United States Patent Application Publication US 2015/0240253 A1 - sequence listing, part 10

SEQ ID NO: 45612 - DNA, 690 bp, Zea Mays
cgatgatgaggtgggagctggttgatcttacttgacatcatctccttaatcgatgaaagttggatgttaaaggtgggccgaggagtaggggcagggcgcgatgcatcaaaaatgttggtcctgcacttcagctggttgttcagcaaaaataataagaatccatcacaacactcctattccatttgttccataaatcttaaaaatagatgtatataatacaacaaaaacttgcctcggattagcgatcgagcttaggtacaactgaatagcatgtctcggtcgagctttgaaactaaaatataaaatgtaagtgaaagttgaactggaccatgagtttgtaatgcaaacaatggtactcaaaacaaagcacatatatttgacataaaatttgtcataaaatacacttgtttaaatatgaataacttacttcacaatatctgaaaggttcggacccatggcgtgccttcctcttgtcggctttagtcaaagcttttatgatattcttatcgaagaattttatgcgaggtgtaccaagcttattttggggggcaacggctgcatgcaggtgatccaggtagtacagctacataaaattttttaatatgcaatggccgtgtaagtaaacataacaaacatcataaaatatgttatatcatgccccacaatgagcaaaaaaaattgcaatatatg

SEQ ID NO: 45613 - DNA, 447 bp, Zea Mays
gtgcaagtccgtccgtgtgggactgtgcgttcccttcgtccgaggatccgtgagaagtcatctgtgtagggttaagtgtaagtgaaaaagaaaaagaagtataaaataaaaaggggatcaaaactcggcctctctctggctacaataatgttacagagtgtacttaatctgtcatcatcaggtattagaagttctcacttaattattaatagtttaagtaaggatgcatgcatgctcgtcccaaatgtgacaccccagtgtcacctagggtttctcttacaaatgccaaaccaagaaccattattttatgtgaaccaaagtaagcatgagcatcaaattaacttaggaataaagaattcaccaagcatatacttaaaagtatcatgatcaaagcaaatgggtctttcaaaaaggtaagaatgtgtaaccctaataaaaaccctaagt

SEQ ID NO: 45614 - DNA, 1066 bp, Zea Mays
cattaaccgaccagtagttaagcaggcttctaaaactatggcataaactgaaaacatagaagcacacagaaactataagcataagccgagaaatgtttaaaaacctctgtctcatgttagctgtaaagctgtaatcagcaacctcagagaaatggtgcaaaaggaaagccgagacctaaaaaggatggcatgaacaagcaccaaagttagatgcattgaaatttaatttacaacaagcaatacgtaaactgaaacattgttgggagtctaagacgatgatgcctataagcattgagatggaaaagtgaatatgagtatcagtgctaaaggatcctaaaaattgtagaggtctgggaaagggaatttccaattacacagtgaacctgtcatatttaacatgtgatggactttaaaagttgtaaataaatttattattctgatccactaaaattgtacggacggaacaattggtaactccctttgctcacttttaaattgagcttctgccattgtgttaaaaaacaatagatatggattcatgatttgaaccgtacacgtgcagcaaaatgcttcacaaacggcggccagaaaaaagaaaacgaaaaaaatagctcgtcgcaccaatctcccataccaatctcgaccgcagatgctctccatggaagcctctcctcgtttccttgatggaaggtgatttatttctcgatttgggccgattggagcaatcgttggccggatctaggggcaatctgttggccggattgatttattgattgtgctgccgagtagcatgcgcttgattgtgttgccgaggagcatgcgtgcgtacatggcgaggagccggggcacaatctgttgcccggatcgacgcgtagctgccgaggagcatgcacgcatggagtatgctgccgagtagccgcggatcgacacgtaggctggcatagcagcagcgagatttgcgggagaggagaggcggggattgcggctgcggggagaggataggtgggggcaagcttcaccatggtcggtgtggacgtccacgttacatgcttatagagtagtagag

SEQ ID NO: 45615 - DNA, 500 bp, Zea Mays
aaaaggcatttatctggtcaacattcgtttcccctgctcggtttgaacaccaagcggatgtctcgtagttcgttcctaaatatgcacaatggtcaatggattatgttgatttttttatccttcttagtcaactcctcactttggttaggattcggagcttttgagttcgtgttaagcctcgactatgaaacataaatacttcttccacttttggcttgctcagtctagatggaagttatgacattaattggatggaactctccgagttcagtgctgttggttgttattgcaccattccccagttattgcttgttaggtaaattcatagtgttggccaggttcaccaggtagctgcttgcatcagaatttcgttttactgttagacaaaggtctggtcaattcttgatcgttgtcaagtatgtctgttaccgaattttggcaatgctgattattcactatgcaaaaaattggcacctctgaactctgatgtttctggcttc

SEQ ID NO: 45616 - DNA, 512 bp, Zea Mays
gctagtccttccctttgcttgacaccaagttcaaccccgaacgaccatttcccctcacttaattgcaaggttcgagctcttaatcacactgcccatgttgacagcgcgagcaacggataaatcgagacgttcccggtgatcctacgggctctaactcaattggatgggtcgaggagcatcaagggtacatcagagtactaaaacgagggaacagagggtgtgaacggacctgtagcgtgctggccacggcgagctcactcagtacggtgttctggcctgatttgggggaagtctcaaattggggctctctagttgataattggaggcacgggtgggtgcgttaggtgcttgactacatagcggagccgatggcacgctcaatttataggatccgtgggcgatggcgttcaattggaagagattgcgctggcggtcggagagggaagaagctactggcacaagcgattcgtggactttaccgtggcaagacaaccggcaatgaacgggtgggc

SEQ ID NO: 45617 - DNA, 653 bp, Zea Mays
cctggacatataaaggccgttttagacacatgttcgtcggccctgaaaatctgattatatctggcattaccataaagaaagctaataattttatttcctgacgcattattgatcaatgtgtcggctatgggcatgggatattcatctttaggagttgctctattcaaattgcgaaaatcaatgcatactctgagcttacctaattctttcttctccaccggcacaatattggagacccactctgcatatctgcaaggtttaataaaattagcttctagaagccagtgaatttcgtcctttattcatgggagaaggtctagacgaaatgttctagctttctgcttgaaaggtctgaaaccggacttaatgggcaaccgatgctctactatctcacggtttaatcccggcatctcaatgtaattccaagcaaagcaatcagaatattctttcaatagaccgatcatttcatctctaggatcggtctctagggtcttgttcgcaaaagttggccttggagttttaccatctcctatatcaatctcctccaaaggatctgtcgatgtaaacccctgtcctaatttgttgagatctctgaattcctctattatgtctcccatagaggaattagacgatctttgtgtgacggcagaccc

SEQ ID NO: 45618 - DNA, 649 bp, Zea Mays
caaatctgaatattatgtcttgtatgaattccacggccttagctgaagttaaagaagcaatgggtttgaactctatccatttagtgaatttgtcgattgctaccagtatatgagtgtatcctccttgagctttcttgaaaggtccaatcatatccagtccccagcatgcaaacggccaagttactggtatggtctgcaattgctgcgctggtagatgttgttgttttgacaagtactggcaggcttcgcacctctgaactaactcggttgcatcactttttgctgttggccaatagaatcccgacctgaagactttcccgactagcgtcttggatgctgcgtgtattccacattgcctagcatggacctcatccagaagttgcttcccggtagacgagaggatgcacttcatgaggacacccgatgcgcctcttctgtatagtgtttccccaatgagcgtgtagtgagctgattgtctagcgatgcgctcggctgcatttttgtcatctgattcctcttcattctttatatatctgatgatcagcttcctccagtcgtcggaatctaactctagctggctcaaggtattacattcttctgcctgatccaatgagatgcttgggtgtggtatctcttgtacgaagactcc

SEQ ID NO: 45619 - DNA, 433 bp, Zea Mays
gttgagtcatatgatggtcctaccaatccatcagtgtggctcaggatctaccagttggatattacagtagtagggggtactcttctgttttggctaactatctacccatatatcttggcactactgtgaggaagtggctattcagtcttcctacaaattctgttaactcatgggaggatttgaaatgacaatctatcaataacttcagtatgttcaaaaggaggatgagtcactacgtaattatattaagaggtggcacaatgtgaaagatgacatatctagcatgcccaaaaaatagatatctatgtcttccgcaagggtctcaggagctatctcggaagcttgtacgatgacaccccaccactcttgcctctctattttaagctgcaaacaaatacgctataagtgaagagatcattcaatgcatgtcctc

SEQ ID NO: 45620 - DNA, 488 bp, Zea Mays
tatctctgacttgctgagtttgagtgagttggacatttggctacagctcaccagatctattccaccctcgagagattccatgagggcgatgatcatgtaaagaccagactgttcaagacgtacctatgagagtatgagaattttgttcagttggccggagagacgatcgacaccatgttctcttggttccaatccatcgtgaacaagatgtgagccagcaaggcgtagcttccctatgatgatcatgagagagcactgaagttgctacatgctctggatcaaagggtttgggaggtgaaggtctcaacgatcatcaagtcacccaattatgagattctcaccatggatgagctattcaacaatattaagtctaccgagattaaccaccagacccgggtcaagatcgagaaccctggtgcacccactacgaccctggtctatggaggtggtttagcttataacccatcaccaactttgtttgctctatc

SEQ ID NO: 45621 - DNA, 380 bp, Zea Mays
atggagaggtcatcgtcgtctccttttctcaaacggtcctgaagtgatgcaacaacgaactcatctttagacaaaccaagttcaaccctcaagttattgcccgccagtgcttcatcgatgcctagtggcttaccaccgctagcattcagtaggccaaggattaggtggacagtttcttttgtaatctttagttccttgccttgaccgaggcgaattgtcatgtccttgtggtccaacttatccatcaaccaccgaagatgagatcgactgcccagtgcatcaagggtcatgtcgaggatattggaaaacccttttctcgcaatggcttgttgttgcctcattcaatatctaaatagttataataacatcctggggattgc

SEQ ID NO: 45622 - DNA, 756 bp, Zea Mays
accgaactgcccacatgtggctgagttacagttttcgaagggacgtaatgttgattttgatgagtatatctatctgttcccgctcaaaactctaattatgttccgttgcgattctaacttcacatttcttatttctggttgttgcttcccgattgagaccgagactggtggctccgaagagaaagaaaactttcaaccaacacataaatttggtagattttattcctcctttcgatcccaacagtccgattccattttccacctttgagtcttctatttctgaatttgatccgcttcatcttgttgatatgggagttctccctcccaaggagttgagtcagtggagaactttgaagaggatttcagttcccactaaagattctcatgactctgtcacttttgcgtccttttttgtccgtcgattaggtttgcatgtctgctcatcttatggggtctccttgacttctattccattgatatgactcatctgaaccccatattgacagggaaatgtgccgaacaaccatttctacctattttggagattaagtgttcgacaccatcatggactatgagtatgagcataggtctactacaatgcaatttgaagacatcatgtccaaaagagcataaatggaggcctgaaaattcatcttggagaaaaatggtaaagctgtgagagaaaagtgcattttggacatagtttatgcaaaaatcaagaacttcattgaatatctgtgaaaggtgattgaccaa

SEQ ID NO: 45623 - DNA, 512 bp, Zea Mays
gttagaagatgcacaacagacgaggagaagatcttagccgctgttgcacttatagatccatgttgtatatatttaatactgaaacactgagcccaccagtcggggtccagctcccttgtaacgtgcctgatggcacatgcactacaaggggacaaactcacttgaatccccttggaggcatctccaaccaatcctaggctttctcaagctctcaacaatacaagtaataagtggagtagggtattacgctatggcggcccaaaccactctaaaccctcctgtgttcttgtgttcatccgtctcatcaagcaaaccctaggctgccccttattcataggattaggcgggtgcgctccgtcacttggctagagttttctctccgacatatggggcaccaggtagagggaatctcctatatgattctcccagccaggctagagatagcgctccctcttctccgacatctggcagtaggggaaagttgcactatgacttcctctacctgccaatga

SEQ ID NO: 45624 - DNA, 850 bp, Zea Mays
gttgtgagatggcgttggtgagacgatgacaggtgggaggagcgagtgcaggaggcgaggtagcaatagatgacggtgatggcaagcgaaagccattgtcgtgttgcgacaacgcggtgagaccctaataagttagcgaggtacaggtgacgccatggtcccaccaatatcttgctcatctgttggtgcggactaggaggcaaaatatcgatgttgtgtgtaggatcccgacgagtcgacgagctgatgagtaatgagaaggcaaggtgcgctgcagcgggcgggttaggtcaccgacttactggtcagtcgatgaccgaagaagcgagtgaaccacgagtgagtgggcttgctctagggaagagaatcaaatggctcaggtaaagagtggactgagcagtgaagcgacgacagaaaaatagatcaaaacctagttttcattagatttgtccacgtaaactatataaaagtttgtttattttgctatgtacctaaacctaggtataaggggttaaaaatttgaggtggggccatggcccaccttgcccaccccttggatccgcccctgaatgataataataatactttcctttctacacaaactgaagatattgttggacatcatatcgtctccaagccgggccgatcctaagattttaggttccataacaagacttaaaatatataaccttctaattttttatataaagatattactaatataaacacctaagatacatctaaaaacattaatactaaacaataattaaattaaaaagatacgtaatatattgtcgttacctgtaactagggtacctctcctacgtggtggcaaattgttccctcagaa

SEQ ID NO: 45625 - DNA, 435 bp, Zea Mays
atttataatcatttatactcccagatttgcttctcaccttttctgtatcagatccagcaagtgcgttagacataacctgggggcagcagaggactagccggtagcgtcaacaggctggatggagcaaacttcctcttctactcctcatctgttgccgctccaattcattccatggatgatgccctcattgtgctcgatgaaatgggcacatggtagagcggcggctggcagctcctactcattccatggatgatgccctcaatgtgctcgataacagccggctgccttgctccactattttatgctcattagtatgacaaacactgaaacagagcctgaggcacacaacaaaacaggagctagcaggagtaatacttgtgcaagggaaaatgaggttaggcaacgcaattgatggtattaagtcttttggtttag

SEQ ID NO: 45626 - DNA, 405 bp, Zea Mays
gtttgatcttcttatacgttcatctggtgtggatgtttcaccatttaattaaaatgaattgttgaagttggtaagggttgtgcttagtgcatattaccccttcataaaagagtgtcgttttaagacattgatgctgatgtatggctgcatccaaattcgatgttgtgaaatcgtagtgttgattgcatctatgacttgctttgagcttcattgcatgttgtttcatgcttgttgtcaggttgtgtagcttccttagaccattagtccgaggtagaagttcttgtgttgattaataccaataatggacccatgttttgaatggtggtgctatttggggtaccttggatgttttgctgggagtggtcgaattcgaggacgaattctttttaaggggggtagagtgta

SEQ ID NO: 45627 - DNA, 381 bp, Zea Mays
gcgacgtctgctctggcacaggtggaagggacacgttagggttgttgggtttggggtttctttttgcgatattgaaggttggttgctgcacaggttccgacgtccgggcctgcgcaagcaacccccgatgatgttgatactgatattttgatggctgcgaatgcaacaccttttaatggaaatgtggctgagggttctgaacctgggtcgtggtcctcggacggggatgattttgggagtcctttttcgtggattgaggagtattttgaggaggatttagactactttgctacgttggatttggccacgttggagtctccgccgcaaacctgatgcgcgcgaagcgcttgccacctctgccggggcgatagccgaagaccc

SEQ ID NO: 45628 - DNA, 711 bp, Zea Mays
tgaccaagagttgggaatggttggaggaatatttgtcaggggcttatagcaaaatacgtgtacaaatgacaggtactcatcagacatacagggagcccctattgaggacagatgtaaaggtaacccctagttgtattctgctgcgaaattaggaatgaaggatgctacaatgatatgacatgacatgatgctgacaccagagataagcacacctgcatctttttgcaattttcccatggaatcagaaaaatcagctgggcagagcctagagacgacgaccatacaacactgctacacggcacagtgctgaacgccttttggttgttgccttgttgagccaagcgtatagcaactcaggaagagataaggaacggccgggaggattaaggaagaagacaagtgagatgacggagaatattgtaagagacaagaagcgaaagcaagaacaaagcggcgcacactgatgagtgactttcagctgctaaagacctagagcttgctgtgtgagagccgaatactttctatgccgtaggcttctggttgagttgctttcccgacaaaaagctcattcccactcgtcccctgtacaacgctatttctcagatgcttttacaatggccgtcgatcaggtacgtcctgcatgccactgccggccgatccgtatatactagctagttaagaagttcatgctcatgcatgcatgaaactaag

SEQ ID NO: 45629 - DNA, 301 bp, Zea Mays
atctgagctcccgaccccagtggaaaaaatgccaaaagatctactgtttccctgaggaatgcctcccgaaactccaaaccccaatgccacagaacatgaaagaaaagagaaaaaaatttaacttcttttcagaaaattgagatatcacagggaagtccattgaggaacttgtgataactggacatctcaacaaacctctaacttttgtctaagttactatcaaatataggaggtcgactacaataagaaacaatagggatgataaagggccacttggctggatacctctcctacagtgtaa

SEQ ID NO: 45630 - DNA, 372 bp, Zea Mays
ctctgattttggtgctacaaaagaactagcagcttttctgactctatttcactgaatataaaaggactcaacacagtacgtgaccaatgtccacgcgagaagctcggcacgcccgtccactacgtgtgccatcccacacgtcaagacatgccagccacaactacttcctactgacccgctcgcagcatgaacgtgcatgcttctgagctacaaccactcgcacttgagtaaataaactaagacccatgcacaaggattatttcaacgattctcctcctaaaacttgtgcatatgctactaaataaatcgaaggccaatcttcatgcagagttctctgaacttcagtttgccgagaggcttcatgagaacgtc

SEQ ID NO: 45631 - DNA, 655 bp, Zea Mays
ggagtcgcatctaccgatgagcgccaccatgacaacacgggagaaatagccgccgcacccagaacccatcctcaccagctcccagaatcaggggtttggtctggggtcttcgtcggagttcgcgggagcacgaggtgcactcgccaggcacgactgatggctggagcggagggaattcttcaccggagcatggacgtcgtggtggtgtcatgtgtcgtcgtgggaggactcccccactacaccgctgcctgtaagatgcctttacatgagtttgtgttgtccttcgttacatgtagcgccctttgtattaggggtatgtgacctatgatgccggggcgctgcctcattatcgtgttgccatcgcggggtgggcgcacgccactggagtgcaaggtcggagcgagaataagaggttagagtcgttgatctccttctgggcgactctgattagaacgtggagatacccctttgtgcattaaaccgtagtcgtcgggtttggatcggagggataggataacgttttggctagatcagatcttggtcataagatggagcgttagtggattagattagatctctccctaataaaatctagattgtatattcaagatcggacgaccctgattagaaattgagataatgttttgatccgatg

SEQ ID NO: 45632 - DNA, 462 bp, Zea Mays
tcgagcatggcacagagaagtgtgttgtgactgtatacattggatccagtccacaccatgtggaatggagtgtcactactgctgggcacagattcaaagacacctgccaagtcgtcgctcgcaaggcattgagggccctgtgtcagatctatgaagaagaagtgcctgacaccccactcagattcttttcgccctttcagagagaccgtcccgcttggatggccaggatgcgtgcattggaggaacaacagctgcttgaggacgaccccacagtcgtgtacctcactgcatacctgctcacccttgatacacagtatgatttcttggctcggcaccaccgttagatgattgcccgagcagaagatgcagagaagcgcaaccgtcagctgcatgtggatctcaccacagctcaagcccgtgcaactgccttggagagtcgtgaagtcattgctgtggaagccc

SEQ ID NO: 45633 - DNA, 602 bp, Zea Mays
attggtggcatctaccgtggcggctctccggcgatcaccggatacagatgacccgagttattgcgacgtgattaagggccggaggtgtggcgcaaacgcggtgaacaacgcagattccggtgatggccgtaaggccacgtcgccggcgcaaatgaccgagggacagcgcggccacaatgtcccggacccatccgcggcgtgatcttttcaccggcgagctcaatccacagacctgaagcacgaatcatggcgatcaacaccaatcatggtgaagggtcaccggtggcgagattcatggaatctgtagatttttcttgccactgtaccatcagaagcttcatcagttggtctgacagagcttgtttggggcgaaatttctctaaattttgtgtggtgactaacccagtactctgcatcaaagttgtagcttatcaatccatcttgaactttgtcacaggggtttttgccaaacatccattaatccgagctccacatggtcccaaagttgatcctacacactgttaatcaatcttcagactttaggctgactgacagcctaactttgggccgaattatcttcaaaatttgcatggcaccaaggc

SEQ ID NO: 45634 - DNA, 348 bp, Zea Mays
actagattctgaaggctgaagcttttttcttccgaagtatcttcgacaattcccttccctttctcaggcactgcggccatgacttcttctgtagccgcagcagtctcctctgtggccatatccaagagcactttatcaatagcagataacgtactctccagattggtagcttcggcggccacaacttcggcagaagtatctgcttcggcagctggtgtcatctttgatgctgaggccggcggtggcatttcctcaatagcttgcataacagtaataattcttcgctttttagacccaaccgcctttttcgttgccgaaggctcgtccttcttctataaaatcttcgtc

SEQ ID NO: 45635 - DNA, 962 bp, Zea Mays
cgctgagtcatgaagatgatccaaataatacagctacaaaaatcataacatgagtcattatgagacataacaaaagcataatctacgtgtatatggattttgcatacaagattatggctacatataacagacaaaaaaaggatatgcttacaagaatgacgatggaacatccgtaaatggttgtagaaacgttcgtaacgctcctagtatgccacttcttggcagcttggcataaatcattgaaaataagttggcaccagtccatctggtggaaacgatccatctcctcggttaaaagaacctcatggttggttattccccagctggcagtagggaacaacaacctattgaacagtatcaagaaaaaggatctgatgcttaaatcatcgtcagaccctttcctcagacgatcttgaagagctgcaaccccaaaatcttctttcgataaaccaagttcagctcttaaattgttggcagcaacagcttcatcgatgcccaatgcagttcctccaccagcatttggtaaccccaaaataaggtgcatcgtatcctttgtaattttcagctccttccctaggccggctcgaattgtcatgtcattatcgtcgagcttttccatcagccaagctaaatgtgatctgttgccgagtgcgtccagtctcatattaagaatactggaaaatcccctccgtgcaattgcttggcgatgtctgtcatttaatatctggatgcttactaatacatcttgggggttgcatctcatgttaagcctctgctgaaaaaaagtatacaatgaatatcgtaaacatttacatctgcataatcgcaactcaatatttagctcaaacctcaacacaacatgatttcacgcataaaatgatatattgccatagaccataaatctctaacctgtcgggggggcactactttcctccgctttgtgactaccttcttcaagactt

SEQ ID NO: 45636 - DNA, 1049 bp, Zea Mays
caaagttttgattaaagttggagtttttatttttgctatgaggagccaagggctagagccagatgccaactacttctacaatattcacgaattgtcgtaccaggcgaaggcggttgagaaagagcaatatcataataacttcgaatgctataactttgtgtaccggtctgatgtgaggtatcttgtgccaacgtttcggaaaaaatggcgaggctcatggatgaagcaatggttttatgttaaaaatgatctgagtgagagggaggatgtgaagggcataatccaacgccccatatgatcacgctttggcatcaggaggccttcaatcgcaggtggaaacgaagcacaaacatgtttgatggccttcaacacagtgtgcacttacattggcaccagggatttggttcatgagcacattgcttataaggtatggcctcttgttaatgattgggagatgtcgaaggagaccgctgctggttccagtgaaggtggcctggtttacctgaagtatagctatcgctacaaaagttaatttggcgagccgaatgacgaatggcttaaagtcgttgaggtgaccagtgatgagctgttggggacttatacgaaggcaaaggacgaagcctggaacactgtctttggtgctcgaggcaaaaggagactaaatagagtttttgatgtgattggatttatttatcctaactactgctttcccgctcggaaacaaggaacgtagaggaaaattgcaacaacaacctcttccgccgcgccgaagccaaagagggccaaagtttaggctcatcggccgaagctgcactttttagagaagactgctgcagtgcctgctacagagaagatggaaattgttgaatatgccgaagctaccccctcggctttggagataatacctgttatgactgtcgaagctactgtcactcaggtagaagaagcagaaccatagagcttaaatatagagcagcaaccgaagctgcagagtcccccaaccatgatggggttgtcaaagttagcatccgctccagcatcaactccta

SEQ ID NO: 45637 - DNA, 864 bp, Zea Mays
cgatgaatgggtgtgagtaatagaacagaagtttgggctaatccgatgcacggagacgcaaaagccaatgtttgccgctcattagctaagagggcctgccagtacctggtgggcaaatttttcagcaatccaacctgctagacatcagttacgtgggaagaattcaagttggcattccgggagcattatgttccggagggagtgctacaaatgaaactagaagagttcatccaactgaagcaagggggagatattgtgatgcagtacctcaataaattcaatcatctctcccagtacgccattgagcacgtggatatagatctgaaaaataagaattgttttatgagggggctaaatgacatacttcagcggaagatggcaacatgtttggaccttacctacagcagggctgtcagtacaacactggcagtcgaagccaaaaatgtgggacatgggaagtcaaagggatatgcgggtgagaaatctactcaaggacctgaaaagagaacacggttggtgatccgaccttttaacccaaaccgttcttcgcctcgcccatcttcatacccatttaagcagcctgtatttattcgtcccactactgcccccgctcctaccaatcagccgagtgcccatggtactcattttcctgcccttcccagttcttccagtggttgcttcaattgtggaaagtccggacatttcatcaaggactgcccatatccgaagcaaaacaaatccaactttcagcagacctctaggaactcaagtcaaggaaaggggaacacggccaattctttaacgggcaagaatttcaagaaaactggacatgtatgttatacccaggtggctactacaccggag

SEQ ID NO: 45638 - DNA, 653 bp, Zea Mays
gttggggcaaagtacaagagcactctttcaacatgctaaaagataagttgacacatacacctctcctccaacttcctgattttaataagacatttgagcttgaatgtgatgctagtggaattggattgggtggtgttttattacaagaaggcaaacctgttacatattttagtgaaaaattgtgtgggactgttgtaaattgttctacttatgataaggaattatatgctcttgtgcgaacattagaaacatggcagcattatttgtggcccaaagagttttttattcattctgatcatgaatctttgaaacatattcgtagtcaaggaaaactgaaccatagacatgctaagtgggttgaatttattgaatctttttcttatgttattaatcacaagaaagaaaaagagaatatcattgctgatgctttgtctaggagatatactttgctgaatcaacttgactacaaaatctttggattagaaattattaaagaccaatatgttcatgatgctgattttaaatatgtgttgctactttgtaagatgggaaaggatggaacaaattcatcattagtgatgggtttgtgtttagagctaacaagttgtacattccagctagctccgttcgtttgttgttgttgcaggaagcac

SEQ ID NO: 45639 - DNA, 551 bp, Zea Mays
tcgtagaactccccgaatccaccaggaccaacatgacttgattctgcagcaaggcgcgcacagccatacattcttcatttgtagtaccgccgagagcatttagagacaatcgaaaattctcctcttctcctttttcctccaactcaatctgtgtcaatgtttgctctgagagggtcatacccaactcttcagcagtaagagcactcaactgcatctgcacccttttgggatagcgagcttgatggccgggttcaaatttgtcaccacaggtatagcacaaaccattttgcttccgatactctttcaccaatcgctctttagacaactcgggcaacgaaaccgagcttctactgtcagctttgggcacagtactaccaaatcgaccttgactgctagtcgagaaaggtttatggcgctgtttatccaagataccctgctgaatcctggctaataatgccgctcgttcaacagaagcaggcatatgagatttaaccggtccttgtaattcttgcttgagtcccttaataaaatgagccacatacagagtctca

SEQ ID NO: 45640 - DNA, 805 bp, Zea Mays
taggggcttggtctaagggaaaagtccatgttcttagtggtggtccatagctagatagccgcttagcctggtctcgtacaataaacctacaccttccactgccctataatagctgactcagtactttctagactaggtacctaaaggtccgaaccttgtccaaatttaagggttggatcccgaaactctgctcagcaaagttcagttacataactcgaaagattgaaaataacaaagtaaggatcatgagcatgccgctaagcacgatccctgacccatactcaggaacgactctctagtctaaaggtagccacagacacttcagactacctcctagagagcctctcttccagggacgatagagggaaatcttgtatttgagtcgagctaggcatacacgagggctagaccactttgtctttgcaacaacaacgatgtgccaccaagaaaaccactcggcaaggagaccgcaggcgtagagctgctgcacaagactagcatttctggaccaagacgtaggtatgtccccacttacgggttttccacctcacccgaggtgagcccaagggactatgttgataccctaaatatggggtacctagtcatgttgtgtcaaggtgagaccccggtggctacccatggccatggaactgctgggtggccaacccgacttagggatggggcccaccatatgtggcatcgggccagctaggctcgtttcctgggctagatcagcatcaccacaagtcccatagaaggtagtaatcagcaactttgaccataggtctgggtccccatgggcggg

SEQ ID NO: 45641 - DNA, 493 bp, Zea Mays
gtcttatctatatcaagttggaagtatgcttttatgtctggaggaacagagggacatttcttgacattcttccctctgcgggagatgctccttcaatcaggtaccacccccttccgctctcgtttctttacaatacttgcacttaaaacctgtgccaaccttctcttcgtgctgccacactagttctgtcatgttttctataaaatataaacatataattgattgagcatacacatttaacaataactaatacataaactattgggcattcacatttaacaataactaaatcaaaacatatttaacaataactaatccataaaccataaaccatcacatatgtaacaatattaacatacaacatatataaatctgaaatcctaattccgaaaacatattatcgagactaaatctgaaaccctaaacaccgcaaaactaaatctgagcaataaatacgtagtatagaactaaatatgggtactaaatccgtttt

SEQ ID NO: 45642 - DNA, 621 bp, Zea Mays
aagctcaccgatcggcaggtcctggtggccaccaacagtgccccagcctcgtattggtggtcaaagcacaccatctccttcagtcgagctaaccagtggcttatctttgatcaccccagaaaatacccctacttttcgatccagtgattcgagaaagccgagtcaagaaggtgcggtgaatggtggcagcaacatcaatgtcaccttccctcggacacttcaagccttgtgagttttgatcgccaacttaacccagttgaacaccctttcttcggtatcatgctgactgagggagagtacccgctataacacctctacatgtgtgtcacctccggcaccccggacaactatcgaaccgagttcctaagctttgaggtagctcgtttcgattgctgatacaacaccatcatcgggagaccagaactggcaaaattcatggttatcccgcactactcgtacatgatcctcaagatgtcatgtccccaaggcgtcatcactattcgcactgactaccagggagccacatattgcttctggggggccatccaaacagccctcacggtcagaccctcagtggcactcccaacatggagcaacgacaagcaagcaaaggatgacctc

SEQ ID NO: 45643 - DNA, 1087 bp, Zea Mays
ctccgtgcatcgaatcaacccaaacttttgttctatcacgcttacccattcatcagcttctaaggttcttctgctttgatgaagagcgggggttgagtcttggagaattccaaatatgtagtatcatgcggtccttgaggaggagctcttcctccgtgatgttggaactgattgcccgccatttcacacaagaagcacgtattatcagcgatggcattgaccagggcagcgatagcctcagccaaagtcggtggtactggtggcgagttaggagtatcttccctaccgcgggaagtccccgcaccatcatgtgcgcgagtccgtgatggcatctgaggcaaagaaacatttggaaaaaaatataacatgccaacatacaccatcatattacattaccaaaatgtaataattatacagactccaatgtacaacttgacttcattacttattttacataagtataacatctaaactatactattctagtcttcttcatcctttgtaataattatgcaggagaccgttcgtcagcaaggttcatggaaggagggggattaaaaaggtctagctccccattaggtccttcatttgttgtacccgatggtccgactcccattgcagcaacatcttaaagcacgtctgggtgcagtcgagcatacaatacatgtactttctcatgtaaagtattatagtacacttgcaggctttggagggatgcactaagctctgccacacgagctagagctttcgcttcgcaatcccaagcgaaagaacgtgaattaacgacccaatcaatggttgtatcccgttccgagatttcgtaatgcaggcgactgactttggctgacaattctgctatatggtgactgtcctgctcacgtgccctatttctgtggcgtagttctgacgaagttgttccaccctggcttccaggtctccaattgggtcattgctgccactactacttccttctgcctggaagctagctgatgtcgtggcacgacaaaaggtccagtagatttgcgagctgttttcctagtacgcgccatatctccataagaggggaagatttattagtatattttta

SEQ ID NO: 45644 - DNA, 635 bp, Zea Mays
cgaaagtatgacatgtgttccatttaaatttaaattttaaattatgttaaaggctataaggttttgatggaaccggtcgtactgaaccgtaaaagagccgcagcggaccgcctaaaacggatgcctatgtaagttattatatgaatatatttacacaaaatttgtctttcaaagttatgattgttatttagtcgtatgtttaatatagcttcaggttgttcgacgactaccgtgatgaagatttttgtgggctaccgcagaaatacagtattgtcgctcgggtagaagttaaattcccgattgaaccacgttatcgtgacagacaacatttcattttatctgacatcaatgtaagccaacaattctttaagtttcattttgaaagttacacgatcttcataccatcacctcttctcctactgaaatactattagggagccaagatcgaggccatgacatatttgtatgagacagtcaaacatttcgacaatttgctccatgaaaagcatgtttacaagatgcataacgtaaagtttggtcttcatccgggtgaatttaattttcgacatctaaatggtcccatggaattgtatctcaaccaacaaactatcgtggagccatacactgttccaatt

SEQ ID NO: 45645 - DNA, 360 bp, Zea Mays
cagagaaccctggcgacagatcctagctttctctcttcttacattttgccgacgactctcgttttggtggttgcaagagatggattcgtgttttctaacccttgtgtgttttaccctgaagttgcacctacacaacttgtagacccccatagcttaacagctagccaaaccaaaacttccttaagcacgtggttatgtcaaaaaacatcgtttgtgtctagttgcgcaaaccatgaccaagccatgtttcattctatagatcctgcgccaaatcttcataacctttctggtgctcatcctaatcgatctcatgtgactacctctcattttacctcgatctagtaaatctttacctttgtg

SEQ ID NO: 45646 - DNA, 606 bp, Zea Mays
tcggtggctccgtctcggagagttactcggcgagcaggctagtcggccgccttcgagaggctttctaggctttccttggacatccgattcccgacaaatactttttccactcttttcactttaaacttgtcccacacgttcatatgtctctactactctataagaacctaacgtagactgtggtgcacggttctgcctcctcacggcgcatacgacccacatgttccctacatctgcatggtcctagccgtgatcggccatggaaggaaaaatctcgtcactgccacagaaggaaacacatcccctcgccgctatccacgcctcgcagcaatccagcacgcaggaatcccatcgtcgatgacccgcgcgcgcaggaccaccccacccaatcgttcttcccatgcaccgcgtgccccgcccatatcctccgcaccccaaacgcaatccacgcctcaccgccatggtaggaatcgcaacccaatcccttgtcgccatccaatgcacaggaccaccatcggcccgcatcccatcgcaagtgcaggaccaccccaccatctcattcttcccattctacgcgccagccccgcccagatcttgcgatgctcg

SEQ ID NO: 45647 - DNA, 839 bp, Zea Mays
gttttaatttgcgtttttggagcttcggcaggtttcttcggagtggtacttgaagactttattgtctccagtacatctagaacattaaccatcctttttcttttgggggtcactgctagacctttctgggtttttgacatttcaactcctgcgaaggacttaaaatttctgatgctcttgtcccttcggctctcggctcttcaaatttttcaaccttcagtgttgctctcagctcttcagttttctgtgcaagcgcaggttctttggcttcagtagccgaagaggtctcactgacaaactcgggcactatggccggttcaataaagcgcggtcggtgagtaaggactttcaccttcttcctcttcggcgcgggctcgcttggagcagctgaagcgtcatctttcccagaagttgcaccttttcttttttgcccccgtaacgggtagcggtagtcagggtacatgaacccaatagcatcgaaaactctattgagtctcttctttttcggcttctgaaggccgctgatagagcattatcttctgttttggagtacggcccaagcagttcatcacttgtagcttcgacactcttcagacaaaccttctaaaatctccctagtaaccttctccgtatttgtctttgctattgactcaagaaacccaagattcttctcctcagaaaggctcagcttcgtttcggcgacaactttgttatcttgagacatcttcggaaacattgaaaacgtgctcttagggccgaagctaaaaaatctaaaaagctaggcaagcgttggtatgcaagagctaaaaattgggaaagcaagagcagatggcaagaaa

SEQ ID NO: 45648 - DNA, 578 bp, Zea Mays
ttaagataaaaaggagaacaaatggtgagcaaggagatcgatgttcaaggattttaacaaacacgtttgagtaaagacgcgtatgatattgagcatgcacttcaaccgttcatgcgaccggttcaactacaacgaacaataccaaactactaaactcaaacaatgttcgagacaaaacaagacagtttaagtgttgcaagcacctaaactacatagtatccttgaaaagatacacaagataatcaagaacggtgtgagattgattaaaaacatgaggaaataaggcaataccttgatctgatgattcaaccacagaaatcccaacgaaagtgagggagtcgatgaaggaggccgagagcaacaaatctctcacaaactcccaaggatttgatggcacaaatgggatttggagagtggtgtgagtgtgagagagagaggaaaagtagaggcgacggcggctgtaagaaatgaatgggtaaagagtgaaagaaggaaggggaggagaaaaaggaggaggcggcggctggtcagcggaccaggttttgctacagtgtgaacagttaaagcgcacagaaaac

SEQ ID NO: 45649 - DNA, 414 bp, Zea Mays
gtcgggttcattactgcgaacccgaggggctcttttgcaaaagaccacgaccgaagaggtatcacgttactacaatcgtccgatcgaaatctgatggtccagattagacccagcccaccacgaaccgatatgcgctcactgaccgttgatgggcagatcgacggacgagatttaattacctgagatccgatcgtgcccctcggatccagatctaacgccccaggtgtaatgcactgaagcggtatacctaatctaatccatgccattggcgtaagatccaacggttgatctacgactaagattgataacgcgaataagtacgctacttttaacccgagccgaccatcaagggatgaacggctccctgctttcttcacccagggccaagcacgacggagccgcccagaattccgg

SEQ ID NO: 45650 - DNA, 828 bp, Zea Mays
gcgagccagggaagaggatgagggagatggctgagcgagctaaaaggataagcgcgcgccagatttttctatgagagaagctaaggcggggatgagacaaggccgatggctagtgacggtggaaagaaaatcagggtgcagcggctggagtagaatttttccatttttttcttttttttaaaacagagaatcgcagatattttagaattcggatttttagcgaagaacaaagggtccacgcactatacgactacgactattatttttttggattttgaaataggaaaccaaaatggctagcaattgttccagtttcggtttatttaagcagcctgccccaagtagcgcatttaccgaatttatagagattgctctaaccgagcgaaatacttaagtgacaattttagttcgtcttcatcgattaattttaaatgagcacaagacttgacaaatcgcaaaacaaatgagcgatatcgatgcgacatcgagagtgcgatccattccggacacgatgacatgcatcgcacatgtgggcgagaagctgtgtgcattattcttttcggatagcgcgaggctccaaattttacataaaatcagaagtcttctgattttcgtattcacttacatgcatgatccgaacagttcaaaattcgccagtgacgaagattcgataatccagaagtttcttgaaccccttttcaattgcttagattatggaaataaataccacaacaaactcgaacttttgcgagatgattaaaatttagtgtccactttatttactaatcccgcgcttaaatccataatcactgtttatgggagataaac

SEQ ID NO: 45651 - DNA, 277 bp, Zea Mays
ctgggagactcaagactttttggaaaagaattttcctaggtttttagcttcatgtaacctgtaagatatgtacatttgtttgtaaagttggaataaaccccataccacccctgctctgtaagacaaataaggaaataaagatgtgacgttaaatcttgagacaagattcttttatgggggaaaggatgtaacacacctagtgttactggcattgaaacataagcataacatcatgtgcattgacatatcatgtgtttgttacatctagaatgcattc

SEQ ID NO: 45652 - DNA, 279 bp, Zea Mays
taggtagttggaacgtaggttccttaacatgtaagttacgagaaatagttgacattgcggtgaggagacgagtaaatattttatgcgttcaagagaccaagtggaaaggacagaaggcgaaggaagtggaaggtacaggcttcaagttgtggtacacggggactgcaacaaacaataatggagtaggcgtcttgatcgacaagagccttaaagatggggtagtagatgttaagagggtaggagatagaatcatcctagtcaagctggtcattggggact

SEQ ID NO: 45653 - DNA, 294 bp, Zea Mays
atgtgccactgatgcgtacttgatccggatgctcctttgctcgcagaaatcgaagaactcagggctggtgaagttggaccctaggtcagtgatgatgttattcggtatcccgaacctaaatattatatcatggataaactccactgcttttggtgaggtcaaggaggaaattggcttgtactctatccattttgtgaatttgtcaatggcaaccagtacatgagtataacctccctgagccttcttgaaaggcccgatcatgtctagcccccaccatgcaaacgaccaggttac

SEQ ID NO: 45654 - DNA, 986 bp, Zea Mays
caccatcctcctcctgagaaggtaactcatgttccaacaggaactccgtagaaaggcaggacaatgagcacaaaacgtagggaaaaaataacacaacaaaacactaagaaccaaaagaagaagtcttaggatgcagttcatacaatagagttagatgttcattacaaacaccacaaggcaaaataatctatgcaatatgaggaggggaggtatcaccctcagcgtcgtctagagacaccatgacagagtaggatccagcgctcaaaggagacactggtggaaccacctcttcatcgaagtggcgcaccagtgccgagcctagaccctctacaacgtcgctgagtcttcgcacctccgcctcggcaaggtcgtcctcgtccggtaggatgtagccctcgcacacctgctagagattaatctcatagttggatgcaacgatggctagcgcccgcttcaccccgaggtggacaacctcatagagtttgctctgtacatagccactcggggcttgcatgcggctccacggggactcacccaaggggacgtactcagctctgaggccttggccaaagtctgacaccgcatcggatagtgccttgagctcgacgatcttctggtccacagcctgggagagcgtccgggaggtgtcgatggaaatgtcaagatcccaccgaagctctggaaaacaaccaagacactaagccatggctagagtaagccaaatagataaagcagaggtaacaacatgtacctcccatttttgttttcaagccttgggcctcggaccattcagcctgtagatccttcgcaagggagccggctcgggaagaggcctcagcggtttgacgctgagacacatctcactcgcccgtcaacttcagaaggctttccttcagaaggcggacctcatcctccaggggagccaccttctcgcgcgcagccgcggtctcgtccttcagctccacgcacaacgatgtcagctccac

SEQ ID NO: 45655 - DNA, 909 bp, Zea Mays
aagaggatatgaccaagggaaaataggaaaaatacaactataaaattgagatggaagagagaaggttttaaaggatgggtataatataagcatcaaggtaagatataaaggcgacaagggtaaagatgatgattgtgaaagcataaccaaggatagagttaaggcaagactctcgaagtggcgaaatggataagacaatcaagggtgatataggtaaggtcccagcagaattgttgaagtaacagaaattattaccgagggaagttatgaggaaacagtgagatcctcaaggatgtgcgaaatagaatggtcactcatggaccatcaagaagcaagggtgatcaagggcatattaactgaaaggttttgaacagtcattgggatatgaaggtaagcatatataaaaatattagtatgcaagattccaatggtacaagcgtaccaaggccaagggaatagaaaaagctaaaagataacagcttcacaacggaataggaaggggtctcagaagacaagaagtccccggacatataaactgaaatgtttaagtaggcagcagaaattcatatgtaactatttgaaacaagagtattaaagcattaagggatacgagtatgtcaataacaaacgaataaggattgccaaatggtagaaatttaatgatggaagaggaataaatctcaaaaggcaagaaggttatggttagaacatctacaagggggtcgcaagcacatgaatgagatcatatctagtagattgagaaaagtatagaccgtaatagaataaaacacttgtggcaagggggcatataggagcacaacatagaattagtccaggtgactaatattttgaagtagaatcaaggatgaggtgaagtaatgatcaataagtccttaaaacggccaatgc

SEQ ID NO: 45656 - DNA, 379 bp, Zea Mays
gtcaaaccaagtcataactcatccatatccgtggacgcggactattcgaataggttttggaactctgtgaagaggtgtacacttcacccaatagtccgatttctgcaatctcaccgtcgtgagaacggattaccgaaactctctcctccactacacgtctttaccttaacagttataccaaaaggaacatggccacctccatgcccaaactaggacaaaactttccccctccttgtcctcccggtgctccctagccaacataaccctagggtgccgaccgtgcaagttcggatcaagcgactgcccatatggtctagagtggttgtacttgataagagtatatgcagtgaagaatggcataccggtccttatacgagag

SEQ ID NO: 45657 - DNA, 758 bp, Zea Mays
gtgaaagggaggccgccattggtgactcgaatcctaggagaaatcccggccgcgattgtgacctggggcagagcgtctggccggcggggtggacttcacgtcgagccacagatggggatgctcctatgcgtcatgttgctgtgccccacgatagtggtatgcgtgcagctgccggggaacgcgagagataggagagagaggcaaggaactacctggagccgccaccggtaaattttctctatgtagccattccatcctcgtggtgttgctctggacgtcgccggcacatgtgtggtctcgctgcagactcgtgctcggtgtgaggatcatcagagcaagtccttcgttgtggagccgcagtcggcacggaccgcgacaccaccaccacctgttcgaggacttcatcgtcggctttcttcctccatcatagttgacgccttggcatgggtaggtctctacgctacactggtgaggtcgcctaccttccccttctgccttctgcttgccatagcagccgagtgcctcagcccccgcatgttcttatattgccagcgggacctccaccttagggaatggcggcgccgccgtgttcctgtgtctgagaaagaagattcagtttgtggtgtggatcagaaaatgggcggggaggattgacagagcgatgagagaagttgttcgccgtaggattttcatttgacgatcaggatcagatctaggtagtctcgggtcagatgggatctaaaccgtagaatttggat

SEQ ID NO: 45658 - DNA, 741 bp, Zea Mays
cccaagtaacctcgtgatctagaggttgtatggcaacaaagttggaccaccaagtgctggcagctccgcgaagttattgtgcagcaaatagagacttttgtacctcagtgcactgaataagaccaaacttctgctcaatcacctgcagccactcaattgcgtcaagtggttcttctcctttagtaaacactagcggctgagtttccataaactccatgtatgtcgcattcctttactgattttggggaatacgaggcccaccctgattgttttgatgatgagcaatctcatgcaaaaccctagcattatcagcagtggcattcactagggcagcaatggcatctggcagtgtaggtggaactggtggtgttgatggagggttgatatcagcttctgcatcaccacgcgatgtgccggccccatccgacccacgagtacgcataggcatctggagtaaaacaaactcatgaataaacctctataaccatgaaatatattacacgaggcaggtacatggattttattcattacaataccaaaattgacataacttattatcctatgcctacaatagaggtcacgacaccatacacatgtcatattaaccctttgtatcattagctatctcagaaacatcactgcctcctgggactcaccacctggtacaagcataggagctgcttctttctctaagtctgcattaggctcacccccatcagctagcaccacaccaccctctgc

SEQ ID NO: 45659 - DNA, 681 bp, Zea Mays
ggggagtcttcgtcctcgcttgcaactcagcacaaaagagaatgggaggagagagagagaggagttaggctctgctttggcggtactccatctggtgctgggacgctagtctggtgacgagccacatttccctaggcgctggactccggtgagttttgccctcgttcctcgacgcgtaatccagggaccgtagtagtcgtcttggtaactcggcgcggttggggcatcggtgcctccgggattccatggagtatggcggcggcatgggactctggccttggacgcagtcggttgtgcccggttgtcgcgggttggacgacaccgataggtccgtagagccgagtacctgggcatggggactgaccttggggcagctggggccaccgctgtagagtgcgagtgcagggtagaagatgacagggcgtcccttgatctcacgatgtacggcgaggattagaggaacgggatgaagaaaaccgggaccgtaggatggtgagcggagggggtagattaaatcttgcgtacccattcgtatcgtggaatttgggcggttagattgtgatcgtgtggcccagatctgggtgggatttcataaagcgtggatctaatcgtgactatagatcttgaatcagacagccaggatagatccataccccttcgcggttctaaattgtacttgag

SEQ ID NO: 45660 - DNA, 307 bp, Zea Mays
tcgagcgcgggtccatatggattagaatctataatgtctaagcatcgcccgtggaagctgacgacatataatgtctaatgtacagctcgtaatatgggtaccatttcggcactagcggactatcaagtttagcttggttcaagcatgttgtggggaaaaggtggtagatgtgcttgaggtagatctaaaatgtttggttccactacagcccccttacatcatcgcttccctgcctcactgaactacaagcatgtcctactgttgtctatcatgggttgtatcccctgctatccctatgggttatagt

SEQ ID NO: 45661 - DNA, 471 bp, Zea Mays
cacttcgcttatctcatcatgaagtaacaaccatgatctaatccaaaattaactagatcttatccatctaagctagtcataccagtctaatctagaccccatccaatcttatgtgaactaaggtgacctaatgtgatctaatctaagtagaactagtccaaccaaacctaatctagttttacttaatactagtctaacctgctcatattcttgcacttaactaaaagggtagagcgaattaaacgagatttgttaatagattaaactctacaactagaaacacttttcccacctagttcacttgatcctaaattggtgccttaagtccaactcggccatgaacaccaacttgaaaaacataatagattacataacctatccaacccatctagaagcaaacaaccaaaccagattctcactaatcccatttaactcatagccacctactaaactagctgctctacctactaa

SEQ ID NO: 45662 - DNA, 430 bp, Zea Mays
cctgataccacccagcccaggtggggttgaccgaggcccaacaaattagggttgctcggagcccaacaattcattatgcacaccaaactcagggaaagggccaattgccccaaaagactagtccaatgggggaagggtgactctcccttaaagtgggttcctcctcccaagttaagcgaggtgggataattctgaggctcacacggtcaccgtccgactacaattgggccaactgggccaattgcgtctttgccaacgggtaatagtggaggatgtcctcatcattcccaccttcttaaaatgggccctagctctgatactagatgatacacccagcccaggtggggttggctgaggcccaacaaattagggttgcctggagcccaacagttcattatccacacccaactcagggaaaggcccaatcgcc

SEQ ID NO: 45663 - DNA, 592 bp, Zea Mays
cgggcatagtgtttggcttcaaaaacttcttcttcggataatctttttcccgaagcatgtcgaataatatagtcaagatcttcggacggtgcttcgagagcaggggatttggcttctttggccacatttttctctagagctaccctaatatctggagattcttcttcggccttctgctcagttgtggcaagcttcatctcaacatgcaccgagggcctagctttggtttccgtatgagctgtaacagcttcggaagccttcttcacaggagcaggagtcagtgctcttgttgtctccacaacggcgtccaacacgctagccattcttctcctcttgggagtggtggcaggagcttttgcaacctttggtagctctacttctactggctggctcagaatttctggtagatctgttgccttttctaattctggttttttggttgtctcatcttcagcttcgactgaatcaactataggaaccttcggcactatagttgattcctcaacacttcgagtggcgggagcagcttcttttgcttcgacagtggaatatgtttcttcaccaaattttggcactgtcgctgtttcaatat

SEQ ID NO: 45664 - DNA, 355 bp, Zea Mays
gtaaaatctcaaggatgccctaaaagcacccttctgatcggtgaggagacgttcttttcggcatgcatgcattataaaacatgaaaggattagaagttacccttttaatctaagtacggatatagcaaatagggatgataatataacgtaaggaataaaaaattttaatctaacattttaacaacccgggctcacgtatttttctttcttctaccgtaatctttacatctgatcctcttccacagatgacttcacccacccccgcaatggaggagatactcgtttcagttccaatttcctttcccacgagggttttccttccatattgcgggaggtgctcaactccactggttac

SEQ ID NO: 45665 - DNA, 326 bp, Zea Mays
gcagtcccttgtaatgccgccatggacggcagcggtgggttcccatacagctgggtcaccacattagcgaacgcatagagcacttgccctcggtcctcacacatggaggatgaaccgaggagcgcatctgtgcagcctgcaagcacctagacatagggtggggtggtgcacccttccccctctatcattatgacactggggatctccacaagccgaaggtcacacataccctggatgacagcgtcgatgggcgaggaggagttggtgaggtggagttcgtcggtggtggtggcaaggaagtcgagagagctgaaggtgatgcggct

SEQ ID NO: 45666 - DNA, 561 bp, Zea Mays
gccagatgacgccacgactggagctctcaagcgacaggaacacaattagatccaccccgaccatttcccctccatcaatttcactaatggtgcactataatgtcctggccacggtggcagagcagatggacaagagggtggacatgttccgatcggacaacggcggagatggccaaattgaggctaggttaaggcttacgggttcactagggtccatggacatgcttcggtttgggcagaacaagacccgaagaacgggtcgacggtggggggggggtcacagcggtgtttgacagcgcacaggtgcgttccggtgatgggcttcgatcaaattctaattgctcagtacagagatcaataggagactatacacaagctagaacagagagtaattgagaaattacccacccgaagagtgctgtccacggtggagtcccttgcagcggagcaagaacagaggaaagagctcgtgggttctccagtgtcaagtgtttagtcgcaaaggcacgggatgtggagaagaagctaagcccgagcgcaatttataggccaacgaccggc

SEQ ID NO: 45667 - DNA, 558 bp, Zea Mays
caagaacaccgagttgaccatttgtaacatgcccgcctatgacaggaacaaggaagttgaagacaaccattttttttgtttttctggacaagggtaggaaaggttccagggtaggcctagttaaacccattggtaatcccaagtacgcgaagtgaaaggtcctaatttgacactgaaatggccaaaacttccatattttgtgctaacacgtttagggaatatatgttggacttaagataattgacgcgcagaccagtagatttagcaaaagagtttaagattgccttcgggaagaatagtttcttctgacatgcttccaagaccagtacggtgtcatctgtatattggatgatcaggaagtcttgcccacatctttgttggagaagaaaccttagaatacctagcactttcgacctgttgactattatttggagtaggtcagcagccaacaaaaaaaggagcgaggagaggggtgaccttgtctgacccttctcttgcaatggaatggttacctagggcaccattcaaaagcactgcaaatgtaccggaattcataat

SEQ ID NO: 45668 - DNA, 2084 bp, Zea Mays
ccaaatagtataggatgacagtgtgtaccaacctttgttcaatttaactgtgtggatatcctttaaacttgggtcttcttcaaagagtaaggcagcatgtgtgttcatatcaggcatatgaccatcagcatattgacctccagaaacaacaggttccttagttaacttgcttggtcttggaggcactaaagaagcattgcccactgctttccaaggatcctgatttgagaaaagtgaatcagtgtatgctggttcttgtgtagcttcaacacgatcaattccaacagtagcctgcaattgaaatttactgctacgattggggagagcacaaaccaagtgattgggcatttccttaggatgctgtagaggaggcccagcaggaagctgagcaccagagttagatggttgaacggtgaacttttcattagaaacaggtggttcaatcggaactctaaggttgctctggacaggcagattgagtggtggtcgctggattatgtcaggttggacattttgtgcaccaacatcaaaatcacaaggtggctgctcactgtgcctggcaatgttgtcctcttgggttaaaacaggagcagtaaaggcatttgtgatccccatatgataccctccagcttgagatttgcagaaagaagtaacatcattatttacaggtggcttcccaactttggcatgatcaatgacaacatgaggaatagaaggatttccttgcacactagattctggtggtgcaataggacccaaatgaactgcatgcatacgagcatcaatagctctagcatagtcatgaggaagatcacgggcatattctctaagcggttccactgctgcatgatttgaatctttgtatgcactggcaccaatgccttgtgggacattcactggaactagcggcggttgcatgctataagagaatggttgctgctggtacctgacatgatcttcagccccagccgaaggagaatgacccacaaatactccttttggagcaggtgcactagacactgggaaagcaataatggtgggttgaaccggcacaactgtatccgcatatgcagtcgcctggactgcaggttttctggcaggaagagtcgaatcaaattgtgccatcactgctgtgttcccagctcttggttctgccacatagttcgtgagtgttcctgaacttgcacctggattagatttgttggatgcggtgccttgatgtgggctgtaaaacattggagctgcctcaaggttgcccattgcacaagaacttccctgctcccggatagtattatccgaatgggcatgtggcaatgctttttggcacattgtgcaaccatcatacctcaatgatggaacagtggccgagctaaccacaacaggaattgtgcctgagctggtcaccactggcatgcttactgcgcttgtcatcgcttgttgggcaccaaatttctgcctctgcgcatcatttgtctgcagatgcacagaagacaaaggaggaagctgtgacagtggagtgtgcaccacccggtaactctgatcaacctgagcttgcactggccttgtgaactgcgtggtctctggaacaggttctacacctgcggaagcgggcttcaactttcccacttgagcagcagtggtcgccatagagcccgtcacaggaatgttgggcatgaattggctcatttgcacaggcacatagttgacagattgtggcaccccatgcacaccaaattgttgggcgttgatgtagtgtacctgctgcggctctatatacgactgcggcatctgctgcacataagcagcagactgaggctgctgttgtggtacgtaatgggtgccttgaggctgctgctgctgctgctcctgcacataagtggtcacttgaggcggctgatgctgtgttgctgctgcataaacagcagcaacctgatgaggcggcaacgtcgactgctctgtcctaaccaggatggggttttgagccgggatgcccatcgccagaggtgacgccgagactgcagtgagcccaaccgactccgggaaagcacggaggtaatgcgctccacctgaatacgaatactcag

SEQ ID NO: 45669 - DNA, 526 bp, Zea Mays
gcgaagcatgtagcaactgagcagtaaaacccagcagttgagtaagtacacaattgcaatctgccgccgcaatttctcacctgatcgatgtccaactcaaacactacgacgggtgtttcttagccttgaacccaaaggattatgaatgaattccataaaaacgcccgcaggcctctctttttaagttacagggcacttgtcatgcacgtccacatccctcgtctgaaaacccattctccgatctccagtccacacacatgggcgaccgatcgagctctaccatttatacccaccactcctcgtcgatcggatgaacgccggggaagaaacagctcgatccgtagcttagctgcaacacatcggtgatcgttccatgtgtgtgtgattattgatcagggagcaatacaatacaatgccttgcttggcgcaagagttccaccccaagctgccggcggccagtcactactgcaagtccttgtcgtcgctcatccgggagacctacgcgcactgccatgtcccctgcgtc

SEQ ID NO: 45670 - DNA, 479 bp, Zea Mays
tgtcagtactctttgtggagcttttggcatttcttcgatgaaatgtgccgcgcagaatgttattggcttcttgttggctttattgctccattagttctgtagaatttctcccttttgtggggtgcaaagaatgttagattacatgattatcttttcatgatggcaagaataaggtttaggaagattaggagttttgtttcaatagaactacttgtttcgtggtgctgtgaggtgaggtgtttgatcttcttatacattcgtcaggtgtggatgtttcaccatttaattaaaattaattgttgaagttggtaagggttgtgcttagtgcatattaccccttcataaaagagtgttgtcttaagacattgatgttgatgtatagttgcatccaaattcgatgttgtgaaattgtagtgttgattgcatctatgacttgctttgagcttcattgcatgttgtttcatgcttgatattaggtt

SEQ ID NO: 45671 - DNA, 458 bp, Zea Mays
attaaattcaaggtctgtattgcactgcgggtatgattttccagtggtacaggggtcatattataaagttccagggcaccgttgtaattagtttgcacaggatgtggatggcggctataatataccagagtctagggtctcctttgcatgattacttgcgggtgacggaatagggttacttggcgcccaaccactagatcaacgcgaactgctagaccagtgatctacggttgggattcaatggtgtgaaggggtacctatggcatctaatcagagcctcccgaacggagatctaaggtccaacgatcgtcgtcaacctacagtgtgctcgacggtggcacaatctctcctcacggcggagcaaccatcggtgtgatcgattcctggcccctggtgccccacagctcgatctaaacctcgctacttgatgtggtgcacacccccaacacataccccgc

SEQ ID NO: 45672 - DNA, 367 bp, Zea Mays
tacggatcctggccatcctgtgactacaaatgtaaacctcatatcgaagtcacaaacagccattacattctgcgatgcgtaaccgtgtcggccaatatatttggcttcctctgaggtcgggactgacgctggaaagtgactaccatcaattgctcctatgcaatccttgaagtgtggccaaaatctcgcctctcgcaaacgaggatgaatctcgatgaaatttgggcctttaggcttgattatgtcagatgacatcttatacagtgcattaaggacttcaatatacttgcgactaattgtttccaaggagtgaccaaacttattccttatctgcctaaaagattgtggacccccacatgcccacaag

SEQ ID NO: 45673 - DNA, 393 bp, Zea Mays
attttcattctctgttctaccattcccatcatgaattccacgttctgcacactccaatccgcgcgctgtagatatcaggaagatagaacatatgcaacaagggtagagactcttgcaagagcacttgaccgcaattgcttcttttgttattctcatcattccctgttctgcacactccaatccgcgcgctgcagatatcaggaagatagaacatatgtaacaagggtagagactctggcaagagtcattcttcacactcctgcaataagccagcaatagcagtgcacttgtccttacgcgtaaggctgcagatatcaggaagatagaacatatgcagcaagagtagagactccggcaagagagcacttgaccgcaatgtgtgttgctgcaata

SEQ ID NO: 45674 - DNA, 841 bp, Zea Mays
actacccgagaaaaatatgctactacaagactattgtaaaggtctcgtattaaatccctagccattcattttgaaagtgtttgagggtttagctaatctaggctagaagaaatgcacgacttgtacggcaagagcggctcggtcctctcaaatgattaaatgataattaaactaaattggacatacatttcattatgtgtattttttatgggatgatatttatttatatttaattattgctaataaaattttaacgaatagcaagcgtaccctcagggtcttcaatgtgctcctggatcgtcgtcttcatgtgattgatggaggtgtaaaccgcatacttgagttggcaatttggttagcggaatcgccagaaacctccttggtgaatgctgttaaactagcattgcagccggcgacggacttctccaacagacagaagcattgtttccagttagaatcaagcgaaaaaaatctttttatcgacgggggttcgaagacactggattagaggacgctatcgaagagtggatcggcaagtctctgatgccacttgttagagagaggggatggaaccgatgcctaaattcagagtttgagagttagagttacaatcttctccattattccctctctctcacgtacgctcgcttccttttatactcgacacattagcttttatccgcatagcgggaatttgacttgttggtcgcgagctatggcgaggtacttgggcttcttcgttcgtcatggtgattgctgttgtcggcgaggtacggaagcctagcgagtaagcatggatcgtgtctggtggctggctaaggctgcatgctagggaagcgag

SEQ ID NO: 45675 - DNA, 759 bp, Zea Mays
gggcatgccattttacaaacttctcaagaaggtggataggttccagtggcccctaaggctcaggaagcgtttgaggcactcaagaaattcttaacaatcccaccggtcctcaaaccacctaaccgagccatgaccgatctgtcgaccgatgatctattgttgtacatctcatgcacgactcacgtgttgagcaatgtgcttatagtcgaatgaagggaggaaggacacacacatcctatccaacatctagtatacttcctcagcgaggtcctcagaccctccaaggtcagataccctcagctccagaagaaattgtacgcagtgctcctcaccggacgaaaattgtgccactatttcgacaaccacaaagtcatagtggttacatatttcccaataggtggcatactccaaaatagagaagcagtggggagaacaaccaagtggtcgtgcgagctcggagctaatgacatagaattctgaccccacacgactatcaaaactcaagccctagtgtttttcatatcagaatggactgaacaataattgctcgaaaacctcgagctaatagaagtatggaagatgtactttgatgagtcgctaaagctgcagggagtcggggcaagtatcttctttattgcccgaaaggagatgaactcaagtatgcgttgcaactcttgttccctatctccaacaatgatgtagaatatgaagccttgatatacaggctcaacattgttgtctcactccgcataaaaaggc

SEQ ID NO: 45676 - DNA, 696 bp, Zea Mays
gccgatggagatcctctgccgctgggccactacgctccgtggttgtgctccaccacttacgtccagctctcgttgatcgacctgggaggatgcgcagcgcacacggatgttcgtcgcagcttcgcctgggtggattcattctcggcgcggctggaatttctcaccgatgtgagctctccgccgccaaagcttcacctgccgtgggcgggcctcgtcaccacctcgcactccggtaagaagcctcactatgatccaccatattgcactcctcgaatagcactgatcggattggagtttggggcacggggcgtctgtggaccgagcgccggtggtgggcgccaccattgtggctgatgcgcctgaccggagttttgggggtgggatggtagaaagaagacaacgtttggggccgttgatctgcgattcggcgcacacgattagatccaggcggtgtcttggcttcgggcatcgtggaccgttgatcgttcatcgaggggaggagattgatttcggctgcattgaattcgggccctcggatcttgatccagtggccgttatttcaataccggttcggggttaatacgttctaatcgtggccgtagacttgtgatccaagggatcaaatcgcttgccagttcgttgttttaatctgagcttttcatctcagatccgacagccatagatcaccaatacccc

SEQ ID NO: 45677 - DNA, 730 bp, Zea Mays
gggataaccttgataataaagcaagagaaatattagttgagaaagggccaattagagaggaaggtctggaattcccttcggatgatgcatcaagacatttttcttatgttcattatcatagaaaattaagcaatggagaggtacatgatagaaaatggcttgtttattcaaaacatattgatagagcattttgcttctgttgtaagatctttaagtctactactagtagaagccagagtgcattagcaaatgatggatacaaaaattggaggcaaattagtttgaagcttagggaacatgaaaatagtgctgagcatattaatagcatgaacaagtggaatgagctcaaaacaagattgcaaaaagaggaaactattgacaaagaagtgcaaaagcaaatcgataaggagaaagctcgcatgaggcaagttttattaagaataataactgttgtgaaattccttggtaaacgcaacttggcttttagagggactagtgagaagctttacacaaacagtaatggtaatttctatgcttgtgttgagatgattgcagaatttgacttagtaatgcaagaccatcttagacatattaagaataaggagattcattatcattatctcagtcataagattcaggatgagctggtatatcttttagcttctgatattattagttctatcataaaggttgttaaagaggccaaatatttctctattattctagattg

SEQ ID NO: 45678 - DNA, 422 bp, Zea Mays
ggccgttacaacgatcccgatgtggtggaccccactgtccatctcactaactcgggtctagacccggatcactcggaagagagatgggaccaaggtccccatgctcctaggcccagtagggcgcgaccgacctaagtcacgatcgtccggacctagggggtcgttactgcacctatgacaccgaggtttccgctctactaccccaatgttctctgcatcaatgcagtggtggagaatggctctatctccaatgatgaaccaaccgtacatggggaggagccctcgcagcatgaggcgtgtcaccggtggaaccaccgccgcaacatcctgcgtcatcacactaccggggagcgagacccaactcaacctatttctccgaacaaggcatctgatgtcggggagactcccgatgaacggggttc

SEQ ID NO: 45679 - DNA, 1998 bp, Zea Mays
ctgccatggaatccggcagtagcaagcgataagccaggctgcccactcgggccaagatagtgaatggtccaatgtatctcgggccgagcttcccagagacaccgaaccgcacaactcctttagtagttgataccctgagaaggacttggtcacccacagcaaattccagatcccgcctcctcacatcagcataactcttctaacggctctgagctgccaaaatattctgacgtatttcccgaaccttttcagaagtctgctgaacccaatcaggaccaaccagagatctctctcccaaagtctcccagcacagaggggagatacaccgcctgccatacaaagcctcaaatggtgccatcttgatgctagcctggtagctgttgttataagcaaactctgccagtgcaagatgatcctcccagctacccttccatgacagaacacaagcgcacaacatatcttccaaggtttggattgttcgctctgactgaccatcagtctgagggtgaaaagtgacactaagtgaaagcttggtgcccaatgcactatgaagactctcccaaaatttggatacaaatttggagtctcgatcagaaacaatagacttaggtaccccgtgaagcctgactacttccttcatatacaagggaaccaaatatgaagctgaatttgtggtcttcatgggaataaaatgcgcagacttagtcaagcgatccactaccacccatataacatccctgccacggggggaacgaggtagacccaccacaaaatccatggtgatatgctcccatttccactctagaatttctaatggcttcaggaaaccagcaggccgcttatgctcggccttcacgcgctgacatacttcacaagcggccacatacttagaaacgtcaaccttcattcgcttccaccagaagttttgcttcaaatctcggtacattttggtttcaccaggatggacggtgtaaggcgttttatgagcttctctcaagatatccatcttcacctctgatttctgaggcacacaaagacggcccctgaaacgaaccaaatcattctcatcaatggtgaactcccgtggtttaccatcaccaaccctctttcgagcttcctgcaatagacgatcctgctgctgagccgcacgcactctctccatgagagaggattgaataagcatccgagtctcctcgctagtggtaccgacataacacaaagcgattccaaaatggtccagatcagcgatcaacggcaaggccacctttggaaccccggacctgctaagggcatcagccactacattagccttccccgggtgataatgaatggacaaatcataatctttaatcaattccagccaccgacgctgcctcaaattcagctccttctgagtaaaaatatacttgagacttttatgatcggtgtcaatgtcagaagcctcgccataaaggtaatgcctccacgactttagagcaaaaaccatcgcggccaattcaagatcatgagttgggaaattcccctcatgcttgttcaactgccttgagccataagcaattactccgccttcctgcatcaacacacagccaagaccaatacgcgaagcatccgtataaactgtgaaacgcttgccgctctcaggcaaagctaggataggggcgtccaccaacttgctcttcaatgtctgataactgacctcacaatcaccggaccagacgaagggaacacccttctccaagagtataattaaaggcttagcaatgctggagaaattttgtacgaagcgccgataatatccagcgagccccaagaaacttcggatttcagagacactagagggtctcttccactccaccacagccacaacattcttgggatcaaccgcaatgccctgttgattaatcacgtgccccaggaaagccacttcggacagccaaaaggcacacttcttcaacttgccatagaactgattcttccttagagcacccagaacgagac

SEQ ID NO: 45680 - DNA, 711 bp, Zea Mays
aatagtcttgtcgtatgagactttgaagtcaatgattatttccttgtaagtctgtaagtcgatagcaggcattgacagcaccaggctaagtacaatccactgaactattatggtagagttaggtcgtcggtcccactcaccggcgagcgggaagctgaggtgcgggaggctgcaggccagctcgccgaggtctgctccgccacgaaggacgggtacaccagctagagacatgtccgagaggtcttccaccacatcatgcgcaatcgaacagagggtctcaatttaccgatgtccaatgttgattaagctttatcatatcaacatcatcatcttgcatttgatctcacaatgtggcagtgctaggtagctattctgttatgttcccctcatttcactggctcttgcgatcacctattatcaagcaatttgtaaacctggtagagacttccctggtatgaacataaaatggatgaattaacaccgagattaagagttgttattttactgtattcactactttactctttgatgcattaattactatctaatcttgagccttacccatatgtttgcatggtgcacctgttggttcttatgtggttttatcaggagaaggagttgcttgaaaagcacaatctctggactggagcaaaggatatcctacatgaaaaggtaatttctcatgtagatgattgtaatattactgtttcc

SEQ ID NO: 45681 - DNA, 509 bp, Zea Mays
cctaaaaacagaggggttcctttgcataagtgtcaggacgaaagggtatcggggcggttgggacgttcgatcttaagctacggtcgagattagatttcgatcagatagaaacggggtcttatggtaactgttagatccagagttcacagcccagatttaatgaattacggatccatcccaatcgctcgtttttggatctacgctacgtattaccccatcgctcaccgctccccctaaatgaatctcgcacactccctagggatccaacggtagccacgccattgtcaacctccagcgagctaccccaacggccaacgccgacacgtaggactacgacatcgcgcaaccagccatggtgccatgctagggaggattcgcatggagcgctacaacgctaggcatcgcccggaaataagcgccaaatgacatggaaggcatagtctatgagtaatgagggtactcaccagagttgtgacggagtgttccccaatggtggcgccgagccgtga

SEQ ID NO: 45682 - DNA, 468 bp, Zea Mays
gaaaaaggtgaatagtactgggctaaagttagcccaaggcggcccacgcacaggcgaaagcgcgctcgcacgcgcccattgtgttctttttgcgcagaggaccctgctcttttaaataactcataaagactcatgcgcactattcctatgtgtcactgacgtttgcagatagccccttcccttttctatttcttcacacgtcgagacccccgaccatggacagcggagcagcggctccggcgagcccgtaccggccggaaaacgcaacagctatgcttcatcgttgcacaacacctaattctacccttaatgaccatttcccctccatcaatagtagagttctaactctaaatcgcgctgtccatggttatggcgcaaactgaggataacccgaggcgttcccggcgatctaacgtggtctaattcaattggccgggtcgagaagcatcaagagcacataagagagct

SEQ ID NO: 45683 - DNA, 489 bp, Zea Mays
gttagatgaaatttttaagagttggtccatttcgccctcgcggagtggataggcttcatgtatctagggatagttttggaaagagaaataaccctttataggagcattaaccattcatctatctctctaacacctcttttacttgtaatcttaattttctttctcattttgttagaagatccttagaggcttgaaccttgacatctaaattcatgtgattttgaggaactgtgatcataaccatacgttgcccttcatgtgtttttaattcgtgccaaatctgttgggttttgatcttaagttcattcttctcctcttctcttctagtttgagttttcgagggattttgtgaatatgtgttcttgtggccatttgggttgaatagaaatgtgctacgacctcttaggatcattgaaaccaagtggtatgggcttgtcgataccctaaaataggggtaccccttactacagtatgaagacacggtgcccg

SEQ ID NO: 45684 - DNA, 472 bp, Zea Mays
gctcgtatctacagagcctggttcaagatactttaagcaatttttcccttgcatcccacgatgcaagcacacgcggaaccaggcaaccaaacacgcctttagggatgttggcttgacttatgatggtagatcaaggggtagtggtattgttattgcgactgcaagtggtactggattatccaatataggaaaggaaaacgtaagatctccttttgatggggcatgtgctagtactagtgaggctagaaattgtggccagacaagtggcaatatgtctggtagatcaactaaacaaagttcacttcgtagtttgtactctagcccatgttcttcaaaagctcctcttgctatagatttggcacatagtatagcaccctcacatcctcgggtggatattatgctttgtggggattataagcttaagctttggaaagctttgtctaagtggttctataccaatgacatacctagt

SEQ ID NO: 45685 - DNA, 552 bp, Zea Mays
tcgcattcggtttactttctaaaaaccgggtgtgacattgccgatgcaagtgggtacgacgactaggcagtacagtgccccaagttcatcctcacgcgagatcttttcacccgccacggttatccactttacataggcacgaatcgcgacggtcggcgtgaatcatggcgcggagatcaccgacggcgacaggttcactgaatcagtgatctgattcaggttactgtaccatgggagctccattcagtgcgcctgaccgagcaagttgaggagccccgttctctaatttccatgtaacaacccctaattcatctgtagcaaaattgttcttctacaaaccagctttaattttgttatagcaacctcgatcaaacatccactagatcctattccaaatcgatctcaaagtccatccgagcacactatcagtcgagtttcagtttcagtggtaactgacaacacaattttaggtccatttttctccactttccatacaactccaaggcttggtcacttaatcaaaattaaactactaacatagctctatcattt

SEQ ID NO: 45686 - DNA, 417 bp, Zea Mays
ggttgtaacaccccaggtgtttatttttggtgcaacgatgagtacggatttaacacgtgatagctgtgaatgtaaaggtcactaaactttgattatcctcgtttatcacgattttgatatcgtgtctgtctccatccgtttaaattgtcctaaattattttgcaaaaactcagactttagtaatctttcgaaacatcaaatccaatattgtttgggttgagccatcgacgtcttgcccaaactctaatctttgaaatcgaatctggttctttaagcttcatttgaaattctttgacgcctgtgttgcatgtgtctctgtgatttggcttcatggcgcgtggcgggcgcaaccctgtgtgacaaaacacagcttctcacctacgtgaaagacacgtatcgtctccatgaaggtccccg

SEQ ID NO: 45687 - DNA, 480 bp, Zea Mays
ggtgaaccgtgtgtgtcaatttctctcgaacccgacaactgaacactggtcggtggttaaaaggatattgcggtatcttcatgacacgattgatatgggtctatgcttcacaaaatctggtgctccgttactcagtgccttctcggatgcggattgggctggtgatgcagatgatcgacgtagtactagaggctttgctgtcttttttggtggtaatcttatttcgtggagttcacgcaagcagtcaaccgtctctcgctccagtactgaggccgagtataaggccattgcagacgccactgccgaagtcatatggcttcaagttcttctgaaggaactgggcattcatctttcacgtccaccggttctttggtgtgataatattggtgcaacacacttgactgctaatccaatttttcatcgtcgatcgaagcacattgaggtggattatcatttcgttcgtgagagagtcaccaccaa

SEQ ID NO: 45688 - DNA, 646 bp, Zea Mays
ctttcttgcatcaacgatcccgccagcagcctcatcgtatcctaggaccaaattctcaaggtccatggacgaggcaccttaggggagctctgatggggcacgaaggttggccgtagtgtggagctgggcaactacaaaggcaatggcagtgccccgatggatgccttgctccacgacgttctagacgcggctcgggacatccaatagttgtcatgctcgtgtcaccccacaagcacggatgctccaggtcaccatatctatttgttggtgaaactccgcttgtttcgcctcctgccctactaagggaagagacaaggtttcaataggcccacggggcgaagagtgatggagcacggaggttgcaacttacttgacacatgggcctccatgtctgctaggcaagcttgaaagcctacgacacggatgtcagaagcccttagggccacgcgtgaagcctttagacggccctgcaactcaaccatcacaaacagtgggagagcttggtgctcgaacccaccgggctgcacgtggccaatagggatggagggagtgacaaacccatgtacaaagaaacatggcccagatgggaccagatcctaaccatcctcatagccaggagagaacgatcgattagaatcggggcaat

SEQ ID NO: 45689 - DNA, 1054 bp, Zea Mays
tgcctacatccacccgtctctctctccttgctgattgagacggtaacacaattaacggttcagtttaggtttaggggcggcgatgtgtgtgcttcctaacctggaagcaaaccttatgaattatatatgatcatccttgtgtcatttccttcttaacttccatgcgtgcatgcctcattgcctcctctgatttgataaagtaaccaggctttatttattgaattttggacacgagaaggctgaactgagcagaagataatttgctttaacgacaatcaatgatgaacatttcactttgttgccagcagtcaagagcctcccctctagtttaggattatgataagccaattcaccatagctgggttggccattctgaattatgtttttctcgctgccaacacagtagctaaccacctttctagacatatatcttttaggactaactagattcattgtataacacaaaaattgggctaatatatcctacctggctagctagcctggttactttaaccctgaatacagcctaaacctattgctagtgttcccagtttgtatccccctgtagctcggtacctgggctgtagtgctcaaggtcaactgtccaagcttctctcctttgccatcccaacgagatcatatctgaatcccatcagaggtcattatcttaacttcccaacggtgtaggttgaaccctaagctctacctcagtaaactgagggaagaaaaaccaccactgtggcactgccccaactcaacattctttcttatcaccgtgattggcctgccaagcagtggcagacccaacacaaaatttaaggtatcagatatatgcccatgtttccttatcatgcatatatttctgattgaatggaaccaatttcatatcttaaagcatgtccttgggtcagcaggggggaagggggtgctgccgagaaggggctagggcatagggaaggagcatgagaaggggccgccaccaggaaggggttggggctagggcatagggaaggagcatgagaagggaccgccaccaggaagaggttgtggctag

SEQ ID NO: 45690 - DNA, 542 bp, Zea Mays
gtcggccggatgcagtagccccgcgcccccggcgggggcatcaaaccgtcagtgctcccaaatcgtcgtctagctagggcgaccgcaacgcaacggttgttggagtagcaaacttggttttaaggtggagggaaaaattggctgggctgaaagcagaaagccttgtaatgtacatgaaagaaacggaacggatggcgcgctacaatctgagctcgccattgccgcatatatctgctttaagagagcattgcgctgccttgcctaatcgaaacgaaacgacacgaaatgttgcctgcaagtttttgaacgtgtgggtgagtaaatcgcacggttgggtaccagtactgcgaggaaataataatgcagccagccagtcagtgcaaatccggcgccttccattttccaacgaacccaccacatcccgcaagccgacgacgatctagatcgcagcaccaacgcattttggcgccgagttgctgtcgcgtgacacacatcttggcagcagcaccaacgccggcactcctcctccaaatccggcgcca

SEQ ID NO: 45691 - DNA, 674 bp, Zea Mays
gagagatccaatccaacccgcaagtgggcgatgtgcgtagtagtagtacccttttgtttatttccttggacttggagtgctactgaatgaagcaccaaaaagcgagaaaaaacaaatagaggaaggaaaaaaaaaggagcacggggtcgacaggttcagggcttttgttcctcggcagtcggcacctgcagacggctagctaacatttaaaaacatgcaacttgaggtagcacatgcgcttcattagcatgagcccggaatcagtcgtctagctacgtactggcgctaggagaggtaacactacaacaaagaccctgggctagtcgcgtggtgggtgtgcagccgaaaaagaaaggggcaaacacatgagtgctcaatttaaagccagccagggcagcgtcagatgcatcggcaacaaaagcagccaccctaccgagccccctggatccatctgtccgcgaccgcgacaggccactaactaaacaccaccaccgttcgagggtgccgctgcgggattaaagtatagttgacacgatagacggcgagccggctctccacactccactggtgctcgtgcctcgtgctatggggaaaaaaggttttatagacctgcttatgcagctatagtattcttcactgcaggtatcgtggtcgtgaagttttctttttgtcag

SEQ ID NO: 45692 - DNA, 517 bp, Zea Mays
ggagttcttctgtccacgacgacggcgagacctgagggtgaaccaaggtgttcccgacgactaggcgtggtaatgtacaaattctaagtacggggagcaccactataccctaaggaagctagaacagatggcggttgggttggaactacctcaggcgacgctagccacagaagagctctccacggcggcgatggcgaccgaattgggggaaaagccaaattcaggcgctgtgttggctaatcggagatgagggttggtgctctggctttgtaacaacctagcggagctagctgtgcactcaatttatattatccgcgagcggtggctccgaatttggaagaggaaaggtggcgggcgaagagagggggtgagtcaccgacgcgagctaccgtggtgttcactggggcaacgttacaggcgatggacagactacctatagtggtttactgcgatgtggtaacgcttctaagtatgtggtgtccgagcggcaagcagcagaatcctgcgaggccatctt

SEQ ID NO: 45693 - DNA, 1058 bp, Zea Mays
actaaatagagaaaaccccaaagattaagtgaaataatcataaaatgttatcaaagatggacctacattacatttatatccctgagataccaaaaaccctaattgagaccctggaaaaccctaaatccaaaccctaggggcctatgtgcaaaaatagtgcacttgtggactaaagtgtaaaaaccatgttaaataagtatcctaggtcatatggttcacaagaaggtggatttgcaatccaaaacttgagatttggacttaagtgcaaaagagccacacttgacccttttggttaggtctgaatttcagtgtggttgactcaactttgagcccttgtatcttccaaattattgagaatttactctaggtcaccacatcaaatgtatagacctatcaaaggagaacaactttgcttaagagtgtaagcatagttgttgagaagaatttggagataattaagcccaaagttggactgtcagactacttaaagtctgaaatcagactaacaatggaattgcatgaacttcaagctcaattcaaagcatgatcctgtgactgtttgtggatgcacgatgtatcaaagttggagctggtctattaagttataattttgttgtagagtgttggtcacgttgctatagaaatctgagaggaatttggccctaaaccgtgactgtcagttcatctgaatggagctcgccatggtacagtaactgaagtggatcagactgctagcgcagagctctcaccgccgacgaccgatctccgccgcgattcgtgccgccgccgttgtgatttacgccaccggtgaccggataagcctgccagatagtagctcttcgcctaaggataactctggtgactcaccgtcgtgcctccccccttgctcactgaacccgtggataaggttctcaccgccgttaagccatcaccggcgtccgccgcgtgtctctacctttccaccgcatcgccgtagcctactctcactctccgttgatcaccggagtaatcgccacggcataggacaccaagccactgcgccagtgctcttcccttcc

SEQ ID NO: 45694 - DNA, 960 bp, Zea Mays
accaccatgggccatcagtcctaagtttcttgccactgagaaggttcgagatggtcaagtgtaggaatcggtaaacctctcccaagaacagttttccaagaccaacagggctacctccggctagtcgatgagccagggaaatataattcttagtgggagcaagggaagggccacagaacataaagcgctcaagccaaagattaagaaaagttgtatgctcttttttagttactagaccttgttttggcatgctaggacatgtaagctcccttggatgagagtttgaaacgaacttcaagcatgctgaaggctaaagggctagcaaactcgatatctagaccggtgatcattactacatccataagggtaggagtcatgggcccatgaccgaaaaggaagcagtttatagcatcagaccagaagtagccaatggttttaagaaggttttcatccttctcaagaggggatagcgacagagagagcgcatcggctatgccagtggcttgccattgagattgataggtctgagccactcttctgagccatccttctcaagaactatcatgtttgtatacctaccggcgacggaggggggagaagccgatgtgctgccgtcggctctcaaaatccaaaaagggcacacacacgaacggagattagctaagcaaatagtaattaaataggttaaaagtacgattgttctttacacgatcgatttatcggccaggacggacgaacaccaccaaaagaaccattgttccagaaatgctactactaccgaagggaaatcctactaactacacgaccttgtggcgattcgggggaggagacacatcggcttcgggatcatcgccgctgccgccggtatcatcgctctcctcgtcgtcgacgtcgccgctggagctgttggtgtcgctagacccgtggccgacattgtcatcgttgtcgtcgtcgtcgtcg

SEQ ID NO: 45695 - DNA, 628 bp, Zea Mays
ggaccacagagttcacctagcagcatcgctaactgaagcagcataggtggatagcggtgtcagagactcatgagctgatagagtcctaaaccctctatcacctgcatccatcaccctgacatgaatgtgagtgatgtagtaacaagcccgagggggcttgtacactcgcctggtttcatacaggggtcggacgtaggttcccaacgcatgcagaacatcctgtagcaggttagggaagtgccccgtctcaaacattgatgtataatgttcggtgacaggccatatccccacgaagtggtccagttgttcaccgttggcttcctcgttgatggtctccttcttcttcttctttgaagttttcatcatcatcaccagagtcgtctgggtcgtcgccttcgagagcaggggcttggactgctggtgctggtggtgctgaagatgacgatccagctgtgaaggctagtgattctgtcaacgggctgggcgtaggcagaaactccttcgagctgtcctccagaataactccattctccacacaaatgcgagggagatccatagggatttccttgactaccactgggtagacgagaacttaccgtggtggagggatgtagttggtgttggtccg

SEQ ID NO: 45696 - DNA, 525 bp, Zea Mays
agagaactctgctaatgagagacatttgtcccagttcttaccatagtggatgacacatgctcttaacatatcctcaagaacctgattcactctttttgtttgcccattagtttgaggatggtacactgaacttctgattagtttggtacccaatgattcttgcagttgttcccaaaatcttgctacgaattgagctcctcaatcagaaataatggtcttgggcatcgcatacaattgtaccacttgatcaatgtagatctccacatacttttctactcgaagagtggaatgcaccactatgaaatgagctataatgtcaagaagtattggataatcctatgataaaatccatgctaatatcatccccatttccaagaaggtattgcgagtggttgcaaggcaccgactgcttttaggtgacttgctttgatcctctggcaggtgtcacactcagacacatacttagctatctccctcttcatccttttccaccaatataggggttttaggtcagggtacatcttg

SEQ ID NO: 45697 - DNA, 808 bp, Zea Mays
cactaccttgttggtgcaaaaggtgcacttctcaaggttagcatacattttttgttctcgaaggacaacaagtacatatcagatatgttcagcatgttcatcaagggatttactgtaaattagtatgtcatcaaaatagacaacaacaaacttgccaatgaaagttctaagaacatgattcattaacctcataaatgtactaggtgcatttgttaacctgaaggctatgaccaaccattcatacaacccaaattttgttttaaaggttgttttccattcatctccctctttcatacgaatctgatgatagccacttcttaagtcatttttgtgaaaataaaagcaccacaaagttcatcaagcatatcatctattcgaggaattggatgtctataccttacgatgatgttattgatagctcgacaatccacacacattctccaagatccatctttctttggaactagaaggacaggggcaacacaaggggaatgactttcttgtacgtacccttttttaatcaattcttccacttgttgctgagtctcctttgtttcttctgggttggtgcggtaggcaacatgatttgagagggaagcgctagacacaaggtctatttgatgttcaatccctctcttaggtggtagccctagtgacacttcatccggaaacacatcctcatattcatgtaatgcatcaaagacaatacttggccaagtagaggataagttgttagtagaaagtcgggtgtctttgtacaggggcacaaagaacatggcattaggttcactcaattattatagatccc

SEQ ID NO: 45698 - DNA, 548 bp, Zea Mays
cgtcgaccattattttttcaagtcggagatcatgtgtacttgaaagtatcatcgatgaagggtgttagtcgtttcgaggttaaaagagagttagcaccctgatacattggcatgttccctattcttgaatgatgtgggcaggttgcgtacagacttcggctaccggaatcattgtctcctatacacaatgtgttccacgtatcctaattgaagaagtgtcttcgaatccctaatcaaactatggatatatcagatgtgaatttggaaccagacttagcctattcagagcatcccatccgagttttggatcagaaagaccaagttattcgaaaaaggactctcaagttttacaaagtacagtggaaaccaacacacagaagaagaggctacatgggagtctaaagatttcttagaaaaacattttcctaagtttttagcctcctgtaacctttaaagtttatgtactttattataaagttagaacaaacccacacacccaccccctgctctgtaagagaaaataggaaataaagttgtgacgtgtttcc

SEQ ID NO: 45699 - DNA, 492 bp, Zea Mays
cccaaacattggtgacgccagcccacctggaagctggctcgacgacctctgacccagcctcggatctagactgaggccaagccaggccgccatgtcatcgtcttcgtcatcatcatcatcatcgtcgtcgtcgtcaggcgtgtccggcgacggctccaatgggagcccatcccttgcttgcctctgacaacgcttctccaaagcttcccgagctcgcatcctctcgcgagctcgggccttttccgcgtccttcttctccttgtccttctccgcggtgagcctacgcgcggtccggcccgccgcgtcctcctggaccggtggccgagagagtttaaaattcctcaacccctggggacgaacgaaaatcccaacagtaagaactaaagacgtaagaaacacgacgcaaaacagaaggaggatcggacacttaccagggacacatacccatggtcaggacgcatcgggggttggctaaggacgccagcgtccagc

SEQ ID NO: 45700 - DNA, 361 bp, Zea Mays
ctggcttggccagtctacggtggctgtggcttgtgcaagatctgaaatatcttcagcacttcaaccaagaatctgctcaatgggaatcaatgcattcaaaaagctattgtaaataaccacctcattttcttcaggagcaggggcggtgctgtctcctccaatcctcacaatagtcatgtcacgaaagtatcttcccctcatagcgtcaacatgactttgcttaatattcgactttccgaagatggtatggattggtcgcaagggcaggtcctcagaatattcgtctccactttccaaatcaaagtcatcactgtcatcagaatcttcagataaatctgccattatctcctttgtgattttt

SEQ ID NO: 45701 - DNA, 523 bp, Zea Mays
tcatacacctgaaacgtgctacgcgaagcagaggaaaggatgagttcaacagggatgtccataccgtaaaccttgcagcgaggtagccagccaacggtgaggggcgattccgccacccgccatgctccgatgagcaaactggatcagtgccccacacgcatctggttcaccgatgccacgcaaagcttcagagggcaccatcgaacatccccaggtctctttcagaggtcgggtcggtggcctgggcatgaatcgaccacgacgacgccattagcttcgaggaggcacacgacggcgcgctgggttgagaggagggcactgtccgtatatatatgcgtgatagaggtccgaggcgactagttcgtaactccgtggaagtcgcgggggagaacaacccaacctgtcgcacgtcatcggtgtccgatgaacacagaagtagcgttcgaccacggttgcgaggttgaggaccagcctgacagagaggtccaccagtcagcgaccggatgaacatgctaatgccctg

SEQ ID NO: 45702 - DNA, 278 bp, Zea Mays
tctgtatatatatggcagatatttcccagcagataatgacgccatattttaagggcatgaaccacagcagctaattccaagtcatgagttggataatgctcctcatgccggcgtaattgtcttgaagcatatgctataactcggccctcttgcattaagacacatccaagaccactgcccgatgtgtcacagtacacatcaaaaggcttttcaatgttcggttgagccaataccggagcagtggtcaacaataccttcagctactcgaaggcttcgtt

SEQ ID NO: 45703 - DNA, 494 bp, Zea Mays
cccctgctcgcatgttggcaattgcgttgagcctcaatcagggagcgtagcccttccttgccacaccattgtagccctagtcgccagcgagcctcaccgccgtttacggtagcaagccatcatgcacacagaaataagaaaccgctttctatgagcccacctgcatgcgcctcggcaaaatctccgaagtatagtccgcacataggaaaatgagaaaccacctgggtcccatgcgcatgcacatgagcggcatgcaacatatctttattatttctctgatgcatgcagccaacgaaagccttggtaagttcaagcacggccaatggaaatacggtacatgactttaaagccacgattagtcatttattcaatctatttcatgtggcaaatccgtttagacttaattatgttgcaccaactttataaaaacgtcaactacgtattaaaatgttattttattacgacacatgttctatgtatttaattaattgtcg

SEQ ID NO: 45704 - DNA, 389 bp, Zea Mays
gcaccgcgttggtagtcgagcgagcagaggaagggcatgcatatccagtacaacatcccgtctatttcatcagtgaagttctgggaccctcaaagaagaaatatcctcaagttcaaaaactattgtatgcagtacttctaattgcacacaagctccgtcactactttgacgaccacaaagtcatagtagtcactggatttccaataggggatattctccacaacaaagaagccattagaagaatagtcaagtgggcctacgagttgggagctcacgacatcgagtttcgacctcgcactgcaataaagattcaagcactagtggacttcgtatcagaatggaccgagcaacaagtgccagataacccggagattatagaagtatggcgg

SEQ ID NO: 45705 - DNA, 867 bp, Zea Mays
attttgatggctaggtgtagtcatcaaggtagaaaacgatctttcattagcacgaacaccttactgtaaataataagtagtcgtgtagaaaacatttgaccttcaaaggctgcaacgagtaaattaaaagaaacatgcatgtgcattattcaatgtttcaacgaaaacgtggaacttgatttttattttgcgtgagggagcttaattatttctgttgatgtgtaaacacgttggaaatggggcccccgaaccacacgtcatactttttttaattatttttgtaggttgctatgctgagctagtagctgtttacacggcgtctgttattctgataaggaactatatacaaaaccacacatgcacacgtggtcaaggtagtgactaatctcgcctaataccactgacaaatcatctctacttggttgtctcgacctatagttgctaaaatccatgtggctaaactttagttttctctgagttgacgattaattattacatatactttatacttgaactatagttacctgcatgttgtaaaattatctaaaaattcacgtaggtcaaatgtggaagaagtgccatagaaaacaacagtcccatattgtgcatcggcaatgaataataccacgtgctaccgaacacggtgaggattactggtcgttcgtcccgtgatcaagctggtaggtggtatatatgcagctcttatgaagttgttgagaagattgacgcagtgatctatcgtcaaactgaaacggagacgggcatcactgcaccttggatcgttcgtgcgtttccatttccatttctctgctgcccgcagccagtgtgcagccgtcgtctgcgcaagatagacctggtcatccgcta

SEQ ID NO: 45706 - DNA, 457 bp, Zea Mays
accaaagattgacaatagtgttgcaatttcaagagacagacaagttacagggagatgtttcgtctttgcattttcgagggcgaggttaggctttgtcgatctgcgtcgtgctctatctttgatagtgacggttgggctgcgtgtatacatcggtgaggggaccagggggtgaatgggcaccactaaaaattctcttttgagaatagcaccgtgactacgatcttaattttcacacaatccccaagagacgagataaactgcgtaacacagtaatactcattctagtgtcgactaaatatacctgctacacagggaactacccaactatctacaaaatctcagagtcaaattcacacagaagggcgagcggtagtactgcgcaaaggtccgatagtgccatgtagcggcaatgccgggcactaaaaatcctcagaaaattctcaaacttcacaaaaag

SEQ ID NO: 45707 - DNA, 381 bp, Zea Mays
ggattctttttatcgctcctagaggagaacaactcaagtatgcactccaacttctatttgtagcattaaacaatgcagcagaatatgaagcactgatccatggcctaggcatcgttgtatcagtcggcatcaagagactaatggtatacggtgattcgctagtagtcataagccagataaacaaaggctgggactgctcgactgattccatgggcaagtactgtgcagctgtccgaaaattggaggacaaattcgaaggattggagttccatcatgtggaaagagaccgcaacgtggcatcagacgcgttgtcgaagctgggatccagccgggtccaggctccacctgggatcttcgttcaagaaatatcacaaccaagta

SEQ ID NO: 45708 - DNA, 725 bp, Zea Mays
cccccccccggcacacacgcagactcgctgctggtcgaagaccagaaaactcaggcagaagcgaaccgtacaacaactcatcaatccctagccagatctgaaaagaaccaccccgactccactgccataagaacgaccccaatcagcgctagcattcttattcgcctgcaccgttgttcccagcaaacgcaagagctgagagcacgaattgtatcatctagaagcacatcgatcaatattcccgtaggctacacacagaattaacctacataacctaaattacacaaacttaaccataaactgcgataaaaaaatcccctctccacccagacacccacaagaacacactacacacggtaaaccctcaaatccacaaccccaggtctggtctctagcagatccaaggaatgatggaagaataaatccccacagatccaattacccaaacgaatcctgacaccaaaccaaatagcacgagatgtagcgcatgctgcgcataccacccccacgggtgattggcgaaacagggttctttcagatgaaaaaatcgggaaatgatagcgcgagaaggaaacgtctactaatcgggaagcgcgaacctgaacaagcgggaaaggaaaccgcggcggaggagggagaggacgacgggattcaggagccgagactcgagaccacgcaccttgtagagaggacgagcggcgaggggaacggcgggcagcggcggc

SEQ ID NO: 45709 - DNA, 730 bp, Zea Mays
tggatgctgcacgcacttgcgctacttaaacctgcaaaggcgacaagcacatttcgcaggccatgtctgataacaacgcccatctcgaaacaagcaccagttccgatgcagctatagccgtatgcaggacggagactgcaaaagaacaaggacatcttctgcaacagctgcatgcatggggagattgttccaagaacaaggacgcatgaggctagggaggagaactgggcaagaggaaattaatggagactttcgtgaggatagcatgctgccgccgtcaacttaggaatcggcccggtttttgcttcgcctctagtaaggtctttgcagagtagcagcagctgggttcttgttccaagcaaacgactagtactcctcaagctggcagtggcaaagagaagatataagtctagatgatacctagtccacttcacatcaactgaaatctcagctgttcatcagtacaatcatccaaaattctctcttattacaaatctgtatctggatctgtataaagacgcactgcaggctcgcagttgcttgtattgctgtttccgtaaggtttccttggttgcgcgattgatgatcctgctgagctagccaatcgtggctctcctcgtcaggaattcaggatggtccgtccagagctctctgaacctgctagtgctactgcatggcatgtgactgaaaacctctgctgctggagttggcggcttctgaagtggagtaa

SEQ ID NO: 45710 - DNA, 531 bp, Zea Mays
gcaaatgtccataatgcaccaaagttggagtactcacaaactgactcaagatatgtactgcatgagctatgtcaggtctcgtcacagtaagatagaccagacttcccacaatacgacgataccgagaaggatcggcaagaggtgtgccctcagatgagcggagctgtaagtgaagatccataggggtggcagctgtccgagtatcagtaataccagatcgtgcaagaagatcttgaatatatttgtgttgtgaaaggtagtaacctttggtggagtgcactacttcaatgccaagaaaatagcttaggggacctaaatcagtcatcatgaacaattttccaagttgctttttcacagaggaaatgtgttcctcattgtcaccagtaatcaacatatcatcgacatagagtagaagtaaagtacgtccttgtgtggattgatgaacaaaaagagcaggatcatgattactaggtgagaaaccagcagccataatagcagaagcaaaacactcaaaccaagcacggggagctt

SEQ ID NO: 45711 - DNA, 658 bp, Zea Mays
acaagatgatgaaaaagatgagaggcatgcaaatgaagatacatttgtctctcctgaacaagatgtaggattacggggaggctacgctagcgcaaaacaaaattttcaaccccataaaaccaagaactactgcggttataggtcatggaattaccactagacgcgcagagcagcggaagacgtctcgatgtagacgaacgcgtcgagcagtgccgtgtagtcgtcggcgtccttcacgtcctcgcacggttcgtcctagtgctccagatgcagcacctccgaggtatccacacgtacagggaggaagcgccgcgtaccgaactgctaggttcgcgacagcggcttggcgagggcgagaggctactcgtttgctggtggcgaattagggttaagcctaaccgcgcccccgcccctcattatgtaggcgttatggtgggcttctgacaccgaggcccatcagtaaccctaaagcccagtctaatttcagatctaatccgagttaggcttccttccccttaagtgtgtgaccctataggttcacgtacaaatagacatagcccgagtactcttacttggcccaataattgatagcggcctctagcaagacatgtcaactcctatgcgcacgtaaagatcatatcagacgaaccattgcaac

SEQ ID NO: 45712 - DNA, 459 bp, Zea Mays
cttgagatagagagtagccatgctcatccgggctgtggacacacaaccgagccagctgtgactgcgcatcagaattagtcacataggaattcgtaacttcttggatccagagaggttgaacttcactgattgttgtcaacgccatcacacagcccacacgagaaagagcatcagcgactttgttctctttgccctgcttgtagatgactttgaactgcatccccataagctttgccatggctttacgttgcaactccgaatgaagctcctgactacccaagaaactgagagccttgtgatcaatccggatttcaaactcgctccgttggagataatgacgccaacgatccacaaccataatcagggcgatgaactccttctcatagattgaaagtttttgattggtaactcccaacgccttactcaagaaagctataggtctcccctgctgcatcaaca

SEQ ID NO: 45713 - DNA, 797 bp, Zea Mays
cagggggcttatcggatgcacctcatgaccgtgcaacatggccgaacgaccgatgttgtcgtgggtcgctggtgagctcaattgcgccacgctgaaatcctttaccacgtagtcgtaactgtggcacactcagaatgctgttgagcaccacgacggacccgccagtacaatgtcttgtcataaccgtgctccgctctcctcccaaattcggagccaccgcttcgagctgctataaattgatgccccagcctgcttcaccaacttattacgaactcagaacaccacctctcgcctccaattagtcaccatagctcgtgaatttcaaacttcccccaattccgttttctgcaccaccgtgagcacccctccgtcgacccactgtcttgtcccttcacccgccttcctagttgccgttcttgagctctggtacgtcgctaaatcttaccgtgcccttaatttggatgttgttgtactatatcgtcaggaacacgacggggaagactccatctccgtgggtgtacgtaaaccaagctttaggacagcatgcaggttaaattagtgattcccagttagtcgccaaggtatgaattaggcatagaccatattagggcgttgattattgcgtatcacggccgatgtgagttcgccgaagtacgcacgccgtcgtccattgtcggggacccgagtttgtgaagttaagaaagaaggggctcggtgcacttgtcactgagacaatgaatagtaactagggactcttcatcagatattcaaacagttagggtcctctacgcaaaatg

SEQ ID NO: 45714 - DNA, 611 bp, Zea Mays
ggagaagaagaacatgtgggagtcctcggatccgaaatggagggctggtaccatgcgggtgtgggcggagatgcaggcgaagagcaggccttccgtcgcccagcttggactcaggtaggagaaagaaagctagccattggatcttcaattggacgctctagataacgtttcacccggatccgtccctggccgtctgatctggatcgtgcgcttgacaattgatctgagtgttttaaatctcgggtcgttggatttgcaagcgacgatcaagattagaagagtaaataacccttcggcactttgaatccgggccgttgatcgtcgatccggtggtctgggatgatctcttttgtttgcacgtgtgtgtggtggtggggatcctgtgcggatcggatcccgtgcacctcaccatgtgcaccagggtgtggcacgatctcagccagtcgcaggatgccacgtgtccttatgtaggaatccgagatcggttttgcacaagagcccctgcacttgtgttaaaacaacccgcagtccatacaagtccagaaatcccttcagctcagtcctggaatttacagaacgcaccccgtgctttcaagtaattagtagccgca

SEQ ID NO: 45715 - DNA, 1485 bp, Zea Mays
cctaaggactgagaagacttcgggtgaagttgtggaacttgttccgtgcgcgaagaacaaatggaggaattggtgggatttctggttttatgtgacattgaaagatgctgaaggcgtatcagggctacctccgtccatactatgctcgcactgctacattgtctttccgtggtttaaactgaagaaaggagatgtgaacgaagatgcccttcgctgcgcttccaagatgagcactggtcgtgacttagtggagggatttattgcttgcggagtgtggccacttgtgcatggttgggatgtgggcaaggtgaagttgcgcccgatacctttcttgaagggtcagtaggtgttgagtccttccttcaacattgaactgcggggtcgagatgctgcatctttcgtccgggaggtggaagcggaggttgtgaggattatggggaaatattcgatgaaagcggagatgccaaggagttggtatatacgcggttcgaacgtcaggttgaaccgtgtctttgaactgaatggtctccaatatggtctgtatcctgaggaggattctactgatggtgggtatgatcgtaggaaaaagaaagtggtgacacgggtggactaaggctgctctaaagggaatgttgtggttacagcagtgaggaaaaagaggaaagttgatgttatggcgaagggcgtgacgaaagtatcttgggttgcgggggcctcggacaaatttgttgcggagttagcggagacgtttgtcgagctgggggaggtcatgactttgcccgacctccaaaaaacgtcttcgtgaatgctgagtgtaatcggtggtgagtggcataaaaatattctattctcgtggcttctggcgaggattatttaacgtcttgtttggctcgagattttaaaaaatttccttacgggcgaaacattagcgctgttgtgacagctgtgatggataaggaccgccaggagtccacgcggaagaagcgaaaggcgccacagtggcttatggatccgcaatgtgaggcaaaggtgatgcgccctggcatgatgctgctacaatgccttcacctgcggcgccggcgatagttgctaggaaggtgccctcacatgcgaaggctagtgaggttgaagcagcgaggggtgttgagatgtgtgggaccagcgaggagagctaggaactttctattgatgattacttgatcgagggtgtgagcatgttcgatgctcacaccggcatggcggctggcgatgagtgtgtatttattattgtgtatgttttacttttgtggcagtgcatgtactcttgtattgacttgtggtttttggtcatagggtcggggtctggtcagatggttgtggtgccagcgaagccaatggtggagacgaagcagatgaagtctgcggtggaggcttcgctggacccatggccgtgattctgcgttgttgttgatcggggtggagtcgtcatcgacacatctacgggcg

SEQ ID NO: 45716 - DNA, 602 bp, Zea Mays
tgctctatcaggtgctctgaatggagttctaatggtacagtagactgaaaaagatcgcaggttcgctgtatctcgctgtcggtgacccccacgctcggattcacgccggcgctgtgattcgcgcccattaacccgcggataatgaccctctagtgaaaacatctcgccgtggatgaagtcaaagcactgtggctgctctgtcgcccatccacttgtgccacaacgtggccgaatgggcaccgccggtgtgaccgccatttaccgtaatccgccacgctactgaccctgttacctcatcgcaaggtgtcgtgtgaattggtcagtcatcgtctcaggtctctaccctagtaaatgccacgttatgagactccggtgactcacccctctctccggccgcgagccttctccttcgaaatttggagccactaccctcggacactataaattgtgtgtgccgctagttccgttaggttgtcacaaagccagagcaccagcccttgcctccgattagccaccatagcgctataattcctttcttcccccaattcggttcttcgtgccgctgtgagccacagcgccgtggaccgccgtctccaggtccg

SEQ ID NO: 45717 - DNA, 574 bp, Zea Mays
gcgagagcaaggcaaaaagaaaaagattgccgctctagttactacaattgagccgaagggcaagaagatgaaggttctgactcaccggccgcgttatattgaaccagccgtgatacctgaatttggcaaagggacctcttcagctgctgaagcaacagaaaccgttccgattgtacataacgttgaagagctgactgtagtgccaaaggtgcttacagtcgagccagttgagaagaagattgatagggctgaagagccaaagattgaagaaataatgaaaatgccaaaaattttgagccttccaacagagggaaaactgccgaaggtatcaaatgcttttgtcgcgactcccaagaggagaaggatggcgaacgtgctggatgctatgctggagactacaaaggccttgagccctgctcctaaaaagaaaattgttgaagctgccaaagcgcaagctgaagtcgaaactgcacaagtagaagccaaagctctgaaaactcgggctgaagctgaagctgggccttcggcgccctcttcaacgaagcctgccgtgtttgagggaaaaacggcaggg

SEQ ID NO: 45718 - DNA, 759 bp, Zea Mays
gtccgattggttactaacttggataattgattccttaaaggtagtgggtgataataaaagcagtgattactctgggacgtgagctgacaatcgtcaattttttctatgttgtttaagtccaagatttctattagacataaggatttgtgtaaaatacaattgcagtccgatacagtttttagccttgtgcccttcgcaaaaaggactacaagaatcatgccttttttcagtgtaagctgttgttgacttgctgagtagtttatcctcagggagttcagaccaatgttaatgtggtaatagagtttcggcacgtcagctctaaacagaaaactgatagtacattgacgttttatgattagttttgtgccacattctatccaaaagatccagttaggagattagctcgtggaatagtttaacttcttgccccttcatctattttcaagatcaaacatgttttttctacttgggaagttctttaaattttctgccagtagcaaggatctgtttagacccagatagctaattgttagctggctactactagatcctcagggagttgagagagcttctgacagcaacaagttcagagttgtaggggatgctaattctttgtatccgtgatgtaagttcattttgccagctacaagaaaataccagttgtagtgtagtcatgaagcatgagacttccagatataagctaaagctatccacgtcagatacatagattttcaagatcaaacacgttttttccacttg

SEQ ID NO: 45719 - DNA, 315 bp, Zea Mays
aaaagtttggccaaaataattgtttaaaatccccaaaaaggccatgcaagtggaagctctctagggaaatctaaaaattcagatttcagaatttcagccctcacctagaactcgagcacgttcaccttaatccctaactcaaaaccttaagcccccattgacaaagttgtgctaaatgaacccctctgcaacgtgtgtgaagatggcatcaagattgcgccctagacatgtcaagtcaagggttttagctcggattcacgcagtgagacaaacccgatttgatcaccccatatctttggctccagtcaacaaaat

SEQ ID NO: 45720 - DNA, 476 bp, Zea Mays
tgctgctccaggtggcgaggccgaggtgcctcttccagtcagtggtctatctctgatgcagtggatgagcatgaagttggatacttttgatggcagtggtactccggtcgaggcggtggattggctaacttacgtggaggataagatgaatgtctttgagattgtgtatggtgatcgtgttcgctttggcacacagttgctgaagggagaggctcaaatttggtggagaggtgtgtaggcagcgcactcctcctcaccaggagtcctgtcttgggatgtcttcatcaggcagtttgaaaggaggttctacccggtctccttccaagagaaaatgaagattgatttgtagtcctacaagcaagagaagaagtctatcatagagtatgaagtgggcttcagcaagatggtctgttttgtccctcatgtggcttataatgagatggagaaggcgagccagttccgtcagggtctgaaac

SEQ ID NO: 45721 - DNA, 463 bp, Zea Mays
tccaggccgagtgacttctgctactatgaatggcccttcccatagtggcgacgatttgtgccgtccctcccccgttagaattgggcggaggacgagatctctcactgcgaaggatcgatgccgtatggccttatcatgatagcgcctcagagtttgctcgtaccgagctgactgaatcaccgtattcaatcgttcttcttctagtatatcaacatcattcagtctagtagcctcagcttctgctatgttttcaaagattaatctcggtgccccaaacttgagatcagcgggtagtactgcctccgaaccatagaccatgaagaagggagtgtttccatgcaaaggtcagctgggttgagttcttaggctccagaccacatacgacaactctctgatccactttcctgcaaacttttcattcttgtcgaagactttctttctgagtgcttctagtatcattctg

SEQ ID NO: 45722 - DNA, 474 bp, Zea Mays
tttctaaaaaaaatcattagcaaaaatcagcttagcctcctgatatccaattaacacactcaaagcgctatccttttttctcacaataaaaggaatgttgatgatgcagaacaccagtacgaggtcatcactaggcctgaaagtatctcccttgcacccgaacaagtaaaaacaaacgcttaagcatccgctaagcagtcaattcctcttacgaacagcaccgtacaccaaacaactacagcttccggatcacaacaaccaaaggaaaggtcaaacaattaaatcctaaaattaccttaacatcagagcaaacaaaaccaaactacccgcactacagaacctaaacccactgacgagcaaaccgcgatcgacctaagacgcgtcttcgaaccgaaatctcgcaagatggccgagggcgttctcaccattggctcgcccttctggaagaggttgaacatacatgagcatcccggg

SEQ ID NO: 45723 - DNA, 597 bp, Zea Mays
tacatcatcctttaactcctcgtgagtttgaatgtgcctaggaaatgatgctagaagaatacaatctgcatgaagatatgactctacgcaagttatatgaaataaggaaaaaatggataccagcattttttaaaaatgacttctgtggggtaatggtgtcaacacaacgcggtgagaggatgaacagattagtgaagaaatcacatgtagatgcgaacacccctctgcatgagtttgctaaacaaatgatgaaaatgttgcatagcaggaaaattaaagaatcaaaggaggcattgatgagcaaggtatatggtgtttgttatcaataatcaatggcatacatgtttatgtaaatacgttatttaattatgatgttaacgtcttatagggaccaaggacaaccgatacgttgtataggttcgaagtgagagtctctagggcatacatcagagctgttatgaatagatttgaggaatcaatgaaatacgccactgcatacagaatattgaaggacacagacggttgtgataaagattggatcgtacaacatacaaaaagatctaataaaattgtgtggggacaacatcaattcaagat

SEQ ID NO: 45724 - DNA, 412 bp, Zea Mays
tgggaagctacaactagagctatgctatatctactcctaaggcatgaagataaatagtgtaaatagattggttcgattggattgtgtgtgttttcaatcgatcgtaccccttcatatacatagggtggaggtctggactcattcctatgtgatatccaatagattctcgtgagtttgttaggataaccatgcatgagataaaaactcaagcctgaattaatctgaacgcggatgatacgggctactcttgcagaccatttgaccttccaggtgccaaatttggcgttcaacagtgccactgtgaagtcatcctttctgcgataggtgctagggctgaccggtgcaagctgaagttgggtgaccctgctccaatagaacaatactacgtgagaataggtttccatgccatgta

SEQ ID NO: 45725 - DNA, 553 bp, Zea Mays
ccctgagctttcttgaagggtccaatcatgtccagtccccagcacgcaaatggccatgttacgggtatggtctgcagttgttgtgctagtaaatgctattgctttgacaagaattggcaagcttcacatctctgaactaactcggctgcatcactctttgctgtcggcaagtagaaaccagacctaaagactttcccaaccagagttctggatgctgcgtgtattccacactgtccgctcgactactaacgcggtgctcaccacgtgagtcatgcaggagatgtacaacagcagatcttctactggctgatctagcatggctcggtgtggcagctttagcataggtggcgtggtcaagaacttcttcagtgcatcgagagcttcctgtgcttctgtggtccactagaatttgtccaccttcttgagcaatttgtagaatggtaagcctttttctcctagccttgatacgaacttgcttaaagctgccatgcacccagtaagcctttgcactttcttctgtgatcgtggtgcttccattctcatgatagcctcg

SEQ ID NO: 45726 - DNA, 707 bp, Zea Mays
tgtcatcaatgaataccaccacaagcttgtcaagataatccatgaatacactgttcatcagattcatgaagaagcccggtgcatttgttaaaccaaaagacatcatagtgaactcatacaacccatacttggtaatgaatgccgtcttcggaatgtctgaaggtcgaatcctgagctgatgataacccgacctcagatcaatcttggagaacacactggctcctctcaactggtcgaacagatcttctattctgggaaaagggtacttgttcttgattgtgacctcattcaaagctcgataatcgatacacatccttttggtgccatctttcttctccacaaacaggacaggggcggcccaaggcgaggtgcttggccggatgtaacctttctctgacagctcatcaatctgcttcttaagttcaactaactctggcccagatatcctgtaagctctcttgaagataggggcggttccaggaagaagttctatggcaaactcaactttccgctctggcggcatacccggtaagtcctttggaaacacatctgggaactcggacacaaccttgatactctcagttgggtctgcttcactaccatcgacagccatctgataacaacttcctttcttcggttcaggcgggactaactcgatcaccgcttcctctcctagtggggacaccaacttgattgtcctcttatca

SEQ ID NO: 45727 - DNA, 473 bp, Zea Mays
cttggtgctcccgaggttgtggacttggttcaccattgtcttgagctggttgctattctcctttgttgatggtgaaccaaccaagctctgccttgatcatttcccttttggtgatcttggtgacacgatcaccctcatacgtcatcttgaggacgtcccgccaaatttccttcacgctcttcaacccttgtattttgttgtactcctcccgacacaatgaggtgaggagaatggtggttgcttatgcgttgaagcgtttgatttgggcggcctcattcgaatcatagtcctcatctccaacttgaggcacctgcatgctaaactcaataatatcccaaatacttttgtggagtgaagttagatggttcatcattttatcactccacattgaatagtctttaccatcaaaaagtggtggttcacctaatggaaccgaaatgagattggcatgtctaaaaatgtgagaataatga

SEQ ID NO: 45728 - DNA, 377 bp, Zea Mays
cttggacgcttactctggtttccaccaaatccggatggctaaggaggataggagtcataccgcttttgtgacagtagatggactatactgttatgttgtaatgccttacggtctgcgaaatgccttgccaacttttgttcgggcgatgagcaagaccttcggggacctgatctgggataaggtggagatttacgtcgatgacatcgtggtcaagactagggaagggtcggctatagtggaagacctgacccaggttttcgacaagctgcgggcaacccgcaccaagctgaacccggagaaatgcatcttcggtgtctccgcagggaagttgctggggttcctggtttcataccggggcattgaagctaaccgagaga

SEQ ID NO: 45729 - DNA, 755 bp, Zea Mays
gttctgccatttttccatggcagtgcatcctgtcgtttcctgatcccagatagaggaaaccatatcatgaaaatcatctctaattaaccagccttgctcaaatttaaacaaggtgtggttacccgtcgaagcagctactttgccatttagtaaaagtggcatgtgatccgaccgggttcgatcaagggcctctacagtaacatttggaaatttaatatcccattctggactcatcaacaccctatccaacttctcaaacgttggtgggtctaagtcatttgaccaggtgtactgtcgacccgccatttctatttcccttagctctagactctctatgaccgcattgaataaattaggccatcggtaattaaagttgttattatttttgtcttctggtcgtctcataatgttgaaatcacctcctatgataaaagggtgaggctccgtaccacacgctcttgccatttcagttaggaacatgctcttaagatcatcctatgctgggtcgtatgccgcaaaaagggcccaaatgaagccatcagttttatttctaaggcggaatatacagtaaaagtctccctcgtctatagctccaatatcaaatacgctaggatttacacctaagagcatacctcctgatctcccccttggtggcatagagtgccataagaaatcaactccaccactcaagtgtctcaaagttgaatccgagaagccacttctacccgtttccataatagcaatgaagttgagac

SEQ ID NO: 45730 - DNA, 539 bp, Zea Mays
attcgaacaactaacattagataaagtgtagcacagttaaccacaaaccaaacatgtccttagtctctctcaaaagatcctccttcgactctctagaatttccaaaaaaacaaaaaaatgttttattcactcaacatatgcggtgttcagtttcttcttcgtttggtcgtagcacaagttgttcgttctgaagcagaaggcagtggtgcctcagttgatttttttttttttaatctgggtcgtagcacaagtcaacaaccttctggacaagtatcctgtggtgggtaggatctctagaatttgtgcgagatacctctaggacaagcattcaagaaagtcctacaaatatcccatcaaatgtaccaactgtcagcactggggactgggggcacacagtagttaattgcccaagtaatcgattcttcagcagcacatctaattcttcaagtctacggtgtaagaaaaatgaaccaatatccattagtagttaatttttatgtagtgtttgatggttaacatgatcacggagactatttttt

SEQ ID NO: 45731 - DNA, 580 bp, Zea Mays
gcaaccatgatctaatctagtctattctagtcatacccaatcctatctaatttattatgatcaagcctattggaagtcactcaaataggattggttaatgctgagtaaatacattagaccctcctcctataaaccagtttgagatcttagatcaactcggccatactcctaattcacttaagcctaaattggtgacttaaatcgactcagccatacacaaacaacttgacctacataattggttatataactaatcccatctagcatatagctacctactaaaccctctacccatctgttgcctacagatctatcttaacctcttgtcccaaacctggatgaagacatcaagactcgagaagaaggagatcaaactcgttgaggaataataagaatcaagccatacttccaaaggaatcaagatccactatgcattatggagtccttccgtaccctactatgacctacccaagcctatccatgctttagagacattttttttcacctactcatttgtataaaaaaaatctcttgattttggtaccaactagaaactaaaagctatattacaaccaatctc

SEQ ID NO: 45732 - DNA, 418 bp, Zea Mays
gaagagtttgccctgatcgtttgattcgaacgagcggtggagatcaaatcgccgtctctaatgatctggaggggatcggtgccgttggatgaatagtgggcggtctagattagaaaggccatccccttcgtataatgagacttagaccgtcgattgtagatcggatgattgtaatcacgcgctagttcataataacgtggtcagatctgggacgtcgtttccgaatcctatggttgaggggagagcggatgacttgtccagggctaatctaatcagggcgccttgtttctgatcggacggccgagggatcacgatatcccttcgtcgagcctgttttgctaaatagaccctaggaatagaagtattcaacccaccgtccgctgttgttgttcactgagttgtggtaaaactaaggatt

SEQ ID NO: 45733 - DNA, 426 bp, Zea Mays
ggaaatttgatctgtgcacccaatgggtgcgcccaatggatgtgtacactgtcttgtctcaaaatagtaaccagaggtgatagggcgtaattatgtgcctaagcggttggttaactcctctctagtgccgtgttacgctacggggtggcagtgatgtgtagtttcctggaaatctacatggctcttgaaggcttgcaaccttttgtcgtacggatgggagccggaggggcacctcctggcttctttaaataggccactcgcttgtgatgttcttcttcacttgttctcagtctcctttcttactgcccctcttccattctaaaaaccccagtggcaggaggcaagagcggcaagggcaagcatgacaagaagagccagagcgacaagaggaatcgtcttccgacccctctgtcagacaacttcgat

SEQ ID NO: 45734 - DNA, 351 bp, Zea Mays
gggatgccaagcaaacctagtcatttggactttggaaagtccaccatctctgaagctgatcttccaaaaatggtgaagctgggctatcttagtgaggcaaaaaaggagctggttcgtttcggcggagaggaaactattccgaagccagaaaagaatgaggttgtggtgttcaaaagcttctttaaagctggcctaagattcccctgaatgagatgattgctattgtgttgaagaagtttggggtttaccttcatcagctgacccctaacgctattgttagattaagtgtttatatttgggcccttcgtagccagggagtggaaccgttcggtgaaggtttctgccaagtcc

SEQ ID NO: 45735 - DNA, 365 bp, Zea Mays
gggaattcgattcccatccctagttggtgccctcgtcttccacctcagtctcccactggaaaatgcaaactatttttcataccgctacaacagccccacattcttccgcactttctagcatagggtggccgacggtttggcagggcacggcggcctcaccggagaggtagggagcgggaccgcgagcgttgctagactattgcacactaaggggttccatcaaaacgaccggaggcagcaagtggtcggcgggccacgtaaggggatggagcagtaggcgtataaggtgaaaatttgatcattataactagttctgtattttttaggggtgcatctgcaccccctaaactcaatatagctttgcc

SEQ ID NO: 45736 - DNA, 602 bp, Zea Mays
agagcatgcacgacaaccaagaggagatacgcgcctagaaggtctagcacaatcaggtctagacgacgcctcatgcttcgtattatagtaactcatgggccctcctgtcggggtccagctcccttgtaacatgcccccttggactataaaatgaagggcacttgcgatacagggggaggactcaaacactcagacccacgacactcaaactctcaagcaatacaactcgcaatggatgtagggtattacgctctgatggcctgaatcgctctaaatccttgtgttcttgtgttcatccattcgatcaggcaaacctctagaccccctcctcatcttaggataagggcgagtgcactatgtcacccggacataggatttcacctccgacagggacctatgcgagagagagagagagagagagtaggggagtgagaaagacaacaaccttatctcaaaatgattgaatcaattgaatggccaagagagggaaaaggaaggaaaatgagaaatgaatttattcaacactatctggtgattgttggtgtgcaggagggctccacctcgaaaattctagtcacataggcttgaaaattccaaatgca

SEQ ID NO: 45737 - DNA, 358 bp, Zea Mays
cggggtgcatggagaattttgaaaggtgagcttcatccaatattttctttctgagctcagggttcttggggacaaccagtcggtctccaaaccatagaattcctttgctgtcctgacggaagcatttgtatttttctgctttctgttcaaccatttccttgataaccttaacacccttgtcacccatctgtgccatgactatctgttcttgtaaagtgggctccactgagatataactcaaggcaccggaggaaacaacttctattttcaacttgcacaactcatcacatagggtggtgatttttgcatccatattcatacaattgcactgggccttcctgcttaaggcatctgccac

SEQ ID NO: 45738 - DNA, 882 bp, Zea Mays
ctccccctgatgcaagcaaatttctaagtcgtcgcataccaatgtccttaacacatttttgaaatgtagaataaggtagcgacttagtgaataagtctgcgagattatcacaagacttagtttgcatgacactaatctcaccattttgttgaagttgatgaggatagaataacttgggggagatgtttggtaacattgctcttgatataaccttgttgcatctgagcaatacaagcaccattatcttcatagataatggtgggtgattcaatggaatgaatcccacatgatgattgaatgtgattaatcactcttcgaagccagacacattcacgtgaggcttcatacaaggcaacaatctctgaatgattagtggatgttattactagagtttacttggaagacttccaagaaatagcagttccaccattcagaaatacaaatccagtttgaggccttccattgtgggggtccaaaagataaccaacatctgtgtaccctacgaggctaggatcttgatttctttcgtagaatagaccaagatttgtcgtgccatgtagatatcgaagaacattcttgattccagtccaatggcgtttggtaggagatgcactatgtctagcaagtaaatttactgcaaaaacaatatcaggttttgtattgtttgctaggtacataagtgctccaattgcactaagatatgggtacttaggacccaaaatctcttctccgtcgtcacgtggtcgaaatggatcattatccttttctagggcatgaactatcattggagttttagatggatatgcttggtccatattgaatttactcaatactttctgggtataaacaaattgatgaacgagaatgcccgttggaaggtgc

SEQ ID NO: 45739 - DNA, 513 bp, Zea Mays
atagaccagagcggcggatggaaaaagatgaggggtaggggcggcggacggataggattaggagatatttttctttttctttttaattttatttaaccaaaaaatcacagatttttggatcctaattgtcttagcgatgtatacgatgtagacagtaattgtgacacggtttaatttgatttaaacccgataaatctttaacggctcagatttgaacgttatcgtgatagttcagatcgtattaaattaatctgaaaccaaacaaaaatctgttcgctatccgggcagttggatcagggtgtaaaacaattggaccaagccaaagaacatcggctttgtatatggagatggggtttgatttagttgaaatcagacgaaaatgtatctgtcctccgaacaccattaatttctttgctgaggacagcgcactcggtcgggtttgtttcggaccaaaaaccgttgtcgttgagttctaattattttgcttgagatgaaatcggagaactgagctga

SEQ ID NO: 45740 - DNA, 1130 bp, Zea Mays
tttcaatcaacaaagatctcgaatctaagctaaaagatgcctctacactgctcgtgaagttgcaagatgaattttctagttatttgaaaggggaaagtgtagatggagatgcggagagaccaatggttattaccaagttgaaactagcaagtgctaggaaggagcttgaggacatgagggaggacataaaaaaggccaaggatgatgccaggatattttggaatgatgctgctacattacgagttgaaatagagagggaggaggcagatctactagcattgaaacacaaagagcacctcgcttcgctttctgtgtcatctctccaagaagagcaaagcaacatgacatatgagctcaacattgtccatgaaagaaagaaagctgctaagatgccaacagagctacaacaagcaactgaagcaatggaacaagcacaaactaaggctcagatggcacgttatgaggttgcaaaagctagggaagaggtggatcaagtgaagtcccaatttaatgttgtcaaactgaggctagaagcagcgtcaagggagatacttgcagtgaacgcatctaaagaaattgcaaatgcctcagcaaatgcattgcaagaatacaacgatgatggacaaatagagccccaagatgaacgaataagcaataactatatgatgttatcacttgaggagtacaatgccttaagtaagaaagcccaagatgctgaaggcctcgctaagaagcaggtcatcaaggccgttgaaaaaataaaagaagctaaggatgcagaggtgagaagcttgaatcagctggagcagtcgatcaagaagaccaatgagaggaagttggagctgagggctgcacaggagaaagccaattcagcgcaatatggaaagctcaccatggagaatgaactacggaagaggagggccaacgatgagcagcaaagtaaagcgaatgagtcggacgttcatgacatccccaattttaagagtacatcgctttcttttgatgcatcatcatcaacatccaatcctcacatggttggaacattgtctagagctgacactatagcagcaactagggtgaaggagccaaagccacggaagtcaatctttccacggtccttagtggccctg

SEQ ID NO: 45741 - DNA, 415 bp, Zea Mays
aggcccaaattgccatcagtaatgggtggattcgacacgaaaagggtgaaggctttggaaggaggcaagttccaggacgaatacgccaatggagcaccaacatttgacaccttgcccctgaggatcatttcaagtcggctcaccaagtctgcagaaggaattctcctgtcggtaacctgagttgagtcggctagccctcgatacagataagctggataggccctgtctttcagtggctgaatattcttgaaaacaaagtcagtaaccacagcttcagcagtcagacccctctctttcagcagtccaacttcagctagcaacacacctgcctcagctacctcttgatctgtgggagactcggtccagcttggggtgcgaacgtccggctgtcttcccgaccgggaggggagagaat

SEQ ID NO: 45742 - DNA, 1192 bp, Zea Mays
cattgaaagcagccgatttcaccacaacatcatcaatgtagatttctaatacaatgcccaaaagatcatgaaaaataaggttcatggcccgttgatatgttgcaccagcattctttaatccaaatgtcatcacaacccattcaaacaaccccacaaaaccagggcagcgaaaggctgtcttagatacgtcctcttcggccataaaaatctggttataccctgcattaccgtccaaaaaactaatgattttattccccgaagcctgattaacaagttcatcggctataggcattgggtattcatctttcggggttgccctgtttagatccctaaaatccacacaaatcctgattttccctgtattcttcttctcaaccggcactatattggagatccactccgcatacctgcatggccttatgaaatttgcttttaacagccgatcaacttcttccttaactctatcatggatgtcgtggttaaatcgtctaggtggctgcttatgtggcctaaacccatgcttaattggtagcctatgctcaaccaactccctactcagccctggcatttcagtataatcccatgcaaaacagtctctaaactctctaagtaaagcacataccttttgcctctgatcagctattaatttagcactgacaaatgttggcctaggcacctctccgtctccaatgtccacttcctctagcttatcaacagatgagaacccctgtcctaactttccaagatcatcaaaatcatccaccacctcacccatatcgtttttgtttaaacgatattcatctgtcctctcctgtaaccattttaaactattgtgttcattcatttataacgctgagtcattgagccgtgctatgtcagccggctttacatgaataggcacaaaactgtctcgctctacactgataaaatcatatcctgacaaatctcttcctgtcaaacacctcatattaccatgctgccattccattggcgtttccatgagtgcgatacacatagcggtgtctgcttcaatcacctccacctgatcacctacccattgaaccaaaaactgatgcaaagtagatggcacacaaccatttagcatgtatccaatctcgccctagcaaaacattatacctccctttcacatcccaccacgaaaaaaggccgttgggacagttttgctgcccac

SEQ ID NO: 45743 - DNA, 473 bp, Zea Mays
gggagcgtcattgttcggaagacagcgccatgtgacgtgagcgtgcaactgtctcctggtctggccttctttaatttcctctctcgtcacctccaacgccacggcgcccacaagaacactgaacatgacactagagatctcgccttttacgatgagggtactgagcacagttgctagccaatttgagcgcacgaacttttatgttcttcgatcgttgccggtccagggaccaccgctattttttctccttctcttttggtgaacacgtagactcggagtgaagtgatccatggatgcatgtattttccaccaccttttttgctttttaattttagctgtggctgcaacgcaaagcagctggaggaatctaaaccagtgggtgaccgggttgaagaatcggaaagaaagaaaggaaggaactgcatgcgaagacaccgctgattgctcgcaagtctctcgaccattcgctcttc

SEQ ID NO: 45744 - DNA, 506 bp, Zea Mays
gtcgtgttcctgcgcttcatcaatccgggtaagatgccctcttcgaaattctcccttgtctccgttacgatttgagctcgttaccgttcaatttcgtgcacctggggctcggtaatcactcgccgttaccggggatccgtgcctcactatggctaggcgggttatcgcaacaatccacggtgtatcacccctctatccggttcgcgttcgactgaacttcgtgtagcacctcttgaatcaaggttggggtcgtcgggtgatggatggagcgaccccgacaatggcgtcgccgcactcatggccatggtcggccgcccgtgtctgtaggaaggggacatgcacaagccatccgatcaaatctggacgattgtgatttgatcggctcctactgcctcggggtagggatcctgtgcgttagatcacgatcgtgcggtttgcgtcgttcgcgggtttataatgcgcttagtctaatctgagccatcgggcgccgatccaacggttctgat

SEQ ID NO: 45745 - DNA, 537 bp, Zea Mays
tgggacgaatttaaattggcatttcgtgatcactacattccagaaggagtgctgcacatgaagcaggaagaattcatgagactcaagcaaggcggagatactgttatgtagtatctcaacaaattcaatcatttgtcccagtaagcaattgaccaggtcaatactgacctgaaaaagaggaattgttttatgagaggccttaatgaccggctacaacaaaagatggccacctgcctcgatctctcctacagcagggctgtcagcacagcgctggcagttgaagcaaagaacacaggccaagggaagtcaaagggcttcggaggtgacaggtccaactaggggcctgaaaagcgacaaaggttggtaatccgacctttcagtcaaaaccgttcttcacctcgttcaccctcctaccccttcaaacagcctgtattcatctgccctgccagtgcccccacttcaacaactcagtcgagtgcccctggtgctcgtttccccgccctcccgagttcttcaaccggctgcttcaattgtggg

SEQ ID NO: 45746 - DNA, 516 bp, Zea Mays
aacgcgacaaggaggaggcagaactgctgcgacaactcgccgaacggtgaaagacaacggaaaagtacctatcacacttcacggtggactgccaccagaagatcatccgtcaaggggagatcgatatgaaatctctcctacctccgcttcaggctcctgttgtaaatactcttgatctatctcttatagctttcatagaacagcgaggagatcagttaaagcaatatgtagtcgaatctattaaaagctgtatgcgttcatacgagaaatcactgccctagtcttcctttgcatgagtctaatgcggggccacccgcgccaaaaacatcggctacaaatgggtcactcttggcccagacacccagccatcatatggtatgccgatgcacacgttcgtgtcaccatcacagccaccgtcaccaggcacacatcaggccctggacatagtcggaccatccgagagtcttcttggacagtccagctacgtcgcggaccgtctgacgtatttcaccagac

SEQ ID NO: 45747 - DNA, 606 bp, Zea Mays
ggccgccttacattgaaccggtcgtgatacctgaatttggcgaaggggcttcttcagctaccgagacaaaagaaactgtttcgtctgtgcagagcactgaagagccggctgtaatgccgaagttactttcagtcaatctagttgagacgaaggttgataaggctgaaaggccaaaaattggagaaataaccaaaatgccagagattttgagccctccaacggaggcaacagtgccaaaggtacaaaagggttttgccacaacacctaagaggagaaggatggcgaatgtgctggatgttgtgttagaaacaactaaaaccttgagtcctgctcctccaagtaaagttgtcgaagcttccaaggcgcaacccgaagctgattctaagcaagcataaatcgaagctgcaacaattcaagctgaaactgaagctggaccttcaatgcccaccgagatggagcatgttgaccctaaggaaaaatcaacagagcggattgcaactgaaaaaatcgaagctcctggtcccgaagcgtcaaacaaaagtattgactacattattcgtcatgcttcgggaaaggtactatcccaagaagagatgttagaagcgc

SEQ ID NO: 45748 - DNA, 473 bp, Zea Mays
gttgggagatgaaacagtacagacttttgaatgggctttcaattcattcaaaacatgtatgggatgcgagggtccaagagttatgcttacaagtatgtgatatatcaatttgttatgcaaaatagtgaattaatttattgtgaaaataaatgaataatttgtgagcaattgcagatcaagatcctgcaatgccaattgctctaagaactgtatttccaaaaacagttcacagactgtgtttatggcatgtactgaacagatttatgccattcctaaatgagatatatgcaaggtttgctgttaaggattttaaaacaacattccagtctattatacatcatccattaactcctcatgaatttgaatgtgcctgggaaatgatgctagaggagttcaatcttcatgaagatatgactctacgcaaattatatgaaataagaaaagaatggatacctgcattttttaaaaacgac

SEQ ID NO: 45749 - DNA, 1077 bp, Zea Mays
gtcacctttaaacgtgaaaacttcgtatgcagccaaattggatttccagtgcacaaacaacattgtggaatacaaagctctactactgggaccgaggaagattaaagctatgggagttaaaaaggcaatcctcaaatctaattcccaagtgatcacatgccacgttgataaaagcagtaaggccaagagcccgacattggaaaagtatcttgacataatgcgaataatggagagctcctttgaaggcttctccataaaaaaatatactaagggcagacagcgaacatgatgatatgttagccaagtcagtggcttaggggatctccctacctcccgaagtttgctttgaaattctgaaggcaccttcggtagagttaattaatggaaaaagcaaccctaacattttctgctactcatagcaaagattggaggatagaaatcataaactttattcaagggaactacttagttgatgacgaggtatatatcaaaagaatgcaagccataacaagaccatacaagataatagaagtggaactgtttaaaggtgtttgctcgcccctccttaagtgtctctctagagacaaatgacaagagttgatgaaagacatccactctagtatctgtgggggtaaccttacaagtttgaacttattcacatcattgttgagcttcgacattcccaaccgcttaatattgggaagaacctgttggcaaggtactattgaaccaagtctcgtgtaccaatttgctcagcaacaaccctgaaatggactttggctatttgagccagagagcctatcttcatgtagcagagaggcctcgttatgtcgaagtttaatctcatcaggctcattactatgtttttaaccttctctctatctttacaatcagctttcatgtagaaccattcactagtccaaccagtcagccactttgtatggtatccatatataggggcctttgtatcttttctatatgcaaaattatagcatccaaagttcttgtgaagaccgtctgaccttgccttcgtctggtaatgtaactcgtgaaccctacagaaaccctcgaaattcg

SEQ ID NO: 45750 - DNA, 755 bp, Zea Mays
cttttaaccaagctagaaattcagagaagcaagacactgcagcaaagagaatcataacgaaaaacatataatgcactcatatgcatgagtttgcacaagacacacaattccatggccttaattcttatacctcccataagttagcatgctatgaccaattagagacgcagaggatatcaggatcacattgtgctcccacaaaggtatgacccaaaaccttgtagcaaaaacacatgaatagatatgttctgagaaagttatctccatttttcctttttggcctacaaacctgcaacaagtgtattactgagttacactcatttgcatctctggaaaatgatctataagtttgaaaattgaaaataaatatgatgtcaaaattaaccatccagattccccttaaaaatgtgtgaaatcttatctccagcagactccctatcccacttcatattttactccctatttcaatctctaccctgaaacagtgcaatctatagtgcgaaacgatactttgcacggccgtttaagatggcttggtctataaactgactagagcaagtgttgtgcagagttacacctgtgtgcagctctgagaaatgattaacgaatatccatcattcaaaatgaacagctgaaccaacacttacattcctaatgtaaacaaaaaaatccccacatattatgcctcttattaattcaatcatatcgttcgaatatgccaatgtcacataaatttcatcaggatacaagtcctc

SEQ ID NO: 45751 - DNA, 351 bp, Zea Mays
ccacggattgtcctcggtttgtgtcgtcaccgtcgatagagcgatttagagttagaactctgtaattgatggaggggaaatggttattaggggttaaatttggtgtcaaccacacaagagcaccaatagttgagttatccggccggtataggctcgccagagttcctcctccgccgtccacggtcgtggacttcaccttgtgaagaaatagaaaaggggatggtctatttgcatttgtcagtgctcaaagaaatagtgttacggactctttataggtttctcaaatacccagggttctctgtgcaaactgaccacagcatgcgcgcgcgcgagcatgtttgcatgttcacg

SEQ ID NO: 45752 - DNA, 445 bp, Zea Mays
acgttctttacacagatacctgtagtggtggaagttgtagtctttctaggtggttggataagtgttggtcgttttgttggtattattgatagggttgatagatttcttggtaagggtggtgaacttgagattggaaggtgtgagttatggcctttggtagctgatatgggtgacccctcgttacccttttagcttccattctctctttggtttccttggtggcgcggcagtccctggttgagtggcttgcgtcttcatcgtgaaaaacataatagggcttgcgatcacgactaggaccgcgtctgcgccccttgcccctgggtgccctaccacctcttcctagttgctggctgtggtcatagttatgaggggtcctcaaattgctggtagtggatgacgttgttgacttgctagttaggcgccaagggctactatcctcttgacc

SEQ ID NO: 45753 - DNA, 555 bp, Zea Mays
agcatatgtttgaatgtatgtgtggaaataagggggatagcatttcccgccaaccttatagtaatgggtactcagggaatagatgtcatcctagggatgaattggctagataagtatcaggaagttatcagttgtgataaaaggacaatcaagttggtgtccccactaggagaggaagtggtgaccgagttagtcccgcctgagccaaagaaaggaagttgttatcagatagctgttgatagcagtgaagcagacccaatcgagagtatcaaggttgtgttcgaattcccagatgtgtttccaaaggacttaccgggtatgccaccagagcggaaagttgagttcgccatagagcttcttcctggaaccgcccccatctttaagagagcttacagaatatccggaccagagttggttgaacttaaggagcagattgatgagctgtcagagaaaggttacatccggccaagcacctcgccttgggccgctcctgtcttgtttgtggaaaagaaagatggcactaagaggatgtgtatcgattatcgagctctgaat

SEQ ID NO: 45754 - DNA, 329 bp, Zea Mays
caagggtgcggtaagtaaaacaccgctctcaaattgagatagaagattggagattttagataacagacataatgtaatcacaaggtaggatagagtgttgagaagggtaaagtaaataacaaacaaaaacacaacaaatgatagagttaaaaactcgcaggtgacaaagaagaggacacgaccaagggaaaagtgggcaaagtacaatgcttagattgagatggaaaagagaatatcttaaaggccggtataagataaacatcaaggtaagatatagaggtgataaggataaaggtggtaatgatgaaaagcataatccatggacaaag

SEQ ID NO: 45755 - DNA, 311 bp, Zea Mays
ggggcttaggcggtggcgtgcaatttggccgagcaatgctggcgggcggagatagagaagaaccttggcgcagtggattcgtgtctactgtcgtggcgacttcaccggcgaccaacggggagctagagtgagtcacggtgatgcggtagaccggtagagacacgcggtggacggcggtgagggcttaatagtggtgagaaccttatccgaaggatcagtgctcaagggagaggcacggcggttagccggagtggcgtccagcgcacggggtgatgatcttttaccccgcgatgctatccatcaactcccgg

SEQ ID NO: 45756 - DNA, 453 bp, Zea Mays
agtcctcggcggtttgaaaatctagcaaggaacccgcgtactattttcttgggtcactgacaaatgcaaataagccctcacacttctatttcttcacaccccgaggtcaacgacggggagcggcggaggaccgagctccggcgagcctacaccggccggatcactcaactaccggtgctcccgtgcagcagacaccaaattgaacccttaacaaacatttcccctcgcttaattccaccattcgtgttcccaaactctctgctcacggtgtcagtgcaatacaagaacaacaccaagtgttcccggcgatttaataggttctagcttaatcggctgggtcggggagcatcagggacacacaaggatattgaaacgaaagagcagggggcatgagcggacctggtgcacgctgaccacggcgaggtcacaaggcgcggtatttcacactaaatt

SEQ ID NO: 45757 - DNA, 416 bp, Zea Mays
tgcttaagcatttttaagaataaggttagctgttagtgtttttttccacttcatagtgtgtgcttgtatgagggtatgtgtttcctgctgttcggttcattttagaaagtagtactaagtttatgtcaacaactattgtgtgtctattactatatggttacgtagttcaattctagttgcagaaatatgttgtaagttgaagcatttgaaaccatgaacacaacatttgttcacgtcaaccatgaatacaacatctgttcatagtcatgcaacacacaccaatgaaccaagaacaaaaaacaaaattaacaccatgttcggtacaacaagcattgtatttgattattacacaatgaaaacaaaatgtcaagttcctcgctcaaacaaatgtgtagtttgatcacaaaaacttgttc

SEQ ID NO: 45758 - DNA, 399 bp, Zea Mays
gcagagttttgtgtggagggcaagttatgcttcgggcgagacaaagtttgcgtccgagggctagtatgtgttcctgacgtattacatgtcactaatagtttgttgaagccttgtcatgtggaccagattttgtcataaaatcatgcgtacctgtgatgtggagttgatgtggtaaatggttatgacgtttatcaatatgacatggcacttttcaatgccaaattttattgtcgttgttaataaaataacccatcctagtggtgagccaaatttgtggcctcattaaatctaatttataattttctatgaataccatttcatattatcaaaatatatagcccattttttgagcaatctcattcaactgtacagatgttcacatgatatatttcataaaat

SEQ ID NO: 45759 - DNA, 772 bp, Zea Mays
tcttggccacccaggtgccgtaggtccaaatctgtgtcctctgaagccttaccagtggatacttcggctatgtctttctcgggagccacatcagatataagcctgtcaatctctgacattatggtcctaaggttttcaacttcaggtctagcttcattagcttcagcttcgacaatatcttcggcattagcaggcacaacaattttttccgccgaagctgagggcggggtcttttggatggcttgcatcacgtcaatcattcgccatttcttttgacccccagcgtttccctcggtagccaaagtagtctcctttcttcccgagctttgtccaagtcccttctcctttgactgcaataagctagtcacatccgactccaggggacttagcattgcaaacgggaagggttcagtcattacctttagtatctctgaaacatcgatagaggaggacaaagaagggcccataggttttcctggtacatcttgtaccttcatctccgtagcagccatcctgactggttttcgttttctaggagttgaatccttcggctcttctagagttttctacttcttaacaaccctttgatcttctttgatgaccggatggcctgcctattcaaaatactcacaaccctctttctttttgccccccggccccttcgtcaagtctgtcgtaatctgggtattcaaagtttagagcatccatcacccgattcaaccttcgtttttcatgggtgccgaaggcagctgtcatcaactgatcttctttc

SEQ ID NO: 45760 - DNA, 598 bp, Zea Mays
tagttaaggaagaggctattgaaatggattagagaaattcaataaactggatatggcataattcacgggtaaaaatcaaactcgaccctgtttttgaacacacacacacgaatagcaatagcaatggatctgtatctaatggtacacccacctatatccatatcctttaatatttttttgcacccataaaaaacccatatccttgtgcagatacaattttgtgcccatattcattctaatggtgataagtttgtggccaacaaatgtgcatatgaccatacaaaatactgatttgtattatagagtgtactgtttataagtggagtttgaagttagagatggatgagtaaggctgttagagatagtctaagggcatgcccgaaaaaaatgtaacacttgtattaaactttgactatatgaaagtaatagaacgaaaaatctgtaataagtgcaatagaaaaatgatatttatgccacacctaatatgacgctatgtctgctagttaggccatgttgtaaagtcctttaggttgggagatggcttctaattatagatgcatattaggtataaatatatgtatggttttatgggtttggg

SEQ ID NO: 45761 - DNA, 448 bp, Zea Mays
ccttgcctcctcgctattaggttggactccacatcgctacacatttgttaaaccacctctccacaaaaaccctctcgcaccctaacctcttttttgctccccatggcacctcgccttcctacgagcacctttgggcatttggccacacctactaccccaacctattcgccaccactccccacaaactcgcccctcgctccacactatgtctttcttggctactccaatcacaacggataccgatgtattgatctcccttccaaccacatcgtgatctctctccatgtcgtgtttgatgataatagtttctcgttctctcgagtacagtctcccactaatgagcttaatttttttctctgtgatggactttgtggttgacattggcccacctccccctataggtactcggtctccttcatttgatgtcacgccatgcacaaccactatg

SEQ ID NO: 45762 - DNA, 601 bp, Zea Mays
atcttagttatatattgctcaaccagatgttggcaaattgctatttgttgctgaatgacatggagcagactttaagataaatgactagtacattagcaacacgaagttgcgagtacatcgaaaggtaattctgagaaatttttcacaatgtttgtgtgaaaaaccattgtgtgttcccgtcgaaccagtttactcatcctatctaggacctctatgcttgtgttgcatacatttctcagaattgtaaatacttatagtagttgaattgacttggaatagtcctttgactggtatggtatacagtaagccaaatggtaaaggttagtactgaatggaaataaaattgggatttatgtagcaaaactacatttgattccaccctttgacatgcttaacataatctatctctgatctaccagaagtaagaaagtagaaaaataaccatgaaatcccacattaccacaaagcttgaagctaaataggcattaatatgtcattggtccttggcgccggaagatccgtaattcttgaccactaagctattggtgatggtaatttgtgataaaaatatgaagatcttatggaaaccagatgtattctc

SEQ ID NO: 45763 - DNA, 1307 bp, Zea Mays
ttggagattctccgggttgaagcaccaggctctgactacaaacgaagatagctcttgcttggacatagtatcagggtgcacttcagcgatcaaacaggaatcattcagtatactcttcaccgtagacagaaaccaagcatgttctgggatccctcttatctctatgtctaccagccctgacatgattgaagatgaggcatgtgaacatcgtgtccaacgcttgaaaatcagactaaatcgaggtcctctcaaaatcttgccaacattaagcacccttgttgtcgtagcttcgtcaggtagaaacagaagaaaatcttctggcttggtttgatgaatcttcatatcctcggtcttgatgttgaaactgtgagcaacttcctcgatcacctcagaatcagtcacagttggcctggttcccactattgtaacgaagagagccctcctgagatttgcctcttctcgtgccatgtcagcactgaactcaagaatacaggatgaccttgtcccccaacccatctctccctgatcaccaggcctcggatcaggggactggctaatcatcggagctatggcttcatcagacgaggtcagagacgcctgaccaggggcaacgataggcttctttgaacctttttcgtgcttcggccgtcttctctttcttttgttgcggaggcatctatgagactccccctcagcagccatcctaggggaatcctccatcttcgcaacaacctctggtgtgttgatcttaacccacaccaagcgtcgcctacgggggacagcacacgccgaggttgctgacgaggccccgcgctgcaccgagaggcgctgccacacagacccccttgcttgttgtttttccaatctctgccacactgtcttcttgctctgcacttctcgacggcctggacacctgacagcctgatgtccagtcttgaaacacttgaaacagcgcgtgggtcgacggcagacagcagcaaagtggtcggaggagaagcagttgaaacaccgaccccgaagatccacaggggactctcgacgaggccgatgatcacctcgacacctcctcttactctggaccacttgccaaccgtcgtcgtcacaccgaggggcagcccgccgactttgcacctccggttggatatcagtcaccaccttcacgcttggcgccaggggaggagccgcaggacgcgaggggcaggctaacagagcctccctatatgacggaggcgcccaccaagaatcaccagacgatgaattcgggctagaatcactccatcgttgagccttcaggcggcccacctggg

SEQ ID NO: 45764 - DNA, 283 bp, Zea Mays
gaggaaggctaccagcccacacctcaggaggaggactggatcaagagatcagggatctggaagccatccatcagcaggtgcaaaagaagagggaaaagatgctttggctcgccgacctctagaggaagatcaatgaagctgccgaagaaatgcgtcacctcactcaggatgaccaagaccgaacgccccaacacgaggagcttcgctaagaaaatccatttaatgatgatgaatggtacggtgcctttcatcatggcaattttgcttttgatgatgcttttcc

SEQ ID NO: 45765 - DNA, 491 bp, Zea Mays
cacgctaggccagagccacgtgatagacctatctctctacaaaggagtaccgaagtaaatgtttatgtaattgctcttatttgtcattcacttatatatataaaggtgtcttataggtctctatggcatgtccgaaggaagaggaagaggtgcggcgccatgaggaataggttgcggccatagatgcaggggtgcaggggcatgaggaggaggtcgtggccactgatgctgaggaacaggcgaatgacgagaccatcaaggcttctgcctttcgaccgaggggcactcggaaaggccactttgtcctccctccctcaacgcctacacagtcagaacctcgtgtactgatcatcctagttggtgataggtactcaaatttggccatttatgttcttacatatttctttattttactatacattgtgtataatacatgaatttcttgttttttgtcatgcaaccaatgggatgacacatcttttgatggccga

SEQ ID NO: 45766 - DNA, 427 bp, Zea Mays
gctcaacgaagtactgattgttgctcggggtagtaaatatcgtcgtgtggatgaacttgagccactgttcactccggccgtcgtgtccgcctagctcacaaccgattcggatgaactcaccggagttagccactcaacgatcgtgcgccacgtgccttggtgtcttaccacgttgcggtagctcatattacacatatccggtgatcgccggtaagcccgccatggtgaaagccaccaatctcttgcgacagtgctcttttctttgtccgaccgccaccgcgccatctcaaattcacgggccaccgctcggggatcctataaattgagcatgtcgtcggttccgcaaggtagtcaagcacccaatccatcaacttgtgccttcaattgttcaccagagcccccgaattgctcacttcccccaaatcgg

SEQ ID NO: 45767 - DNA, 977 bp, Zea Mays
gtgggaggctccttggtcagggaggcggtcagggagtcgatccgactcatgatcaactaggtgaagggacggacttcatcctcgatggcatctagatcctcattgcttctaccggcggcataaccctcggcgatgatggtggcatcgatttcatcaaagtgagaaaccatttagctaagggcgatgccaccaactcggcaaacaacttcagcaacagatcgctccacatggtcgggtagctcccatagaagatcagccaggagcgcttcagtcgatggtggaggagagaggtgggaacacaccatgctagcaactaggaataactcatggagttcagagctcctctccgaatgaagggagttcgctcggcatcccacgataatgacatttttgtaagctagtgaaagcttgcatgctttgtcaacggtcgccacctacacctcgtttgccacggtcttcacatcttgtgccagagcaagcatcttgtggagctctgtgggagaaaaggcatgaaccgaccaggggcgacagatgatcaaggcgcaaagaataaggaaggaagtggaccttcagtcgtgtcacactcccttgcaagctccaagcccacctgatccaagaaaacctccaccttccgcgaggatgatctagccagctcggcacgacccttcgctccacagagcgtctccccgagtcaagaactttcatccagaggtgatccacatcgctgcaagcactgtcgcactccacgcgcaaagatgaaacctcgccttggagacatgggattttggagcggaggtcaacaagctcatgctcttcctccttagcgcaggcggcactcgcccaaagctgccctacctccacctaagctgatcgcagcgcctccacccgagcctctgctcgagcaagaagttgctggagaagggagccatacaagcaatccagatgaacaaaagatcatgtgaagagcaaatacaaaa

SEQ ID NO: 45768 - DNA, 1112 bp, Zea Mays
tacataaaccccaggtatgtgtccattcaggaccgacctttaccatttagcttacagtgtataccaaattgtcaaaggactatcccaagtcaattctgtgactataagtatttacaattccgagagatgtatgcgacacaagcatagaggtcctagatagaacgagtaaagtggttcgacgggaacacactatggttttcacaccaacatagtgaaaaaattctcagaataacctttcgatgtactcgcaacttcgtgttgctagggtactagccatttatctcaaagttcgcttcatgtcgttcaacgacaaagagagcaacgtgtcaacatctggttgagcaatgtataactgagatttatagccttaaatcatttggtaagattttattgcttactaataaaatcccaatttgtgatgtcttttatgccaaaaaaactttttcatgcattaatattgaatttcttcaggttacttcgggtaaaactttatgcatgaggagagagagcacggaattaacttatgtgtgttttattgtaattcaatttaatttcccagatttccaagcactatagagcttgatatagttgttatggccacttggcgatatataaatatgatgccacacaacacagtcaaataaaatataaagtcaaataaaattgtttacgaaggttgcacataatatgactttaggggcttgaacaattcacgcgagtacaagctctagtgtatatggcgtcaacacatgtgcggccatcagggctacgacaacaaataagtcttcgcaacaagcgcaacagacgcaattgtggctcggtagttggggtacaggataagtccacgcaacatgcacaacaggtgcaattgtggctcgatgatcacgacagacggatagtgcctacagggctacgaaaaatgcgcgacccggcgatggcggtccgactcaacgggagcggtccgattaaacgagagtgcaacatagcaatcacatgacgcaaccaagttcgtacgacacaaatactgtgtcgtgttgccagggcgcaaccaatgcttagccaatgtcaaaactcatctgattaataatttagtctgatcggcatatccggat

SEQ ID NO: 45769 - DNA, 382 bp, Zea Mays
tggtgtattcacggtaagttcccatgcccagtttgcaaggaagctcttatgttcattttgttgaagaagggtggcaaatattccgcgttcgataaacatatataattcctccctcctgaccatgcattccgactagacattaagaactttacgaaaggtgtcgtagtgacatactgtccacctgcaatgatgacttgtgccgaagtttgtcaacagatagatggtctcgtggtcaatcgagaaggtggttttgtgggatatggtgagcaacatatgtggacccataagtcggtcttgactcagctcccctattatgatggcctacttccacacaacattgatgtgatgcacactgaaaagaatgtcgtcgaggcactttggg

SEQ ID NO: 45770 - DNA, 1348 bp, Zea Mays
ggggtatccatacatcgtcgtctttgttgctaaggcatttttcgacaacattgttaggcttcacagcgtcctgtgcttcattgtcagagatcgcgatcctgtcttcacccatatattatagacggaattgttcactctccggcatgcaactacacctcggtacggctttccacctctaaagtgatggtcagtcagagtgaccaataggatcttgggcgtctacttgcgctgcttggacggtgattagcctacaagttagctgcgctggctaccatgggcagaacactgctacaaaacacctctttctagattgctcttcgttccacaccattcaatgtggtctgcggtcgcaatccatcaacactgctctcccacaaccaagggcagtccaaggtggctgctgttgaccaacagctccaggagtgtgacgaatttctgcttgaaattcgtgatagattgttgcatgcctagattatgaaaggcaattacgacacccatcatcacgccgtggagatctaggtaggctaatgggtttggctgcgtcttcaacaccgtcttgcagcatcactgagtgataacgcttaggacaagctggctcccaaatactatgggcccttccaagtgcttgagtgcattgggcctatcgcctacaagcttgctctgccaccacatgcccgcatccataatgtcttccatgtggttttctccaaaaaattccagcgacagccgccaacagagtgtcatctcggccagtaacgattctgtgtgctcgcctcaaccgtggagtttggaaggtattggtcagctggatgggctaatctactgctgacgctacatgggagcaactcactgagctcaaggacgcgtcctcttcgtttcagctcgaggacgagctgtttcataatgcgagggaagtgttacgggttcttttattaggaggatctaccaatgctaacctaggccagaaaagacctaaaccagcaccgcagcccctgctgcaccaggagaactgacacctggaaaccagctgccgctgggggcttagagataagaataaagaatatagcaacgaaaatatgttgggatagggataagtagcagtttagagataagaatagaaatggaaatctgttgggataaggataagcattaacagtttagagataagaataatctgctgggatagggataagtattatcagtttgttgctcccaatagatttggctggcgcctgaggactataaaatcaagggcgcagcaccttgtatcagcagaaaagaaactcttggtcttagagaaggtgcaggagctcctcctcacctcctatctactgtaatcttctcccag

SEQ ID NO: 45771 - DNA, 691 bp, Zea Mays
aatcgttgacagaaggaggtcaccacaacgtggagtaggcattggccgaatgacgggataaaatcatcttgcctcttgtccatttactttattacgattgttgtcttcttgagttctcatattcacttgtattgttgctcctaagtttgatacacatttcaaaggagcaatcaagtgaagagttctcctatctccatctctactcatatcaacttgattttagcttccactaacactattaaccgaacgtggcaaacccagtttgtgttgtttagagttgatttttgcaggatcacctatgcaccctcctctaggtgctctcaccctttcgctccccgcccatacaatgaatagtcgcaagtaatcaagtgtctttttgatttccaagaagcagcatatccctagcacaacgtggcaaacacgacaacggaggtcactaaatgagtagttcactagctcacatgcatcattacactgtcaacttagggaactgttttacggaagggacaacatacccactagggatggcaacggataaattatacgcggatagtgtctctagacatccatatccgcgacttatatccgatatccaaatccgtacccgttacccgctacagataaaaaacagtatccacatccgttacccgcgggtaacggatatgcgtggatatatccgtttgctcactac

SEQ ID NO: 45772 - DNA, 373 bp, Zea Mays
tgtgaatcctacaactactctcagggtgatggtggaacacaagttatgaaagtgtcttaccccgctcttacaagtttataactagcactgcaggtggcaaagggtgctcggtgtgactgcccaaagagcgtgggtgtgattgcaaaggagtacctattctgctcgagtgaaaggtggagctttgggaagactcaccgaatatatatttgtggcacacaagtcagtaacagatagcaatgccgaataagtgttccaagtactcgtcctagttgttggcctaaagaatgtattagaacagttggaccaaggcacaaaggaggtgacaaggatctaggaattgcaagggaacaagttggaatgaaaaacaatcaca

SEQ ID NO: 45773 - DNA, 727 bp, Zea Mays
attcgaggtaagaaatatcgcgttaaagatgaacttgggctactgtttcgccctgtcgccgtgcccacttgcccgacgacgtggtcgcacgaccatctccgtcgtgacgccattcctcgtggttatgccacaccatcagccatcttagcacgtcgcaattgatcacagtagacaacccatctatcgcctaaggcctcaccacggtgacagccacggtcacccgcgccagtacacttctcctctctccggccgccagcacctcccttccaaattcggagccgccgctcgaagactctataaatttatgccccagcttgctccgctaagtaattgtgcacccagtgaaccagccctcacctccaatcgccccccatagctccccaatttgggatttcccccaattctgttctctgcgccaccgcgaaccaccgcgccgtggactgtcgtttctaggtccgttcataccctcttgaccctcgttttgccactcttgtgtgctatagatgcttatcgacccagccaattgagttagaccccgtcagattaccgggaacaccttagattgtcctcggtgtgcgccattaccgtggacagggagatgttgagctagaactttgcaattgattggggggttaaggtcgttataggtgggattcggtgtcaaccaggttagagctctgaccattgagcatatctgccggtacgagttcaccggaaagcatgctca

SEQ ID NO: 45774 - DNA, 337 bp, Zea Mays
tgaaatgggctaccttggtgaggcggtctattattacccagatggagtcattccctttctgtgtccggggcagtccggttacgaagtccatgcctatttcttcccacttccattcaggtatcgggaggggttgtaataggccagcaggtttttggtgctcggccttcgtccgttgacagatgtcacatcgggccacatactgagctatttctttcttcatccccttccaccagtatctggtcttgaggtccaggtacatcttggtagatccggggtggatggagtaggctgagtcgtgagcttccttgagcaggacttctcgggcctccccttttgg

SEQ ID NO: 45775 - DNA, 493 bp, Zea Mays
tacaccttatcgtacggatcaggtatgttgggggttgcagtaaaggcatcttgggtatcatcaatctcgatatcctcaccagattcaccatctaaatttatttttgaagaacaacaggtaagatgtacaactttagaaactttcaaatcctatatcctatactattaaaaacattacgcaagtaccttgaccagcgaataggtattcctcttcttcatcatcatcatcttcaaaaagtacatcctcatcatgattatctataaatagcacaccttcatcgtcatatattcgttcacatggttttaaccactaagaataattagggaactaatggcggaatgagtttggaattaccattggcggtgacattcggggttgtctagtgttgcatcccaacgtctactccttcagtcattttgtcactctttgtagcagtgactagacatggaccagtacattctattgatggaaagttgtgttaagttagttggcc

SEQ ID NO: 45776 - DNA, 603 bp, Zea Mays
gaacaagccttcgaatctttcctccttcatttttgataccttgtcgtagagctgaagcttcctggcttcgccttcacatgtacaccgctcaaacaaaggttccaaacaaaggccagcttcattattgctttggtagacctaaaatagattaagaaaccacttatatgttgatgttttgaggagcttcagtaggagaaggcccccaatagtagccccttgtgatattagtttatttttgatgacgagcttagaccacaaaataaacaaagacatcatacggaaggtccaaaaaataccttcccaaagctcattattgaaaacgaaatcttaaaatatgtggttatgaacgcttgacatgggggatccactttgtagtggatgaatgcaagtggatcctcgaattgcgcgcccttttggtataaaatggcccgatatccatgcgtttgggcatggcatttactcatgctacccctgctttctttgccttcgaagctttcttcgactttcctgctttctcacaagtttcatgctttgcgagcttcgttgtttgagaacttcgtttcttgagtgatggtggaggacaaatcgagtaccgagctagcc

SEQ ID NO: 45777 - DNA, 567 bp, Zea Mays
gaaaaagggtggtgaacttggccctgtagttgaactaaagaagttcagaacggtgcaaaatccctgaaaatatctcaacccacttgtttctctaggtggttctggcatgcaacagatatggagagattgtgttgaaagggggaagtgcatgacatgagtttatcaccacatggatgagtttgaggaggtgtaaaacctatctatttgatgactcagttgctggttgtttgccttgctgtcacacatacagcaagggtgaacttggcttttcccctatgcttggtctaacgtggtgaccatgtagagaagttgggggacatattattgccagtttggctctatgttaagttccagtgaaactacaacaatccttttagcttgtatgccttgccatggttggttgcagcacaaattgagtttctctgtgctcctgtcgacctcctgccctgctcaccgcgccacctcattcacctacatctagataaagtcctcaaatcttctccacccctctggttcactgtgaaaactagaactcgtggtgagccatagcagtggtgaccacaccag

SEQ ID NO: 45778 - DNA, 724 bp, Zea Mays
cccttttctgcctcttctttagggctagctgtttttgcttagttgtgttgagccattgctcatatctttagggaccatgttttgctcatttcttatgacttctatttgacttttgtctagccttctatcttttgagtgagttattccttctttttttcttccttctttcctaaatcttctgtttatgtggtggtattgacaatgcactcattaagggggagattataaacacaaggttgatatgtgtccttgtggtttgggttgttatgagttattgtcaacaagagtagcctcttgggttgagtcatgtgggctaaataggatgtgagtgtgtttgtgcaacatgtctcttggcttgtggtgcataggtgtgaagtccgcagacagtggtcaacaacaaaggtgaaggtcatgcaggttcatgccaatggaccgagggtggtgaaggacgagcgttgtgtcttgattgagggactagagaagttagggggactagctgtgttggctaatatttggggacactaacaagcacagggatatgatggagcaaatcatgtcgccaacacagttgaggatcaacgagagatatttcctagacgtcggggacgcatatggcgtacactacctactaaggtttggtggttgagcctcagaaccaccttgcaacaattcgtgggtttcgttgggtttgggcctcaaaacctggtggcacagttctaaatgg

SEQ ID NO: 45779 - DNA, 689 bp, Zea Mays
gacagaggtgcaggaggcgcttgacagcctcaaaagcctcttgacccgagcccctgtgctggtcccatcgaaggataaggagtcgctcctactctacatcgcggggatagcccaggtggttagctcagtgctcatcatggagaggcaggaagaataaggtgcgcgcccgctttagcatcctatctacttcataggtgaactcactcactaatgcaaaaactcgctactcggaggcacacaacttattgtacgtcattttaattactaaaaggaagcttaggcattattttgagtcgcatcctatttctatggtgacttcgttccccctgggcgacatgacccgcaatctagacatttctaggaggatcgccaaatgggcccttgaattgatgggatacgagatctcctacaccccatgaatagcgatcaaatcacaagtccttgccgactttgtcatggagtggaccgagacctaattagagccggcgcaaaccaccgagaaatgttggatcatgcattttgatgggtcgatgacaaagggggagccggtggcggcctcatttttatgtcgccattaggggagtggctgcggtacatcgtgcgactccactttcaagcttttaataacgtggccgagtacgaagccctcgaaaatgggttgtgcattgtcgtggacctaggtgtccgac

SEQ ID NO: 45780 - DNA, 492 bp, Zea Mays
cgacaattccgtttcggttgaatttgacccctttggtttctccatcaaggatctacacagccggatgactctactccgaagtaatagcaccggcgatttgtaccccctgcgctccacatcgtcttcgccacctgatgtctcccttcaggtctccgtcgatcagtggcacgctcgtttgggtcaccctgaccagcctgctctccggcgtctcctcaataacgttgtctttgattataagcccacaaataatcatagttgtgcatcctgtcgcattggcaaacatgttcgtcttccgttttctgaatcaaacacagtctctccctttcctttctgtcttgtgcattgtgatgtgtggacgtcgcctgtgctgagtaattcaggttatcagtactacctcgtgcttctggatgactactctcactatacgtggacatttcccctgcgccgaaagtctgatgtgcttcacacactcgtgtcgtttcatgctttcgc

SEQ ID NO: 45781 - DNA, 800 bp, Zea Mays
aaaagggattaaagaaagccggttcagtcgagcacggaagatcgacgacatgggaaatatctgaaggaaaaaaatctgtgccactgtagaatccgaatgtgtccaaacgaagaggagacagagatggctggggtaggatagctctgaaccaatgcacaacttgcggattaggccacgtcggggcggggatatttcaacggcagccactgtggctcggtatctccgtcgcggtgtcactcgtgcctaattctaccacactgtgctccttggttacgtggtcgccatgcactaacatcgtgcctcgtgatcgcgggtagctagctaggtcgccatccctttaaattgtgccatgactcacggtgaggtcttcactgtcttccgttgtgattggtagaagccaaaattcgcggtgtcccttcctcatcctaaactggtagtgcacgttgaacttgtagttccttacggccgtatagccacagcgtgactgcctatttccgctagaattcatcacaacacccatttcccccatcgaaccccgcagagcgcactcatccctgcgttcccatggccaagcgaacctagtatggttctatgcctttgatttggtgtttgaacatccttgtgtgctagtgaagctcgccgtggtagctgtttggccattactggcatagttttgttggaacgcgtgctcgacgtcgcgtgctaacctgttgacagcaccagtgtcgaccaacaaaaattattgtggtctgacgctaattcttgtgtgcaccatgacctgcgtgacccactgatgctcc

SEQ ID NO: 45782 - DNA, 1459 bp, Zea Mays
atcccactcaaggacagcatcaaaggatggcgcttggagtggtttattgtagaaaatcatggcaagtccctcccccctcggtcggggagacagtcggatgtttgtgctccaagttggactgaatcccccacagacttggagataaccgaagccatgattctgcttgctgaagttggcttgttgaaggagagaggtctgactgctgaagcggtagttgtagactttgttttcaagaatattcagccactgaaggatagagcgtacccggcttatttgtatagtggtgtcactgattctacccgggttaccaacaagaggattcctgctgtggatttggtgagatgactggagatgattcttaggggcaaagtgtcgaatactagtgatcctgttgcatattctgcctggaatctgccaccttccaagacttttttcaattttgtgtccaatcctcctgctagtgatagtagcctgggtcttagagtgtgaccctctcccgaagaagtcgaggctttggttgcttcacttggtgatctccccaataatgaaaggcaagttcactttgagatgcctataaacccgagtgatgcagagataagtgctatgttggacatgttggctgaggattcatctgacttcgtccctgctgaaaccatagctattgcaactgtcctcgagcctgagaaaaccttgactgctcaaaaatctgatggtgctcgcccaaagcgccttcgcccgaccagtcatccaactgctcctgccaaggggaagaagaaaaagaggaggcttcggcgagtgtcatgtttgaatcaggatgctggcccttctgttcctgctgctgaagaagtaccagtggaactttttactggggctgaccccgatgggtgtgaccttgatgatgctaatcccaatgggtgtgaccctactgatgctgatcccaatgggtgtgaccctgctgaacccaatgggtgtgatccggccagagctgaccccaatgggtgtgttgttcgtattgttgacgaggatgaagaagaagaggaggaaatccccttaattcggaaaaacagccggcgctacctagtaagtggggagagtagtgatattccttctccagctttgtctgctcttgttggtctacaagagttgtccatagcaaattttgatcaggctcttgaggatatggttcctaaagatctgctgtccgagccaacagatggtggtatgatggacgtttgcactgacgttccggatgtggggttagagttgtctcgagtggcgtctcgtgcctcgtcgaccttggagtgcggtcttcagggtcaagaagctggtctaggttgctccattcccatggaggtgaatgagaatccttcagccttagaggtggctgctgtagagaacccggtccccaaggatggcgccagcgattacccagcccccgagggtgttgccggcaatgatc

SEQ ID NO: 45783 - DNA, 1199 bp, Zea Mays
tcaaccttgatgtgtcgtcctcctcttctccatgtaatcctgcctctgcaagagcgataagctcactcaatctagatgtgtcatcgtcctcctcctccatcagctccacggtcgccattttttcctgaacatatcttgcatgcgcctcatcggccatatagtttatgccacatctaatctctgcaaatataatgagaaaaataagttagcaaagtcaggataaataaattgtactaacaaaattatagtatcatttttctcactcacttcccttgagacgatcaacaagattatccaacatctgtttctcggctcgagccgcttcccattcccttgcatcctgtgctctcttctcatctgccgccttcaacctcctcttctctgcacgcttcgggctgtcataaaaggcagatttcgcgtacctacgcatgtcgcgtatgcgatcgttaatgtacgaatcgacgagctgagatccataatgcatcttctgtcccattagtctcttggactctattgtgcgcatcacctctcctttgtcgtcgtaactctcccaactgcatttcctcgtctcctacaaaaaatagtaagtaccggtataacattacagctggtgcaaaacaataaataaataccaacctcatagtaatcaaccatacgtccacaaaaatatccaacaccaagcttgaaaggaactaatccatacttagcttcaataccacatttgcagagtattggaccaaacttcaactcttccacccactgatttttttcttttcctttacctctgcctctggccaatgggacaaaggaccatacaaccactctctgaaacgacacttacgccacccgtatagctgcaggagaataaattaataatttattgtaaaaaataacaagtttatacatttagcgcatcgatgggctcacataatcaatgttcggacacacgaagtgcttcacaatgtcttcgtcgatgacaacacgatctccacaatcgcatcgaggcggtgagtccatctttctttctgttgctacctccttctctgcatccatcattggtggaggattcgggaaaggaggtacccaacgcttaaaacgctcatgactagtccttccacacaaccaattagcgaaaagaagatatcgagggtcaaatttatcaggaccgttgatccactggaaaaagaaacacctcaggt

SEQ ID NO: 45784 - DNA, 475 bp, Zea Mays
ggccatttagtgcgatagctgaccaccggtgtcttcatgtctttgcgataagcaaagttgtagcagccgaagttctcatgtagtccgtcctccctagccttcgtctgatagtgaagttcatgtactcggcagaaggcttcggcgagtggctccaccccttgactccggagagcccagatgtaaacactgatcctaacaatggcgttaggggtcagctgatgaaggtaaatctcaaaattttccaagacatctccaatcatcccgtgcagaggaaatctcagccctgctttgaagaagctgttaaagaccaccacttcatcattttctggtttcgggatagtttcttccccaccaaagcgaatcaaccccttgtcggcctctctgaagtagcctagcttcgccatcatagccatatcagcttcagacacagtcgactttccaaaatccaaatggctgggcttcgatggcatagcgg

SEQ ID NO: 45785 - DNA, 587 bp, Zea Mays
ataagcaaacccatggtgatgaatacattcgagttcgtctttatctccctctttaactcttacatggtatcaggcgtttccagatgctgatcttctgctgcccccaaccctctctcaaccacgtcgccatgctaaaatcctcctcctcccctcgaactccgacgctgagtctcccaccatcactggcctgcaagttgaaaccaccccggcacctcctgccattgtccacagcatcaacatacaatctcgtgtccctatgatccttgatttcgatgaaagcagttacacggcgtgggttcgcgcattctctgccgtcttcagccagtatggcttgagcgatcatgtcaacggttccccggcgcaacgattctgactaggtccagatcgactgcgtcatcgtgtcgtggttttacaaccggatcgccagcgacgtcctaagttccatctcccacgatcgcgacacgatgtactccctgtggcgcgccgctcgtgatctctttcgtgataaccgtgaaacacgtgtcgtctacctctccgccgagtttcgcactgccatgcagggcgatctcaccgtcctcgctgaaagc

SEQ ID NO: 45786 - DNA, 477 bp, Zea Mays
gaggcagagccatggtgcacagggtgtggacgcctacactgcagtcttacagagtagtagagaaaagatacagacctaggtcctagatgctcaacctgctggttacactcatgtagcccaactagtaaaaaacatagtctagatgtcagggaggaagaaagaaaacaaatcacaaacaatcaaacacaaagacatgacaatttgtttatcgaagttcgatttccaaacgaaacactcttttgagatgtcccaaaggatcaggactctttcaactctctgaagtgatttcgaagatcaaacataagccctctctattttcctaactcaataaagagaccaaagtctccgcaagacgctccacaagcttgtaggctcttgctagcctttacagtcaatgagagtcaaaactccaagctcaaggatcacaagaatgtagtacacactcttctctattaccctctctcaagacactatctc

SEQ ID NO: 45787 - DNA, 505 bp, Zea Mays
caccggctgggtccgcccctagctgtatataagatcgtcctctcctagcacgctaacacgctgcttaatttagcctttagcatcgtctcaagaagctgctggttaaatggaagcacgcgtctggtatgccattactgtcatgtgcatcacggtggctgcgtctgcgtggtttggagacaacagtacgggcgcgtttccgacgacagttttcgcaatgttgatggccatttcctactacatggcggtcactgccatatatggtgaggttactgcttataatccctgctagatgagcaccgatccaaagagatgctactatatatacataatgtaatagcccgaataaaaggattgtgtgtcctggctcctgggatgaacaggatcggaatgtaccagctgggactgcgagtttgcacttatcctgtaatgaactactgcatgtccactatacatatttatgtgtgtgttgtgtgatgatatatagtttattgcctttacctttaat

SEQ ID NO: 45788 - DNA, 512 bp, Zea Mays
gttcctttcataggatctaggcatggggtccgctaggaaccatcctcatattctcaggtttcgactcatatagttgccggccccattcgaccaggtccgatggctcgttgactctttctctctccatgataaaccacgagtcggacgttccctaggactcaaacacgatttagaagtgcccttggtgctcgtgtgctacggtactgactgttgcggtgcccacttcataatcaccccatgatctagggttttgggagcgatcgcgaatccataatgggctgacctttgaactccaagttttacgagattaatcgggccgcctcatagccataggccagcgagcgtccactgagcctatcccggtaggtgagagatgggttgagtcatcttaccggtcttggtctggcagttaggcttcgacatcacttcctgtgtcaagaggccatcacccgacccacctatcgagcttgtgggtcgtgtgactctggggagtgagctacattgaaccaagc

SEQ ID NO: 45789 - DNA, 527 bp, Zea Mays
gatcaaagtgaattcagagattaaatctcttattcgatttttaaaggattttatcactagattcccttcaatccctcccaaacagaccaaagaataattgctggtccccttcaattcctcccaaacagaccaaaaaataattgctttggtggatagcagtgtgttccctatggacaggggcggacccatgttggtctcagcgagggcacaggccccggctcaaaatttgttaactatagttagtagacaatttttcaccattagtgccccatctcaagaaaattagaggccctcactcatgtacatgttcagctaaacttcatatgtgggtagaagtatgccccgacttagttttttggctgggtccgcccctacctatggacctccgcatgttccactctactatttttaatgttttttcccttgcaaaagtgcctatgcaaatagcacggataacttgcatttgcaggatgacattttgatctttcttattgatagatacttttacatttaatatggtgtttttg

SEQ ID NO: 45790 - DNA, 533 bp, Zea Mays
atatcactgatggttgctagtcatttctttagttttgactcgacagtgctctgatgctgaggacaggtgtcctcgaagtcaggcggagcttgatcaagtgattatgtttcttgatggtgtctgtgccatgaactcttccctgcagtcaaagtttgatttggagaagaaaacccacgaggtaacccgtcgggagcttcaggttgcttattccatgctttcgacctattaccaaaggttctcccatccgtaggaggagatgtagaaacttcttgcttcccaaaacaatcttgataagttgtactgggatgcctctagttcccttaccaatctggagaggagccatcgtttcaccatggaggagttggaacacaagaggaacaagttgaaggagtcccgagatgaggtgttgttgcttagcgagtctctgtcttcgaaaggttctatcattaaagacctctgtgcctcgaagaagctagtgtcacatgagttagagattgttcgccgagacatcaaggtcttggaggatgtctatg

SEQ ID NO: 45791 - DNA, 1614 bp, Zea Mays
caaatttattgcttcacatctagcagtttaaacccatcagatccagatacaattggtacattttctttatcatcattgtgtgacatcataaattgtattgtaaaaatccagtgatctctttggaaaatcaattttcaaagaaaaaataataccaaacattgataataacagtgtgggaattataataatatttgcccaaaagctttggctctgctggtattttttgtaatctctaccttttttataaccttgttaatgtgatggatgtaaatatctatgacctgaaactgaaagctgcattcggccttttattcaaggttacaataagcgctaggcgttaggcgggcgttaggacactgtttagctcctagagagcttaggcgtggattaatcgtgcttaagcgtttgtaggaatatacaatataatatatatatttgcgcagaaaaaatagttttagctaggaattagtgtacttacctgtaataatgaataaaagtacagaacggaagatatggaggagcagagcaaaagcaaaggagggagagtgagagcacgcctggatagctagggaaaaggagcagagagtgatgaccccggcggcctggacgacttgaccagaaggggaagaggtcaccgacggtggcggccctagacggctggggaagaggaccagtctgttggcggccctgttttcctcctctcccatgcaacagcagcttcagcttccaacttgtttcactctctcccggtcaacaatatttcccgcctctttccctcctattcactttatattcccgcgcagcagcttcgtgctcatcttttccccgcgcgtcgaaccccgcttctacatgccttgtttccgcctcagcgcgcatagcgcaaatcatgcaccgcctacacgcgcccaccgcgtaaaccaccgcccaggtcctaagcgcagcgctaacatgccgcttagcgtctaattgtgattaggcggacgcttaattgcgcttttttgaacattgcttttatttgaacccaccaaaccaatcttggaaactgcattgcagtgttcacgacgcagctcattaatattttcatattattcatatataaaatgtaaccaggatactagagaaatgatgatcagcccaaggtacttggatcatttttagcagttagcaagttattttagtcaattcaaacaggttagcatgacaaacacctcatatgcatatgatttgggtagatcatttttttggcaattgtggatctgtgtgcatgttaggtattcgaagataaatgttttcaaatatttgaaatgtgcgtctctcaggaccttagcaaagctatatagcaagtggcttcagtcaaacataataagtaggaaacccataacaacacgcatgttgccaagttggttttagtaagagatagcatgttttctttctgtcgtctcagcaggcacgctaagatctattcacgctaaatttctgatctagttacgctaaattggtttgttgtttactgcataaatgtatttttttttgtttgtcgggatatgaatgtttattctagtactgtataaatgtttattttgttgcttagtcactattactactgcataactg

SEQ ID NO: 45792 - DNA, 437 bp, Zea Mays
tcggcggcagagaatttagattctttgttggttctctcttctaacgataacagagcttttgcagcatccgaaggcccttgttcagtatcgttttcaacaagctctgcatgccctgtttctgtgggaactgagggccctgagggcccagcttcagcttcaacccgagttacgacagcttcggcggtttcctttatgtttttctcactcatgctaggcacttctatagaggcaggagtcagtacctttgtctactccatgacagctggccattctcctcctctttggagttactgcaggaattcttgttaccttcggcagttccgtctcttgtgccgatttcttcaggcttggctcttcgtccgtttttacccaagcttcgacaggacacttcggcacatcggctatctgggctttcagcttctctgctgctgccttcg

SEQ ID NO: 45793 - DNA, 625 bp, Zea Mays
cgataaggatgcattttcaactgtatttatgaatgtctctttttttggtaatgcatctaccttatttcgctttacgaattgccactaaatttagataagctctctactccatggtggtcaaaacagctggcctttggtaatggagcttagcgtgtttcagtttgaggacttcggtaaggttgcatttttaactatatttacaaacatctggttttattttcgtaatgcatctaccttatttccctttgtaaattcccactcatattatgatgtgattaacactactattatacgattgattcctagccgaatccttaaatggattactgatttcatagatgagttaggtgtcattgtacattcttatcccacctgttagatttttggtaattaattttgcaagctgcccgtctttctatttatgttcgttgtttgtcttctagcaacacttatttcaacttctagcaacgcataaatgcgttgcaataggggggttatttttgtagtggttgctgtcacaatcttgttgcttatcgtaggtgcggtgccaaacctaacatccttttgctctttatcgagtgtccatggtcttgagagtctttgaatgttgtgtggtgaacatcca

SEQ ID NO: 45794 - DNA, 637 bp, Zea Mays
ccctcgcttgtatatgtagaggcttgtatgatgaagttgtgtgccctcgcttgtatatgtgtccaaaggcgttgcgtactttgtctggtttgttttgttgtgctgtgctggtgtgattataattggtcttggcgcggacggtttgatgttgtcgtttctgcctttgtcgtgccagtccggttgcacccttaggtgtcttctgcacggacagtctttgcggtaggcttcggttttttcgcacttgttgtgctagtccggctgcacccttaggcgacttctgcgcagatagtcttcgcgatagacttcgattttttcgcacttgttgtgctagtccggctgcacccttaggcgacttctgcgcggatttgtcgcacgcgagggtggctagcgcttagcctcgcggtgacctcgtattggtcgaatgtcgaagaccgtcgtcgcggtcgtttttcgacgcatgtttttgcgggggattttcacacatatattacatggctccgcctcgttaaaaacctcacccccgggaggaaaagagtgcgggccggtacaagattgtttttgcgaattacaagggcgaaatcagccctgaggagtcaaacaaaaaatttgcggaggttgtcgatgttccaggagtgct

SEQ ID NO: 45795 - DNA, 2489 bp, Zea Mays
ctttatctgaatgcggcgaagaattgtaccaaaattgtgcaacagacagccaatgactccattgactaggacaggcatggacaaagcaacgaaggaatgtttcgaggcactgattgacacgctctgtctgcccatcagattgcggatgatatgcggaactcatctgtaactgctcatcagccaagcgaaacagttccttccacaaattactgaggaacaccttgtcgcgatccgatacaatggaatggggcaacccatgatgcttgtacacttgatcgtgaaaaagacgtgccacggacaaagctgtatacggatgcttgagcggcaagaagttggcatatttggtgaaggtgtccacaataaccaggatgcaagtgtaagattgagaacgaggtaaggcttcgatgaaatccatagaaataatttgccaaagcgaagatggaacgggcaatggttgaaggagaccgggtaaacgagtgcgatctgctttggcttgttgacaaattatgcaatgagcaacaaatgtatacactaaacttttcatccccttccaagcaaaaatttgtttcatccttgcatatgtgaccggaaatccggaatgaccacccacagcagaagcatggaatgcagagatcaatttgtgttgtagaatatcagactgaccgatccaaattctgttcttataacgtaacaaaccatctttccaagaaaaatgaggtacaaccgaggtatctacgcctagctttgcgatgatagccaaagtctgtgaatcctggttatatgagtcagccacttccgtaatccatttaggagtacatgatgaaattgctaaacatgatgaagacagacttgggtgacgagacaaggcgtctgcagcgccattgtccactccttttttatatatgatgcagtactgcaaacccaacagacgtgtgaacatcttcttttgccaaggagtgtgcaaacgttgctcatccaattgtgccaaactacggtgtccgtatgtatgtgaaattctttgagttgcaactagtggcgccaatgatctactgcaatcaaaagagccaagaactccttttcataggtagaaagtctctgcgatctgggtcccaatgccttgctaagatatgcaataggatgtccagcttgcatcaaaactgcccccacacccaactgactggcatcagtttccaacgagaaaggcaatgaaaaattcggaagtgccaacacaggcgctgaaatcaaagcctccttgagagccacaaatgatgcttcatgagatggtgtccagataaacaaatttcctttcttaagtaaggtcgtcaaaggcttggctaacagtccaaaatgccgaacgaatcgtctgtaataaccagccaggcctaaaaaacttcgcagttccttcacattcttaggagtaacccactgagccacaacttcaattttcgcaggatctatagccacaccagccgcaaaaataacatgacccagatatgtcaactgtgattgagcaaacgaacacttcgaccacttaacttgccatttgtcccgaaccaatagctccaagacttggcgcacatgctgcaaatgctcctcaaagctggcactgtaaatcaagatgtcgtcgaagaaaaccagcacacaacgacgaagcaacggtgacaaagtagtattcattgcccgttgaaaggtagccggagcaccagtcaacccgaaagccatcacacgaaattcataatgacccgaatgagtttggaatgctgttttgtgagcatccgcaggaaggagacgtatctgatggtatcctgctgtcaaatccaaactggtgaaccacgatgcctgtcccaattcatccaaaagctcttcaataactggtactggaaaaatggacttcacagttagagcattcaagtgacggaaatccacacaaaacctccatgagttgtctttcttcttcaccatcaacacaggagaagagaactggctagaactgtggtgcactatactagcctgaagcatctctgatatttgatgttcaatttcatctttaatggccggtgggtaccgatatggacaaattttgacaggagttgccccatgcactaaaggaatggtgtggtcacattctcgagaaggtggcatcccaactggaggggcaaaaacagaagcaaattcagataataaggccttcatagccggtggaacatccagctgctcaaactgaatcggagtagtgtccaccatagccaactccactaccgaccctggaggaatcgtggctgacaatccatgcaacaacaccggggatcgttgatagggaataatcatccacttgtgctcccaatgaaccttcatgggactattggcacataaccagtccataaccagttcatgggactattggcacatgacaatatccatagtctgctagaaatgtgaatagtataatgtggtctcgtaaaatacgcatccacaacattttgcatgag

SEQ ID NO: 45796 - DNA, 301 bp, Zea Mays
cgaaatgttcttcctttttgctttgttgaaaagacttggtgcaatgttttttggtgcttgaccatggatccaactagatttccagaatacagcagttttcccattacccaccttcacacaagtggaagcgttgaaaagatcttcatctgattcatcacatggcagctgcaaattcacccatgctttgtctttggccttccatcgaaaccacaaccatcttagtcttaaagccctcgcaaaacgattcaggtctagaatgcccaatccccctttgcactttggtaaacaagtagtagaccag

SEQ ID NO: 45797 - DNA, 461 bp, Zea Mays
cctctagtacttggttggtcctctcggtctgcccatcagtctgaggatggtaggccgaactaaaattcaatcttgtatccaagcactcatacaacttcttccagtaccgagaagtaaactgtgatccctagtctgacacaatcttctttggcacaccatgtaagcatacaatctgtgccatgtacaactctgctagcttggctcctgaatatgtggtcttcactagaataaagtgggctactttagttagcctgtccacaatcgcctaaatacagtcttacccagcagatgtgcggggtaatcccacaatgaagtccatgccaatctcttcccatttccactcaggtatcataagcgggtgcagtaaaccagcaggtctttgatgttccgctttcaccctctagcaaacatcacatagtgcaacatgtgaagcaacatccttctttagtccatatcaccaa

SEQ ID NO: 45798 - DNA, 1044 bp, Zea Mays
gttcagttcatctcgccgccggcgaccacgcgctcggattcgcgcctgatgctacgattcatgctcaacgaagtactgattgttgctcggggtagtaaatatcgtcgtgtggatgaacttgagccactgttcactccggccgccgtgtccgcctagctcacggccgattcggatgaactcaccggagttagctgctcaacgatcgtgcgccatgtgccttggtgtctttccacgtcgcagtagctcatattacacatatccggtgatcgccgatgagcccgtcacggtgaaagccaccaatctcttgcgacagtgctcttttctttctccgaccgccaccgcgccatctcaaattcatgggccaccacttggggatcctataaattgaacatgccgtcagttccgcaaggtagtcaagcacccaatccatcaactcgtgccttcaattgttcaccagaggccctgaattgctcacatcccccaaatcggttttccgccaccgtgaaaaggctctcaccatggccattgcgcttcaggtccgatcatgtcctctactctcttgtttcaacacccttatgtgccactgatgcttctcgacctgaccaattaggctagaaccccttagatcgccgggaacacttcgtgctatccgttgatcgtgcggtcgccgtgagcagagaggttgggagctcgaaccgtgcaattgatcaaggggacacgtttgttagatgttgaattaggtatcagccaagttagagcaccggccattgcgtgtcctggctcgtacagcttcgtcggagctcggtctaccgccgtgctgtgtcatggacctgacgttgtgaaggaatggaaatctagggggttttgtaagctgtcagtgaaatgcaggaatagtgtcgcgaccccttttcaagttattcaaatcgccaaggtcctctgcgcaaaattaaccatgtgggcgcgcgcatgcgggcgcgttctgcctatgctgggctggctcgggctagattcagcccaaccctgttcatagtttctctttttctt

SEQ ID NO: 45799 - DNA, 714 bp, Zea Mays
atttgtactaaaaaccattttctaaaggattttcctggttttattaattatctggactgggcctcaattacagaaatgcgcaggggctaaacaataaaaattcccgagacacagagggtaactcgagtgactgcgggttgattcttaagttttctagggtctcttctgcgaactggcaaagtgaaggggtatcggccatgatgggccatcggatcagacccgaacggcctagattaggtacgtgcacttaagtgatcagtctgcaacgcgagcccttggatcgggatcctacgacccatagccaatccgtgggttggaacgcagagccaaatctacctgtctgttcccaaaccaacggttccgatttaaagaaattcatcaccgcaccagcactaatctcaagcgcccaaccagaatccaacagcccaggtgtaggtgtctaaaaggtgtgtggcggcgctgcgggacccagccaccggtgcagaggatcggcgtatgagtgactgatagcacgggcccgccagtcagtgattcaattggttggatgggctgcacactgtaactccttgatgggctgagaacccaggattgggcccaagcgcattttcccttttgatttctcttttcttattttgttttcattttattttgaatttctcatttcaaattccactttttgtgcccaaatttgtatccagatcaagtacaaaattt

SEQ ID NO: 45800 - DNA, 439 bp, Zea Mays
ggaggttctccagatcccccgcatcttgcgctcttcggccgatgcatcctcctggcatggcatggtcggtggccttgacgatagacatcgtagtggtcgggggaggaggagagcggaggggttggaggcgatgcctagctgctcgggcatcggcgcgttggttgcattgcgtttgataaggctactagtagtaccaacatcgttatctagaggggaatgtgtaacgcaacggtggagtaaagatagagaaataaatataaagtctttttattaataaaaacttgtgttttacagtagaagagacatcctaaaagatcgataatgatgaatattggtgtgctcatggcgctccacatgcaatttcgttctcccttgatcaacgatcaatcacatggcatagtcgaaattggcgaactggcgctgcagcttgggctccaga

SEQ ID NO: 45801 - DNA, 1599 bp, Zea Mays
ccttgattaccgaccaacaacttttgtaaaatctaccagtgaacccgttggggcccagggatttgtccgaaggaagggacttaattgtatcccagacttcctcctccgagacaggcgcatcaagggcatcaaggtcataagatggcatccccagagcttccagatcaacggtaacatcccttacttctgcagttccaagtagcccttgataaaaattaaagaaggatactgcctttctttcatgggcagtccagatttgcccatcctctgagtgtattgctgcaatgaaattctttttcttcctgaaccttgtttgtgcaagaaaaagagaggtattagcatcaccttctttgagccacccaatccgcgatttcaaccttgccatggtacgagagatagaggacagggcaagggagtgcttcttgagcatgtttcggaaccacagttcaccaggagataaggaacgattgtcctgcgccacctctaattgatgtaggagctccctagccatctcaagctgcagcttaatcctcccaacttttttgtcattccagctctgcagactcctagccgttgtcttcaatttcttggccaaagtgatgagtgggcaaggccctgctggaacagacgcccaagattgagctaccacatcatgaaatccctccatcctaggccaaaaagcttggaagtgaaacctcctttttcctctgctaaaatcatgaaacccaagcagcaaagggcaatggtcgaagtcattcgtggctaagctctggagaagagaatctgagaattattcctcccaatctgttgtgcagaaaatcctatccaatttgaccagggtaggattagggtgtccattcgaccatgtatatttctggccaatcaacggaatttcattaagagccaagttattttcccatttcctgaacctgcccatcatggcacggtttaagttattgttattcttctcttcctcccttaatatcagattgaaatcctcgagcacaagccacaacccagtacagagagctctaatttctctaagagattgcaaaaactaaatcttctcatggttcccttgcggaccatacacacatgtaagccaccatggtgagctggtgctagaatgaaagttcacagagacgctatgttcatccaccccactgcccgcacaaacaccaatgctatttttccaagccaccaggatgccaccactagcaccaacagaaggtaggaatacaaaattgtcaaaagctagtcctagcatccgcaataaaaggaaccgataaacatccaccattttagtttcttgaagacaaaccacatcaactcgagcagaatccaccaaagtgcgcaccgcatcctgtctagcaaacccatttaggcctcgcacattccaaattagaatttttgaaggatccataggggaagaaaaaagaacgactaccagcgagggacccaataaatcagcagattggtccgccctgcagcagctccttaggcctagaccagctaaatagcgctgccatgaccgtgatctacacctctgaaagcccttttctgaaaactctggtatactcatcaagatcttctggcctg

SEQ ID NO: 45802 - DNA, 745 bp, Zea Mays
ggggcgccaaagcagcagacaaactgccaggacccgaagagccaatcattaatgaagcagatatcaagggtcccatcccaggcgccatcagctcagcgtccaaaacaattgggagagcgaggctatcaactgggccgcctttatcagcactaatagaaactcgcggaccaaggcgagacttaaccgaagcacgaacagtcaagtcatggaaaccgaaccgtctcttccgctgaacaatatctcgatcatcatcagactgatccggcaatggtggatgagaaaggattgtctcacgaaccagccgatcatccaaacatgaagccaaaacggagataggatataccagtgatcggggatacgacgaatccacctcaaaagccacaggtggttcctcaacatgcagatcaacaattgaaggcaataatgtcggtacagggcaccatgcacgaagcttgaaaatagccctgttgttgtcctcaaaagaacttggaaggatctcatgaatcatacaaagaccaaatagaagactctccactgtttcaatcctccaaagatgggcaggaattccatgaagctctaattccataagctgaggtaaggctccaccccctgaggccaaagcatgacgagaccagcgcttgatgttcagccggaggggggggacaaacagagaatgcccaccagaaagcacacgatccgctagctcgacacttgaaaagtgaacaatgaagttgtttgacgccac

SEQ ID NO: 45803 - DNA, 531 bp, Zea Mays
tctcttcttctttcttggaaaggaagtccaaggtggaggcgctctcttctgctatctgcgaagtagtgtaaaaaagaggtagagggaaagagcaggagagagagagacacaccttttgaggttttatgtgaagcgatgctggctggctgacgtcaggaagtgagggcatttaatgcgatgggacgctttggcacgcaggtcgaccgttgcggagctcgtgcgcgtggaattcgaagcgacccagctcactctcgttttcgtatcggggtggcccggcctaagccttggtgactccatctgtccttatacatttgcttgagaggggctgctcggttctttaccttctactatcgccttcctgccctagccgccctcttccttagtcgtgaaaagttcttgagctctcctttcgttttcttccccagtcccgatggccgataaagtgagtgtccttcctccccgtgacccatggtcgatctcatctatcaccaatgacgacctagaggcattggtggatgccgggctgctctg

SEQ ID NO: 45804 - DNA, 480 bp, Zea Mays
ttgtatggtatttgggtatgttcgaacttcgatacctatttcataataaaatagggggcactcctttctgttaacaaatctctatccccatatccacatccatcatgtgtataagatccatcccaaactcatccccattcgggtaccgagtcccatttctcgtgtgataagcatgatcacattatatcttatacgacattaacagccacacgacacccaacaacaatacatcacaaataaatctgatatttaacaagaaaatattgtttaaccatgcaaaatagtgaaaacaatgtgacacgtggattggcgggcggggcagctggtggttgaccgcctgtgttgggtggatagatgtttaaaagggttgagagaggtaggttagttgttgggcttattacttattgggaagcacaacgaattttactaggtgaattttatgagtaaagtataattccggtccttaaacttatcgagttg

SEQ ID NO: 45805 - DNA, 369 bp, Zea Mays
aattaaggagtctcattgatcatttaatttacgttttgatcatttcacaatccccatatatacagagagatatagagagaggatacaaaaacattggtaaatatatagaggatcctttttcacttatgacttgcctagtggtggggcaggaaatatggaaggagatccaccactgaagactgaatggaaagttacctctatactcgctcatgcattcatatgcatgctgcagcatgcaccccacaagaggccaaattaaagggaaacatcaaaaatgatttagtcccaatggcctggcctggacctatagggtgccatgcctgcatgaacccagcggcccagccacacaaaatgcatgctagctcctcc

SEQ ID NO: 45806 - DNA, 314 bp, Zea Mays
caacaatataataatgtatataggctagcatcgtcaggggctaggcgacagagcgcaccaacatgaactgatgcattctatcttttcagatcattgctactaggcacgcattcagacatttatattcgatccatcgcttcggccgtctatcagttctttcttttatcatctctccggccatagacatctttatttggtccatgcatgcatatcttcgcaaatgacatgacacatgactcgtcaattggattccctgtctttttttcatttatttctttgttatgatggttttaattgacagatattgcatgtaa

SEQ ID NO: 45807 - DNA, 487 bp, Zea Mays
cgcaacacgacgagtcgcactgagacccaggctacagaggctagaggttggcgtggcatagagatggtagagctcgagttgcggagttggtagtggtggtgagtaggcgggcgagggcctggaccacgacgtctagtcatccatcgtgatcttggcctgggtgtgagcgagatacggagatagaaggctacaacaaaaggagagatgcagctgggagcagaaggcaagggttgccctgctttgaccttttcattatgataacagcaggtatatatagtccccttctaacttatctgataaactaacttccttatatctatgtggatctccacatttattctccaactaatcctatctagccgtctagcaacagcccaacaacaaatcagctaataaaatagcaacttaataaatcagccaataaaatagcaactaactagttgctatggcgagcttatggcgtctcacctattgcgccgatcataac

SEQ ID NO: 45808 - DNA, 453 bp, Zea Mays
gcgatctgttttggtgagggtggttcagagaagctttagtttggagaacttaaagttctttacaaccccatgctcggtgagggtgatgaagctcccgttgggtatgatgaacaaagctacttgagttgatattggggagagtctagggacctttttggtgatggaggctgagaatgatgccctgccccattggcctatttctaagagtgaaggttcttttagatattcatcagccactacaaagaggtgtgctaatggaattggatgtgaagggcgataactctggtgtcatgtggtatatgaattcttaccaattttttgctatatgtgtgggctccttgggcacgttgacaatcgttgtgattatgggagtgggacagacaagaggaaaccttgtagtgctgaaatcagagtagtgcctcctcgacaccactgttgggactatgcttcgtc

SEQ ID NO: 45809 - DNA, 305 bp, Zea Mays
gcgataagaaaaactttataaagaacaccgtggtcaccaaaggatcgcctaaacatctaaacgtagcagaaatatatgctcagctgaacaaccttgtcctaaatgaaaagggggacaagtacgaaggattcggagtggaccacaactggacacatatatgtggtctgtgggagctcccttatatgtcgtcattgattcttgtgcacaacattgatgtcatgcaccaagaaagtaatgttgctgaagccctcatatacacctgcatgcattttgaaaaaaacaaaggacaatctaaaagctcgaaa

SEQ ID NO: 45810 - DNA, 901 bp, Zea Mays
ggaggtaccatccgaaaggggaccaaagctagggaaagaggattgttttcctcgctaaaaccagctgctcactgatctttgagtgatgtgattgctacgcttcgaggaggcacaaaaaaactcgaacaaggtaaggtgttcgatgcccggccaacggccccggcctcttttggtcggttcgactacgctgttgcattcaatcaatctgctcgcttctagcacattccctagtcaggccaatgccctcttgtcatcgaccccatcgatggtacaacacgactgaccaaagtactcatagcaaggggtagcaggctcgccattctctactctacctcgaatgatgccatgggtcttggccgagaccgcctccgaccaaccgggggaccatcgtcatgggcaccacggcgtgacatgcataagaacgtaatatcgaatgttgtgatctagccaagggagccgcccttactccagggttatcggatcaactttggtccgacagcaaaagggaccctgatgtgaggaaggtaggcgcgatcctcaagatgacggacgacgcaaagagaaagccgccagaccccgggtgacccatcgaacaggaagtgtgtgtcggttccatgccccccatttcgagtagggggcatacttgcttccctttcccttcacaaggagaaggacaccttcgcacggtgaccctccaacatgggaggcatccctacggaagctaccaaatactctttgaggatccgtcccagttccaaggcccgtgaagcagattgccatgacgcttccgcaagcgcaagaaaagcaccatcgagcagaggcctggcagaatcttcgcagtcggcatctacattaactaggataaacgctcaacgcagtactagaccggaagggaaatgga

SEQ ID NO: 45811 - DNA, 360 bp, Zea Mays
tcaagtggacccaagcactcagagacggtggatgagagctcaggtgcaagacaagacaaccgacagtgaattgcggcttcttgtcatgtgtgcctacccctagtcaacggtcacactcttacaacacgaactgtacaactattaggctacgcctacgcgtacatatgtatttatgaataaatggccgacatgtggaggagtgatactatatattgagtactggaaaacaagctagtgaaacaaatctgattacattaccaccatgcatattagctaagcgcctgcttggaaactaattaatgatgtgatttttaggttaattgatggcgcatgtaaaacatatctcagattttgtctcta

SEQ ID NO: 45812 - DNA, 798 bp, Zea Mays
ggagatcatgttggagtcgatagggcagtatggccctagctatcgtggcctatcgtaccacgacattagggttctgtggcttgaaagggctgtcgagaggacatcatcgctgacggcaaagcatgaagaatcgtggaaggagtatggctgctcattgatgtcagattcatggacagatgttagaggacatcatctaatcaactttttggcaaacagtccagcagggacacactttttgtgctctattgatgcatcaagtgagatagctaatgccaacatgtatttgctagaaaaatcagattgaaaaaattgacagagaaaatgtagtgcaagtagtaactgacaatggaacaaacttcaaagctgctaggaggcttcttatggagaggattccatatttgttttggacaccgtgtgctgcccattgtttggatttgctgctggaggacattgagaagattaagtacttcaaaacttgcatcaaccaagcaaagagggtgtgtcggttcctatacaaacatgggaggttgtacaaccttatgagacaaatgattggaggtgaccttgttaggcccgatattactaggtttgccacgttttttctcaccctggctagcatgctcaagcataagaatggtttgaagagtgtgtttattagtaacgaatggcaacaaagcaagttctccaccactcaagaaggcatccaagctgaaaatattatcctctctacagagttttggaatagtgttgagttctgtctacgagcttctcaaccaattctcattgccctaaggattg

SEQ ID NO: 45813 - DNA, 385 bp, Zea Mays
tagaggttttatgaagctcattggaaaattgcgtctccactgcagcatgatgctgtaaaaacttaaatatattttctcttcaatcggtggacgctccaatgaggttaatttcatgcagagggatgcagatagggtggtcgagtggatcaaataaagaagagatctatgcatttgatgaagtcctgtctagtagaagagattattgcgccttcatgggtttacgaagcacgacttcaatgctagaaaaagttaggtgcacacatttgaagtatgttggaagcctgaacttcaggctgtcaatagaaaatattaaaaaaaactttcggctaatgtttccaacgtggccaagagattcttcacacttatttggagcagaggaggaaaa

SEQ ID NO: 45814 - DNA, 624 bp, Zea Mays
gaatgtgccttcggctgtggaggagaaggtcggagggcaaaagaaatggcggattgtaaatgtaatgcaagcaaattagcaaacactaccttcaacttcggcggtgaaagcagcaattcctgcggataccaaatatgctggcagagctgaagctgaagaactcgcagccacaatgtcagatattgacaaactgatatcagatgtggttgcggaggagacaaatgtggctacggaggaaagcatggtcatagtgcctgataagggaagaaaattgatgatactccttcggaagaaaaaggtttcgaccttcggcacttgggtggccaagaacttttggaggaagataaactagagctaaaataattcgctatggcttgcggttaccaactggggtccatgctctttggtggggtcgctgaagaaatcttgggatgcattcgcaaccgcgtcggggcaaaaattgtgggcactttatccaagagcgatggattcccgaagttggagtctaacattagctgttacagacgacaacatattgtcggcagcttgttttattccaatttcaaggtgaggcttttctctatactctcttttttatattaccttcgtaatagtctgagtatt

SEQ ID NO: 45815 - DNA, 720 bp, Zea Mays
ggaggaggtgctacgaaaactcaaggaatgacgtgaaaaggcaacagaaaagtacctatcatactccacggtggatcgtcactagaagatcaccccgtcgtggggagatcgatatgtcatctctcctacctccaccttaggctcccatcgtaagtaccccagatccatcttttgagtctttcatggaacaacgagggggactgttaaaagaatatgtagacggatctattaggaaatgggcgctttcatataagaaacatactgcccctatttttctctcacgtgaatccaatacagaaaccacccgcgccaaacacgtcggatacaaatgggtctccctaggcccaaccatcgtatggtatgccgatgcacatgttcgtgtcaccatcacaaccaccgtcgtcaggcacacgaccggctctaggcacaattggaccgtccgcgagtcatctcggacattctgaccctacacaagcccacgcacagatcactcagatagtgccatacacacccggaccatctgggtgtgcttcggatcgtttggcccggtcacggaccgtccgaccccttacgtcggaccgtctggatatgtcacagatcgtgcggtgtgtttcgctggaccgtccgaccccacgtgaatccacgcacagaccactcaggtcacaccacacatggccgaactatccgggtacaaccccaaacaactcgaccaggtcgcgg

SEQ ID NO: 45816 - DNA, 357 bp, Zea Mays
cccgcacagagctcgtctctcctccggccgccagcactgttcggccgaattcgtcaccgccgctcgctacgtctataaattgaccccgtcgcgagctccgtagggtagtaagctgtccagccaccacgaatcagcctcggtcattctctagaatccacgaatttggaattctccccaaactggtttccgccaccgcaaaactcagctcgccgcggccagctcaactcaggtcagtccaagtccctctgttgcttgttctagcgtccctagtccctcctaaagctcttagacccgcccaattgaactagaccgccacccatcgccgagaacgcttgtggtcatccgcctcacccgcgg

SEQ ID NO: 45817 - DNA, 1606 bp, Zea Mays
agaatccagcagaagctacaatttgcattagtaaatgcagtgtgatgatttttttgaaatttctttttatttcgtgaggcatagaggtcgccctaagatgagtaattacgaatgtgcttgtgttggatcgaataggcatgagtgtgccatgccgattcaagtcattaccgactaaaaccgaccgctctgttagtagggtatagtggtcaccctgagttacgtaagagcgagcatgttacaccgccttaagtcgttgtcgacttaagtcgattgccccattagcagggtatagtggtcaccccgagttaagtaagcgtgagcatgtcacaccgccttaagtcgttgccggcttaagtcaattgctccgttagcagggtatagtggtcaccctgagttaagtaagcgtgagcatgtcacaccgccttaagtcgttgccggcttaagtcgattgctccgttagcagggtatagtggtcaccctgagttaagtaagcatgagcatgtcacaccgccttaagtcgttgccggcttaagtcgattgctccgttagcagggtatagtggtcaccctgagttaagtaagcgcgagcatgtcacaccgccttaagtcgttgctgacttaagtcgattgctccgttagcagggtatagtggtcaccctgagttaagtaagcatgagcatgtcacaccgccttaagtcgttgccgacttaagtcgattgctccgttagcagggtatagtggtcaccccgagttaagtaagcgtgcttgatagtaaacaagttgagcacctttgataatgaagtctttttattgatgatacatttcccattttacagaatacaaggccgtcccaatagcttttgaaatatagctaggggtaaaacttcttgagatgttctatattccatgagttcccaacttccgtgccatccatttgagtgaggcgatatgatccaggccgagtgacttatgctaccaagaatggcccttcccatagtggtgacagttcgtgtcgcccctcccccgttagaatttggcggaggacgaggtctcctactgcgaaggatcgatgtcgtatggccttgtcatgatagcgcctcagagtttgctgataccgagccgactaaatcaccatatttaatcgttcttcttctagtatatcaacatcctccagtctggtggcctcagcttctgctatgttttcaaagatcaatcttggtgccccgaacttgagatcagcaggtagcactgcctccgaaccataaaccataaagaaaggagtgttcccattcaaagctcgactaggttgagttctgaggctccagaccacgtatggcaactctctgatcaactttcctacgaacttttcagtcttatcgaagatcttctttctgagtgcttctaatatcattctgttggctctttctacttgcccatttgctctcggatgcgccaccgaggcgtatttgatctgaatgcttttttgttcgcagaaatcgaagaattctgagcttgtgaaattggatcctaggtcggttatgatattattcggtatcccgaatctgaatattatgtcttgtatgaattccactgctttagctgaagtt

SEQ ID NO: 45818 - DNA, 564 bp, Zea Mays
atttgaggtagctgaacagacggcgtcaagctgcatctcgtctctagaactcaagtggtgcctattgcttttccaaatcctacgcgtctaactcagacctagaccgacgctggtcggtagtatataaatatacaagcgtcggggcctaggggcaactcatctatgaaggaatcatctacacatggaagagagacaaggtgaatgacaactggtcccaaggagatttgagcagtaccaaggttatgataaaagagcctaaaatcttgttgtcacaatccttaagctgcacataaaagagatggacaatataatattgatgcaaacatcctacgtatggagttaggttttcttcaagatcttattccacataaaaatatgggtccacttgatattctcaattttttaaaacaacatgattattttacgagtgcaactattgcatataaagttctgttgaccatttctataactgttgcatcgattgagtggagtttttcaaaattaaagctattgaagttctagttacgctctataataatacaagaaaggctgaatgtattggct

SEQ ID NO: 45819 - DNA, 643 bp, Zea Mays
cggcaacccgttctctgacgaagtgtagatcaatctcaatgtgtttggtgcgttgatgctggatgggttcagaggtcatgtagacgacactgatgttgtcacaatacaccagtgttgcgcggcgaagaggagcatggagttccaggaggagctggcgcagccatgtggcttctggaactccattagccacaatgtgatactcggcttcagcattagacctagagacggtgttttgacgcttggaggaccaggagatgagattgtcaccatgaacgcagtatagcccgaggttgacctgcgcgtatccgagcaaccagcccaatcaacatcaatgtagaccacaagatcagtcgttgtagatgggcacaacaggaggccaagataaagggtgccacaaatgtatcatagaattcgtttcagcgtggcaaggtgtggttcccggggagagtgcatgtgaaggaaacttgttgaacaacataggcaatatcaggtcgggtgaatgtcaaccactgcaaagcaccaacaagactgcgaaaatccgaagcgtcagttaccggcgcaccatctgctgaagcaaccttcagatttgtatcaaccagagtgaggcaaggcttgcactctgacatccctacacgatcaagaa

SEQ ID NO: 45820 - DNA, 1350 bp, Zea Mays
gattaacaagttcatccggtataggcatcgggtattcatcttttggggtggctctgttcaaatctctaaagtccacacagatcctgatcttccctgtgttcttcttctcaactagtactatattggagacccactccgcatacctgcatggccttatgaaatttgctttcaacagccgatcaacttcttccttaactctgtcatggatgtcgtggttaaatcgtctaggtggctgcttttgtggcctaaacccatgcttaattggtagcctacggtcaaccaactccctactcagccctggcatctcagtataatcccatgcaaaacagtctctaaattctctaagtaaatcacataccttttgcctctgaccagctattaatttagcacttacaaatgttggccttggcaccttaccgtctccaatgtcgacttcctctagttcatcaacagatgagaacccctgtcctaactttccaaggtcatcaaaatcatccaccacctcacccataccgtttttgtttaaacgatattcatttgtcctctcctgtaaccattctaaactattgtgttcattcatttataacactgagtcattgagtcgtgctatgtcagccgactttacatgaataggcacaaaactatctcgctctacactgatgaaatcatatcctgacaaatctcttcctgtcaaacaccgcatattaccgtgctgccattccattggcgtttccatgagtgtgatacacatagcggtgtttgcttcaatcacctccacctgatcacctacccattgaaccaaaaactgatgcaaagtagatggcacacaaccattagcatgtatccagtctcgccctagcaaaacattatacctccctttcacatccaccacgaaaaggccgttgggacagttttgctgcccactgtgagttcaacagacataattccttttgcttgtgatggcctcccctgaaaacccacttagattcatatttgtcttaattagctcactctctttgtatcctaacttagaaaacacggatagcgacattacatttacacctgctcccccatcgaccaacatgccccccattggcttcccatcaatgtgaccacgaacatataatggtttcagatgagatcccttctcatttgttttttcaaacacagcatgctcagccccgaatgttagctcagccacatctccctctcttgctctgaactcagtaggtaaaacaaacgccatgtttatatccatgtccccatgtgcttcaacactttcttctttatcggaaccactgctgttgtcattatctttttcctccttggccaatcgtttctccctccacg

SEQ ID NO: 45821 - DNA, 687 bp, Zea Mays
tgtaagttagatcaccttgcacactaagttcttccataggcaactgctcctctgagacatggagacacttcttaacctgagatacatggaacacatcgtgtacatcagatagatgatctggtagctcaagctggtaggccatctccccaactcgcttaaggattttgaagggtccaataaagcgaggggatagcttgcctttaactttgaatcttctcataccacgaatttgtgacacctttaggtatacgtgatcatcgtcttcgaattccagtggtcttctttggttatcagcatagctcttctgccgagtctgtgctatcctcaagttctccctgatcatccgaacttgttcttctgcctcttgaataatttcaggcccaaagaattgtctctcaccagcctgatccaaatacagaggggttctgcactttttgccatataaagcttcaaatggagacatcttcagactagcccgataactattattgtaagaaaactttgcatatggtagactcatgtcccagctgccaccatgcttaagagcacaagctttcaacatatcttcaagcacttggttggttctctcagtctggccatcagtttggggatgataagccaagctaaaattcagttttgtatccatgttctcatggagactcttccaaaaaatcttgaggtaaactg

SEQ ID NO: 45822 - DNA, 558 bp, Zea Mays
gcaagatctcaattgggcggatacaccgtcaacaaaatcctatggtcatagacagataagcaaaaaagataattcgccagtatgaacaataaagagcaaaatgttgactcacctgaagattggaaaggaatagtggaagacccaacgcaggaagggctggtgcatggtttgatgagggaagatcagcaggaacaatctcaagagcacgaattggggtaacttcagccccaccaacagacagcagactcctggcgtctggctcgctgacctctaaagtgacttgaccagtgaaagccatagaaacgcgtgtcaccgtcacctccttgggccggactgagggtgatccaatgtggacgtccatggaagcagtagagaaagagcatgctccaatacccttgggggctggattaccaccaacgccaccctcgagggctaggttgctaccggcaacacccttaagggctgggtcactaccagtgccaccctcgggggctaggtcttctgcagcagccacctctaaggctgaaggcccctcagtcgcctccataggagttggat

SEQ ID NO: 45823 - DNA, 1515 bp, Zea Mays
gtgagcgagtttataaatctgataccagttgttattgacaaattataagttaaaatgatgcagtgtctataattaaagttattgtaaactggatgcaaatttgcgtaattgtgctaacaaaacagcgtaattcgtctgtacagaagaattcgtgacacatactggtgaataatatatttgtgaagaaaacagagaataacaataactagtgagtaaatcactgatagaaatgtgagcgaatagtcgaagtttgaactgaacagtgcattatacaagagaggtttcataacttgtttaatacacataggtcgaagttttatctaagaactgcattaaacatgagtggcttgatagcttggttgaaaaacacgcgcaagtttcaatacagttacatagacatgcaacagatagttgggcttcacaaaatgctgttccgtaacaaggaagccacaaaaggttgttccatatcaaacagttgcgattcacaaaaggttgatccagcgacactactagcgtgcaaacttgaatctttgaatttctggaggcaacgggaggcacttgttcttgctatggaaggtgaggtaatatagagctagagatcgtaggtcgccagagttttcctgcataatacacattatcccaaagtgaataggttatatcagaaatgttgaatgtataaatacaaactgcataaccataaagtgacttactcgttgtatatattgcttgatagaaccatccatatagtcatagtactggatgtatctcatgacaaagaagccacaatcattagatccaactatcatggtgggacacataggtggcatgtcaattgggaaatttccaaatttagggatgcatgaattgggtcggacttgttgcaaagatttgttcaatctgttcatgataatcctagcccatggtagtttcctggagcctatgtccttttgggagtaatgaaacatcttccatgtagtaccacccaactccggaccatatggatttgaatctaaaatgtgaatgcatcgaaactggatattgatgacatacaatgtccaatgtcccatatgaagtatagggaccatgatctgtcaaatatcatgagttagagatacaaaatgataacattagtgtgtagctgagcgatgaatataattgcataacagaaaaacgttgatacaaagataaatatttataccgttttgtagtcaacaaagttgtccagttggggcagtgtcttgtccagataagcatcaaggacagtttgataaaaaatctgaggagacttgctgtagcgttcatgctcctcaaaatcgaggagagtctgcataatcataattactgtgtcatataaaactgtatgtaaacaattgcaaaaataggtaggtattaatgaattgtacatacaccaacattgacatccagtacaagtttgtttttgttgatgcacgagcaattatttatttcttcatcgtgaaaacacaggatgaaacactgcatgaacacattatcgag

SEQ ID NO: 45824 - DNA, 306 bp, Zea Mays
gaacgatagtaacgaaggtcggggtggaattgcacggatctagtgcgctgatgatggtgccaccacaccgggcagcctggtcgtcgggtttgaaccaccgccgctctgcatactcgccgccacggtagaaagaagtccaccgcgcagtttgtcgtaggaaagaagagagacgggcgtcgaccatttaaaattgaacggacaagattagatcggggtggtgtcgtaggatcgtgattggacgtatgggatcccatctcagaattttaaatcttgatcgttgaagttagatcgggtgaccgggatcac

SEQ ID NO: 45825 - DNA, 377 bp, Zea Mays
cgtgaaggctgtcttcggtacatcttctgctcgaatctttaactgatgatatcccgatcttagatctatcttcgagaatatcttagctcccttcatctggtcaaacaaatcttcaatccatggtaatgggtatttattcttgatggttacttcatttagacttctataatcaacgcacattctcctcgaaccatccttcttgttcacaaatagaactggggctccccaaggggatgaacttgggcgaatgaaacctttttctagtaattcttctatttgtttcttcagttctactaaacctttgacatccattctatatggtcttttcgagataggtgcggttctgggtaataattcaatagaaaactctatatcac

SEQ ID NO: 45826 - DNA, 556 bp, Zea Mays
agaaacaacgcactacatctctagtacaggttcttctagatggaggttgaaatcatggacaagctttggatagaaacttcctcaatcctggtttttccccaaagcaaaagggttgctcatcttctatgaccatttctgcgaaagccaatcttaatgcttcttgatcaaacttgaaagtgctgataccttcacaatgtgttgcttgtagaatacactgtgatggatctttattgaacttatttggattgcgcttacaaacgacaaaatgtctcttcaaagaagatgtgccatgttggccagcttctgccttcatgtttcggtggcaatatttgcacctagcagtcttaacaatacctttatcatcttttatcttaatgaagtgttgccatatctctgaccttggttccatttcctttcgtccccctccctgatcctctgtttgagctaaaaatggtacctcttgtggttttgatgttggtgcaacaattactgcattatgattgtgtgatgcttgaatactaagttcaactgattcaacctccatctctgtgtgctc

SEQ ID NO: 45827 - DNA, 390 bp, Zea Mays
caatttttcacgttgagtttcaaattggagggattagtcatgaagccctggatgaatatgctaagcttttcaaacatcccgtcacaagcccaggtggaggctttatcgacacttttggctggtccattccagcagatttggtgtcgtaatagaactctagttctctcttttggttgttttctgttgtctgttttttgatggatgcttcaaaacctttgatctggaatgtgaggggtttgaactcctgtaagacaagattcagtaaaagagcttgtggaatcctcccagtggatgtggtctgctttcaggaaactaaaatgcaaattgttaagacgaactatcctttctatgctaggtgcagagttcactgaatttgtttttctcccatca

SEQ ID NO: 45828 - DNA, 481 bp, Zea Mays
ttccctttaaattggttcgtattcttttgatgtggtcatttgtgttagaggtgctagagaatattagtgaagatgcacgtgatggggaaaagaaaacacaagcatcgggtttgatagaaagaatggaaacttttgagtttgtgttcatattacatcttatgataagagtattggggaggaatcaagatttatcacaatgtttgcgaagaaagaatcaaaatattgttcgtgcaataggattgattggatctgtgagaaggaatatgaatgacatgagggaaaatggttgggatcccttatttgaggaagtgaagaatttttgtaccaaaatgaacatagtaatcccaaatatggatgacacaataccaactagaggcagatcaaggtgtcgtggagctaagttggtgagttactaccatcattttcataatggaattttcattgttgtcattgatcaagttcttgttgagttcaacaaccg

SEQ ID NO: 45829 - DNA, 544 bp, Zea Mays
agtcgggcccgcactcttttcctcgcagggggtgaggtttttaacgaggcggagcatgtaataaatcgccgcaaaaatcgaccccaaaaaataaaagcggcaccatgacagcgggatgttgaaaaagaccgcggagtcagtcttcagcatttgacgctaaaacagtcactgcaacggccagtctcaatagccgttgcgtgcgacaagcacaatccaagcaaaagtcgcataagagtgcagctggatcatcacaacaagtgcataacagcacccaagggtgcgaagtcatcctagagacgcatatttttatccaagctaaagtcgcctaagggtgtagctggattagcacaaccagtgcgtaacaacacccaagggtgcgaagtcatccccgagacacatagttctatccccacaaaagtcacctaagggtgcagctggattcacacaacatgcgcatcacaaaaaggcgaagtcatcacctagacaggagataataccctaccaacagtcgcctaacggtatagtcggatcaatacaaacgtat

SEQ ID NO: 45830 - DNA, 739 bp, Zea Mays
agatatgactattcaaaggtggtggaggaaagaaggagaggaggaagaagaaaaggaaaagaaaggagaaaggaagggcatgcatgaagcacagttagaagaagcatgtgcatgattgtgtcaatcatgtgtgcgcgtgccatgtcgggccacacaaggatccaaagcgctcccccgcattattaattctggtccagaaggcacaaggatccaagaggaggagcactgcctgcgtccgtctctgacggagcagaagattcttctgcccacccatccatccatccatccacctcctcccctgctgcccattgcatgccagtggagcgagagaaccttggcggcttggccccatgtccggcatcttctctcttttagctaagaacgtggatcaagtgacgatgatgattcaagatccgtcgacttggatggagctaaaagaaacaaggaaagaaataaaggttgcagtaaagaaatgcgtgcgtaggtcgtgcaagtattctatccaagtcaaccgctggcactacacacacagtgagcagtgtcagactgactgactctgactgtgactggttggttctactccattcctcgggcgccgatcccgaggccggctggggcgaaaaacctcctcgctttcagagttccagcagtctgcagtccactggggcccatggcaatagtaaacgccgcagcgcagggggaagctcttctcgccgtcgagcgtttccggactctagag

SEQ ID NO: 45831 - DNA, 547 bp, Zea Mays
agtatggtcgcgtaagcccagaacatcacgtcgtaggctccgagcgagagagagaagagggaggagagaaatcaagctctaaccatcgaattgagctgggcgagactcgctggacttcaccgcggcacccggggcgcattgtagaagacattcccgggtggctgagcgacctgggaggacgaatttcttgctggggttgtctctccgtcgtgcggtcgatgcgtgacgtgggcagctccaccaacgtcccaaccttgggtaagtaatcctctggttgactccctttagcccctggaatctataggaccccgcagtagggtgtgtgcatcgcgtgtctgccgacaattgctcgccggagcacttcggctaggccaaaaccgccgtgcgccatggccaggttactccggtgctcctagagtgtaagtatccctaccatctgattctccatgggtagggcagcgtgtgggggctatcgaagtggggtatcgcgtacctgggcgaccgaggccttcttctccggcgtgcctgtgaggtgcataggggcggc

SEQ ID NO: 45832 - DNA, 457 bp, Zea Mays
aaaacaataaaaaagttaagggaagaattttaccttaaagttagaataaaacaagctaccggcgatatgctgccgtcggtatctgatgagatcggcttcgagcttcgggaaaccaacacttttcgataaagtgctaacaactttctccccagtctggtctcgaaggcaacctaagctctcttcgtctataccaccgaagagcagtgcccctggctggtaccagcaagatatagcatagtccctcagcccttctttttcagccttagacaactcttgcccaattatgttttgaaagttgaaatttctttctttcgaagcatcttcggcaagctccttctcttttccaggcatcttctcccttttttcaggctctgcagcagggtttcctcagcagctgcagcagtttcttcctcagccatattcaaaatcatttcatcaatgtcagaaagtgtgtttt

SEQ ID NO: 45833 - DNA, 503 bp, Zea Mays
cccctgcatacttgcgtgtgaccaaaaaatactcactatttttccatcattgtctagctggaaatcacaaaaaaattatggattctgtttcttgcattctctaaagaaagccaaaagtttggctacatcatttgcgcagttttctcttctcctggctgccctcctacatttgtttgcacaaaaaatgattacacacacatttactatagtaatatttatggcacttgatatatacacatgtaacaaaaaaatattgcttacatgtttttcagatcttgagcagttaccggtacgttctccggcccatcatgcatttctgatataaaatcaactatgcaatgctgcggcactcggctatcatgcattgcatcaacaaaaattatgaactcagcatccctaattttgttgcaacgtaaatgttgtttctctgcttcgtcagttatgaactcatggttatgctccaagtttaccagttcaatttttgcagctacaaccattttttt

SEQ ID NO: 45834 - DNA, 687 bp, Zea Mays
tgtaagaactggaaattgccagtcgtgctctagaaaaacagaatgcaaggatactctctcgcaggcttcagtcgccatcaccaattctcctgtcattcggtgttgttggcataggtgtgatgaattgttgttcagtgtgaacaattccatcacttgtgaccacgttggtgtgaaggatttgtggtctcgccttgaagccatgaatgatagacaatcagggaatgaattccctagtcaagttgccacgacacatggatgggatccgaagatccttgaagcatctatttgtccacctcggttggtagtcaaggattgtagttggcaggccacttccgatgggttctatttcatattgaggtcagttggagtcactagtttccatctcggcattgtgttggtcgaagagccaggtaaggtggtgtttggtcttttggtcatgtaaggtcattgttttggtcatgtaaggtcttgttgggtgatggctggagctaagcagctaggtagtcttgctttagctgacaccctcttggcacccgggtagctcctagtggttgtagtgcgttgtgtgcgtgtccgtgggggggtttcttttttattttttatgtaaggcatgttctctctattatctataaagatgtgcagttctcccacgctttcggaaaaaaggtcattgtacttgactatttt

SEQ ID NO: 45835 - DNA, 673 bp, Zea Mays
cagaaccaattaccatcgatcctagcatcacaaatacgcaatgtagggttttggaatcggatgtcctggagaagagcggaccctccgctggcagtaaaatctgtgacaagctcatttgcagatcgacgagcctctgccctgtgaagaaccaacccccggataatgggtgcgttggcaaaggggaggtcaacttcatcatccttgcctccatcatcatcacttgttggctcccatgcctatggatttgtcgcgggtcgagaccgaccggagggattccgggtcgtttgaccgcgagcaccatgagaccctgaggcctcaccaccttgcatcacatttccggatcctctcccgcgcttggatctggaacgcagaggagtttcttcacagatttcttgatcatcatcggagtcagtctcaactactgacgggttcctatgacgcaccatccttaagataaaaaaggagaacaaatgatgagcgaggagatcgatgttcaaggattttaacaaacacgtttgagtaaagacgcgtatgatattgagcatgcacttcaaccgttcatgcgagcggttcaactacaacaaacaataccaaactactaaactcaaacaatgttcgagacaaaacaagacagtttaagtgttgcaagcacctaaactacatagtatccttg

SEQ ID NO: 45836 - DNA, 475 bp, Zea Mays
ggcgactttggcgactgtcatgcttggaccagggtgcaggcccttctgctccggttcctgatgatgtaccagtagaggcccttctggaggttgatgccaagcgttgtgatcgtgcacaggctgctgtttgcatatttgacgaggacgaagaggaagaagaagtctcgctgatccgcaagaacaaccggcactatagaggtagcgaggggggtagtgatattccttctccagctttgtcggctcttgtcagtcttcagggactttcaatattatactttgatcaagtactggaggaagtcgtccccaaagacatgctattcgagccacctgcagatgatatcacgaccgtctattcagaggtcctagacgatgggctttccttgcttgattccgctgggaaagaggtaacccgagcggtgtctcgcgcatcgtcgactttggagggtagtcttccatgccgaggcgctggtctgag

SEQ ID NO: 45837 - DNA, 392 bp, Zea Mays
tataatgctagatacacaccaaaagttaccaaataatagaaaaggtgcactaaaaaggtagtttatgacctgtagcagtatgcgggaccatttgtcgtatgcaattaccattagcaggtgatcggattgtttattatctgttacagaactagatccatcaaggttctcattcaataatgtggcttttgctttctccacattttgcttctgtagtataaataaaaagttcatgaaatgtcaaggcacatctaggttgcataaattgttcatcattgaagtcacatgatacctcatcttttggagagagaaatggagatttataactcaggaaagcagcaacggacagaattggtgataaacaaccaaagatagcaccataaagcatcatctgc

SEQ ID NO: 45838 - DNA, 746 bp, Zea Mays
gccatagtaaaaaccccacccgttcaaaaaagaggagacgctcaactcctcgtaggcaaacagcagagcagctcgcggtgagtgctcaagtggagacctctcgatcgatcgagatggttcatgtaaagcagcttgggcgctctcagcctcccgtcccttttgctgcatgcctaatggcaattgaccgcgacagcggagcactatagagtccgctgctgtaaagttagtcccggcgttgttcagccatttgacttttgccgcgatggatggtggatttcgatcaatcgggccctgcccgcccaggcccaggcccagggccgccggtccccatccacgcacgctcactctcgccgcgtatcttgctctttctaggacgctaccatggctcacgtcggataagaccctgtctcggagaagtaacgaaaggaagaattctcatctctgtgtcgatcgcccattcctttcatgtagtgtttttttttttgaaatttgatcccttcgaattgtatgttgtaagctgaccttgctgtatattctgtctacagcaccaaataaatcaggtcttcccctgtaccatccaagtccacttgagccgactctattgctctctatgatttgaagtaatcatcctgcagcatccgcgcgccgggtttaattaggtcgaaagaagcggcaaagtaacatccagggtgtgggaagatttataagttcagcagtgtccacggccaaagagagacgacgatcca

SEQ ID NO: 45839 - DNA, 512 bp, Zea Mays
attaataggtggtccccacctgtcaggcttatccccttcccaatgaactttgtctgaagctcgtcgagccgttgggattggggtttgtcgttgtttctgtgatcggactttggcccgggtataaaaccagccgcaaccaatgaccccccatccacgtggtgggccgcgccgacgagatcaactctaggaaccgcacagtaagaacgccattgagagaagaaatgggtggtggcctccattgttaacctcgtcgacgaccgtcattcgcggacgaacattgggctcaagggatcaaccatggtgtgtggatcatgtccagggtggtatcatggcgcaggagtcatcgggcttgcatgaattcctcgctgtcgttccgctccgccacagacccgcgctccgccgtgggcggagttcggtgctacctaatcaccggtaagttctatgctcattgactcgcattatcctccccttcgatttacgccttcctgtatagaggatagtgcacctgtgcg

SEQ ID NO: 45840 - DNA, 431 bp, Zea Mays
cattggtaattgttccttagggacatggagacacttcttaagttgagacacgtgaaacatagtatgcacatccgatagattatcaggtagttcgagttggtatgccatctccccaactcgcctaaagattctgaatggtccaataaagcggggggacaatttgcccttgacattgaatctcctcattccacgaagtggggacaccttgaggtacacataatctccttcctcaaattccagtggtcttcttctgttatcagcctagctcttttgtctggtctgagctaccctcaaattctcccgaattatacatacttgttcttctggctcttgaatcagctcaggcccaaagaactatctttctccagtctgatcccaatatagaggagtcatgcacttcctgccatacaaagcctcgaatggtgacatct

SEQ ID NO: 45841 - DNA, 998 bp, Zea Mays
gccacatctaccaccttgaatcatggtgttgcacactttaccatgtttaaaaccatacatcttaactgagttttaccatgtccattttcatccaccatgagagaagtggtcatgttgtagacatacaatgagtctccaattaattaacgggtgactaaagtttagtccatgtcacatcggatcgccacatcaccttgagtcatggtgttgcgtactttgacttaaaagtgatgtgctgactactacataacacatagatttggttaatattttccggtttgttatacaaaactataaaaaatttatttagatatttaactacacaaacattatttagatcttcatacaagaatgaaaaatacattttgtatcatttatcacattgaagaatgaaaaatagcccacatttcgtagtatcagtatatagttaatgatttattatagtacaaattcctatatattaaactgttgccgaacaaaccatagaaccccacacatcgcgatcctcccaaggccatgagaaacttccaggcggaaatcgaagcatcgtgccataataaaagtagaaaaatgcaggaatcgtcgtgtccgccgtggtggaagggggaaaaagagagcagtccacagcgaccacggtggcgggtactcagtgttccctgatctatgagcgcttcatctatggtctgtgtggtacggaccagacatcgttgtctccgtcaggttggcacactgtcgatgtcggtgaccatatgattgtgtttgcagccatccctcaatgtcatctgcttcgtcgcgtgtattattgttctctccgattaccataataggtcgttggaggccgacgtatagacatgtctagcaaaacagcctgcccacatcgaggctatcgtggtcatggtggtcggagccatgcagagcactgtagtcgacgggcacctaggcacacttacgcccgccaacacggccaattcttcgcacaatcattttacagactaaac

SEQ ID NO: 45842 - DNA, 763 bp, Zea Mays
cgcgccgcacggcggagctccatgcaatctggcacagctaatcactcgagaagctctcccccatccttgaccttgccctcttgagtccgcactcgccgcactattagagacccgtattcctcttctttcgaagtaacccgagagcctggcatgacccaaggaaaaacacggtgaggaagagggaaggccaggagcgccgtcgtagccactgcgtgtgattgtcgccgttcgaccattgggggtatgcagggatcgcctgtgcatgcagattcgggataggaacctgccgtgatgaatcgtgggcgggccgccgtcaaattcctcaccgaagctcagaacaggggcgacatacccccttctcgtgggcggagctcggtgcaccatcaacgtcggtaagaactcccccgatgaactcgcgctaccttcttctgcattttaaagtcattagacaagcctgggatggccggggcgccaaatcaaccgtcgccagcgagtcgccgtcgcgaccgtgttgcacgggaacgctcgaccaccgggagggggggagaagacgaccccacggccgtccatccgagattggacggtatggattcgatcgtgggagcggttgggtttaatcgccggtaaccgtccgttgtgaaatcgatggtcccgattagatcacgagcgcattgatcataaaccctagatctctgatccaacggcctttccaacgtactgattcgttattgcgtctacctaatccggtgcgtcggagctaaat

SEQ ID NO: 45843 - DNA, 938 bp, Zea Mays
catcgtcatatttaatctatacaggatgtacaatgagcatttacaacacctgcacatagtttacaatcatcagctacacctttatcatctacgtacacaatagatcagatcatgaggattcctagttaccgaggatttttcaacgcaaacatctcctagatcacctaactttgccgtgaaaataccgataagtgatagtctcctacagctgtacggatcataatcagaatctctttggggagtcatatgggctttgtcgtctgtggctgatgtcgcgccatggatctggaactgggtcgcttcctctcatctggttctgcatgtcactgactgtgttgtgggccacagatcccgaggagaatgccagatgtgatggggaagcaacgcagctccagttccattgcttcagctggcgtaacgggcttgagcatggagacaccgggagagacatgtttgctctcacatcaatatgcctgctgcaggatggatgatggcagaagtcaaggtactgggtgtgatgggatgaaccggaaagaaggatggtcagtaaatgcaggttactgtgcctggaagttttgtggggtgaaacgcatgctgaggaagatcccgtaaaacctcgcgctcttatccctccaatgtcccgcagaggagcaacacttctcttcaatgaaggttctttgttggactgcaaacaaatttaagggtagcaagatcattgcaaaacattaacatgactggaaatgcttctaagaaactagcacaatgtctattaaaaatggaccagcatgtaagccacttttttatgacatgcctctgcaggcgaagatagtccatttctcaaagtggtgttgcatttggccccactgatttcctgattgtcttgaacaaaaggatggcgcagcaactgagttgcagatgggcgctgtgccggatcacgt

SEQ ID NO: 45844 - DNA, 713 bp, Zea Mays
tacggaaaggtccaatactaaaaagataacaaatgagattctggctgggttgcttgatgattctgaagacagagaagatttcgatgttgatagtggtaatgaagatgccgaagatcggtcatggaggccaagtcacgtgaactttgggaaatctactgtgaagaaagggcatattgaggccatgaagggtaggtattttcatgatgtatctatagtgagtttcggaggagaaaacaccattctgttcctcttcccgagaaagatgaagtggtagttttccgaagctttatgaaagtcgggctatgcttccccctgaacaagatgttggttgaagtcctaaaaaagtttgaaatatttcttcatcaactcactcctgaagctttaattagagttagagtcttcatctggtcaataaggagctaaggactggaaccagatgtcgattgcttttgcaatatccatgagtgtcctatcaaacgaaggctactaggaaagagcagtaccacaataactttggttgttatacctttgtataccggttagatgctaggcaacccgtgacaacttttcagaaaaaatggctaggctcatggatgaagcagtggtttacgtgaagaacgacttggataagagaagtgatattatggatgtgatccagtggtctatccaatcctgcttcagaataaagagaccaattattgtgaacacaaaaa

SEQ ID NO: 45845 - DNA, 1310 bp, Zea Mays
atgaacttaagtgggatccaaaccttaagagtgcaagaaaccctaattggaactgtggaaaaccctaaacgtaaaccctagggggctaagtgcaaaattagtgcacttttggactaaagtgcaaaaactgtgaaagtaaggtatcttaagtcatatggttcacaatcatgaagatttgcaagctaaaccctgaattttggacctatttgcaaaaggaccctatttgagttctaaagctaagtctgaaattcagtgttttgagctcatctttgtgaccttgtaactttcaaacaaggaggattttgccctaggtcaccacatcaattttgtaggcctattgtaggagaacagctttgatgcagacatcctctttggttgttacacaaaaattggagataatcaaacacaaagtcgggctgtctggctgtttgatgtctaaaatttagactaactgtggtactgagtcatcttgggagctctgtagatcaagaacttcaaagaatttgtcccgagtcaatatagcaaagttatagagccattgtagaggaacaactttgctataggtgtttgggcttggtaccatatgaaatttggagaaatctggacctgaaaatggactgtcaaacgctctgaagatccttcgccatggtacagtgatctgaaatggatcaggccgccagctcagttttttctcgccgctgacgatctcttcaccgcgattcgtgccgctgccgtatcgattcgtgctcgggttgatcggataacgctcgaagtcacgccgccgtggataagctccggccagtaaattatttcggccaccgtaccgagctcgccgcggtggattaggatgaattcaccggtgaccgccgccttccggccttgtgccgtgtgtctaggcatctccaccgcatcgccgtgacctgctttaactctccgttgatcaccggagtgaatgccacggtataggacaccaatccactgcgctagtgaaactccccctcctctgaccgtcgcgcgtcatcgtttcaattcccggccaccgctctcgctcagtataaattgaagccaccgtgagatccgtaaggtagtcaagcatctagccaccaagaatcagcctcaattgttcaccagggagcgtgaattttgaacttccccaaaatctgctcaagaacatcgtaggagagacctcactgcggtcagcctattccaggtcagtcccagcgccttgatcgtttgttctagcgttctaaggtccccctcaagctcctcgactcctctgattgaattagaccgccatggatcgtcgggaa

SEQ ID NO: 45846 - DNA, 641 bp, Zea Mays
ccatgaggatcctctgattgtcatagttccacatgatgctaagcagtgtctaaaacatgtgacgtgctttgtgcgccgtgctaaatttcaatactcttcaacgcttctcagattctcaaagattacaagaaagttctataaatgatgcctctatagaagatatctcttggagatgtatgatatgcacatacaaattgcaatactaaaacactactactttgcttactgtataaatttcagaacattatataagtgaaaatatgtccctcctttccaagtccttgtttcagatggtcaaccatctctcatcaggtttcaaggggtgcatatcctgcattgcaagcacataataataaaaaatatccatgttccaagggaaaaaatatgtatggcaagctgcttgcgagaaccatagacatgtgtaatcaaatgtttgcctagcaataaagtaagccatattgataatacagtttttatcttctggtctggtccattccactataacatacatttgtagttgatgatagtgaatgatgccaaaaaaataactgtaacgccccgaatttttgcagttgaatttttttttcttttctttactcgccaaaattcgggcgttacctttcctttttcgttttccctcg

SEQ ID NO: 45847 - DNA, 375 bp, Zea Mays
cacaattatagcattctctattctcaattgcaacatatgctggcttcacatgattaccactactcatcactcgaagtatgctctcttcatctaccatggctgacacaacctcatccatggtaggaagactctcctagtgacaaaaagaagctctcctgctctcaaactcggggtctagattctttagaaaatgggtcactctcctatcatctacccacttatggacaatatgtgtatcatgtggacaaaccatttggagaggagcgtagtgatccagctctccccataagtattgaatctcactagcatattgttccactggtctccccatctgtttcactacatccgcgttgctctgaatttccatcatcatca

SEQ ID NO: 45848 - DNA, 456 bp, Zea Mays
cgtcaatgttgtgtggaaggagcatgtcgtcataataggggagccgagtcaagcccgacttatgtgtccacatatgatgctcaccatatcccacaaaaccaccttctgtattggccacgagcccatctatctgttgatgaatttcggcaccagtcatcgttgcaggtgggcggtctgtcactacgacacctttcgtaaagttcttgatgtctaggaggaatggatggtcaggaaggagaatatgtcgatgtttatcgaaggacaaatatttgccaccctttttcaaccaaatgaacctaagagcttccttgcaaactgggcatgggaacttaccatgaacacacgaggcgcagaatagcccatacaccggtaagtcatgcatggagtactggtaccaaacatgcattctgaagtttgtcttcgtggctcggtcatacgtccatacccttcctccca

SEQ ID NO: 45849 - DNA, 316 bp, Zea Mays
ctttctccgaaattattatgggaaaggggacactgatttgcaccatgttgatacccatagtgaaagcgaaatagggttaatcttttcctataaataattttggtggttgatcatcaacacaaatacttggactaattagtttgctctagatttcatgtattacaggtgcataaggttcaaacacaaaaccaataaaagaatcaagttagggactcaatttgagatggagcaaagaacttgtgtgtgttgtgggctggtgcaccagactgtccggtgcaccaggaccgtacaagtatcaaccagccactctcaggaa

SEQ ID NO: 45850 - DNA, 339 bp, Zea Mays
tttctagccttttctgacggtggagggtctgaattgagaggaggtcacatttgcagggattggaattaggttgaaatggtcaattcaattccacggacaaccaaacagaccaattgttggaaaatgattcaattcagaccaattcttggaagccaaacagcccgtatagagaatccggaaccgggtctcattgccaatttgccatctctggtcggaacttggaatcaagaaacgcaggaaatccttcgcgaatgctaagctgacagaatacttaagcagagttggtcgctctttgtcgtcaaggagacatgcatggcaatatacggcgacggaacgatc

SEQ ID NO: 45851 - DNA, 629 bp, Zea Mays
aactcggaccaaagttttacgatccttatcaaattcagcaatgcattagggagatctcctacaagttgaagcttccggccaaggcacagatccatgacgtatttcatgtcgcactcctcaagaagtttgaaggcatgctcccagcagaggtggttcccttgccagacattctacatggcaaagtacttcctactccagccaaggtcgtgaagtcacacttaaacaggggtgtgtgggagttgctggtacagtgggttggacaggtggcctatgatgcatcttgggagcagcttgatgagttcaaacgacgacgtacagctcacggacgagctgtttgttgggaaggagggaaatgttatagatatttttgtggggcaccattattcaaggagaagggcagctagggttgatgtaccgaatgccagcataaacagttaaagaaagagaaccgatacataagaagaaaaggggacaggtaacaatcgtggctacaaattagggatactcagtttccttagctagtttgtcaccaaataatagcagattagtttcctaaatgcaactgcttgttttcttgagctataagccgcctacctctataaagacacaggctatagtttgtattagac

SEQ ID NO: 45852 - DNA, 935 bp, Zea Mays
tggaaaggtatatattgtatgcaaaactctatatattagtatgagagcatcttataaaatatttttttaaataatcctcttacctcctctaaatatatacatatatttttaaaaactatcctttactcttatatcctgattgtacgattacattctattaaatttctataattttagtcagtcattttagcctcatggatccaaaacttcgtatctatatcaatcgcattcttgacggtttaataataaaactgaaaaaactatactggagagagagagtaccatactgcatacaccatgcatgtatagcatgcatgagccccagccattgttcaaagctcttgaagagattgaactgggaagccaggaagggacaacgtgaagccccagccattgttcaaagctcttaaagatcagtagaagccgagcaccgaccaatgctaataaatgctctctcccttgactgctgctgctggcagggatgcagatgtgcttgctggtgtatgcgtacgctcaccgtacgtaaactccattcacggaagaggagatatcctcgcctggcctggcactcttgactacccccagagtactgtgcactgcgtgcgtaacaggccatgctgagcaagtgctctgtccctaatcaactctcctccatgcctgcagtagtacgctgtactgtagtacagtgcaataccacaggttcctaaatacgtgcttcgcacctgtccttttcttattcttcttctcctctaaaacacggaaataataataaaaaagagggtttgtgagaatccagacacgatctttctttctccttgtactagcaatgatgaaatgcatcacatcaacacgtcgatcacagccttcacttaagttcactggaaggaaggaaggaaggaaggaaggagagcggatatataggctgccctgacagc

SEQ ID NO: 45853 - DNA, 837 bp, Zea Mays
tttctaggccagcaactaggacgagtacttggaacacttattcagcattgctatctgttattgacttgtgtgccacatatatatatttagtcagccttcccagagccccagctttctctcgagcagaataggtactcctttgcaatcacacccacgctcgttggacagtcacaccggtcatcatttgccacctgcagtgctggtaagaaccttgtaagagcggggtaagacgcttcataatttgtattccaccatcctaagagatagttgtagggttcacattgtttgttgcctttttgtctctgttttgtgctaaccatgcatgaccaaagaatcaaatggacaaggacaaggggcctaagcttaacgacgatgagtgtgtctctcagatggaattgaaggagatgatgcgcgcgatgactgaagcttttaaaaaataccatgactctgcggcgacatcgtatgagcagcttgatcgacgagttgctaaacttgttacacgcatggacgtactggaggcttgtcccccaccaccaactccagccccagctcactctcctgtggacgacgacgatgacgacgatgtttatgcaccgctgggacaacgcctcgcacgtaatcgaaaaggtatgggaggtaatggtagacgtcgtcatcataatcctgaaccagaccatgatccatttgctaagattaagttctctattccaccgttcatgagttcttatgatgctgaagcttacttagactgggagatgacggtagaacaaaattttaattcccatcttgttcctgagcagcatagggttagacaagccactagtgaatttagagatt

SEQ ID NO: 45854 - DNA, 341 bp, Zea Mays
gtaggggcaggatcacccgtattgagctactccggcgggggtgccgtcatgctcgtgtcgcgtcgccaatctcgggtgagcgaaggaagaaaggagaagggacactagatccaaaattatggcgttgattagattctagagtagagattcgtgtgggtaacttgtttcgtcggcttcctaatgtacgacgtagattagaacagcgtggcggattcggcctatttgatccgaaccgaagatcgatgatcggatggttgtgggtagtctaggtttcataaaaatctggttcgtcgaatcccgatcctgtggcggccctagcataccggttgatttataaagag

SEQ ID NO: 45855 - DNA, 661 bp, Zea Mays
caggagcatagtcatggtctacactattggcttaatagatagtagagatatagacctaagtgtcacacgtgggagcaagcgaaaaaggttatttaaaacactttgaaaatgctaactatgctctaatatgtttgtcaaaacatttgagagttggcttatttaaaaagagaggagaaaaaacactctagatttttctaagtacattgaatgtgttcaatgaggcactagacacaacaccagatataaatatggtctggatttagtacatggtttttggccaagcactaacagcgacagacgggcacaacgagcaaggcgcatcagtgcatgacacatggacgggcgcgtgtcaccaccgccatggtttttccttttctcatgaagtaacaggatcaaaataacatctaatactagttaattgacataatcgatctgtagcaagcaattgactacataaatcaatctacaacattcatctgaccacgagaaaaaacaattggattgaacagatcttaaccataggtttagagcagatcaagacgacatatcgtgtctcttgattcagtggatagaaacaaagttcgtcacataggatagtttagcaagaccgtgggacttgctagctttacagaaagttggtacataccgaaattataatgac

SEQ ID NO: 45856 - DNA, 365 bp, Zea Mays
ctcggaatcacctaagtcctccgaggaaggacttggctcacgcttccgcttgtcaccggtgcgacgcggcgaaccccgaccttttttgtccttacccatggtcaaatggaagagaagagggagtcggaaaagaagcaatagatgatcggaggatgtgtgaagagaacaacggtgcaagcaggccatttataggggccggaggcaactgttcatctcctaccacactcatcgaacagtcgcaagtattcaataagcaattcaaaccgcctgaaagcaagtcaggcagtagatgccgcttcgcgtaacacgacactatttggactaaggtcaactgctcgggcgatatgattacgccccacggtcac

SEQ ID NO: 45857 - DNA, 3532 bp, Zea Mays
taaaccacaggtttctctaacctgaggtctgataaactcaagctgtcttcaatcttgcatcagagatttgtttcagcaacgttatagccaaaacatagtaacagtgttaaattcttgatgcgttacaaaaatattgatacatttttttataatccaaaaaaaatgtttgacatgtagcttggccaataaaccacaggtttctctaatctgagatctgataaacccaagctgtcttcaatcttgtatcagagatatgtttcagcaacgttatagccaaaacatggtaacagtgttaaattcttgatgcgttacaaaaatattgatacaattttttataatccaaaaaaaatgtttgacatgtagcttggccaataaaccaccaggtttctctaacctgaggtctgataaactcaagctgtcttcaatcttgcatcagagatttgtttcagcaacgttatagccaaaacatagtaacagtgttaaattcatgatgcgttacaaaaatattgatacaattttttataatccaaaaaaaattgtttaacatgtagcttggccaataaaccacaggtttctctaatctgagatctgataaacccaagctgtcttcaatcttgtatcagagatatgtttcagcaatgttatagccaaaacatggtaacagtattaaattcttgacgagttacaaaaatattgatataatttttataatccaaaaaaatgtttaacatgtagcttggccaataaaccataggtttctctaacctgaggtctgataaactcaagttgtcttcaatcttgcatcagagatttgtttcagcaacattatagccaaaacatagtaacagtattaaattcttgatgcgttacaaaaatactgatacattttttttataatccaaaaaaatgtttaacatgtagcttggccaataaaccacaggtttctctaacctgaggtctgataaactcaagctgtcttcaatcttgcatcagagatttgtttcagcaacgttatagccaaaacatagtaacagtgttaaattcatgatgcgttacaaaaatattgatacaattttttataatccaaaaaaaattgtttaacatgtagcttggccaataaaccataggtttctctaacctgaggtctgataaactcaagctgtcttcaatcttgcatcagagatttgtttcagcaacattatagccaaaacatagtaacagtattaaattcttgatgcgttacaaaaatactgatacatttttttataatccaaaaaaatgtttaacatgtagcttggccaataaaccacaggtttctctaacctgaggtctgataaactcaagttgtcttcaatcttgcatcagagatttgtttcagcaacgttatagccaaaacatagtaacagtgttaaattcatgatgcgttacaaaaatattgatacaatttttttataatccaaaaaaaattgtttaacatgtagcttggccaataaaccacaggtttctctaatctgagatctgataaacccaagttgtcttcaatcttgtatcagagatatgtttcagcaatgttatagccaaaacatggtaacagtgttaaattcttgacgagttacaaaaatattgatataatttttataatccaaaaaaatgtttaacatgtagcttggccaataaaccataggtttctctaacctgaggtctgataaactcaagctgtcttcaatcttgcattagagatttgtttcagcaacattatagccaaaacatagtaacagtattaaattcttgatgcgttacaaaaatactgatacatttttttataatccaaaaaaaatgtttaacatgtagcttggccaataaaccacaggtttctctaacctgaggtctgataaactcaagttgtctttaatcttgcatcagagatttgtttcagcaacgttgtagccaaaacacagtaagtgttaaattcatgatgcgttacaaaaatattgatacattttttataatccaaaaaaatagcatgtagcttggccaataaaccacaggtttctctgatctgagatctgataaactcaagctgtcttcaatcttgcatcagagatatgtttcagcaatgttatagctaaaacatggtaacagtgttaccttcttgatgcgttaaatgacacgtagcttagccaataaaccacaggtcattcaaacctgaggtttgataaacccaatatgtctttaatactgcatcacaggcatgttttgactttgtttcaacagccaaaacatatgttacattcttgatgcgttaaagaaatgtcaatacaatttttatgatccaagaataacatgtagtctgaccaatgaaccacatgtttctccaacctgatatcagataaaactcaaactttgtttaatcttgcatcagatatatgcttcagcaatgtttccgcacccaaaacatggtaacagtgttatattctcaacacgttacagagatgtcaccctaatttcaaccaaagtgaatagtatctaaaaaagaaacatgcctctaaaaacaaaatcatgggtgtgagtacaaaatacataaccataacatccaaaaaaaatatcatgtatatttgcaaggttaacaaatcagagtatcaacaattttaataaacacataagcttgtaccttgttaaacaaaaccatatagagcataaagaaaattggtaagttagatccataagaagttttcagtatgataatgtcaatcctagtagttagatccataagttctcataccatgaagaattacaaggtgtcatatctgaattggaccgtatctgattacagctcttactaatatgctccaggtaatgacagatggcataatacctgttgcaagcacctcattcaataacaggactccttcaggtgtcctattacaagagcacaggcccttaattcttgtattgtaagtaacaatatctggtttcaaaccattatctaaaatggcagcccaaagagatgctgctgtatcaatagaaccaatctcataaaatccatccatcaatgtgttataggtcactagatttggggaacaattcttttctttcatctccaaatatatacaaaaggcatcatttactttcccagcagaacaaagaccatgaattaagatgttgtgcacaattacatcaacctgaatacccgcatcaagaatttcattccaaatacaaagggcagcatcaatcttcttgactcgacaaaggccacgaatcaaagaaccataagttctgatatctggtttaaaacctctctctaacatttcctttgttaagcttgaagcttcttggtatttttcagccttacacaaaccatctatcagagtgttatatgtgatgatggttgggcaacaaccattgccggtcatttcaatgtaaattttaacggcatcactaatcttgcatgctcggcagaaaccatttattagtgcattgtaaacatgagaattcggtttgcaaccatccttcatcatattcttatatacct

SEQ ID NO: 45858 - DNA, 818 bp, Zea Mays
taattatagaactaaagttgaaaggacttccttctaaagttgcaaagagaatgacattcaaagagcatgttgccttaataaataaagcacccattcaagtaagtctcacccttcgcttcaccccgggaggactccaacccgaatctcgggacgagattccttgaacgggggaaggctgtgacaccccagtgtcacctagggcttttctcagtgctaacccaagaaccatcatttcatgtaagccaaattgagcatgaagcaccaaatccatttaaaaaataaaagatccactaagtttatatctaaagaatcatgtctaaagcaaataaggttttcaaaaagggaaaaaatgttgaaaccctagaccaaccttaattaggctatttaagtagaaaagaagaaaatggatgaaaagccatgaaaaacttgaaatcatgacttaggccaattataaaaattgaaatacactaaataagctacaataaagattatgaaagcttggccaaaatatttattaaaaactccaaacaagccattcaagtggaggttcaatggggaaatctgaaattcagatttctgaattttcagcctttgaaccaaaaccgagcgcgttcaccttgatccttagctctaatcctaatgctcccattgaaaaaaatgtgtctaactaacccctctacctcataccagaagatggcattaggacgcgtgctctagacacgtcaaacctgagatcttctctctgtgctcggcagtgagacaaacccaacttcacccctccatatctctttatccagtcagcgaaacctacaagcctc

SEQ ID NO: 45859 - DNA, 456 bp, Zea Mays
accgtgctgattgaatcactgtgtttagtcattcttctttgagtacatcaacatcctccagcctagtagcctcagcttctgctatgttttcaaagatcaaccttggtgccccaaacttgagatcagcaggtagcactgcctccgaaccatagaccataaagaaaggagtgtttccatgtagggctcgactaggatgacttcttaggctccaaacgacgtacaacaattccctgatccacttttctgcgaacttttcatttttgtcgaaaaccttctttctgagcgcctccaatatcataccgttggctctttctacctgcccgttggctcttgggtgtgccaccgaggcatatttgatctgaatgcccttttgctcgcagaagtcaaagaactctgagcttgtgaagttggatcctaggtcggttatgatgttatttggtattccaaacctgaata

SEQ ID NO: 45860 - DNA, 338 bp, Zea Mays
gcctatcacccctgtgagagatggtgtgattgatgaacctgtgagagctcctcctcataaacaagtgtggcttccaaaacctaaccatctcaggaacacacttgacacctttctcgacatatctagctatccctttcctagagcccctcagccatccaaaaagaaagccccctcccacaaacaaaatccacccaagagagaggtgaggtaccattgtgagtattgtgagagggatggtcatctagcttccttttgctttaggaggagagagatgagcggtgggtttctgagtcgagcaggaaggacatgaaccaccctctcatggtgttcatgctcag

SEQ ID NO: 45861 - DNA, 307 bp, Zea Mays
atgttacttgagctgtctgggtcccacccgaccgaatcccctccctccctgcgcttctctgcacgctggagcagacccatccatatattgagatggaaggcaacaaattacgtgcagtaccaatcagtggtgtgcgtatattattccatgggcccatggccatgtcgtccatgctatgcccccaccgcaactcttgcctggtctaaacctagtacgccccccttcacatgcggggaatctaagcctagctacagtcgtcggacctcggcatggtagcagcacacccgatcgctctgctccgcgcctt

SEQ ID NO: 45862 - DNA, 372 bp, Zea Mays
gagatcgctcgctgccggtgatctagctcaggtgaaacagactgctcgctgccatagacggtacataatgtagtcttcttcttcgtcatcgtcctccgtgaccgcgtcgtcgagtgcactgtcatcggagaagacggttagcgatccgacgtcgattacagagttgctgctggggcatacaatggagttcgggatattacggatctcctcgtagtgtgtacatgaaatgcaatgtttgggttattttggaggggaagggggcgctctagtggtcgaagaggtccctgagccggagggagagcttgtggtcttcgagacattttcacagtccatcttcgactgcctgtgcaccgctttgttaccaaagtctta

SEQ ID NO: 45863 - DNA, 416 bp, Zea Mays
gcggtcggttacgctgtccctagtgtgggggatagatatcccccgggtcctcatgaacacaaaaacgtgtcattggccgcctgacgggccttctactgggtcgtcctacgggatgggccagcgagatgtagcctggctgggcgagcccgatctaagccggtgaagattgacgccaaggttaagcgccgtgggagcatggatatatcgggtggtgcagttgggcacacccgacgggctaaacctttgtcggtaactcggatggataggtgagaatgactccgggtatgtagggatacagtctatgacaaagaaggagataagcgagtggatataactcacaccttataatgggataactctctctggtcctgtatataacaccgagagggaccccctaccattttatctcaccttag

SEQ ID NO: 45864 - DNA, 940 bp, Zea Mays
agacagatgacggaagtggaaacaacaagtcagatcaccatgttagtggaaacaacaagtcagatcaccatgttatgtttggagggaatttattccagtcggtatcttgctctggttctggccatgaacagcctcgccacgccatctggttccatcagccctttccttattggatgagcaggctcgttcgctttcagaggtgacagcaggtttgctcctgtgaccctttccagaatatcatgactcgcggattgagatctcgtgatggttcatggttgcgagtactgcgcgcccggccggctcccatgttgttggttcggtcctcgcgatcacaggcgtgcagaagagtgtcatctcagatttaagcaagctcctgactggaacggcttgaggcgatctgctagcctttcgtcggggatcattgtttggtggtatgtcataattgctccccggacttagcatgctttgtgtagtgtagggtctgctagatctcctttgtaggctgttccctcgatttaaaaggtggcggcaggcatgttaatggcaggatgattagccattcaatatatgattggaaaggcccaaccgcaccgcgcataactgtacatccaggacgcacagtgtcattcgctgctgcgttgtgcattccggcttcagttctggcaaagatcgcgcttaacgtcgactgctgcggaatctgctcgtcttgaacaggtaactcttgagcagcgggcaagatgggtctcctgtgttacatgcgcatcactgcatcatcaggtacgcggtttgctgtttaaatttgcgatgggtctctcatttcttttctttttcctacaacctgttggtagtagttgtcaatgaagaatctcatgttttacactgtaccgtcagctacaggtagtacagtacatctgctgctggtgcttacattacagttcgg

SEQ ID NO: 45865 - DNA, 683 bp, Zea Mays
cattgagccggccgtggtgcccgaatttggcgcggaaacttcttcagctgctgctccaaaggatccaattccttctacgcagaaggctgaagaaccggccaccttgccgaaggcactctcagccaagttagctgagccgaagactagtaaaacggaggagccaagaatcgaaggaacaaaaacattagaagttttaagcccttcggcagaagtgacaatgccgaaggcacaaaaaggtcttgcggcgaaccccaagagaaaaaggatggcaagtgtactagatgtgctggagacggtaaaggcttcaagctctactccagggaaaattgccaaggcttcgaaagtgcaaattgaagccaaaacaaaactgaccgaagccgaagctgcaatgagctaggctagcgccaaagctgggccttcagagcctgctaaggagaaaccctcggaaattggagaaaagccagcggaggaagaggctatagaacagactttgcctgaaaaagctgccgctcctactcccgaagcaccttctgaagaccttgattatgttattcgacatgctttgggaaaaagattatctgaagaagaaatttttgaagctaaacactatgcccgagaactgaagtacccgaaaggggccttagtgtttaatggtacagatgaagatgatttcttgtatttcc

SEQ ID NO: 45866 - DNA, 396 bp, Zea Mays
acctcagctatatcacccttcgcgtgattaaacctatggcgtcggatctggatccaaaggacgacgtagcataccgattcgtccctgcccatctcagtcgttgatcggtgcgcaaacgggtgagatcgtgccctggcgtttatcaattgtgggccgtgggatctagatccaaggctccacattgaatactagttcagaggagatcagatctaatctatgtcgtgcgtagttgatcgagcggccaggattgttaggtaccctttcggctggcacaaattgtaagtaagtccctggagtttatagaaaccaacccgcagtccatggccgctgtgcactatgtctggaaattattaccccgagccccatgtgttcctatttaattgaggcccagtccag

SEQ ID NO: 45867 - DNA, 287 bp, Zea Mays
cccacgcctaaagtacattcggatggataagtcagaggcacaaaagcatgcatcaaaatttgactgaaaagaaccaattggacaaagtaccaagcatggcgaagctaaagttctaaaaaatgtgatgaaaggaaaatacgatgttacccttgtgatattggtgaaccgtatttgtaaatctcaagggcatgcatgtaattctacacgaagttgtatctctcccctataaatagaggagcagtgtcacgcatggggggcttttgggaaaaaggactcgaagcttcggc

SEQ ID NO: 45868 - DNA, 407 bp, Zea Mays
gcgatgacacgtcagcattcaaggttagagcataagagggcaagaaagcgagaataatggcataaggaagcaagcgggggctcgaacgctatttatagggctgagaggggtagcggaggggcgctggtgggtgagtaattgctcgtcggcgtcgatgaggaggggaaacaatggcagcaacgatgaatgtatgaaatggccgtgggtgggttgtccactaccgtgaggctgcgagtgggagcgcgctgcagtttctgagtgcaaggatgcaagcggaaaatggtgcagacgtggggaggcgatggtgtggggcgtggagaagaaggcattgataggtggggctacctaccagcggaggtagggagcgtgggggggatctaggttgcagggaagggagtgggtctgga

SEQ ID NO: 45869 - DNA, 345 bp, Zea Mays
ctggtctgaagcttaatctagagaaatatgtattcagaataaagaagggaaaattcctcgactgtttagtctcaatgaagggaattgaggcaaatcctcataaaatggaagacatcattcagatggaaccaccaaagtcaagaaatggagccaagcagcaggcaggcaggcttgcatctttgaaaagatttatctcaaaatccgcagagcgaagcttgccattctttgaggttttcaaatcagccaaagtatttcaatgggggctagctcaataacaagcttttcaagagcttaagcaatatttggtctagttggcaaccctctctctaccttcgctaggggctc

SEQ ID NO: 45870 - DNA, 1557 bp, Zea Mays
ctaacgggtgcttattggatcatttgagtatgcaaagatgactattgatgttgcaatgactatatctcttattacaggctataaatagaacctcaactgacaattgagtagtgtgggagctaaggaacatatcaagagagctaagattcatctttagcagctctaaacacccaaatgctcaaaggatcccttggtgcaggtgctttatgaagtgcctaggttaattagatcactgttcacgcttactctaggtttaggcctattgtttgagtgatgttagagtacctcttgttccatggtgcttgcacgcaccattatagttgtactcagaggagcttgtagtcttgaaagatcacaccaattatgtttatagtgtggatgtcatcatgtattaaagggaatgagacttgtggcatttcgatcagaaagtcaatagtgaagatggtggggagcgatagaggactatttatggaattacctaaccgagagcttggtcctcgtgtgggcatctttgtgaagggctccaataaggactagggtgaagcttttgcgcttcttgataccttagtaaaaaatatcgaagtcatcgacaagagtttgtatgtctattgccttttagtttccacatttatattgggtaccatggttatgagggtttactttctaggttagttatttgtcgtcgcgtgatagacagaataccaaaatagtaccccctcccattttaggctcaacatgggccttagcgaatcaacctaacccctaccataaccatttgggcccagtccggctaaccgaagagtaagcacaacaaacaccgtgagaatcgtgagggagacaataacttagacaggttcggatcgctggagcgtaataccctacatcctctttgagtggattgggttgcttagaaacaactaagtgtcgagcacaaaggtggccaacaaagtttgagtttgcaatgtgtgagcatgggaaagagtcctcgcgcaggaggtcatcctctcccttttatagaccaagggagaggggattacaactaacaaatggggccaggttggcacctgtcccaccatacattaatgaaagtcttgttgacgtcaatcgaggtcttatagacacatgctctacatgtcgcagatgatcggggtgtgtttagggtgtgcgcatgtcgcagatgctcgggggaggtagtacaccatggcatacattgtgggagactgggaatatggaaagttgaggcgcacatcgtctacgctgttataggggatgtggcagggcgtggcgcatgtcgtccatgtcgccatagtgtcatatcagggccatgcctcgtaacgtttggtcctgacaactaggaagtgggcacgatgctgctacagtcatgcctattccgttggacatgcgtgtcatatctactcactctaccaactccttgactgatcgtggagtggtcgaccggaccacgtggcacattgggagccctccctgacaggggcatcgagggccaccattgaccagggtcatcacaggtctggaggacatatggcgtgcccatac

SEQ ID NO: 45871 - DNA, 646 bp, Zea Mays
cggccatctagtctactaatccaatcaaatatcttctctaaactcctggagaccggcaaaaacaaaaatctatgttatacctttgccttcatttgatccacaaccaatataagtctccaagattttctgttctatgtggtccaacctgcattcttatttctccaataaccgttagtccacaagtagttgtcattaattaccaaaacatcagtaaggggcctagatgattcacaatctccccctttttggtaattgatgacaacactacatattttatccaagagaagttttgattttcaaatcttcctcataccttagatataagaagaattttagagatgagttccataagacttatcttgatttgaagttccgtccgagagatagataagtcttaacaaaaactcagagtgtaggaatagctccccctatatgtgtgcatgatgtttctagttgaagatatgacacacataatcgatcggagttttgatggagatcttcctacagacatggttatcgaggcataaaagaagtaatatgtaaaaataagtgcagcatatttaatcactcctcgattaaccattcacagaataatttgaactaataaaaacataagatttaacaagcatagttcaatccacaaaat

SEQ ID NO: 45872 - DNA, 964 bp, Zea Mays
gaaggctagctcaatgagtgcccttgtacctatgcagtgtgcactttgtgagggtttgtagtctgctcttgagtcctgtagacacatagagatccagatcgaggaataaaacacataccttcagtcgatcttgagctgggtgttgtgtagtgagccctagatgggcatggtggtcagtcagttcaagtggaaaattggcagactgggatttttctaaatatgggagtgtcgcttgctttggaaaggttggtgagtggaatggattgaaaccattagagaaaccttctgccactcccaagattatcaaaaccactccacctaagtctattacccctgtgagagatagtgtgattgaggagcatgtgagagaccctcctcaaaaacaaatgtgggttccaaaacctaaccatctcaggaacacacttgatacccttcctaacaactctaatcatccccttcctagagcccctcaaccatccaaaaagaaagcctcctcccacaagagaattccacctaagagagaggcgaggttccattgtgagtattgtgagagggatgggcatctggctgatttttgctttaggaggaagagagatgagcggtgggtttctgagtcgagcaggaagaacatcaactacccctctcatggtgttcatgctcagcctgtttagagatgtcctgcgatggctagaggtgctttgcctttttctgctaggccttaggcagtgagacagcaagatggtcgtgtgcagcggggtgatggtcatgtgccatatggccaagggaccctatgtcagtggctttggttcttacttcctcaacgaaccacaatttccttcttgtggtgatcgcttcccttctggaccggggatgagcgttgttttttctaacactttttataggcaaataccgtagcactagtattattctcagtatcctaaccctagttctatgtcatttgatc

SEQ ID NO: 45873 - DNA, 931 bp, Zea Mays
cggccaccgaggtaaaggcggatcccgcaccagccctcgtcgtggattggggactccgtgcgtcaatcaccggtaagattcaactccgatgcattcctctcctttctccaatcgtgcaccgacaaaattggccccgctcattcaccctgttgatcggaattgctcgatggggttgtgctgccactgattgtcgctcatctctatagacagaattgtagttgtccgctcgcgtatggatagctccaatcgattcaccacaccaggagctgggttcgggatctgtcgtgatcgggtatggtcgagttgtgggcgaaatcgttggcactccggcgaggttcgtcgttgcacagctctccgccaccgggttggctttgagctgggaggtgacgacaggcctatcgtcgatcctctgagggacggcccagatctaatccgcgctctgaccggcgtaacctgaattctcaccgttagatcacgagtttacggatcagatctgatgaagggatcatgcgccatggaccgcagatctgggatccaacggtagttggcgcagcagtatacataaccgggactgaattaatctggacgcttgatgtgacaccccagtgtcacctagggtttctctcaaagagctaacccatgaaccatcatcttatgtgaaccagaattgagcatgaacatcaaattgacttaagaatgaaggacccactaatcctatacttaaaagtatcatgaccaaaacagatgggtttttcaaaaaaggcaaaattgtgcaaccccaacaaaaaccctaattgagccctatgaacaaaattcaagaaaatggggaaaagagtatgaaaaattcagaatcatggcttgggccaattataaacattgaagtatattcaataaacaacaataaagattgaggaagcttggccaaaataat

SEQ ID NO: 45874 - DNA, 652 bp, Zea Mays
ccccttattcttcaaactaaggataaaaggaatcgatctcatgagtttagatatgaactcagttggaaattaagacctggctttagagacattgtgattaataattggtctctaccagccagaagcaaaaaaacattgatgtttggaaggaaaaagttaaaaggcttaagagagttttaaaaggttggaatatcaatgaagaaggaaagaataggagaaaaataaacatactgaaacaaaaattaaataggttggatatccaaagtgaaactagaactctctctgaagttgaaaaagaggaaaaattggaatatgaacttcaactaaaaaaccttcttgaagaagaaacaaaaatgaagcaaattgccagagaaaaaacatcaattttggagatgaaaatactaaatattttcatctaaaagaaaatggcaataaaagacgtttaagaattcatgccctggttgataatgggagacttgttgaggatgaggagtatattaataagttagccactgactattatagagatcattttggaccctctaatatttcgaccattcatatgaacaacaagaatatgaagaatcttagcgatgaagatagagattctcttactcttccttttactttagaagagattcacaatgttgtg

SEQ ID NO: 45875 - DNA, 294 bp, Zea Mays
ccctaagacttgcatagtagataagttcacacccctactcaggttagctgaagtacttccttgatccactgaagtacttccttcctctgggccctgcttaggacgaaatcggccttaggccttctccatgtctttccaccacttggcggcttcatctcttggtttggtttatcacataacgctgccagatccactcttgcctttacgttatcctttgacttatcaggaatgtccataattgttgcccaaagtgcctcgacaacattgttttcagtgtgcatcacgtcaatgttg

SEQ ID NO: 45876 - DNA, 474 bp, Zea Mays
attctcatgaagaccatctcctctggctttagtctgatagtgtagttcatgaactcagcagaaaccctcaccgaacggttccactccctggctacgaagggcccaaatataaacgcttaatctaacaatagcattaggggtcagctgatgaaggtaaaccccaaacttcttcaaaacatcagcaatcatcccattcaaaggaaatcttaatcctgctttaaagaagtttttgaacactacaacctcattcttttccggcttcggagtaatttcctcttcgccaaaacgaatcagctccttttttgcttcactgaagtagcccagtttcaccattttgggaagatcagcatcagagatggtggactttccaaaatccaaatgactaggtttacttggcatcccgcagctgtactcatcttcggaaccagcttcttcaacatcagcttgtgttgcttcggcagcaggtgtgtcctc

SEQ ID NO: 45877 - DNA, 1504 bp, Zea Mays
agttaaataagtatcttaagtcatttggttcacaaatgtgtggacttgtaagccaaatattggattttggacttaattgcaaaatggaccaaaattgagttctattctaagtctgaaattcagtgttgagggctcaactttggagctttgcaactttcaaattatggggtttttgccctagggcaccacatcaaagtggtagagcaaacaaaggagaacaattttgcttaagagtgcaagccatgttcttgtgaaaaatttggagataattaaacctaaagtcaggttgtcaggctgttgaagtctgaatttcagactgacagtgccactgcagtgacttttgacatgaatttgggcatgatcgagtaataatttgcttaggattgctataacaatattgtagccggatcttaggactataactttgttaaagagtgtcgatcatgttactacacaaaattggaagttattggctctgcaaatcgggctgtcagttcatctgaataaggaattccatggtacagtagccgagctcaccgccgacgaccttcaccgcgattcgtgctgccgccgtccggattcgtgctcgtggctagtggataacctctcgggtaaaagaatcttcaccgccgtgcgctggacatcactacggtgactcaccgccgtcttcctttttggctttgcggctggcgcggatagcttcgccggtgaccgccgttctccggtcttgcgccgcgtgtcccaatctcgccaccgcatcgccgtgactccctctaactgcccgtcgaccaccggagttactgccacgccactggacacgtattcaccgcgccaaggttcttcctcatctccggccgcccatactgtccgctcaaattaagcgccaccgccccggggatctataaattgaccccgcagagagcttcacaacaccatcacccacccagccaccacgtattgctagcaattgttcgcccgagctcgcgaattttgaattcgccccaaatccattctccgccacccgaaacccaacctcaccgtggccagccttattccggtcagttcatctccttctctccctcgttcaagctttcccttaagtctacgatgcttgccgagccactgaattgaactaggagcccgccaatcgctaggtacacgacggtattgtcgtgatgttcacggccaccgtggccagagcacaccccttgatcattagtgcaattatgttgggggaaatcctcccctggtcatggatttggtttagtcttagtctaggcgccagtcttggagcaattcggccagtctgcatgctcgctggagttcatcctccgcgcgacgccgtcgaggaccttcccctgcgaagaattagaagtccgaggggttttttggaatgcgtcagtgactcattgaatagtgcttcggttctgcttctggttgttcagaaaggcaagggcttttctgtaaagccgccagcgcgggcgcgcgcgcgggcgcctttccc

SEQ ID NO: 45878 - DNA, 522 bp, Zea Mays
cacgctcggcagtttgtcaccatagtaagttgttgtgaagtttgatacctcctctagaatgtatgcctctgcaatagaagcctcgatttagcatttatttctacatttctttcgaatagtctttagatatctcttgattggatagcaccaacgtccctgcacggccccccattcgtgcctcataggggagatgaagaatcaaatgttgcattggattgaagaagctgggtggaaatatcttctcaagcttacacagtaacacgggtgccaatctttccaagtctgcaaccatggtcctagataactcttttgcacaaagctgatggaagaaatagctcaactctgaaagcgctagccagacatgcttagggacatagccttgaaccatcacaggaagaatccgttcaatccattagtggaagtcgtgactcttcatccctaagactcgcagagtacatccactcacggtcctccatcctctaacatatataaagaagtctgtcaacaaaaaattttggtagc

SEQ ID NO: 45879 - DNA, 902 bp, Zea Mays
tacaattggaacgaatcaatcaggaaaggcttattggtgtcacatcagcgactactacaatgaacacaagaagacagctaatgctaggacacaacactccttggagcacaggtggagcgacattcaaagggacactacgaagttttgtgctgcgtacgacaaagtgataaggttgaagcaaagtggcaaaagcgaagacgacaaggtatacgaattcgtatccttttcaaacatgttagttaccatgtaaacaacggtgggtttaatcaatctaaacttacaggtaaaagatgcactacagatgtttgaaggcatgcacaagaatcagtttaggtttatgaactgttggtacatgcttcgccgagaggtcaaatggacgacctggctctcaagttgtgaaactccacataataatactgggaatgtcaacgtcaacgaaaccgggtcctaggcgaagcagggggaagacgaatttggttcaccgtctgatacctttgtgcgaccaatgggtagggaccgtgcaaagaaggctcgtagtaccagcacttcgagcaattcaactgcctgcatggcactgctggagaagttccaagaggatagagcaaggttcgaagaaaaggctacaaagtatgaagattaggccgcagcatctacagaagaggatcgaagggatatgaagatgtacagggacagaaagatccagctttctgagaacatgttcaaactccaccaactagagcgagatgatcgtataatgaatatgtacttggacaaggttgctccttatgcaagagactactatgtgtatatgcaaaaggacattttggcaaggcttcctccaccatcagacacatgaccttcaaaatgtgtggaaattgagctcagttgagcgtcatcgtcag

SEQ ID NO: 45880 - DNA, 750 bp, Zea Mays
ctttcgccgtgattcgtgtcaccggcgttgggattcatgtctgagcggatggatagcatcgcggggtaaggggatcttcgccgccggtgggctggacgccactccggccagccataatccctcccccttgctcaccgcccgtggataaggttctcaccgtcgtcaaaccttcgccgttgcccgtcgcgtgtctctgtccatctaccgcatcaccgtgactcacccttgctctccgttgatcaccggagccatcgccacgacggtagacgcaagttcatgcgtgccagtagttccctgcccctccgaccgccgcgcgtcaccattaaaattcccggccgccgctcttacttcctataaattgagccctccaccagctccgcaaggtcatcatccaccccgccaccaagaatcgttagcaaccgtgcatccgagagctagaattttggtttcgccccaaatcagttctccgccaccgcgaaactaacctcaccgcggccagccccaatccggtcagctcatccctctctctcccttgtttgagcactctcatagctctgtgatgcttaccgagtcaccaattcgaaccgagagaccaccaatcatcgggaacgcgatcaaatgctcttggccttcacggttctcgtgggcaggatagaataggccaccatttgcacaattaagttaggggaaatactctctaggccatggatttggtttagtccgaagctgggcactggtcttggtcttccc

SEQ ID NO: 45881 - DNA, 570 bp, Zea Mays
cggtcgcatgtgcgcagaggtggcggcgtttgccaacagcacctggccaatctgactcctcgggagggaccccgtcaaggtggagagatcctagggtttctcttataatcagtagaccacccaagacgcctcgagatgacttagagtcaaagagatatgtaaattaaggtgaagaaggctacgttattgtttactcatagggcaaaaggtaaaggaacagaagatatattgatttggttcaattgttgatagttcaattcattgcatcctttcaaatatataatggggaggtctggacctattcctaaatgtcctccaacaacacacacgagtttagaaagataaatatgcgtgaagatagaagcttaattcgctttatctgatctaattatggactatccacgcctcaagaccggactgtccgattgtgtccaataccataaataatattcaagaaatgagatactagctatttctgtcgcagcatgtgtaaatgatgaaagcccgaccaatcatgcatgtacctacgacgaaggcgatggtgcgcttgcagaagcatatccggtcgtg

SEQ ID NO: 45882 - DNA, 474 bp, Zea Mays
gggaagcacataaaaagcaaattggaaggaggaagaataacgtacaatttgggacaggggaagcacataaaaagcatagtagaccataaacaaaatagatgaaaaatgaaaggtaacttataatttggaaaagatagagtacttcaaatgagacagagtagaccataattaaaacaaatgaaagataacatgtaatttggaagagagggagtacttttaaataggaagaaggatgcggctgcctctagtggctaaaggcagccttagagctgaggctcagtcaattggatcaagcatgcagatctagagagcgagaataggatttgtgtagcagtgttaatcgacaactggccattaggagatattactaaggtctggctgattgtgggaggcaggtagggagcagagttagccgatcagagcctcccaggaagggtgatcacctttgctgctgctatttcggttaagttagcc

SEQ ID NO: 45883 - DNA, 922 bp, Zea Mays
ataaaatatctagattgtggccacgaatccctgagaactcaagtgcttttgcaaaaattgtaggactggtctatagaattacttacactagcatggatgtcgggttagttctttctaaacgcaggggttcttttgcaatttggcgctgcccaaggggtaagctttaatcctggccgtttgatggctagtcaagcacctagattatattaggttgacaccaaaccagtacgccaccctggacacccgatctaacatcaacgttcatgatttaaaatgctgagatggaatcccatacgcccaatctcgatccaacagcatagcctcaatctaatctcgtccatccaacgacgaatggatggctcccatctctcttcttcccctggctgccagacgcggcggcgccatgtgccacacggcggagcacgccacaaccacactcccagatgcccccggtgccccaaatcctttggccaataggtgatacaccatcagaaggacaagacggaggatatggaggtgatcttaccgatccccgggggggcaatggtcctgcccacgacgtgatgtggcatggcggtagtgactaagctctggtgagcaattgccatggattcatgccctctttcttcagattggtagtcgttgctacttcaacacgcccaagcaacaaaccctagtcatctgctgagggtctatcgacggaggaagcgcgttcccccaacgacggccctccatcctacgcccagaaatgatgccacccacctcagcttcaccaatcatacgatttgttcacggctatggaaagaggggggggcaggacaccatttattggcacaagaactcccagtcaacacccgcgctcgatttctgcggattctgttgctcagatgcgagtcttccgtgaggttggtgccgaacccga

SEQ ID NO: 45884 - DNA, 365 bp, Zea Mays
cagatgccaaccccttgatggttcattcttatattgtttctccatgtggaatgtccttcaccattagccatgtgttgaaccgctgcttgtgttgcttcattacccaaacgtccgtatgccaaggatttttcttgcgaatcttgttaatgtgttgttggataaatggctccattatcgctagctgatgtaggatgttgtgatgtgcctcaagcactgtattgtaatctagtggaatgaaagatttttgtaccattctcccgcttccacacaatctaccctcttgccgtgatggaggccaatctattgcaacctggtcttttaggatactattaaagaatggaccctaggactcaatggcctcttta

SEQ ID NO: 45885 - DNA, 478 bp, Zea Mays
gttgatttctgcaaggtggacccacaaaaactaagtctcaactccttaagcgcctccaggtcctccagtgttgccattcagaggccgcgttcctcgtcttgctccacaaatgagccgagttctccgtctgcagatcgaagggacacttctgatatggatgatgacgcggagtctcatccctcgacggggctgtaatgcgtggccgtctcttttgtctcagcttgggtctgagatgttgcggtgcttattgtcttttggtttaattatgtatcgcggcaaaactactccctgtgtggatggacccgttgtggaccctgtggtgacctccccagacttctcaacattttttgtattctgggtgaatggttttaatttcctgggtgcaatgaaactttggggtttgtttatgcctttttggcttttatttggtctggatttcgggggggtgctggtgctctcttcccctcctttctggaat

SEQ ID NO: 45886 - DNA, 473 bp, Zea Mays
cgacgggtagcactgcttctgaaccataaaccatgaagaacggggtatttccatgcagagctcgactaggttgagttctcaagctccaaaccacatatggtagctctctgatccattttcctgcaagtcattcttgtcaaacactttcttcctgagcgcctccagtatcatctcgtggccctttctacttggtcgttggctcttggatgcgctgctgatgcatacttaatttggatgctgcgttgctcgtagaagtcgaagaattcggagatggtgaagttggatcctaggtcggtaatgatgctattcggtataccaaacctgaatattatgtcttgcataaattctactgccttggctgaggttaaagaggcaacagatttatactctatccattttgtgaacttgtcaatggcaacaaacacgtgagtatagcctccctgagctttcttgaaaggtccaatcagatccag

SEQ ID NO: 45887 - DNA, 1014 bp, Zea Mays
ggaatgttgaattataccttagtactaattagagattaaatggttatgcgcatgatgagtttagtaaaaatccatcggtgtcactggtgttaagttgaggtttatttgcgcgtggaaagtaataatgtgattaatacttagaactcttagttgatagtagaaattgttttagcttatatagagaggtggtgacatgccaaagtagtcatcgcttcctctatatcttgagtagggtcaatacgctttatgtgttcatgaattgggaagtaagcacatgatggttttgagttagagattagtggtttacgggtcgtatgatttggtagatgtgtgaaaatacatgtgaatatgtatgtttatataaatgttgtggtatatgctgtgtctcggatttcgataataataggcaagccgacgtgtatgtcgtatgacgggctatgccattcctttggttaatcaacttgttagatggctttggttaagctcgtagttacgatgaattacttgttgtggtctaaatgcgtatggttatgatcgcgggtaaaaagtagtagtactcatgtgatgtctaatttaaaacgcaaattgttgagtgattatcgtgaagaatgcatttttaaatggttgtagtaattttagtgcactaaatgacttaaataaaatttgcaagtcgatttgttgattctaattgattgtcttaactcgaataaatagtaaagcgttagagtaattcaagtctctcgaacgcggcgattcttgaattatataggagctgaaatttattgattgctgttttggactgcacgcactgttttaattgtgctgtatgtttgatgaactaaattgtgttttctatagatatgtgctatagaaaagtggtagataactttattatcttgctggtgttaaaatttgacagtcataggtctcacagtttatgagttatgcttttttacaaattcagtaactgaatctgtccaatttctgtacagatttcagagactgtactgtttg

SEQ ID NO: 45888 - DNA, 674 bp, Zea Mays
aattgtcattaattaccaaaacatcactaaggggcctagatgattcacatcagtggacagtggcgtctgcccgctccgtctgcgatccttggtcccctaaacactgctttctctctctcgttttttcgcatgattttgattatcgaaaatgatcacgcttatactagatggtaaatgggcgaggacatattttggtattcagtttcgtttcattctgatttcgaggagggaagcgtctgcatgtaaaaaaacctttaatttctgaagataggaggggtttatctttaggacgcacagtaaactcttgtgaggtgttctttgcagcgaacagtgatctagatagattcggatatgtagctgttgttcgaattcggtttttatatggtttggtttatttcgcaccatttcaatccatggacgggacaactttattccaaatgtgcagtgtatcatgtagatcaatcgagctttttaccactccgcgcacgagctgccccgaccgcaaacatcggaacgacgccaagtcaccaacaacctccattgtcctcatctcggtcgcctctttctcacgcacctagatagggatgcatgcaacctccacgcgcttcttcctccgcctgcttctcacgcgcctgccatccccgtgtgccataacgcaacctccacgcgctttt

SEQ ID NO: 45889 - DNA, 675 bp, Zea Mays
atcatctgacacatctttccaaagttggattgtgatgccaagattatccctaactaagaactcaagtgcattccggaacttagggagtgcctcttctggagctaggggctgacctttcgggctcacatctgagattttatatgtcttgtcaggaaacttgttcaatcccctatcacctcttttccggtcgctctgtgtccttttccttgacctctcggtggttttatcggtaggtaccggtgcgtcttcgtcttggttcagccccggtgcgtcttggtaatgtgccacaacttcatcaagtatcgcacaatattgagacaagatctcctattcatgtgtaatagacattgtgaaatcaactaattaggtatacacatacgaaactaaagatgtgtactttacctcacactcttgtggatgataatccgggtcacgatgcaattgacgccgagcggcccgatctatgctaggacaggggtcggtaggcgtttcatatccttcatcacttgaatgttcttgacaaatacccttgttcatgtggtcgaacattaacccttggtccttgtttacggaacttgttgagctatatatatataagagattgcaacaaagattaaaaaaattgaacacattgtttggaacagaatattaattagaacacaatatatatatata

SEQ ID NO: 45890 - DNA, 623 bp, Zea Mays
tggagatccaggataacaccatcgatatcctggaaatccagctacacaatgtgcaagaagagcttgcggaggccaacgctcacctggaaatgcaccaccaagacatggaagctaatgaggcaggcagcgagggagaggaggatctcgaggagatagagccagctttcggtccgaaagcgactccctccggagtgcccgcttcacctgcatccagcgttgcctcaaccaatcgtggttatatgggttagatttaacatgttaggagagtgggaaaaccacgtaagcttagtttttagtaccaacttttgaactaggctctagggtggatcccctaaaatgttgtaacccggaaagacttttgtgaatgttgcaatgaatgaatgaatgttatcctggtttggttcgatataattttatgtcatttttcttctcatgatataaagtctctgtttggaaccatgaatcaaggtagcaacaacggaatttctgttttccgatggcagctagacctcgtcgcgggaagaacgagcaggtttcctcgccacctcccccagctcccacgatgcaggagctaatgactcagcaaaatgagatcctgtggcagctggtgcagcgccagcccc

SEQ ID NO: 45891 - DNA, 970 bp, Zea Mays
ctaaaacgaattatattttgggacggagggagtagaaaataattctacttgattacatatgcgtccaatgttcaggaaagtatctatacagctggcatctgatgcattgtttccttgtcaacaaaaagggaaacagatatcaactattcccataggtaaaaagggaaatgtatgccaaagctggaaatattgtgatgtaattaatgggttattgctataagataatttatagcatgattagtaagtagaacaagtgtgttttagagagcatgcatcgtcatccactgcctattaatggaaagaccatgagaagaatacccagcagtccaatctcagttcacaagcagcaggaaacatgttatagttacaccaggactgagtctgatagtgattcgaaaccagcacaaacaactccgactacacgctaccaaaccaaaaaaatggggggaaacaaaaggagcgcgtgcgagggtgcgacaaactcttgcgccacttgagcaactctatgtcaaaggcagatgcggaatcaccgcattgtttttcgctcaattgtcctcaaacaagcttctcgacaacaatgctatgggcatccaagtcaaacagcggggagcactagaagctcagcgtaacagtttttagcgccaaaaaaagctactacatgcaagcaatttgaactaatcttgcctgatgcgtttagcagacgctaagcattcgaaaatagcaagtgcaaccaggtctccggtcctccccgagctggaactatcaaccatccatacaccatgcaacgccggacctcagattgcaggcagaggtgtcaattcaccagaacctataacttcgcactacaccacaggctactctagaacttctgaagccatggccaccagggtgctagtatactcgtactaatacacggtacccttcgtcccacgagcaggcagcgaaaagctggcgcgccccgacgggcaag

SEQ ID NO: 45892 - DNA, 330 bp, Zea Mays
cgctcatgccctggctttggagagcccaaatataagcactaagtctcactatcgcatttggcatcagatgatgaagatatatctcaaacctttttaatacttcagcaatcatctcatacaatgggaatcgaagccctgcgcggaagaagctcttgaacacactacctcatcatctttcgactctagaataatttcatcacctgcgaatctcaccaagtcatcatcgttctttccaacataaccaagctgattcattaaaaccaaatcatcaggtttcacagtggatttgccaaattcaatgtgactgggtttgcttggacttaagatacc

SEQ ID NO: 45893 - DNA, 1185 bp, Zea Mays
actctagtagaagcgaggtttgagaggttcattgaccaacctggctcataagatcaacatagggctttgaatctacctcaacgtggattatggatgcccgacgagtcaccgagccacgattaaaaactcagactattgatcctacaacgcatagcacctcgggtcgctcctagagtcaccaacatgtggacatgttgttgtgcctgtcacgagtgtcgtctggatgcctctactctggtgctatgcttggctttttgccagcgtgtaggtcctgtcatgcgggcgtaattgtgtcaaccttcatggtggacacgtattagcctaggttgttctcagattgttttgagagaagctccacatgttataggccatgtcacgctcaaggagcgggcatgcctcctttctcgcctcaagaacaagatggttgctctcccactcgagtcctcatcagtggagtcaatcgatttgtaggcaaggagattgtaaatcaattctagggcatacacgaccatacccatgaactcaatgttcgcgagaggctggtgtaggtatggccttcgggcatagatgtgggacctagagcggttttgtcttccattcgaggacttcataggggcgcttcccgcataagttaccaaactatggaggcgtagcccctagaatgactcgatggtgatgctgatgaggggttgtgtgggtgtcgtgacccatgttggcgctgcctcagcggtgatgatgaaatcaaagcccccaaagcacatgccaatgcccacgacccacttgacgacattttttaccatctgctacggtcgtgtggtgaaatatatgtcatgatgcacaaataatcccctacttggcatgccaactgttggtgttctaaagccactagttagtaaactacgtgctttgtgcatctggtgcgaatggactgcgaggaagtcacattgattttatactagttcaggccaaaggccaaaagtaccaacttctagtcgagtgagttgcgtaaccatgcactatgtttgtaatagggatggattacatactaattgagagagggctcaatgcccaagtctctagtgaatgaaaggcagagcagggtggattgctttgtgtgttacaagtatggaaagtacttgtgctagctttttgtcactttgcatgttgtggtctcccctacctttt

SEQ ID NO: 45894 - DNA, 508 bp, Zea Mays
gttgaagttgagccattgatccgcccgagtgaaggtgatcgggtgctcggaccatcgatacggggcgggaggtccaacggttgccaccaatatctgacggtcgttgaccttttgttgccttttgctttcttgcgacccatgtccaccgaagatgacattgacttctccatcgacgcgcgggaaggctccacctcctcccccttcctgttgttgggattgtcgaggttctctaggtcctcctcgtggcgggggaggcggcagaggttggaagagtcggccgttccccacggaatgcttgaagtctctgcagttccgaagggtgtggcgcatgtccttgtggtacgggcactggtcgtcgaggatgtcgtccagcgtgcgctcgcctccacgaggtcctcctcgggcgcgagaggcgggtggtccggcggcgtggacttcttcacgaggcctcttttcccaacgtttgtcggtttgttggttcgcgtcgcatcgcggtgccgcctgcgta

SEQ ID NO: 45895 - DNA, 1152 bp, Zea Mays
cgccgattggggatctcgtgctcggctgctcgcccagtcgcccttctctgcttgtccacaactcatgctcgcccttctcggtctctggttgcccagacgttctcttgtccatcgtgcggcacaccacagtccacacgtcgacgacgtcgtctctggtgctccggctttgaaaggtccgtctctactctctactcatttactgtcgttagcttatcagaattcagaagatacatgtcgtcgcccgtcgaccgtcgttagctgatagcctgatagtcaagaacgcatctctgtcgttagcttataccttatacatgtcgtcgttagcttccaaactccaacgctcctctccggccgtaggaactgcttccaaactccaacgctcctctctgtcgttagcttatcagagaagttgtctgtttaattctgtcgttagcttatacatgccgtcgttagttgttgtctgtttaattagttgttagctgtttattttagttgttgtatgttatgttttttagatttagtttacaacatctgaactcactttagtatactgtttgtataatttaaattaattgtgcttttggtgcattgcagtcgttgaggaaccggaggcgacagtcctctaaccggtttagctccttgggctcgtggtcgaagtcgcggtcatggaccttgacgcggctgcagaggaggaggagcgccggctggaggaccacaaggaggcgcaggatgctaggtacttcctggggtttggtgacacccatggagatcctattgaggttgatactgttgtcggctctcaaattggcactggaaccagatccactagcccgtcagcagcagtccctaatctagatcaggctgctgatgctagtggtagcaacatgaagaaaaggtccaagtgctggaatgactttgatgaattgactaagattgtgaatggtaagaaagtcaggtatgctgctcgtttcaagcactgtaagcaaacacttaatgctcgatctacttctggtactggtcatttgctttgtcataattgccctgctaagaaagcacatgaacactctgggcaagtccaatctgtgcttaagtacattactgacggtactttgcaacgttgggagtactctggttctattgctaggactgaac

SEQ ID NO: 45896 - DNA, 404 bp, Zea Mays
aaggtgtatcctcaagcaaggccgattcgacagaagctacatcgtttcacgcctgataaaagagaagctattcatgccgagttagcccgcttagtgtctgcagggttcattagggaagtactgcacctcgagtggctagtgaatcctgttcttgtactaaaaaagaataaagtggattggcgcatgtgcgtcgactatactgatctcaacaagcattgtccgaaggatcccttcgagctccctagaatagatcagctagttgacttgactgctggttgttctatgctctccttcctagactgctattctagatatcatcatatcagcttagcaaaagaagatgaggagaagactggtttcattaccctgtttggtgctttctgttatacctccataccgttcag

SEQ ID NO: 45897 - DNA, 358 bp, Zea Mays
gagatatacaaagacacaatggcgaactaaacattaaatgagaagacaccgcagacaaccacatgttagcattagttatctacacttcatcgagcgcatcatatcaacaccactggaaggacgaagattactacctataatttaccaacacaacacgacatcacgagtacaagcatttatttaattggatacgacttttcattagttcttctagtgaacacgcacaagcatcatcgacaacacaaattcaatagaggacataagcgtcaatgtctaaggaactcctatatcgcaaccactagataaaggaacatatcaaacaatacacacatgtcatctctagcttagccatggcaag

SEQ ID NO: 45898 - DNA, 273 bp, Zea Mays
aaacatgaattttatcacttgataataaaatttgatcacaatattaaggttagtgcgaggtataagttaaacaaagtagaggataagttcaacttgtaatatgttgctctaatgagtgaggaattaagatttggagcaacaatggatgatttagatgaagatcaatccaagagaaattagggagaagaggataaaacaaactgcaaagaagagagcacagtaacacgacaatttatttatcggagttcaatatcataatgaaacctacgtctt

SEQ ID NO: 45899 - DNA, 352 bp, Zea Mays
gaccatcgccgattctagtgatggtggcctggtccgactgaagtataccttcagatttagagagaagtttgatgaaccaaccgacgactggctgaagtgtatcgaagctatcaatgatgagttacttagggcatactctaaggccgaagataatgctttgtccgcaaccttcgggggccgggggaagaaaagattgaacagggtctttgatgcaattggcttcatataccccgattatcgctacccgctgcgagggcaaggaaaaaagaggaagactgctgcttcggccaccacagctgtgccgaagggcaaaaaggtgaaggttctgacccaccgtccgtgttatattgaa

SEQ ID NO: 45900 - DNA, 641 bp, Zea Mays
tctagcagcatcgctgaccgaagcagcttagatggatagcggtgttagggactcatgagctgacagagtcataaaccctctatccccctgcatccatcaccctgacgtgaatgcaagtgatgtaatagcaagctcggggaggctcgcacactcgccttgtcttgtacaagggtcggacgtaggttcctaacgcgtgcagcacatcttgcagcaggttggggaagtgcctcgtctcgaacatcgatgtgtaatgttcggtgataggcccaaaccccatgaagtagtcctgctgggcatagttggcctcttcgttgacttgttcctctttgtcctcatcatcgtcgtcatcctcatcatcgttgtacccagagtcgtctaggtcgtcgtctccaggtgtaggagcttgaacggctggtgtaggcagtgctaaggtcgatgacctagctgcgaaggccagtgacgctaccaatagggtgggcgtcggcagaagttcctccgagctgtcttcccggatgactccatgctccactcgaatgcgagggagatccacaggaacttcctctactaccactgggtagaccgggatttgccatggcggaggggcgtagctgttgttaacccgggtggtttgaagggtacga

SEQ ID NO: 45901 - DNA, 622 bp, Zea Mays
ctcgggtttaattttaaaaagtatgttattgacctgtaaaacgttggctaggaaacgctgttctttcacatgtttcgatgttcactgaatgattgtatgattaacaacttaaaccatctcaccaagattgctgagcgcgggagaacaccgacgtgcgtgcatatgttgggctgggagttctccgctgaaatcatgaaccgggtcggcagtcgcatgcatgcatgtatgtatgggcagtctactccagctgggttgcatgtgacgatatattctcgtaatatccacccgtgacgtctagtcgtcgttgatcgcgaagcaaccttgcatgcttcgtgtgcttgatattctgcagttcgctgcctgtgtttgctagcgaacgctacagcaaataaccaggaattccttgtaagtttagatatttttatttagtcaaagaattaatcgatttttcttgctagcggtcattgctagcttgagagtcatctctctcaagaaatatttcctgggtggtttttctaattttcttgatgattttggttcctcaaggaattttttatgatctgatgcagtggacggtgtagtggaagtacaataattcggtggttaacacgtcgtgatgctg

SEQ ID NO: 45902 - DNA, 486 bp, Zea Mays
gtgagcttctagcgcgaccctgctggcgtcgagtagtttacacctgtagagatggatctaggactccacttgaagggaaatgtaataacttttgcttttgtaaggtactttttgagtactatttatcaagcagtattagcacttatctgtgtaccacctgtccctgttgtgtgtgatgttgtcgactcctccctggtacttggcccccctgggatgcaggctcgatgtgttgaggttggcctggaagagttggcaacaacccccaggaggcagcctcgaccgggacctgggcctgtacacagcttcggctagggagcgttagtagcacacccataggatcccccgtctgacattagccatcctttgatacatgctcgggacctgcagtatttagtctgggaggccaagttgtgtgtccggacccctggaccatggctctagatactaggacacccgtcgcagagtggtggagcgtgcaggcttacg

SEQ ID NO: 45903 - DNA, 324 bp, Zea Mays
ttctggtgtggcggccatggcgaggtacggcattgtggttcaagcgttttccgacgagaaatacatggctatagagtgacgacttatgaaggacgataggcactgtgtattttacaggtgaaggtgaggtcgtagaggtgctcatcgaacccagaagctcgagtcttgacgcggctgcttgacggcgtgacgacgatgagggaccgaggcgacagatcactacgaccccgaaaacctggcgcgacctgcgtcggtttggcggtggagcgaggcgtccgcgggtctgggttttatagggtcagtcccgcggatcccgggcggagg

SEQ ID NO: 45904 - DNA, 917 bp, Zea Mays
ttattttgtgtgattataagttgggatttggtttggttggaaattagatagaaaaattcaaaaatttcaaaacttccctctgtctaggctcaccggacagtccggtgtgcaccagacactgtactgtgcactgtccggtgcaccggccgcgcgcacgccagttcctatttctcctgtgcgctgtccggtgtgcaccggacaggcactgtagactgtccggtgcgcccataatcggttttttaaaatcttttccctgcccgagcccgaggctaggctctgtttcctctctggccactgcctctctcggtctctggcgacaccccctacgctctggcgacccctccctcaccggcggcgatcctccggcgaaccaatgctatagtcctgccctcttctctggtgagactcccctgattccctatcactctctctctgttcttcaccagactggagctttcactcaaactcttccaccctttgattcaaattccaatttctatcaaatcctgtgaatccaagtgcatgattgagtccctttatgttccttgagtactcctgcaggtttctagctccttagggagggtttcacaacctctaatagccatttctccaaaaccctagaactccgcatgtcacgtgttcggtgaaatgtccaaaccagccaaaaatgctccgattgaccccaaatttttcaggcatcttcacaacacctccagtaacatattcgccaaatttcacgccaatccgatattccaggcttcaatttcattcaattcttcgtttcgagcgatcgtttccgagccgagtgcccaaatttcattttcttcgcctaaattcaaaccaagcacacacttcactcatttttacccatataaaactattcatggaatatcggctccattccacgtcattttatg

SEQ ID NO: 45905 - DNA, 380 bp, Zea Mays
cggcggactcagcggagcgcgcctaaacgacggtgaaggttcttaaattacaattcaagcgatgctacacaaaccaaggaacaccacgaatctataggtagggttccttaccggcacaagtcgcggtgaagcgcaatcccacatcacgaggcagaggtgtgacggtgtgccacaccgatgacgaattgccgttgacctagatcctcctgcgccaatggatcctgatgtatgctttctccacaccctagtctacaccgtggccaagttctatgggttgggtttgctctagtagcgaaatcgcgtgcggcagcgctggttcttttctttgcggggcgaacgatgagcacacggcagcgccacacgatgcggggtctgggcga

SEQ ID NO: 45906 - DNA, 689 bp, Zea Mays
cattcccgaataataatataacatctaaaacaaacaatagcttgaaggagaaatgtttaacataaacaaacataagctttagatataaggtaacataagagacactatcaatcacaaacataaacttcaacatcgtcattatacatttgatagctctctaatgacacgggtgtaacaacatgcaccgactcagcaaaaatggtcaacccccaagatggtcacactattcgccaatttacagagttgggcctttatacagcttcatgtgaaattataattttgtctctctttctcacatgacaattattcacatttgggggagtacatttaatttatttctccttgcaaacgaatcgcacacctcttatgttcaccgaagcttcctatatcttttctttgtcgaagctccttttgggcctcatttcaactgaaggttatctttatcgacgctaaagatttacttttgataccttcaactccatgcacttttatctcacccacgtgttccaaagcagtctgataagggttcaatgatcagaggtggttttcctttgagtcacgttacatccctatcctaaaacaccatctaaatactaattttgttttttggaccttcaatcagaaaccttctccccaatagtagtccctcgtgggattagttcgtttccataacaagctcaaagtgcgaa

SEQ ID NO: 45907 - DNA, 295 bp, Zea Mays
tgcagccgttcttcctctagtatgtcaatatcctccatcctggttgcttttgctttggctatgctttcgaatgttaatctgggtgctccaaagatcagatctgctggtaacactgcctccgacccatataccatgaagaatggggtgtttccgtgtaaagctcggcttggctgggttcgtaggctgcagactacatatggtagttccctgatccattttcctgcgagcttctcgctcttgtcaaacacctttttcctgagtgcatcgagtatcatcccgttggctctttccacct

SEQ ID NO: 45908 - DNA, 327 bp, Zea Mays
ttgtttctataaattgcagctacaacagttcgaacaaaactggtttaaagccacagctaataagctaacatcagcggtcgatcattaacagcccaattggttgcctgcaccattggcatctggctcacgccatcctgcaccgattgatacgcacattttttacttccccacacatgcaggccaacgaaggtataaagatctagcctgcatctacgcgcacaggttcaaacgttgccatacagccaaccaaccacaggtccagccatggtcaatgcatgtatggggcctggacccagtagcccggccaaccaatcatgcagtaagagt

SEQ ID NO: 45909 - DNA, 614 bp, Zea Mays
ggaaaatgtgcaagatacatatggtggcaatcatgcagatgactaatactcctaggtgagctaggtgagatgtgcgtgctcatccatgcatggcatacctttcaggacgacacaaatagcacctagaacgtctatcaatcaaccgggcacagagagagaaaaaggacgtcgactctgaagacggaagctacagtatgcatgctgttcataaccgcagctagctagcgttctgatcagtcaccggtcggtctcttgcatgcgtccttccttcctcagctcaatggaatctaatgcttcctggctagccgacgtggcaattatattgctgagatcacgctgacgcctgcctaaaccacaccggtcctttttacttcaaactttcagtcatatcggtctacggagcatgcatccgccggcagtaaaaagaaacaaagaaagaaagaggaggaaaagaacagaagagttcgtagaattatttattatgaagatgatccatggtatttgcttgtgctgctgtgtctgtgtgtgtgcctgtgtccactcttctggtcctctccatgggccaagcccaatagtgttctgttctgtattgcccgccaggaagcctagcccag

SEQ ID NO: 45910 - DNA, 294 bp, Zea Mays
gggatttcaagatactgtgcacgatgcttgggaatctgttggaactgcgaactgtcctttcctaactcttcaccgtaacttgaagaagacagctaggaggctgcagtcttggagtgataggcaagttggacacatcagttctcaactggcagtggcaaaggaaatatcacataagctggaaatagcgcaagatgaaagggtgttgactcctgatgagttttggctgaaaatcaagcttaagaaacattctttgcttctatcctccctgaagcgtactatggctaggatgagatc

SEQ ID NO: 45911 - DNA, 640 bp, Zea Mays
gtcacaagaggaagagcttcgggaaaattaaaaaagtcaacaacttcatcaaaaattgtgaggaattcatcatcaaatggcaagggtatgtttcactgccagggttacacgtgacggagaacaagccgaagctgctgaaaccgctccgatttacgaagtgatgaaacggtcggggctggtagtaccagaggatgtttctgacgaaggtgcacctgccgctgaagctgagaaggttggtgccgaggaaggtgaatttgaagatgattacagtgccttgccatctaaacccaaccacctggagtttgggaggtccactgttaccgaagatgatatgcctaagttgatgaagttaggctattttagtgaagccaaaaagaagctgattcgctttggcggagaggaaattactccgaagccagaaaaggatgaggtggtagtctttaaaagcttctttaaagcaggattaagatttcctttgaatgagatgattgcagatgttttggagaagtttgggatttatcttcatcagttaactcctaacgccatttttaggcttagcgtctacatctgggctctccgaagccagggggcagaaccgcttgccgaaggcttctgccgggcacatgagcttcattatcag

SEQ ID NO: 45912 - DNA, 634 bp, Zea Mays
catcagtggcacacccgagagctaatgggcaggtggaaagagcaaacgaaataatacttgatgcactcaggaaaaggtgttcgacaaagtgaaaagcttgcagggaaatggatcagagaactaccataggtggtctggagcttgcgaacccagccaaaccgagctttacatggaaacaccccattcttcatggtatatggattggaggcagtattaccagcagattgatctttggggcacccatgctaacattcaaaagcataggtgaggcagaaacgaccaggctggaagacattgatatattagaggaagaacggctgaatgttgtcatttagtcggccagataccagcaaattctgaggcgctaccatgataaatcagtgcgacatcgatccttcgcgataggatacctagttctccgccgagtgctgacgggagaaggacgacacaaactgtcacccccatgggagggaccattcatcgttgcagaagttacctggccaggatcctaccgactcactcaaatggatggcaccgaagtggggaattcgtggaatattgagcacctcaggaaattctacccatagcagtacctcaaaactctggtgggcaagctatactttgtaagcaaaag

SEQ ID NO: 45913 - DNA, 394 bp, Zea Mays
gtcgacgacgtttgacgtcgcagcaggggatctctggtgcgggtacgagcggtagtcggggtgtgggacgttgacgagaaaactccgacgatgcgtttggacggcggggaaacaacagcagggaccgatgtcgctgtgcgagcagcagaggttcagcgataatggtatgcagtagccgcgcgacagcagagcctgtgcgcagagtagttcaggcaggagagcgcagaatcaagcacgaaaagggagaagagggagctcggggaggagaagggaagggagttcggtcggattttatagcgagagagtgccggggagggaagagaaacgacgggttcttcatggaggccattgatggcgttcatcaacagaggtaacgacggcattgaagttccat

SEQ ID NO: 45914 - DNA, 1016 bp, Zea Mays
atgaacggtggaatagagaacttaatcttagcaaatggatcatggtctggttcaggattatgatgacgatgtctaccattacctcccataccttgtcgattacgtgcgtgacattgtcgcagtggtgcataaacatcatcgtcatcgtcgtcgtccacaggagagtgagctggggctgaagttggtggtgggggacgagcctccagtacgtccatgcatgtaacaagttcagcaactcgtcgatcaagctgctcataggatgtcgccgtagagtcctggtattttttaaaagcttcagtcatcgcgcgcatcatctccttcaattctagctgagagacacactcatcgtcgttaagcttaggccccttgtccttgtccatttgattctttggtcatgtcattgttagcacaaaacagagacaaaaaggcaacaaacaatgtgaacactacatctatctctcagggtggttttggtggtggaatacaaattataaagcgtattaccccgctcttacaacgttcttaccagcactgcaggtggcaaacggtgactggtgtgaccgtccaacgagcgtgggtgtgattgcaaaggagtacctattttgctcgagagaaagctggagttctgggaaggctgactaaatatatatatatatatgtggcacacaagtcagtaacatatagcaatgttgaataagtgttccaagtacttgtcctagttgctggcctagaaaatgtaatagaacagttggaccaaggcacaagaaagggggtacaagtatcgaggtgcagcaagaaaacaggcttggggcaaaataatcacagaggtgcacagaacactggcgtttctatttatgtgctactcttttctttttttcttttttttgtgattttttttaaatattttttatttttctcttttgcagcagcacataagaagaaaacacaccaagtttcagatttttttgtgcaatgacgcgtcctctggaatttctacaagtttgccctaaaatcgg

SEQ ID NO: 45915 - DNA, 441 bp, Zea Mays
cgacgccgacattgacgttaacgtcaacaatgtgtctgtgctgcacgcccaagtggtagccatactcaatgtgtgtgcctcggtgtcaactacagtcgacctcatcaggtcgtcctcctccaaattgttttgtcgcctcctcgcccgcgagtaggccctcgccgattatgacctatgcgaggcggcattctctgtcgttaaccaccgggttcgcagggaccttcatgtgctctcatggatctacggctctgtctcctctgagctcttcgatatcgtcagttcgtcaccacctccaccctgtccgcccacaccgcatggctcgctctcgaggagcagtaagtcgttaatcgacaatcgcgaaactcaggtcctcctcgttgacatcgaattatgcaccctatcgcagggcatcctttcccgctcacggactcccatgtcgaa

SEQ ID NO: 45916 - DNA, 532 bp, Zea Mays
atcagctaaagacttcatggcaactgaactttttaggaaagtcgagaattggtcctcctttaaggcatttgagatagatgaacgaaggattatttggttgaagcgacattgtgcatgtgcaggactcatgtagaagagcttattatgctagttataattatcgtgaaccttatcatgatcagctgaacattaacatgctacttctttcttaacgaacttcttatttcttgcttaggaagtcctttatgttgaattgaaccatattacatataatgtaatttatagtatacaatggttccttgtagatggatgtttgctcaagtgatgatggtgaggatatgtccatgactattgctctcatttgagttgagacattgaggaattttgaagcagttgttgtgggaattggtatgctctatactgaaaattacttgaacaaaaccattagaatacaacctgttatgtttggctttgattgggttatgagaacactaagcgatcctatcgaatgctatgagttgtttaggatgag

SEQ ID NO: 45917 - DNA, 433 bp, Zea Mays
gtgctttgaagttgccatcatggttggagataaagattatatatgccttatatgatggtccaacataacctcgatagccaaggtgagactacactagcacaatatattagcatatattagcacacaaataggtcaaaacattagaccatattttgtatcctagaccaaagaatatcacaagaacaacatatgttgcctctcgagctttgccatatgcttgatacaactcttgatgtatgtgtgagttctctttgacaaagtgatgctaggtagtttcttctatgtgaacattggcaatttcttctgctccatgatcgcgaatgtaactgatagtttgaacaagacaattctagtttgcttttatgtatatttgtcatatagagatgaaagtttctcaaggagtaacatagatcatttgtgtgttaccggggcg

SEQ ID NO: 45918 - DNA, 585 bp, Zea Mays
gaatgatcggaacggcgacgttctgtctcttccgcttgggagccatcacaatttctcaggcggaatgagcgggctcgagaattcagaaaatggagaagcggaagaggaaaaagtaagatttagggttcgggactcaaaaaggcacgttggcatcagtataagttggctccttaagtcaggcattacctttaaagtgccatatcataactcggaaaagtaaggatcgcagtcgtcactcgggcactacctctaaaatgccgacaaattttcaagcacacgaacaaaaagcaagcaacggtggttaagtggagtaacttcatccttcattcgtaatgggggaattaacacaaactcgaagccaactcattatgagtcaacatcttctacccctggtcattacaatacattacattactctactacttacactaccttattctagtgctacttgctactactattgctgctatctatactaatatttaaaccagtggcattatgccactggccttgtcgctgacgtcgtcgcccttgtcgccgtcaccgttgcccctgccaccatcacccttgccgctgtcatcgttg

SEQ ID NO: 45919 - DNA, 328 bp, Zea Mays
tagggcgggcggcctgggcgcgcggggttggggagagtgggttggtttggttcgcctcgcggttggtggcgtggactggactgccacctgcacggggtcggggaggaagaaatagaagcgggctgggagccggtgaggtgagcctaggacctgacaactgagagagaggaacggcaagctctcgctgcctgccaccaacccccgcgacacgacgcgctgcagcggtgccgtctagtagcagatctgggcgcgagagagaccatgagaggggcgagggggaagtaggtgggcgcatccggcgggccggagttagttgttggtttttttc

SEQ ID NO: 45920 - DNA, 328 bp, Zea Mays
aacgcaaaacaccgctcggtgtgttctccccaaacagaacaaacctagcatgcctattgttgggatggcgccagatgggctagggttttactcttctcattttgccaaaccgttatccaacaaaccaaatcgcagttttattggtttggttaaaatcgttgagggtttgatctcggccgaggatcttgagaaggatttcggttttcatttcccctggggacgtacttggaaagctaccaagtgtcattctggtttcctcatgcaatttccctctcaagagaggttggatgagatgattaatttcccagaaatgaaaatgaagttgtcg

SEQ ID NO: 45921 - DNA, 991 bp, Zea Mays
tctgtcgtctgatggatttgaggtcccacggctgcgctggtttatcggagagggactaaaagttcgtgataaactgaggattgaaatctccccaatcatcgatgcaatgacggggcagatccggagccattgtagcgcatcctgccctagaatgatgggcatgtacgccatcatgatgtcctccgttgctccagcagcccgagcggtggtagtgtagacagccggccaaccccgggtcctgcatgggttcgtatttgtcgatgttagatactttgaaattgggaggccattggatggctcgaagacgacgggtgagcccggagatcccacacgtatcctcctgtcaatgatcacgccgtcgatcccagggaggggagcgagtgttaggtcacctcgaccgtccccggactggactgttagtggaggctgctgctaattcaatcctggtcgtgcggctgtgtgtcgttacaccatgatcgcggtcgtattcctcccggtaccttatttcattctcatgccgatgattgcatgaagaactgatgttgctccgtgcgcctcgtcggctgttgatggcatgacgtagatcgtttggtgggtgggcgagaggtagaagatgattggccgtctgagtaagcacccaccgatagccctccgcgtctagggttcgcgggaggccgtcgactatctacgctaggacccctccaactttgctcggcgtgttcaatgctcgggcaaagtcagggtacatgttttaggcaaggagcgaattttcccatcgaagcctagcatcttgctcatctagctgccgctcgcattccagagcttgacgacagtctcggcggcgggagttgcgccgttctcgatgtgttctttcatcaggagtctcccccatctctgaggcttcgtaccgagagacaggttgtgccaggtcccgttctccggcttcatgatgtcgccgcacatttcagcgcttgtttctccatcgccgagc

SEQ ID NO: 45922 - DNA, 532 bp, Zea Mays
agaatgcagctaagcgcatcgcaaggcaatcagctcactatacactcgttggcgaaacactatacagacggggtgcatcaggagtcctcatgaaatgcattctctcaactactggaaagcaacttctggacgaggtccatgcgggtcagtgtggagtgcacgcagcatccagaaccctggttgggaaggtcttcaggtcaggtttctattggccaatggcaaagagtgatgtggccgagttagtccagaggtgcgaggcctgccagtacctgtcaaagcagcagcatctgccagcacagcaactgcaaacgatacccataacttggccgttcgcgtgctggggactggacatgattggacccttcaagaaagcccaaggaggatacactcatgtgctggtggccatcgacaagttcactaagtggatagaattcaaacccattgcttccttaacttcagccaaggcagtggagttcatacaagacataatattcagatttgaaataccaaatagtatcataactgacctggg

SEQ ID NO: 45923 - DNA, 486 bp, Zea Mays
ggcgcttcgccggtgatgaggccggcataaacacagctacaactgcggcggcaaccgggacggacatgccatgcgatcacgtcccggtaacacctgcttcttcttcttcccctcttcactcacagtctcctcattcgccttccttcatggatcactaaacagcacatccaagtaccttgcgctgatctcattctttttcttacacttcgattacttgcagaaatagcactagctagttggatagagatgcacgcaggtttcagattttttagacaacttgcggcatcacacagattcatttcgcaccagcgcattcaagaaccatccgtccatgcatgcctttgtcattccaccatcaaacacttcttctcaaattcaccaggacaccatgcatgctctagtctgcaatattttggtcagctactagggcaaccagtcaatttctcaaccatgatctgcaacggcatcctcattagacgattcatg

SEQ ID NO: 45924 - DNA, 456 bp, Zea Mays
ctggtctagtgtaacgttgatcgtagtatacactgaggaacgtgttagagaaggtgcaagtgtgggaatgagggagtggagaactccagttgaatgcattgtctttaactgtttgacccccctcacttttatacttcaaggggggttgttacatatggacttgttgtccgaaggagggcgcgacctattgtctatggtggtcctactgacgtagctctcctgacgttgtcttctggttcatgtgtggtcgtacacccggtatggtggatcgctccatctacctagtatgggtcactacatcgctctgatgttgagtttacctgtagtgatgccaggtgggaccatgggtcggagtcagagggcaccgagggccgtacgtggcaatgccccgtcccattgtcagggactctccgggcatgttgtggtgtcatccaagacgatatgtgtgtggcgacg

SEQ ID NO: 45925 - DNA, 634 bp, Zea Mays
gatggtgaagattattcttggtagaatcataaaatgaaaggtcatttatactcattccacctaagtattagggaagttgttgaactaggaatggaaatacctaatagcaatgacaaaaactataatctggtggaggcagagcaaatagtccatcgcaactcacaagccaccatagtacttcttgcttctttatgcagggaggagtacaacaaggtgaatgggtagcaaagcgctaaggaaatatggtatacactcaagacgacacacgaacgcgataaaattacaaggatcaccaagatggagctcatagaaggggaactagagaggttcaccgtgaaaaaggagaagggctagatgaaatgtacaaccgactgaagtccatggtgaatcaagtctgtaactatgggagcaagaagtgtacagatcacgaagtcgtccacctaatgctaaggtttttaccacccataatgctactctagttaccttaattcaggtgaatcctaggtacaagaaaatgacacccgaggaggtgtttgggaagtttctaatacatcgacgacttggcccaagggaacatcacctccatttagccacaaccatcgacatttttggccttaatgttaatgagatgtcc

SEQ ID NO: 45926 - DNA, 1177 bp, Zea Mays
cacacaatagtcatctgttgcaaatgaaaatagcatgcatgctcacacatttcgtttgatatgcataataacattgattgtaataatatatatacatacatacacatctctattaccatatgcaattgcctgacgtagaggctataaccttaattggggtttagggtttaccatatgcaatctaaaaatgtatgacatgtttttggcaagcagtgctggaacaagcagtgatatttgatttgtagtgttgagatattagagtgaaccaaatcaacaaagtcaaggtttcaatctatgctgtccacaaaataagataaaattagatatataattggtcatagttccctcacgaccaactgaagtgccttatctataccactatataactcaccacttcaaaaattgctaaagccaaccaatcaaatgtccaccatagtctacacctcttctaaatgcacccagatcaatcccaccgttaaaaccaatgaacaagatcaactcaaacctttcatttctcttactcactcaaatccaacgatcaatctttagatcatcccacctcatcatcaatcactcaaatggtggtgacagagtgttcctgttgcctgtggctttcatgtcgagcttctcgttctttcccatgtggaacaacacgagcctactgagacaccgcagttggtggctacctccttgactccaaggaccgcgcgggggcctacaccgtggggtttagtgggcgtcaacggtaggtagaaccccacgatcggtagcgacaggtgggagcacctggacgtggcaatgtccaagtccagggtggaactcgtgcccactagagcacgacatgacaacgacttccacgtcgtcctcaaagccctccaagcagatcacacatcctctagtgttgttgtcgcacgctgcctccgccgtgggatagaagacatgaaatcgacctccatgaagacaccaccgagaactcgtgcccgctagagcacgacatggcggcgacctccacgccattctcaaagtcctccaagcagatcacacatcctctggtgctgtcgtcgcacccagcctccgtcatgggatagaagtccattaagatccaaaccatcaccaacatgacatggtcatcatcattcgcttcctcgagaaactctgctgttgtgcattgttcttg

SEQ ID NO: 45927 - DNA, 404 bp, Zea Mays
gcagcatcagaccctcactaccatcgacgcacaggtaggcaaaaaagcgtacggcgtggaagggaaacagacgatgacgagtgtgggtacggtggttcgccggtgctgggtcgctgtcaaatgcagtcccgtttcgacaacccgtccaggcccgtaagaggtaaacagaatgagtcaaacgggcgcctcccgacgcacgcaacaaaccgaaaccattagcggcagtagcatttgctctcgcaccaaacatccaacgagcacaggcctactactacggccaccctaccgggtcaatggctcagatcggctccgcatagccggcagtgcgtgggtggggccaccgctaaactgttcaaaacgctggcccacgggacaacgtacggacaccacgcacgcgatgacac

SEQ ID NO: 45928 - DNA, 504 bp, Zea Mays
ctcgagtttgagcgcctctctgtgcttcacgcccgaataacctttcgtgagccgacgcgtgccccagtggtcggacccaaaattttttcttcgtttcagctgagctgtgcccgtgcggccgtgtgtcacgtccgcggtatgcccctctccccactctgatggtatgacccaccaggccatcgtcccaccgcccattcagattctgacgacgtccctcccgttgcctcctcctgagtcctgacctcggcgtcgtcgctcgagctggccctgcgtcctctgcgttcgatggggcgaagctttgggacattgctggtgccaaagagtgcgtcttggatctcagcacaaagggtctcgtgtcgcgcttgctgccacccacgctgttggcgcccctgcttatgcccggttgcctcgtgccaccagtcaggtaccttctaaatccctaaccttctcgagctcttggctcagtgcgtcaagcaggccaatgtgctccagtgtgtgaagaag

SEQ ID NO: 45929 - DNA, 413 bp, Zea Mays
aactggagaacacaattatatcagcccttcatgatagtgcactggagggctatcggggtttctagtcacatatcgcataatcaaggctacattctcctggcctggtatgaagaaacaaatccatgactttgtgcagtcgtgcctgatctatcaaaaagcaaaactagaatgattaaagtacataggtcttctaatgcctctacctgtacctaaacactcttggcatactatgagcttagatttcatcttagggctacctacatcagtggatacaactgtattctagttgtagtggataagttttcaaaatatgtccacttcttaccgctctcacacccctttacaactcttgcattagcaaaattatacatgtcagagttttatagattacatggccaactagcagctctagt

SEQ ID NO: 45930 - DNA, 373 bp, Zea Mays
aaacaaaggaggttcggaggcaaaaagtgaggctaggacagaggcgtgcggcgatgtgataaaaatggggttttaccgggtcagacaccatttctaaaatgtgcttagtcatcactcggtcgttatttctaaaacgccgacgtggcctaaatacgactcggttgtttcttctaaaacgctgacatcgccattcatcactcggccgttatttctaaaacgccgacgtggcctaatacgacttgactgttacttctaaaacgctgatgtcaccatccatcaatcggtcgttatttctaaaacgttgacgtggctcagtggaactcggctattacaatctaaaacaccgacgtttgccaagaaccattcagctgtt

SEQ ID NO: 45931 - DNA, 486 bp, Zea Mays
ggacgtggcattcctccatctaatctgtggaaacactcggttgctgtatttcttagatgaaaaccccaggtggaacttaagcccgactggatcccatctttgacagtgcgtcatctgttgcattgagatccctttccacatggtggaattctaatccttcgaacttgtcctccagcttccgcacgactgcacaatatttgctcattgagtcggtcgagcaatcccaatctttgtttacttgacttatgaccaccagtgagtcgttgtacaccattaatttcttgatgccgagtgaaacagtgatgcttagcccatggaacagtgcttcgtactctgctgcattattggatgttggaaacaagagctggagtgcatacttgagttgttcacctccgggagcaataaagagaatccctgcccctgctccttgcagtctcagtgagccatcgaagtacatcctccatatttcagtgacctctgggcttt

SEQ ID NO: 45932 - DNA, 574 bp, Zea Mays
gttgagactaacccttcatgatgaaggacaaatatgtagtattcatgtcactacatttatctaagtccacagctcactgcataaaactcctgtctgcaatgtgcgtaaaatttcccaaattaatcaccacaatagcatacattggccacaactggataattgtggttggggattttatctgtatgcttttagaacatctcggtattagggggaggaatgcccatacaatgtaatgcctcaatattctattaaacgcacaaaagccaaactgaacctgtcgttcggtgtgtactcctgtgtacatggagtttgccagaaatcgttgaggagtaaccatattggtctgaatgcttctacctgatgtagatgtggatatacccgggattaatatcatatccacatttgacttattggtatttgatctattctcggggacgcctgcgaatatgatccatcagccttagtcaaagcatatgttctgattgcagattcacgtggtctgtaaataactctcctccgatgaactcgccctgctggtgatttgcctcatgaagaggttcatcttgatgatgaa

SEQ ID NO: 45933 - DNA, 319 bp, Zea Mays
ctttgccatttctcgacaaacatatatttccttatcgtctggtaggcaatatagaaagtcatcttcgtcagtgccgttgtataccaatgaccctaggggatacttcagatccttgacatattgcctagcttcggcaatctgctcctctgatagtcttttccctgcagcctgatgcactataaattataatcccccagtagatgcttcagcagcaggggattcagattcttcggtagccttctctttttctaatggcaacgacacttttgaagcatctgaaggtcttgattcagtatccttttcaacaatcttcgcaggc

SEQ ID NO: 45934 - DNA, 426 bp, Zea Mays
ggtcttatatgagcgttatcgcagcccaataattattggaggcgagtagcgttcatgagtcagtccttgctaaaattgaagaacaatccgataacatatgcacatgagtgctttaggtccttcagtagcaaatgtaagtcttatggagttttacgccatgtgttaatacctctatgttagacccccaaaaatgtgccattttaagtgacctgtgtattaacaactttaagttgagcaatgattaggaaaaactgtttaatctgctctaacccatgtttcgagttacaatgtctaaaatggtttgctaattctgatactgcgttagccaactcatgttaagtaggagtcgattgcgtaagtgattgtgatatataggttgtgtctcagattgcgataataataggcaaaccaacgtgtatgttattt

SEQ ID NO: 45935 - DNA, 345 bp, Zea Mays
gtcaaccaaaccttctcgcgacaaagaagtactatcgtcgtctcgtcgatgcccgtcctccctagcccctatgaaccctgctagctatagccttgcagtttttgcagcgttaattcgtttatgctcttatacgtattggtttaattactggtgaatagttgtttgggggaaatttcattttgcacttgtattagttagtctttctactttgttggacttctcattagttagtcttacatttactatgccttataccattgatccagtgacagaagttttcaaacgcaggtcagtgcgcatgatattgaagatgcattggcatggaaaaagaaaatagagctcctc

SEQ ID NO: 45936 - DNA, 528 bp, Zea Mays
cccaaatagaaacacgctgtagagactataaatgcagtagtaatgcacacttgagaggggattaatagggtagcatggttgttccatttccatctttattcttgtgcctaagcctaaaacatcaattattgtggaaaggaaggaatgttgcgacaagtgttttcttcagcgaaattgcaatcgcagtttgtagagagcatgttggcactgccaatgatggtgcagtgtgtaccagttttagcggctcctatgcctcccaaggttcgtgctgagcacatatgcactgcaacatcggtatggcactatggtcgtgctttatcggctggagagacaggaattgaatccacatcgtggttccaagcttggcttcacggaaggtttcggtgatcattcaacaccgacacagcaacatataaccaccctagggcagttactaggggctcctagtgagagcctacccacccaggattgcgcccagctactcaaaaaaaccaagggacaaattcccactttcgacacataaaaaag

SEQ ID NO: 45937 - DNA, 1164 bp, Zea Mays
gttaacaatagactgcagaagatcagttgcaagaacaaaaagaagtggggacaaagggtctccttgtctgactccgtgtctgcagtgaaatcttttcccagggactccattcaaaagaacttctgaagaaccggaaccaagaatcatagaaacccagtggatccatttatcaccgaaccccttgtgcctcaaaatctccataagagttgcatgttccatttgtcaaatgccttctcaaaaacaagctttaaaatgaccatttcctttctggatttgtggcaaagggtgttcaagctctgacaaattatcaatcggctgaatcaaagcagataagttgaaaaccatggaagtttgttgagaggtccccaaacggttcttgaaatcattggaaagcacagattctttgtcagtatgagagagagccatatttccattgtcatctttaagagaagaaatgaggttatgtctgtgcttgacagtggcattggcgtgaaagaatttagtgccagcatctcctagggtggcccatttgatttgacctctttgtttccaataagtccgttgtttagctaaaaggtcttgtaaatgaaggagaaggatttctttgaagttccattcctgaatggttaagtctctactctcctcaatgaagtccaaaagctgaatcaccaacttaaccttatcaatcaatttagctaaattggggagagacttacaccaaacatggattgccttgcgtgcccttttaaacttggccatgagccttttagcagggtctggttgaaagatgggctgattccaagaatcttggaaaattgagtggaagtcttcaagctggagccaataactttcaaatctgaagatgagcggtttgggaacattaatttgaacattgaccatccaaggaatgtgatccgaggttcccctaggaagcgagagtgcagaagtgattggaaaggtgaccgaccaagcctgtgatacaaagcaccaatccaatttttcaagtagagggtgacactgcatatttgaccaagtgtatgcttgtcctttgagaggaatttcctgaagccccaactgactgattgcgaagttaaaactcatcattctgagatgatcccctcccgacttattgcggttatcaggagatctgatcatattaaaatc

SEQ ID NO: 45938 - DNA, 445 bp, Zea Mays
gccaaatcaaaaaggactgatccgccaaagaaccagtcctcatgcaatatctttcggtcatgtgaagcctggaaaaacagttaaaaggattcacattgtagcacatagagcggaacaaaaatgaagaggctaacatgttggtgaaagtagtaacgaaaggcgacccactgccatctaacgtgtttttccacacaatcagcacactagctgtaagaaaccttgaagccctacaaataacacaagaccccaacggtcatagaatcgtacatctgataatgaacgaagactggcgtgcacccatcaccttatacctccaaggtcattatcacccctctgaccaaagcgaagccaaaagattgaagcatagaagtcgtgacttcggagtgatagatggacaaatatacaagaatggaataagtcaatcgatgcttaaatgtatcacaat

SEQ ID NO: 45939 - DNA, 491 bp, Zea Mays
gaaaaagatggtatagaaaatttaatcttagcataagggtcgtcaggagcacgattgttattaccttgctggcggtgtggcataccttctgtgttttgatgaagacggcgacagaggcgcaaatctctagtggctgcttcatcataattaccttcttcatcaaacaccgcatcatcgggaagacgtggacgaggaggtggtggcggtgcttgttgttgcgtctccaacacagcaagtctgtcgacgatcttggacaatcgtcgatccaacctctcgtaagtcttgccaaggttcatgtcaatgaaggcatcatgcactgacttgtggaccgtctcctgcatttgctccttcaggagcttgttgtttgcctcaagattttggcggctaacacattcatcgaagtctgtagggatccttgcttcttcttcgtcgcttgccatcgaaacacaaaacatgaaacaaacggtgacgattatccctaataatttcac

SEQ ID NO: 45940 - DNA, 599 bp, Zea Mays
aggctcgggtacatgaccgagccccagctctggcctcggtgccctacgtagttaaagatgcaaatacaggaaccagacatcccctcacggcataagtcaacaacgagtaaaagggccataccacagaccgtaccggctacatggggcttggtcacacctcctctcccctacgcgacaaaccctggtggtcctggaggccctccttgagacaataaatataggcgtctaggggcttcaggaaggcgggcgaacacttcacggttctcctccacaatgatattagcacttgcctcaatcaaccctagggaagttgggatccatccctgtcccgaccggcttgtactccctactgcaagcccttaggtgcagtaaatatgtctcatccccctccactagaagtagggccttcccttgcccgaaccaagataaagacttgagtctccttgcatcactcatctaggctagtgcacacaccatacattcactagttggtgagaacagaaggaagtcttccggcatggtttgatgaatagacatgtcatcaatatttaggcaatagcgacgggccacttcctccagcacatccgagccgagaacaa

SEQ ID NO: 45941 - DNA, 672 bp, Zea Mays
ctcgacgtggcggttttagcactggcggtgtagtcaagaactttcttcagtgcatcaagagcttcctgagcctctgaggtccactggaacttgtccaccttcttgagcaatttatagaatggtaggcctttttctcctaaccttgatatgaacctgcttaaagctgccatgttccagtaagcctctgtactttcttttgtgatcgtggtgcttccatcctcatgatagcttcaattttttccgggttagcttcaattcctcggtggctaacaatgaatccaagcaatttcccagctggcactgcaaagacacatttttctggattgagcttccaccggtatcgcctcatgctattgaagaccagctacagatcctcgatgaagttttctgagttttctattttaatcaccacatcatcgacataagcctctacccgcttgccccagtgatcggctaagcatgtttgaatagctctctggtaagtcgctccagcgttcttgaggccaaacggcatggaggtatagcagaaggctccaaatagggtaatgaatgcagttttttcctcgtcttcttttgctaggctgatttgatggtatccagagtagcagtccagaaatgacaacatagagcatccggcggtcgaatctaccacctaatctattctaggaagtc

SEQ ID NO: 45942 - DNA, 1353 bp, Zea Mays
agagcttatgtaaaaagtttgagcaattttgggattattatctattttctaaaaatccagaactaagactttaaactacttaaaatgccttaaaattccttatttcctttaaaaatcatataactatttttattaaattctagggaaaatgagaagtctaggaaaattggtctcatatttttaggatttttctgtaattttctacatttgttggagttctgctggaaaaagaaaaagataaagattgaacagtcctgggccgatttcagcccaggcagcccaactaccgcagaaacacgcccacgcgcgcgcgcccgcggcaactttgcacagaggccctcggtttattagctaaatcgaagtaggtttgcttgctgttcctctgtgccactgacaaattgcagaaatgccctccatcttctatctcttccccgcgaatgcccctgaccacggcgcgcacgcagatcatccctcacgtggtccgtagcggccatggccggtgatgactgcttggaataactaacgaggaggcttcactgacctaaggcgacctaggaacaaccactaaactaatatgaaccctactgggagtcgcttgtccacgatcacggcggacaccgatcatgggagcacacgttcccgcggattggggatggtctagttcgatcgggtgtttgatgagcatcacgaatgcacacaggtactgaaatagaaccgcagagagcatgatcagacctggaagtggctggccacggcgagggtgctttaacggcggcggtaaactgatttgggggaaaacagcgattctccgactagggtgggcaatcgagtggaagaacgggtgtgtgggcttcgtgatgacctaacgcagctgcctgggggctcaatttataggtagctttgtcggtggcgcttaatttggccggaccgtgtgggcggccggagatgaggaagaaccttggcgcggtgaatacgtgtccagtggcgtggcagttgttccggcgatcaacagggagttagagggagtcacggtgatgtggtggcgcggttgggacacgcggtgaacaacggcgatggcacgacgacggtgagcagctttacccgcgggcggtgagcaagggggaatgagttacggctagccggagtggcttccaggtcaccggcggcgaagatatttgaccccgcgacgttatcgacttaccccgagcgtgaatcttgacgccggagacgcgaatcacagcgggaaaggttaccggcggtgggatttttctgccgcggccgatctgatccgctggggacactgtaccatcgcgctgcttcatcagagcttctgacagtcaatgtttgggctca

SEQ ID NO: 45943 - DNA, 499 bp, Zea Mays
tgattttgtcggttgccttttggagcgcaagtctacttctggacttgtcagtttttgggtacttcattggtttcatggtcttctcgaaaatagtctagtgttgccctatctaccacaaaggtcgagtatattgctgccgctagctgttgttcatagttactttggatgatggctaccttacgggactttgacttggattttcatcatgtgcctctgctttgtgatagcacgagtgccataagtgttgccaagaatcttgtgctacattcgaggaccaagcacattgatgttcgctttcactttattcgtgatcattatgagaaaggcgacatcgaattgcgctatattgataccactcgccagcttacagacattttgaccaaaccccttgatcaaaaaacttttgttcatttgcgaggggaattaggtgtttgtttccctttttgattagagggctccctttttggtcttttcttcttattttctgctttcactttct

SEQ ID NO: 45944 - DNA, 890 bp, Zea Mays
cagctaactcatttgtgttgcactgttacgccctttccacttgataactccatgactgtcttagcgagcgggcaaaaagaaatgaatttgatcaatcatattgaatcatggaatggatcacctaacacctgctgcaccatgttcgcatgggtccagtcatactcgagagaaatggtgaaatgaaatcattggacggctaagaacagcgcgccgatcggtggtgtgtatacatgagaacaagataaggtttccaaattacgttcgtcaatgataataacaagttgaagttctttcagtgcaagaaaggctttctcaatgatgaaaactgcgtctgtaaacccctctatcaatcgcatcagcgcaccagctcacggaaagaagctcaagaacatggtgcctccttttttttctctaaaacttctgaaagttcctttaatccatgttttagctcttatcgcgtggtagaactagcgttgcagacgacaaataccacctttcatccatgacataaggcaaaggttagtccgcgcatagtttaatttgcaggggacgataacacttgtattagatgatgcaagttgcttgtcttacattttgaggtaggggaagaacacttttggtgagacaggaactggtctagagttatccctccgaaaaatcttgcagttcaaaatctgatctcttagtttttgccggtttcttcttcacatctgttccttttcttagtgatgtgtttagcttcctctgtactgctttgtatggaatccggttgaatattgggtcaggcttgtgcagtgcatcagaaaaaactctttttattttctggatttggcatagcatctcccagtgcctagtgccgggaaaccatgactgatgtctccagaatccag

SEQ ID NO: 45945 - DNA, 946 bp, Zea Mays
tatttcggccaacttggtctttaaggatggacctagtgagacaggagaatgtggatctagctttcttgaagccttcgggctcatgaagtagtaggtgccgaagggtgtgatgaaattggcatttgccttgtcctctttactgagatatatttggtggtaactagaaaaatagtcgagcagggacatgacctcgtagcctaatgcagaattgacaattttgtcgatgcaaaggaggggaactcatctttagtgcaggctttgtttagattggtgaagtcgatacacatgtgccattcaccattcttatttttgaccataacaacattttcaagcctagtggggtagtcgattggttcaataaattttgtgtccaagagccgctaaacttcaaccttggttgcctccgtcttctcatctgacatcttgcggagtctctatttcttggggtgagcagaggcgttgatatgcagtctatgttcaatgatacttgggttgaccccaaccaggtcagatgatgaacgagcgaagacatctttattcttgcgcaggcagtctagcaagctggcatcgtcctacagagctaggccttcgccaataaatattgcatgattggggagagaagtattgagtggtactttcttggccccctcgtcacttcggatggggttttggtgcctattagtcttggctggcggctctggagtgtgatgactccgtggggtcctaggatcttcatccacaagtataatccatggattgctgctttgaaggcattaatgacccccttcctaggattgcattatgcggatacaccatgtcaatgacgtcgaaggtggtctgttttgtccgcgcgtttgggccagcagcaaaggatagtggtaggactattttttgagaggtaggtggccttaatttcgaatccgaacagaggattatctactagctg

SEQ ID NO: 45946 - DNA, 407 bp, Zea Mays
atggattgttctcttactcttgtgttggtgttattacattgtaaaggctagtatgaggctccgagattgtggagttccttgtgaagactctgtctctcatcatcaaaattcattggttcaagcttgatcgttggaatcgtttgagagggttgaaagagaccctgtccttagggacacctcaactgagatgtaggttctttgtaaccaaactctgataaatcaagtcactcgtgtctttgtgtgtgtttgatttctcttgcaatttgttcttccctccccctctaagctcttttgcattggtttcggttcaattcttgagtgttgctcctaaagtaattccacaatcaattgagcacactttgcaaaaataacttctctctccctactctaattctattctctctctc

SEQ ID NO: 45947 - DNA, 520 bp, Zea Mays
tggcgcgtcgtgggctcgtggcccaccgcggatgctcggagatgcgtgcgacgctggcccagacggacccctgtgggctgtggctgccaagaaatttgtcgacggaattttaggcaaccgaaccgagtagtaagtagctcatcactgtcgtaaaacatcaccacgaaagcctggccaaaagggcacgcggggcgggagtgctccaccaaaagcagatcgccgccggaccataccctccctatcgtatcgaccaccgctccctccgccagccgagccggggaccatgcagttcgtagcagctacgcggacgtggtggggttgccgactccgccgaggcagatcgcgcgtgcacgcacgcatgcgcggccacgcgtggtctgcgtgtgcgttgccgccgtgcccccccgtttgccttttcgcccatcggcgtgctccgctcttttggtgaggcctgcacgctgtagtacgtcgcgctggcccgcgataaaaaaagtgcaaactaattataatctaacaaaaa

SEQ ID NO: 45948 - DNA, 271 bp, Zea Mays
gttgaacaattaaaacttgatttttagccatgttccaattaaatcataagaaaaccaaaaagtgtccaacaatgggcaaataattttttaccaaattgttgatgaagtagaccacaagagaaaaatgcaaaacctattcaaaactacgaaataacactcattatccctacctcatgaaaaaggccatttaattcaagaaattcctaccaccctttcccttaagcaaaaagttaccaaattctagaatgattgctcttgcacaaagaagaag

SEQ ID NO: 45949 - DNA, 1067 bp, Zea Mays
gtggatcctagggttaaccgtctgcgttctcagtgatagagcattgtagagttcaattgaagggtatggtgaggttcacatgctcaccacggattagaaaccgaggttggctaggtcagagaggtcgcggttgagccaatcatcgtgagagtggcctgcggcggcgaattttgccggtgcaactcattctcgagcaccggctgtggtagagttgaaacgaacaaatcaatgagcaatagggagtcatatgggagctaaaacaagagtcagagaggaatgatacaagccaaagaggcctggccatagtgatgctcctcacggtggtgccggtgaccagtttcagaacaacactagtgactaatggctatggtggacaaaatggtgcggcaagcggtggcatgagtgcatgaagaagtggcgaagcagatggtgtgctcaatttatggaggcagtggcggtgaggtcgaattttttaccaaagtcggcacgattcaatggagtacagagaacctccgcaatggcgtcgtggcagtttcacgcaagtaacgtggcaccagcggtcacggtgtgttgacacatttattgagaacatgtagaagcaagcagctgtgtgggaatactagaggcgacgacgatcaatggtgggcgatgggcgatggtcaagaagataggcaggtgaagacgtgttcacaacgcctgacacccaaagtttatcacccgatctctcgatttcatgtagtaacaagtcgatcatgcttaaggaaaaatgttcactgatctttggtctagatctttgcaatagggattactaactaaaactcactggattaatcaacagaaggctccaatgttctctagacgaactgacacccgatttttagttaactaaaatcgggcgccatggtacattaacctcacccccaaatatgaaattcacaaattactttgaattttctatagaaactgaaaaatctccaaacatggaagttgtttggttttcacaactctataaatttgatatttggtcttttcacaaattctttgtggattttgaatttcacttttgg

SEQ ID NO: 45950 - DNA, 645 bp, Zea Mays
tcgtgcgcagaggaggcccaaaacactgctggcacaacgtcttgaagcgtggccagtgtagtgtgggctcgtcgcgccgtagcatgacggaccacagctgtgcagcgcccgtgagatagtatgtggccatccagactttatccacctccggcgtcccttgattgtagaagaagctctcaccacgggataaccaaccaacatgaccctctttgccgtcgaatgtgcgaaagggagggttgtggtggtgctggttgggatggttttgttgtggtgggtaagcggtatggtggggttcggaaaagcctgagattggtgatggggagtgtgggaaggctatctgatggatgggtatgggcatggtagatgtgggcagcaacaaggctgaggttggcggtggaagattggttgaggtggatgggagtggagcgggtgtggtggtgatcggcggtgatggtatgggtggcgcgacagggtttgacaagggaggtatcccgccataacctggcatgccatatgggatggaagtagggctggtggatgctgggggcggcagtggtgttggcgccctactgatcatctgagtgatggcggtggtgagatcgacaagggccttcgtcatggtgtcgatcttttgctctagcgctg

SEQ ID NO: 45951 - DNA, 582 bp, Zea Mays
gatgaagttagtctatttcagtgaagccaaaaagaagctgattcactttggcggagaggaaattactccgaagccagaaaaggatgaggtggtagtctttaaaagctttttaaagcaggattaagatttcctttgaatgagatgattgcggatgttttggagaagtttgggatttatcttcatcagctaactcctaatgccatcgttaggcttagcgtctacatctgggctcttcgaagccagggggcagaaccgcttgctgaaggcttctgccaggcacatgagcttcattatcagacaaaagctagagaagatgggctgcacgagaactttggctgttacaattttgcttatcgcaaagatgcaaagtctccaattatcagctatcgtaccaaatggccagctggctggaagactgaatagttttatgtcaaagttgatgagaaaaaggagaagctggttcaaagcccattagaattaatcttcggagagactaggccccgatgcgacatgaaactggagagtccatgccaaattgcactgggcgaatttcgagttattgcggagcacattggtattagg

SEQ ID NO: 45952 - DNA, 460 bp, Zea Mays
taagtacactggaaacaaatatctaatgaactccttgttttcaattcagttactgaagtctttgttgtcaatcgtgaaataaacttgctatcaggaaaccagttgtgctttgagatgagaatatgctatgcaactcaggcacgtatcattataggttgcagaaactgtagtccaggaatcatgcgagcttggattagatagtttggacttatcccggttatcggaggttgtcatgcagagcactacatctcgatgaactaaagaagtcgtgcagagcactcatgcaagttcaacttcctcgccgacacaagtggtttgatcaactttatatcaacgtattttatgatctacatcacataaatgtagtactgtataactaccacaggaggctaaaatcttcgttgttgcagttgcctctgaatgtttatgaaaattgcaacgtcgaagaggctgccgtgca

SEQ ID NO: 45953 - DNA, 406 bp, Zea Mays
tgcgcgaagatgtgacagagataatgcgcatatggcagctgatggcgagcatggagaccatccaatattgtatcctcgatctcacaaataaggaagtcaaccacatcaaactctaaatgtgagatcaaggcaccaagtagccatagctgaatatgagtagtggcctctctatatcccatcctgggtagcagtgtccgtctcatcagctcatataagtacttcactgtaggagtgaagtcagcaggagatcgtcgagacccatctgtgaaaggaggtctgaacagggccacgacgtgagctgtagcaggtgcaactccatcgtgagggtgatgaggaggatccgaggtgccattgcacagactgtagagccgagtcgacgactctggaaatccaaagagctagcgaa

SEQ ID NO: 45954 - DNA, 332 bp, Zea Mays
tgcgtggctaacgaaacaaactccttctgcttgtcgatggtatgatgagatgttcttatggtctggcctttgtccttgccacaaaacaagcagaatggtttccgtgggggtgcattcaatctaccaccaaagctttggcctccccttcctcctcttaaagcaggtggacaaaacgtgttgtgcgaaggttgctgctgagagcttgcatgttgatgccctgactgacactaaaactgggccatcttttcctcaccctacaccaggttatggatactttagacatgccttggatcaaaccatcctctgaagcccctagcgacttcagtgtaact

SEQ ID NO: 45955 - DNA, 702 bp, Zea Mays
atcaaagttacggataaaaaatttaaacaaattatattttgaaacggagggagtatgttagagcatagttagcactttttccaggtgttttaatagacgtttccgcatgctccctgagcatgtcactaggcctatatacgcaatggacataatttcaacacctactgaaactaggtgctcgatgaatgtgtggtcggatttagggtagatattgttacgccttggttggcatatcatgggcccgaacctgttcccagcttgttaaccttcgcggattacgtttagggtctggctaactttcctctgtagtaaataacaataacgaaaccagacatttattaggtcattaggcccgaacctgttcccagcttggacgcgtcattactagagatagcagtcgggctcgtcgtttgaaatagggagaaaaaaaaagaatgccgtcaaatatcaaaaatagatccaaaaagaatctgatcattgatgaacgacggctactaagactgtccgcaaccgttccccctaaatttttccccctaaatgttactatgcagccaagtcagtaagattccatcccctatattcactcgtcccgcaaccgttccccctaaagtttcccctatatatccctctactcattaaataaacatttccatataactaacttaaccaacttcaattttgttttcattttattaatttgca

SEQ ID NO: 45956 - DNA, 1314 bp, Zea Mays
cagccacaaactcttttatgtgggatttcatacccttccatgcaaacaattgtttaattcttctataagtcataggaaaccctgaatgacctccaattgggctgtcatgtaaagcagtaactatttgaagttgaagattcccagtagctccaatccacaccctgcctttgtatttgataatgcctgaatgtaaggtaaaaggggttgaacccaaaacatccacagtcaaggcagcaagaagtttttgtgaataggcatcatcaacataactgtcaatgacctgatgcatccactgaggtaccactaaagtaatgctgaagcatgttggttgaggatgtgaacatcgagaaagggcatcagctgctccattgttagctcctttcttatagacaatacaatattggagccccaaaagtttagaaaatactcattgctgccacggtgtagtcaattttttctcagtcagatgagaaaggcttctatggtcagaatagatcacaaactcagagtgttggagatactgacgccatttgtctactgccaacaatattgctagatactctttttcatatgtggacagtccctgatttttaacacccaaggccttactaacaaatgctagtggatgaccgccctgcaatagaactgcacatatacctttaccagaagcatcagtttcaaccgtaaaggttttggaaaaatctggtagtaccaatactggagcggaaacgagggactgtttgagaacctgaaaggcttcttcttgtacttgcgtccacacaaacaatgctccttttttcagcaaatcattaaggggacgtgcaatgacgccaaaattcctgacaaactttctataataccctgcaagacacagaaatcctcaaaggtctttacaattagtcggggtgggccaagaagataccacttccactttagttgggtcagtagccaccccttgttggctaataacatgtcccagataagagatgtgttgttgtccaaaagcacacttagaaagtttgatgtaccactgatcttcatgaagaatagaaagtacttattgaaggtgatgtatatgatctggccatgttttgctatagatcaaaatatcatcaaaaaacacaagtacacatttccttagtagaggagcaagtgtagtgttcatagcactttggaatgttgctggtgcactcgaaagcccaaaaggcataactctgaactcgaaatggccgtgatgagtttggaatgccgtcttgtgttgatctttaggactcatacgaatctgatgaaatccagcacgcaaatcaagagtag

SEQ ID NO: 45957 - DNA, 656 bp, Zea Mays
ggtttctctttttctttttattttctaattcctatatccatttttatatctttttcttttgaacaattaatttaatagataatcttaggtgctaaaaaataaaatctaagtgaggtgctcataatcaaacaaagtgcatgcaaatgatggggagacctagggggaatttgggatagatgataagaagggggggttagattagggtttcaaacctgggttaaaaattgggatgttacaaacctaccccacttaaaggaatctcaccctcgagattcagacggggctcaagaaaaggtaagggtattccctcctcagagaatcctcactttcccaggtaccttcctcttctccttctctgctccactgaaccttacagagtcttacttctgagttgcgggtcttctagactgctgagtcaagaatctttactggcttttctcggtactggagatctttttgaatctgaatcgtctctgcctcgatgtggttctctggtacttgcaggcatttacggagctgggacacatggaacacattgtgaatatctgacatggattctggtagctcaagacggtatgatgcgggtcccactctgctaatgacgggataagggtcgatgaaacgcgatgctagctttcctttcttttggaaccttt

SEQ ID NO: 45958 - DNA, 612 bp, Zea Mays
tgggaattgggctgggtggtgcctctaccatcgggttgggtccctagagcattaccgacgcgtgtcgaagtcatgggcaatgaatattcgtgcggaaggcggctatgggcttaggaatctctcgccggagtcaggcattgcctcttatccgccattcaccgtcgaccgaccgtgtctccaccccaaatcacggtaagacctcccgagatggtttatctggtccttccctccacattttgccagttaatcgcgagttgggggctgggtgttcaggtgtggctattggtcgataatggcgctgcagtgatatcacggtcgctgccgtggctgaaggatggggtgagagctagatctcaggcggttgattcaatcgggaacagatgcgattagatcatcttagcggttcggcgcattgaatccaagccgttgatcggctgttggatggcttagatcgtatcgtgtcatcgtcaattttggaccgaggatctctgaccaatggccctggcagcataccccttcgcttgattattacgtgccgtagatgagaaatccaacggttctagttgtgtaccgcttcataacctaatccgagctcttggatgtggatccaac

SEQ ID NO: 45959 - DNA, 372 bp, Zea Mays
gaaaaatataaaggagaccgccgcaactgttacaactcatttcgaagctgaagttgggccctcagttctcgcagaaacagggtctgttgaaactgttggaaaggatactgaacaaggaccttcggatgacgctctgatcttggaaaaagaaggcacacccaagaaggttaaatctcctaccccgaagcgtctactaaggagctagattttatcatacgacatgcttcgggtaaacagttgccggaagagcagattgccgaagctaagcactatgctagggatttaaagtacctgaaaggatccttggtgtataatggcactgatgaagacgactttctgtactgccttccggacaacaaggagatatctatt

SEQ ID NO: 45960 - DNA, 615 bp, Zea Mays
ccgacatacagacgtggatggtccgagacatcaccagacagtccggattattccagcggacggtccgacaatgctcaggagcccaagacgaccacacacattcaaaccacgacgaccagaaataggtacgtggaaaactaacacgttcaaggcagcatggcgactggtcaaatctggcccgacctttgattaattgttgtctaaatatgtgaaaaggaaggccagcccaagtgaccggccaccaaagcgacctcgctcgcccactcaagagcgacagcaggtaagaccgattggaccaccttaccaatcggaaggaacgataggtcataatgtccaattacgacctaacgtacctacatggacacctccacctccaaacgcgctcgtgccatatcattatgcgtacataccccaccaccatatgtcctgaatcaaatgtgtggtatgccaccatatccatttgggataccacaataccccgcttgggggcacccaatcatccgtttttgataggttggcacctttcgtacaagaccgatttagtacccctcaatacggtcactaggcacagacccagcaagattgtcggaccactcggccacaaaggccgaccaa

SEQ ID NO: 45961 - DNA, 412 bp, Zea Mays
agcaaattgaccccaaacctgctttgtcagtcgtcctgatgaacaatcacgatggtgcagtgcacacaaataccagcaggttcagagtatctcgccgccgatgacccttcaccgtgattggtgcttctcgccacgattcgtgcttcaggtctgtggattgagctcgtcggtgaaaagatcacgccgcggataggtccgggacactgtggccacgctgtccctctatcatttgtgccgccgacgtggccttacggccgtcaccggagtccgcgttgttcaccgtgattgcgccatgcctcaagcctttaaccacgtcgcaatagctcgggtcgtctatatccggtgatcgccggagagccgccaaggtgaaagccactaatcttgtgcgccagtgacccctttcttctccgac

SEQ ID NO: 45962 - DNA, 366 bp, Zea Mays
ctgttaaactgtcttataccaaacaaagcaaaacatgtcatgcacatcctatcaggtctacgacccataactcccttcagcacacacctccaaagtcccagacctggatccattacctctgcctgcacaaccacatgctccgcttcatcccttaccattgctctgacatcaatggcagcggggatgggacagtagaagtgtggagcgacgcatcaggcttccctctacggccgcctccacatcagcttccccacgcccaacttgtgggatgaggcgcttatccatttgggcgagcctgcagtcctgctcatgccgcggtgccgcctatggcagggagcagcaagaagccaagaacgtggagttcat

SEQ ID NO: 45963 - DNA, 493 bp, Zea Mays
cagttgatcttcttttttagtgtaattgcccaaaattttgttgcacatagtctcaatcatttctagccactcttggcagggctctttgaattgtttctcaaacttgaagcgatagggcaatcgaacaagttcgttcttcttccttatttcctttagcttcggcatactccattcactcaacgttggagataccctgtaggccaggtattcttgcactagatatctagtgttgatctgttctgccaccaccgtgaattctgctatagcttgtcaacatggtgaccccggcatgatgcggcacaaaggcctagtcagtctgaagcttaaactcagtggactcatcactatctgcatcagcttctctctcttcttctcatcggccatgaaataaaaccattcattcttccaaccggtcggccacttcgtacggtagctgagaaccggagccttcatatccttgcgatatgcaaagttatagcagccaaaattttaa

SEQ ID NO: 45964 - DNA, 743 bp, Zea Mays
ttaattgtttctcaaatttaaagcgataagggagtcgtacaagctcatcttttctacccttctttcttcttcggcatcccccaaccactggaagttggaaatgttttgtttgccagatattcttgtactaggtccctagtactaatctcggcggccaccactctaaattcaacttcggctacctggcatggtgagccatgctgcatatggcacaagggtctggtcattccgaagcttaatttcatgggcctcatgaccatggtcatcaatttttccctcctcttctcgtctgctttcacataaaaccattcatttgtccacccagttggccatttagtatgatagccaattactggagccattgtatcttttctatatgcaaagttgtagcatccaaaattcttatgaagaccatatgctctggccttcgtctgatagtgcagttcatgcacccggcaaaaagctttggcatttgcgctcataccctggcttcggagagcccaaataaaagcactgagcctaacaatagcattgggtgtcaattgttgaaggtatatctcaaagttctttaaaacctcccctatcatgtcatttaaggggaaccaaagtcctgctttgaagaagctcttgaaaacgacaacttcatcctcttttggctccagaattatttcctcctcagcaaaccggacaagcttgctttcagcctccccgaaataaccaagtttcttcatcataaccatgtc

SEQ ID NO: 45965 - DNA, 458 bp, Zea Mays
cataaacaagattatttcctttgataatgttagttcaatttcttttgcctggatttgtaccttgtctgggcttcaagcacgggaaggcgatctggtgcacttaaactatgggccgggcctgtttggattcaattaaaattggtgtttctatatggaaacacgagaatgacgaaaaacgcctcgcgtttctgtcgattctcgtggccgcgggttcataaactaggcagattttatactgaaacacgagaatcgcgaaacgacgcaagaatcgcgtgttttctgaccgcgctgcgcttagacgcgcgttggagaaacacggaaacaaacaggccctgccaccgcgcaaactgttatttcgtgtgggatgaaattctaatgccagtgttcagtacgtacactgaaaacatgtcacggtttcagattgattctagttatctggtggtctcaacatattttcc

SEQ ID NO: 45966 - DNA, 597 bp, Zea Mays
cagacttcaaaagcaagggaaaagtccacaaataatgagaaaataatccaggacgagcaaatagtacttagaactagaaatactgataacaggtgaggtccatacatcatagtgtatcagatcaataatgtctaccgctctgaaagaggaggtagggaaagggatccgaacatggcgaccaagctaacatgcatgagagagatgctcaaaagagccccgactacaagacaaagtggagttgctagatatcttggaaaacacatcacgcccggggtggccaagtcgatggtgccaagtgacggacaaagtagcaacagcgagggcgtgtggtgtaggggtcatagaagaggtagcaggcatgtgaagggtatatagtggcctggagctgtcacatctagcgagaagggtcctggtagccagatccttcacggacaaaccaaataggtcaaactccatggaacaagaattgtcagtagtgaactgacgaacagaaagaagattttgaatgatgttgggagcagcaaggacattgtttaagcgaaagggaccgggaaggaccacattgcctactgaggtgatgggaaggatagacccatt

SEQ ID NO: 45967 - DNA, 390 bp, Zea Mays
accagattcgccagttgtttggattcaatgagtcatcgactcgtcttcacagcttgtgctacggcacctctgatcctcctcgtcaccctcacggcggagtttctcctggtacagctcacgtcgcggcattgttccgaccgcccttctcagatgggtcgcgacgttctctggcagatttcaccacagcgaccaagtttctatatcagctcatgagatggacgcttctgccacggatgggttacagggaggctgccactcatatctagctctggctccttggtgccctggtctctcactccgagtttgatgttgtggatttcctcatttgtgagatcgaggacaccgtactggatggtctacgtgcccggcgacagctaccgtatgttcact

SEQ ID NO: 45968 - DNA, 688 bp, Zea Mays
cgtggcttgaagcatcttggtttggtgggccaacgctgtcagctgcttcctctcctcgccgaatccatccagaagttgggcgcataaaacgacgcaggttcattgcgattagcttgaattgtgtattccgctgcggtataagacaggacggggcccttgctccatcctgtggccgatgagttcacctgccgaggaagccgagcgagaagcgtcgagttagaggagagaaaggagtagctaccgccatggatgaagctagtcaggctccagccatggagtcctcttactacggtgagaaccggtaatgatccctggaccttccttatgtcgcgtggctagcttcccgtagcgactccttgcactcgatgccgttcacgggatcgcctagacagttgcccgccgtgagcaccgccatgggccagcccgccatcgcgggagctcacgctctgtcgctgctgattgacgggaggtggaagaaggtatccctagccgttggatcggcaacaacggtccatattagaggtggaatgtcggtttgggttgatggagcctaggccgtcttatctgaatcagacgcgtgagaatcgatttagacgttttaaaatccggggcgtcaattatggatcccacgaccaagatttcatgttgggtcgatctaatctaccctagaatggtaatccaacggctg

SEQ ID NO: 45969 - DNA, 621 bp, Zea Mays
tgggcgtagtgtctggcttctaagatttcttctttagataatcttttcctcgaagcatgttgaataatgtaatcaacatcttcgaacggagcttcgggggcaagagatttagctttttttatcatgtcctgctccgctgccctgccggtatccggagtttgttgctcagctttatcctcaggcgcggcaggcttcgtctcaatgggcactgaaggcccatcttcggcttcggcctgggcgtgacagcttcaacaactttattaataggaacaggggtcaaggtttttgtggtctccatgatagtgtctagcacgctggccatcctcctcctcttgggagttgcggcaggagcctttggcaccttcggcaattctgcctctaacggtgtcatcactattttttccaattctggctctctggtcgcatcatctttggtttcggctggcccgactgtaggcaccttcggtaccacaatcgacccttcagcgctctgggcggtgggagtagcatgttttgcttcgggagtagaagaggtcccttcaccaaattcaggcactacgaccgtttcaatatatcgaggccggtgggttaaaacctttattttctttcccttcggcacag

SEQ ID NO: 45970 - DNA, 423 bp, Zea Mays
cgcacctattgtgttttacacctttataaagagaataaaatatggtgtcatatgttatatgctaacaatgtgatgctctactctagttgccctaaagttcaagtctttctctcaatttgtgctcaaagaaatactgttggatcagaaagatgatttggatatcaagctctgtaaactacaaggttcaaaagatctctattaagaattataacacttgtacgctcttgtagtatgatgaagctaagcggaaatctgaaaccatccttgttccttaactaatcttatattggaaatcaaaatgttgctctttatcttaatgtcatacaagcctcttatgcagtctgtctcactaactcttttaccctctgactagatgatgaaccccaatggaaatgaagtaaatgatgccaacgacaatattcc

SEQ ID NO: 45971 - DNA, 426 bp, Zea Mays
gtctatatcttcacaagatttataagaagactgtctacgaccttctcatcggtaacaaacctaaggttgactactttagagtctttggttgcaaatgcttcattctcaacaagaaagtcaagagctcgaagtttgctcctagagtggacgagagtttcttgcttggttatgcatcaaatgcgcacggatatcgtgttttcaacaacaccaccggtcttgttgaaatagcgatagacgtgacatttgatgaatctaatggctcgcaagggcatgtttctaatgatattgcaggaaatgaagaaccaccttgtaaggccataaagaagcttgcaataggtgaagtgagaccacaagaaaggaatgatgacgaaggaaccttttagatgacaaatgaggtcattgatgtgggcgcaaaggtggcgggtg

SEQ ID NO: 45972 - DNA, 853 bp, Zea Mays
gtgatcgctgatgagctcgccacggtgaaagccactaatcgcttacgccagtgcatccccttccctccgatcgccaccgcgcaatcacaaattcatgggccaccgctcaagggccctataaattgaggacaccctcgactctgctatgtaattgtgcactcttgcctccaattactcaccagagcccccgaattgctcagttcccccaaatcagttttcggtcaccgtgaacaagctctcaccatggtcagtgcacttcaggtccgatcttgccctctgctctcttgtttcagcactcttacatgccactgatgctcctcgacccattcaattaagctagaccgtgctagatcgccgggaacacttctgttcatccgtagttcgcactatttccgtgcacagggcgatttagggctcggattgtgcaattgggcgaggggaaacgattattaggtgttgaattaggtgacagccaagttagggcaccggccattgcttatcttggccggtacaggttcgccggagctcggttcatcgccgttcgccgtcgaggactgcgggatgtgaagaaatagaagagcgagggcttatttgcaaacgttagtgaaccagtcaaatagtgtgcacgattcttccctagttattcaaacccctgagggcttcggtgcaaaaccgccgctcgggcgcgcgcacgcgggcgcgtttacctgttctcgggctgtcttgggccagtttcggcccagtactatttatgtttttcctttttctttttctgccaggattagagaattcatagaaaattgaagaaaatactaaaaatgcaagaccaattttgctaggttcctaattttct

SEQ ID NO: 45973 - DNA, 1027 bp, Zea Mays
tacaacgaccagagatcgtcaaagaataaatgccgcacaggatctatattatctttgctccaaaatgcatcttctggcacaacaaatgtgaagtcctcgagtttgtatttgttgctagccaccatgtaccactcatgcattctaatctccggagtcgacaacttagaaagttgcaccgtcgtcaagaacggcctcccattcacaaatttaggaggaacaacctccttcttgtatatcgggatattgattttaagacgtaataattctcgagtatgaatcattctatcttcttcccatacttcgaaattgtctatttgggaccgtatgcgtactccacgagatgctgattccacttttgattgatttgtcataactctctgcaatttttgcaggtagcgtgccactgattttgacggtttcttaacatcgtcagtggtgattcgctgatgaattttctttgaactagttggcccttcaacattggtgtcaacctttgcttcctttttgatgtttgcgtcgatattctgaggaacaattttgtctacgtcccccttgtcgagttccttcgcaagaggtgatatgattgtttcaacaatttttgtggaggtcggtgctatattttcctgcaccatggagtatggaatgatcgaactatctttctgttgcattgatgttgaattcggcgttggtgacttatgacgcgatacacgacttaagatcggctcatcacccaacttgatgtcgcgtacagttctagaacttcttaagttgaaggctagcgccggatggtctgatactagcttcatagatcttttgaattttctatcccaattactaccaaaacccaacaaactaccaacaagcacttataaagcgaagaagcttatatctcccatagctctgggtgtgcaaaaaattcatgcatgtctgaaccattgtattctgtatcgtggcgattttgagaacgcagcaagatgcccagtttgcaatgtcagtcgatacaagaagagctacaatcaagactgtg

SEQ ID NO: 45974 - DNA, 812 bp, Zea Mays
gctacctcgtctagctaccgggaggacataaccgaccaagggtgacctaggaacactcaccaatttggcatgaacacactgagaacgatctgcccgcgtgcacggcggaaaccgtgaccacgagctcgtgttcccgttcaaccctggccgaattgaccaaacggtggccacgatgagcatccagtgcataccaagttgcgaaaacggcacttgagaggcgtagaaccttaccattgtgggctggccacggacgagctatccacggcggcttagagactcgagttgggggaaaatggtgtcgcaacggctctgggcaaaattgggggtggacattggggctacacggccgttaggaactgtagtttcaccgtgtatactcaatttgagaggagggggcggaggcagtgcgaatttgggcttggatcatcacactgggtggaggtgtgcataccccgccgtggatcatggtgctatttatagccacggcggcccggccagctatctacggccacagataacttcattagcgcatgcataccacgtagggaagaggcacagtgagggagatcgaggcatgggtgagaccgcggcaaaagttactgagtcacggtggccgccggtgactaactccggccacgctcgactgggttcgcgggattgcgccacgttcgaagttatccatccccagatcgattcactggatcgcatgagcccatccgattcaacagtggccctgatcttatcccctgtgttcttcagatatttcagtgctttggatcttcaggatttgtctgaactgaccaccttccaac

SEQ ID NO: 45975 - DNA, 339 bp, Zea Mays
atgacaaaaatgcagccgagcgtatcgccaaacagtcggctcattacacactcattggggagacattatatagacggggtgcatcaggcgtcctcatgaagtgcattctctcatctactgggaagcgacttctggacgaggtccatgctaggcaatgtggaatacacgcagcgtccaagacactagtcgggaaggtcttcaggtcaggattctattggccaacagcgaaaagtgatgccgccgagttagttcagaggtgcgaagcttgccagtacttgtcgaagcaacaacatctaccagctcagcaattgcagaccataccggtgacttggccctttg

SEQ ID NO: 45976 - DNA, 477 bp, Zea Mays
ggcattctttagctaaagcttgaagagtttgttcgtctgaaaaaggtggtgactccatgatacagtaccttgccaagtttaatcacctttatcatatgccacagaacaagtcaacaaggacttaaagaagaaaaactgctttatgaggggtttgagcgacatgttgcagcagaagatggctacctgtttggaacttaccttcaatagggccataagcacagtgatatcggtttaggcgaagaattcaggacaagtgaagataaaaaggtttggacgtgaaggaggtgagggatcctctcaaggatccaagaagcgaccaacgatagttatccattccttcagcccaaatcgtgcctttccttgcccaccctcctaccctttttagcaacctgttttcattcgtccaactactgcccctactctaaccactcagccgggtgcccctggcactcgctttcccgctttacctggtccgtc

SEQ ID NO: 45977 - DNA, 711 bp, Zea Mays
aaccatatcatcatcccaactttgagtaatgttggataactctgcatcaaactcctcactctcttcttcatctgttctaatattaaaagggtaagataattttgcagtcactgcaagtctatcaatctctatgcttttaatcataactaccgaatttaacacttctttctcattttttgccaagattaatcccgatatttttcatattagatataatagttttggggttgtaggtaataaatgagaactcacttaagttgcacttggcagccaaatgctgtgctttgctcatgatatcttcatctgaatcgattcttttagccctacactgctgctcgtccagatttaactgttttttctttgcgctctgagtaagagataaagagacgagtaactcctgcaaagccaccaatacttgctcattagtttgagctaacaaagacaaagcatgagccatttctacatttttcagtgccgttttgctagaactatttggtcttttttttgtgtgcttcaagtcttcctgacctgaagcaaacaatgatttccatatgtttgggtcataactatagagattatctaacaccttacaaactatcgttgtacttagagcagtggcttttgtgttggtcaatctggctgtctagaaataatctagttttgttcgccgttataggttatctttgcatcagtccattcgatacgttcatg

SEQ ID NO: 45978 - DNA, 552 bp, Zea Mays
ctttttttatctatttggaagaccagctagcagccgtcctctaatgcatcagtgtgccgccaaggtagtcattatttatcgggacggtagggaagaaacggttggcataggataattagttaattactccactgctcctggtcctgcgtttgtttgaccagtttggtgaattatgcggcgccggcgatcgacacgaggctttttgttcagcggaggagcggcgtactcccggccaccgcgcacgcacggccgagaacaatgaacaagagataggagacaccgcacaagtggggatctacgtcctcatcataataaatatttcctctattctcgaatatttatcgtttgttgtttttaactaaaatatgataaataaaaaaacagagaaagtatcacttatcgagcctataataagcacaaactactctattcaacaagtcaagaccccactcataatcgataagtagagcccataacaaacaccaaatacactcaacgatctaacactattttaaagccatacatctaggtgatggcaaaccaccgagattt

SEQ ID NO: 45979 - DNA, 767 bp, Zea Mays
gcggatacattctttccaagcacaattatcggcaaatttgatgtagggtattatctctctagagaacctaaactagtataaatctattgtattcttgcacatttactttttgttctacatcacactaaaacctccatatacaaatctactatcaagaaatcctcgacaaggttttaccaaccatcatgcaagatgtgaatggctaacacactcaccccacatggatgccaatgagtatatcattaccctcaacctagaaaatacaatttaggacctcgctagcattacactaatacaggtccccttccacaaacacgtaccttttagccgggcaagagatacgctctgcaataatattatcactgggtaggaattgtttttcaagtaccccccaaatcttatagacccatgtgtcttgttctacctaaacatttctagctagatttgaggccttagggacctgggtcatcattgttggtggcagtccatttgaatgcaacattgtcgaggacacatgtgctcgcttgtccatggggtccccatcactcaaagtagcaagttaagtggtagatttaggaagccatagcacgaaggtccccgcatacactagtgcctgagttgaagcaagtgtgtagagatcatctgctatcgtgttttctgcccaagtagtatacctataatgcacaacattaaatgggagctctaactacttgattttgacggtatatacctttagatgcgttattatacgccaaaatcctatgaac

SEQ ID NO: 45980 - DNA, 282 bp, Zea Mays
ttattgatgacattctggtttattccaaaaatgaagctgaacatgctgagcatctacacatcgtacttcagctactgcgcgatcatcgtctatatgctaagctgtccaaatgtgatttctggttgaaggagataaaatttttgggtcacaccatctctcaggatggggtatcagttgatcctgaaaaagtacaagaagtgatggattggaaacctcctaccacagtatggcagatccgtagtttactgggattggcagggtattatcgacgatttattccgg

SEQ ID NO: 45981 - DNA, 625 bp, Zea Mays
aatcgacagatatatgcaagggactgtggtagtacaaatcatccaagtcatcatggtatgtacaaggatgagtggcgagtcttaaggggtgttctatggtctaaagttaacactactagaacaaagtactttgccgcgcataacattcggcaaaatctttatcgagtgtagcattcggtaaaaaggactcgatgaacagtttattggcaacggtctctttgccgagtactttatgtcgagcactcggtaaaaaggactcgacgaacagtttatccaagcgacggtgatgaagtctttaccgagtgactgctgacttgacactcggcaaaaggaactccagtgccccccacgtcagtctttgtgccaagtgtgcggtttggcactcggtaaagggagcttcttttgcggagtgttaggaccataacatttggcaaagaagctttactgattcctaggtgtgctttatttgctgagtgctatggtcattgtactcggcaaaggcactctttgtcgagtgtgacattcagcaaagcgactagagacccccatttttatttgtttttattattccatccaaacaaataaaagatatatcacataatcatcacatgtacattgcagatat

SEQ ID NO: 45982 - DNA, 502 bp, Zea Mays
gaaacagagggatgaccttggttcgttgctcgccggggggaactttgccgtggagccaacgaacggttggagacctggcagggtagggatcaccggctgctcgggctcctgttcggcggacaccaccgcagaatgggaacgctcactgctctgtttacctcacgtgaggaagatgaaggaggaccgttggatgcgcaatgaagaatggaggtaagaggtttgttttcagccgtggattggaaatccaagggtcggaacggtttaatgcgggggagagattttggaccgtaggatcttgatctgatggccatatttgcgtaccagtttgtagggctcggatttaatctgagcgcttgaactaggatccaacggctgaaatctatctatacctcttcgtcgttgcctttatgctaaagagccctcggagttttgtggaatcaacccgccatccatctgtaggttaatcggagtctagggaatgtttataagttggcccctgtac

SEQ ID NO: 45983 - DNA, 460 bp, Zea Mays
gacggctcctgtgccgtctgatacattttagatggtgtggattagatcagcgaataacccttcgcttgagcagatcgtgaccatagattaggagtcctatggttgcgaatgcttaccgattcgaaactttgaatccaagccactaattccaaatcgtggggcgcaagtgagaaatctagttagtgatttaatcctgactgctagcggttgatcagaccgtccatgtatgctcgtaccccttcgactaggaactttgctaaagagtcctcggggattctaggaattaacccgcaatctaaagatgttgtgcgctgagtgttgggaaaattgtagaatcaccccgagattcccagaaaatcatgcgtgcagtccagtcaggggggtaattaatataaaagagattagaaattggtttttgggtataaaaataattgcataaacccatttaaatcatataaaa

SEQ ID NO: 45984 - DNA, 555 bp, Zea Mays
gccgacttgagatgatccttagaggcaaagtgtcaaatgttggtgccccagtggcattctcagcctagaacttgcctcctcccaaagccttcactctttttgtgtcgaatcctcctgtcactgatggcagtttgggccttagagtgtggccctctgctgaagaagttagtgccttggttgcctcgctcaaggagattcctgatgatgaacgacaggtccattttgaggtgcctctgaaccctagtgatgcagagataagcgctatgcttgatttgctggctgaggactcttctgacgctgctcctgctgggcattggtagtggcgcccctcctagaggctgatacaactttggatactcagaagcctgccagtactcgcccgaggcgcccttgccgagccaatcagcctgatccttctgccgatgagcagaaaaagaaaaggagacgcctccggcgagtatccagtttggatcgagacgctggtacttcggttcctgctgctgaagaaatgcctgtaactgaatttattgacactgaccccaatgggtgtaccca

SEQ ID NO: 45985 - DNA, 420 bp, Zea Mays
ggcagacaagaacagagacaactaaatgtgccccgaaatctatggtaggtattatggcggttgtcgtactaatcaccctccacgcatcgtcgaccacattaatttacacttatgtgatgagtccatgaactgtcttctggaaaccctaatcgaatgacgaaaccctaaaccctaaaccctaaccgaatgaccaaatctaatgttactttggcggccagatagtactggaatccgttcattcacatgagttcgttcaactatggaactgaaacctataattttcgaatataaagtaacaaagaagtaactgcgaagagggggaagagcatgttcgaacctgaaatccgggccgcaacaacacgaatcgaaccgatgaactctggatctaagcgagccgtcgatggtcggagaggaaatcca

SEQ ID NO: 45986 - DNA, 438 bp, Zea Mays
acccagagattaaagccccacatgttgacatgttttggtagtgcaataagcacccaaaacagaggaggcatgtcacatcacatcatgattcatggcaatcacatcaccaaggttgtcaaatccaatccctaatctccatgaaagttaattaaagaaagaaagtgagaaaacacggtagtaggatggttgctcgcatgctcctatcttggattatgctgacgaatccactacacttggtgtcctggaagatgacactgaggttggtgttccttagcatggcagggtcacgattaacaccgtcgcaacacacacgcaaattgacctgatgagcgagcgcccatctcatacctagtgttgcttggcctatacaagtagggccttggcgccatggacaacaagggctagtcacgagcacacttaggcaacacctcacgcccg

SEQ ID NO: 45987 - DNA, 436 bp, Zea Mays
cccgcggctacaccgataccgaggctttccgctccttttcatcgtgtgatctgggtccacgctcggctgggtgaggtggacaaaggagtctaccacgtcaagggcactaccttagttggtcaggccacaggtgctactatggccctgggcctggccgccgcggccgcagtcttgcgcggggcggaagttggttgaggtcttcgtactttggagttcgtcggagtagtccttgctagggtcatgtggggcgagcctgcgtccgcgatcggtaccataagagaacatcccttctcggatggatccgcgatgcggtgcaggatgcctttccggtctgggatgcaggagagggatccaaagcggaaaacctccccgacgttgaagatgatcagggtgttgaagatgatggccatggagttgtcgtgaatcaacatcgcac

SEQ ID NO: 45988 - DNA, 450 bp, Zea Mays
ctggcaacaagttgcaaattctcatcaagtggtcggcttggcttgaggacgtagcaacctgggagaatgaagatgacatcaaacatcacttctcaaatggatcggcttggggacaagctcgatctcaagggggagagtgtgaagactgttgaaggaatgacaatagacagaagaggtcgttgtcgtgtgaagcctagcgtctgattccatgggccggattgggcccagtgacgggtctataatttttcttttctcgttttgtggctagagtatttagtcttgttctcgatctgatatatgtaggacttggtaaaaaacctgtaaccggatatccgaacccggaatacccgaacccataataccggggaccgcgtaccgcgtacaacactaattggtgattgtctgatttgtgatggtggcagactggcggctatgtccctatgaccctat

SEQ ID NO: 45989 - DNA, 405 bp, Zea Mays
tgcgagagcgagaagctgtggtggcgccatgaaggcggagcgagtggaggagacaccgcgcgagggagaagggattggcgggagcggcgttgaggaggagggatgcatgggagttgtggtgacgccatggtggtggagtgggtggaggagccgcccgcgcgaggggagaaggaattggcggctgcgacgttgatgagggatgcaaacgctactcccgtgtgtggatggaggatccaccaagaaagtgggggagtggagacaaaagcttgggatcgagaggaaattgaggaacgaaggaggtttgaagcgtagccgtggcaataggacggacgatgcagattgataggaggcaaaatcatgaaatgctggctacccctgcagtcttaatatagtagtatagattgc

SEQ ID NO: 45990 - DNA, 469 bp, Zea Mays
gttcaaaatatgattattttgctcttacaaatttattttattaatcttgtctctttcatttcaactaagatgacactttcttcttgtagatgctacgcactctccataccactcgcgtgaacaccacatgtgtccctccacctcagtaggctcctttttacctagttgtggtggaagaagaccctgagtagatgcaccaccctgttggagggaatggtgtaattgtggaggacagttccgaggaggttctggcgacacccgctctgtccccaacacttcatgcctttgccgctggagcttcttcatcatcaccacatgtggcagtcgcccaagtccctactcctagaggtgatgatcctgatgattctgatgatgatgaaggcgatgctgataggtgatccaagtgcaacacttatctgattgcccaattctgtttttcgactagatcaagtttgttggtgggtagtcc

SEQ ID NO: 45991 - DNA, 553 bp, Zea Mays
atttcttttttcgccttcgcaacttcgaaatcttcattcatttcagcaagtttcttctttaaaccttcaacctcagcttcgtgagcttcggcttgtgctttcaactgagcttcgctgagttttagtctatccactaaggaaattagtattttttctttttcaagagcttcattccttagtgtaataacctctgatcgaagatttccaagcgctagctggtagcttcatcttcgcctttttttctgggcccttaatgccttgctcagaattaaaccctacaaaaataaaggatgagtgcacactgaaaaggaaataaactacaaaaataatctgctttctaacaagttaaagtgttcccaccttcagactgttataggcaaggctatccgcgagttggtccttcgtcattgcagacaaacctaactcaagcttcgggtatcctatatttgtctgccatctcctgacagacatgaatttctttgttgtcaggcagacaataaaggaagtcatcttcatcacccccgccatacaccaaggatcctcaagggtattg

SEQ ID NO: 45992 - DNA, 321 bp, Zea Mays
tttcattaagagccaagtcatttgcccatttcctgaacctgcccatcatggcacggtctaagttattgttattcttctcttcctcccttaatatcagattgaaatccccgagcacaagccacggcccagtacagagagctctaatttctctaagagattgcaaaaactgaatcttctcatggttcccttgcggaccatacacacatgtaagccaccatggtgagctggtgctagaatgaaagttcacagagacgctatgttcatccaccctactgccagcacaaacaccgatgctatttttccaagccaccaagatgccac

SEQ ID NO: 45993 - DNA, 467 bp, Zea Mays
acgaagtctcgcacacacaaagaaatagagtctcttgcttcactttacaacaatgataatggggagtgagggtgagaatgaaaacccaaatcaagagcacaagaacttgcaacactcaaatgcaccggccgctaagtctctcaaactcaaatcgatcgaatgcggcgtgtatatggctttgaatgcgtgggaggtgttactctttatgtatagttgattagaatagttcttatgtgttcaatgtgctggtttgggtgtatttatagtcccaaccatcgcaaatagccgtcgtgaagtgggattgaaaactgctctatctgtgtgtgcaccggaccatgaacaatagaggtctagtgcacatcaagccctctgtcccctgacatggcaggtagccattctgacctgtcaggggtatcggattaggtccatgcacaaggacctaatgccacgtgagccgactgttggag

SEQ ID NO: 45994 - DNA, 433 bp, Zea Mays
atttaatgtttttctattgaacatgatgagtggtaggaaaacaaagcgcactgctagggggtttcttaatgcggctagcaggatactccctggtgcacgttcccttttccaagggagttcttctagctagagcagacaggaggtgttgctgagacacgcccggccagaactacgtgatacacctatcgctctacaacggagtaccgatgtaaatgtttatgtaattgatcttatttgtcagtcacttatgtaattgatcttatgtaaatgtttatgtaaatgtttacgtgtctctatttcatgtccataggaagaggaggacgacgaggaggaggtgcaacaccatgaggaggaggacgagcaggcccatgaggaggaggaggtgcaggcccatgaggaggaggaggtgggcatagatgctgaggcagatgac

SEQ ID NO: 45995 - DNA, 763 bp, Zea Mays
caggaaagttttacctcatgtgccatcttctcggagtcaagttgtgcattcagagaggagttcaaggagcgagcaccgtccaagaaagcagaagtttggattaagtcggcctggctctaggaatacttctcttcaatgtcagagcaccaccgagccaaatctgataaagcaacaaaagaagagcgcaagatttagaatgagcgagtaatgaaagcaaatagggaagctatgagctcactaacaattatttgatgccctcagatcatctatttgtttttgaagcagtagagggttccactgcatcagagacgaaacttgatcagggacaggagcaccgcaggatctcagttgggcagatacaccatcaagaacatcatatgattatgaaaagataagaaaaaaactactttgctagcaggaacagtaaaaaagcgaaagttgattcacctaaagattggagaggaacaagggaagacccaaagtaggaagagttgatgcattgcttgatgaggggagatcagcatgaatgatatcaaaggcatgacccggaggaacttcagtcccatcagcaggcgacatgctcctggcgtctggttcactggcctctaaagttaccagaccagcaagagccatagataaacatgtcaccatagcctctttggattggactggcgacgatccaacgtggacatccatggaagcagcagaaggggaacctaccgcaacaccctcggggactgagtcgctatcagcaccaccctcg

SEQ ID NO: 45996 - DNA, 570 bp, Zea Mays
ctctgatctaagctcatcttctctttcccaagtcgcttcatcttttgagtggtggctccgctgaactttgcacatggaaatcactttaccccgagtgattctgcgagatgtttccaatattttcactggatattctaaatattttaaatcttctttaacatcaagctcttctaatggtaactactcctcgggtactcttaagcacttcttaagttgcgatatgtggaacacatcatccacatctgataactgtgcaagtagttccaactgatatgaaacctcacctttctttctaggccctaaaatgggctgatatagtgaggttgtaactttcctttgaccttgaacctccttaaacctctcataggggaaaccttgatatacatgtagtctcctacttcaaaggtcaattatcttcttctattgtcggcataactcttctgcctagtctgggctgttttgatattctctctgataatctatacatgttttctacctattggataatttctggttcaagcacctgactttctcctatttgattccagcacaaaggtgtcctacactttc

SEQ ID NO: 45997 - DNA, 655 bp, Zea Mays
cctttctcttgcaacgaaagtcatggttatcgcaatgcacaaaaaagtggcaaaacggtccatatattgcaaccacttttaaaggtcgtggcaataaataacatctaatgcaacaaaaatattgttgttgcaatatctgttgtgccattagggtgattttgcaacaaatgttctagtggtcgcaataacacctttctcttgcaacaaaagtcatggttatcgcaatgcacaaaaaagtggcaaaattgtccatatattgcaaccacttttaaaggtcgtggcaataaataacatctaatgcaacaaaaatattcttgttgcaatatctgtcgtggcattagggtgattttttagtagtgggctactgccctgtttccaatgcccgtggtgtagcgacggtgcttgaggagccggaaaccgagggcggtcgtcgtgccccgaaccaggtaagctgtcgaaccatgaatatagttttcctatgcatgaggcttttttcctgacatcttgtcttgcttcaacactaagcgccaagcccacgaattgtcctttactgctaccaaggtggtgaagcgtggtgttggaacatcggtcggggccatgtcttgtccccacaccgcacaggagaccacttgggagggcgttgaggcagcctagc

SEQ ID NO: 45998 - DNA, 787 bp, Zea Mays
ccggtttcaaacctttcaagcagaaagctagaacatttcatctagacctactaccacgaataaaagacgaaattcactggctgctagaagctaattttattagacatgcagatgcgtagagtgggtctccaatattgtgccggtggagaaacaagaatcaggtaagctcagagtatgcattgattttcgcaatttgaatagagcaactcctaaagatgaatatcccatgcccatagtcgacacgttgatcaataatgcgtcaggaaatagaattattagctttcttgacagtaatgccgaatataatcaaattttcagggccaaagaagatgcgtctgaaacgacctttatatgtccaggcttcattggtttatttgagtgggttgtcatgacatttggtctaaaaatgctggtgctacttatcagagggctatgaatttgatctttcacgagttgttgggaaataccgtggaagtctacattgatgatattgtagtcaaatcggctgagtttagttctcatatagctgacctgcgaaaagcttttgataaaatgcgtcggtatggtctgaaaatgaacccacgtaaatgtgcttttggagtgttggctggtaagttcttaggattcatcattcatgaacatggtatagagatagaccatgaccgaattaaatccattcggaatgtgggacctccgacctataaacttgaagtgcagaagtctgtcggtaagataaattatttatggaggtttatttctaacctagccaggaagattgatgccttca

SEQ ID NO: 45999 - DNA, 350 bp, Zea Mays
cttgtccgtgcttacaaacttcgcactgctttgagctcaattgcttccttggtcttctcatgtatctttttatatatgcagcacgcttggaagcttccatattggttctttcctgcaatggaaggggcaacaaatctatcggagcaataggtttgaacccatatacaatttcgaaggggcataaattagttgtagaatgtactggcccgttataagcaaacttcacgcgtggcaaacattcctcccaatccttcaagttattttttaccattgttcgcagcagcattgacaatgtacgattcaccacttcagtttgtccatcagtttgagggtggcatgtggtggagaac

SEQ ID NO: 46000 - DNA, 561 bp, Zea Mays
ggaatctacaacactcttgtgcagcccatccaagttgttacgagagatggttagggacgggatctgttcctttaattgatcgatctctgccctcagtttttgtactttgtcccgcagattggaatattctgtgtggtgggtcgacaacatggagtaggctacataaagttcttagtgggttacctcatcatcaaggaatgctatatcaaacttccactgtaatgatctattagcctcccgagcatcgtcaaggaatgctataacctggcagagctcggactggtttgagttagtctctcatcaagatcagaataccatctatccgcggctacaaggctcacatacagtcagtaaaatgaataggcgacgaggccgagtgtacacaaatgactaccttaccagcattttgtgcatcctaggaagcctttagctcaacaagctatttccaaagcacgacaccatcagactattgcaaagaggataacttctcgatgatttgaacagatcgttccttcaactcactaccagctaagcgcaatgaagaagcgacctgattcatca

SEQ ID NO: 46001 - DNA, 328 bp, Zea Mays
gccgcgaatttgcagctcgccgtggaccgttcccaccactacacccttgccggtaagactacctccttgtcacccgccttgcccttctcaatgtgtagcaccgttctaatcgggggttagggtgttgcgcaccgagatggctgtctccagccatggccatcgccgtggggcaaggctccgttgctcggcgcggtgggtaaggtgccgatgtacgaccgtcgttggatcgatcaccggcggataggattagaaccgtgtttagcgcttcagttcattaaatccggggcgttcagaactgatagggtggataggatttagtcaaacacgt

SEQ ID NO: 46002 - DNA, 554 bp, Zea Mays
ttaggagtcagctgatgaagatatatttcgaagttctttaggacttcccctatcatctcattcaggggaaatcgcagccccgctctgaagaagctcttgaaacccacaacttcatccttcttcggcactggggtagtctctcctccggcaaatcaaacaagtttgctttcagcttctccaaaatagcccagtttcatcatcataggcatgtcatcttcagacacagtagatttttcaaaatctagatgactaggcttcattgggatcagaatactttagtcttcttcgctctcagcatcttcaccctcaatcacagtctgctcagcttcgacattagaagtaccttcgtcagctacaacaagacctgacagtttcattacttctgaaattggtgctgtttcagtggcctcggtttcttctccctcacgagacacctttgcagttgatcgcaccctggccattttgatggatttttacagtctgacgaagctaacccatttgacgaagttaaccttaaatgatgaagtgttctcttgaaagcgcagtgcagaaag

SEQ ID NO: 46003 - DNA, 585 bp, Zea Mays
ccttaccgcagaccaaacacagcggcgccgcccgaagggcgcaccggcgacaagccacccatgaaccgatgccctaagctctaattctaccggtgccacgcgacgaggaggacaaggcagactcagatgaggactacttaccgatggttaggctgcaacattcctttcccacagggacatgcgatccatggtggatcccaacttctgatgaggaattgcgacagcgccagaggtcgttccaatcccacgacgcaatgccaagcatccaaacgggccagtgattaaccttatctcccagccaaccagcaactcacaatcgatggcggcacggagcgacttcctctgtgctctcccccatggaggctctcagctctcacgatcgcgcgacgttagcgggacgagatgcagaggagtatggggagctgacttaagtacccgggaggatcatgtagtggctcgggaaaaaggggaagagggttgagggagatgcggaattcacaggcgggagatcggcgaagtctgttgggaagacgctcctcatgactcggccccaccgcatagcgaccggaagacgaccctgatgac

SEQ ID NO: 46004 - DNA, 579 bp, Zea Mays
ccaggaatgattgaccaaactagtttttttcccacgtacgctaattgtcatgtacccatgaacggggtatctggagcaagctcataaaccctttccctcgacccaacaactccgtgagacggagcgagcgaccaagtctcccaccgagcaagtctacgaggcggagcggacggccaagtttaccgccgagcaactccgcgaggcggggcggacggcaaagtctcccaccaagcaagttcgcgagacggagcagacgaccaatttcctcgccgagcaacttcgtgaaatggagcaggcgaccaagtcgcttgccaagcaagtctgcgaggcaggacagacgactaactcgcacatcataaaaccgacgtaggggaaggaccaatcccatgaagttgccccacatcagtaggacaagacacgtcattaccaagccacgtctgggcctcaagtacgatggtgaaaggtccccatcaagtgcctacggcacatcatcgtgcactgtctcatgcaggcccccgctaacgtgtggggctggtcaaccccagtcttaggggcatcgacgtcggagtcttaacagtg

SEQ ID NO: 46005 - DNA, 1996 bp, Zea Mays
cttgtttaaagccttgtcaaacgttcgtcatagaaacaactttgagaaagaagcccggaggagttggagttgttaattttgagtccatgggtttgtttggaagcaaggagattggaggagaattgcagggattaaaatcttctcgatattcaaattaaatagcgagtggattttagcccttacagggctagtttggtgaatagcaagggatttcttatccatggatcctctctaattctcttgttaccaaattggctctcggtctcctttaatcctctcgctcccaaacaagcactaatggttcctagaagcatctacaatacaaccattttagaatacacatggaagtcgtttgagacttacaggaaaagcataaatatggccataggaggggcaagggaattaaatccatgttatttagatttgtttatgtattctaagtctgttctaaaaaaatatgaaatctcaacgtaaaaggtatagtaggtgaatagattcttaaaaatctacatagtcctctagttcaacccataatcttttgtcccctaatatttttcacattcttagcatccaaattttccaaaatattatccacatggcaatttataggatgaatcgttgtcttttctatttggaggcctctcatttcactcccacacgatggcaccttccaaggacgactagggctaccactgtgtccctgcgccacactccggctcaaccatctataatcgccgcacctcttgcctatctccccttcaatgctgcttcatcgtccaacatccatgttcttcttttccatctaacggtaccctccttagcacatcccgcctcacacttcaatgttcggtggagtgggtatgactacaaccacgacgcttgcgcctagtcgggcgtaggatctccatggcaggacgtaccccctgccggtgatgacatgttgttgaatcggttcgtctcaatgggcagagcggcatccctcctgctaggttgtcacatcatcataagaatctcttatagaatatatagttgacaagtgtttcaactaaacaacttttagcttttctacaaccatcaactcacatcgactttcccgtagtttacaactaaaatcagattttcaagaatctattactgaaccaaacaggcacttaatttaattcataaaaatatgtggatactacctatccagtaaagagtgatattttatcctatgacaaactatcttatatttaaccagttttcatagaataattattaatatttatgatacaaaatatgtttactataaaaatagattttatgataaatgtaatggtatttatttaatttggtatcattaatcttagtattttcaatataatcttagtcaaacttaagattgtttgaattatgacattaccatagtgacactctttgcagaactaggataatatgttacaaacaaattacaaaaaatatgaaaatagaagttttgtatctagggatgcaaatggacacttgatatgaattggtcttttctaggcattcaagtttatgtcatttcttctcctaggcaattatatcatatgatatatcattagcttattttagcgagatcgtagaaaattgaactctatgatatatatgtcatatcttaatagtatatgtcatgagctccatatatcgccagttgaacacatacatatctcagcggaatattttagagagtgcttgactgatataacatgacttcaattttacaacatctagtgaaaaggtctggctttgaaaatggtaagagcaaaggtttataggacttgcataactagtagaaaaaacaggctgtagtctcggtttttcagtcaggactacaaaaccaagattagacctttagtcttggtctagagaatctagactaaaggctctgaggctaaaaaatgttcatgcccatgtggctcgtgagacttggacccaagaccaattactaaatatagggaaattagaaaaattaatt

SEQ ID NO: 46006 - DNA, 566 bp, Zea Mays
ctgatcttaaagctatatccaacgcttcacggtaaacatccccgaactgtatgtgtagggatcactgatcccccaaacatactccaatgatttatcatagaaacaccctacacatgaagggaatatagatttcttcgcatatgtgcggggatggaaacacatcacaaacgttgtgcaccaaccgacgacgcacgtgaatcttccacgagggcaagggaggtgaggttggtgaccaagttcttcagcgcgtgcgacatgggcctagatgaagaagaggattgacttggttttcacaatgttggggaggcccagaagtgagtcgtcgtaccgattgctggtggcacaggagaggagatgcggagcaaacaaatgacgtcctcaagcactgtcacggctcaaagtaacccaccagtggcctaaagtgtaaagaggttgtgcaggcgtgggtcccctcgagcgcaccagggggtgacgaggatggaggatctacggtgcctaggtggcgctggccaagccgcgggcgatggggaagtatgccacaacagcattgccaactagcatctcct

SEQ ID NO: 46007 - DNA, 1064 bp, Zea Mays
caagttttagttcttgtaacaccaggggtgttacagaggaaccatgggagatccgccaacgatgaccgcgcggcatgccatcgcctaggcttcagcacgtcgctcggaatcctcgctggggtgtcgcgatgatggtggtggtagtcgttggtgttggagcaacctttgcacccacaaattgctcgccgggccaaaccatggccgcagactcgcacgtctccgagggcactctactatgtaggtgattggggcgaacgctggactgctggagcttcataatgtcccttggaatggggtcgtggccgtctctatcgaagtgttgcaccgaggcttcaataattgctcgtcggagtaaaattctgccactgggtcgctgtgcgtcgtgggcggtctcgttgtcatctcggagctggtaagaaacccactgcatatttcgtcaccttcctagtatcacatagcaactgttcgttgttgaatcgaggcaccacaacactgggcgaggatctcgccggagctcctccgccacggaaccaagtgcgctgccgtccagtggtcgtgggatgaagacgacctctggccattggatccgcctcgtgtgtctgagattagattagggattccattttggggacgataaatcgtgggcgtcggttgggagatggagggagagggtaagatcgcggcgattttatatctgggagagttgattttgcgaatggatggcctagatcacatggcttctaccagtttgggccggatatatctgatccgtcggttcgcgaattaacggcataaatttgatcaaccaatgtatcagttcgtgatcggatatgggcctcaggatcaggatccggtggcccgtatttgataccagttcataagtgaggtaagtctaatccgaaccctcggattgtaatctagcgtctaaaaaaccccccatacccctttggcgtgacgattttgtagacaagcccccatagatttagagaatcaacctgccatccactaggacacaaagacagtagcagataggtcctcatatttatgagttggaccctggattc

SEQ ID NO: 46008 - DNA, 296 bp, Zea Mays
cctcaacacatcaagcctgcatcccaggcggggggccaggtactaaggaggagtcaacaatatcgcacacagcaggaacaagttgaaaatagataagtgctaatactgcttaacaaatagtactcttgagtaccttacaaaaagcgaaagtattacatttgttttctagtggagccctagttccatttctactctgcaggtatgaactacctccacaccagtaagggccgtgggatagcaagccccaagtggctcgccagcggaggcggccacatcagcaccgacggcgacgacca

SEQ ID NO: 46009 - DNA, 331 bp, Zea Mays
atagttgtagagataagtcttttccatggaagtatttcttgatgattgaattttgccaaagactcgattcattttcaatcttccaccaccatttacaaagaaggcttatgtttaaagcttctagatttttaatacccaaacctccatttttctttgtgtgacaaactttgttccaatttaccaagtgatactttttttctccaccaccttgccaaagaaatcttcttcttttggcatctagctttttaatagtggtttttggaagaagatacatggacatatgataaataactgaattcgtcgccattcttctctcctcttctctccaaat

SEQ ID NO: 46010 - DNA, 913 bp, Zea Mays
ctagagagcaaagcaaggtcagacccagagaaggagaggatggaggaagaaattaaagttgtggagcatgtgaacccagtgccccataatcctttcaccccccttcctcaccaaaattgtatgaggccagtgacaatgactcatacgactctaacaggtccactaggtatagcatttggaacctgtaaatgtggtacctagaccaaggtcttagttctagtaatgcatcaaaataaataaaaacttatgtgtgctgtctgtgatgcatgggtaaccgatgtaggacatgtgggatgtttgttaatgttccttttgtatgaaccttatgtggaatgcatgaaacttgttacattttagtagaagtgtgttatctgttgttccaattcattgattcgtgtatttcattcctagaatggctgagaacaactgaaacacacctattcgacctcctcttgccggccccagttcaggtaaccagattttcccccacccatgtgggatcctcagttctggcagggccaaggattagaccaaacccatcctgctacaattactggtagtataagccacatgagcaatcctacctggtcccagggacctaatgacacatcttcatttccctttcgcaatccatggaacccatattttggtatgatgaatccaggtggtcctccaccacaaacatcattgggtcaagcccagattgtaccacctactccatttccctaggtttatacccatgtgacaaaccagactgaccctatcaatttggaatcagaagcagagcataatgtctaggaaataaacagccctaccaaaccttcggacacacctgggacaggtaggaggacaaaggaacagaacttcaaacctgatgaagaccttttgctttgcaaaacttggctagagatta

SEQ ID NO: 46011 - DNA, 641 bp, Zea Mays
atgtgttcatattttgtaggtggagacaaaagtaaacgttgatccagatcatgattccgattaattgcatatcaattatgcattccaggcaaacgacattgtcgcaacgagagaagttctgacaccaggtacatgactgttcatttgactaaacatgcaataaacaatcaggtttcatgcggtttaacgtagatatgccttattccaggcagtctgcacaaaactgttggtcacacacctaagcatactaggcaaaggatcgcctactttagcgagcggtacaaaaacataactcccgtcgagagggagtttaggcgtgaatgccttaggttgtataatagaacaccaaggcgaaaagaggcaaaggtagatgacaacaggaaacgtagagttatgaaagccgacaatttgaatcaggcctccatcgccagggaggacccaacgtatacccctgagtttgtacaccctatagcagatgcaacggaacctgatggatccaccgtctatgacttggttatccctgaatttgtcaaaacacctttgttcccaatttcaacacagactgaggatttcacttcacctgatatgtctatcattccactaaaacgtaaacatcatgttccatgtggggaaagacaagc

SEQ ID NO: 46012 - DNA, 469 bp, Zea Mays
atgtcatcagagtttagggataagtggattccactgctatcatcatcctcaatagagctctaaaaagagcttgtaggtggtggtgatgtatgaagcctagaatgggagaaaagctagacatatcatacctatgtagttttggatgcattaggcatgtcaaggagatgaaggcctacatctccaagcctgaataggagcacccaagtggtgttcctaagatataaggcaggtatcaaggcgtattgcctcttcgacttgcccggtggacgactccacatttcacaggatgtgatttttcacgagaaggcaatcttgaataggtggagtcctagtgcaagggaagtatatgaactccatgggacctccaccattgatcacttggtagttcatggtttgggaaatgttggcaaagtaggggaaaggaaataaggcagtctgatcatccacaataaggagaacctagtcggac

SEQ ID NO: 46013 - DNA, 429 bp, Zea Mays
cagattcgacaggtctaagaatccccaccttttgtatctctttcagtttagggtactggatcttgtttttcctatgctgcaaagtgtaccttattcctctaatcaggcgttcatttgttctagtgatgggcatggttcagtacatagcgagtaaaatgtatggatgaggtatccaaaactaactatgccaataatgaagcaaccgaacaaggatagcaattttattcagtgtattagtcagaatattacatcataattgtaaagctagaaaaaatcattgagataaaacagtgagtcatctttataaaatactaaaaaggatgttttccaattacctctaaagccattcctactgtcctgccatgctagagttgcatttcttctcatcctcccttctagttccagctgttgtgcgcccatggctcctcc

SEQ ID NO: 46014 - DNA, 484 bp, Zea Mays
cccctgaagtaccaaaaacccgaattggacccctggaaaaccctaaaaccaaaccctaggggctcatgtgcaaaattagtccacttttggactaaagtgcaaaaaccaagttaaataagtatcttgagtcatttgggtcactcatatgtgaatttgcaagctaaaccctaagttttgggtctatttgcaaaaatcacttcttatgtcccaaatggcttaagtctaaattgtagagattttgctcaacttttgagtcttgtagcttttaaactatagggtttttgccctaggtcaccacaccaaaattgtagcccaatcataggagaacaactttgcttaagagtgcaagcatagttgttaagtaaatatttgagataaatgagcctgaagttggaatgtcagactgcttgaaatctgaaattcagattaacagtggaatggaatggaattagggctcggatttaaacatgatccaatgcaagtt

SEQ ID NO: 46015 - DNA, 1408 bp, Zea Mays
gcgaatggtaatattatttatagctctccaatcaacacacatcctccaagatccatcttttttaggtactaaaatcacaggaacaacacaagggcttaaactttcatgaacaaaacctttatcaagaagttcttgcacttgcctttgtatctccttagtttctttaggattggttcgatatggtggacggttaggaagtgcagcccctggaatgagatcaatttgacgctcaatcccacaaattggaggtagtccagctggtgtttcttgtggaaacacatattcaaagtcctgcaaaagatcagccacaacactaggaagagatgttatgtcgttaggagaaatcaaaacatctttgttcacaagtacaaagagcacttgatatgggttgttcctcacttctctcagctcagattttgtggctagcataactagatgttctccctcttctttctttttatctcttaaatttggcttgtagcactcaatcaccgaattgtggatgtcactcaatttcttttgttcttctcctcctctacttgctgcactaatttcagttttcttttgtaaatgttcagccatgatttgttgaggggtcataggcttgagtataaacgttctccctttcagatctagtgtgtactgatttgttcttccacaatgctgagaatatcggtcatattgccaaggtctttccagtagcaagtgacacacagacatgggtgcaacatcgcactccaccgtgtcaacatactctccaatcttgtacgaaactttcaccttataaccaatcttgatatctcctgattcgttcaaccattgggcatgatatgtatgagggtgtcgctgcaacttcagatcaagcttttcaaccatctcacgacttacaagattatgacaacttcttccatcaatgatcacctttactactttgtcttgcacttttgctctcatttgaaaaagattatgtcgctgtccaatttcagcttctttcatttgaacactcaatatttgtgtaaccacaagagcggtaccatgcttaaattcacatcccgtatgttcttccaatttatcagtgtcatctacatttcttgctttagcttcctcttcactagctgatgtatattctccatcatcagtcacaaggatcacacgattatttggacatttctttatgacatgaccatgacctccacacttgaagcactgaataccactactattggtgttgaacccactgatattgaagtggatgttgctggtttataactcgggtttggagcagcaccattctttccactagaattgccttgaatattggatcgcaggcccccagttgaaccttttgttgctgaggatgcaacagtaaaccttgagattgatttgcttcctccagtcatggttcgtg

SEQ ID NO: 46016 - DNA, 322 bp, Zea Mays
ctaacattgtcgagcctataaagcgtcactaaagactctcgtaagttttacatgtacacatgcagtctaatgtagaaagggctcctgtacttagcggtttagttaggtccctcctaaagtttttctcgactccatatgtggtctcttctatgccataaaaaatataggttcccccttggtcgccattagatttttccattcccttgcatgccattattgttaattccagggcagatgctcgggagggagaagagaaccatggttcgtgaatagaaccattggagcgcatcgctcctaggtcgttaggttcaatcgatcttgg

SEQ ID NO: 46017 - DNA, 350 bp, Zea Mays
cagcgttttcactcactatcgcaagacaagagcgagggcagcaaacacgctacatcggctcagccttcgggataaggcccgcctcccgaaaattaaacaacatcattttcaactcctcaccctaaaaaagatttcacagatccccctccctgatacatgtcccggacgatgaggacaacaaatctcattggccaacccgatccacccaaagacgggttagctccatccccatccgatgatgcctaccacttcgcgacatctcgccgacactatgcttcgataccactttgcgccggtggtgctcctcggtcctcgccccagtcgaaggatcggacgcttcacgccctttc

SEQ ID NO: 46018 - DNA, 488 bp, Zea Mays
gcagtttcaaactccaacgactatctttgacgtggcgctaacgtggcacggtccggtgccccaccgaactagtcactgttgcccaccagaccagtaactatgccaaccacccatcagaacacctacttgctatagaagtctgacaggggtccggtgcaccatcggactagtactgtgtaaggtccggtgtgccacccgaatatgtagtaattgtctagttgctgcttgagggccactacctgtggatcagagagagaaatagctaaaaaaactagtgtggacaaactgtgtactgcagtcgagttttcgttccatcgagacaatgcatatgctgctccattcaatttacctgacttatattctaccgtcatgtcataaccaaacaacttactcacccaagtgtgatggtggaaagattttgatcaagaaggaatgtcaagttgtaatgatatgtgcgtattgtaaccggtcgaccccataggtatggc

SEQ ID NO: 46019 - DNA, 365 bp, Zea Mays
cgaccatatactcttcaatcaaatcctagcctccactgaccatgaggcaaatctaaaggccttgtcatccaggtcatccttctccacattgaagtgagggaaggcaccataatcatacgagatcattgtactcacacacagccaccgctcatcttcctcatcccgcacatcgaactaaacgtttgtctagctgccccaccaatttttggcataggggaccagttcagtcacattacctttcatctttgtagtctttgtggtaaaggtgcaacactcatttgttcactgtcttttttctactagtccagataataatgtttgatgaaggcctcgactgataaagtcccccatgagttgtaaccggc

SEQ ID NO: 46020 - DNA, 1132 bp, Zea Mays
ggagtcaatgtttttcagatggtatgcccacaggcgagcatctacaatacacgcacagaatttggcaactaacgatgaagaccctcgttgaaaaatgtagttgttgcgctgcttccacaagtgccaacaacaaagaattgcgaaggaggggaaggcatcttggcgcgggtcaggggtcgggtagttgatgcatcaatgacaaggaccccaattacattccagaaatcctgagcaaaggtacaacgaaagaggatgtgtgatgtcaacttcggttccgcagagcaaacttcacaggcggcatcaacgacaatcatcttcctatgtaagttacatgagtctaaagcttgtcccgcgaggccagccaggcaaagaatttgactcagggcagggcactgccatcctagatgaagcccaacaaaggcgaagcctgaccgtacccaagggatagcaatgagtaaagggctttggtttgaagccgcccagagttatcagtagcgaaacagtgcgctcatacggggagtcgttgaggctaatcccagagagtacattctctaggtaggacatgtctgaaattactctgcctgggggagctgaccatgtagagatgacgcaagcccctgctcaggaggtcagagacgctaattgatttgtcctaggcatgctcgaagaggaggggaaaagggtggccaagtcttcgctggcgcaccaggcatcaagtcagaaggaggtgctgcagcagtctcccacatctcaggttgtgatggaatggtagagagggaggactttattgaggctattctagtgatcaccctagagcatgtttgccatgcacgtttgatcccgaacctagatttcccaggaggaggatgttgaggtaaatagtctgtgaagcatcttcaggagcaagtaggagttcgagatcaggatatttttgaccctagactgcctctggctgtagacatcataccaaggaactaagcagttggcgccttttgcttgcttagagccagcccagaggaaccctctccgcttcctttcgatcctgtcaattgcggtaggggtagcctcattgcacctataatgcggttgagaaggacaagacgacccatcgggttgaggagcttggattgcc

SEQ ID NO: 46021 - DNA, 630 bp, Zea Mays
gagttcttcgatttctgcgagcaaaagagcattcagatcaagtatgcttcggtggcacacccaagagccaacgggcaggttgaacgagctaacgggatgatatttgaggcactcaggaagaaagtcttcgataaaaacgaaaagtttgtaggaaagtggataagggagttgccctacgtcgtttggagcctaagaactcaacctagtcgagctttgcatggaaatactcctttcttcatggtctacgggtcagaagcagtactgcccgctgatctcaagtttggggcaccaaggttgatctttgaaagcatagcagaagccgaggctactaggctagaggatgttgatgtactcgaagaagaacggctgaacacggtaattcaattagcacggtaccagcaaactctgaggcgttaccacgataaggccatgcgacgtcgatcctttgtagtgggagatctcgtcctccgccgaattctaacgggggagggacggcacaagttgtcacccctatgggaaggaccattcatagtagcagaagtcactcggccgggatcatatcgtctcactcagatggacggcacggaaattgggaactcatggaatatagaacacctcaggaagttttat

SEQ ID NO: 46022 - DNA, 338 bp, Zea Mays
agttgatcttgaggcattaggtgttttatcaagcaagtgtcattgtcttgttactctttgaggttgtcgcctcatagacggcttgatgaagtccccatcgagattttcgtgaatattgtgaagaggccacgatagtgattatgaggggcacacgcttgcctcgctggagcgacaaaagcgacactagtgaaattgagatacgagcgattccttgatcattcggctcaaggatcaagtggagtcttgatagaggagcgggtgagtgcgacgaagccacctcaatgtagattagggatgatctataaaccaccgagaccacggtaaaaatccgatgtctc

SEQ ID NO: 46023 - DNA, 455 bp, Zea Mays
tcaataagagttatgggttctaaatagttctacagagaacaaaatcaattattaagggtccaacattatacattttagtcatttaaaagctgttatacattttagtcattgaaacaaaagtaattgaataaaaaaacaagggccaatggaaaggaagatgacctctcgatcaacacaatgatactcatatggattatgatttaaatgatactcaaataagtagaagtggcaactgtataaagaaattaggtctgaaacctaatttgtcctagaacacttttatccatgaacgtcttttgttagactgaccaaagtttttaaccattagttaataaaaagaagtaaataagaaatactacttatgttatcatcaaagaactaacaggatgatctttcagaccatggcactaaccacggcacacatggttgctgaacggttgaaaaaacagagcttg

SEQ ID NO: 46024 - DNA, 1001 bp, Zea Mays
cagcaacgacgggtgatcatgatcgtgctgatggtgtgactccaggagttgacaagccagtgacggaaggccgtcggctgggtacttctaccgatcgtgttgcttcattgaaaagctatcgtcgtgctcggggtctgtgtgatcgctgtgcggaaaagtggttcaggggacacaaatgcccaactactgtgcagctgcaagtgattgaagaggtgtgggatttgttggatgaaccagatgacagtgagccggtgcaagaaactcagcctcagttgttgatgacactttctgatgaagcgtggacaggcacagatgcagtttccacgttacgttttcagggcagtattcagcagcatcctttgatgatacttattgattccgggtcgacacattcatttatcagcaacagatttctgtcgttgttgacgggcacgcagcaattgcaacgcctaatggctgtccgagtggctaatggacaaatcgtcacttgttctcaacatcttcctcggacaacttggtctatggctgcttaccagttcttgtccgatttcatctttttacctctgccttcggtggatttggtggtgggcatggactggcttcagaattatagtcccatgcatattgattggtatcacaagtggattactattccgtatcagggaacctatgtctgtctccagggaatgatgtcgacgttaccagtgggagcagtgattgaactgcggctgttctcggactctcaatcaccaacctgcgagcaccagcaagcccctgctgacgacaaggtgcaagcagtgctatcacagttcaccgaagtttttgatgatccagtcggcttgcctcctacccgacagtgtgatcatgccattccactgttgccaggcgctaatcctttcgcagtgcgtccgtatcgttatccaccggcgctcaaggacgagattgagacgcaggtgcagcaaatgctggaccaaggcgtaattcagaaaagtcaaagctcg

SEQ ID NO: 46025 - DNA, 353 bp, Zea Mays
gaatctgaagcaacgctgactcccctccctcgggtgatgtcccgcgctcaccaggctctctgggaaaccgaggtggctattcggcgggagtaagaggcgctcgagacagagcaccagcgccttggcgactggtgcacccaactggaggagcacactaaggcggtgtcctgctattttgcctcagaacgggccgagtttgagcaggagcgtgaggacttcaaggaggacatccgaaaggtgtttgaccgagaggacgaggtgatccagaaggagaaaagcctggctaggaaggaggtacgcttagaccaaagggaggagaccgtcacagcgctccaagctaagctaaaagctta

SEQ ID NO: 46026 - DNA, 432 bp, Zea Mays
aaagcgttggcttagtacgtctccgacgggggaccaacgcaggaagggcggcgccgccgtgctcggatgtcgggtggggtgggggatggcccttggccattgattgcgaggaagatggataatattagaacgagagataatgtttcggccaattaaatctaggacgttcagatgtgatctggtggttaagaataggtcacacaacacacatggaggtctcttgggttgtggatctctaatctaggggctcataatgtgtaccgcttcagtttaaatattgatctcttctgaaccataggcgtcgatcagatgactgtagttagccgataccccttcggtcgagactaattgcataagagtctctgccattttgtttaataaacccgccatccgcatcaattcaaaagttattgcaacttaatcctagaattt

SEQ ID NO: 46027 - DNA, 923 bp, Zea Mays
caaaattaaggagaggcagaaccatgaaaggcacccttaggtacagggagctagttcagtgggagcaaacgtccgattagagggcgtgtacgcctttgaaaaaaccttataaattattctaataaaacaattcattgaactttatgcatgttctttcactaatgcacttccaccaaaagtacctttatattttaacattaaataaaacaatttgttcatgtaagcatacaaagacaatagatatacactaccctctcggtcgaattcagagcataattaagcatgtataactatgtcatctcgactatacatttaaatggaaaagtttttataagctcggtcatggtattggataatcaactcgaacaggcaacactgtccctcaaaatctccgtaaaatgtttggttagaacacacgcttcaatcgagcagacggtagaccatcaaagacttcaaaagcaggcacaaatctgaaagaaagaaaactgcaagtcattcatataatgtcacacttccagtatcattgttcccaaataagtcttatctcacctcatcaatctcatttcatatttgctcagatattgcatgtggttctctagggataatatatttacattcatttgaactgcacttcaaaatgtccactcattttagagaagcacaacagtggctcgatataattttctctataaatggagcaggtcaactttccagaaacacaaccaactatgtgtcttctgtgaaaagcatcgaaagacatttttatatgcaacaagaccgggagacaagataaattgccttggcaaattcctcaatagtacaagtgatcagcttttttaggacattcagacttcttcaggtattccacagattgagagcatcttcatcgttactttcatcatatttttcattgttgcttgtcc

SEQ ID NO: 46028 - DNA, 647 bp, Zea Mays
cttataaaggccaccctaaccctcaggcaatacctctgacactcctccagcctagtgccaagctctacccgagaccttgtcaaatccggtgagctcagcgccccaccattgcctccgagtgccagccaccgcaaccaatcgacccaggtcatgttccatcccactccgttgctctgaaaacttccctagagcattgagaggaatcaccaagctatagcacaagctaagacccaccgaaatagtgggatcggcatcaccaatgctcggtaatccgccgacgaacgtgggccaacctccacataccaccatcgtccaattcctctgagggtcagcgctccaccaaccctgtggagcttccttaccgaccggaccaagctctactgccattgttggccagaatttggtgccgccatcgaccaccaccacctgcgagcgtggaccgagcagcaccggccatcttcgacactgacctgaccaccaacgtgatccccaggacctccccgacctcaccaaccacctcaccagagtgctaccgcctccggtaagccgctccatcatttccttttgccatggatactgttcctccagccatggaccgcgagtttagattttagaaaccgaagggttttactgctaagtccgaaact

SEQ ID NO: 46029 - DNA, 973 bp, Zea Mays
cgagaattactaagatcggagctacgattaagaagttacgattttccaaggatttacgtgatgacatattaaactatagtataaattggttactatgcatcatatgagaaattatgctcaaaataattaattctactttaatctagatcataacttgttttagaaatcatattagaaatatagacatgttgacttgactagattgattaagcaacaaacacaagttaaataatattcaataaaggtatgtgattggacaaaataatgtttgtcgctgtgtagcatattttattataaatctaatgcaatttgaatgagttaaatcggagtttaaacgtaggtgatatgtctaaaacaagtttatgggtttacttttatatctaaaaaacattatatacattaattttattgaatttcttgaccaggtggactgcggacaccaatcttcaaaagctcagggaccaactcgtgaaaaataggactggattgcaaggttctttgcactcgcgtggaccgcgggttagtttcaaaggaactcagggtccttttttgcataagcgcacggtggaacgggtatgggatgctttcagacgttggattaaaaacggacggtaaggattagatctattatctggcgaatcggtatacaatagtagccaccggatcagaaaccgatggtggcgatcacctcttacttcatacaccgatgatctatccgatcataaatctacggctaagattttcttcagacgatgggttgtttgcgaatcagatcacggccataccctggccatccaacggccagcggccatcgttcccgacagctcccatacactcccccgcggcggcgctatgctacgacggataacatctccggcgatccagacagccgcgcccaggggcacaaccacgagtccgagcgcatctacactatgcggagaatatggcgaacagaggggtgggttgttaccgg

SEQ ID NO: 46030 - DNA, 444 bp, Zea Mays
gtggatgattattttgcctcctgtactcatgtggagacacaaacaccaaagataatatatgaaacaaatatcaggcaatgaacaacatgtaccagagacagagagagagttggccgtctttttcggacaaaaacatggcgtatatagctcgtctgtccggtacgtatcaagctacatttcctctactaattcatctgggccggtgcccgtggcctagcctaacattaacaagtgtgctcgtacctggaatccagcacacgacatcgatccattgtccgtgaactcaccggccgggcagatcaatcgtccgacgaacacggcggcgcgcctcatctatttcatcctctaccccctccctgtacagctaccaaaataattttaaatgttttgtcctcttaatgacaggctgatgaccactacacagattagcttggcaagaaacag

SEQ ID NO: 46031 - DNA, 551 bp, Zea Mays
gttaaataagaatgccggtcaatcatgaacaaactgagtattcttgaagcctttctttattgatgacatatttcccactttacagagtacattatcgtcccgatagcttttgaaatacagctaggggtaaaacttcctgaggtgctctatattccaggagttcccaatttatgtgccgtccatttgagtgagacgatatgatcccggtcgagtgacttctgctactatgaatggtccttcccatgagggcgacaacttgtgccgtccttcccccgttagaattcggtggaggacgagatctcccactgaaaaggatcgttgtcgtacgaccttgtcgtgatagcgtcttagagtctgctggtatcgtgctgattgaattactgtgttcagccgttcttcttcgagtacatcaatgtcctccagcctagtagcttcggcttctgctatgctttcgaagatcaacctcagcgccccaaacttgagatcagcgggtaataccgcctctgacccatagaccatgaagaaaggggtgtttccatgcagagctcggc

SEQ ID NO: 46032 - DNA, 274 bp, Zea Mays
aagactgttgacgtgcactagcgttctctcgattgttcggatttttatgtttgggcgtggggtgggagtgggagggggcacttaaatctctgatgttgtgaagtgtgagcattcaaaggttcatatattttagttagcagcattgattgcatggtttccataggttgatatgcggatttctgtaagctgtagcttgaagttgtatcacatatgatttcgttgcactgaaatgtctaaacatcaattgctttgttggtgctccagttatgatcac

SEQ ID NO: 46033 - DNA, 1060 bp, Zea Mays
atgaatttccaaagctggacagaaaaagaaaagagaaaagaggaaatagtgttgggccaaaatcggtacaggcggcccaacaatgagcagaagcgcgcccgcgccaacgcccgtgccaactttgcactgagctccctgtcattttgaatattccgaagcaaggtcaacacactattgagacgagtcactgacggtttatacggaacccctcggacttctaattctttaccggctgaagccctcgacgtcggacggcgatgcgcagggctccgacgagcgcgtgaaccgaggattttgctcagtggttggtgtcctactttggtcgaaaccaaattcaagttctaaggaccatttccccccaataaattttacggttggtgatctgccaagctctgcccgcgaggacagtgaacggcgcggacatgtgctcgtgttccaatcgattggcgggctcctagttcaattcggtggtttgtcaagcatcaccaacatacatggacataagaacaacgcgcgaatcggatggtgtcttaccagaacggactgaccacggtggagtggtgctttacggtggcggagaccaatttggggaaaaacgacgttgcgacggctctgggtgaaattggaggcggggattaaggctacacggccgtaagaaactatgctttcaccgtgcgcaaacgatttgggcaaaggtggagaggtcagtgcgaatttgactcgatttggtttactgttatgtgggtgatgaccgagcctcgccgcgaaccatgggctatttatagccgtggaggtccggcgatcaacggacaagcaccccgtgagtcaccacgatgaggactagtgctaagcacgtggcgcacggcagtaatcgaccgacggtgaggtcttatccgatcagtcgatgcgcaagggaggtacggcgagcctagctacggcagaaccatggtgatggcacggtggccgccgattaaccggggcctgccacctccccgttttaacgccacgttgccaaagccttttaccgtggccgccgacgacctatcccgaccgccgtggc

SEQ ID NO: 46034 - DNA, 724 bp, Zea Mays
ggtttttatctaggccatgaggagccaaggactggaaccagatgcaagatgcttttgcaatattcatgagttgtcttatgagacgaaggcgactggaaaggaacggtaccacaataattttagttgctacaacttcatgcctcgatctgaggtgaattaccatgtgcccatgtttcagaagaggttgctaggctcttggatgtaggagtggttttacgtgaaaaatgacatgagtcaaagggaggatgtgaaagggattattcaacgccctatatggtctcgcttcggcattaggaggccagccactgcacttgggaatgatgtgcaagcatgccaggcggctgtcaacacagtgtgcacctacattggcacaagaggcttagctcaagagcatattgcatacaaagtatggcctcttgcgagcgagtgggaaatgccgaaggaggccaccattggctctagcgagggtggcctagtttatctgaagtacacttttcagttcagggatcagtttgacgagccaaatgatgattggttggatgtcgtagaagtaacaagtgatgagatacttggagcgtatttgaaatcggaagacgaagctatgataatcgtctttggtgctcgcggcaagaagagattgaacagggtgtttgatgttatcgggtttgtatacctagactattgttatcccacgcggaagcaagggaggaaaaggaaagtcgct

SEQ ID NO: 46035 - DNA, 490 bp, Zea Mays
ttaacatgtttctgcaattaattttatactgaaaaatcattttctaaatgaatttctcggttttaataggtgtctggtctgtgcgctaaataatcagaaacacagggactaacccaaaatgtttccaagactcagtcaacagtcgaaacaggacgacaggtttatttttaataaagataggggctcttttgtaaatcttcccggtcgaaggggtattggcgattgtgagccgttggattagatctggacgcgccaggattaaatcgcccatgagatgaaccggtatggcaccagggccacaggatcacggatcgacgaagcggatttaaaaggtcgaagagttatttgatggtctaatctaatccgttgatacagagatcaacggccacgatttcccccacccgaagcggtatacctactatctaatcgcgaccgttggctaggatccaacgggcgaggttcatctctcccaccgcgcccaacaacggcg

SEQ ID NO: 46036 - DNA, 737 bp, Zea Mays
cggaggagtcttcagatgagggcttggattattttgcagcgttggatgtggctgtagcagagccttcgccacgcgcggagggttccgaggagctcccgagcgtgagttctgggtataggcggcgaagggcggtggcgaaacggagagtgagtgaattgtcgcgaagtggtaggcattatcgtagtgagatggagagtggtcgtcttcgcgtggatgggactagtaagcgagaattgttgtcctcaccgattggggtgagtgtaggtgagggggagctgcgaaatattttgatggtgaggaattgaggataatgttgttcaactacacggagatgggtatcatcccgaaggttgagccaatgtaatatatgatgccctcgctgtgtgtatgtaaccgctatttgtatgataaggttgcgcaccttcgttgatccggccgcgctcgtgggcgacttctgtacagagagtcttttggaaaggacttcgattttgcgggcctattattccggctgcacccttagacgacttttgcacgaagagtcttttggaaaggacttcgattttgcgggcctattattccggctgcacccttaggcgacttttgcacggatagtattttgggaaagacttcgatattacgcacttgttgtgctattccggctgcacccttgggcgacttttgcacggagagtcttttggaaaagacttcgattttgcgcacttgttgtgctattccgg

SEQ ID NO: 46037 - DNA, 599 bp, Zea Mays
ggttagtatgttgactacaacaggtaatacaaatgactgcatgaaccaaatttgatgcatacataacataattagtttcttacaactacataagcttttgcaatgtatgattgagatcatgtgcactgtgcaaactgcactttctcatgattaagtttgttcttgacacaattgttctgtatggaaaacacaaccgttaggtagagaaatagagataactagaagcaaagtgcgacaccgctcccatgtggctgcgtatagggcacaagacatcagcaacaggcataacaatttatgtatcaaaatatgcaggctcatgttacaagattgtttagtttgaaatattaaatgcagaaaccaagtcaaaaagcatttgatagtgaaaaaaataaaattctcaacaaatcaagtgcaaaggaaaatggttaactcatccatttatttaaagcacaaatgctttactacattttcatcacaaaggctgaaagggaatgacatctttttcctgtgtccttcaacttatcgatatttttttcatagtttagcacatgagattattagtgaacaaaaagcattttcccctcaaatgcagcaaacac

SEQ ID NO: 46038 - DNA, 558 bp, Zea Mays
gtgaaacttccatagagtaaatgacgaagtctttcttctccaaggcagcttcgtgatatttaactttgttttcaaggtcttgaatgacgaagtcctttttcttcaaagcagcttcgtaattttcgactttgttttctagatctttgatggtagcttcgtttttttcgtcttcaagatcttgttgcatcctcagcactttgcttagtaatatactctgccaaaacaaccttcgtcagaaaacatcttaattcaaaaaacaataaaaagttgactttgtaccttgaaattagcatagagcaagctaccggcgatatgctgtcgctggtacctgcagaggtccgcttcaatcttcggcaggccaacgctctttgagaaagtcctaacaaccttggcctcggttcgattccgaaggcatcttagtttcccttcattgactccgccaaacaacagagaccctggtttgtattcacaggatatagcatatttctttagctcttctttctcagtttctgataattcttgtccaagtatatcttgaaaattaaagttttcttcttc

SEQ ID NO: 46039 - DNA, 647 bp, Zea Mays
ctcggtagtgagggcatgtaactgcatctggactttgtttggacagtgagcttgatggccaggttcaaacttgtcgccacaagtatatcacagaccattctgtctcctatactccttcaccagtctctctttagacagcttgggtaaggaagcaatccctctagtgtcggacctgtacacagcacccccaatcgaccctgattgactatcttgaatgatttctatcgttgtttgtccaaaataccttgttggatcctggctaacaacgctgctcgttccatcgaagttggcagatgagacttaaccggtccttgcagctcttgcttcaaccccttaattaaatgggccacatacaaagtctcatctaaatcatgattatggacagaagttgcataccgcgcctcatcaaacacctttttgtactcctccacagatccagtctgcctaatctccaataaggaccgcatagcctgtgaatactcctctgacccaaacttcagcatcacagcttcacaaaattcctcccatgaacatggaccatactgaattttaaaaatctgaaaccatctcttagcattcccctccatgttcaatgatgctgacatcacccaaaccgactcaggtacccgatacaaagtgaaataatc

SEQ ID NO: 46040 - DNA, 694 bp, Zea Mays
ctttttcccttcgacgttgaagtctccgcagcaattgtccccttggtatttttctcacgtacaacattagcaataagtcaatcaatttctaataaggttgtctcgaggggaccaccactgttttcagcctgttgaggccctttgttggccacatcggctacaactttctatagaatcgccagaggcggggtatcaagaatagccctcatcacattcaacatccgatgcttcttctgagcgtttcctccgtcgagtgctgaaggctccttgtttacctctacttcggcagctctcttaacagttttcttctgtggatgtaataagctggttagctctgaccctggaggacttagcattgtgaaaggcaagggttcagttattagtcacgctaatagaagttgtcgagggggtctctgctgaatgtttcggcagagaaggtccttcttctccacggctagatggcataatcttccttgtcttcgatgccaatggttctggtgtcaacttcggatttttttggtaaccttttcttcctgtccatctccacaaatctatgtgcttgccttttcaagacgctcacattccttttctttttactcccccggctccttcgtcaagtctctcatagtcaggatactcgaagccaagggcatccatcacccgattcagcggtcattagctggtcctctttttt

SEQ ID NO: 46041 - DNA, 616 bp, Zea Mays
caaaattatagaaactggaatgagtcaaaaaggagttaaaatgaattttatatacattttacaagattctagaattgttcttgagttaaaaatcaatttcctaaattctcaattctctgggccgagcgcataaaaactgagaagcgcaggggtcacgttgtaaatatttccaagacacagttcgccctacgcaggactgcgggttgattccaataaagaacaaggtctcttatgcaagaaacccggccgaaggggtatcgttgtatcgtagccgcacggtctgatctgggcggccaggattagattaggttgacactctaatcggtacgcaacgcacgccgtaggatcaaacatcgacggcacagacttcattaaggcgagatatgatcacgaccccccatctaaccaccaacggtcccgagccatcctttcccagatccaatcccagccgtaaactccaaaatctatggtcgtgcacttctctctctctcactcgatcctgaccacggcggcgacgcaagtcctcacggcggggcacgccggcgagagaacgaaaacgcgcctggtgaccctaaaccccacgccgattacaccaaattggaccagagaaaatagc

SEQ ID NO: 46042 - DNA, 801 bp, Zea Mays
ggaaaactacagctagtgcgcccttaatcatagggttctcttggtacgccctcgggaacttactagccagccgaaaggaaactggcctttaatggccttcatgtgatgtgctagagtttcagaatatctatcttgtgctagagaagaggcaagtaggtgaattatagcagtagggactagggagacagtccacagaccttgcacgtgcaacaaagacgcagcagcagtcactctcacgatgtaattatcgaagcaactgatcacaggaaccccactgtcacacatgcaaaagtagacatgtttctttaactgcgccaagtgtttggatttactgacagtaaggaacgaatgcaaaagtagccttccgctgagtgcaagaaccatcaacataattggcctctttaatctgtatcctgcatcttgttttgcatggagaggcttccccgtcgctcttctgaactctaagcattgtgagacgcagaaacacgcttgcggtttattctcgtttgactcgtctttagtgtactggatggatgagatcgtgcccgttgcgatcgtccaaaagtttctttttttttggttccattcttctagctcttggatagctgcagcctgcattgcatggacgacgattccctagaccacgctcgagaaaaatacgctccagatatcggcgaggattggaatcggaactggattgtttcgctggctccccttggcgctgggtgcctgcccttgtcgcccctgcctgaattgtcccttttgcatttctttgtcttgcatgccacatctagaggcgca

SEQ ID NO: 46043 - DNA, 741 bp, Zea Mays
aggactaagaaagaggtggggaaaatctactcgtagctcttcttctctttcctaagtagcttcatcctcaccatgatgactccattgcactttgcacattttgattactttactcctcgtgacatgagtaaaagtatcaagaatcttgataggatactcaatataagtcaaatgatcttgaacactaagatcctccataggtagctgctcctcgggtaccctgaggcacttcttcagttgggacacatggaagacatcatgtacatccgcaagatggtcgggtaattccagttgataagcaacttccctcactcgctttaggatcaagaagggtccaataaagcgaggggacaagttccctttgactttaaatctcctcataccccagatcgatgacacctttagatacacgtggtcaccctccttaaactctaacagtcttctccgggtattcgcatagcttttttctgtcttgactgcgtagttctcaagttatcccttatcaatcgtaattgctcttctgcctcttgtataatttctggcccaaagaactgcctttcaccagtttgatcccaatataaaggagtcctacattttctgccatataatgcctcaaacggggacatcttcaaactagcctagtagcaattattgtaagagaactccgcatatggtaaactcttatcccaactgccaccatgtgatgacgacatcctccactattacccgttggcaaagacg

SEQ ID NO: 46044 - DNA, 359 bp, Zea Mays
gccaaaccccaaagactaagatcatccttgatggcacctagaattgtgttaatagaaggagaaactcctttcaaaacatagtcatttcgatgcttccagatagaccaaacaacaagaatgctgagggaatttattccttttttctgccgcttccttactcttttcattattctgcaccaccagtcagcaaagctacgttcattttgctgaggcactgaatctgtgagctgcagcaagtttagcaagataaaccatacttgtcttaccgtcagacaagatattagaagatgttgtgctgtttcctcttcttgatcacatagtggacatttgtccggatgatcgggccctctcttagcgag

SEQ ID NO: 46045 - DNA, 494 bp, Zea Mays
gacccactctgcgtatctgcaaggtctgataaaatcagcttctagcagccggtggatttcgtccttgatgcatgggagaagatctggacgaaatgttctagctctttgcttgaaaggtctgaaaccagatttaataggcagccgatgttctacgatctctcggcttaatccaggcatctcagtgttatttcaagcaaagcaatctgaatattccttcaaaagatcgatcatctcatctctaggatcggtctctagggtcttgtttacaaaagtcggccttggagttttaccatctcctatgtcaatctcctccaaaggatcggccgatgtaaacccctgtcctagtttatcaagatctctgaactcctctatcatgttccccacagaggaattagatgatctttgtgtgacggtggacttttcggtctcggggaccggatcatccgtaatattgtccttttgttgtgatatatgttcggtcttaaagtccaaac

SEQ ID NO: 46046 - DNA, 475 bp, Zea Mays
tcctgtcaagcccagccgcccgcaaacgatccaatgatgtttaatctggcagcagaaaacatgtccgtaatcgaagagtttgtggatgtatttccggaagaattgcctggaatgccaccagaaagaggagtggagttctatatagatctcattcctagcactgcgcccatcacaaagagaccataccgcatggcccccacagagttagcagaattaaaactccagattgcagagctgcaacaaaaagggtacatccgtcccagttcgtctccctggggagcacccatccttttcgttaccaaaaaggatggaagtatgagaatgtgtattgattatcggtccttgaacgaagttacaatcaagaataagtaccctctccctcggattgatgatctcttcgaccagctgcagggagccaaatacttctccaagatagatctcaggtcaggatatcaccaactgaggatcaaggaag

SEQ ID NO: 46047 - DNA, 515 bp, Zea Mays
tatgagaataccagcttaccagcacaggtattgtgtgactagcagcatgagtaaatcacacgtcattgcatcaaaaaccacagaataagggtaacctgtcggtttaaccaaatgggcaaggcttgaaatgtgtgactagcaacaaaatcaaagtacacatcaggaagaaaagtgtattgctccatcccaaggctgcatataccactttccaaaatgcatcttttacacagaacagatgcaacgagtaggtcatgataccattgccaagggaacaaggcacctacgtctatgtgctaaacactttagtgctttaaacagaagtagcttgaaagtgtttttttttcatgttttcatctgacaatcagatggttacagccacacatattgtaatgagaaattgactgcagttgttgaactgcaatgtccagggtgtttccaatttcagaaagagacgtgaaatagctgcccctttcaatgtgttcagcggctcagaaattttcgtagctaggtgttgc

SEQ ID NO: 46048 - DNA, 276 bp, Zea Mays
ggacatttgcatggactttatcgtaggattgcccaatacctccaggcaccatgattctatttgggttattgtggacagattgaccaagactgctcatttcttgccagtgcataccacccacaagacagagaagtatgcagaaatttatgttgatcaaatagtgcgattgcatggtattccaaagaccattatatctgacagaggagcactgtttgtggcacgcttttgggagcagctccaagaatcacttgggacccaagtaatacgaagctcagc

SEQ ID NO: 46049 - DNA, 687 bp, Zea Mays
tagaaagtgtttgacaagttgatacagaccgtggtgaagatcaaaagtctccctcaccatatcccctgctgacagcacgtccacctcatgactgtttccatcaaaagagcaaaccaccgccttactgattaactcatctctacgacgacggatcaacccggtccccgagatagcacagacagctcttgcaggtcatgcccgagggtctctgggatagcgcgcttccatgacctggcctccttggatagcttggaggtaagatttccttggctggatagatgaagtgtggagtgcaggctgccgctcctgccccgtttgaagagagccgaggtgaggcttctgctgctggtagctcgaggagataatactgcctttctagagtgaatgcttgagtgacccaggcagatctcgaattgaatgggatctcccatggtaggtattgccaggatatgatctagccctgcttgtagacattgccagcaacgaacaggtgtcgaacaaaggtaggcaaagtgatctgacggcaggcagttgaaacatttgcctctgagctgctgcttgaaaaaatcagatccttgcatctcactttgctgcttgaaatccccatgaaaatttgaacttttccgccaccagaacttaggcttcacaacagaccagccatcatctgcagaccagccttcatcttct

SEQ ID NO: 46050 - DNA, 291 bp, Zea Mays
gagaaaatttcacccaaagatgggctgtcaggctgttgaagtctgaatttcagactgacagtgtagttacagagactttgggcatgaattcaagcttgattcaataggaatttggctactgctgctatggcaaaattatagctggttagtagctctacaactttggtgcagagggatgataaagttgtcaagcgaaatctagagaaaatttgccctgaagttgctctgtcaggttaactgaagtggaatgccatggtacagtaactgaagaagaatctcaggttcatcccc

SEQ ID NO: 46051 - DNA, 1277 bp, Zea Mays
ctgagagtagtggaaggatgaacgttagccctagatttaggtactagagaagctagaggacccaccatgggtaattgatacctaaggatatttacaagttttcaagagtatatggaggagtatatcatgttgaccaagtcaagataatagttgacttggaggcattggaagacttggtgaccaaacaattgaggactagtgatgacacatgtcaagattttggagggagcacattatatacactaatcatgagagttttggtggtttgggcctcaaaaccaatggccagatggtttttaggtttatgactgaaaacttgggtggattccaacgagaagtggaggcaacatatggcaacctcaaggaattcacattgaggaaaagatatccgatgaagagcctatggctatcagatctacaaaccttgaatcggatcacaacaccctcaaagttaggtggttcgactctcattatttatgggcaatttgtaaatatgtaatagccatataaataaggggaggctaatccaaccaatttatctattaagttatcattagtttgtctctctggtaggttcccccctctagtctgatccatagatgatttagacaatatagtattcattcatctctataactgatcttgtaagctatgaaatttgtggcaatggaggccctaacctactaggttcatggtggctcaatatgttgtgttgtttgttgaccttttctttctcttttccttccggtgtctgattttcacttattttccatgttttggtgctccgtttggtgtgggtattataaattcgtttcttggcattcactaggttatatgacccatttagatcacatatgcaagttggtttgagcatatctgcctctttgcaattgtatagaaaacccagatcgagagaacaattttgccttttttgatgatttgatggatgtgttagtttaaaactctataagtaccttatttaccaaattgagaatcatgtgctatgttttatcgaaatccaattttaaatggaggtttgaagaattttcggagagtcctcagggtgtaggctgccacaccctattagattggcgtcaacacctgcccaggctgccatcccggtcctcacaccccactaacccgggtatgttggcttgagactatgcacaagtgtaaacctagccaaattggctttatccactattagtggcaacccagctagccacctttcatcgttgataggtcggcttctaaagctggctataccgccatcttgg

SEQ ID NO: 46052 - DNA, 1126 bp, Zea Mays
gttttgctaggttgggaacaccatcctctatgtcatggtagcatccattgtcataatctttcgatagggcatccacggtgagaagatacttgagaagatagccatccacaacctccaggatgcggggaactgctctctttggtggaaaatatgcatgagttgttgagatagagcttggaatgctcctcgctagatgcaactagggctataggggtttgtgacctcgtaactagagccctaaaagaagaaaaagggcaaggtttcagaggagaatttatgctaccactgaaaatagcgagcccatccctagagcaaggagcagccccacccaagtgctctagagcattcggaagtattgccccattcataggtcgactactcatgacctagttgagtgtagggcagttaaatacctaacttagcgcttttaatatctcgactcgatgcgccatgatcgtgggcaccaaaaatagtgccgccccaaccaatgacacctaaacaacaacaataatgtcgggtatcgtaattaggggtaccccagatcatgcccctaagcatacctgacacctgggtacttagaaatcataaaacacgcttcgcctgaggccccactcaaccgttgcttaaacaacatcttgcccgagcccatcctagggcgaatgttgcgcccgtgtgaaatccttgactcgcccgaagcccccccccttatgaaaagcaatttccgtctcatctgagctcgtctcggacgaaggacagcctcaagcccggtctcggccaaagttatcgggaaccatgacttatgaaggcgtgcacattaaatgcaacgatatgaatatctactccatgtgacaccacagtcaacaaaggacgatgggaccgcagtctcatctagtttcaccgactacaatgacgcacgtccgcgaataccggacagttctcccccacttcggtcattgttctcgaacaaactttggatgggacatgcaacgtctaggcatagcctcacgctcgagagagagctctgcctcgctcgaagttggcttcggcctcgggaggaactccgcctcacccaagctcaatctcgaccaactgtcttagcaatagcacattgttgccgactccccgc

SEQ ID NO: 46053 - DNA, 329 bp, Zea Mays
agagggtaggaaataggtttattgcttgccttcctcatgcggctgattacaacatatataaagcctctggcccaaccgattggagataatctctccttaattctagggataataatcctatctttccaacagccaacgagcaacctctccttaattctagatagtaaatcctatctatcctaacagcctgcgcaccaaacagccagtgctcctctacccagcgtacgtcacgggcgcgtctgtgcctggcttaggtgcgtctgcacatgacaatacttgtttgccttatcccaatttattctctcgtgctctccaaaattttgacttag

SEQ ID NO: 46054 - DNA, 629 bp, Zea Mays
ctcctccaaaattgatgtagctgttggagagtgcaatgtctgttcaacagatgaccagtccacagatgcaaataattccagcagctcaaccgtcagcttcgaccgattgtacgaccttcccaagctctatcgcgtcaacgggaaataaggtccattatccagttgataacatcacaaggcctgtggcgtgcacactggttataagatatggtattaacaatcatcgtaagatgaaagtaggcataggcattgcgatcctaggacgcaagtttcatggaagcaacattccagatgataattgcagggtagaagtgacaacggtcgtccaaggatccgaggatgacatgctagacatccctggtcctgaaggtatcgagacacttggacaagccatcaaaaatttcatcctttcgcctcgaagggatgtcgaattggttgaaccaccaccgccgtcgtcgtcgcatccccaaccatctccgcctcctcaaactttagttcctattgtacatccatcatcacctcctcaatcttcacatgctactcctcatcctctttctgacccaccgtcttcgccacaagcattgccatttagggatccaccaccttctcctcctcatcctcttggagac

SEQ ID NO: 46055 - DNA, 279 bp, Zea Mays
gaaatcttcttattgaaggataggggtctgactgctgaggctgtggttgctgactttgttttcaagaacattcaacccttgaaggacagagtttatcccgcctatttatatatcggcatcaatgattccacctgagtcacaaatagacatattcccaataaggatttgctgagccatctggatatgattctgaggggtagggtctcgaatgctggtgctcctttagcttactctacgtagaacctgcctccaaataggccattctctgaatttgtctcc

SEQ ID NO: 46056 - DNA, 424 bp, Zea Mays
ctttagaaaatagtctgaaaggaggtaggattgcactcacccgattctgttagcatgttaacacactaatcctttttacactatatatgttgccatacataaattggctaaagcaagcttactttttcactatctttggccagacgcaaagcaacttcaaccaaaagagatatgcttgatttgctcaatacacctacacctgacaaaaagataataaatacataagcatgctctattggaatatacactggcactgtaaccatcaacatgaaatatgtacctgcatagggatctgtatgcacttccagtgctctaaaacgaatacaagaacagagatttgccaaagcccatgcagcggtgacacgaacctaatattaacatttacaggtaagtactacctccgttcttaaatatatgatgccgt

SEQ ID NO: 46057 - DNA, 320 bp, Zea Mays
caaaacgacaatcttgcgccggctgtcgcgtttgcttgccaaagtctgcacggcacatcgtttgccttcgtctccgccttagctttagatgattattgattactaattagactattgtaggcagtagcagatcgctgattcatggtataatttttctctgtgctttagatgattattgattactaattagactattgtttagatatttaaatggattgttttgggaattttacagcaggtctcatttgtaatacatcggtttaatattgtctcgttatcgctttgctcattggtgccaacatgattgactttagtgtttt

SEQ ID NO: 46058 - DNA, 575 bp, Zea Mays
ctcaattcgcacagctccgccctctctcatgctctgcccacgctgccagacaccgccgaagacccgcgcccacttccctggccatctaactcgccggagaccgcgccaagccaccctgagctccgccccgaggtgagacgcctttgcccgtgcttaatttccccaatttcgctctatgctcggccaattttggcatcgccggtgctcagccatggcggtctgccacgcccgcgcggtggccggtcagtttagcccggtccagtgccctagtgtaggtccctatgtcacccctgcctctgctgaagccttaccaggccttagcgcgcctcaagccccctccccatggctggaatccctcactggaattccttcggtccgcccgaggccttctccccaccgttctcccctctctgttctcagattcatggccttttccccgccactgagttcgccgtagcatcttcctcctctcttcccaatcccgacgacctcggagccaccctagcacgcgcgtgcctcaactccggcaacctcaccaccgttgagaggagcagcgccgctcacagccgttcatc

SEQ ID NO: 46059 - DNA, 499 bp, Zea Mays
caactggcaaggtagcagtaagtgtggcttctgtaatttggatgaaaccaatcagcatttatttattgactgtcatgttgctcactttatgtagcggttgatatcaatctgttttggtttaccaggacctagatctgttaaacatttctttgggaactggttgatgggggtggatttaaatactaagaatctcattattacaggtgtctcagcattgtgttgggctatctggataagtagaaatgacttagtatttaatagagcacaaatgtttacttatttgcaggttctattcagaggaactcattggctcagactttggacgcagctgcaaagaagtgacgattcagcgaatctgttaagaagagcttgtcgacatctggagacgatggccatgcacttttttgcttatcggggttggaggttttctaataggattacattgtattgatcgttttcctttttaagtgagtgttgaatcggtgaggagtaagggaga

SEQ ID NO: 46060 - DNA, 479 bp, Zea Mays
ggggataatatagttgcaatagtacatattctaaatatgacacatcgcttcaggcgttcatcctttgcaacatctatgatggtgtaacaaaagtctatcaaagatcgtaatccatcagggatttttcatcgatcagatatatcgttatagtctgtcattctggcataatggggatattttgccagtaacacctaaaccttataggtttctgccatcgtggctttagaggataccgtaattccacatccagtggaaaataccatgagtaaagattgtggaatgcacatgtgcttattcagtgaacttcaagtcctttggtacctcatcttattccttttcgggtctgtatgggtctttatccctttataggggttatcaaactttggtgttcaacacagactttgttttcttctggataggttccatctgggaacgataatctcaacctaggagatattctccctacataggagggtgat

SEQ ID NO: 46061 - DNA, 1308 bp, Zea Mays
ccgaatgacgacgcgtcggtctaatacctactctggtatctgtagaggattgaagtcatctggaagagcagcagccacctgattaggactcaaggattgtttgagctgggacacatggaaaataggatgtatagaaaccgactgcggcaaaagcaacttgtatgcaaccttgccaatttgttgtagcacagtgaagggtccaaagtacttgaagtttagcttgtgattggctcggttagcaacagaagtatgtacatagagctgaagcttgaggtatactgagtctccgacctgaaattcacgctcggatcgccctttgtcagcctgtgctttaattcgtatctgagcccgcagaagatgttgtctaaccaacctgaccatcagctcgcggtcttgcatccaagcatgtagctcctgcgttgcagacacatcagccactgtgatgcctagatgtcaaggatagcgtccatacatcacttcgaaaggagaagtgcccaatgaagtgtgaaaactggtattataccagaattcgaccaatggcaaccatgacggccacttggaaggacagacatgcacaaagcaacgaagaaatgtctcgaggcactgattaaccctttccgtatgtctatccgtttgaggatggtatgtcaaagatgatggaatgaggtaacccatgcaacttgtatactggatccaaaaagatttggaccactttaagggttgtgtaaggatgaagcaatggtaggaaatgagcatatttagtaaaaaacatccaccactaccaggatcatatctgcattgtgtgatcagggaatgcccttgcacaaaatccatactaatcacttgccaggaatgctcaggaatcacttgccaggaatgctcaggtactagtataggttgcagaggcccaggatacttactcctgtcaggtttggactgctggcaaatagaacaatgagccacataatgtttgacttggtccttcatgcctttctaggaaaaaagttgtttctcacatcgataagtaattggaaacccaaaatgtcctcccaggggactgtcatgcaatgcaactacaataccatgctaaagctgagaatcattccccacccatactcgtcccttgtaacgaaggatgcccgattgtagggaataaggtgatgaattgttctgaagtacaacaagttcagacaacagtttttgagaaaaggatcctggttgtagctgtccaacacctaaaccaaccagtcagggactaaagaagatatgctatacaagcccacttcattaataggtcaccgagacaag

SEQ ID NO: 46062 - DNA, 627 bp, Zea Mays
tttgaactcttttatactagtgggtgaagctactaggtgtcagcatggtagacatatcaggtcatcaattgggtacatggattttttatttgataaatttgggattagttaggttccattcaagattgtagttgttcgattgagcaggtgatgggtgtaggaatggcacctccatccaccatgcatgtgagcctaaagacacgagagtacgaggagaaccctaccgccaccatccttgcaagtcgctcgaggcattcagattcttactctagtagtgacaaggtggaaaggggaggaggaagggacatcattggctagggttcagtgccaaccgagccatgacacaggagataacatggggaatagaattttggtttctcactaagcctataaaacacatttatgcaggttatatggtagacacgttgagatcgggcacaacgactagttcaaatagagcacaaactattgcaaaggtttgtaacgtgtttgaacaactaccccatttaaacatggtctatctatgtgatataaataaaccgtagcaacacatgggtttctaccaagtaggggatcatgcttatgcatgattttataccccaccataggaaactgactcgattacaa

SEQ ID NO: 46063 - DNA, 1263 bp, Zea Mays
tgtgcatgccacaggccttgtgatgtcatcaactggatagcagaccttatttcccgttgacacgatagagcttgggatggtcgtaccctcagtggaagccggcggttgagctgctggaattatttgcatctgtggagtggtcatctgttgaacagacatcgcactcgccaattgctgcatcaattctagaggaggattcgatagcatttcaaacatcaggcctttgaactctttcttggcctcctccttaaaataattcgccatctcttccttgtatcgatcacgtttcttgtacagaccttcccattgtggtccgaatccttccttccatccttccttagatgagattcctcgtacacgaccaggatgctcaggattaccgagaccagccgttagaatgtctctctccctttgcggcttaaatgttccttggctctgcttagctgcaattgcatatatgttttttgccgcttcttcgacagtgggatcatcaaaagatacaccagactcagtttcccttggttttgtagcacggatccaattagctgtcctttcaccaagttgctcggacagcgtcggcaaccctgcagccttcttctcggcgtcttcttgtctccatttaggaacctgacgcttgtaaccacctgtgccaaggtggtggtggtatttgttcttcttagatagttctgaatttgcctcacttagcgatatgaaatcagggttgctcctctgctctagaaatactgcccactgaactgctgagattttatattttttcgtcgggtctaggtctttctttgcaaactttgtattcatctcagacctccagtttcggaaattgattgcaaactgcttcatcgtgtattttttcacgagttcttctgaaccccgaggcaaaacgaacctcgttattagcttattccacatttgattcttgacatcatctgatacatctctccactgtcggattatgatgtcaagattatctctaactaagaacccaagtgcattccggaacttaggtagtgcctcttctggagctaggggctgaccattcgggctcacgtctgcgattttatatgtcttgtcaggaaacttgtttagccccctgtcacctctattccgatcgctctgcttccttttccttgacctctcggtggttgtctcggtcgattccggtgcgccttgggtcggttcccgtgcgccttgggtcggttttggtgcgccttgggtcggttccggtgcgtcttgggtcagttccgg

SEQ ID NO: 46064 - DNA, 571 bp, Zea Mays
agacgcctgggcacgtggcgcaaggccgcgaggtggcaatctccggcgaactcatccgaagcaaccgtgactagctcgggtatggtggtcggagtaaattagtggtcggaacatatccacagcgtgatatttacttaccccaagcgctatccaaccgatccgagcgtgaatcgccaacggcgagcacgaatccgagcgcacagctcgtcgacggtgatgtgatctgaacttgatcctatctggttactgtaccattggaattctattcagtcagcatgatagatcaactttgagtccaattttctcctaaatttacatggcaacttgctcatcggctaatagcaaagttgttgtctaatgatccatttataaaccaactgtagtcaccatgcccaaacatccacggggtcatcttcaaaatggccccaaaagttcatcccatgcccctaaataccataattcaggtttcagatagactaacagcccaacttgggtcacatttatctcagaattcttcatggtaccaaggcacaatctctatagtaaagttattctcctttcatagatctac

SEQ ID NO: 46065 - DNA, 705 bp, Zea Mays
ttgaggtttcctttgaatgaaatgattggagaagttttggaaaacttcgagatctatcttcatcagctgactcctaacgctatcgttaggctcagcatattcatctgggctctccgaagccagtgaatagacccaaatgccgaagccttctgccaagtgcacgagctccattatcagacgaaggccaaagaatacggtcttcatgagaattttggttgctacaacttcgcctaccgcaaagatatgaagactccagtggttagctatcacaccaagtggccaactggttggaaaaatgactggttttatgtgaaggccgatgagaagaagagggagaagctcaagacgctagtgctgagccctctgagcttaagcttcgggctgactaggccgctatgccgtatggagccagggtcaccatgccaacaagctgtggcagaattccgggtggtagccaagcagatcgggaccagagatctagtccaagaatatttggcctatagggtgttcccgacgctgagtgaatggaacatgccgaaactaaaggggataaaggagaagaaggaacttgtgcgactaccttataagttcaaattcgagaaacagttcaaagggccatgtcaagaatggttagaaatgatagaaaccatgtgcaacgaaatattgggaaattacactaaaaaagaagatcacctgatgactgca

SEQ ID NO: 46066 - DNA, 285 bp, Zea Mays
atatcatgtttagtgtgtgtatgtgtgctagattccaagctaatcctaagtaggcccgcttagttgttgctaaaagaatccttaggtaacttagggcatgtttgagtccctagagctaatagttagctagctaacaaattgttatctagaatggacctttatggttttggtgtttgaatgacaacacaattaaaggtctaattaggttattgagtgttgaacatgaacttagatgtgaaagtggaaaacataaaaggttcagcacaacagatcgagtggtgatat

SEQ ID NO: 46067 - DNA, 364 bp, Zea Mays
tgatcttgttgactagcaccatcaatcggtcaaagagtgactgtagtgactcaccctttatccagtcatatcttgctagctcactttccaaggactcaatgcgatgtcttttggctttaggatcaccttcatgtgacatcttgagtatgttccaaatttcacgagcatcctcccgtccttggacttttctgtactcttctgcacttagacttcccttgatgatgctcactgcttgagcattccgatggagatcttgcatcatctccggggtcatctcttcaccaaaccttggcttgcatacacctacatgcacaatctcccagagacttggatgcacaccaattagatgagacttcatcttatc

SEQ ID NO: 46068 - DNA, 781 bp, Zea Mays
attggatgttaaatttgtcttatcaagaacaccagaaaaagtgtaccatgtatgaccccattagataactggaaagaaacttctgctgtactttgtaaagtaactatggtccatggaagcaaggaatactttatggccacagaaggatacggggagaaaagggataagagccctaactttacatgcactccatgcataaacaacgtagcttcctatagaacaaacaatgccctaatatgtttttttatgtttcaacaaatgtctctttggcatggacatggttactacaccattgattaatacagacaaacaaacatatttttatctgggggaagttggttaattttttgatacaattgaatgcagactgaaatcactaagtgcaacagaaacaacacacaaggtttaactcatactgatgcataggaacatgaatgaggtcacctgaatccccatggtgttctcgcattcgctttcctcgatgcggtactcatgcatcacccagctggtcctcagcccctgaggagctcgacccttgtagtagaccagtgtcttcttcatgccgattgatctgttctggtagctgatttgccgatctttgcctgttgacttccagtatcctgcctgggttgcgcggtttgtgcggcatccatttggatacttcctatcccttggcccaaagaagtaccactcggagtctctaccaggcaggaatgatttctcttccaaaacaaacatatctcaaaaattcagttcggagtgatgaaatctcaggatgaac

SEQ ID NO: 46069 - DNA, 1269 bp, Zea Mays
ggaatgcaaaatcgtttcggtgttgaaggaggtggtggcattgccaacggcgccaccggagcaggaccggtctagaaatcccatcaaaatcgcccaggcaagagcgggttggcattcaagacttgcacaatcaagggggaaggagaaaaaatttacttgggtagggtgggcacgcgtgtgatctactcctacactgatataggtaaggagattgtaggcataatatctgatggtcaggacgttcagactgtcagaggtaccactcctacatccattacatcctctcctttgtttgtatatgactgtgtgattaaatgtgttgttgattatgtatactgacgaaaggtgttgttgggttgcattcttttttatagggggtactactgcgccactttcaagtgttacgggcctaggatgtctccaatggtaacctcaactctgacctatgtgtaggcaataccctttatcgggatacactacatctcgggggagtcgtggaccccgtccctaccacccgctgaagaataagctattgcaagaagcatttaaagtcatatatgctactaggagcacccctaaagtcaaaacaagaaagttgttttgtcagacatgaattttgcagtactaattaaattatccacatttgttggtcatgatttttaatttgtattacaccgtccacattatttatcaagggtttcgtctacatatataaattgtatatcgtctttgactttttcatgtgcatagtttttttaccgtgcacgtaaatatagtgtatgcctccctctctttggtgcgcgcgtgcctgaggagagccagagtagtgatcatagcatgcagtgttgataggtaggtcggcagtaggtggcataggcggcggccgctgcaatgtcgatggtcggagcggtgcaggccagcccgcccatccaacgatccagtgctcgaccgagatgtagcagcaagatatggttgggtatagctagagcgcagttggccagccagaacaatgctaggtgagagagggaagtggtggtgataggaatgtgagaggagagggattgttatctgttaggtcttatgaatatggaggaccggccggcagcaaacaaaaaagtgaacactcatcatagctgctgttgggcagggattcttttccatctcgcgtcctctggttgagagatatatatgtctactgctctcgctatatagagggccggcctgcctgctagctagatagctagtttaagttctaggcacggattggat

SEQ ID NO: 46070 - DNA, 569 bp, Zea Mays
gtggtttttgatgaggctcatcatttgtatcctcgtcccttgtctgatgcttcttctgcgtcgttggttgaccccatctcctttatcttctttcttgatacccctaattctactataccgacttgacacccatcacaatcttgttatgtttcttctttggagttttctttgcatcctaattattccatgaatcctttggtgacacagttttacacacgccgcaccatgatcccttctaatgtgccatcttcgtctgatgagccatctcctgctacttcatcttctcttgatgtgtcggcatctccttgtgagtaatctattattgttgacttgtcctgttccgctgagccatttttccctgctgcttttacgcctgagccatctcttaggcgtagtctccgcctttgttagcctattgattagtattctccttcaacttttgtgactactgctcttcctgagtcggtctcatatcgtgatgccattcttcatcaagaatggcagcatgcgatggctgaggagatcgctgctctagatcccaccggcacatgtgaactcataccttgtcc

SEQ ID NO: 46071 - DNA, 564 bp, Zea Mays
ccatgatcacagtcgtgtccatccccacggcccacatgacaaccagttctccgtgagactcgctcagcataggtaaactccggcaagagctaactgactactctaacacctaactgaacactaactgaataacctgactatgactgaaaacacaaacaacaagggactattgggactagaaagagttatctaacaacggacaaccagaggtgtctggcgcaggggcagggaggcatggttgttgggagcaagaaatgctatcatccatgcgcagcagggagaacatctgatgggctatgaaagggtgggggcacatagtagcgatgatgatatcactagaaaaggcctgtttagcatgtatagactaacattttagcaaaaataggcacatgtcacattgtatttccctttcttccattatttttggctaaccaaacaaaactgtcgcccatgcaatgcttatttaactgtgcccatgcagtgatcattgtttttaattgtccaaggcctagccgttgaaacaattgattgttcttcatcagattcacattcgaagttgacatc

SEQ ID NO: 46072 - DNA, 918 bp, Zea Mays
cttgttccatcaagttgagacccccttgtgcgattctcgctcgagacctatgccaacgttgaaagtttcctctttttcttgttgctctacttcctttgttctctagtgtgatgcatataattcatgtccctgcctgtatgcagatatgttgattcgatgttgtatctaagcgcatgtcctagtcgatgatgtttcattatgttatatgagcactgccttttgttgttatgatgttatatgagccatgccttttccattcttgctatgaattatatggaacatgtggattagagaacatcgcttgtcaatcaagatgctgcttttgttattgtcatttatgcgtacttcatgagtagtgatcaattgagtcacctgctgtgggggcgaatatcccctgggtccactcgggggtgaaaacttcgtccggggccacatgacagtcgcccctctgtgacgacatcccgtcgtgggccgggcaaagggaaacgatggaagcgagccgacccaggagcgtgttgggcccacgcccggactagtcgcgggttgggcatgatcgtgttgaggtcgttcgtttttctcgcgcccgacatcctcaaacaccggagatagctcggagcggaggcgccgggttttccttgggacagtgaaggttgtttgctattaactaggagacaagcaggaaaagtatgatcaacatgtacgcgggaagcaccctacggacgtgtatataaggccaagggggatgccctccattttcatatcattagcatctcacagctcggtagacaccacctgtaataccactcacatacaaagccaacccaggaagtagggtattacgctcctcaaagcgacccgaacttactgaaatctgcttgtctctctctcgtgcccaagcgcgaaccatcgagttacgat

SEQ ID NO: 46073 - DNA, 1377 bp, Zea Mays
gtttttgaatgttagcctaggcgctccaaagatcaaatctactggtagtattgcctctgatccatataccatgaagaatggggtgtttccatgtaaagcccagcttgactgtgttcgcaggctccagaccacgtacggtagttctctgatccattttcctgtaagcttttcgctcttgtcgaacaccttcttcctgagtgctccaagtatcattctgttggctctttccacctgcccattagctcttgggtgtgccactgatgcatacttgatctggatgctcctttgctcacaaaaatcaaagaactatgagctagtgaagttagatctcaggtctgtgatgatgctgtaaggtgtcccgaaaatctgaacattatttcctgaatgaattccaccgcctttgctgaggtcaaagaggcaacaagcttgtattctatccattttgtgaatttatcaatggcgaccagtatgtgagtgtatcccccttgagcttttttgaagggccgatcatgtccagcccgcagcatgcgaaaggccaggtcacaggaatagtctgcaactattgggctggtaagggttgctgctttgataagaattggcatacttcgcacttctgaaccaactttgctgcatcattcttcgttgttggccagtagaacccagacctgaaagttttccctactaatgtccttgatgctgcatgcacgccacattgccccgcatagatttcatccagcagctgccttccagtagtcgagtgaacacacttcatgaggactccttctgcccctcttctatatagtagaccccctatgatgatatagtgggccgactgtcccgcgatgcgttctgttgtggctttatcatctgtttcttccttgttttttatgtatctgataattagttccctccagtcgttgggatctgcttctgtctgacccagaacgtggcactcctcaacctgctcggtggtgacgcttggctgttgtatctcttggacgaaaaccccaggtggaacttgggcccgactagaccccagctttgacgcttggctgctgtatctcttgatgcgttgcgacccctttctacatgatggaattctaaaccctcgaatttgtcctccaccttccgtactgctgcgtagtatctattcattgagtcgattgagcagtcccagtctttgtttacctggctgatgaccaccagtgaatcgccgtataccattaatcttttgatgccgagtgagatggcgatgctcagcccatgaaccagggcctcgtactctgcagcattgttggacgctggaaacaggagctgaagcgcatacttgagttgatcacctccaggagcgaggaaaagaatccctgccccggctcc

SEQ ID NO: 46074 - DNA, 433 bp, Zea Mays
gtacgttacaacctcgaatttgttggtgtgctttggaggcttggacagtgtacacgtcatgaactctgtatagtttccaaattgtcgatccgggcccggcatatatgtgagagatcgatcttgtaaattatagccacagtgtctttggtgatttgtacgtagctggaattaagtagaagaattgttaaaatggtaagtactagttattaacttgccttgaaatgaactagctgacattgatttgtcctgggatcggaggagagacacagaaacctaaaagagttagcaaagacagaagttgctaggaagcttagtgatatacatacatacatgtacaccagtggcttgcgcgcgcggctggccttggcaattgccgtcatggattatttgcagtagtacctgtgtgccacattggtttgcatgtgacatacat

SEQ ID NO: 46075 - DNA, 419 bp, Zea Mays
tttggtatcatcagtcataccgagttggctgagtcgagttgctcaaggttatgaacaagaccccagtgctaaaaaactaatgagtggtttggttactggtgaaacaatagaacactacactctgtcccagggcattattcggtttaagggcagaatatggttgggatcaaacaaggccatacaacaaatgattatgtcagagttacatgaaagtgccattggtggccattctggatttccagtcacctaccgcagaattaaagctagttttgcgtggccaggcatgaagcaacaaattcaggattttattcgtgcttgtcagatctgccagcaagcgaagcccgagaggataaagtacctaggattgttgctgccactacccattccagaaaatgcatggcaggtggtcagcatggact

SEQ ID NO: 46076 - DNA, 462 bp, Zea Mays
ttctcgtgtctatcatttggtgagtttgagtgagttgagcatctgactatgactcatcagatctggtttaccctcgacagattccatgagggcaacgatcatgtgaagactagactatttgagacgtacaggcgagagtacgagaacttcacacaattggctggagagaccatcgatactatgttcttcaggttccagccaattgtgaacaagatgcgtgccaagaaggcacaacttccctataacgatcatgagagagcgttgaaattactacatgctctagatcagagggtttgggaggtgaaggtctcggcgatcatcgagttgcccaactacgagactctcactgtggacgagctcttcagcaaccttaagtccatagagattgaccaccagactcgagccaagattgagaatcttggtgcacccaccatggccctggtttctagatgtggttctgct

SEQ ID NO: 46077 - DNA, 597 bp, Zea Mays
ggaatgggccacaccccgcgttggcctgtggcgcggatggacttccggggtggagctgagccaggccgagaaggagaaatacgatgcaaatgttgaaggccctttctgcttgacggagactccgcctcacgcaggtaattcctcccctctctcgtcgcattgctctcttctccccagattggtgtcgcagcagaagcctctagggtttcccaatgacctaattgggggtcgtccccttcctcatctcgccgctttcctctcgtcgctctggcagctgccttctaaggtgaagactagttactgtggtggttggagaactgtccctattcgtcctctcccctcttccgattcgtggccgagagtagggattgatatcaaaatccctagagactcggatgcgatggatccaaaagggaagaacacgaagtgggatcgttaaaaccctaagtcgtagagacaaaactcgccaccctagggaagacaccgaaatctcaattggcgtttgagaccccctcaagcgaagacggagatcaagaatgattcacatatttcaccatcggaagagggcgctgatctaggtaacatgaatcatccgac

SEQ ID NO: 46078 - DNA, 705 bp, Zea Mays
ggctctatcctagtgggacaccttcagcgctacagtaagagatgctacctggacagagtttgagactgctttccgagagcatcatgtgccattgggaatcgtccagctcaaggaggaggaatttcgggagttaactcaaggagggtgatccgttagtgaatacatccataaattcacagaacttgctcgttatgcacccaatgacgttagcacagaagccaagaagatggcccgtttcttgaaagggttaagaccagaactcaagaccatccttgccagccaagacttcctcagtttctcgcacctctcgaacaaggccatccagatggaaagagcatgagaataagaaaaaggccacctcaagagaaagtttcagattctccgagcccaacagcagaacatgcataagagggtttgatcttttgggttcccttccaagggttcgaacctcagcaagccagcaggattcgctccgtcacgtttcaaccagcctggtcaaagttccttccacacctagtctgttgcaagcagccaacctccaaccaatgcttgttggcaatatggagaccctggtcacttcaagaataattgtccgcacctaacattcgtacctgcctactccaactcggtgaatggccccaagaatgttacgacacccgcctccaaggcaccctccaccagcagccagttaagaaagactcagtt

SEQ ID NO: 46079 - DNA, 475 bp, Zea Mays
atcggaacagtgacccgacagcaaatccgccaagagcagagctcttttggaggaagaactccaacatcaacaaggtggaggagatctgattctgagacaacaaacatgtggttacctgcgaacggcaactgactattgggatcgatgggaggaatgattgccacaacaaaactctgattcttccgcttgggcgccatcgcaatctcgccggcggatcgaacaagggcgaaatcttagggaaacaaagaagtggatcaaggcggaaatgtgaagttagggcttagaactcaaaagcgcacgtcgacatgagtataaatggggttttcccgggttgggcaccatttctaaaaagtgccaagtcatcactcgggaaaacgagatttccgacataactcggctgttacctctaaaacgccgacaacatcaagcaccactcgaccgttatctctaaaacaccgacaatgcctgtcataac

SEQ ID NO: 46080 - DNA, 458 bp, Zea Mays
tttgtctctcgtgggctcccctacaggttcttctctccctttgggaggtttccaaacctagaacaaccaattcaccaattctctaaaacccttcatgccaagtgctcggtgatatgcccaaacaactcaaatttgctcaaatcgatcctagttttttagcaccgtcatgccacctctagtaacactcacgccaaatttcacgcctattcgatatcccagacaccgaatacaccactgtttcccatttatagcgatcgtttcttaggcgagtgccaaaaatttgttttcttcgtaaaatttcagaccaagctcacacttcactcatatatatctatctgtgaagtatcgactcaatcccacgacttttcatgcctcttttcaaatttcaaacctcctatggcacaattcgtcgttatcgagtcatttgacccccgtttctccaaatcgcccagtttttg

SEQ ID NO: 46081 - DNA, 703 bp, Zea Mays
tcatctgatccttggcataatttccatatccatttcacaatcaagcattcgttcatcatgagagtatttgtgattccaagaccgccttggtcttttggtctggttaaactatcccatttcgccatgtggtattttcttgagtcttcggccccttgccaaaagaagttagctctaatcgaactcattttcttgtgaatcttattaggtaggaggtagaaccccatagtatagattggtagactacttaaacaagaattagtcagaatgagtcttcccccagaagacaggtgtttacctttccatgggtctagccttttttccatctttccaacaatatggtcaaacgcagatggtttcagacgaccatccgaaataggaatgcctaggtatttcatcggccaagttccaagagaacaattaagcatattggccatcctttccctttcttgttgaactgcccccaaagacaaagacctcgcttttgtggaagtttatttttaatccagacatccattcgaaacagtaaaggattaatttcaggtttaagattgacctatcagacccatctatcgtgatcaccgtatcatctgcatattggatgtgggaaatgccactaggaacaaggtcgcctaaaacaccagaaatgtggcccttttggacccctttatctaataggacacttaaggcatccgctaccaagttg

SEQ ID NO: 46082 - DNA, 1914 bp, Zea Mays
ggcgtttccgacttaagccgattgctctgctttgtagggtatagtgatcaccctaagtcatgtaagcgtgagcatatcacactgacttaaggcgtttctgacttaagtcgattgctccgttagtagggtatagtgatcaccctgagtagatatgctgtgccgatttcatgttgtgtccgacctaagtcagttgttgatcaagaacttgtatgccttagaacatgaaagctttattgataataaaaccctctgcttacaaagtacgactcatccccaagagttttgagacattgttacggatagaacttcttgaggtgctcaatattccacgaattccccacttcggtgccatccatttgagtgagtcggtaggatcgtggctggtaacctctgcaacgatgaaaggtccttcccatggtggtgacagtttgtgccgtccttctcccatcagtaatcggtggaggaccaaatcccccactacgaaggattgatgccgcactgctttgtcatgatagcgcctcagggtctgctagtatctggccgactgaatgaccacattcaaccattcttcctctagtgtgtcaatgtcctccagcctggttgcttctacttcagctatgcttttgaatgtcaattgggtgctccaaagatcaaatctgttggcaatactgcctccgacccatataccatgaagaatggggtgtttctgtgtaacgctcggctcggctgggttcgtaggctccatacaacatatggtagttccctgatccattttcctgcgagtttctcactcttgtcaaacacctttttcatgagtgcatcgagtatcctcccgttggctctttctacttgtccattagctcttgggtgtgccactgatgcatacttgatctagatgctcctctgctcgcagaagtcaaagaactctgagctagtgaagttagatcccaggtctgtaataatgctgttatttattccaaaactgaatattatttcttgaatgaactccactacctttgctgaggtcaaagaggcaataggtttgtattctatcaactttgcaaatttaacaatggcaactagtatgtgtgtatatcccccttgagctttcttgaagagcccaatcatgtccagcccccagcatgcaaacgaccatgttacaggaatagtctgcaactgttgcgtgggtagatgctgctgctttgataagaattggcatgcctcgcactaatgaactaactctgttgcatcgttcttcgctgttggccagcagaacctggacctgaaagctttccctactagagtctgtgacgctgcgtgcacgccacactgcccagtatggatcttgtccaacagctgcttcccagtagccgagtgaatacacttcatgaggactcctcttgcacctcttctatatagtagaccccctataatggtatagtgggctgactgtctcgtgatgcgctccgtcgcagccttatcatctagttcttcttcgtttcttatgtatctgatgtttggctccctccagtcattgggatctacttctgcctgacccagaacgtggcattcctccatctgatctatggtgacacttggttgatgtatctcctggacgaaaaccctaggtggagcctaggcccgactggaccctagtttggatagcgcatccgctgctgcgttgcgatctctttctacgtgatggaactccaatccttcaaacttgtcctctagcttccgtaccgctgcgcagtatctgttcattgagtcggttgagcaatcccagtctttgttcacttggcttatgaccaccagtgagtcatcgtacaccattagtctcttgatgccgagtgaaacagtgatgcttagtccataaactagggcctcgtattctacaacgtcgttggatgccgg

SEQ ID NO: 46083 - DNA, 1127 bp, Zea Mays
atcccgtcataaaacaattcttcttcttcaagtcggtatccacctggtcaatggcatactgagagaggtggttgaatttgttgagatactgcatcaccgtatctcctccttgcctcaaccggataaactcttctaatttcatctagagcaatgctcctagaatgccaacttgaactcctcctaggtaatctgatgtccaacaggctgaatcgtggaaaaattcacccaccaggtactggcaggccctcttagctgctgagctacgaacaggggcttttgcgtctccgtgcatcaaattaacccaaacttttgttccattactctcacccattcatcggcttctaagggttcctctgctttaacgaagagcggcggtcgagtcttagagaattccaaatagatagtatcacgcggtccttgagggggaactctgcctccatactgttggaattggttgcctgccatttcgcgcaagaagcgcgtattatcagcggtggcgttgactagggaagcgatagcctcggccaaagtaggaggtaccggtggcgggttgggagtgtcctccccaccacgggatgtccccgcaccatcatgtgcacgagtccgggatggcatctgaggcaaagaaacatttcaaaaatataacatgccaacatacaccatcatattacattgctaaaatgtaataattatacatactccattatacaactcaactttcttattttacataagtacaatacttagactatactactctagtcttcttcatctttcgttgctccattgcctactgcaggagaccgttcgtcggcaaggttcatggaaggagggggtctaaaaaggtccagctccccatcaggtccttcattagctgttcccgatggtccagctcccattgcagcaacgtatggtggcacgtccgggtgcagccgatcatacagtacatgcacttcttcatgtaaggtattacattacgcttgcaggttttcgagggatgcacttagttctgacacgcgaactagaggtttcacttcacagtcccaagcgaaagagcgcgagttgatgacccaatcaatggtcatatcgcgttccgaaatttcgtactgcaggcgactcactttggc

SEQ ID NO: 46084 - DNA, 1076 bp, Zea Mays
tggcggccggagagaaggaaagttactggcgcaggtaataccgtggccttcaccgtggcaagcttaccggcgacgacccagctatctaaaatggctcagtgcgacgtggtaaatggcctgaggcatggcgcaaccacggtgaatggcacaagtttctgtgatggtcgcttggccacgtcgccggcgcaagtgggcacggcataggacgtaatagcgtttcaagctcatccgcagcgaagatcttttcactctgaggcattatctgggcacaagtgagcacgaatcacatcgccggcgtcaatcatggcgtaaggtcaccggcggcgatattccctaaacctgttgatatttgtgtggcactgtaccattggaggcctattcagagcgcctgatagaccgacttgcagggcgattagctccaaatttcatacaatgacatgaccatctctctggatcaaagttgtagtcctataatccaactacaaactgactatagagacctgactcatttacccactcctttgagcttgaatcgagtccaaagttgatcaaatctcactgtcaataaaaattcaggctataggggtgactgacagcagtacttggagtccatttaactccatcttttgtacagaacttatgtctgatgacttaaccaaagttatacccctttagtagctctataattttgatgtattgaccctggacaaattccttgtagatttagaaatatagagctctaaagttagccctattcaactgattttggacttaggcatatgagaggtatagggtgtctttttgcaaataagcccaaatctcataatttggtttgcaaatcctcaaatgtgtgaaacatatgatttgaggtggcctaataccttggtttttgcactttggtccaaaagtgcaccaattttacacttggccccctagggttccaatttagggttttccaggggttttttcagggtttttacatatttagggttttggtgccatcaaagtccattatatttgacatcttaatgatcatttctcatgtcttttgaagtttccacatatttgggcttcct

SEQ ID NO: 46085 - DNA, 501 bp, Zea Mays
gattggactgcagccgtgattaatgagaaatccggggttcaaactataaataccaggggcctatattaaactctctgctatagttctaggacggcgggttaatttgcaaaaagagcaggggttcttatgcgaatccacacagccgaaggggtatcgttcactatgagccgcccgatctgaatcctacggtcgtgattagatctcagccccccaacactcgataactactcagatccgtccatcaagagaccaatggtggtgattttaaaatacgggagatcagttcctgatcgtggataaacggatcaacggctgcgatcccctggaccgaaccggtaccccgtgcttcgaatccccgccattcacccacgatccgacgacccagcgtaatcgcccccaaccccagagcgcccaggcggcagcgccgcccacccgacgacggcgaacccgccggagcggcgtgcaagcacaggccacggcagaccatcaccggcgcgcggc

SEQ ID NO: 46086 - DNA, 290 bp, Zea Mays
aattgttctagattaaggactttgtacttaggggcagatgtaatgatcctatatggaataaagtacattaaaatgcttaaatgttaatgtagcacctaccagaattttttggtgctagcccacattttgtttttagtgcatccagttctgcatgcacctctgcagtggttttctagaatccattactaaaataattctaagttgtttgatacatgatctacagatctagtctagatctaaaatattgttttcgttgtatgagtttacaaaaaatgcagaacaaaggggca

SEQ ID NO: 46087 - DNA, 1371 bp, Zea Mays
tggagctatatggaaattggagaaaatggacctaaagttggtatgtcagtcgggtcaaacactgaaactcaacttttagtgagctttgatgaactttggggtcgaatttcgtatgatccagtgagtatccgagcaagaaccttatgacaaagttgaagttggtacatagggcaacaactttggtataatcgagttggtaggttgttgtatggaaatcgcagaaaaatgcccctgaagtcgctcggtcaggcacactgaagaagattcccatggtacagtaacctgaagaagatcccaggtgcagtgcacccaccgtcggtgaacccgcgccgcgatccacgccggcgttgtgattcgtgctctatggcacgcagattactgcttgaggtaaaagatcttggcgttgggatgagctcgagccctgttgccgctcagttcgtcatacccacttgcgcggcgacgtggccagacaatcatcgccgtggtggtcgtcgtccttcgcgattgcgccacgccgtgaccatttcaccatgtagctataaccgtggcaagcctagagttactgcccttgagccattgtaccggcgggcgccatgacgcattcatccagtgaaatattccccccaccattgtgatcgtcttcgtctcaaattgaagaagcacatagcggattcctttaaattgagcgctaccctcgctttgcatctctattacacgctcataccaccctcagttagcctctctcgtgcaccatagcccccagtcaccggatttcccccaaatcggtcactcgcgccaccgtgaggcatccttccatggtcagccatttccagctctgttcatccccctatgtgacatgttttagcatccttaaatgttaacgtagctcgtcggccgaactgattgaacgctaccgcgatagggcttcgagaacatcatctcgccgccgcgaaacacctccgagagcgcacttacgttgacccactcttccacccccgttctgtccaaattcacgcatgtaccccgacctttggtgaactagtgaaactcaccctagcttcaatttaaacgctaccgcgtttggttgcttagaacgcactcaccggagccctagcaccgctgtggctatgaacaagcatcgattaaggtcggactagtccaattgagtgagggtttatgctcgggtagacctgtgcatgatgttcgtatgcttgttgccttatgaacaggtcgtcatcgcctagaaaccgcgactctggccatgtgctcgatgcggttccatcgaggacctaaagccataaagaaatagaagttcaagggtctttatgcgaatgtcagcgagacatgtgaatagtgcctcgggctctttac

SEQ ID NO: 46088 - DNA, 399 bp, Zea Mays
ctctaaacccttgcgtgttcttgtgtgttcatccctccaaactctaacaagaaaaacgcttaggcccctcctcattttaggatttagggtgggtgcactctgccacccgaccggagatctcctctccgacatttggcgtgccaggtagggggcaaagctttaggtttttgcttgtttacttgctcagcatgatggtgcaaatcgttgagcaccgcgccgagactttagtggatttcctggtggaggaagaagctgcttattccacaccacaagttcccaaccgcccgatgccaggtgaaagtcgcctaaagggagggtgaataggcggaatctgaaaattataaacctgagcataactacaagtcagggttagcgttagaaatataagtgagtccaaaa

SEQ ID NO: 46089 - DNA, 517 bp, Zea Mays
caccgacattgtgcgtctccatggcatgccacagtccatggtgtccgaccgcgacccgattttcacctcgacattatggtgtgagctcatgcgactcatggcactaagctgcacatgtcatccaccttccatccccagtcagacggccagacggtggcggccaaccgcgtaatcattctgtacctccactgcttcacctgcgatcgtcctcgacaatggcttcgctggctcccatgggccgaatatgtgtacaacacgacataccagtcctcgctctgggagacgtcgttctaggtggtatacggtcatgacccaccctccatccgctcgtatgagcctaggaatacaagggttgatgtggtcgcacgtgacatggaggagtgcgaggccttccttgctgatgtgcagtatcgcctcgagcgggcataggcgttgcaaaaactccactacgacaagcaacacaggccagtgacctacacggtcggtgactgggtgctcctttgtctacgatagcgcg

SEQ ID NO: 46090 - DNA, 555 bp, Zea Mays
ggaaattactctgaagccagaaaaggatgaggtggttgtttttaaaagcttctttaaagcaggattgagatttcctttgcatgagatgattgcggatgtgttggagaagtttgggatttatcttcatcagctaactcctaacgccatcgttaggcttagtgttttcgtttgggctctccgaagtcagggagcggaaccgcttgccgaaggtttctgcagggcacatgagcttcattatcagacaaaagctagagaagatgggctgcacgagaatttcggctgctacaattttgcttatcgcaaagatgcgaagtctccagttattagctatcgtaccaaatggcccaccggctagaagaccgaatggttttatgttaaggttgacgagaagaaggagaagctagttcagagcccattggagttagtctttggagaaactaggccccagtgcaacatgttgccggaatcaccatgccaaattgccttgggtgaatgtcaagttgtttcagagcatattggcactagtgatttggtgcaagaattcttagctttcag

SEQ ID NO: 46091 - DNA, 659 bp, Zea Mays
taatgttgatcgaagtctatcattacaaccacactccgcacaaagccgcccacatacgtagcaggaacaatacaagcgtacgaaaatgaccaacaggccacaccaccattacaactacatacacacggcgagggcatcgcctactacacatacacggcgagggcatcacatattacattggctcaaccttcaggatgatacccatttcctgtagttgaatagcattacctcaattcctcaccctcaaaaagatttcgcagctcgccttcacctacactcgccccaatcggcgaggacaacaattctcgcttactagtcccatccacgcgaagacgaccactctccatctcactacgatgacgcctaccacttcgcgacaattcactcactttccgtttcaccaccgccctacgtcgcctatactcagtactcgcgcccgggagctcctcggaaccctccacgcgtggtgaagactccgctgcagccacatctaacgctgcaaaataatccaagtcctcatctgaagactcctccgtccacgcaatcgaactcccagaatcatcagactcaaaacacttagacacagagccaaacgaatcatcatcggcagccacagtcgaagccgccacaaacatagtattgtcagtagcggttgcgtg

SEQ ID NO: 46092 - DNA, 836 bp, Zea Mays
ctgaaacacagacattttgtcaaatgcattcaccgtgtgagcgtgtgccgtaccatctcagcagcttagcagcctcgaccccagattaattcagcagcatgttcacaagaaagcagagacgtgcggttttgctttgtttccatggcagccaacaaaccatggttttaaacagggggggatgagaatttgttggcggcagatctggacacagtgtgctgttctctccctcctttctcataggatgaaagtgacgactgcgttggattattagtggaacactgccaactcgatcggtggcgtcctttcttcctgcgtaaagtagtcaaacagttgaaatattaggtgagacgtccatatctgcatgcattttaattcagtccgtgacattctcgatccgtgcacttccatgagcttcagttccccaggcgcacacgtacggacgtgtctcgctactgaaacctcttgcttcgtcaccttttggggctagttagacgagggacggacaagagcgtagatgttgctcattcatcactacgtactccaattaagagcagatcgatcgattgatcacatgaaagctcacgatatcgcgcgcaagatcccatcagcagcatatgggtgcgtatgcatgtacatgcatgcatctcgatcctaggccaatatataagtgcccttttactttgcggcgcgccaacaaattaagcgcttctgtgttcgacgaaacgtgaaccatgcgtcgtcgtgcgtggtcctaaggaacagtactcagtgcttttgcttggcggagccgtcaaatacctacgacgattccccctagctagctagctaggttaacc

SEQ ID NO: 46093 - DNA, 660 bp, Zea Mays
caacaaagaagccatcggaagaatagccaagtgggcttgcgagctaggagctcacgacatcgagtttcgacctcgcacggcaataaagactcaagcactagttgacttcgtcagagtggaccaagcaacaagtgccagataacctagagactgtggaagtatggcagacgtattttgatggctcgttaaaactgcaaggggcaggcgcagggatcctcttcattgcacctaaaggtgaacaactcaaatatgctcttcaattgttattcttagcatccaacaatgcagcagaatacgaagctttgattcatggactgaatattgtcgtatcactaggcattaagagactgatggtatacggagattcactggtggtcataagtcagataaataaggaatgggattgctcgaatgactctatgggcaaatattgcacagccgtctgaaagctggtggacaaattcgaagggctggaatttcatcatgtagagagagatcgcaacgcggctgcagatgcattgtcaaaactgggatccagtcgagcccaagtcccacctgggattttcgtccaagaagtgccacgcccgagtacttccttagaacgggcagaggaatgcaatgttctgagccagccagagtcagatgctgatgactggaggg

SEQ ID NO: 46094 - DNA, 463 bp, Zea Mays
atagaaatagggtacttattacaactcattgacaaaattgtcttaaacattattccatcaaaacacaacagttctcatgggtgatctcccataggaagttgaccggcgcatcgctagatctagaattcgtcaacgccttcctcaaagccttcttcttcacatccttctgaccaaaatttagcaagggtgatcacacttacggcgggagctcagcaagagggtggaaagatgcaaagcttagcaaggatggctaagaggttatgctgtcaacattttagttggtcaaacttttattagcaacacctatttactaagggtaaaaatccccaaaacccaactaataagtaacattaatcatcatcttgaaccacttaagcaaaaacagttaagtgaaccacttgaatccaaaaggaatagcaatttaatctccatcttcaagttcgattatcatgtgagggtccag

SEQ ID NO: 46095 - DNA, 1638 bp, Zea Mays
cgaacatctaaatgtgaagtccgttcaatactcaatgcactgcataagaagaggattcaaacctaaatccccccccccacaaaaaagatattgtagcatgaccttatctaaaatgaaagcattaattgcgaagtagataaagctgacatttaagcgaagcataacatgcagccgactaatgataccttaatagaaacggaataatacaagagatagttacctcgtcgttgcagtccttaagaagaggtattactcaacgtgtttcgaaaggcaagctgcaatgaaaatgggtgtagcggaggaacacattaaaccatcagaaagatttttttatttaatagtgaaacccagaagactgacaagatcactcgtaggcgctttgtaatgtacgaaaaaatttcttagactccgagaaagcaaaacgtaaacctttgagtatacagtaacatctggaaaattgtacaggcgatagacgcaaatttataaacgatttgtgatggaagtcaatgattgtttagcgaaaactcaaactctaaaatagagatagcgaataaactgtaaatcaaagtgtggccggtcataaaaacaggaaccctaaaacgaaggaggcgtcaaaaaaaatggcggtgcgcggctggtcaaaaaacaggaaccctaaaacgaaggagccgtcaaaaaaatggcgatgaaccggatcagcagctatgtctagtgcacaacagagaagggagcgtggatgagaagtacctgtaggtcgtggcggcacaggacgctaggacgaacaggcggcggagcgggcggtgctgtccatgtcgtccaggcaaaggttgagcgcggtggactggtgggcaaaaaacaatgaatacggatgaagtttctagagccgtatggaatgggaaaaggcaccagagctccgacggcttgtagcatttgggcagacagggaccgtagatgaaaaatcggacggtgcataaataaagacatgacgtggatagcctaatcacacccgttttgaaccgtgtttgtaaataaggaaatatccggtgatgtgccacgcgaacaaggagggcaggcggcagcaagtgagcgactgagcgttagctctgaagacacagtacgttcctaaaaaactagattatttttcatcacgtttgttctctaacaaattagttaaaccgcacattctatgtcaatccaaagactaaagtaggcttgatattcctaattcttagacatcataaacatatcccttttcccttcggtggcggaggacagaaaagatttaaggtatgacgaaacacagcaaagattttcgcttagtggtatagataggagacccattgcgcagccattaccatcatggactcgtcgaagatgccatgactctggctcagccctcgcgatgaacgagcgaccttggtattgtgggagactgaaagataactgagcgatggacaccggagccataaagacgatttggtgaaatcgtcctagtctcatctcataaaccatactcatgtggttggctccaagtccagctagctagtaagaaggctatagtcaactgttaacatgccaagcaaaggccaaaggcctgttcgtaaagtacatgtgtttctgtttttcctccagctgccg

SEQ ID NO: 46096 - DNA, 734 bp, Zea Mays
ctagggtagggtacttaaccctaaactgagcttagggtgtcaataaagcccaaatgagttaaattctcaaaacttattagaaatggtcatgtgacatcaactctaacaggatttgatagcatccaaaccatagaagtgccagaaaccctaaatagacctttggaaaacccttgactgaaaccctagggggttatatgcaaatgtgcacacttttggacctaagtgcaaaaaccatggagttagggtaccttaagtcatatagttcacatatttgaagatttgcaaaagaaaccatgagttttgggcttatttgcaaaaatgccaccctagtgctccaatggttaagtctgaaatacatttgaacaaggctgactttggagccctacatctcaggattcttgaagtttttgctcaaagtcaatatagcaaagttgtatagctatcataggagaacaagtttgattagtgactgagcactagtgctgaatagaacaaaattggagaaaaatgagcccaaagttgggctgtcagtcagcctatagcctgaattctgattatcagtgacataggataaactttgggagccctttcgaagataatctagtgggtgttttagcatggttaccatagcaagattgtagctggattatagggctagaactttgttacagagagattaatacattctcacgcagagatccaagatcttggcgtcacaagttgctcggtcaggc

SEQ ID NO: 46097 - DNA, 592 bp, Zea Mays
gaagaatgctgaagatgacagttgccagatagccctcggtaaccgtctgtcggaggttatcaaactgagaaatgaagccttagagaaagataaaattctgctttcattggtggatagagtaaagaaaaacgaagcaaaatttaatgctcaatctgaagcccataaagccgaagttgagagccttcagaaaaaacatgctgaagctagtgaaaattttgcatttgcaaaagcaaatcaagaaataagtgaatggtcgaatgctaggctggaaaagaatgttgaggagcttcgtgaatccaaggaaagatgctttgagaaatccttggattgcgtaagaaaactgaaagtcagctttgccaaggtgggtgcataatcttcggaagaaaatttcattcgaggcgaccccgagggagtcatcgattggataggtgaagaggccgaagcttttgaagagatcctcagtgatcatggggatatctgtgcctttgccggcgctcgaggggttgcagcaattctagagaaggttggttgtgaccatgttaaagctgtggcctaggccgaagccgtcttctccacaaacgacacaaaggac

SEQ ID NO: 46098 - DNA, 277 bp, Zea Mays
aattgcttttgactttgcgttttatttctgtgactttgaacttatttatgttttgtatcgcagctgagctatctcctcccccggagcctttcgagccaacagccgacccagaagcaaagagagaggaagaaatcactaaaatggccaaagctattttggataaagctatttctcaactgttaaacgaagctgcggaagtagttttaaaagaagaatagctgctattgtaaaaacatttggaatgtaatatttgctgaacaaagtgtgtagtattttt

SEQ ID NO: 46099 - DNA, 439 bp, Zea Mays
taatgtatcggtgagtttgaatgtcgtactttgtcgtgtcctatttgagcgtcaatgcccagctattagcttaggcagctctgtgaagcgtgttgttatgaagcctttttctggattcattgaagaattgaattgtaatatcctacttctgttgatgcagtatcagagaacagcggtatccccgtgaggtcagagtggatcgtggagtagtgactagtgaccaagattttttaagcatgaactatgagtataatattagtttttgtcttaggaacaatgttgattatgcgatagtatcaagtaggtatttccattgttttgaattttctggtgaacattcagttagcagtagcctggatccattcacgagccaaatcatcatgcttactttcatttgccccttctctataaagtctaaatgcaagtgcaagatttgagg

SEQ ID NO: 46100 - DNA, 284 bp, Zea Mays
gtggcctcgtatccatgaaatccttgaagctgcaatattggttgactccctgagcttcttgaggctacccatggcgtgtgttgttagcaatgttgcgacgttcttcctccatgtttcgttgcaagttctccatgtttctctgagaaatgttgtgaagttctgccaattcacaacacattgtccaaaacagccacatctctaacttggacaacttcatctttctcaagtgtaacttgagccaactcttcctacacctgggctaactctgcagcatgcgcttcctg

SEQ ID NO: 46101 - DNA, 839 bp, Zea Mays
cggggttgttcttaagctctagaggacagttgtgagcgcctccggccatcgttgcccaagctgcttgaggcgcgtgaaaatctgagatttgaggccttgtatgatcattctattaactcgttcgacttgtccgtttgtgagggggtgagccacaacagcccaatctacacagatgtggtattcgtcgcagaactctaggaacctgttttcggtgaactgtgtaccattgtccattatgatcaagttggatactccaaaatggtgaatgatgtcagtgataaattttacgacttgttcgcaggtgatctttatgagggtccacgctccgatccacatagagaatttgtcgatcgtggccaagatgtgagtgtagccccgagtgcccttttgaggggtccgactagatcaagtctcgagacgacaaactgccaggtgacaaggatggtttggagtgcctgcacaggcagatgggtttgccacatgtagtactgacatccttcacaggttcttaccacctgatgtgcatctgacactgcggtgggccaatagaaaccttgtcgaaaggcattccccatgaggcttctcggggaagcatggtgcccatagttcccgccatgaatatcttctaggggctgctttcactgctcgattttgatgcacagctgccttattccgttgtggcccttttgtagaggtctacctcgatcacaatgaaggactaggtccgccgatgaagcctttgtggttttgttttgtcgcgggatagcaaaccattagtccaaaagtcacaatatggtgttctccagttggccacatggttagttgtggggtcagtttcc

SEQ ID NO: 46102 - DNA, 690 bp, Zea Mays
gtcaaggctggatgccagtatacttaagaaagaattggtgacctggcccccaggaggtagtctcgactaggacctggacctgcacatagccttggctaggaagctttagtagtgcacccataggacccactaactggtaacttttatcctttgattcacgcaataggacatgcaggacttagaccgagaagccaatccgtgtgtctggaccccctggatcacagttccaaatactagggcacccgtcgcagagtggtggagcatgtaggcttagggtacgggaccaggctaagcggctacatagctccggaccactccaggggacatgtgttcgttctctagtactagaccccaggttgctagacccatagggctatagttccaaatactagggtacccgtcacagagtggtggagcgtgtaggcttagggtacggaaccaagctaaacggctacatagctctggaccaccccaggagacaagtactcgttctctagaactggcccccaggctgctaaacccccgctactaagggatcccaacctgcaagcctgtctactcaattcggatgtcattataccagcaagggtgggaactgtaagggtgggttagataaaaatgatgctcgtaaattgaagcaaaaataagaccatcacaaacacaaatctaggggtgaatcttttctttata

SEQ ID NO: 46103 - DNA, 576 bp, Zea Mays
acatattcgctcagaaagaactcaacctaagacagagaagatggcttgagttgattaaggactatgacatggaaatacaatatcaccccgaaaaagcaaatgtagtagctgatgctttgagccgtaagggtcaagtgaacaacatcactactcatttgatgtcacaagaattgtgttgggaaatggaacaactcaaccttagtttgctcaataatgtagaagcaacagttgtggaagttgaatctactttggaagaagagattcgtaaaggacaagagtctgatgagaaaatcaaagaaattaaagctttgattagtttgggtaaagccccaaatttcacggaagatgatcaaggcacaatatggttcaagaagagaatctgtgtacccgaaatcgagcacttgcgccaacttattttgaaagaagctcatgattcagcttactctattcaccctggaagtacaaagatgtaccaggattttaaggaaaagtattggtggtacggtttgaaaagagatgttgctactcatgttgcattatgtgatgtgtgtcagcgagttaaagctgaacaccaaa

SEQ ID NO: 46104 - DNA, 648 bp, Zea Mays
gatgaatgtcgtagagtgatggtcggcctccttcatagcgatctgatggtagcctgagtatgcatctaggaaagagaggagttcacacccagcggtggaatctactactcgaccgatacgtgggagaggaaaaggatcctttgggcatgccttgttcagccccgtgtaatcaacgcatgtcctccagctcccattcttcttttttatgagaacggggttcgtaacccatactaggtggttaatctctttcacaaacccaaccactaagagttttgtgatttcctcgccaatgtccttgcgcttctcctcatcaaaacgatggagtttagggtttagtgactggtcttgccgtaggtcagatattcagggagtgattgacaatctccctcgagattcgtagcatgtcagcatgcttctaggcgagacgtcatggttgacccgaagaaaattgatgagtgtgttttcttgtttatcagagagcaccgccctaacctacacatactttgaggtgttggtgtcatcgaccagaatgttttttcgtgtcttgtgctgacttgaacatgccagaaatggctttggggcgttagacctatcttgtaggttgatgcctctctgtagttcagctaattcccttatggcgacctacgc

SEQ ID NO: 46105 - DNA, 720 bp, Zea Mays
atcttacatcaactgtgtcgtggtagtcaatcattaaatcttcttggaccgcactttactttggagagtttaacagggttggtgacatagctggtgtggccggtggaactgttctctcgtaacattctgtcggttgctcgttctcctcttgtactagatgctcagctgaaccagtgcatgtgtcctcctgcgactcaactgatgcagcctgatgtaatgcttcttcggccgatgctggttcttctactatctcaggctgatcagatggtgcatctaccgcttcttccgtaggttgatgagatggtgcaacttcttattctactctaggctgtggtgtttgagctgaatctacagcctaatgtgccacttgttcaatagacacatcatctactgttgtcactggctgatctcctggtgcagcctggacttcaactagtggctataatgtttcacctatatctcctgttgtatgtacatgttattcttctgttgtatccactggtagagcctagtctgctgcctgtcttctgctacatctgttgctgctgtctgttccctacatgacaactgtggctatgaaattcccttgcttttcttagcacctctggtgtcacctccttcagtgggttcgtaaaattctaggattgtcggttgatctggttcttgtggaggtggcggttatgcctgcgacctaggtgatggcagtagcggtgatcatgt

SEQ ID NO: 46106 - DNA, 338 bp, Zea Mays
gcgacgatggtgaacttgaggttcccttgagctgtaggcagtggtccaacgatgtccagtccccaacgttggagtggccatgtgtgggcgatgagcttggtgaattgcgaagggttgcctcagcgagcagagaacttttggcatgcttcgcatgacctggtgactcggttggcggtgcaaactatcgcgggccagtaaaatccctgacgaatcaccttggctgcaagggccctaggtcctaagtgtgagccgcaggttccactgtggacttcgtggaggatttctatgcctttggtttcggttatgcatatcagcataggctagctgatgcccttttt

SEQ ID NO: 46107 - DNA, 621 bp, Zea Mays
gttaaatttgaattaaacaagttactagtattatttttatactagaaaacattttctacattattttatccattttagtcacctcccgggctgcaggcacaatttctgtgaagcttagggttgtttttacaaagaaatgggcctttctgtaacgattcttgaatgggacaggagcgcgggttgattatttaagaaacagaggactctatagcaaaaagacgcggccgaaggggtatctttaagtgtcggccgcacgatcagatctgagcgatccagattagatcgagtcttaagtgaatcgttacacacattagccgttgttctcgagatctgcagaccagatttaaataaacgatggttgagcgtaatccttcgatctagatcggacgggtctggccaaccctcccaaccggtatgagtctgaactaatcccagccactggcacacgatcggacggtgctccattgtcttcactactcgactggccaggacgaaggtgccgaaactctcacccgacggagaatcacaggcgaggccctcgttatgtgccccgatgcccgattcccaataccgaatggtcccaaatgaagcttaagctaccgccaattgctttaatgagat

SEQ ID NO: 46108 - DNA, 471 bp, Zea Mays
tgccattggttctgtttatcccgactactgctacccgctgcagggacggggaaaaaagaggaaaactgctgcttcggccaagactgctacttcggccattccagatgagcctgcaccgaagagcaaaaagttgaaagtccttacccaccggccacgttatattgaaccggctgtggtgcctgagtttggcggggagacttcttcagctgctgattcaaaggagcccattgctcctacgcagaaggccgaagaaccggccataatgccgaaggtaccctcaaccgagctagctgagtcaaagactgataaaggtaaggccgaagagccaaaaatcgaaggaacaaaaacgttagaaattttaagcccttcggtagaagtaacagtgccgaaggcacaaaaaagtcttgcggcaactccaaaaagaagaaggatggcaaatgtacaagacgtgctagaaacagtaaaggcttt

SEQ ID NO: 46109 - DNA, 662 bp, Zea Mays
gttgtcttagggcatcattcggtttaaaggacgaatatggcttggagggaacaagaccatacaacaactgatcatgtttgaattacatgaaagcgccgttggtggccactctggatttccagtcacttaccgttgaattaaatcgaatttcgtttggccgggtatgaagctacagatccatgattttgttcgaacttgtcagatctgtcaataggcaaaacctgaaagggtaaaatatccaggactgttgttacctctaccaatcccagaaaatgcctggcaggtagtaagtatggactttatatcagggctccctcctcgccaaggcaattacatactcgttgtggtcgacaaattctcaaaatatgcacattttataccattgacacatcatttcatcgctctgatagtggctaagatgtatttgtctcaggtgtacaaactccatggacttcctaatgctatcatatcagatcgtgacccaatcttcactagcaatctatggaaggagctattcagactttcaggcactaaattatgcttgaatagttcctaccacccataatctgacgggcaaaccgagagagtaaatcaatgcatagagacctatttacgttgttttgtgcaatcttgtcctcagcagtggcccagttggttgtcgc

SEQ ID NO: 46110 - DNA, 1151 bp, Zea Mays
gcaaaaattccaaacaagttgtattgttttaagtgtttttgcaaatagcaccctggttaaggaacttaaccctaaaatagaggttaaaggggtaaaacttaacctaagatgagaaaacctaaaggcttaggggtaagagtcacaaaatatccctaaaaacaaagatgaatcacctttatacccctaagataccagaaaccctaattggaactctggaaaaccctaaaaccaaaccctaggggcttatgtgcaaaattaatccattttgggactaaagtgcaaaaaccaagtcaaataagattcttaagtcccttggttcacaaatgtgtggacttgaaagccaaatgttgagttttggactcaaatgcaaaaaggaccccaattgagatttctctaagtctgaatttcagtttagttggttcaactttggagccctgtatcttttaaaatatagggattttgcccaaggtgaccacaacaagtttgtagaccaactaatggagaacaactttgcttaagaatgtgagctcagttgttaagaagaatttagagataattaagcctgaagtttggctgtcaggttgattaagtctgaaaatcagactgacagtggcattggatcatctttggcaacagtttatgactaatctagtaagaatttgcccatgaatgctgtaacaaagatgaagatggtataatggacaacaactttgctgcagaactttaagtatgttaccatagagaattgtgagcaaattgggcctaaatactggctgtcagacactctgaataggtattctccatggtacagtgcactgattaggacgacagcgcgggcagctcgacgccggtgacccctcgccgtgattcacgccaccgctgtaggattcacgtcgccgatgacccgataaggccgccaggtaaaagccatcccctggggataactccggtgactcaccgtgactgcccttctgctttgcggctgtagccgataagctcaccgtcgaccgccgcctcccggccgtgcgccgcgtggctcaacccttccaccgcgtcgctgtaactcgctactgctgtcaaatcaacgccggtgaggttgccacggcgtaggacactaattcgcgtgcgccagtgttcttctccacctccga

SEQ ID NO: 46111 - DNA, 523 bp, Zea Mays
ccgtcgtacccgctcgtgtcacggtcactctgtataggctgccagagttagccccccacaaacatgcgccacgtgcctcgatgctttaaccatgccatcgtgagtcatcgtagcccatccggtgatcgccggtgagcttaccacggtaaatgccaccaatcgcttgcgccagtgcacctcttcctctctgaccgctaccgtgcgagctcaaattcatgagccaccgctcaagggccctataaattgagcaaaccctcggcttcgctaggtattcaagcacccagcacacccactcgtgcctccaattgttcacctgagcccccgaattgctcactttccccaaatcgggtttccaccaccgtaaaaaggtcctcgtcatggctagctcgtttcaagtccaatcttgtcctctgctctcttatttcagcaccctttcatgcccctgatgctcctcgactcgtttgattaagctagactgccctagatcgccgggaacacttctgctcatccgttatttgcactg

SEQ ID NO: 46112 - DNA, 569 bp, Zea Mays
catatatgtgtagtttggtatggccatgaatttggtgtagcatcgcctttcgagaatgacgttgtaggacccccgaaagtccaccacctcgaactgaagccgctcggtgcaaaagttggaggggtcaccaaatgtgatgcatatagtgatccacctgagcgggtaggcctggtggccaaagatgatgtcgtgaaatggcaccgagttgggtcgtagtgaggagtgtgtgatccctaaatcatcgaaggtctcaacatacatgatgttgaggtcgcttcccccgtccatgagtaccttggagaggcacttcgagcccatgattggctcgaccatgagggggtaggtcccaggtgtaggatcctgtctcggtggttatggcagttgaagacaattaggaactctaaccactagagataccatgggatggtaggctctgcctcgtgcacctcgtggtgggccaccttgaggcagcgcttgttgccatacgcttcagtccggccgaagatcatggggcaccccgtcgttttggggcaatccacacgggggcctcctgttctgttggcttggcg

SEQ ID NO: 46113 - DNA, 429 bp, Zea Mays
gggattctgttctactggttctgatgaggacgaggtccccctcctcaaactctttgggagtgactgctttgtctcgcgaggccttcgtttgtgcttgatatttgttcaatgcttcgagggcatcgacacaatccccatcaaggagatcttttgttgttagtttgtcaatgtctgggatggccttggggtttgtttggggcgagccatgactgagttcgtgtagagtcatggcctctgattcgtacatcagtttgaatggagtgaacccggtggcacgggactcagttgtgttaagtgcccagatggcttcaggtaattgttcggtccacttgcccttcaggtaatcttttttattgcagtgaagattttacagttggcgcgctctactaccccattaggttatgggtggtagactgacgcgaagactgc

SEQ ID NO: 46114 - DNA, 273 bp, Zea Mays
gccccctccactttaggaaccatagtgatataagcactattaagtttgtacaaattcaagaagtttctattccataaagctgccacaacattcatcacctcttttttaatgatattccaacaaactttatggaatctcccagtgaaaccatcgagacctggagccttgtcagaaggtatggtcttgacagtttcccatatttccagttcagaaacaggcagctcaagatcagcaaggtcatacatcggtagtccaagagcttcgaggtcgatg

SEQ ID NO: 46115 - DNA, 284 bp, Zea Mays
aaggcaaaccatgcatgcaacaaaggtggtggtctgaaatgcaggcacacaaccaaagcaaggcaagcaaaaagtgcaactgacgacaaggcaggcaggcaggcgctttacggtggtgcaatcacagtcatcaactttattaggcataggcaacaccaatctgtatctactgcgacgacaatcatcagcgcaccagtctggcatcaggcacgtactactggcatagcacgaagtttggagctgaacgtgtccgaaacagggtttaatttaattaagcatttttt

SEQ ID NO: 46116 - DNA, 508 bp, Zea Mays
gggtgctccgaccatcggtatggggcgggaggaccggtggtcgccaccagtatttggcgatcattgagcttttgttgtctcttgttctcctgtgatccatgtccgccgaagatgacgttgacctctctgtcgacacgcgggaaggctccacctcctccctcctcctgttgctaaggttgtcgcggttctcctagtcctccccgcggcggaggaggaggtagaggttggaagggttggccgtgcccgacggagtgcttgaagtctctgtagttccgaagggtgtggcgcatgtccttgtggtacgggcactgagtgtcgaggatgtcgtccaacatgcgtttgcctccacgaggtcctccccgggcgcgagaagcaggtggtccggcggcgtggacttcttcgcgaggtctcttctcctaacgcttgtcgggctgctgattcgtgtcgcgtcgcggtgccgctggtgctggttttactcctccaatgaggtcctgagctcgctcgtcgg

SEQ ID NO: 46117 - DNA, 365 bp, Zea Mays
caaacttgtacaacaacaataggagtaccacgttgattaagccacttagccctagtagcatttggaactaggtgaaaaagttatccaaagtggggctgatagtttttttcagttttcagaccgggaacaaatggttaagtctgaattgtagtgtttgtgctgtttttggagctcattgtggaaaatttaaggagctttgggctgagacgtctatagaggagttaaagaccataagttagtgtacaaatttatttaaggggaatgggtgtgatcctacacaagatgtggagaaaatgttgctcaaaattggactgtcaagttatttgggctgaattttgttctgtctcggaaatctgaatttcagt

SEQ ID NO: 46118 - DNA, 865 bp, Zea Mays
acttctagtgtggataagcacaaataattccaacactgtgatattttcagtagggagctagacctcaagaccctttgttgtccatcccaacttaactcagcttgtgcacataagtgggggacaacggggagagaagatctttgttgcacccaaaactgatccatgcttcagttgtctgaaccacacacaccacaacccctaaaattatcgaaatcctggatattttgaggcctccaaaccttatccatgcacttcatccatatctctagttatacacacaagtgcaaccatagggaggggagtttcttcatcagttactaaccaaacattgaatcagatgaacacatatgctactactccatttcactcattcctgttggagccctgtttatctcataaatccttttggcagcagaccaatcttcattaacaaaacttattccccaaccatagctcaaccaactggtacagcaacccaaggttgaaaatatcatagaaaaagttattgtaccccaaagttgagcaaaaattactgaaacacacaatttcagttaactgaacaaccctttactgattctaacaagggtttttgcagcaccattttctcccaattatatacagtatcagtaccaattctaatttgaaaagggaacttgtttactgattctgacaagggaacttgtttactctaacacccctggtgttacgagaactaaaacttcggcatgacatcatatgcattgacatttcattatgtatgatacacctagagtgcatccactaagcgaaaatttcaaaacaaacatgtgtgatgatctgagttggtcaaagaggcccttgatcctatgttagagtatctccccag

SEQ ID NO: 46119 - DNA, 589 bp, Zea Mays
catcgatcttcctggcatttggagcagaggcagtcctaccgacaaaattggagtacggctccccatgaaccgaggcctacgaagacgagggagcgacgatggatgcgtagctctcagtcgacctgctcaatgaagtgcgagatgaggttgtgatacgctctgcgaagtacctacaagatatgcgccgctacaatgagaacctagttaggggcaggtcacttaacatcggcgatttagttttaagaagggtgatggccaccaaggacaagctcaaactatcgccgccttgggagggtcccttcatcatcgcccaaactctacgcctaggggcttaccgactcaaggacaacgacgacaacctcttgagagacgcttggaacattgaacatttgaggaagttttatccctaggcaaacttcgcccgcctttggcatacaagcagcgcgtcccgaccatgtcagcacaccctactcaggggctaggatgtgggcacccaccgactggcacaggaaacagaaaagaaataatgcaatagttgaaccaaaaagttaacgacaagtgtcttacaagcaaataaaaatagtccagg

SEQ ID NO: 46120 - DNA, 735 bp, Zea Mays
acgcatcaatttgacaagaacacactgagaacggcctgtccacgtgcacggcggaaaccgcggtgtcgatcccgtgttctcaattatccatgctcggatcggctaaacggccactacgaggagcttcacgaacacatagagctgctaaaacaaggcttgaatcggacagggacttaccagagagggctggccacggagcgcagggctttacgttcgtcggagacagagaaagggggaaatcggtgtcgcgacggctcgggttgaaattggggttggggattgaggctacacggccgtaagagactgtagtttcaccgtgcaccatcaatttgggaagagggggcagaggcagcgcgaatttggacttcttctgagcttcactggtggagatgaaaacacctcgtcgtggctccttgctcaatttataggcacgacggcccaacagatgacccccggccacggatagcagcgcaagcgcatgcctaccacgtcggaaagagatacagtgagggagatggaggcatgggcgacaccgtggcaaaattcactggtcacggtggccgctagtgaagactccggctgggctagggcggtggcgccacgtatgggttatccctccctgacgttatccattccctactgcgcacgaacccggatggcggcggcacaaattttggcgcaaagaggtcgccggcggtgagatttttctgccgcggtgatctgatccccaattta

SEQ ID NO: 46121 - DNA, 497 bp, Zea Mays
gtgcgtgcaccagcatcgggttgggggcgatctacaccggcgaattctacaccggagcttcaccaccgcctcggatccgccgcgcaccgtggtcacgtctacgcgatccagaaacgcaggtgagaactccactcctaccttcaccatgtcggtctcgtggtgtagagcggtccaattttgggtatggggtagtgattagccggattgcgtgccgccgacgagctatccgccgcggcaccagtgcgccaccgccgccgtgctcactgtatattggtatgcgcgatctcggccgtcgatccccggttggatggtcaggattagaaaccaaatgacgtttcggccatggcgtatagagatcgttggatgagaatccagtggcggggaatgggtccacggatcattagatctagaccgtgggatctaaatccggtggtcatcgtggcgtaccggttcggcgcacatgggatctaatcctgtgcgcccatctttgaacgaat

SEQ ID NO: 46122 - DNA, 729 bp, Zea Mays
ttgagaacaaaagtcccactaagtcttttatcttaaagatcatgcctaaatcatatggtgcattcaaaaaagggaaaaaatgttgaaaccctagaacaaccctaattgagccacttaagtagaaaggaagaaaaggggtaaaaagaccatgaaaaacatggaatcatggcttaggccaattataaaagttgaaacacactaactaagctacaataaaggttataaaagtttggccaaaatagtttgttaaaaacctcaaacaagccattcaattggaggcttcctagagaaatctgaaattcagatttctgaaattcagcctctaactcaaaaccgagcgtgttcaccttaatccttatctcaaaaccccaagctcccagtcacaaaaatgtgctaaactaacgcatctaccacatatctgaagatggcattgggattcagaccctagacacgacaaaaccgaagatttgcctcgggctcgggctgagagacagacccgacttgagagctccatatctttgaaaccagtaggccaaatcctatgattcccacaaagatcggtagcttatagggagaagaagaggttttgtgcactgaccaaggcaagcgcaggctcggatgagtgacaacacatgccagaactcgggcagaatgaacgcgcacacgtgtttgaccctggtcggcacgtcggcgttcgcccaacccgcgcgcgcgcttgccccattgccc

SEQ ID NO: 46123 - DNA, 582 bp, Zea Mays
tcagagatggatcaacttcagggtcgtatggctccggagggggagaaagctcagctgtacaacaatacaaatgtctgttactaccgaagctaaaataattcacgaagctaaatcatgaaagatatacctataagtctagcacgttcagcagcctcttcagttctttgcgccccttccaaggcgtcatgagattctttctctttcttcctaatagcttcatcggctatctctcgaccacccttcatccatacatcgaaataaaattttccacctagtgcagtggctttgggcgaagggtttctaatatcgtcgactgagagcaaaaattctggctgagtcacagccttggcatgttcgcagctgaccttttccaggaccgacacggccccatgggcaccggcgaaggcatataaatcccctctgtcactaaaaatctcctcaaaagctttggtttcaccgttaatctaccagataaccccatcaagatcaccgcggataaaattctgctctaaggaaaatgcaccaactttagaaaagctattctttaaattcttagcacattctgtagaaacattgtagcac

SEQ ID NO: 46124 - DNA, 322 bp, Zea Mays
tggcggatgatgtaatcaatgctctcttttaaagcttcgggagcaggagtgtcaaccttttcaaacgaaatttgctcggtggccttttcttctgttgccttttcttcaaattccgcaggcttcgtctcagcaggcactaagagccccgcctcagtttcagccaaggttgttgtagcttcaacatctatttgcttagtatcagctctgggttgtgttttgtcaacttcggcaaccttccctttgggagcgagacctatggagtcggttgtttccagtacatctaatacatttaccatcctcctcctcctaggagttatggcag

SEQ ID NO: 46125 - DNA, 377 bp, Zea Mays
aggaattgagagaaaattgggctccaaacttgactgtcaggctgtctgaagaacactcgccatggtacagtactcggttgtggatcagatcggccgcggcagaaaaatcttcaccgccgacgaccctcaccgtgattcacgccaccgctgttggattcgcgtcgccgatgacccgataaggccgccaggtaaaagccaccccctggggataactctggtgactcaccgtggctgccccttctgctttgcggctggagcggattagctcgccggtgaaccaccgcctcccggccttgcgtcgcgtggctttgctttccaccgcgacgccgtgactcgctacggctgtccaatcgtcgccggtgagctcgccacgacgg

SEQ ID NO: 46126 - DNA, 648 bp, Zea Mays
gccatggagaccaagacacgttgttcttaggaaatcaactatcagacaagggcaaattgaagcgatgaaagacaaatattttcatgatgtgtccatagtgagtgctgggggagaagacaccattcccctcccagaaggtgatgaagtggtggtcttcaggagattcatgaaagttgggcttcgctttccgctccacaatatgctggttgaagttttaaagacatttgagatataccttcatcatcttacccccgaagctcttatcatagtggaggtttttatatgggccatgaggagtcaaggactggagccagatgcgagatgcttctacaatattcaggagctctcttatcagatgaaggcgaccggaaaggaacaatatcataacaactttggatgctacgacttcatgccttgctctgaggcaaattaccctgtgcccacatttcggaagaagtggctaggttcttggatgaaggaatggttttacgtgaagaacgacctgaatcagagggaagatgtgagaggtgttatccaacgtcctatatggtcacgcttcggcattagaaggccatccatcgcacttgggaatgaagtgcaggcgtgccaaattgctttcaacaccatatgcacctacattggcacgag

SEQ ID NO: 46127 - DNA, 751 bp, Zea Mays
ggggggtgggggtgggggaaggagcctagaacttaaattgatgctagtatgcgacctggcgaggacgaccgcggaggagaggatgttaccaatgggttggatgtagaggagggaatttgacggtaacctcaccagcgtccttgagatcgaggagcgttgcgggattggcctcgctgcgttggccggggagctaatcgcgtcccaagcgagctgttcccagtgcatttcatggcgagaaggcgcacccgccggcggtggggagctccgcctccccgtagtccgtagtcgtaccccagcgcggtcacccctcaccatatcgcctcacccggccggtacattaagcatcgcccagatcaacgtcggcacggtctagaactcgacgccgctgtagcacgcagcctccaactgcccggaggcttggagaagattgacattgatctccttcccaccaccactgcactctcgacggactgatgcttcctgctttctcgacgaaatgattcagagttgctgtagcgaaaggctgcaaaatattcctttcttctccatggaagaaaataaaggaagaccaaaccaaatgcattccctccacaacgcgcgttcgcttggctttggataaaaagaggacgactggatgaggacaacttttactgttatcccaaagaatgtaaagcagcgcagtttgctaggagatgtcatttccatggcgtactggccatcgaatcaacaaaaagcactattataagtatac

SEQ ID NO: 46128 - DNA, 658 bp, Zea Mays
tggtgtagggttcggctcggcctatgagaattcggcccaacaatgaatacggactggggtttgtcttcttcttctttttttcccttatccttgtatcaatcaaaattccaattctccctcaattatgcttttgttgcccctactggattagacttggacacaatttgaaattgaaccaaaattaaacggcccaaccacttaccaatttactcgttttcttaagagacgaccagttgaataagcacctttgtagctagactcctagtaaattggtagtggctcggttcaagaagtgtagaatcaaaacaagtcacaggtgcatcagggcctcatgctcgcaaccagaaccgataacaaccggtgacgtggtaacatatgtgctcgatactaatctaaggccccctttggaacacaggaaatatgaaggatttttgaaggattccttccctacaagaaaaattcctgtgtgagtctttggaacacaggattcaatcctatcaaatcctttgaaattcctatggattgctttcctccatacaaattttggaggaaaataacaagaggtccaacctcttggaaactttcctatgactcttatctctctattcaaattcctgcacagcatccaaatgccaggtgagaattttttgtgcattcc

SEQ ID NO: 46129 - DNA, 359 bp, Zea Mays
gacgatcaccaatggttctcacgttggaggcaacgcgacgtcagccatgggcatcacaaaggaagttcagcctcgtccctacaaaatacggcacgacggtgacatcatatctagcggggagccccaaaaatgcccatgcaccagcctccccacatttggctacgagggatgctcggacaaagcaagcgagggcgggtcacggattgtggtgaaatggcgaagggaaaccgagaaaacaggcgataggaggaagcagtttaaaaaccgatggccggacagaataggagagggcggctttgcggctcgctaggaaaaaaatggcggcctaagggagatggcgcctttgtgccataggagaa

SEQ ID NO: 46130 - DNA, 571 bp, Zea Mays
tttaaagtgcatatcagcgcttggccgatgtctgcacctccatagtgtcgaatccctttcctacacctctatttcgtcgaatccaactctgtcgtgtttcataatggcagaaatctccggccactgtagcccggccatcccatcctatcttcgcctagtccagctccacgggtagcttccccaaaggatagtgaagcttcctaaacacttagaccgaacatcacttcgccggagacacagaatcacctcaccggacttcttccttctgtcggttcccttggtccaggtaatctagccactcatttgtcgattccttgcacacacatgctccctgccactcattgaagctccctgtgcggtctaattgaactataccgtcgtggcgtggccggtacagtcatcgccgacgagctccgccgtctgagtcagtggccagaccaacttcggtcaccatcgatgccaagtcgtacctcgacgtgactgccagaggctccccattctcgatcgacccttcaccggagctctaccatcgccggtaagccgctctgccatctctttcgccactgttact

SEQ ID NO: 46131 - DNA, 329 bp, Zea Mays
tctatcggtgccaagtcctttctctaggttcatcaccacacgatccatcgcatctaatcctctaacttgcccttcacactagcaacccacccgatctatcgtagctaagtcatgttccttgatcttctccgccctaaccagataacataattccatgtctcatatacaataagctccttcatcacactcgtacccagaagacaagtttgctgaaatttgcaaggcccaagtacatacaacagacgatggaagttcaatcaaagtgacctgatcgagtacgtccaaaattgactggtgttatgttggatcataggtcaattcgattggtc

SEQ ID NO: 46132 - DNA, 374 bp, Zea Mays
gccttcttctagataatcatgttctatcaaagagcgtgtatgatgcacaaaaactgtttcgtgcactcaagatgacgtatgagcagatacatgcttgtctgaagggccgcgtcctatttaggaaagaatatgtggaggcaaagtactatccgaagtgtaaatggtataggttcatggaggtagactctggtgatggacagaagagacagtttgacttccccgtgacaatcttacgtcatcttccgttcataccgaggatctagcgtctatacataaccgagaaatccgcgaaacagataacatggaacagaaatagaaaactatacaatcctgacaaaatggtatacacatccgatggtgaaacatggacccac

SEQ ID NO: 46133 - DNA, 446 bp, Zea Mays
ttaaaactctactctgaactatggcctctaattcccaaattagttaaaaactatgcaagaaactatctacctgttgggggccttctactacggtagctcctaaaaacattatgttgccaattgtttctaagtctatttcaggtgctccaaagcaataatgaagttaaccttcgttcaagagctttgtttggacagcgcacatgcaatagcgaagctaagaagcttcgacgggaaaagacgatggtgcccctagaggattttgtagtttaaacgtataggaactgagggcatgtttgcaattttgtatgaagttgtatgccagattgccactataaatagaggtcaagagccatgcaatcagggacacgttgagctctcgtctctccatgataacgctcagcctatgaaacctggacattatttcaccttagaactgctctctaagt

SEQ ID NO: 46134 - DNA, 831 bp, Zea Mays
gaaaactttgtgttcggttcctctattcagtctgttctttagtgacaactagaagaaaactttgtgtttcggttgacattttgacttccacaaccacgcataggcagggtgaactgacctgctcccagccatgtgtttatatgcctttcgaactgagtatagatggaccccaggtgtacaaccatttatcatgctggtcatttgcccctgtagagactgaatcatgagctgatattactcaaaagctaccaaggacattggtgtgacatatcttgagagtgtttcaatagcttttgcttgccatattgtgacgatagacaattgcagagattccattatcctaccgatcaagccatagttgcatggtccgtccatcctcaatgaccaccctcgataattccttataagtactcgaagtctttagcatatctctccaccaaaaggatccaacctttttatgagggctatggtgccatccctataatgactgctccagacaatgttgacctagggtatattgagtctgttaaaaacattatgcaggttcttcattagtagcgcttaattttgggttgtaaggtcatggacgcccaagcccccttgattctttggtttacacgccagtttccaagctgcctttggtggcttttcgcatttatgtctgcccctctccataagcagtacatgtcttcgatatttatcaatttgctttattaccgagctaggaatctttaagtgcacatataataggtgggcaatgatgaaaagactgcattaaccatctgtagtcatccaactaatgacaaaatctagaaagttgatgacaacctc

SEQ ID NO: 46135 - DNA, 1472 bp, Zea Mays
caattatataggatgtgatgataaaaacaatagtattacacaaacaagtccatcattgcatagcataagatatgaaatgttactactggctattacaataatgtcatcacatcacatcattaaaaagtttgtgggctctaagccatcaccacatgcatcacaagtcagacgaataataattattacaatccaggtgttcattacataaattaaaggtgctgccaagatgagaatccttctcccccctttttggtacaagaaccaaaaaaggagagagccaccaagccatagatcaccactgaggaggaggatgcggatcaaagaattgatgcaccaggtgagatgcaaagtgttcttccccagactgagctaggggaggatagcttcctgaaggatcctggggcggaggatgagaagaggattgacccggatccccctggtggggaagcggggcaaactgctcacgatcatcaaagtattcttcattttcttcttcatcttctggagacatgaaaggcaccccatatgcctgctagtgccactcattgatttctagaggaggcggatggagaggcacatcaggcgaacggggaccaaatggcatacccatagaggaagcttgacgacgtagattgtcgtcagtctcccgctgccgccgagccagctcatgtacatctgaagacatatttctgtatatggaaaagaatgctgcaatgccatgggccagacgagcacccatcccacgaccacgacctcgaccacgaccacgaccacgtggtgtgggagatccgcgaccaggagatggacacgagggtccggcagcagcaggtccacgggagctggagggcgctttcctcagacaccctgctggattgtttggatcaatccagaagggggtgtaagatagatgtcttgtgcctttctcatagcgaaattgagtgaccacttcaatcatcttcatgatgaagggggtgtggagacatcccttaagagggaagtaggcagcatgaataacttcttgccaaatcatgtcaaaaacgttgatgctttccgagctattgggcttcataaatgagagcaagactttgctctctcccaggatgttcatctgattaccccctttgggaatgagggtcattctacatagagaactaatatatctataaaacttatgcagatttatggactcccaaaatttaccagtctcagataaatgaagatcccgggcttcatccttggtgggttgccgaaagtcatgaattttgatcttgtcccaagaaatgtcttcatcagagaatcgaagaatgtgagcaaacctccggtagctcaccttgtaccagctaccttcgatatagaaatttagataaggaaagttatagggactttcctcatcggccagcttgatccaaagagtggaatagaactgagcaatgacctcatcattccaatcatattggaatgtcataatgttc

SEQ ID NO: 46136 - DNA, 400 bp, Zea Mays
cgacgcgttcacgaccgtcctctgcagcgacgattctcctcctactggcggcaatcgttccagcgccctgcatttcttgagtcattccttccgtcattaatcgccatcacagtttcagtttcctcattaaattcaagagagcgtcaattgtcatcaaatccgctttaatccagctaatctcctctcctccagtctctataaaacccaacaacccctttccctcgccaacaacagaaatatcacttcctgttcgtcttcccattacgccatcctctgctagtgcgaacccagtcgcgcgtctacttgcttcgttcatcggcgattgttccaagaggcacgctcgcccttcttctccatttccgtgccctggcgcccaccgtccatacctccatgctgtccc

SEQ ID NO: 46137 - DNA, 511 bp, Zea Mays
taaatatggggagaggtcaagggtcaaaggtgataataggcaaggatataaaggaagaggtaaatgtgcataaaaacaggaatctagatacaaccaagaatagagttaagataagtcttgcaagtggtaaagtataggatataaccacgggtgcgataagtaagagaccatgcttgaactaaggtgggagattggaggttttagataacgaacatagcgtaatcaccaaggtaagattgagagatcggaaaggtcaaggcaacgctaaacagaggcacaaccaaggatggagttgaagactcacaagcgatgaggaagaggatacgaccaagggaaaagtaggtaaagtacaacactcagattgagatggaaaagaggaggttttaaagggccagtataagataaacatcaaggtaagatatagaggtgataagggtaaatgtgataaggatgaaaagcataatccatggacagagtcaaggcaagactcaccaaatggtaaggtgaagaa

SEQ ID NO: 46138 - DNA, 935 bp, Zea Mays
cgaagcagaagcaaccagactggaagacatcaatgtactagaggaagaacagctaaatgtggtaattcagtcggccagatgccagcagaccctgaggcgctaccacgacaaagcagtgcgacatcgatccttcgcagtgggagacttggtcctccgttgagtgctgacgggggagggacgacacaaactgtcactaccatggaaaggaccattcatcatcgctgaggtcacacgaccgggatcctaccagctcactcagatggacggcaccgaagtggggaattcatgcaatattgagcacctcaggaaattctacccctaataaggcctcaaaactcttgaggacgagttgtactttgtaagcagaaggtttcaatatcgataaagcttccattttccaaggcatacaagttcttgatcaacaactgacttaggtcgggcttaactcgaaatcggcacgacactcgtacatgactcagggtgatcactataccctactaacggagcaatcagattgagtcggaaacgccttaagtcggtgcgacatgctcacgcttacacgactcattgtgatcactataccttgctaatggagcaatcgacttaagtcggaaacgccttaagtcagtgcgacatgctcacgcttacacgactcatgatcatcactataccctgctaacggagaaatcagcttaagtcggaaatgccttaagtcggtgcgatatgctcatgattacacgacttagggtgatcactgtaccctgctaacggagcaatcaacttaagtcgaaaatgccttacatcggtgcgacatgctcacgcttacacgacttagggtgatcactataccctgccatcagaggaatcggcttaagtcggtgcgacatgctcacacctgcgcgactcagggtgatcactatatcctattagcaaaa

SEQ ID NO: 46139 - DNA, 542 bp, Zea Mays
gcattattgtcttcatctcggtcatcctccgtgcagaggttgagatcaaggctgtccaacatcgtgacaggtgaagacgagaaagcttttggggaggagaaggagaaactaccgaacagaggaagaagaatagcaaggtatggaggtgtctattctccttttctattccgtttgttacaaggcagtctcgccaatatatgccattcgaatgggtcacacacataatcatgtattacagccaaatcggtccaacaagcctaaactcaagcttcaaatatccagcacgccagccaccagaactactctgcattctcctgttgttcttcagtcacaattgtgacaggaccccccatcgaagaaccatctgcccccaagatcgatactgcagaaaccatgccttcaggacattgaaatcctcccatgatgccatctctggtggtagcctagtccatttgactaaaatttgaacaatagcagaattgcccttcttaacaagttgacgctgcaatatctgcggtgatacaactgcatgctcttcgaag

SEQ ID NO: 46140 - DNA, 945 bp, Zea Mays
aaaaatatcccgatccactgaacctcgccgccgacgagccgtgcactcggattcacgccgcctcggtgattcgtgcctagagcagatggataacgaagaagggtaagaatcttggtgctcggattagctcgggcttgctcatcgtcgtgtcgtcgtacccacttggaccgtgactggttggaatcatcatcgccggtgttagccactcaacgatcgtatgccatgtgccttggtgtcttaccacgtcgcagtagcttgtaatacacacgtccggtgatcgccggtgagttcaccacggtgaaagccatcgattgcttgcgccagtgccccttttctctccggccgccaccgtgccacctcaaattcacgggccaccgctcaagggccctataaattaagcacatcctcagctctgctatgtaattatgcacccaacacacccactcgtgcctccaattactcaccagagcccccgaattgctcacttcccccaaatcgattttccgccgccgtaaggaaggtctcaccgtggccagtgcgctccaggtccgatcttgtcctctgccctcttgtttcagcacccttatgtgcccctgatgctcctcgactcgttcaattaggctagaccgtgctagatcgtcgagaacacctctgttcatccgtattacgcgctatcgtcgtgggcagggtgatttagaggttaactctagcaattaagtgaggggaaatggtcgtgtaaggttgaattcggtgtccagcaaaggggagggctagccgttgcttattctggctagtacaagctcgccagagctcggcctggcgccattcgccgtcgaggaccgcgggttgtaaagaattagaaagtggagggcctcggtgtaaatgtcagtgacccattgaaatagtgcgcggggttcttcgctagttattcaaacccctggggac

SEQ ID NO: 46141 - DNA, 929 bp, Zea Mays
cgtggccgtcagataagcatagcccagtaaaaatcttggcgtctgatccacttgtgctcggattgtggctaagttcgtcgtatccccagccgtcggtcgagcggataaatctcaccaccgtcgagctgccgccgttgcgcgccacgtgcctcaacgcgggacttcatcgcggtgactcactggatgcatgtcggcgatcaccggagccactgccacggtgaaagccactgttcccccgcactgagctcgcctcccctctccggccgccatcacccctcggtcgaatttatcaccgtcgctcgatgcgcctataaattgagtgcgccacaagctccgtagggcagtaagctatccagccaccacgaatcagcctcgaccattcgctagaatccacgaattttgaattcgccccaaatcaatctccgccgccgtgaagaacagctcgctgcggccagcttgattccggttagctcgcgtccctctgttgcttgttctagcatccgtaagcaccccgcgaacccctcgacccgttcaattgaactggaccaccacccatcgccgggaacatcttcatccatctgcaaccttcatggtcaccgtggccagcacaaccctattgatcattagtgaaattaagttgggggaaaggtttgggatgagtccaatgccgtgtctgtcgctcgggaaccctagtcgttgccctatccgaccgatccaggagctcgccggagttcggttgcgcgcgacgccgtcggggaccttcccctgcgaaggattagaaaccagagggcatttctgtaatctgtcagcgacatagtgtaatagtaatagaacccagttaaggttagccaaaaccccagggtccttttctgtaaagacgccggcgcgggcgcggaagcgcgcgtgattccgtgcggaactgggccgcc

SEQ ID NO: 46142 - DNA, 788 bp, Zea Mays
caacatcgacaacgatgatgatgtccctggtgccgccgccggtggtcagacaggcacaggctccacgagctcgacaccgaccgcggcgaccggcaccagttctagtaagcgtcctcccagatctaaagtttggcaagactttgatgaactgactcacctcgtcaatggtaagagggtaaggtatggcgtcatttgtaagtactgcaaggttactttaagtggtaaatctagttctggaactggtcacttgcttcgtcataattgcttagctaagagagaacaacaacgtgctggtatagttcaatccgtgcttaagtataattctgatggttccttgaaacattgggagtattctccttctgttgcacatactgaactctgtcggttgatagctaaagaggacctacctctatggtttgtagagtctgatgcatttcaagagtacattagtaatgcccataatcctaaatttgttaagtcttctagacaaaccactgctagagacatggtcaagctttacaatgatcgtgtagttaaactgattgaaacttttaaaaactctgtttcatctgttgctcttacatctgacatctggaatggtaaggctaaagaggactatttatctgtagaaaagatgaattttaaaaatgctgcatcacctttaatgctgcatcaaattttaaaaattgctagacacctgaacacttatgaaaatgatgaactattaagacaagttgtagttcctatgaaagataaatttctaaagtactagagaaaaatacccttgt

SEQ ID NO: 46143 - DNA, 449 bp, Zea Mays
gctgaacatcacacttcaattggtgtcccaaagtcgcagtagcttcttccattttgctgcaatcgtccctaggcactttgctatgctcaaccaacccagactttgaattacagccctcctgcacctcacagtcatgctgtccagatgtatgtttggcctgctcacctaagcctgcatcaagaacatcactaaggactgcatattttagtgaaacaacaggagattgttccatcacctcatcctcgagcaggtcatcctcatcaagatcatccagagcaccatcgtccatctagacatcctttcctacgtcccttctgttgctagcaaaggaaggtgcagcccaagaattgtcatttgtgtcttttgctttggagttattctcctccatagcggtgtcccttctatcggcattcccatgatccccctcattaccattctctgaagcgtcc

SEQ ID NO: 46144 - DNA, 743 bp, Zea Mays
cagagtaggactcagtaccagggcagagcccgagtcaactacgtcgacgctcaagaagcccagcaagccccgggagtagtgctcggtgagttccttgttgaatttactcccgctactgtgctttttgattcgggagcatcccattcttttatagccgctaagtttgtggaaaagcatggcatcccctctacacccctagctatccctttggtcactcgaaccccgggatcagacctcctatgccaactcaggtgctcccaagtcagaattcttttaagtggggtagtgttcctggcagacttagccatcttgccatcccaagggattgatgtgatcctaggaatggattggctaactaagcgcaaaggtatcatcagctgcgcaagtaagactgttcttctcaccgatcaccaaggaaaggcagtttcctgtcaagcccagccgcccgccaacgatccaatgatgtttaatctggcagcagaaaacatgtccgtaatcgaagagtttgaggatgtatttccggaagagttgcctggaatgccacccgaaagaggagtggagttctatatagatctcattcctggcactgcgcccatcgcaaagagaccataccgcatggcccccacagagttagcagaattaaaactccaaattgcagagctgcagcaaaaagggtacatacgtcccagttcgtctccctggggggcacccgtccttttcattaccaaaaaggatggaagtat

SEQ ID NO: 46145 - DNA, 583 bp, Zea Mays
cgtggtgagggagagggttgcccgggcgatggaccaagtaattgtgtgtttgagaccgacgtgtaggtttcctataacaggcgtggaaggatgaggaaatcaaagacttggatggcatggagggctgctggctgcgctcgatgatgtcagtgtcaaaacgagagtggaggagcagtcgtcatgggtaggggttcctgttggtgaacccagcgctgcaaagactttgcactgttttgctaacaaagttcatggtgatgtgcaagtgtaagggtgggggtcgaatacttttgtggatgttttgtcggcatgtgtactaacactgacttggtacctacatagcttccaatgattaggcagatgttgagagattttggtttcccagacaagcgaaatagtattgtggaggctaacgagtgtgttacaccactgtcctattggagcccgtcgccttgcagcgacatggagcttttcttcaaatcagagacatccgataacgaagagggtttggatttctttgcgaagatggacgatgatccctctatggaggacttggattttttgttgcgttagacattgcatctgt

SEQ ID NO: 46146 - DNA, 609 bp, Zea Mays
aaggggtggcaaaaccctctttcatactcaatattgtgttgtttcagacatcgaaactgaacttttagtgtttttctcaacctcgaatcaccataacttttgttctatatgttttcagttatgggtttgtatataaaactggtagagctatgaatagagaataattgtcgtgaagagagagtggtctgttactagagaaattggcagatcaaatgcattgaacagtgaggtgagaaaaaggagcagtaggctgatgctattgagatcaaggtggcatttggattctaaagaaaaatttccctctctgttgttcacttgtgagtatagatgaagataagggtgaagtacatagcttaagtgctaggagcttctctccaccgtaaatatccagtttgcactggcttgggagcagtgaactgtgggacatttattggttttgtttgctatctgcactagggggcaaaggaggtacttatgtgtatagatgagatgaatatgaagtacataaataaggtctggagacatccccctctgcatgacagaatatccagtccttgaatcaatttgagcatatcccctagtacagtgaatatcagttttgtttgctag

SEQ ID NO: 46147 - DNA, 516 bp, Zea Mays
aactgttgtacgcagtacttctaactgctcgtaagctctgtcactactttgacgaccacaaagtcatagtagtcaccgagtttccaataggggatattcttcacaaccaaaacaagccattggaagaatagccaagtgggcctgcgagctgggagttcacgacattgagtttcggcctcgcacaacaataaagactcaagcactagttgacttcgtatcagaatggaccgagcaacaagtaccagacaacccggaggctagagaagtatggcgaatgtatttcgatggctcactgaagctgcagggagcaggcgcaggaatcctcttcattgcccctggaggtgaacaacttaaatatgctcttcagttatcattcccagcatcaaataatgcagcagaatatgaggctctgatccatggattgaacattgtcgtatcactgggcattaagaggttgatggtatacggagattcactggtggtcataagtcagataaataaagactaggattgctc

SEQ ID NO: 46148 - DNA, 438 bp, Zea Mays
caagtgacgaagggctcatgactactggagaagccacgtcacatatgactgatccgagggaccgactgcacatcactacgaagacgtcagcaatagactcactataggagtcgaagcaacaggcgatgccatacctggagtacagctacacgtgaccctaggaatggcccaccacacttacccgcggatccaagctctctcgtagaatactagtcccattgtaaggtcctacccatgagatataaaagggcaaggcccccttcttcttccacacaagcacaccagttgtaactttatgctctagagcaatactacaattagcactacactgaactagggtgcaagcctgaacagtataaaccctatgtctcaattcccacgttcgagtctcagcgattcaccattcggagttagtccgcgctagcatccccaccaaac

SEQ ID NO: 46149 - DNA, 597 bp, Zea Mays
gcagaagttcagattagtctgttgcacagaaacacaaaagccattatttgctgcccaacaactgagaggccctgccagtacctggtgaggaaatttataacagttcaaccagccggatatcaggtcacttgggatgaatttaagctagcattccgtgaacactatgttccagagggagtgcttcacatgaaacaagaggagttcattcgactaaaacaagggggagatactgtaatgcagtatctcaacaagtttaaccatttatcccaatacgttattgaccaagtgaacactgacctaaagaaaaataattgcttcatgaggggactcaacgaccggctcaaacgggaaatggccacctgcctggatcttacttatagcagggctgtcagcacgacgctggcagtagaagccaagaacacaggccagggaaaatcaaagggatttggaggtgacaggtccaatcagggacctgagaagcgaaccaggttggtaatccgaccttttaatcagaatcattcttcgcctcgtccaccctcctatctgttcaaacaaccggatttcattcgtcctaccactgcccctacttctacaaat

SEQ ID NO: 46150 - DNA, 717 bp, Zea Mays
cggcgagccatcgtaccccaaggagaatttctccttggagaacttcgaggcctcgaaatcctcagatggagggctcggagggcgcttatgcttcgcctcagatgagcgacgcttcttcttgcctcctttgacttaggccattgttctcgagggcgatggggaaaagagagggaaagaagacaagttaacaagggcaagtgatgaaggcaactagaggcgagtgggctatttaaataagtcgagagaagatcgttcttttcccactcgttcgccaaacagtcacaatacttcaatagcggctcaagtctccaagaaatgggtcaggcgactggcgccgtttcgcataacacgacactggaaggaatcaaagtcaaaccactcagacaaggtgttacacctccctgtcgcattagtttactattttgggacaagacgatggacacctttcactggatagacacccatcgggtacacccattgggtgtaccatccggatttttcgagattttctaaagcggcacgacctgcaacatatacacaatgaatacacaacgacaaagggggagattggtcaaactgaaggaagtctagactccaccgagcacaagtccaatcaacagaagcattgaagtctttggccaagtgtcttccagccaggctccccctagtttgtgttcagccgaccaggctccaattcatcaaggggtccgatcgaag

SEQ ID NO: 46151 - DNA, 352 bp, Zea Mays
atcttaatcactttacttctcgtgacacaagtcaaggtgtcaagaatcttgataggatactccatataagttagatcatcttgaacactaagatcctccattagtagttgctcttcgggtaccctgaggcacttcttcagttgagacacgtggaagacatcatgtacatccgcaagatgatcgggtagttccagttgataggcaacttctcccactcactttagtatcaagaaaggtccaataaagcgaggggacaactttcctttaactttaaatcttcgcataccccggattggtgacaccttcagatacacgtaatcaccctccttaaactctaataacctcctccggg

SEQ ID NO: 46152 - DNA, 598 bp, Zea Mays
aggagtctcgatcttctcaagagcaatttgttccgccgctttttcttcaggcgcggtaggctccatcttggtgggcactaaaggcccagcttcggcttcagcttgagcttacgtagctccgacctctacttgtccagttttagcttcggcttgcgctttggcagtttcaacaattttctttgtaggagcagggctcaaggccttcgtagtctccagtacagcatccagaacattggccatcctcctccttttgggagtcgcggcagaagctttttgcacctttggtagttttgcctctgttggaggactcaaaatttctggtattttcattatttcttcaatctttgcctctctagccttatcaaccttagcttcgactgacttggctatgggtaccttcggcactatggtcgccacttcagcgctctgtataatcggagcagtttgtgttgcttcggctgttgaggaggaccctgtgccaaattcaggcactacgaccggttcaatataacgtggccggtgggttagaacgttcatctttttgcctttcggctcagctgcaatggccgaagcgacaatcttcctcttttttccttgc

SEQ ID NO: 46153 - DNA, 356 bp, Zea Mays
gttttaggctagctccaacaaagaactctaaatggttctgtacgctagatttagcgaaccgtgacctcctttctccgtccaacaaggagcgctaaagcgtccggtaaatttagaggatgtacttgcacactctaaaggaagcggatctccagcgttcgctaatttctctctctttgccgcgtcgaggtagaagcttctcgctgcgcttcatcttgttgctcgtcttcgtccaggagccacacgagatcgcttctcgagcaatcaggcagcaccgcgaaagccggacgaggccagcaggaaagcgacagccatggcggtgagcaaggttagcatctgggagccaagcgaggacggcg

SEQ ID NO: 46154 - DNA, 773 bp, Zea Mays
gtgggaatgaagatgtcgaagatcagccgtggaggctgagccatgttgtttttgggaaatcaactgtcaaacaaggacaaattgaaacgatgaaaggcaaatattttcatgctgtttccatagtgagggctgagggagaaagcattgttccccttcccgaagctaatgaggtagtggttttcaagagcttcatgaaagctgggcttcgctttccgttccacaagatgttggttgaggttttgaagacatttgagatattccttcatcaacttacccccgaagctcttatcaaagtgggggttttatatgggccatgaggagttagggactagagccggatgctaagtgcttctgcaacattcacgagttatcttaccagacgaacgcgatcggaaaagaacaatatcataacaacttcgactgttacatcttcgtgctccgctccgaggaaaattaccttgtgcctacatttcagaagaaggggtcgggctcctggatgaagcaatggttttacgtgaagaatgacttggatcagagggaggatgtgaggggcgtcattcaacgtcctatatggtcacgcttcggcattagaaggccatcaatcgcacttgggaatgaagtgcaagcatgccaaatggccttcaataccatatgcacctatattggcacgagagatttagttcaagagcatattgcttagaaagtttggcctcttgcaaatggatgggaaatgccgaaggaagctgccgctggctccagccaaagtggcttgg

SEQ ID NO: 46155 - DNA, 401 bp, Zea Mays
gtgcagccagtcttctgcatccatggggtcagcagaatgggcgaaggtaggagggtgccctctcatgaactcaccacacttatcccgtggcatctggggcatctgcgcttgcaattggggttggggttgctgttgagcctgctgcatggctgccagagtctgcccaatggcctgcactgcctgagtctgcatcaagaacatctgctccactaacatcgggggtggtggggaggctgcctctgttgttcctcctgctggtcatgctgctcttgttgagcacgcctgttgcatcggcgtctgttgtcagacatctgtggaagacattcatacatcagcattgatcttacaatccttcagcataagaaaagagaatacggaattcttcatgacactgagtgttg

SEQ ID NO: 46156 - DNA, 399 bp, Zea Mays
gtcccaggagagcaaaaggcaggagaagctcaccgaccggtaggtcctagtggcaacccatagtgccccgacgctgtatcgatggtcggagcactccatcacgttcaatcgagccaaccagtggcttaactttgatcacctcgataagtatcctctgcttgtcaaccctatgatctaagagagtcgggtcaagaaggttctagtggatggcaatagcagcatcaatgtcaccttcgccagaacactccaagccttggggatcctgactaccgacctcattgagatgtataccccattctttggcattgtaccgactaaaggagagtactcgctagagcacctcttcatgccattcaccttcgacgctctagaaaactaccgaaccgagttcctgcgctt

SEQ ID NO: 46157 - DNA, 667 bp, Zea Mays
ttatatctttatagcttagcttcgtaagtttttcagcttcggtactaacatatatttatgtttcgatgcagctgagctttctccctctcccgagccatatgatcttgaaattgacccatctatcaaggaggcgctcgatataattaagattgctaatgatgctattgacgaagctgtcgacaagctgctgaacaaagctaccgacaaagtcctaaaggaagaatgaagctttgtatttttgatagtttagtgtcctggtacataactcttggttttgtaagaaacacttataaacaatttgcatgtatgttgatgtaatatatttctttgtgaagcgtggaaccttcgtacatactgtttttaagccggtggcaaaaaaatacattccctttttttcacgcttcagaaagaaatcgcccttttttgctaaagcaactgtatgattcttgccatagacattgctcgacggggacttggtcgatcgctccgccactcaggcttgctcggcggggacttggtcagtcgctctatcttgtaggtttgcgaggtggggaccctggtcgtccgctccacctcaaagggttgctcgatagagggctcatcgatcgctctgcctcgcaggtttgctcggatgagggttggtcggtcactctgcctcagtggtttg

SEQ ID NO: 46158 - DNA, 491 bp, Zea Mays
gagctccttcctagtgcttcgcctggtggtccgcattgttatgcactccgccactgggttgatcggtcccgagattgttggatcagggtgctccaattagcttgccggcatgagcttcggcacctcgtgctcggccgtggacatgaggtgggtggtaggctcctaaccgtgcgatctgatatgggcggttgtgaatagaagcgttataccctttcatccaaattgtccgcggaccgtttatctctgatcccgcgattgatattacatacccgttcggattactgcatatctaatcgtagccactgattgacgatcggacggttcaggatgcttggtaccccttcgccgtgcacttctttcgaaagaacccctcggttttcttcaaaataacacgccgtccgctgcgggattagcttgagtctagagaagtttatacgctagcccctgtaaaactacagaatatggtgcgcagtccagagagtgataaaaat

SEQ ID NO: 46159 - DNA, 298 bp, Zea Mays
gtgcatgagttaacttatctttgagcacgctgaaagcatcctgttgagcagcagcccaagtgaaggttgtacccttcttagtgagttcatgcaatgggtctgcaatggtgctaaagtccttcacaaagtgacgataaaatccagcaagtcctagaaagcttcgcacttgggtgaccgttgtgggaaccgaccagctgtgaatggcttcaaccttggcttgatcgacttgaattccctatggtgtcacaacatagccaagaaaagagacttgatctgtgcaaaaggtgcacttctcaag

SEQ ID NO: 46160 - DNA, 320 bp, Zea Mays
ggcagaagctctttgtgccgatgttgaggtagtcgagcacgagggtgagtagccatggttgaggatgccatctttacgccatggtgatggtcgaggcgcgtcgagacagtccattgtataagggggtgatgttgaggtcaatgtagtcaaggccatcgaggatgtcgacgaaaatagcgacacagtcaaggcaggtcatcatggaggaagcatacaccggatttgctaggcctgagaacgtgtcctggagaacggcacgctacactgccaatataagacatgctagttagagagccccaacaatgtgtcaacatccgagc

SEQ ID NO: 46161 - DNA, 326 bp, Zea Mays
ataccccagggcgaatctggaatttgtagcagtagtagtcacgtacagacacacataaatggctaggagattctgcatatgcaaggattataaagtgagtgatactgaaaagatagttaataatgcgcaaatatatcaaattataaagaaacaactaacctgcatcttcatcatttgcattacttgccctatgtgtcgcacggtatgcatccacttcgtccatggatactccaacctttgagatatttgcatgccatccaagttcgcctctagggaagaacaatggatatgatagtgcatcgtagcatccatggtatgagcggatg

SEQ ID NO: 46162 - DNA, 281 bp, Zea Mays
agggcacgagcaaaaaacaccctaactgaacccactcggatgactcttctctcaccgtcgctctcattggggatgggacttagtacatattggactcacaatgtttgcctagtggcctgtatgtggagaggatgctaaggggaggggtgatggtgcgatgacacatatgaaggcacatatataggtgtggcggtgtaaaggggaggtagcatagtcgcggtcgtgacaaatcaatgatagtctatcgctccaaaccccccaccaaagggactagcaggtgg

SEQ ID NO: 46163 - DNA, 1122 bp, Zea Mays
atgaagtatagcgacattggttaagcaagtattgtgttgttgttgtgctgtcaatgctctttgtggagtttttgtcatttcttcgatgaactatgccgcgcagaattttattggcttcttgtcggctttattgctccattagttatgtagactttctcccttttgtggggtgcaaagaatgttagattacatgattatcttttcatgatggcaagaacggggtttaggaagattaggagttttgtttcaatagaactacttgttttgtggtgctgtgaggtgaggtgtttgatcttcttatatattcatctggtgtggatgtttcaccattgaattaaaatgaattgttgaagttggtaagggttgtgcttagtgcatattaccccttcataaaagagtgtcgttttaagacattgatgctgatgtatggctgcatccaaattcaatgttgtgaaatcgtagtgttgattgcatctatgacttgctttgagcttcattgcatgttgtttcatgcttgttgtcaggttgtgtagcttccttagaccattagtccgaggtagaagttcttgtgttgattaataccaataatggacccatgttttgaatggtgatgctatttggggtaccttggatgttttgctgggagtgttcgaattcgaggacaaattctttttaaacggggtagagtgtaatatcccaaaaaaatgttgaccaaaagttgatcttcggtgcgtgtatgtgggaaaatggttgtgggccgttggaagttcagagtccgcagatgtcaagatctcatttaaacgatatcatttgagtattcatttgtctgaatcaggccatgcatgggggaattggttgtgagccgtcggtttcgcatcaagggcatcgggggcatcgctccctcctctcctaaaaaaccctagctgcccctccccttccctcatagcagcagccgccccccttcttccccattgcagccgctcctctcctcccctccccaaggtgatgcacccacctccctctaaaccctagccgccccctggttcctcctttggtgtgctgcattctccattggtggattggtgggaggaagaagaaagaaagaaaaggagtccaaggtga

SEQ ID NO: 46164 - DNA, 277 bp, Zea Mays
atcatatcagccctaaaatggcatgttcaaaagatagttctgacgtctctcctagcaacatcatcgagccgactatggagactctatcggctgaagatcagcaagagttcgagaaacacaaggagcaactaatcaagcaagcacgggtgaaattcctggccaacttcaaggtggacaagaatcacaaggtcatccgatagagggcgatttatcttccttcgctctgacctgctacaactacccccaaggtaagcaagacaaatgaagtacaatctct

SEQ ID NO: 46165 - DNA, 561 bp, Zea Mays
atgtactcatccaaagcatcagccggaactccataagctaacacacgaaaagcctcaatgaccttctgtagacaagatagtcctaacataccggttgcattccttttttgcacaaaatagttgtcatgttcctcaacaacattcattgtgcaaaggaatacatgtcgcctcatacgaaacctaggtgatgacacagttataaaattagcaataatataatgatgtaacataaatattggatgataaatatataaatcatgtgaaccttcgtatgaaagtctttgatttgaacgtaggattatctgagaaatagtctttgtaaagaagagcatggtgtaatagtctttcatgttccactacctcatgtcccacaatagaaccaattcgacccggatgattaaccaaatcctcaacgattatgtgcgcatcatcaaaaattatttcattctcatcatccgaagaagaggggtcaatcacttcattcattacaaactaattgatttcatcatttgaatccatatcgttgcctctgaggctctatgtgcaccgcttctatcgtcg

SEQ ID NO: 46166 - DNA, 564 bp, Zea Mays
gcggtcgaggaggaggagaatttctatggtgacgagagacgctgtttgttgggttctgatccgccgtaccgcgtgatcagtatgttgatgacgttattggcgttgtcgtagcaccatatttggagttagaaagatatgcgacgttctaatctatggccatatttgaacctctagagctactcacccagacagcctatgttgtgctcggtttgagatatggagtggttcatcatttttctcactcaagagtttgttagattctccaccaatcctcctccctcatccctcaagctaataattagttagtacaagcatgagaatggggtgattcattggattcgtgaaatgaactcatgatgcaccgcctcatctaggatgagttgatcctcaaaccaaacaccccctaatagtgactaagcctagatctgctataatttttcatttcaagctagcgaaacaattacagatcagaatgaatgatgacttgtgcgatggttggtatatgtatttctgcacatattgctgaaataaccttagatggactaatcaactgttggttggagg

SEQ ID NO: 46167 - DNA, 316 bp, Zea Mays
gagaagtggtgttgcgattgcgaggttctagtcttgttgattggaagccggatcgtctgtatgacatctccaccaaatcgatagttaccttcacctgacggaagatcgagcacccccattcctatcaagtggtattcaaagactcaggtattaccgtcaggcttaccctagtttagtttatgtttttcatcctataactctagaaaattgccatacaaaaaaatcccgctgtcctagaatccttgtttagcctttgcaatttcgttttcagtttggctttgttcagttcgtgtccgtggtcgagtcgagttgctgg

SEQ ID NO: 46168 - DNA, 324 bp, Zea Mays
aaagaatctcacgacgctcaagaaaaagccaaaagagctgaagaagttgttgagcgtgcgaggcttataggtacctttattgaggtttagcttcgtaatccatttttagcttcagaactaacacatattttatgatgcatctgaactttctcccccaccggagccatacaacccagaagccgacccggccctgaaggaagcgctcgagatgattaaaattgtcaatgaagttgttgacgtagctatcaacaactgcaaaatgaagccaccgaaaaagtgttgaaagaagattaaagatttgtatatttgagagtttagtttttg

SEQ ID NO: 46169 - DNA, 407 bp, Zea Mays
ggacaacctgctccaatcccggaggcggtaggcgtggttttatccgaagccatctgccatgggaagagagtcactaacatgcacatgccatttttttaaactagttattttattcattacatcaggccattacacaatacaacacacaactaccataagctcattacacgcgagtgctatctagggtactcccgaactccttctctagagtgtctccaaattccttgagaaggtcatcaaggctggctagggacatctcctcggtgtcggacgagttccttaacccggcagggggtagggttggaggggcttcttccttctgctcagtctgacatccatggttcttggtcttcttgcgtatttttcttgcggggcgagcttcttcagtttcttgtcgtaatccatct

SEQ ID NO: 46170 - DNA, 347 bp, Zea Mays
catccttgtgatcttggctgcagatagagcacctgccactccactgacactcagcacggcgatgcgcatcaccacaacaaaaacacaccagccccagcccgggcttaggaacagcccgatacctctgattatttcctccagaagtacccgattcagaggatttgccacggtaggggtggtggctctggtgctgagacttgcccctcttgtgggctagacccccagtgttgcccctcctcgcgtcctggccacgaggctgatccacacccgaagacttctgtgactccatggtgtattggtgttgcatctccacacccaatgcctgctccactgtagtacgaaaatcc

SEQ ID NO: 46171 - DNA, 429 bp, Zea Mays
aagagcaccgctggagcaatgttctttcttggtcagagtccaatcagctggatatctcagaagcagagagttgtagctctttcctcctgcgagaacgaatatatagtggcagccacagccgcttgccagagcatctgactgaaacggctgctgagtgatctcagaaatgcagcagctgaaactattgatcttaaggtggataataagtctacattggccctcatcaaaaaccctgtctttcatgatagaagcaagcatattcagacaaggtaccacttcattagaaaagctgcagagaatggtgatgtcaaactagattacatctgcacaggagggcaactcgcggatgttctgacgaaaccatttccacgtgatcgttttcagatggtgcgaacacaaattggcatgagtgattttggagcataagct

SEQ ID NO: 46172 - DNA, 517 bp, Zea Mays
cggtgagaaaaaaacatagtccgtactagtacatatgaaaaaggaggatcatgttcatggatgcgtatcaagctagttgcggaggtgcaatgcctcacggaaatgacggcaatatatacacctcctttttgctgtcgggcgtgccaagcaagatgccgggaattcaggcaggaaaatctcgcccaggatcttattctgcagcaaaacctgttttgcaggaatgagcagccaaggccgcgcagcacaggcatctttctcgacgacgtcacctcggcgtgctcatttatagggccagtttgcaactatttgttttctgttttttttttctactgacgagagagcgtataagaactaattctgaaatgattttactgatgtggtgattgaaagtgaggagccagtttctttaaagtgtttctagagatttttttaatataatggcaggagctccgtctctcattaaaaaagaataaaattgataaagttttaagaaaaaatctgacgcaaaatatacaca

SEQ ID NO: 46173 - DNA, 351 bp, Zea Mays
tttcatgtgggcgaattttccattcagtccgcttagcacttggaggacgaaggtgcagtcgcggatgacctcgccgagagcgtctgttagccccttcatcttgcagcagtagtcgtcgatcgagaggttgccctacacaaagacacgagattcggcgtcaaggagaagagcgcgagcttcgtggttggtgtggaattacgcctcgacagtgattcgggtgtggcgtgggggtgtggacagactccatcagctcaggggagagtgtgcctagcaggctagcacccatgacaggacaacgacatccacgcgtcgctatgatggcatgatggggaaggcgacgtcagagaggac

SEQ ID NO: 46174 - DNA, 848 bp, Zea Mays
ctaccagtccgacatgcgcgcgcaggatcccgtcggtggctgctaccgcctcgtcctcagtctggagcgccagctcgagatcgatactgccgagctcaccgccgtgctccaccacttggcgttctgccgccaggctaccacgacaaccaccgtgatggcaccgcaacagcaaggcggtggcatggctgacctcgacgtcacgtcctccaaccagccgcttctccccaacgagcagcaagaagtcgttgacgcactctacgtgaatcacgaagctcacaccgccatccttcaaaccgacgaggtcgtccaccgccacggtggaggccacagccccaccgatgatcatcacggtgagcagcaacagcagcagctcttcgactacttctattacgatgccaccgccagcgacgatgcaagtagcaagcctaccatagacatcaacctcgacaacatgcaacaattcgattttgacgatagttgtgccgccgccgagaaagtggatctggctccggcagctggggatggggaaataaggcatcatcagcacctcgacatgaattgccaaattgaccacaaagattatttcgagataaaggcggcgtcactcgtcgacgcctttgacatccggcaggacctgcagccggtggcagacgtgaacgccgaggttgacattgacatcaagacggtggatatgaatgccggcattggcatcgacatgaaggcgatggacatgaacgccaatgtagacgtcaatgccgacctacagggggatgatgccgctgtcaacgtctccacctgtgaagctgaagcagcaaaaatggcagccgagtcatcacattgcaggctag

SEQ ID NO: 46175 - DNA, 792 bp, Zea Mays
atcccgggtaaatttgatcgtcacgagttctttttagtcgtctcctttggcagatgctccatgcgattgtgcccagaatctgtgggtcttcttctttaatcatttgttggtggcgaggctggcttattcagggtttcacagcttgcggaccgagttttccgtttttcgatctcttgcaaggttgttggttttgcagtttatcatttacgttcctactcctactccgtattcaaggcgtatctgcacctttggaattctggcggccctaattggttcattgagtggcagcgttattcagaggaagaatccaaatcctggaaactggtttctcatcgccgttcttcctcggctctatttgctactatgtctcgtaagccagctctgtcaggtgcaaatttggtccctctaggtcatcagaagaggtctattcgtgctcccgcaggtttgaagcagcggcattcggtttttgatcggatttccttccccttcgctctgtcagtgatcatggagctgctgttcgtccgcattttcaaaattattcaaatcgcagaattggtcgcaaggttcgctcaggatttcggtcatctttggaggcccctcgcgtttccccatgggccccgcggatgttggtttggcggcccaagaaaattttggaacagtgcccggagaattttgggcaggattctgtccccaacattaatggctcttctgtcccagcggcgtcaggtgaccagcatttccgggatctttctctctctagaaataattcacaaatatttggtatctcgggtc

SEQ ID NO: 46176 - DNA, 520 bp, Zea Mays
gctctctccagtcactggggtccaactctagttggctcaaggtgttgcactcttccatccgatctgagggaatactcgagcgtgatacttcttggacgaagatcccgtgcgggacctgggcccaactggatcccagcttcgacaatgcgtctgctgccgcgttgcgatccctttccacgtcatggaattccaacccttcaaatttgtcttctaattttcagatggctgcatagtacttgcccatagaatcagtcgagcaatcctagtctttatttatctggcttatgaccactagtgaatctccgtataccattaacttcttaatgctcagtgacacaacgatgttcaacccgtggatcaatgcttcatattctgctacattatttgatgctgggaataataactggagtgcatacttgagttgttcacctctaggagcaatgaagaggattcctgcacctgctccctgcagcttcagcgagccgtcaaagtacattctccatacttcggtagcctcggg

SEQ ID NO: 46177 - DNA, 1073 bp, Zea Mays
cctaggtgatgaatatatatattatacacacacgcgcgcgcacataacatccaccctgtttagggttaggttttccaacactaattatcatggagatatataacacctaaatctgatattcttctcaatagcatgcgagagcatgacagaacaacaatacatgaagccatggagcaacagacaattagcattgcgaaggtactgctgcttttaaaaatagccagtttctgtactattcacagttactagtgtgcactttaactcagcattactacttatttgtcttccaggctggattagttacaacactcagtacaaggactactgtctttggtgccacgaatccaaaagggcaatatgaccctaatgaaagtagtgcttttaaacatcaagcaattatatagcttgcttaattcagtaaaacgttgtcagaagtcagcactgtgttacatgcatatttacttctgggtttcactttcacccataacaagatggtgttattgagctattggctagttaatttcttaagattcactcggaggacttccataacatgtactttggggcaaaacattttcaatttgcttaacaatattaatttagcaaggcatccaaaaacactaagatttcatcattgtcccttgctaaagttcgtagatattttttgttcggaaacaatttttgtttcttattgaaaaatcctacagttgtatgaaatacttacatttttagaaagtaacaggtgtactgtgtacagagcgaattatagttttaaaaaccataatattgctaaaaccaccttttctgagtttctgcactcaggacctcctttttgccttttcttaaacatggttttgcactttttcacttctttgggtctgaaactacagtttcttgacaccatatcattttttcagaacattcaaaaaatgcccttttccattttgattgttatatctttgcttttccctttcaggtttgtctgtgaatacaacactttcaggaccactgttgagtagatttgatatagttcttgttcttctggatacacaaaatactggttgggatgaaat

SEQ ID NO: 46178 - DNA, 1050 bp, Zea Mays
cttggactgcgccccaaatacaggaaagcacggggttttctgcgcaagaattcccatgactccgtaaggactctgaggggacggcgggtttattccagtaaaacataaggtctcttttgaaagaagcgcacgacgaaggggtatcggtgaatctgagtcgttagatctactttcaacggataggattagatctagagtgaaacaaaccggtacgtgtctacagccgttggatccgagatctgtggtcagggtttaatgaaggcgggtttcaatcacggccctatgatccagatcctgcagagtagatttttaatagccagaaggttatcgccgatatgatcctgtccattgaatactggatgaacgccctagatcacgactctgaagcggtatccgcaaatctaatctccaccgtctaatcctcacccaacggcccaccggccttcttgctccccgcgctctaccatcctcctttctctctcttcaagttgtctgctcgccggagttcggccgattcggcgagctagggcaccgagctcaccccagataggtcctatgcggagtataggcgagagcgaactatagggacccgctattacctgcaatcccgtcgtcggaagccgcgaccacgtaccacggcggaaaggaaatgctgatggtcgattacttgtgcctagatggttctccgagcacaattggctcagcgccctcactccacacgacgaggcgaggcgcgggatcctaactccgagggcggtgcatcaatgaggcagcgagtcgagtttcacccgcggtgagcagcggaaatgcatgtccggcgacaaaatctcgatcacggtttgggtaactacgaattcggcttgacggaacatgttcaagggaggaagaggggcatggagaacatgaatctcaccagcagggacgacgaatcgacagtggtccacggcgtggggcgaagtcgcggcggcggcgagcgaatacggccaccgagaccgttcttctctcctcgcaccgactccaacgcgatctggcgacaccagcgggatcccg

SEQ ID NO: 46179 - DNA, 323 bp, Zea Mays
ggctaagtgaatagtttggaatgacggttcctataccagttacagttgtaatgttgtgcaagaggcatctctgtgatgtcacatcttttttcaccttggattagctttagttccttgcattactaggactaatgattagctctcagaaaactgggaccacagtgtttcaaggtaggctaagtgaatagtttggaatgatggttcctataccagttacagttgtaatgttgtgccatcctcgttaatatcgcttctttgtttcagatatactgaaactcttcataatttctgtgcaggaccttcggcgaaaatttccagatacc

SEQ ID NO: 46180 - DNA, 706 bp, Zea Mays
cactttagattttgtatgtatcaaactcaattcataagtgttatggtggatttgtgtgaaatttagtttaaattgcacataaatccacaacacatgtttagattgacgtagatacataaacatccaaacaaaaccttacctttggacacaaacggcccaataatactaatacggtccacagaaatgttccaagttgcaaacatctccataagctttgtgtttctcatgtatttttccttttatttttcactatcaaacaatgcagattacaaacaaactaaatcagaagatggtaggagagctaggtagcacacaattgtgaggcaatcctaaggttgtggctagcagatcgtgcatatggtcgtgcgaaaaactgttttgtagtgtcgatttcactattcacaaagtgaggtttaaaatagaaggtaggatagataaggttgcaagagatagcctaaaaggaccatagtcatacctgcttttcctgaacatgcttgcatgctttcactatcaacactatcttgcattccataatgggctcgtcaagtcaaagaaacaacaactcaaaacaaccatgctagcgtcgagttcaacttccatatgtatagtgtttacatgtgtgtcctatcatgacctttcctcaaaaacatgtattgtgttgtgtgttccagcattgctacactactcacatgactcctcactcttg

SEQ ID NO: 46181 - DNA, 652 bp, Zea Mays
gagccacaaagggagagtcagtccaccttccactcacgatagatggccccctaggcatgcggcccactcatgacctatcgaccctaggcctgagttcactggccacctaaaggccctgcaatacgatgggtcgcgccaagacccaggcctctaggtatgttgtttgactcgacttccaagcctccaacaatgtgttggaatacgaggccctcgtaaatggcctgtgtatcgccatagatttgggcatttgacgtctcaacgatcggggagattcccatcttatcgtggggcaagtgatgaaggccgagaggtgatgcagctcgaaaggtcaggatgaggctcagggtgtggagttccaactccaaaaatatagaggacttagtaactcgtaagggttacaagagatcaggccacctagagcttacctgccccagagttgttgagagccaacagacaagcctacacacgccggatttcgacattagctacccccacggcggcacgagctgtgcgcaaatccctctagagatcttccaccgacagtcccgttgatggtagagagccagactacctagatggaggaccccccgatccccccttctgcggacaaccggtccacgacgcagctggccgcttcatcatagccctctac

SEQ ID NO: 46182 - DNA, 513 bp, Zea Mays
aaaaagaatctcgtcctcgagatttgtaagaaaagggatacaaaaggattggtttgtaattcaacttttagtctataagtggttcaaaaatctagattgtttttttagtcaatagttggtgattaggagagcattggtatatatgggtatagccactttattatgccggataaaagatatctttaaagcatttataggtttgggtaaaaagcagtggggtaagaaaagactccatccaagattgtggatcttgattcatctggcgatccaacttggtctttgaagacttgagttgatgcttatccttctttgacgtggtttgtcttctttggcctttattcttggagttgtcatcgtagttaaggacatatggtcaaggacatatagttcgaatagctggggtacacgaggtagatttgtacagagttttactttgcttttggaacaaatggattaggcaacctatgatgtaggttaggttgttgtttagggacgagttagtccaaggtatta

SEQ ID NO: 46183 - DNA, 787 bp, Zea Mays
atggacctcatgtcgatcttagggttccgttaaccaccaaattgtgtggggaggctataaaatcatacgtcgaagcctatcttccgtgttcctagctgagtccagctacccgactcgaaactgtggaggtgaacgtcggtgccgtgggaagaaggatagctgccactatcgatcctccccaagggtgactctccgacctgggcgtaccatatagaagcttcgcgagatcaccaggaacatgtttgtgggagtcttgggccgggtaacctattcggttgcccgaaattcgtcgtcggcgcagttgggccgccgtgaaccgccaatcgccgagggcggcaccaccgtcaaccgaatcactggtgagtcatatgccatcgcgttcaccatgcccccatagttgtgaatccatagtcggtcaggagtagggtgctccgtggcaccggatcggatttctctggtaagtcaccaccgtgctgggcgtggcgagaggagggagatgaagtcggggccgttgatctgactacgtatgatcctgattagaacgcgaatacctcttcatgcgatcagatctgggccatggatccatgattgggcgaacaagggtcgatcgcgatcgtttataatttggatcgtagattgtcaatccaacggaaccctgtgcttaccggatcgggcaagggccgatttaatatgagcccttggtttctgatcggacgactcgaaccgaccaatacccctttgtcgtttacattttctaaaagaaaccctcgtgtttctacatatcaac

SEQ ID NO: 46184 - DNA, 556 bp, Zea Mays
cggcgctatacgaagtggataaccaggcgagcgaaatggtgggtgtaataccgggaatcgcacagctctaagtccagaccacggcgcatgcatgggcgcggtggcgccctgccggtgagggccgcgcccgaacgccggagcaccacacccaaattactttaacttcaatgcacagcgagataaggcgaaccaaacggagaagacctatccgataatggtgtggccgaaatgcttgaccacggcacgaatgacttcacggcggaatctctacggcggcgagaaattggcccacccaaacctccgattccgtcgggtgaggaggaacacatcattccttgcgacactgcgaaactactcggccccattaccgaccccgaacgacacctaccatggatttcgcccatggcggcaaggctcaccggagcgcaccaaagcctcgccaggcgccccaaaccacaccgtatcaatgttgtgcgcagagaagcatcagacgaactcaatggggtgtttcttaccggaaatcgacgcacagagctccacggcgatgggagcggtg

SEQ ID NO: 46185 - DNA, 539 bp, Zea Mays
ggagggcaaccaaatcaatcaccaaatcaatcacacgagattacaggactcattgatggaaggtgagatctcctgtctaacacccccccgcagtaggaacgtcggtggaacaaacgtttagactggaccgaaactccaaaaatacagaagatggcaggcctttggtgaaaatatcggcgtattgggaagtcgttggaacatggagaacacggacagccccagcagccacacgctcccggacaaaatggaggtcaatctcgatgtgtttagtgcgttggtgctgcaccggattagacgagaggtagacggcactcacattgtcacagtagaccagtgtggtatgctgcacgggctgatgcaactcctgtataagcaggcgaagccaggaggcttcagcaacaccgttggcaacagcacgatattcagcttcggcactggagcgggagacagtttgttggcgcttgctgttccaagagatgaggttgtcaccgaggaacactgcatagcccgaggtcgaacgacgagtatcgggacatccg

SEQ ID NO: 46186 - DNA, 292 bp, Zea Mays
tgtcatgtctgtgtgtagctaatgctctagaaacatgtgtcactttgagaatgtgagtatcattgacaatgctaacaagcaaagaaaaagatttttgttagaaaaatgtggatattgttacaaatttgtgcatgtttgttagaaaaatgtggatattgtaggatgattaaatctacatgatagagtaccatatcttatcttagattcttgtcaatattgaactctgtaatgtcaatgtttgcttagtcatacgaccaacactatctaaactacaaaggtatggactcttttt

SEQ ID NO: 46187 - DNA, 452 bp, Zea Mays
ttgcgttgggtaggaccttggtgaagacgaaggagttcaaaattcttaaagtgttcgtcgcaagtgatcgcgccggacgagctatccaaccgtgcctgatgagaagaagagaaagaaaagacttcagcagttgtcatgcttagaacaagatgctgatccctcgacatcactcctcggtggtggcccgcgagcaccacccttgaggacgatatcagaggttgtgatgatgccagagttggcggtcgtgtgcttgatgaggacgaagaggaggaagaagaagaaattcccttgatttgcaagaacagcagcagtaggagcagtgatatcccgatgcaggctttatcagggcttgttagcctccaggggttgataatgtctgcaattgaccatgcattagaagaaattatccctgaaaatcttttatcagagcctcctgaggatgaaagttccat

SEQ ID NO: 46188 - DNA, 361 bp, Zea Mays
ccagcactcactcactcagctagaggctactactactgcactccactggcttgtggttggctgctgaagtgagcgtggaacttgcctggatgcaccacccatgttgcatcccgacgatcagagatctatttcgcgcgggtggtggtggtggggacagtgtctgtccactgaccgacacagaccttagcttccaagaagacgcatcgcatcgcaattcgcacgcaccaatggaagagaacggataaagattgctcacccccctagctcttctccttcgttgttcctcttgcaataatgcagcaagagcttgctagctcgaagagagtaagtgatcaaggtgctactgctgcttctaaagcgt

SEQ ID NO: 46189 - DNA, 720 bp, Zea Mays
cgatggggaaaaactggtgttcttggctaccgacggtggaatgggggaaacaaagggtggcttgggtgcgtaacggataggcgagactgagaggaagctcagtttcaagggagtcaccacaacggtggtcaattggaccgctgaatcacgacggtggcgatagcccgaggagttccatgttagcctgaacggtgtccacaggccaataacgtggcagacttatcgtggaccctttacgatggtgcaacatgagagcctccaaccagctgcgtggacgacctggagcgtccggtggtttgctacggcgacggtgaatgaaacacggtgaggacacgtggtgtccatggctagagcggaaactcgatcaccgaatctgagccagagatccttttaccccttcattgatccacgtctcagcggcaccaatcgtggcgcaagctcgaattacggcggagggaccaatcgtggcgcgcacatggaactcaatcttgttcagttcactttatcatggcgatgttcattcagcgcacctgacagggcgatttgaggagttcctttctcaaatttttatgtgacaacttgtttatccgactacatcaaagttgttgtccgtcatgccagcttcaattttgttataaggttcttgctcatacctccactcgatcaagcacaattcggttccaaagttgatgtaatgccactgtcagtctaactttgaga

SEQ ID NO: 46190 - DNA, 699 bp, Zea Mays
gtaattgttcttcaagcaccctgagacatttcttcagctgagatacatgaaagacatcatgaacatccgcaagatgatccggtaactccaattgatatgcaacctcacccactcgttttaagattaagaatggtccgataaagcgaggggacaattttcctttgactttaaatcttctcataccccggagtggtgacaccttcaaatagacataatcaccctctttaaactcaagcagtcttctccgggtgtcagcataactcttctgcctggattgtgcagttctcaaattctcccttatttgctgaacttgctcttctgcttcttgtataatgtcaggcccaaacaactgcctttcaccagtttgattccaatacaagggagtcctgcactttctgccatacaaagcctcaaacggtgacatcttcaaactggcctgatagctattattatatgagaactcagcatatggtagactcttatcccaactaccaccatgcttaagggcacaagctcttaacatatcttccagcacttggttagtcctctcagtctgcccatcagtctggggatggtaagccgaactaaaattcaatcttgtatccaatgactcgtgcaacttcttccaatatcgagaggtaaactgtgatccccggtctgacacaatcttctttggtacaccatgcaggcatacaatcc

SEQ ID NO: 46191 - DNA, 279 bp, Zea Mays
cggcgggttaaatcttatgaagcacaggggctcttttgtgaaaacacgtggccgaaggagtatcggggttttacgatcgtccggttagaaatccatggtccagatcagatccaagcttaagtgaactggtacgctatgcctaccctccgatcacaatccggcaaccaagatttcatactctaacaggtcagcgactcatccaatcctagccgtccatagttgatcgcacggccaggggtgcaccaaccctagatctaatcaccgccacccaatccggaa

SEQ ID NO: 46192 - DNA, 481 bp, Zea Mays
gctcagtacagcgccgccggcacctcatcctcgtctcaggtcgatgccactatgtacaccgctgcccgtgtctctgttctcatgcgctgagccgctgattcgctgccactcgtgtcgatttgatttcggtcagtgctgtagagatctagctaaccaaacggttggattgtaaagctctggaacgtcgaatgcttgctcttctgcacttctgctgaaaattcgtaaagattcattgtgtcacgataactttggatgctataatgataggtgtgatacgatcgtgtagtagtatggtgtcactgatttcatcctttgatctccagaagtatggaatgctggggtgattgatttgcatagttaatagttctattccacaatacaaaattcataagcgatgctgagatgatgcttttaggtgctttctgtgttgatgttgttggactattgtcttgctgtagctgtattttcatcgtgttggtga

SEQ ID NO: 46193 - DNA, 382 bp, Zea Mays
ttctgatttctttagcacacaactgtctgtagaaatagctaacttcagctaacgttttccacacagcatcagaaatgtacacatgaaacattacatgcatgagcctttccataattatgtggaagtcatggctcttgagtccattcatcttcattgtcttcaagttcacagatcttctaaaaccagtagcataaccatcgggaaatttaatatccttcatccacttcatcacttctttcagttgcttaggtttcagacaatagtcagcttttggtttgcctccgttttctctaagcacttgggttggacgatcacaaatcacggctaagtccatgcgtgccttgtcattgtctttcattttatcagagaaatccatgcatgt

SEQ ID NO: 46194 - DNA, 626 bp, Zea Mays
ggtggaaacggttccacccggcgacgtccaactggaggaaatcacgaagattgatgacgccgacggaccacaacaccagggcaaccacgacagcaacaatggtggtcgtcaggccccacgtcgcgggcgcagtgatgggggcagcgaattctatagccacccagatcgttatggctgaccagatggctatggtcgtggtcggggtcgtgacgaggagggcggcggccgtccaccgtgacccaactttccatccttcgacggcgaatcagatccattgacatggatcaacaagtgcaatacctatttccgagggatgcaaaccatggcggaagagaatgtttggctagcatcattgcacttggagggcgtagcagccgagtggtactatgccctggaacgtgatcatggcattctgtcatgggtccgatttgttgactacatccacatgagatttggagcacccatccgatccaatggcctggcagaactgaaagccctttataggacaggcactgtggatgcatatcagcgacagtttttagtcttgctttgtcactatgatgacttgtctcctatgcagcaggtgaacatgtttacagcaggtctcggagatcccctccacaccg

SEQ ID NO: 46195 - DNA, 425 bp, Zea Mays
agagagagagtggagagagagggtggagaggagggagagagagattgtaagtgcaataaacctcatttgaggggtttggtgattaaatcacaaaacaaataagagtttctaacaagtttacttctagtatgtgtctagttgtttcaaagacatgaggagcacatactctatgtataatcaaagaggaatgcatggtgaattacttatatacatcgtttggtgtgcttcatgtgattccgtgtgactacgatttaaaattttataattcttgagttgtaggattcatcgttcaattaagagggatccaacaagtgagtatgttttgtggtgagctcaaacttttttctcttcaaaatcttcctaaaaaatctagagttttggtccttggtgcgcctcattagagagttcccagcaaatgcgagctg

SEQ ID NO: 46196 - DNA, 358 bp, Zea Mays
ggagtcctcatgaaatgcattctctcagatacagggaagcagctgctagaaaaggtccatgctggacaatgtgggatacacgcagcatccagaaccttggttgggaaggtcttccagtcgggtttctactggccaacagcaaagaatgatgcagccgagttagtccagaggtgcgaagcctaccagtacttgtcaaaacagcagcatctaccagcacaacaactgcaaaccatacctgtaacctggccgttcgcatgctggtgactggatatgattggacctttcaagaaagctcaaggaggatacactcatgtactagttgctatcgacaaattcactaaatggatagagttcaaac

SEQ ID NO: 46197 - DNA, 646 bp, Zea Mays
ttccttggacttgtagagttgagccaagcttacataggtgttgcatgcgttacaatccatcattccaaaagacttgagtatcttaactgcatatgcactctgactcaaagtggttccactacctccttgcttcacttcaattcccatgtaatagctgaggagaccaagatcactcatactaaatcttctcttcatctcttgcttaaaatgattaatgacactaacatctggcctaaagataattaaatcatcaacatacatccccacaatcaagaaagatttgctattgcttttcttgtaaacatgttcaagtttgcttctcataaaactaagagcaattaactctttgtcaagcttggcattccaagccctaggtacctacctcaaaccatagagtgtcttgtttaatttgagcactttgtctcccttatgaatcacgaaccgtagaggttacagcacaaacatagtttcatttaagtcgccattcaaaaatgcagattccacatacatatgatgtacttcccatccaccttgtgctagcaaagctagcaacaatctcactatttcaatcttggccacaggagcaaatactccatcgaaatccactccttggtgttgttgagcataaccctttgctactaatctt

SEQ ID NO: 46198 - DNA, 914 bp, Zea Mays
caaaatgtcatatcggagacagtatcacaaccctaaacaatctaagtttggggtcagagggagtgtatggccttcatgttatcctctacctccattaaaccaatggtgttgcaacatatattaagaaacataaggaacacatcaatctgtcctgaccagttgcttgtgtgcgtcctgcttgtataggtattggcaattaatatcacacctttctttcaccttggccctccagtcttcatgtggtatttctgagtagtgcaagagtacatatattttagcaaaaacatcaattaagtgttgcaactccttgccttcaagatgtgaattgttagattattacatgtgcccattagaccatggaactgttgtgagacaacctatatgaatttatgtttcctgaaataaacggaagagctacctgccccatgttcgttaggtgaacacatgtttgtggaatagaatcagagcactccacgcgtgttcagtgactgtgcagctgcaaaacatatgaatgatatccttctcttgatttcttcagttagaactcacatctcttggctcttgctcccattgcctcttcttcccaagaagaaatagtaacaatagccttcctgttaaccttctacataaagtttcatctggatgcctgagacatcaccattttttgcaacaagaatttatctaaaacttcatctctatcttaatatgtagaaatgtgtcgtttttgtacctgaaaatgaacatgctgttaatacagagttatcatgctattgttcccctgaagctattttttaggtagtttcgccagaacggttcaattattttcactgaatcatatgtttatctggtggcaatatacatgggataagtcaaactgcagtgtagaataaatttgagggctacattcaatggta

SEQ ID NO: 46199 - DNA, 622 bp, Zea Mays
tatgaataagagaaccaaattaattaccaattactcgctttcagtcctaattaccctggtccggtttgtttcggactgaaacccattgccatcgagttccaatttatttgttcgagataaaaatcgtaagcatgggtcgagattccaaattcattttctcttaatccatgaattttaaacagacacaagactcgacatttcatgaaataaatatgtgagatcgatacagcatcgaaattgtgatacttgcgaaagtgacgtcatgcatcgttcacgtgggcgagaggccgtgcgctgtcaagacaccggttagcacctgccacacgcgtcacgatgtcaggccacagagagacacgtgcaacgcaagcgtaaaagaatttcaaacgaagtttaaagaaccagatttaatttcaaatcaaagattatagtttgggcaagacgtcgaggtctcaacccaaacgatattggatttgctgtttcaaaagattactaaagtctgaatttctgcaaaataatttaggacaatttaaacagatggagacagacacgatatcaaaatcgtaatagacaaagatgattaaaatttagtgtccattttattcaccgctatcacgtgttaaag

SEQ ID NO: 46200 - DNA, 451 bp, Zea Mays
gccgccgtggatccctggccgccgtgctttctggtcgggggaaagaagacgtctgtgaaccgttggttgctcgttgggtggtcatgatttaaccagaagcgcatcccctcgttcgtgtaatctgggccggtgatcgggtgttggatggtcaaaatgggcctagggttatttaaaacgctggacatcggacctcgatccgatggctacctttggataccgattcggatattatgatgatctaatctgggtcgtctaatatggatcggacgacgtagattggtgcgtaccccttcgctgtggttagtttctaaaagagcccctccacttattccaaataaacctgcagtccacactgtggggaagcctgagtcttaggataattgtgattttggcccctgtgtttttctgttattggcgcccagttcagagctcagggaaaatcaggaaaatg

SEQ ID NO: 46201 - DNA, 381 bp, Zea Mays
ggaaaagcgaacaacttccacgggatcatgtctaattcgcggacgatctggcgcgagcccattgccttcctgggtcggcccatttccactgtagtctttgtctagcccatgatgtgacgaccttgcggggcaactggtttgtggtcccacgcaagggttttcgccctctagtggacccgggggatatctgtccgcacaagcccccaaactttagttgattttgcaataatcaattcaaaggttcctggtctttgcttaagagttggtaatttgacttgatccattgtacctctattgggtgtagcccccgagctttgagtggatttagaagtaatccattcaaaggtcttcatgtttatgtttttggaatcaacaattggc

SEQ ID NO: 46202 - DNA, 569 bp, Zea Mays
ctaggattgaccttctcttagtcttgactacaatgtcatcgacgtagacttctactttgtccctaatcaggtccccgaaagtcttactcatcccccgtacaaatgtaggcagggcgtttttcagaccgtacgacataacaacatagcagtaaagcccatccactgttacaaaagtggtatgcttcctatcttccctagacatctggatttgatggaaaccagagtaagcgtctaagaatgacaataggtcacatccggaggtagaatccacgatctggtctatacgtggcagtgggtacgggtccttgggacaggccttattcaggctggtgtagtcaatgcacatccgaagcttcccattcgccttggggatgatgaccgggttggctagccatattgggtgatgaacctcttcgatgaagccagcgtctagcagcttccggacctcctttcggatgaagtcctgccgctcaacagattgtctgcgaggcttctgactcaccggcctggcgtcggggttgatcttcaggcggtgctcgatcacctccctggggatcccaggcatctgc

SEQ ID NO: 46203 - DNA, 351 bp, Zea Mays
gcttcgatatcatttccaagagcagtagctggccttctgatgccgaagcgagaccaaatagggtgttggataatcccctttatatcttccctttcagctaagttattctttacgtaaaaccattcctccatccaggcccctggccacctttttcgaaatgttagaactggataacttacatcagaacgaggcacgaagccataacaaccaaaattattgtgatactgctccttgctagtagctttcgtctcatacagtagctcgtgcatgttgtagaagcattttgcacttggctctagtccttggctcctcacggcccaaatgaaaatccccatcctgattatagcttcg

SEQ ID NO: 46204 - DNA, 367 bp, Zea Mays
tacaaattgaagttacctccaaaaatgtttgccatccacaatgtgttccatgtatcccagctgaagaagcgtgttcgattgccgaccgagatcgtagcagaactagaattcgagatagaactagatctatcgtaccaagagtacccttccaaggttctagattgcacagaaagatcaactcgggctaaatcgatcaaaatgtataagatccaatggagtaatcactcagaggaagaggctacttgggaactgaggaattcctgcgttccaacttccccgattgcctacctaaggaaattggtacataatcatgcccaacccctcctcctgcccttcgaatctaaaattcagaaaaatgatcttaaat

SEQ ID NO: 46205 - DNA, 633 bp, Zea Mays
ccttattccacacggtctctattctatatcggtgtatatattcgggtctagtaccctcatattgagtatagtgcaatttataacaatttgaactccatgcaccatgcttaaatatgcaacataagataaaacgtccatacaattaaagatgcagtaaaatatattgtgcagaaccaatgtcctactttataatcctactaatgatgcagtaagatatattttggattatggagtagctcactagatattcgagagctgcaccttgagtcactaatcacatagccttgtgcctgggtgtgtttcgttggccttggtcgtgtagtccttgttcgcggtaattcttgtactgtgggtgtgtggtgtgtccgcgagcctctcctctgtagcaggagtggactcttgaccaacacatgtggtttgaggtgaatacaagcgcatccaaagaagtcctcaggtgggaaaatgtgctgcatgcttctcgccgtattgctgttcctataatccagtagtctgtcacaaatccaacattttgctgttttgcagttttgtcttgtttaatttaatgcaagtataacatcagttcatccagtgccgtggttacagcatttaacatgtcaatatactgcacttccg

SEQ ID NO: 46206 - DNA, 1204 bp, Zea Mays
tgaatactctgtgtttaaccagcttatcataagctcttaccatgttttggcgatatagttcaagattttgaacagcttgaaggcgtccttcttctagggcatcaagctcttggaatctgagtttgatttgttcatcattactaatcccttcatgaatggcaattcgtagtgagggtagttgcacttcaaggggtaggactgcttcactcccataaacaagagagtatggagtggcttgtgttggtgtacgcacagagactcgatatgcccataaagcttcaaatagacgatcatgccaatctcttcgattcttggtgactgtcttctttagtatttttccaagtgttttgttaaatgcttctgctagaccatttgcttgaggataataacctgtggtatagttccacgttatattatacttggcaatgaatctttgtatcttgtttgatttgaaagcctttccattatcagaagtgatgcgtcgtggcactccgaaacgatatataatatgccgctctagaaagttaatgacattatccgacttgacttccctcaatggtatagcttcagcccacttagagaagtaatcggttgcagctagaatgaaatggtgccccctagcagatggaggctcgatggcaccgataacatcaatcccccaagcgtcaaatggccatgaaggaactgtaggatgaagaggtactggcggcagatgtttaaaattatcatgcacttgacaactatgacaagacttggcgatcttgagacagtctgccataattccaggccaaaagtaacctatcagcctgatgttgtgatacattttagctccactttggtgtccaccacacacacccttatgcatttcttgtaatatctgattggcttcttcccttgacacacatcgtgaaagaatttcttgaccaaaagaccgtcggtacaataccccagccttgtaggtataaataggcagacgttgttgtaaacgacgcctttccacaagatcttttgggagaatgccatgattaaaataatccaagaatggtttacgccaatcactttcatcaacaaccataacgagtatatggttgacttcacattcctgtgggactaattctaagacggctggtagaagccacctttcttcaatttttatttgagcgggctccccatctgggagcactagcgcagctgcaagtttagc

SEQ ID NO: 46207 - DNA, 418 bp, Zea Mays
taatactaaaaatcattttccatatttgttttatcccatttaccagccctctggactgcgctcaacaatattggaaagtacaaggctaaatcgtaagtttctagacttaatttaaattcttctcaatacccgatggactacaggttagtttcccaaaagtacagggactcgagtgcgaaattctataaccgaacgggcacaggtttcctatagccgccagatccgaagctaacggcccagattagatcaactatcaaacggaccgatacacgctcgcgatggttgggttaaagatcaatggccacgatgcaatgaaccgggatctaaccagacccgtccatcactacggatcaacgacccggatctaacctccgaaccggtacgctacattcaatcgcagccgcacactcatgatccg

SEQ ID NO: 46208 - DNA, 632 bp, Zea Mays
cgtcggggggtggctggtcatcactcgagtgagatggagtgaccacgggtggcgaggaggaagtcccacctgcaacaacagtagagcaaggcaccgaaaccatatcgtcgtcaaggagaaagtcatgggaggcgtgggaggaggcatctgaggtggctgcaaagggaaaagtgggtctcgtcgaatatgacatggcgagagatgatgatgcgacgtgtcgataggtcgaggcagcggtaacctttgtgcgaggggggatatccgaggaagacgcatgccgtggagcgagggacgagcttatgtttggaggttgcttgcatgttggggtaacagaggcacccaaaaacacgcagatggttataggttggcggttgattatgcagacgagtgtatggaatgtcatgctgaatggaggaggatgggcgcctattatggaggtagcaggtcgtcaggagtccctcggcccaatatgcgaggggtagggaggcatggagaagcatggtgcgaatggaattgttgagtgtgtggatgatgcgttcggctttgccattttggggtgatgtgtagggacaggaggagcggaggtgagtgccttgagcagcgaagaatttggtggtggcagtgttgatgaa

SEQ ID NO: 46209 - DNA, 326 bp, Zea Mays
gcacgaatcgcaacggcgacgaggatcctggcgcgggatcaccggcagtgggatgaactgaactgatctgatccgaacactgtaccattgaaaacctgattcagaacgcctgacagacagagttgcaacacctagatcttggatttttgtgcaagaacttgccattctatctgtaacaaacttgtagccctacataccagctacaattcttctatagggatcttgcccatttgcttactcctttgagcatgaatcaagctcaaagttcctcaaaactcactgacagtcagtaatcagtctcagagtggtctgaaagccagatttta

SEQ ID NO: 46210 - DNA, 272 bp, Zea Mays
ctaaccgaacttggcatttagccgatcgatttctacccatttttcataccaccactacacgacatgcctaatacattgaatgactcattcacaattcacatacatctttaccaaaacatttccacatcgcttgcaacttaacctaagcttcactacacaatttcagaacatctacttaattcatgaatatcatcgtcacacacatcgactcgatttgaattaaccacacatgtctatcacatgaatggagcatttcaacaaatatcctaaaa

SEQ ID NO: 46211 - DNA, 295 bp, Zea Mays
ataatgaaaggataccaaggctcttgtgattggttatcgcaccaagtggtcgactggctagacaaatgaatggttttatgtgaaagctgacgagaagaagagggagaagcttatgagtatggtgatgagtcccttaaggctgagcttcggcatgacacgacccttgtgcaacatgcagctcagatctccctgtcagctggccgaagtggaatttagagtcgtggcagagcatattagcactcgggacttggtgcaagaatatttggcaaacagaacatttccaacttctagtgga

SEQ ID NO: 46212 - DNA, 1436 bp, Zea Mays
gacatatgactcttctggctctgaggaccaaggacatgttaatgtctaatttagcttcaagctctgtggtgatgtgggatttcatagttatttgtctactcttctcacttctggtagatcggagatagataatagtaagcatgccaaagggtggaattcagtgtagttcggctacataaaccctagatatgtgtccattcaggaccgacctttaccatttagcttacaatgtataccaaacttgttaaaggactatcccgagtcaattcagtgactataagtatttacaattatgagaaatatatgcaacacaagcatagaggtcctagataggacgagtaaagtggttcgacgggaacatacaatgttttttttcacaccaacatagtgaaatttttctcagagtaacctttcgatgtactcgcaacttcgtgttgctagggtactagccatttatctcaaagttcgcttcatgtcgttcagcgacaaaggaagcaacgtgtcaacatctggttgagcaatgtataactgagatttatagccttaaatcatttggtaaggtcttattgcttactaataaaatcccaatttgtgatgtcttctgtgccaaaaaggctttcatgcattatattatatatcttcgggttacttcaaataaaactttatgcatgagatgagagcagagatttaacttatctgtgtttcattgtatttcgatttaatttcccagatttaatatattgttatggccacttggcgatatatataaatatatgatgtcacacaacacaatcaaataaaatatataatcaaacaaaattgtttacggaggttgcgcgtaatgtgacttcatgggcttgaacaatccaccataatccacacgaatacaagctcaagcgtatccggcgtcaatgcatgtgcagccatcagggctactacaacacaacaagctttcataacaaacgcaacaggcgcagttgtgactcgatagtcggggtacaagacaagtccgcgcaacgtgcgcaataggcacaattgtgtctcgtggcagacagacaatgcctacagggcatgcgaaaaatacgcggctcggcgatggcggtccgactcaacaggagcggttcgattaaatgagggtgcgacatagcaatcacatgaagcagacaagttcgtacgacacaaatattgtgtcgtgatgacagggcgcagccaatatcataactcagccgattaataacgtagactgatcagcgcgttcgagtacccacaatacaatttaatcgctcgatatgagtccaaaagctcaacataatataaatatttagatcgatttaagtatacccaatatatactccacatgcatttaataattttctactatttacttcaggaaataaaacagaaaaaataaataccaatattaatgcataatctta

SEQ ID NO: 46213 - DNA, 843 bp, Zea Mays
cgtgattctgtataaatttgatacaagggctatgaatacagcttatcatgtaagtggatctgcaggttggagagtggacaagagagtatgtgtacgagagtggagaagaggtcaaggtttcagccaaagcagtgtgtagaggttcccaatttctgcaaggccttcgtgcagtaaaggaccggtatgaaagaggctagggtattttaggggcttttgatatacgggctaatcacgtgtaaagggtgattagttcccgttactaaagtttagtctatgccacattatatgtttgaatgccaatgttgaacacccggcatagtatcccagaccgtccgccccctggacagtccggtgtgttcgcctatatagttgattagatcagtttaggttggagtcctgattttttgcgtgattctctggatttcctgtcagattttgttggacttcgccttggaaagggtccagacctcacccaataaatataaaggggtacgaccgattggaagagaaccaatcgatccaaaaaatcatttatactttatgttcttctttatcgttagattagatctagtttttgccctagttgtagtttctgaccctaatcttcacctctctttggctttacatcgacgtgtggcgcttttgttggtttgccgactccaaaggaactctagaatccctcctcactcgggtccctcccgggaggtgggatctaggttcttcctagagatctctgcgcagtcacgaatggcccgccgtctcaatgcggatagtagcctggccatcaaggtcgaacggtccgtgaattagtagagaggccacaaggtcctgcacgccgcatgc

SEQ ID NO: 46214 - DNA, 1263 bp, Zea Mays
gaaggtttttgtggtacacttagcaatttagggtcaagcttggttaagctaattggtaagtttattttggtgttccactgatttctttttactgtcttagttgaagtttattaagatttctagctgaatttactggagtgagatttattattccctctctccttttctatttttttatgctttgaaggagggtttgaactacaagatagattaataaatttccaaattttttgtaaaaattacagtggcttcttattagtgtactaggtagatgctcgtgcattgtgacagcacataaattattgagggagatctatggctactcgaccaggtcgatgacagactatcatgagaaaatgtgttttcaccaaatcaagaagatctagaaaggaactgataacatctattagaggtgcacatatgattgaaaataagaatgtggttgctacatcatccagcgaattagtttgtttttgattcaagaattcttcaacctatctagatacagagcacaacgagttaccatcaaactcaggagaatgttccagcgtgttgaataggctataattctgttggtcagaatttttcctcaaaaatgcaccatatttgttaacagcctccactcagccagataaatcctagagttcagttcttgggatgaaaatttatcaaatctttcttttaggacagtacctataagatcaggcaataaatgcatgtccaccttttagaatcagcagtctagtcaattcttcatgcagatgtggtaaaagtattatagacattagacaatatagggaatgtccaatacctaagactgaagaataaggtggatcgtgttgcacacatacaatgaaattgtagacttctcgtgtaactttgtacttccagatgatgtgtcgagtagcctaatgcatttctgaagaacacaaataatcagagggctgaaatctagagaacggcctacaaagcacaacagaaaaggttgagatacagatgaagttgaatctcatcaggcaatattcaaatagtagaagtgaaaagagtgagaagcatcaacaagatgagctagtgattacaaagattattgcaagcggtaaatggttattacaaaatagtacccaaataaaatgtaagcatatcattcagggacaacggacaaattactataacacaaatccgaaaggcatggcctaaccctgcagttacatgaacttatgcatgcctcagaaacacactcaattaaagtttcacacaattacc

SEQ ID NO: 46215 - DNA, 884 bp, Zea Mays
ccttcgaagaccgaagttgatgattgaaaataatgatgaagcatgccaaaaggctttcaacaatgtttgttctttcattggcacaagagacttaatccaagagcacatagcctatagagtgtggccacttgtagatagctgggagatgccgaaggatactgctgccgggtctgtcgaaggtggattagttcgattaaagtataccttcagattcagggaccggtttaacgagccaagtgacgattggctgaaaagtattgaggctattagcgatgagctacttgggacatataccagagccgaagatgatgctttatcctcggccttcgggggtcgaggcaagaaaagattgaacatggtgtttgatgcaattggcttcatataccctgattactgctaccctttgcgaagacaagtaaaaaagagaaaaactgccgcttcgaccaccactactgtgccaaagggcaagaaaatgaaggttctaacccaccggccacgatatattgagacggccgtagtgcctgaacttggtgaagggacttcctccgctgccgaagggaatcaagctgctcccgctgaggctgaagctgaaggatcgactgcagcgccaaaggtgcctatagtcgggtcagccgaaaccaaaaatgacgtggccaaagagccagagatggaaaaaacagtgatgatgccaaaaattctgagcccaccggtagaggcagaattgtcgaaggtgataaaggctcctgccacaactcccaagagaaggaggatggccagcgtgctagacactgtcatggagaccacaaaagccttgacccctgctccttctaagaaagttgtcgaagctatcacagtccaggccgaagccaaagctgggccttcag

SEQ ID NO: 46216 - DNA, 852 bp, Zea Mays
atccatcaagggttctactgggccgctataatctgcgtcgtgaatcgagtcacgaggtcgtgcgaagtctgccagaagttttccccccgttcgggcaacccttcgcaattcacaaagctgatcgcccacacatggccacttcaacgctgggggctagacattgtcgggccactacccacgacccaagggaacctcaagttcacctttgtcatcatcgagtattttaccaagtggattgaggcaagggcagtatccacaataacgtcgaagactgcccagaaattcttctggcaaaacattgtttgccgattcggagccccgtccgaactcacagtcgacaacggcaaacagtttgacagctaggactttagggatttctgcttctccattggcaccaagcttgccttcacctcagtatatcacccacaatctaacggcgtcgtggagcgcgccaacggcaaaattttaaccgccatcaagaaaatgtttctcaacgacaagaagggtaaatgggccgacctgctgcctgaagcaatctgggcgctgaacacggctgagtgctgggcgactggattcactccctttcgcctgctatacggatcggaggccatgaccccgtaggaaataaaacatggatcaccacggacaagcgcttcagccgtcctcgacgtcgacgaaccaacctccaaagacctcatcgacggagaccgtgtctttgccctgcaggccctcaacaaataccaagctcaaacgaaggcctggcgcgaccatgcagtcgtcccaagagaattcgacgaaggggacctcgtactcgtccggacaacccgtacagagtcacggggcaagctggag

SEQ ID NO: 46217 - DNA, 283 bp, Zea Mays
ctgggtgatattgtatttccaaatcatagtctttgattaactcaagccatcttctctgtcttaggttgagttctttctgcgtgaagatatatttcaagcttttgtgatccgtgaagattttacacttgttatcaatcatgttgtgcctcaaaatcttcaaagcgtgcactacggcagcttattccagatcatgcataggataattcttttcatgcttccgtaactgccttgaagcataggtaatcacttttccttcctgcattaacacacatccaagtcctag

SEQ ID NO: 46218 - DNA, 499 bp, Zea Mays
caagcatgagagtatcattaagaagatactgagttctctttttaattatttcattcactttcttcatgaaatctcttttgacatttttgtcatgctttaacttagcaaaagatctcagcttgagtagataaaatttttagaagaaagctagaaatggttccattttttctattggtcagcaaatcgaagcacagaatagagtggtgtcacagttttcagtaccatttcaaccttctcccaccatatcctatttatcaaacaattgtaggtgaatttgtggtcttcttcatctctccaatcattatttttccaatcactagacaccatccaagcttggaacttgtcttgtctgtcccaaaaactctgtaggaacaaaaaagtgtgccaaacttcgtggcattccatctaacaagctctccacctatcttctctttcaacatatcatgaagcctgaaaaaatcagaatatcattatattaactatagaaatattaattatt

SEQ ID NO: 46219 - DNA, 340 bp, Zea Mays
gtcaagctagtgccaacatagtgtagagatctcaatctcatggtaataagaagggcaagggaaagaagaccaagcccaagcctaccactactttcaagaagaaaagggagggtgaagaccacttcgtgcgcaatagtactcatcattgggcaaagaagtgtccacaccgcaaaggaagaaatcctccactagagcataagactgcgaacatggtgaccagctatggagtggaaactgatgcagttgttcatgtttgttctaatgcaactctattttctttttaccagaccgctcgggattctttcgtggtgataaggaatgggtcacatgctattgttcg

SEQ ID NO: 46220 - DNA, 768 bp, Zea Mays
ggtttatgggcattgccttgggtacccttttcctgagtacccgacaacagccctgagccttcgtgtgactccttggagttggttagaggctttcttgtcggaggccaagagccccgagtgcacgcaagcgcatcagtatgatgtagcccccgagctcccgagtaatccatgaggattgcttggggtttacttagttcctggtgaacccttaggcctgctttttgccaacctctttcatcatcctgggtgcgtcggatgtactcccaattgatggcgtggcccttgacacagcgttgtgggttggctgctagagcgggagaagtctctaaggatgaacccatacaaagttgcccagaggcgatgcccaccggttcatgcgtggtttctagggacagacccatacgaaattgctcaggggtagtgttcgtcaggcgtagtctctcgggacagacccatacggagttgcccggaggcggtccctatcggagcgtggctcgaatgcgcgcaagcgcatcaatatgatacagccctcgagcccccaagtaatctgtgaggattgcttgggggtcacttaattcctaggtgaagattaggacttgcattctgatggctcttcttgatccggctccctgagttggctattgacgcttgctgatcctttgttttgcatgggtctcccctggaaggggttttggacccttttgaaaagagggacgtcttcctcaacctgtccggcgcgagggaaggggtcgtctagctacaaatggg

SEQ ID NO: 46221 - DNA, 906 bp, Zea Mays
ctgccacatggcctgtggcgcatcacggaagttgcaaggcgtcgtttgacatgggcctctagcatgggagccacccgcattaaagaggggcaagacggccgcctaggcgtcgtttgacatgggcctctagcatgggagccacccgcattaaagaggggcaagacggccgcctgttcacaccagtggcaggcagtgtgcgcccgtattaaatgcaggtggtgtgtgcagtccacaaggcctagggcgccagtaacccgtgcgttaccgaggcaaagactattgacccattgtgtcgtgcgtgggcaacccccatcatgacttctactattcccgctacggaggcaggcgaaggggactagacgacactgtccacctactcccctacgcaagtcgacaagctagcctacatctcaacctacatcggagccttcacccacacgctgacaagacgaggcgaagacgactctagctagaggatcccgcacaatgaccaagacaagatcttggtccaccagctctttctgtcactctgcgtttatatttttagtattcccgagcccacctattcgggcctagcacacttgtacatgccccccttaacctataaaagggagggcacatgcgttccaaaaggggggagaaccctggaagctctctcgagctctgccagggagggacttgaactcccacagaggtatctccatctaaacctaggctttctcaagctctcaacaatacaactcatagtggagtagggtattatgctccagtgacctaaaccactctaaatctgtctgtgtcaccttgtcttgcctttcccctagggtcatcaaaaccctaggtcgtcggcatgttcttaggaccctgacatttggcacgccaggtagggggaatctgaaatatgat

SEQ ID NO: 46222 - DNA, 500 bp, Zea Mays
cagctaccttcctgtagccgaatgaacacacttcatgaggactcctcctgcacctcttcaatgcagcagaccccctatgatggtatagtgggccgattgtcttgtgatgcgttctatcgtggccttgtcatctggttcttccttgttttttatgtacttgataattggctccctccagtcgttgggatctgcttctgcttggtctaaagcgtggcactccttagcctgctctctggtgacgctcggttgctgtacctcctggacgaaaatcccatgtggaacctgggcccagctggaccccaattttgacaatgcatatgccgctgcattgtgatccctttccaagtggtggaattctaaaccttcgaatttgtcttctagcttctgcaccgcagcgcagtatctgtccattgagtcagttgagcagtcccaatccttgtttacctggctgatgactactagtgagtcattgtataccattaaccttttgacgcctagtg

SEQ ID NO: 46223 - DNA, 468 bp, Zea Mays
gcaagcctaagcaacttgtcctgaccagccaaagtagcagttagctcatctacctcagcgctgagatcatcggtggaaagtgatacctcggaggtggagtcatcgccatggtccttgtcatcatcgcccaccacgtcctcaccaagtgccatgctacagaggccactcaaaatgtcggtgaagaagcagagttcgttgagcttgtcctcaacccgcttctcgagattgcaaatctcccaaacccggtagctaatgctctaaaggtatgccgtcatgtggatcttccaataaaggtagtttgttccatcaaagaacgatggtttgtcaacaccatgtttctttgccgccttcgcagatcaaggaccgattagggtagaatgatcattaattggctctaataccaattaaaggaccaaaaaggagaccagaaggggtgaataagagccactaaaaatttctcgatttaga

SEQ ID NO: 46224 - DNA, 682 bp, Zea Mays
aggcgaaaacagttgctccgaagaaaagaaaggcttcgactccgaagcaaaaatcaattgatgaaaaagaaaggacttctgcgacatcctctgctactgaaatagaggaaatcttaaaggtaatgactaaaactttgcctatcaaactaagtccactggggccacatccgacgaagctttttcagaaggaaaaggagcccacaaaaacgaaggcacctaggccaaagaggcaaagaatcgttactgtgatagaagtcattgaagcaacaccaccaggagcttcagctccgaaggtgccggctaatgaaagcatgacaactactgaagctgtaccttcggaggctgccgcagaagaggccagagccgaagatgccaaatctgaagatattaatttagaaagcatggctgctgatatagacaaaatgctactaaacatggccgcagaagaagctggcgcagccaccgaagagactacggccgcaaaacccgagaaggaagagatgaccgaagatacttcagaagatgaagcttttgactttcaaaacttagttggccaagagctgacaaaagctgaaaaagaagaactaaaagaatatgctatatcttgcgggtatcggccgggagcgcttctcttcggtgtcattgatgatgaaaggttaggctgcatacgagatcagaccgg

SEQ ID NO: 46225 - DNA, 942 bp, Zea Mays
catcgctgtgactccctctaaactccccgtcgaccaccggagttactgccacgacgatgaacacgtgttcactgcaccagcgttcttcctcacttccgaccgccgcacatcaacgccaaaattcacggtcaccgccgaagagccctataaattgagcccggactccgctgcttcatcacatcccgcacctcaacaactgagcactcgaatcgattacgccgcagaactaacgcagtccccaaatctccctctcctctgttcttgctccgccgtgaagaactccttcgtggccagcgttcctctggtcagtaattatcaaattactccctgttttagttagtctttgatctcctattgctcctagttgcggcaatttggagtttggccgaagcccaacaccggaacgcacccgtgcgctgtcaaacaccgccgtgacccccctcaccgtcgacccgctcttcgggtcttgttctgcccaaaccaaagtatgtccatggaccctggtgaacccgtgaacctttacccagcctcaatttggccatccccgtcgctgtttgattggaacatattcatcctcctgtccatccgctcagtcaccgtgaactgatagattcagtgtcccctgggtgaaattgatggaggggaaatggtcggggtggatctaattgtgtccctgtcgcttgggagctccagccgtggcgtcatctggccggaataggctcgccggagtgcggcgaggactgttcctcgtcgtggactttgctctgcgaaagtatagaacgtggaggttctttttgtaaaccgtcagaggctcacctcaatagtgaatggacctatttcggttaagcgttaagcagagggccttttcgaaaaacagccagcgcgcgtgcgggcgcgcttctgcttaggtctgggccgtgtgggccaaagtcagcccattac

SEQ ID NO: 46226 - DNA, 310 bp, Zea Mays
ccgacggcgaggattcttaccccgcgacgttatccatccaacccgagtgtgaatcctggcgccggtgacacgaatcacggcgagactcatcggcggtgagatcttttggtctgacgctggcgttctgatctgatcccggtactgtaccatggagagctgcattcagatagcctgacagacaaacttggagccaagttttctctcgatttccaatgaccactcatgccaagctctgcagcaaagtggtagagcaatatgccatctacaacattgctatatggtgttgccacaaaaagccactggatcatgc

SEQ ID NO: 46227 - DNA, 778 bp, Zea Mays
tatcaccagagaagcaggctcagttcttgaccgctcttctaaatcctctctgtcatcaggtgattaatttttgttttttaatattatggcattattttttttaaacatgagagacttactgatgcgggtaacacccccaaccccccaggccgagtcacttgttatggatgccaaagcacgaggcttgaggaatcatcaccaatggctattagccttcaacaaattattgttgcattgaatatggtcagcaaggtaatttgcatccaccattgcaaggatgcatgtaaaatattctctaaaatgtttgatattaaggtgactgcctgtggtccatctgattgtttaaagttgtgatttattctcatgtaataattcttacttctgagcacgaagttacttacaactcatacttactgtatctgaacactgcccttttttagggcttcaatgagcgtcttgtgatggtaaataggccagctattgggatcatgtttaagaaagtaagttttgtgaacttacatatattccacaatattgtatggttctcacttgttaccatgtagcatatatgcaactagccagtggtggaatctgttgttagccctcaattactacctgtttaagtagtctccacatctgtggtcttcatttagccctttcttctgatataaattgtttttaccatcttctccccagacccttgatgtagttttgcaagtccttgtttcatttcctagcgtgagacctctgcgatctaaggtaaatctgaacctgttcc

SEQ ID NO: 46228 - DNA, 518 bp, Zea Mays
gggagatagagataatgaacagggacatgtgagtggtctcactgaagcacggtcgtgcggttgcatggtaacactgttgcgctggttatgtgaacttggcagctctcatctgagccagagttggtgggcatcatgctttgggggtttggtcaaggcattcttacgtcgtgtccactcctcattccatgtaccaatggttagcgatgatttaactaggcattgatgtttaccggagtgtgtgccttatcgaaagatcagaaagtagtgtgacagtcgttctggtttgggagcccccaccagttcggttcctcatccaccttttaacaccgagcctctttctccgcacaaccatcgcctctccgagttctccgttgtcccttcccttcactcattctcgtcttcccaccactttctcccttcgcaaaccatggtgttctagagatgttccaagcttgagcaaagccttctgtatgccctcatcacccggggtcttcttcgcgaagaggatttgaggtttc

SEQ ID NO: 46229 - DNA, 717 bp, Zea Mays
caaggtcatatgtttatcaaatgtgtgacctctttctactgacatacgcagatatagatgtcgtacatgagtatgccacaagactcgaatttgaaaaggtctctgaacagactatatatagatgagtgcaaagcaaatgtcacgacgccgacatttttactaaagcagcaatttgtataattgctacacttctctgcaagggttgaagcagttgggcttcctaaggttatgcccttccttcctcgttcttctctactttaatttattatgtatgtataaaggtgtttctttttcagatttacttgacatcatgcgttaaccatgtttttcagatgtaccgtatcaatacatgatgccatttactaactagcctaatatttaccactgactgtggtagcagccagtcactgccacaacaatttatgggtcatatgtaccttgtgactagctgcattgcaatttctgggtcatctgtaccttgtgagttgttattcatatcatcaacacctttttcttatggatatgtgaatatgaatgtttaggtgtccctagaaaggccacagtgctacaacagccaaaaggtgaactagagcagggagagaatacataattctagattagcaagctttctgtcaagatatgcatgtactttgttgattaaatggtgtggccacctgtgcaataggttaactagagcagtgagagaatacataattc

SEQ ID NO: 46230 - DNA, 436 bp, Zea Mays
gtccgtatcagttagtgacaatcgacctgatgccttccctcatatcccttgggcatttcgtggatgggacatctcatgaaagggttaaggtgcttgccaaaacccttccttgttgagcatacgaattgaagcaagatatgtgttgccttcactagttaaatgtagtcgtcttaacaactttgaggggaagaattgatcctaataaaacaaatcgaatgcagcgaagaaatatgaatgactttcttgttgttttgtactttttcgttttgagactttgattctaagagttggtgtaacttttagctgcatagatcccactagtacaatgtctgcgcgttgcgatgacacacaatcatatttgatagtggtctaattagaagagcgaagcataagattaccacactattgagcaccagatttggcaccaggatgcccg

SEQ ID NO: 46231 - DNA, 394 bp, Zea Mays
aaacttttaattctcggcacggatgcgaactcaaaaatcattctcgaattatcaaactcgtctaaagctcatttaatcaaacgctcgacagctgctaatcgagctatgtccgactccgatttctcgatgttcgatctatgtccaaaaattaatccgactccgtactctcaaacggaatgctcaatatgtcgtcctctaatcagttttatccaactcggccaaatatctcatgtccgaaccgaattcaaaaccccgtgtcgacagcgattttaaattgccacgattcggtttctccgactaaaaatccgaagccgatcggaagtctgagagaaacatttatttctaaaatagtgcgcgcgaaattatttccgagcgaattcaaatcaaactctcg

SEQ ID NO: 46232 - DNA, 443 bp, Zea Mays
ggttgtttaggggaactaccgtgcttgcagaaggacaacgaggagtacgagcaccatatagatgaggatcaccatataggggaggaaatggaggaggagcaccatatgatacataagaaggagcacaatatggatacccgtatgggtacgaaggaagatattaataagcaaaaggtcgagatggaggatcatcagtgatagaagcttctgtgataggaagatgagcatcagtagtaggaggttcggtagtatgaggaggaacatatctcgatggatggtcggtatggatatgaaggaggatacagatatataacataggatgtggacttaagaaagagggacaagcatggacattctcccgccaatgatgaacgagagaaagaccatcgaagaagacatgtttcacatcggtaggggtctcaagacatggagattgctcgtag

SEQ ID NO: 46233 - DNA, 1171 bp, Zea Mays
atcacaacaacttcggttgttatggattcattgctcgttctaatgcaagctacccagttccaacatttcgaaaaaggtagcccgaggcctggatggaggaatggttttatttcaaaaatgatctggttaaaagggaagacatcaaggggattatccaacgctccatctggtctcgcttcggccttcgaaggtcgaccgtggcgattgaaaatgatgccgaagcctgccaaaaggctttcagcaatgtatgtgccttcattggcacaagagacttgatccaagagcacatagcctacagggtatggccacttgtggataactgggagatgccgaaggagactgctgtcgggtccagcgaaggtggattaattcatttgaaatataccttcagatatagagaccggtttgtcgaaccagatgatgactggctaaaatgtattgaagctactagcgacgagttacttggatcatataccagagccgaagatgacactttatcctcaaccttcgggggccggggcaagaaaagattgaacggggtttttgatgcgattggcttcatataccctgattactgctacccctcgcgaaggcaaggaaaaaagaggaaaactgccacttcggccatcactgttgtgccgaagggcaagaaaataaaggttttgacccaccggtcgcgatatattgaaacggtcgtagtgcctgaatttggtgaagggacctcttctgctgccaaagcagagcaagctgctcctgtcgttcggagcattgaaggattgactgcagtgccaaaggtgcctttagtggggcagccgaagccaaagatggtgtggccaaagagccagagttggaaaaaaacagtgttgctgccaaaaattctgagtccatcggtagaggcagaactgccgaaggtgactgaggctcccgcctcaactcccaagaggaggagaatggctagcgtgctagacgctgtcatagaaaccacaaaggcatttactcctgcccccacgaagaaagttaccgaagctgctacggccgaggctgaagccgaagctgtgccttcagtgtctgctgagacgaagcccgctgtaactgaggaaggggctgaacaagaatctccaggtattggcatagctacggagaaagaaatagccgaagaagctaaatctcc

SEQ ID NO: 46234 - DNA, 475 bp, Zea Mays
aaaaagtacgagcttgttcgactcccttaccgatttaaatttgagaagcaattcaagaagccatgcaaagagtggctagaaatgatcgaaacaatgtgcaacgaaatccttggcaactacaccaaaaaggaagactaattaatgattgccgccttcggcacctggccaaaacgaaggctgaatagggtgatggacgcgttaaactttgaatacccggattacgagaggcttgacaaaggggctgaaggggttaaaaggaaaaggattgtcagcattctgagtaggcaagctgctcggctagtggaggaggatgaaaaagttttgaggaaataaaaaatagctcatgagccaaaggcgacaatttctaaaaagcgaaagcttgacacaacaccctcttatgagccgaaggtagatgagataggagaagaagctcctctaacgccctctgccgccgaagcagccaaaatcctgaagg

SEQ ID NO: 46235 - DNA, 439 bp, Zea Mays
ttagtgggaatcagtgggataatcatgtagatctttgtcatacctttccaacgagtacttatgcgctcgattcggagttataatttaggagatatcgtcgtttgaatccgggtatgttgctgtccaaaaaaacagatttttcaggtgggtgaacagcagtagtattagcagtttctgggaattttcgtggggtaattagtggaaatcagtgggataatcatgtagagctttgtcatacctttccaacgagtacttatgcgctcgattcggagttataatttaggagatatcgtcgtttgaatccgggtatgttgctgtccaaaaaaaacagatttttcaggtgggtgaacagcagtagtattagcagtttctgggaattctcgtggggtaattagtgggaatcagtgggataatcatgtagagctttgtcatacctttc

SEQ ID NO: 46236 - DNA, 292 bp, Zea Mays
actgtccaagctttggactcttctcttgcatcatgttgttgctgaatttggcgctgcgcttcaggctgctggttgtgggacaaagttggagatatgaccggtggttgtggtaaggccgatgcagctaaagagtggcttactgaagctactgaaaccgtaggttgtgaaaatggttgttgattgcccacatacccaggaatgtacgaggaataacatgaagtagtatgtaggacttgcttcgactgattatgtcatgctttggtctcagctatctccttttgcttctgtattg

SEQ ID NO: 46237 - DNA, 672 bp, Zea Mays
tgccgcctgtagcagctaatgtcagtctccaactttgggaatccaacactcttggataaggtgcctacaatcttcgccccggtgcgtcacgaatgcatcccaagatttcttcatcgacccaccgaagagtatttacccgattggtaaccacaagatatagcgaattcttttaactctgacctatcttgcttagaaagttcctggccacccaggtgccgaaggtcaaaaactctcttccaaaggagtatcttcaattttctttcctttatcaggcactgcagccatgctttttccacatctgtcttctctgcaaccacatctaatgtaagtttgtcaatttctgacattgtcgttgcgaattcttcagcttcggctccgtctgcgtcttcagtgtcagcaggaatcgctgctctcactaccaaagctgaaggcggcctttgctcaatcacttgcattacattcacaatatgtctcttcctttgcccttcaaccttctcctccgtggccgaaggcattttcttcttctataaaaggttggtcagttccgatctcagaggacttatgagattgaatggtggggattcagtcattaccttcaaaatttctgacacctcagcagcagaaggcgacagagggctcaatgttttctctggcgcttcatgtaccttcggt

SEQ ID NO: 46238 - DNA, 363 bp, Zea Mays
gtgggacaactcgatggcatgagatggcaacactttagaccatgcagagcgatgtccgatggtcaggcaagcggacaatgaggtcgtcgaggacggaggggcttgcgtcggtggtggcgagcttatcgtttaccgcaactgtacatgacaagacactgtatttacctatagtagtaccttatgcactccttcacacgcgctgtgggccaactcgctggcacgagattgacaatgctagctttaagccacgcggagcgatgcccgatggtgacgcgcgttgactgtgaggtcgtcgatgacggaggggcttgcgtcggtggcggcgagcttatcgtttacctaaactctacaagacatggcatt

SEQ ID NO: 46239 - DNA, 434 bp, Zea Mays
gtttaggattcaatgaacaatatgggtgtgaggaagaagaaaataaggtacttgctacttagctctgatgtgaggtttaggtacttgatgttgtacaatatcatatttgtgacaaatcttaataagcatacatatctagataagtacttgatagatcatattaggtgatcattagcactaaagcaaaccagcaacaatagccgcaagaaaaccaccgacactgaccgacatttgttctcctttgctcatgggcttccaaagttgtgtagtatatcgaaagcgtctttatttggcatacggtgcacctacaatgacactgccaaataaatttagcagaaatcgatagcaaagagagacacggccgtcggctggccctgacaaacaagcacatcctccaaatgccaacctactcgttcgtcgcaaccgcaacaaca

SEQ ID NO: 46240 - DNA, 367 bp, Zea Mays
gcggggtccgggagtggagatcacgaatttgagtcaaggcaggacatggcagggattttgggtcgaggcggggcatggcaggggtatgcgaggcaaggtttctgcggtcaccggcctatgttgtggagatgtgcggtggaggcgagacgaggtaggagtgggaccggtggtgcgcaggggtgcgttggagctgtgcggtggagctatgcgtggagtgcggtggagctgtgtgcaggggctgatgatgcttctctctactcgtagtggaccatcatggcagagaagggaggcgggggcatggattctctctgttcgcagtgggccagcatggcagagaaagggaggcggggcatgcacgcgccggcgc

SEQ ID NO: 46241 - DNA, 759 bp, Zea Mays
ttggactagagatgaattctctacgaattttataagttctagcaattctttttctcattaaaatcattttcagattttatttaaccatttcttatgaaatctggactgggcacactattaccagaaagatcagggggttcggggcaagattccagagacccagcgcacagaggtgacggacggcgggttgatatatgtaaagagtagggtctcttttgaagttttacaggccgaacgggtaccgtgcactcagggctgttggatccgcagcggagggcacggattagatcgctacttcaaccgaagcggtacccaaccggatccatcggatcgctaatctacggccaggattttatgtggtcggaattaaccagtgaccgttggatcccaatccacggcacggatcccatcccctcgaagcggtgtccgacgcccagatccagccgtccgcgaatagatcgacggtgtcgaacccatctctttcccccgatcctatcctatcctaccaattcgatcggacggccagggactcatcactccccagattctatccccgccatcggacacagatcccatggcccatatttcatcttctaccccagacagccgagcgcggcggaatacattccctacagcggcgctcctcaccggagatacacgatccaatgcgtggactccctaattcacgagctaatcggtgcaaaaggaagcgtgagccatggtgagactacccaggggcttaccgaagaccgaggtgaa

SEQ ID NO: 46242 - DNA, 460 bp, Zea Mays
acttaagtaggttttatgtgcgtgataagtgttgatattaagtgcttgtgaaatgcttggtttggtggactccaatactgttaagtaaatgcatcgttttgtaaggtttaaaattaagatgaagtattgtgcaaggtgattaagatggtgaatttgtaggcaatggatgggatatatggtgtagtctaagttcaaaatacaagttacgagaaataatagtagacatgtatatgttgtatggtccaattaataatgtgcatgaatctagagttttccaaagtctagcggataggtgttgttagtactacgcataatgaatttatgtttgtttgtatggagtcgataccctgctttaatcatctttaaattctatatttagtggtcattatattctatatcaattttatgccatggatgaactttaattgtcactctgagtatctgggatcgagcaacatcg

SEQ ID NO: 46243 - DNA, 452 bp, Zea Mays
gaataattgtaattaagaatgagtaaataaaagaaataagacatgaacaacttgtgcaccatgctggagtttattggattgtgtatttataaacaatggtaatatcgataaaaatagaattaagttaatattgtgatttgagacctaatttgcaattttagaaattggagaagtaaaggaaaactactatacaaaataaaacaaatatgggataaataaaaccttgctatgatggtttgaccaaactgcataattaaaataggttcaaattcccaaataagtttgaatccagatttggatttaaaagagttaaggataaaagaaatcagaaaaaagataaaaaaaaggggaagaccacacgtgcgggccaatttctcactccctggcccaactaacacctctaccgtacaacccaaactccccttggtgccgacaccccggccccacgggtc

SEQ ID NO: 46244 - DNA, 964 bp, Zea Mays
cacatgtttctagggaccttctggggcctctgccctctttgagggttctggacccctcatgatgggtcttcttcgcttgacaactccatatgttcctagggccccactggggccttggaccccctgggtggtattcggagccctagggtatatttcatcagacagccgctctaccaactaccgtgtggggcctaggagtatagtatatctaggctccgagagacctcggcctgatgaggtcctaacacgccacgtctcttgaaggcctatggcgaacctggttaacaagagggctttggatgggccatgtggtcggccgccatggcatggtcgattgaggagttggtggagtaataagatgtatcgcacatgttttacacggtaggcactactgttttagcattatacctattgccttgctatcggggcctagtagtctagggcatggcaccagcatggcactattgtgacatgtagcatatgtgccttgagccgtcatgttctatgttacctgtgtcgtgtgacatgtgtcccgactctggtcatccgtgacatattccatgaagtcctaggtctcttgtagcggcatgaggacctaccctccacttgtcatgtcccaaaattttggtagcaggcacatgctctgcaagcacctaatatatccggtacaaatagggcatttgactacaacatcttggacattcctacaagacctcagactaacatcaataagacttccaacgattcactctcacacttataatcctctgtgagctgagatatcaccaactttgaatcctcgaaaacttccactacttctacactagcttagaggagcaactccatccatttatgcacggcatggtattctgccatagtgttgatgcaggggtcgggtaacctgatagagaaagaatatagtgccccccaaggcgacacgaggagaattcacatgccacatatg

SEQ ID NO: 46245 - DNA, 389 bp, Zea Mays
ccggttcgatgtaacgcgaccggtgagtcagaaccttcatcttcttcctctttggctcagccgtgatggccgaggcagcaacctttccagcagcagcaatcttcctttttaccccttgccctcgcaacggttaacgatagtcagggtatacgaaactaatagcatcgaataccctgttcaaccttttcttattccgaccctcgaaggctgcggacaaggcattgtcttcctttttggagtacgctccaagaagttcatcacttgtagatttgatacacttcagccaatcatcatttggttcatcaaacttatccccaaacctgaatgtatacttcagccggaccaaatcaccttcgctagagttagtgatggtctccttcggcatttcc

SEQ ID NO: 46246 - DNA, 527 bp, Zea Mays
atatgacacatgcaaagttaaccaaaataaatcttacgcttgcagccattgttgatgaggtgtttttttcttaaaagacaaatattcgataggacacggattaaactgtggtcagataacattggtagcttctgcatagttttacttcttatgctgcatcggtaagtacttaagcaatgatgagaaaatgattcagatgaacatgtagtttttactatgtagtccatctcgttgatataacatagttcaagtgaatctatctacatttcctagccatgtttagatatctacatatgctctgcagctgaaagttgaaacaaatgcatatggatatggaaacattacctgaagataaatctaagctagaggaacaggaacccaacatagtgggcaaatgagatacttcctatccttttagagaaaaaggaaacatttatagcaacatgttaacttaggggcggagccacactgcacttagtggtgtcttgtcaggctgtgacaaggttacacgcaggaggcaaagccgg

SEQ ID NO: 46247 - DNA, 434 bp, Zea Mays
cggcggagcggggattgacgaaggtggtggatgcatggttgctcgtgctttgcagtagtagcagtagtaaattgaaggcagctgttgactgttgagacggccgggcatgcaatgcatgaatgttggtcatgatttagttcatgtctcgggactgtaagcgacgagcgaagagatctgttgatgaagacaagcagggaacatctgagttgacagcaagacgacttttttgtaacactcgaggcatgcggtctactcctccgatccattctgctagtagtagtactagacatcatcgagtgtaatggttaaatgccattgaccttcttgacgctatagctgctaggagggagccagctagccactcgtgctccattttctacgtactccttcctatagtaatagtatagctgatgaaagccctgcctgtatatgat

SEQ ID NO: 46248 - DNA, 410 bp, Zea Mays
gaaaactgagtggttttatgttaaggttgatgagaaaaaggagaagctagttcagagcccactagacctaaccttcgggttaactaggccccagtgccgcatgacgccggggtcatcatgcccagatgatgtgggcgaatttagagttgtgtctgagcatatcgatactagggatttggttcaggaatacttagccaatagagtattcccaatgttaaaggaatggaatatgccgaagctcaaaggagaaaagaaaaggaatgaacttgttcgactgccctatcagttcaagtttaagaaacatttcaaagagcccagtaaagagtggttagagatgattgaagccatgtgcaatgaaatcttgggcaattatacgaagaaagaagatcaattgatgacggtagccttcg

SEQ ID NO: 46249 - DNA, 393 bp, Zea Mays
gagggctgccacggtagatgccacgaattccttacgctagtgacctcccactcctccgaccgtcgcgcgtcgtcgtccgattcaatggacaccgctcttgcctactataaattgaggccaccgtgagctccgtagggtagtcaagcaccaagccacccaaaccgtgccctcaatcgatcatcagagagcttcaattttgaatttcccccaaatctctcaagaatgccgcagaaaagacctcgctgtggccagcccaatttaggtccaatctcgcccactgcattcttgttttggcacccttgcttgctcttgatgctcaccgacccgtccaattgagctagaacctcatagatcaccgggaacgcgctggattgcccgtggtgcttgcggtca

SEQ ID NO: 46250 - DNA, 764 bp, Zea Mays
ttcacctcaaggttttggaagagccttcatgagaacatgggtacgaagttgaacttcagttcaacctatcatcctcaaactgatggccaaactgagaggactaaccaagtacttgaggatatgttgagagcttgtgcccttaagcatggagccagttgggacaagagtctaccatatgctgagttctcttataataatagttacaaggccagtctgaagatgtcaccatttgaagctctatatggtagaaagtgcagaactcctctatattaggatcagactggagaaaggcagttttttgggcctgtggttattcaagaggcagaagaacaagtccgtataattcgggagaacttgagggttgcacagacccgacaaaagagttatgctgacaaacaaagaagaatattggaattcgaagagggtgaccacgtgtacctaaaggtgtcacaattcgtggaatgaggagatttaaagttaaaggcaagttatatcctcgctttattggacctttcaaaatctttcggtgagttggggagatggcctatcagcttgaactatctgatcatctatgtgatgtgcacgatgtgttccacgtgtctcaactcaagaagtgtctccgtgtccctgaggaacagttaccaatggaagaactcagtgtgcagggtgatctaacttacatggagtatcctatcaagattattgacactttgactcgagttacaagaaataaagtgataaagatgtgcaaagtgcaatggagt

SEQ ID NO: 46251 - DNA, 474 bp, Zea Mays
ctactctgcaactaaccaaacatatgccaaagcacggtcaatgggatgagggtgatccaggtgcagtagtttgagcaaccaatcacgcgacagctgattctggatatttaatgcacatgctggttaatctcacgtaggttcatgacttgtgactatggcctttagttccacgccaagttatactgtccactaaccaataatggtacctagatttgacctgagcatgcactttatgttagtgcgaaggaacctcatcatgcatatctcttacctaggtgagtgcatcaaatgtataggccacattagacaatgttagttgttgtgcagtctaacaataaaatacaaatatgtgcaaactctttgctcaatgtagtatatatcactatcggttcaacctataaacctgcattgccactattgttttaagccattagttagaatttgtaactgcatgcatagtacaaaaaactcgcg

SEQ ID NO: 46252 - DNA, 480 bp, Zea Mays
aggccttcttcctcccccggctggccgaacggtggccacgcgaatccacccacggcggaaatcaacgccggcgagcaattccaggacatatagcgatcatctggagttcgggttgatgctacacgttaattgtatgtaatcgactcggggagtggagtttttatcgaggattccactgtgctgcgccacgcccacggtgagttgcggtcacgtcagtcgcagtctcattggggaggaattctcggcggtcttgagcaccaatccgcgccgggaacacgtctacaccacccacgggcaccacagagacccccagcaaccctcgcgctccaccccactaccctcgcggagaatggcggcggcggtgcttctacctctcagattgcgggtggaaaatcgaagacgactcggtggagaatgggtttcagattggctcagttggaaacagggagaggagccacggcggcccggcctatatagacg

SEQ ID NO: 46253 - DNA, 304 bp, Zea Mays
atcgggcctcaccctctattaggtgcaccatctacctttatcccaaaaatgacttctctatgtaagtagtctagtgaatcgtctgttgcacagtagactggtccagtgtgctaagcttcagctgcccaaaaaattgctctctatgtaattagtctggtgcgccactggactagtcaggtgcacataggagttggtctggtgtgccaagcacagtattaagtccttttttggcctttgttcttgtattagtttggataacttcatgagcatttatatggcttcaacaaacatatctagagtccat

SEQ ID NO: 46254 - DNA, 576 bp, Zea Mays
caatacaacttcgccacacagtcgttcatcacatggccctttgcgtaacatctatgacagtgtgcctttctctgaattttcataccttcctcatgaacgacgtccttgtttttcatctcaccttcccgggctgcgctctccacttggttctacggccccttgaggccctcagtaccctacgccgatccactgctaccacccttgtccgcctttaattcttggatcgccgctaaagcctgctgcaaaattgcctcagccttggccggttgatcctgtgcgattgcaggtccagcggatggtaccaccacgttagcattggtggctgtagtagtctgcctagcagcgtccgaggcaccaccatcttgatgtggtctgggctcaccccgacctctctgcaagccacggtacccccgcccgtatcccggtctcgcccaggatcggccgcggttgttgtactgtgggccggcatgcccaggacgaaaatggttaggaccatcatactggaacttgcctcttgccatcgggcgacctgagccagcgtcccccatcttgcctccttgagccggcggctgcggg

SEQ ID NO: 46255 - DNA, 519 bp, Zea Mays
cgataaatagaggttcttacccattaacatacacgcgggtaaagagatcatcacatacatgtctttatataaggtaaaactcacttgatattcatgtttcgggtacccatttccatctctagtctctgtacatcatttgcctcctttttggctcccgtgctcatccaagctaagtcgagtctctcttgttgccagtcactatgttcttccctaccatgtgatgcatgtgcctctgtgcttgcgctctactatgttgctcactcacctccaccgcacaacatgcactctgttggacccttgtcgtactacatgtttgcacatgtcatgtcgcctgccactttcctctatgtgtgctagcctacgcttgtacgtgctcatcgttgcacctgtgagctcaccgtgctcctatgcatctcccctacacaaccctttacatagttctttcctgtttgtacaatctattgtgtaagccttccactaagcaaacccaattccaacttccacaactctctagggttt

SEQ ID NO: 46256 - DNA, 630 bp, Zea Mays
attgcttagaattgtttcttacaaaattaggaatcatcttccaggacataaaactagcaaagatacaaagtttttagtcttccctaaggactttatcggtagcttcatttagaagcctgtcgatagcttcgtcaatagcgtcattagcaatcttaataatgtccagcgcctctttgatggacgggtcagctttaggattgtatgatttgggaggtggagaaagctcagctgcattgagacaaaatatctatcagtgtcgaagctgaaaaacttacgaaaatgagttaaaaaagtgcatacctataagtctagcccgctcgacagcttcttcagctctttttgcttcttctgaagcgtcatgagattccttctcatttcttttgatagcttcattggcgatttctcgtccacccttcagccatacttcagaataaaatttcccacctaggatagtagcttcggctgaagggtttctaatatcatcagctgagaaggcgaagtctggctgagctacagccttagcatgatcgcaaccaaccttctacaagatggacgtagccccacgggcaccagcaaaggcacaaaaatctcctcgatcactaagaacttcttcgaaagcttcaacttcac

SEQ ID NO: 46257 - DNA, 322 bp, Zea Mays
ctccaagtgtggaggggtttgaattttccattattgcgccatgatgaagctcatacctatgaattcatagataatctctttatggggaaaaaataggcactcgagcttaagacaaggttcttgagttcatgtttttgtcgcttaatctgtgactctttagtggtcgtgtcttcttcctaagctttgccttatttcggttggtgtaagttgatatccctattccagtttgtctctccttaaggatcacattgttactttctcaatctaacttagggaaggcatgtctgatctttttcttgaacttgatacctttggttttctc

SEQ ID NO: 46258 - DNA, 591 bp, Zea Mays
gcaaaaagtgggagattataggccaatttcgttactaaacaacagtatgaaaaatttaacgaagcttttggcaaatcgattgcaatcattcatgacacggttggttcacagcaaccaatatggtttcataaaaggaagtacaattcaggattgcttggcttgggcctatgaatacattcacttatgtcatttctcaaagcaagaaatcattgtgctaaaactagattttgaaaaagcatttgacactttagaacatgaactgattatgcaggtcatgactcataaaggttttggctctaagtggattaactgggttcggaacattctacactctggcacttcttcggtgttactcaatggagtccctgagaaatccttccactccaaacgaggagttagacaaggagatcctctttcgccactgttgtttgtcttggcggctgaccttcttcagagcattataaataaggccaggcatttgaatctgcttcagcttcctctacctgatatttgtgaacaggactttcctattgtgcaatatgccgatgatactcttttgatattggaggcctgcccgaagcaattattctt

SEQ ID NO: 46259 - DNA, 388 bp, Zea Mays
atttacggaggtttatttttaacttagccgggaagattggcgccttcactcctatccttcggcttaaaaacgatgccgaattcacctgggggcagaacagcaggaagcgtttgatctcatcagaaagtatttatcttcggctcccatgttcaaagcaccacatgtaggagtaccattcagattatacattgcagccgaagataatgttattggagatgttctgacgcaagagaccggaggaaaggagcatgtagtgacctacctaagtcggaggttggtggatgctgaaacaaggtacacttttatcgagaagttatgcttatgcctattttatgcatgcaccaagtgtagatgttatttactgtctagtcattgcaccgttgccagt

SEQ ID NO: 46260 - DNA, 553 bp, Zea Mays
atgacgttgccttctctgtgccgattgtcttgctgttgtgtttgtggcataacttagagtttttgaatcatttctccacccgccttatttatgacgttgactcctttgggatagtaattaaataactcgggcatcacatcgatgcttttagaggtagctgccgagtgacttgaggacgacgtcggagttttagagataactaccgagcgactgaacacgatgtcggagttttagaggtaactgccgagcaactgaggacgacgtcggagttttagaggtaacaccgagtgactgaggatgacgtcagagttttagaggtaacgccgagtgacttgaagacgacgtcggagttttagagataactgccgagcgactgaagacgacgtcgacgtgttagaggtaactgccgagcgactgaacacgacgtcgaagttttagaggtaactgccgagcgactgaggacgacgtcagagttttagaggtaacgccgagtgacttgaagacgatgtcggcgtgttagaggtaactgccgagcgactgaaggtaacatcgg

SEQ ID NO: 46261 - DNA, 524 bp, Zea Mays
ccgcagtacaaaaagttcgcaaaacacagaaactccatgtttctgcccatcacctcaagttagacctatggacagtccgccatgctggcccggacggtccacggtacctcaattcagcccacattcaagaaatcgcttttgaataggtttttctttcacgaaccaaagcgttgttagccctcatgcaaatgcaccaactatatgagcaatgaggcactaaaaacatatcaagcaagataattgacccctcttgatagtacgactatctaacctactaacccggtcaattatcaacctctaagcaccttttgaccagtaaaacaaaaacctattgttatacctttgccttgagcattcaattccatctccttaaatgatgaacaatgggcatccataagtgtagccaaccatgataccttttaccatttgtccatagcatgaagttcctccaccatcatcatcaagccacttgatcaatagcccagatcaacacatggcttgataattctgtaatgatatgatcc

SEQ ID NO: 46262 - DNA, 719 bp, Zea Mays
ggaaaaatttgtagaagcccaaacccaacttaagcactgtttaaaaatactaagcaccctagtataaaagattaaaacagggttatctattaaaaactatatctgcccaaaacttaggaaattaggaaaggaaataaaaattaatgaacacaggatgtttatatttttcctaatccacttaaataatgaagaacttaggaaaaatataaagaaccctagtcgagaacaaattcaaggtggaatgttttattaggcactaataaaaccagaaaagccattatcaaaaatataagaaccatttcaaaattggtaagaaaaattcagtagactcctaactactagaacaccactacaaaaatgataaacaccccagcccatcatcttaagtgggttgaacaaataaaacttggtatttagtcatattccaattaaatcataagtaagccaaaaagtgtgcaacaatgggcaaattttttttaccagattattaatgaagtaggacaccagagaaaaatgcaaaacctattcaaaactacaaaataacactcattgcccctaccttatgaaaaaggccatttaattcaagaaattcctaccacccttttccttaagcaaaaagttaccaatttctagaatgattgctcttgcacaaagaagaagataagaaaatttagaaatatgttgtttgatatttttcaagtataatggtagtagaaagc

SEQ ID NO: 46263 - DNA, 536 bp, Zea Mays
aagaaggaaattctctggctatggtggctaatcaagggcagggatggatgctttgtcttggtgataacttagcgaagcagaccgtgccgtcaatttataaggtcgctaagcggtggccgatgaatttggtctcgcacggtggcagccggagaaagaggagatcaatggtgcaagtgattggtggcatctaccgtggcggctctccggcgatccccggatatagatgacccgagctattgcgacgtggttaagggcctgaggcgtggcgcaattgcggtgaacaacacagattccggtgacgaccgtaaggccacgtcgctggtgaagtggtcgagggacagcgaggccacagtgtcccagacctatccgcggcgtgatcttttcaccgtcgagctcaatccacagacctgaagcacgaatcgtggcgatcggcaacaatcacggcgaagggtcaccggcggcgagattcacagaatttgtagatttttgccactgtaccatcagaggtttcatcagttggtctgacagggcttatt

SEQ ID NO: 46264 - DNA, 465 bp, Zea Mays
cgagacttccgcgcggttgcatgtagagagattccagagaacggttcctagaatttagcagatcaaacatgtgggggatggatatctccgggtccacatgcgcatgaaaacacgaccggggccacctagggcgtcctgcgatgggccgaccgaaaataaacaggcgaagcaagcccattctgaaccagcaaaggcccaacgtccgagttaggcaccacgagagcacgagtatatcgggcatggcggttgcgcccacccgacaagctaagcctccggcaataactcgggtggatgagcgcaggggttcccaagatgtaggaggacagttcgctacaacccgggaaatggacaaatggattatgttcgtcacctgtgcggggatagctatccttggtcgtgtatataaggccaagaggcactcctaccattttcatctcaccccagcccaccattctcatagttcac

SEQ ID NO: 46265 - DNA, 502 bp, Zea Mays
ggcgcggtgcctactgatgttgtcctttttgtgtagatcacatgattattcgtgttgctacttgttaacacagttggacgctaatgtggtgcacaggaattactggctccctacagatgatgctatgcaaaaaaggagaacataaagctcagttattcctgtgccagcgcaattactgcacaccaggtacgtactgaaagatcataaaacgctgggagatcaaaagttcaaaatcgagcccttaaacgttgaattagcgttaaaaattcaacaagacagcgagaagtgtaggaaacataagcaggttagcagaaacataggcagatcggcagacacccttccccagatgcaaatgcctactgagaaaaataaccgaaagaaacgttgggagctgtacctagttaaatttgcaagctagacaatcaaatgaaaggattctgtcaggtcggttacgcaggaagacacttcgttggcagttcagtacttcagtaacagatacttg

SEQ ID NO: 46266 - DNA, 565 bp, Zea Mays
tggagaggcgtggaggtgccttgtagagtattggagtgcggagctggagcctagaggacgcaggctggtggaggacggtggactcgtgacgggcgactagctagagcttggaggacgtggactgaagaggcgatgttacaaggacctccacggacatgacgcgacgagcttctggatgacctccttgcagatacgagctgtaggctggccgagaccacctcgtggcgacaagtttaggctgggcgaggacgtcctcggaggcaggctgctggaggacgcaacccgaatacccgatgtgggctgctgggaggcaggggaagtggggatggtaagcggtgtcggatggagctattgaagatggggaagaagtgttgggcgacgagcggtggctaagaaagtgtagaagtgtggaaccgtgaaatgagatgatacagcatcacactgatgagcagtttagggttttggcttggggtctttggacgctcagactatccgcagcggttttctctaaatttgtcttcctatattattttttgggtcacatcatcaacaatttatctcctct

SEQ ID NO: 46267 - DNA, 782 bp, Zea Mays
taagaattagccgaccagtaaggatatatctctatacataggtagaggctagtgcctcttttagagactggcagactggtatgtcgaatatcaattccaaagaaactagatcgtagtaaaaattgctaagctctaaacatgctgggcagcaggcaggaaacctagaccacccagcatgtaactgcacataagcatcaaaaaattggaaatgctgaaacgtccatgtaggaagccacatcaatgtgatcgctagctacatgctccttaagcgtggaactttttcttattgctgggcattagaaaatatagtgtaggtaaaaggagaatgatgtgcataggtgtacagactaaccgctgatcgaaaaggcaaactgttgagtatctcgtccacgctgcgccacaattcgtctcgtccacgctgcgccacaattcacccaggcagcaagcacccagagcactgaaaaaacagctaaaaaagaattagctaaccagcaaggacatatgtacacagataagcacgcaaatatacatatgtatgcagattccttgctgcattggccatattttgttgtcactttaccaaccgataattgtagtatgtgtgtatgtatgtatgatattactatggaaaaaatacgaatctagattagatatggataaccgaaatgttttgtcaggcctaaaacagaaatcaagcggtaagtactaatttggcaccatctaagtctagcctctaattatgtctcagaagcagcccagccatccacattattaaaaaatac

SEQ ID NO: 46268 - DNA, 629 bp, Zea Mays
cgcggcgtaacaaacccgtacagacgtaacagactcagccaagattattaggatctcctcgaatccctgtaaccacctgtagccgaactttgtgcctcgtatggccaggttttcctcccggtgtataagtatagaagagcacccttccccaccccgtagattgaacagggtgcaccattgtcgagcggattcagagaaaggatgaggtagccgcgagagagcgtacatgtaggagagagacacagacaccacacccagagcctgcaatcgccgtcgaccatcctatctagcagtcaccattgccccagcactacgccgccaccgctcccaactcgatcagcctctgcctccatcgacttcaagaaaatagctattttgattacgcgtatccgtcgatggggtcgttgatatcatcatcaccagggatgtggagcagggcgtcgctttgtcgtacgggaggtgtgtattgcgtcctccatcttaactatagcagctagcaaaaaggctaacgtgattagttcctttgggtggcaattacgcattgttttagatagggattacgtgttggaattggatttggttatggctcatctaattaaaagtgacgacatctgatcagcaggaattac

SEQ ID NO: 46269 - DNA, 1080 bp, Zea Mays
gagccactgctgcccgggtacgttggttcagacacgtacccatggattcttggttgctagcccagagggacccagcagctgtgccactcttcaacaccaggactcaggagtcattctttagggtgcatcagcttttggatctccctgtgtttctgtcagtcgtcagtgccgagtcagagggtcacctatcctatctgccaggttttctttctcttctgacctctggtggcagatacattgaggagtgggtcagagttttctatgccacagtatggatagatccatatcattagtggctgaggttctggtttgaacgagaggatgccacgttgcatgctacccagatcagagagctctttggatttcctgagtcgacgacgaggctccacaacttgtgctacggcacgtcagatcctccctgtcgccctcatggtggagttgctccagctacagctcacgttgctgccctgttcagacctccgtttacagatgggtcacggcgtcctcctgccgacttcactcctgcagcgaagttcctttatgagctgatgaggcggactttgctacccaggatgggatacagggaggccaccacacaattcagctctggctacttggtgccttgatttcacactcagagtttgatgtggtcgactttccgatctgtgagattgaggatacaatgttggatggtctccatgctcgtcgtcagctgccgtatgatcactacctctgtcacatctttgtgcagctgatcaggcctcctcagttctaggccaccctcgaggcctcttgactttagtttggcttatatcgcccagctcctaaggacacagttccagcgccagctccagtaccagatctcagggttgaggatgaggccatcagacagttcgaggctcagggtgccgttgcagatacttcttccgatgatgatgaggacctggggattccgccaccgcctcttgtgccacctcgctcccataatcatgaggtcgttagctctagtgttgctcttgctgcccctctagctattgaccctgccttggctgctattcttcagtcgcttactcagcagca

SEQ ID NO: 46270 - DNA, 622 bp, Zea Mays
tcctgaccaacacacggttggtattagctctcatctagcacccatggcgaaatgtctgaagcacactactatccacgcactgtggctggttgccatagttcttcttgcatcctctgtcgtacttcatgcgcgcataataagcagtaatcaatgaactagaccaattttcctttatttgtgtaaataaagatagatagatatatgcaatgttcattctgattaaattgcatgtatttcaattaattgattcttatcagggcaaaccaaagagaatagcaacactaggagcttgacaatgactatgatggggccggcaagcaacattattggcactggggtgggcaactttctagagggaagtgcattaaggatcatgcatagttcgtgtgcgtaaagactatggagtgttttgtgaccttagtggagtgcttgatagggtgcagtggttatgactaacaagaggccgtgcttttatccaattccaagatggaaatcataaagatgttctagcaaatcatgcatcaaccacaagatcaaaatataagctaacatacctttaattacgtatttattatttcaaaatactctatgggcctaaattataagtcatttagcacaatga

SEQ ID NO: 46271 - DNA, 1311 bp, Zea Mays
tgtaagttacatgttttcctcagaaaacaagctgcagtactgcatatacagaaaagttaccgctgctattttgcttggaagacttactcggagctatgttcttcagccattacattgcagacaggtttaagggcctttggtgcttataacgagtacattatcagaaaacaaaataaagcttctatttgtgtccaggtagactacagattcattctattctttttatttaaagggaaggctggttataacttccagtttacagattgatattttacttgttcatctctgaactgacactctgagaatggttgcctgcaggcttgttggcgttgccatagagatcatttgaattaccttaaaatgaaaagatcagtgttaatttatcagtgtgcatggagaagacggattgctagagaagaactcagaaagctcaaaatggtacttgagtaattgtatcattgttttaatcattttgattcttctgtatttcacttgtacacccttttatttgttgataccttttgtaggctgcgagggacacagaagccctgaaggtggagaaggagaaacttgaggagcacgtggaagagctgactagccgtttgagcttcgaaaagaatcttagggtggatgctactcttgaattacggatttgagatgatgtggataaattaacggatgaatttatgctcacatagtatcacttttcagattgatctagagaagagcaaggcaagagaaatttgcaaactacaggccactcttcgtgagatggaacagcgggttgaagaagccatagagatgcatgaaagagaattagccaaaaaggctattgaggaagctttagctcaagaaagggaaaagatcaccgtattgactaatgaagtcgatgagttgaaggtacttttttcctaaatcaacttatgaaatatcccaactgtaggtatctgcaaggatttgaatattgcattattaatttaatcaaatcagatacaattacagcatttgtttcaagctgaatggtaaaaagaatagcttggctacaaaacatgtcccacgtttgattagagtatggtggaagttatttgtttatctttgtcatgatattttctttttatggatgactgtaactaacaggtattactatcaagagaacgagaagaaaacagtgcaactaagagtgcactcgttgttgttcgtgaagaaaatgatgtgctgaataagaaaattgtggttgcagatgcaagcatggagcagcttagagatactgtaacgaggttagttgctcaagtagactgtgccaagtttctt

SEQ ID NO: 46272 - DNA, 845 bp, Zea Mays
gctgcaatcaccaagtttttcgagctgcacaggcttatcgttcagcaaagtgctgtctggaaagcttacactcctgagcctagcaaagaatctcgaccggagaaggaaaaaccgtcgaggaaagcttctgcatctcatcatcaccagaacaaagctggcacacgcgacacagctaagaatcccgaaggtgcccagggcagtgagaagacggaatgggcccgggaggacggtttcaaggagatctgcaggtcatggattgttctgaggaaagaatcgcggtcgtggtttctgagcttcctggaggatgcacttgaatcaggattcatgtccgagggccaaaccaccaagaacacgagagaacgcgtgcggggacaacccaaacccaagggtggggacgggaggatcgcggtcctgctgtcgcagctcaaggagacgagcaactggctcgatcagctgctgcaggacgaggcggacacttccgcggacggtttggccgaaaccgttgaccagctgaagcagaaggtgtacaaatgcttgcttggaacggtcgaaaccgcggcgtcggcactcggaggaagataaaaaaattgatgtaatggtgacgaagacgagcattaagttattgggtgttcagtcctgcaacaggatgttggggtgaagaacacaatgaggggaagatgtaaatagtcgggttgctcatttttaagttataaactaatttatttttattttttgggaggtgggggtgggggaatttcctggtgttgcgtgtgaaatggcaattgattttcttgggtattcgaattgttacaaatgatcttgcgtgtcagcttttgaaatagtcg

SEQ ID NO: 46273 - DNA, 637 bp, Zea Mays
cgatcacatagattcggttaccactgtatgataacatcacgtgggcttcaatcctatctcccttgatgcttcatcaatcacagcacgtgctaatccctttgtaaaagggtctgccaagtttcgagcagtattaatataatctacgacgatctctccagtatttgccaaatgccttactgatttgatacgtcatttcacatatcttgagaactttgcattttgctttgcattgcctacaattgtgatcacgctttgattatcacaatgcaacggaatggctggtaccggcttatcaaccattagcaagtccatcaagagctctttcaaccactctgcctcagtagtggctgactcaagtagtgctacaagtttcgcctccataatagacttagttaagatagtctgcttacgagacctccaagaaactacatccccaccaattatgaatacatatccacttgtggccttgatctcaactgcatctgagatctagttggaatcactatacccttcaagtacagcaaggtacctagtatagtgaagtccatacgcagacgtacctctcaagtatctcattacacgttctagtgcacaccagtgatcgcttcctggatagaagtgaatctgctcaatttgc

SEQ ID NO: 46274 - DNA, 970 bp, Zea Mays
aatgttatcttttgaagtacaagatacaggtatagaaccaattgtatcaggttggcatggtaagcactatttatgccttttcatctatcccacttcctatgttgtgcttcttgttccttaagcttcttgggtggacaatatgctttacaggaactatatctttatgctctaaaacacagttgcatttacgactttatgattgtgtcgaagttattaccagaagttgcttattgcatgctatgccatataaatctgtacataacagaaagttaaaaaatatctaagttaaacttcagtttagtatgtagcagttgttcctttaatatagttctttgcagaatgtaacctgggaaaacatctatgctaatatgctattaatttttggatgattattttgaagacacttcttagcatcatccttggttcttaatacagaaaatgcatcttatatttttttcttgctcccttcccttatcttctttcagggaatataccatgtttaaggattttccacctatatttttgcatacacttgtgtaattctctcatgtttcgtatgtcatgtacatgtcaagattataaattgtcttgtgaaaaacattattgttgacatctcatttaatcaagtcggtggattatgcacactatgttttctttaggaggtgtgttcttactttccaaaaccatcttaatttgtatatgcaataatgcagagcacatgctcaaaacttttaccatttatgattcaagtgtttaaatatgattgattttctgcctatatttgtttaatgattgcattttaatagattgacaacttgatcagccaataccatttattctagaggagtatcatattgataaaggcagggtgtttctatgagagtcgtattcttggagctcaccatggtcttatatctacttacgcattggagatgcttgttctatacatattccatatatttaacaactc

SEQ ID NO: 46275 - DNA, 692 bp, Zea Mays
cccacatcctgggaagatgcaacaggcgcagacatgacaattccctggtcctcagaatccgcttgtccccaagcgatggcatctagaaaacggttcttcaacacatagtaatcttcccaagttgctaattccactggaacaccagaccagcgaataagaacctgtggaacagcttgattgcccttgcgcaccagacgtcgatctagaatttcttcaggaacaatgccagtccttgagaggtccaccaatggaggcaaataagtaaagactggagtatacgatggatgataaggttttagttgtgaaacgtgaaacaccggatgaacttgagcattgtctggaagatccaatttgtaagctgccgcaccaatcttagccaacactctgaaaggaccaaaaaacttgaaagccaactttggagaaggacggtttaccacagtcttttgagcatatggctgaagcttgagcagcaccatctccccaacctgaaactctcttaccgtccttccccgatcagccatttgtttcatccaattttgagctcgagcgagttgttctctaagatgagttgagaaagcaaccctatcagccagccaatccgttactgacccctcctccggaacaccagattgaggtaacgccaacattggagcatcatatccatatagtgctttgaaaggagtacaacccag

SEQ ID NO: 46276 - DNA, 638 bp, Zea Mays
cccaaacctgagatcagtaggtagtactacctccgaaccatagaccatgaagaagggagtgtttccatgcaaagctcggctaggttgagttcttaagctccaaaccacatacggcaactctctaatccacttccctgtgaacttttcattcttgtcgaagaccttcttcctgagtgcttccaatatcattccattagccctttctacctgaccgttggctcttgggtgtgctactgacgcatatttgatctggatgcttctttgttcgcagaagtcaaagaattcagagctagtgaaattggatcccaagtcagttataatgctatttggtattccaaacctgaatattatatcttgtatgaattccattgccttagctgaggtcagagaagcaataggtttgcactctatccatttagtgaatttgtcaatggcaaccagcacgtgagtgtatcctccttgagctttcttgaagggtccaatcatgtccagtccccagcacgcaaatggccatgttacaggtatggtttgcagttgctgtgtaggtaaatgctactgctttgataagtattggcaagcttcacacctctggactaactcggctgcatcactctttgctgttggccagtagaaaccag

SEQ ID NO: 46277 - DNA, 320 bp, Zea Mays
ctcccgcaaaaatctacgtcgaaaaaagaccgcaccgacggtcttcgacattcgaccaatacaaagtcaccgcgaggcccagcgctagctaccctcgcgtgcgacactccgcgcaaaagtcgcctaagggtgcagctagactagcacaacaagtgcggaaaatcgaagtcttccgcgaagagtatccgtgcaaaagtctcctaagggtgcagccggaccaagcacaacaagtgcgaaaataactacaccaaactgtccgcgcaaagaccgaccacatgcgcaccagatcgacataacaaatacaccagaccaagtgcgca

SEQ ID NO: 46278 - DNA, 1320 bp, Zea Mays
tggatgacattctgatttattctaaggctgaggctaagcatgagcagcatctctgtctcgttctgggtgccctaagggagaatcagttctatagcaagttgaagaagtgtgcattttggccgtccgaagtggctttcctggggcatgtgattaatcagtagggcattgcggttgatcccaagaatgttgcggctgtggtggagtggaagagaccctctagtgtctctgaaattcgaagtttcttggggctcactggatattatcggtgtttcgtaccaaatttttccagcattgctaagcctttgactagacttttggagaagggtgttctcttcgtctggtccagcgattgcgaggtcagttatcaggcattgaagagcaagttggtggacgcccctatcctagctttgcctgacaacggtaagcgtttcacggtttatacggatgcttcgcgaattggacttggctgtgtgttgatacaggaaggcagagtgattgtttatggctcaaagcagttgaggaagcatgaggggaattatccaactcatgatctcgaattggcagcggtggtttttgctctaaagtcatggaggcattatctttatggcgaggcttgtgacatttacaccaatcataaaagtctcaagtatattttcactcagaaggagctgaatttgaggcagcgtcggtggctcgaattgattaaagattatgatttgtctattcattatcacccggggaaggcaaatgtggtggctgatgcccttagcaggtccggggttccaaaagtggccttgcagttgattgctgatctggaccgtttggggatagctttgtgctatgtcagcaccgctagtgaggagactcgtatgcttattcaatcttccctcatggagagagttcgtgcggctcagaagtaggatcgtttattacaagaagctcgaaagagggttggcgatggtaaaccccaggagttctccatcgatgagaatgatttggttcatttcaggggtcgcctttgtgtgcctcagaaatcaaaggtgaagatggatatattgagagaagctcataaaacgccttacacagttcaccccggcgaaaccaagatgtaccgagatctgaagcaaaacttcctggtggaagcggatgaaggttgacgtttctaagtacgtggccgcctgtgaagtatgtcaacgcgtgaaggccgagcataagaggcctataggtttgctgaagccattggagatttcggagtggaagtgggagcatatcaccatggattttgtggtgggcttacctcgttctcctcagggggaaggg

SEQ ID NO: 46279 - DNA, 724 bp, Zea Mays
aaaactgcggtgagacgccggacgcgagatcccaccacctgccgtgctgtccagggctccaggagagagaccaggccgcagagacgatcgagactgggtccggccgtgcgaggtggcgcggatggagatcatcagatggacaactaaccagactccaccggctgtggtagtggtgaaataagctgccggacggacggagggtggtagtggaggaaacaaagaaactgcagtcaccgccggtcttggtgccacatttggcaagtcaacagttgcacatttcggctcaagggggaggatgaggatgaatgggatgcagtacaaaagcgtgttgcactgtaagtactcctctctcggtctggatggatagactctctggactgctgcctgcagcttgtcgcaggatgggcaacgcatacgcatgattatttggagccactaacgttgcacaatggtgggggcactgcgtgcaggtgcagtgcgggagtacgtagaggacagcaaagcatctcggcgacattcctggatttattacagctagctaaaggtcatgcagtgactgtgtgaggcagctttcacctagtactataactctctctctcgatccaagagggaaaatgcattcaagcaagggactgatagatcatagaacatatcctttttgtactacctttggacttcggcggttacaagaatgatcaccggaagtcgatattggagtccaaca

SEQ ID NO: 46280 - DNA, 764 bp, Zea Mays
attttgcagattataatatttggagataaagttattctcgacgatcctattgagatgtatgtaatgagaactcaggttattgataacaatcataattcttttgtgcataggtttatctacattctttgtgcaacagtcttgacctaaggctatgcatgtactgttgtcttactgagtttaggaattgggaatagcatcttacaccattttgctttcagttggccaaactgtgattgcttgattgccttctattcctctggttttcctctgcaaaaggttcaagcatatgctgctttgagaaggtatattttttattctctatttctttatatatctctttcaaatggtaactattcttgtaagcacgtctccattttcttaataatgtcttaatgctgagggagagggatgtaggggcatcaacatttatttgtttgctttgcaagtttctaacaacctcatccttcgagtggcttatttgtattcagtctgcttatctgttttcatataagaagcttaataaaggaataaaagaaagagactcatgttgcttagtgttggggcacaatttgtagtagctttttccttaggaatgcaaccacctctgggaaagcagtactatttaggagggcaactattaatatttggggagacaacttatgcgcctttatgggcacaatagttaccagtttagaaacgcaactgttagttgagtggatactttatgtttgggctagtaaccctacaacttttgccaattggct

SEQ ID NO: 46281 - DNA, 1073 bp, Zea Mays
gattatgctgttgtatatggcttcagtttacctgctgcagaaaggttcgtgttagctatttctcattttattggccatgcttgctgaataatacacttcgctatttatcgtccttcaggttctcattacttgtattatttgtcaagtgttcctagaaagctctcagaggtcagaattgttctttgatttgacaggtgaaattatggatcctttctttaccatctattacttataaaaaaattgttataattctggcaaccttacatgatagcgtcattagtgttcactcagtcgccatgctgttcgtatcacttatcgacgcgtaaaccagttgtttgcttggccgtctcttaagaaaatttagcattcttatgtccactcttgtgcagtttttcaacaagccaggcttcatcaagctaatttttcttatgcttttacaggttcttttttgctaacttaaggcaaaggtttgtatttacatgtagaatatactagctaaagtttttctagcaaagggtttttatatactaacatctacataatgcaagataattatgacaaattttatcttgaatgcatggagtaagattaataacaccgtttgcatcgggtgtcgtcctttcctagaatgtagtcaccctgtaacattgtttgcagcgactatatcatgggcgtggcagcctcccatcagagtcccgccagcgccgaacccttcgcatcgacagtggccacactagagaagaagccatacccacctgccatggtcgcggaggaggtgatggcatgaggctgactggggctttggaccccgtcccccattccacccgtcgtcgccgacatacttgtccaaggtcagtccgccaacgagtatatataaaagtcatcaggaaaggttgctcgcccaaagccttacctgacccgtgataattttcctcccctcaccaccgttatcttatcctgacgttgttcctttcaccatgctttggtgcccacccgccgaagagggctgaggagcagatgaaggcacaaggcagggaggaagaacctgcagtgggcgtgcgacgagggcgtgc

SEQ ID NO: 46282 - DNA, 618 bp, Zea Mays
gacgcgagcagcccatgccgaagaatccatcaaggacggttcatggactacgagaatcgggcacgttatggtactgcccgaaagaagaccgtggaacagtaccctgtactgccgatacgtaccgtgtgttcaatgctactagctagcactctagcaccatgcatggggaatggggatggggggtctgatgagagcacaagacgatcatccccggtagcaaagcaatagggtaggtggccactgtattttccctgccgctgataaatcgtatgttttctaattacggacgagctctcagacgtaaaacgttcggtcaatgaacctgatgtttcaggtggatgcatggaagatgctcagttcttgtcctggtcctggtcaaagaagagcagcagccaacgtgtagttggaactgcgctctagcaaatgcccaatggcacaggtgatcaaccccttgtactcacgctcgttgtaccgtccgtctgtctgccagtgccagctgacttgacaaatcacggcttcacaagcaacgcacgcccaacacgcaggagaagacacaactgaagaagctagcaagcaacccagcaaccagcgcttctcctgccctagccaataataaac

SEQ ID NO: 46283 - DNA, 590 bp, Zea Mays
gcagatgctggtggcactgacggctgcggacagatagagctgagagccggagaggtgaacgccaaagtgaccggccggagcggagaggtaccagcagggggtccagacaagatcgtaggcaccactggagcgtgaagcggtggaggcggagcagactgaaccggaggtgctgagataccagaatgctggagcatgagagccatgaatgcccctattctctgccctatcctgaataagctgctgctgaagagcatcctgcctgtcctgcatgctctgaaacatcgagagcatcctgtcggataaacgggcctgctcggctgccaggagagcctgctgctgggtgagagtctgctgctgctgggtgagagtctgaaggatcgaagcaagggcagggtctatagcctgaggatgaggaggggcagcactagaactcccagcctcatgatcatgtgagcgtggaggcataggaggcggaggcggaggaggaaccccaaaatcatcatcatcatcatcatcattagcggctgtaccctgagtgtcaaactgtcgaagagctgcatcatcggcctgagtgtcaaacacagaagcag

SEQ ID NO: 46284 - DNA, 838 bp, Zea Mays
ttatgaagaaaggaaggaaaataaggatacggttctaggggcataaacgatatgaagaaacaagtgtatgaataggaagatcacgaagcatgtttgcaactctttgctatcatcttttttaatatagctcattaaaatattaccttcgaaacacaagtgatgtgtccaaatataaatgtgctcaaaaagcttcgaaggcagcattccaaggcaacgagagcacttgaacagtagaaaaagattgtccctctgcatgtcgtcgtataaaattagatcaataaccctagattctacacatcctatggaggctactgggggtattcttgtattttctcttacaaggcgtgttgtgtacgtctctttcgtccttcttcatcttcatgttgctggaggcattcttcggtcgtgttgaggcacctcgtctcagccatcatgaaaaagacgatgcttcttccatcagctatggagacgaagctatggtagcgaagcttgggtcatttttcccgaaacaagctcaaagatagctaaacttcatcagtctcgagaccttcaagggaggcacgcccccaacggtgagagagcaagaagatattgatgctcactggtgtttgtgcttgtatctttgctttatttatattcatcaatcgatgagtagcaagatgacatagagtattacacgcactgcattctgaacctctctaactactcgtaggttggctctcaattctgtctaggttcaatatgaccatcgacctcaaatatgctcctttccctctctactactctgtgtgccttacatgacgacaagactaaatataattaagaaattaaatatcat

SEQ ID NO: 46285 - DNA, 588 bp, Zea Mays
gttgggctagatcacgctctccagcttcatggtgatgtcatatgttacgacgcttgttctgatgttgtcgcgcatcgtgctggaggggatcctcccctagcatggtgggctcgtcgtctgagatgggtgctatctccactctcccttggatgaagaggacatccgggaagaagggggttggagcagtggtgtgtcctctcccgatctcccttaagagcggagtggtcaggacgatcattgatggtgctcccggagtcttgtatggagcattcatctcccttcatcgagtgatccgtgtccacaccttagtgcgcgaggttgacaacggggctcgtcgtgccggagaagtcctggtcgatcgagctacagtcatcagggtgattccgctggtgtagttcgcgatttccctgtggccgcctttagcgatcatagggaagatttcttcctaggtggagccgttatgcggtgcagagtttcctcttggtctgcaatgcatcaggcggttcgaaagtagaagactgctcctggactgaaggtgatcatgctcttgaaggtgactgccatggagtcagcatttatcaacgtcgc

SEQ ID NO: 46286 - DNA, 373 bp, Zea Mays
tccaaccaagaggacaatgttcagggggattgggatcaatggatagaaaacatttaacctaatcagcagatcccacagcccattcaactggatgaacaacaactcagcaaccaacactcgggcttatcgtcggacagctccattggtcccattcaggatgcacccctccagaatggccacattttagaggatggacctgtgatgccaggggatgggcttgctttcaatgttgccccttttaatgggccacaagaggttgatggcccagttattcagatggatcctcttcctgttaatgctcgccagccaccacaggtccaagatgggggaccaaataataatcaatccttttagaatttggaaatgaacttca

SEQ ID NO: 46287 - DNA, 827 bp, Zea Mays
tggatcgacagtgcacgacccggattaaaaggtcgagccaaatgagccagtgtcctattgatcaattcgtagccgcccatcccgtgatctacgaccacgattttaaattacaagatctagcagtacgcgttcgatctcagatcgacgaccctcgtccatccaggccaaccattgatttaatctagatcgttgatttcttgatccaccaacatgacttcttcttctacctcccgactcggctgggcaacgacgccgcgccccagggcaatgcccccaccggaaccagatgaagggcccccagacgctcacaacacggcgacaggggatggtagcccccaagcaaactcccacaacaagcccccaaaaccaaaacccaccgctgctaaattatgcatgggacatggtgattatgagggggggtccataccagggatgatcagaacgatggggctgaccacggtctagcggaaatcatcgacattcaaacgacacctagagctgtgatccttctctagcctccgaatttgacggtcccagctagcttccgacacggtttggtgatggcgaatccctcccctcgctcagttcttcacggtagtagtcaaagtttgtgatcgacgggaccagagaaaagttaacggagatatatatcctagagcgaatctgtcggaggcagttaagcaacgctacggagaaggcatgggtgatgtcatccctgacgtcagcgcgatgtcatcgcccggccagccaataaaaataatgatattcataataagaaaaagaaaacctaatactaatcgtgggcttcggccaatatgagagagaga

SEQ ID NO: 46288 - DNA, 793 bp, Zea Mays
tcctctacctatgttgaccctagccaacatcttctactagtggttgccctagggcatcgtttggaggtgatcgtcctctcagttcttttgccagcgactaacctgtgtcctcctgcccttcttcctcttctcataggaagaagagcaagcttccacattagctaagtgccatttttgggacatgttaatatacaaccaacgtgacctatgaggcatggcttgagattcgtgagctgcataaacgctctgtcctacctcctctcgaggctcctcctcctgcttacagtgatatatccattggccgacaggattctctagttacacttctacttctcacaaagacggtcacgcagttgtttcggatgatgtcgatgatggtgatggtgatggtggtggtgcacagggaggagacgacattccatgggacacggtaggggttgaggatgattcacttcttatttcctcttctttttcctttttggtgcttggtgccaaagaggataagtgttgacgatgggaaagggttcaatttctttctattgtcatggacgttctcagcattcttagatgtgtgagatgagaaatattagagttaggatagcgctctgtgcattctaaacttggtttgtaataattattctctcactctttatgttgaacctatctacatttatatataagcatgtttcattactccatatgtcgggtacctgagaacgggtacccaaagaaggcccaaaagacccccaaagatggcccactaaccgaccgacccaccagccgaacaacctgg

SEQ ID NO: 46289 - DNA, 656 bp, Zea Mays
gtcattcaataaggaaggtgggtcggagcataaacatctagagctttacttttacgatgatgatcccagtctcgagcatcggtaccgtaagacaaagaggttattaaacagatagttggcatactccatggaaacccgtactccgagcaccttaggagcatgggccatgttgagaaccttgatgactatcatatcgcattgaaccttgaccaaacttgaatcagaagacatataacacgcctctcactttggaggtggtcgctgtatggatcgagggagcgaacggcgaggccagttcagcaagagtgttatgctacatgggaaggatatgtcaagccacgacatccgctcataccatggatgccacgatgaactatcgtatccactattcttacctagaggtgaacttggatggcatgcaaatatcccaaaggttggtgtatccacggatgaagtggatgcataccgtgcgacacatagggcaaataattcaaacgatgaagatggaggttagttgtttctttgtactttgggatttttgcacattattaactattctttcaacatcactcacttttcaatccttgtgtatgcagaatctcctacccatttatgtgtgttcatacgtgactactactgctacaaattctagattt

SEQ ID NO: 46290 - DNA, 648 bp, Zea Mays
ccattgaaatctatgagaggccaggtcgtagcggattttattgtggaacatcggattaatgatgctcataaactagacatatcatacctcagtgttactccgtggactttatattttgacggatcggtttgcaatgaagggcaaggaattggcatcatgcttgtttcaccaattaatgtctccttcgacttctctagccgattgaaaacttattgcactaacaatcaagccgaatatgaggcccttttgttcggcttggagcttttaaattgtatgggagtaaagcatgtgaaggcatttggtgattctcagctggttgtccaacaggtattagaagaatatcaatgttttgatggtactctaaatagttacctcgaaaagtgttggggcataattcattcttttgacgaattcaatattcgacatatctctagagttgagaatcatagagctaacaatttggcacaagatgcatcaggttatcggataaagcgagggagatttcacaacactgaaaatctgataaccggtgcagggccaattccccaggccgcgaaccgtccgagtaaagactctggactgtccggggttgccaggaaagttctcctaattgattcggctgataatgaagccgatgcaagtgattgg

SEQ ID NO: 46291 - DNA, 661 bp, Zea Mays
tctcaacggccttggtttcatctaagtgtaggggtatctccttctattctaagcggttcattacgggatcagcgactagctcgttttcttccccatcatggcagcacgacggcggtgcagagccccccccctcgccggcggcggtcatcggcgccctgaaccgagacccccatctctaacccacataattccgagatctatgaggtgctacggatactacgagttgaatcaaagcactcttatcgggggtgagtttggcagcaaggccgaccacggcaagcgacaagtctacaatgatggtggattacggtgatgaattctccttcttcatgtgatcttcactgcccaacaaggccacgaacacctcccccatgattcggcgacatcccctgagcattgtattagggtatggcgtcgatgaatcagagtttggatgctagcaaatccttctactctctctcccggtgatgagtccgctatggtgattcttgggactggatactatgcgtgttttcgggttggggtttggtgggcgagacgaccatggggcatgggtataaatacctcggagtcagccagttggatgtgcagccagttgggcgagacgaccatagaggatgtactgcatcttatagtttgtcttctggttcttgcatctatc

SEQ ID NO: 46292 - DNA, 433 bp, Zea Mays
gaacaagtttgattaagtaactgagcactggtgttgaatagaaattggagaaaaatgagcccaaagttgggctgtcagtcagcctaaagcctgaattttgatattcactgacataggatgaactttgggagccctttcaaagatgatccagtgagtgtttgagcatggttaccatagcaagattgtagctgaattgagggactagaactttgttacagagagattagcaagttcttatgcagaaattggagttatgggtcctgcaagttggccggacagaggctctgaattggagttctcatggtacagtgaactgaagaagatcttcagatacatcgtccctcgccgccggtgaccgtcgcgccatgattcgcgtcgccgctacgattcgtgtcgtctggtatggagataatcacgaccgcgtaaagatctt

SEQ ID NO: 46293 - DNA, 948 bp, Zea Mays
gttttgtaaagcggtaactgatacggtattagagcaactccaaaaggatgttaaaaattttaccctaaaaactggttattaagagtaggctaaaaaaatttaagagtgaattatgatggttactctaacagttcctttaaatgtgacatgtggcgcaatctgtacagtcgtcgggagactgtagatgatctgatacgttgaggaatggattggggagggatggaacacaccaaaatatgagggagaggaggttgtggatgcgggatgctaatttttgggggaagaatgagggagctgttggagtaagaaaaaccactattctttactaatatctgttttggagttagtttacacgttcttttagagttgctcttaccatcatgtttatatatataagcctgccgatgatggagccacttcttataatgggctggatattagttttgattttttttattccatattaattctgaacagatcaagcacattacataacagtatttttccctgtacaaacttcacttaagatttgaagttcagttttgcagatgagggaatacaacaccaatgcttctctacaatgtattagtcatcgataatacttttttttcttttacatatcattggtgatcaattaatcatcccagaacaatgattgtcaaagtgacagcgtacacctgatactggcagaattatttcaagcgatgtttcaacatcagagctactctaacgtcgtcatacaaagtgcttaagagtatgaacctaagaacagacaacctattacaatgtatgctcaaaccatcgggttgatgagagagctatatgaatgctgtgttagcgtgaccaacagatgtggatctcggtacctacaatcactgttgttgctctaaggaaaatatagttagtgtggacactatggatagaacaagctagaaataaacatctaag

SEQ ID NO: 46294 - DNA, 898 bp, Zea Mays
aactggggctccccaaggggatgaacttgggcgaatgaaacctttttctagtaattattctatttgtttcttaagttctactaaatctttgacatccattctataaggtctttttgagataggtgcagttccgggtaataattcaatagaaaactctatatcacggtcaagtggcataccaggtaattcctccagaaatacgtctaggtattcacacactaccttgatattttccaagggcttttcttccaaatgattcaccactgtctttccgtttgcatctgttgacttgtctatgctaacttggattctttcaccttgaggacttgtcaacataattgttccgttggcacattgtatcactccatcacaacttttcaaccagtcgcatccaagaatcacatcaataccattggatcctaggaccactaggttgactgaaaagtctgttccttgaatcttgagattaacatggaggcatgagtgtgtggccttcatgtcacctcccggtgaactaatatgtaacatcttcttaagggggtacttttgtatgttatgtttttccacaaatgactcagttataaatgaatgagatgctccagagtcaaataaaactgatgcaggtatggagttaacaaggaacaaaccatacaccacgtcggcatcctcaggcactgattctgcggtgacgtgattgacccttcctctactctggttctgtggagtcttgttctgcgcagatccacgagcgggggtgttctggtcattcctctgagtgttgctcttctgaggtgtctgctggttgcgccatgggcagttgttagcataatgaccaagctcaccgcacttgaaacaaccattgggttgtactggtgcgttgttgcttctggcctacgtg

SEQ ID NO: 46295 - DNA, 341 bp, Zea Mays
tcgccctcacgacggagttgctccagctacagctcacatcgcggctttgttccgaccgcccttctcagatgggtcgcgacgttctccggcagatttcactacagtagccaagtacttatatcagctcatgagacggacgcttctgtcgtggatgggttatagagaggctaccactcatattcagctttggctcctcggtgccctgatctttcattcagagtttgatgttgttgacttccttatttgtgagatcgaggacacggtattggatggtcttcgtgctcggcgacagctgccaaatgctcattatctctgccacatcttcgcacagctgatccgac

SEQ ID NO: 46296 - DNA, 624 bp, Zea Mays
atactaagttggcacttactacagcttatcatcctcagtctgatggtcagagcgagagagtcaatcaatgtttggaaatgtatttgaggtgtgcaatttctgattccccaactcagtggaaaaagtggcttcctttggcagaattttggtacaattcctcttatcacacagctctgaaatgttcccctttcaaggctttatatggttatgaacctgtgtttgctgctgctcctgtgatggccaaaactggggatcaattggtggagggactgttggctgagaggaaggctcattctgaaatacttaagcagaagttggcttctgcccagaatcggatgaagatgcaagctgataaaaacaggactgacagggagtttatggtgggtgagttcgttttggtgaaattacagccatatgtgcagtctacagtggttagtagaccctgtcctaaattggctctcaaatacttcggtccattcaaaattcttcaaaagattggcttggtggcatataagttggagcttccatcttcttctcagattcatccagtattccatgtttcacaactgaaggcttttactccttccactactcctgtgtattcagatttatctcagatggtgg

SEQ ID NO: 46297 - DNA, 407 bp, Zea Mays
ccacagctggtatcggagcaaattccaccacagagaaggacaataaaccatgaataccaactttcaaaacctaaaacttgcctagaaactgttacggatcgtcaggaccagaccgctagacctaagacgaaaggccttaggcatagaggggaatataggtggctaattaattaagccccgtgggccaatacttatattttcgggatgtcctaaaaaggcaccctatctttctcttgagaggtaacgtttcttccagcatgcatgcattataaaacaccaagaagaattaaaaatttgagctaaccccctttctttggaaccattcggctctctttttcttttccttccaccataatctttatctttgattcccttccgcagatgaattcacccacccccgccagtgg

SEQ ID NO: 46298 - DNA, 645 bp, Zea Mays
attggccctaaagtctggctatcagataatacagagactgaatattgactatcagtgagttttgaagaactttaggcttgattcatgctcaaaggagtaagcaactgagcaagatctctatagtagaattgtagtttgtatgtagggctacaagtttgttatagatggattggcatgttcttgcacagaaatccaagctctaggcgttgcaactctggctgtcaggcgctctgtattgggtttccaatggtacaatacattgaaatatcccaatccactgaacctcgccaccgacgatccgtgcgctcggattcgtgccagccacggtgattcgtgtcccgcgtagttggatacgcagagaggtaagaaatatcaccccatggatgaactccggctgctattttactccggccgccgtacccgcttgtgtcacggtcactctggataggctcaccgaagttagcccccccacgaccttgcgccacgtgcctcgatgctttaaccatgccgtcgtgagttatcttagcccattcggtgatcgcaggtgagcttgccacggtaaatgccaccaatcgcttgcaccagtgcaccttctccccgaccgccaccgcgcgagctcaaattcacgggccaacactcaagtgc

SEQ ID NO: 46299 - DNA, 330 bp, Zea Mays
tccaattggagcttatgggctacattggcggcagatgctcgcccacactgcagtcaagttgtccacactacagtcaagttgtccacaataatatgcttaatataagtaattattattattattggaataatttatgaagcaaaagctttaccctggtttcagatgtaggccaacttctcaatcctttggtttgatgcatttccattacattaatcgtgggtttttttctttcccctaacattacagatgaaaggtccaaagttgatgatcacaactgaaagttttatcttagggtgccagatgatattgatgtatcaattaagcttcaaa

SEQ ID NO: 46300 - DNA, 345 bp, Zea Mays
tctttctcgactaaaggctactggtttaagtgtagcatgtctctactgaacatgtgattatgtagtgcagagaaatgttggaaagagactgcaaataactcaatgcactcgctatgttagcttcataagtggaaattgattatacttaaatcttggcactgtagtgctcatgtgttgtttagcaacttttgtttactgtttacatgctattcaaatggcaattttatcctaactgatagatctactaaggcacagtcccctttaatgttctaagctctgtgagtccatctaattacatgtgtgtacatgcacctgccaccttcgatccctttcaaagattattat

SEQ ID NO: 46301 - DNA, 939 bp, Zea Mays
taaaagtgaagactcggctgtccgacgaggattatataaagatggtttggtccactcggagccccgagatcaacatagcttttgagacacggcccaccacccatacaccatgcatcttaattccttatctccggcaacgcgcacgaaaatcacttgtgcgctcgctcacacatgcgtgcgcacaatacgccatagacatctgagttggcaatggtggcctctagattaaagccggcgaggccagctagttagatctcgtcgtcgacagcttcacgttcacggtacacatgtcgtcgcaggcacacgggctaaaagctagggccacagcccctatatatattgggaggtgtcaggtaatcaggtatggtatgggcgtatggctgtacagagcctacacggctgcacaacagttcagttagcacgtatccatctgacaaagaagaaagaggccccgccgggacacatgcatgcaagcgccgctatctaaaacgtcatgtactctaaatatagcggacgtagacgttcggtacgcgtccaacaacatccgctaaacccttcggtaaaaaatacagggcctccctcatccgctacatttggagggtagacgatggctcactatccactgtgcagcacatgcttccgttctctcctgcgcttgttgggaagctcctgaagccgttcgatggcggctacgacgatcgcgcgtcactgtcatgctagagccagacatgaagatagacggatattccgatacatacgtaaaaaatatgtacgtaaatatgaagatagacggatagcttacaaaatgtaattattataattagttttaatttatttttcacagcatagaaagaatattttattacgtatacgactagaaaaaatataatataaatgtattgtgaaatctggtttatactgtagatgtagggatcaaat

SEQ ID NO: 46302 - DNA, 293 bp, Zea Mays
catatgaaaattagacatattaatgctcgacacaggagaaggaccaaaaagatctttgtaaaaatcagtagccactttgttcatatcaacatcagtattaacaatattttcctcatgaactaaggacagaattctaactcttctttttttcccttggcaataagataaaaatatctggagttttcatcccctcattaataaatttttctctagccatctgctttcttttgcagcaatcttcaatcatcaaattctttaagttccactccaaatctaatttttcaagtctttcc

SEQ ID NO: 46303 - DNA, 711 bp, Zea Mays
ttccgttctaataatagtaatttaggcatataaagtgaaactacctaaacatcattcggccatacataatgtatttcatgtatcccaacttaagaaatgccttcaagtgcctgacaaagtggtagaaatttatgatgtcgatctggaaccggatttaacttattccgagcaccctattaagattgtagatcaacaggaaagggttacccgcagaaagactatcaaattctacaaagtgcaatggaataagcattctgaagatgaagctacatgggaatctgaggagttcctaaataatcagtttcctaattttttagagtcttgtgagtcttgagtttattgtaagttaacttaaagtaaaccacccggggcccccacacccctgccttgtaacagaaataaggaaatgagattgtgacatgtttccttttccattacttagccacgagctttaaactcaggatgagatttctttttagggggaaaggatgtaacaccccctggtgttactggaaactaacacttggcatgacatcatatgcattggcatccatgtgttgtaatacacttagaatgcattcactaggaccaagtaaaactctaagtgtaatgtggtgatggatagagagtggaaaacctagtttgaaaaactccagttttgatcccgaaaggcgaaatttgtgatctagcaatattttgccaaaagtcaaa

SEQ ID NO: 46304 - DNA, 527 bp, Zea Mays
tttaatttgagctggttattctgctaccagggtacaatggtcaccctaaatcatgtgaatgtaagtatgctgcatcaacttaaggcgtttccgacttaagtcatttggtttgatagttgggcatagtgatcaccctcaattaagtaagcgtgagcatgtcgcaccgacttaagccgtcttcgacttaagccaattgctctattagcacggtatagtggtcaccctaagtcaagtaagcgtgagcatgtcgcaccgacttaagccgattgctccgttagtagggcatagtggtcaccctaagtcaagtaagtgtgagcatgtcgcaccgacttaagccgattgctccgttagcagggtatagtggtcaccctaagtcaagtaagcgtgagcatgtcgcaccgacttaacccgtctctgacttaagttgattgctccgttagcagggtatagtggtcaacctaagtcaagtcatgccgatttcaagtcaagcccaatcgaagtcagttgtaagtcaagagtctgaatgc

SEQ ID NO: 46305 - DNA, 666 bp, Zea Mays
gccgttggccacgtaaccgcgcgcgccaggcttcttccccgtctccggccgccaacacatcgcggtcaaatggagagccaccgcttcccctcgctataaattgagtgctcccgccactccataggatagttacgcatcagttgcaccaaaccttgcaccggattatccaccagtgactgagaattgctagtttcccccaaaccctatttccgccaccgtgaaaccgagctcaccgtcgccagcccaactccggtcagttcccgtcctctgctcccttgtttgagcattctcatacatctgcgatgctccccgacccctttaattggattagaccgccacccatcgccgggaacacggctgtcttgccgcgatgctcacggccaccgtggccagagctccatagttgaccaatagcgcaattatgttgggggaaatggtcggggtagtactaatttcgtgtccgctgctcggagaaccctgccgttgccctaatcggccggcgtagatgctcgccggagcgcggccgtgcttgaacggcgtcgtggacttccaatcgtgaattagtagaagtgcaggggcctttttgtgatcggtcagcgacacataggaacagtgaagaaactcgtcttcatttagtcaaaaattatagaaaaatgataaaattgt

SEQ ID NO: 46306 - DNA, 795 bp, Zea Mays
gataaatgatgcttatgatgatgctttcatgatgcatatgaaatgtatgagcatgcttaacagcaggggtgttacaatcctccccttaaaggaatctcgccccgagatttaggattactaaccattttcggtaaaaattggggtaaccttctcgtaagtaggcatcggtatcacatgttgtgtcatgctcatcgtggtgactccacaacaccttataagttttgatcgtgctattccttgcgacccggtccttagtgtccaaaatattgataggttgctcttgataaactaagtctgatccaatcttcggatctttggcttctactctttcttcagttactctgagatatttctttagttgagatatgtggaatactggaaaaatagtgctcatgttctctggcaactgaattttgtaagccacttccccttttcgttcaataatctggtaaggaccaacatatcttggtgcaagcttcttcttgaccttgaatctttgtacgccttatattggtgatacctttaaatacacaaagtctcccacttgaaacgtaagcagtcttcgtctttgatcatcataacttttttggggataatgtgtggtttccatattctagcgaatgacttgaactttctctttagcttcagtgattaagtcattcccatagaatttccactattcagcttctacccaatttagtcatgttctgcatcttctcccatataatgcttcgaatggagccatcttgatgcttctttggaatctattgttgtaggaaaactcagctaatggta

SEQ ID NO: 46307 - DNA, 280 bp, Zea Mays
gctgaggattggcttcataatctgtggcaggattgtagtcagaatcgtctgcacgacgacgcttggacagaaatcgccctgccagcttcttcttgagaccacctagtccactgaaaaacacaatataaataatcccaataccaagataataacaaatgaaaaggaagaacaacatgagtaatggggtgatctgttaggggacagacagtccgcgctagtgtactggacggtccgcgcgcaaggaacggacggtccacactacacggccggatggtccacg

SEQ ID NO: 46308 - DNA, 601 bp, Zea Mays
atcactctcacatgatgctagtccacggttttttcaaaatctcgcgatgcaccgctctcgctccttctcaaactcgtgatttgatgctcccaatcctatatgctcttgccatctccccgttcacaccatggacgaccactcatcttcctctaaatccaaaaccttcgagttgaggggtccacctccgcctccattctctaaactgtcaacattcgtgtgcatgttcgtatcaccatcgatgtcaacgaggtgaactactagcactagcgccgcttcttcgatgaggtgttaggcaagtttgacctcacacaacatggtcgatcgtcgtcgtcgctggatgaacgtgacaatgagttgcatatggtcgatcactgcatcgtcagctgaatctttgccatcgtctacaagtcagtgttcaacaatatccacaaatccaagtgctctgcattctcgctatggagcaatgtcgagagcctcttccgcgacaataatcttcatgggtacgcgcgccgtctacctcgaggcggagtttcgtgggtacgcttgcagccttaggtgtggctataatgacacccacgccctcgagtctagtgtagttagt

SEQ ID NO: 46309 - DNA, 746 bp, Zea Mays
ctcggtgagttcctagttgaatttactcccgctactgtactttttgattcaggagcatctcattctttcatagccactagttttgtggaaaagcatggcattcccactacacacctagaaattcccttggtcacccaaaccctagggtcagaccttctatgccagctcaaatgctcccaagtcaggatccttttaagtggggtagtgttcttggcgaacttagccatattgccatcccaagggattgatgtgatcttaggaatggattggttaaccaagcacaagggcatcataagttgtgaagataagactgttcttctcactgaccaccaaggaaggtcagtttcttgtcaggctcagccacccacccaagatccaatggtgtttaatctagcaacagaaaacatatctgtagtagaagaattcatggatgtattcccagaagaattgctaggaatgccgccataaagagaagtagagttctacattgatctaattcccggcactgcacccatcgcaaagagaccataccgcatggctcccaccgaattagcagaactaaaactccagatcgcagaactccaacagaaagggtacattcgtcccagctcatctccttggggagcaccagtcctattcgtcaccaaaaaggatggaagtatgaggatgtgtattgattatcgatccttgaatgaggttacaataaaaaacaagtaccactacctcagatcgatgacctcttcgac

SEQ ID NO: 46310 - DNA, 432 bp, Zea Mays
atcatggtaggacaacgtttccgcgtcgtataacgcagaaagttccacgtaggacgcgaagaaagttgacagatcgtcatatgaggggtcgggcaccatatggatcgtgacctgttgggtacccagaaacagggtacccatagcgaggcccataaaactctttctagcccatccatcgagcaaatctgtgagacgggatgagcgattaagtctccaccgagaaagcccgcgaggtgggcgagcaaccaagtccccgctgaacaagcccacgagacggggcgagcgactaagtcctcgtcgatcaatacaaggagggacatacagccaagcggacccgtaaggagggaactcatgcccacattgttggtctacgacggtcataataggacacgtcgtcaccaaaccatgtccacgtcatgggtagagtatcaa

SEQ ID NO: 46311 - DNA, 384 bp, Zea Mays
ggtgccaagctttatggaccatttgttcatcacgcccgcaccaccatgcatattgaacatccgtcgaagctccatgcactaaaatccccttttgtggacactcaaccattgaatagatcctcactttagaatttttgtcccggaatacttgatccttcgagttcgttgacctttgatcttaaatcctggttgcttcacaatgcttgactcttctttattctcatgatcttgaatcatggattgtttttttcttgacttttgaaagaccttcaacattcaatattgagttatcgatcactttgccatacactttagggatgtcacacacataaggatgcaagtaactagggaagctacttacttggtaagaggcatgtaagctca

SEQ ID NO: 46312 - DNA, 399 bp, Zea Mays
cagatacgcagaggtagtgtcccctaatttgtttgtcatgtcccctaatttgtttgtcagagctacttgaggatatcaatgaggtatggctccgctggttcatcagtattcagtaattacaaggcattatgagttagcatgctccctcctgctgagctagctaaatgtgttatcaggtctcaataagcatccatttttaaaagtataaattgttatagccatacatgcaagtctttattttggaaataaccaaaggttctgaacctgcattgtgctaactcgtcaatcattcctgaaatgcgattcttttttttcattcagagttcggttggacaaattaagatggattgagatcttagttgttacggtagaagcaaaagcaccaccactgaatcctgt

SEQ ID NO: 46313 - DNA, 416 bp, Zea Mays
ggaaccttgttttgaaatccatctcctcaaatcttgcatacaattcattcaagtggggcatatacctgttttgcacatgccacaaacacaatcgatgtattgtgtttgggaatactctgcctagtgcgattggcatagcagggtcttgatctgaaatagataaatttacatagcattatgcaagccaatatgatatcatatagtacgtgccataataaatacgagccatttattacaacatacctgtcaacatcactcgtggtccttcacatcccatacatgttttgaacgtattgaagacccattcgaatgtattaactgtctcgtctcctagtaaagcaaacccaaatattgtgcattgtaggtggtggttcgagccaacaaacatgcctaatggcttatcgtacatattagtc

SEQ ID NO: 46314 - DNA, 678 bp, Zea Mays
gaaattaataattctcttttgaattttccaatcctcatcaacccaatgaagagtgatacacatgtaggccttgttttggttggatgtccacatatccatggttgcactaaaacgacattgaatggttttcaagtattcatataacttattctttttatccaaataatattccattatctcctttctaaccgtgacacgagacttcattgggtaatttggacgcaaggattttacccaatcttgaaataattcatgttccaccatattgaaaggatactcatgaacaatcattgcttcatggaacttctccacgctagcttcttgatcatacttgtatggttgaacaatggcaattcccgcctcatttttttgggttgtgagatgctgctgccctttctttatgatgtggtaattagcaagatgagtccaaaaacctgaagtaccaaattttccctcagccctatgtttgcttgtcttggtattacaccctttgaccttacactttgcccagatctgcttttccatcttaccattgacctccactgtcactgtatacttttcaaagtgatcccacacttctgatgtggtcttctttggcctcttgataggacgctcgccatccttgccatcattttcagcatcaaaattggttggagcatcagtaccactgccaacagc

SEQ ID NO: 46315 - DNA, 469 bp, Zea Mays
gaaaaaatatttatagcatatagctgttgggactgaataacgctctgtgtttcaaccgtagaagggtgcaatttttatagtatggtgctgagtcaaacaattttaaatttgatcatacgaaaacatgttaacattcatggtactaaacgattgtcgtcgttcgtcatggaatcctgttcgctgtagttttacgttggtgcggctagctagggcctcttttagtttcatgtaggtagtgtttgacaaagcacatttttgacagagggggacaccccctatttcattaagaaatagtaaccggacaaaggtttttacaaggccacaaccttaaccaacagccaaaagccgacaagactaccacaattatcagctacgcaagggttaagcccaaataaggaaacgcggtattccagaaatacatgagagacagactccaagtgactgacgaacagccaaagtgacaaactag

SEQ ID NO: 46316 - DNA, 423 bp, Zea Mays
attttatctgtatgcttttagaacatctcggcattagggggaggaatgcccatataatgtaatgcctcaatattctattaaacgcacaaaagccaaattgaacctgtcgttcggtgtgtactcctgtgtatatggagtttgccagaaatcgttgaggattaaccatattggtttgaatgcttctacctgatgtagatgtggatatacccgggattaatatcatatccacatttgacttattggcatttgatctattctgtggggacgcctgcggatatgatccatcggccttagtcaaagcatatgttctgattgcagattcacgtggtctgtcataactctcctccgattaattcaccctgatggtgatttgcctcacgaagaggttcatcttgatgatgaaattcctagcaatgcgtgcaa

SEQ ID NO: 46317 - DNA, 482 bp, Zea Mays
ggggaccaaaatatgcttgacaagctttgcaggagaaggagatgatatgaagctttagggtgcttgagagagtcaattcaattcttattaactcaagctatcaatcttacaatgatttatatatccaagattgacccaaagttattttgaattattatgtctaaaactcatatcatctcggggaaagatattgatgttgtaggaaataaagaattatcctgtgcggaaaatcaaggcctataacatggaggaaggccaaatgatggtaacatttatgcttttaagtgcaagtatcttaaattatcatttcttatgtgtcttgagtagtcacataaataaaggaagcacttcaaatgttttcaaattatgtctttgaagaaattcctctcatatggtagattgcatattcatcatttctatactatggcaatctacatgctttaaattattgtaagcacctcatggcatgttttacactaatt

SEQ ID NO: 46318 - DNA, 453 bp, Zea Mays
gggacttctcatggcctatgtttgctcacccatcatgtatacatgttgttgatctaaagcttgtacttttatctccacggctaagatggtaccttcgttttctcctctgcgatggattcgtccaaaggtgctcttcggtattcctcttgttacacttagaacaaactaaaaagtagttgtaaagttagtgttttgaggaccttcggaagaataaggaccaagggtgaagcttcatccggaccataccgaccgagccaaaccacatcgcttcagcaacccggctgacatagcatcgcacggaccacaggcgcacgtattcaatcgtatcacaccgatcgggccccaccaaatctctttttccacttgctacgtacctcctcgcatccatcagtcacggtcgtcggttatttcgctgattcaaattttcattccacctcgctcgatcgcccttgg

SEQ ID NO: 46319 - DNA, 488 bp, Zea Mays
gtatcgccagacaatcggctcactacacactcattggggagacattatacagaagaggtgcatcaggcgtcctcatgaagtgcattctctcatctactgggaagcaacttctaaaggaggtccatgctgggcaatgtggaatacatgcagcgttcaagacactagtcgggaaggtcttcaggccaggattctattggccaacagcgaagagtgatgcaaccgatttagttcagaggtgcgaagcttgccagtacttgtcgaagcaacaacatctaccggcacagcaactgcagaccataccagtgacttggcccttcgcatgctggggactcgatatgattggacctttcaagaaggctcaaggaggatacactcatgtactggtagcaatcgacaaattcaccaaatggatagaattcaaacccattgcttccttaacctcagctaaagccgtggaattcatacaagacataatattcagattcggg

SEQ ID NO: 46320 - DNA, 756 bp, Zea Mays
tgaataataagagcaatcatcaagaatcaccagataatacttataacccgaaatactgcgaacaagtggtgtccacaaatcatagtgtatgagataaaaaatgcacatcccaagaggacctagggaaaggaagtcaaacatgatggcctagctgacgggcgtggcatagatgtttagaggtgtccctagtacaagagatgattgaactactctacaaaacttggacatcacgccagagctaggatgaccaagtcaatgataccaagtcttggatgtagtggaaatagtcagtgtgtgcggctgcgacgagggtgagagcgatgatgaagcagaagcagtgtggagaagtggacgcaggcaaccgcaaggtgtacaggggcctagagctatcacaacggacgagaaggctcagagaagtgagatccttcacagacaagccaaaaggatcaaactaaatattgaaaaagttattgatggtaaaccgacgaacagataagagattctaaataatatgggggtgacaagagcgttgcgaagatgaaagggctcgagaaggaccgaatcactgactggggtgactgggaggacattcccgttgcccacaatgatagacgaaggatgagacgagagaggttggtgggaagagagtataccagcatccagaggtgtggtaggaggcaccggaatcaacaacctagtcggtgatgataggaagggttagggtcatcatgctaaatgagctagcaagagactaat

SEQ ID NO: 46321 - DNA, 867 bp, Zea Mays
gacgccctccgatgggacgcctaatacgataagctgagcggacgagccttcgggcacaacctctccgcctcgcccgacgtcatgcccagccctcgagcgagttctccacctcgcccgggctcgacctcggtcgcaaactacactgtgaaccccacaggcagccactccacccaactgtagcgcatgttgagggacgactcggctaacgcctcgggaagacttctgcatcgaccaagcaggggctctgatctcgatgagtgttgtagggaatctagacgtcatcgcgcgccaagacgatgacgaaccccttaagcaacctttggcccatacccagcgctgttacaaccactacagcatgggtggcctctccctcgggggctcgggcgtacggacaacctctcggtcttggcctcagctctctacgggaagtcagcagacacgaatctactgcatagtacgtcgccacgtcagacgccatgcatctcttcttcgaatacaagatccagcttcactaaggatgctccccttggtgtataaatagggcagggtccctccacggacgggagatcgacatcgacaacatcaacacacacacacacaacacacatagacgaacgctcaccctctcactctattttagatattgacacttgcctcaatcatctctagggacttggggacttcctctctcccgttgtgcttgtaaacccctactataggcgccacggtgcgagtaatataagcctcattctctttgctggaagtagggccttgagtattttgaaccaggataatcatttgtgtctccttgcacaccatctagagtcggccacgcgacacatttactggttggttaaggacccgcgg

SEQ ID NO: 46322 - DNA, 777 bp, Zea Mays
ttctgttgtaactttggcagaatttcatgcaatgttctgaagaatataataatgtcatccaaataacaggcatgcaactgtaatttgtacttgctaataacgagttctaaattagtgttgaggtgcatgccttttttgggatagaattgacacaaaggtatttctcctgcctgaccccttcctgatgggtttggtgtcgagctttgaggcatgcagatatatgagatgtgaagagaggatctccaatccatcagattaagaaaaaagaataatcctctatatcagacaacaggagatcacgaaaacatatataaacctaagttgtaggtgagatgtgctacagcagatagaggattttttgtattccctttatacgtggcagaattttgtttttcctttctggagggtttgtccttcatcttcgtcgtccttcttgttcccgtccgtcgtccgcatctccctgctcatgggatttcggtaggtcctgtccgcccgcctgctctcacgatgccttccatctcctgcttgaggtggcagcgtttgcagagcggcgctgcagctagcgactcatgagctccggtgatgcagtagcggcgtgcggcagcagagcggtcggtgctctcacggcgactagaagaggaacaaagaggattgagaaaaaatggtgggaggatcccctctatttgagggattgagtggatggaggtttgagtcgttgggaacttgggataaatataggagaaatggaacggagaaaggggatctgctgaagtagtt

SEQ ID NO: 46323 - DNA, 485 bp, Zea Mays
cgatgagtagctcgagcatcctccaacgacgacgaggcacgggcgacggtggccacgacagcccaagacgcagacagtgacaacgatgatggtgacatcgacgattatcgcccacggtggcatctaacaatgacgacctcctccgattcggtgcgtctccagcatccttcgatgatgaccgcctccgatctggtggcctcaaaggcgtcctccaatccagtggctcagggtcgtcctccggtgatgacatcctcgatccgtgtttatgccctagttgcactatttatgcattccattgatgatttttatgatgatgaatatgacgcctctcgtatggattggttttttatggtaaccacctggattcacttgaatttgttacagggatgtcaaacgtgacatcatataacaaaattgcggatttttacacataccactgtcactatttacgctataaattgaggatttttatgctcaaacctggg

SEQ ID NO: 46324 - DNA, 947 bp, Zea Mays
gactaaaaaggagttagtatgaattttatatgaataaaatgagtttctggaattttatttatatactagaaatcattttctataattatttattttcactgctctctggacctcgcgcacaaaaacagagaacaacagagacctaaatcacaatttctctatgacttaggctactattcactggattgcgggttgattccattaaaatccgaggactcttaagtaaaacgcccatgccaaaggggtattctttgcactgggccgttcgatcaggaacctagggctatgattagatctcagatgctgtgaaccggaacgcacgagatccacaggatcccagataaagggctaagatttaatgcgtgtgtgatctattctccgccctgcatctgcgatctaatggccatcctttgctcaccctgaaatgatgacattgaccagatctacaacgttgcacaccgatccaatagtcatggttccatctacgaagcagtatgccctggttccaatctggacgctggtttatggatctacggctaccactcatcttctagctcctgacaccgagtcccgatgaccaaccagagcaccgtggcggcgccaaggaccggccacctctaccaactaccatgccaccccaatgccccaaactcaacaaaatcgggtgctaacctacacggaatcgatgatggctaatacgcgggaggaggacataccggcgagcggcgatggcgcagcagagacccccggccacgcaacacggtggatacacggaggagttcacaccctggttgaccaaattctgggctcccgatcgccaaaccttcacagcgagaacccaggtactgtccttggggcgcggcgaggcttctaagctcgatccccacgacgaattaacggattgacctcagcggtgagtcgagttccagtcgaacgatgacgcaacg

SEQ ID NO: 46325 - DNA, 682 bp, Zea Mays
cttgaatcgatgcatgcgtgggtagtcccaccacctgccacgtcgacccgcgccgaatttacgcagccaataacggcaaaatacgcaagcataacgcgcgactcacgtctccccacccgagccccggccccacgttaccatttatgcagcttgttcattcaaattccgtatgcataaacgccccaccttgaatcggtacctgcgcgcggtagtcccaccacctgccacgtcgacccgcgccccgcacacctagccaggccggggctctctctagtaatggaagccctgggcttccattacctatatatatatatatatatcctctccgacacaactgctatggattaatcaattcaactatatttttatatcaagatgagtatgttttaacaaattagcctctaaaaaataaaggctggcgctttgtacaaaaggtagccaaataatgtctgccttggcatagccacgcatgcttgtctgccctggcatacattagatattaatttgcaggcattacagataggggatccaatggaatcttatatcagccagcagctagccctgcacttgtgtctgtcgatctgtcggtgcattgcattgcattacattacagcaagctaggttggcctttaaatagagatccatatacaccgtctcctatagccacgcaacaccgcagcat

SEQ ID NO: 46326 - DNA, 598 bp, Zea Mays
ctctaattctctctcaactctatatctttcgttccaatttaggggaagtttgtcattcatgttcaaaatagcatccaagtttttcagctttaataaaagatcatgtttaatcttatttttttcacctcttttttgtatgttccaccctcttaaaaatcttctgatagaaaccaggctcccatgccacccatccatcgagtaggaatcttcaggcctacgatccttaagtttagtccatttttgcgaaatcaaagatctgaagccttgttggagaagccagttattctcaaagaaaaaataatgggatttattaacattattctcactagagtcaagcacaataggacaatgatcagaacccactctagtttatcctttagagaagcaaagagggaacctttcctcccactcagtagaaacaaggaacctgtccaacttaactagcaccgaattaacttgattattagtccaagtatactaagcccccctggcaatttctcgcagcttgtagtgattaataaattcattgaacatgttcatgaggttctgatcgatgttctgggaattcttctctttcctattcctcattagattaata

SEQ ID NO: 46327 - DNA, 926 bp, Zea Mays
tctctctgaccacgttgacagcgcgaactacggatgaaccgaggcgttcccggtgatcctacgtgttctagttcaattggccgggtcgagaagcatcaagagaacacaagagtacttaaataagagcgaggagggcgtgatcggacctgtggagagctggccacatcgagctcacacacggtggggttcttgactgatttgggggaaatcacaaattggggagttgtgagggacgattggaggtgagggttagttcactaggtgcacaattatttagcggagcaggctggggcatcactttatagtttccaagggcggtggctcctaattttggcatggcgtgttggcggatggagaggaagaaggtcactggtggctcagtcatggcgttcaccggtgcagcggttctaagatggtaagcccaggcgtgccacggttactactccacactaaagagccacgacgtggcataattgaggtcaccggagtttccacgacgacaccggtggtacggccacgtcgcacggctaaaggcacggttgataagcttcaccccgcgaccaaatccgctccccctccgatcttttcacccgcctggtattatcctgttcgagtcctgcacgaatcgccacgatcagcgtgaatccttgcgcagaggtcactgacggcgagggggctgaacctgagatctttctgtgtactgtaccatcagaaaccttatgaggacgcgtgatagagcaatttgcagtgcccagatctccaattttcatatgataacttgctaatccacctttaacaaagttgttgtcctataatccaactttgattttgatatagcaaccataatttaattctcactaaatcatactcaaaatagctcccaaacttggtcctagttcactgtcagtccagtttcagagttgtac

SEQ ID NO: 46328 - DNA, 469 bp, Zea Mays
acatctgacgaagcttttacataagaagggggagctctcggcagcgaagaagactgctgggccgaaagagcggaggattattactgtgattgaagccattgaagaaactccaccaccggcctcggcgtaaaaaacactagctgcagctaccgaagctgcccccgccgaagctgcaactgccgaagctgaaacgatcgaagatacaaatctagagggcactttttctgatattgataaaatgcttttgaatatggccgcgaaagaagctgctacagctgccgaagagaccctggccacagtgcccgggaaagagaatgagatcaccgaagatgcctcggaggaaaaggatttcaattttcaaaacataattggtcaaaagctgtctaaggctgagaaagaagagctgagagattatgcaatatcatgcggctatcaaccaggagcattgctcttcggcgtcattgacgac

SEQ ID NO: 46329 - DNA, 812 bp, Zea Mays
attttactgtatctctgacgtttgcactaaggtccccaaacttctatttcttcacatcactcggtcgacgacggtgaacggcgacgagcgcgcccttcggcgaacttgtaccgatcggaatacgcaatgaccggtgccctaacttggccaacaccaaatcccacccctgacgatcctaatctgacccttaattgcacgaatccgacgtggagtccttctgcccacaacgacggtgaaacccgagggaaaactgaggtgttcttggtgatgcagtgcggtctagttcaatcaatcgggtctacgagcatcaggagactcatgggatgctagaacaccaagtagagaagcatgacccaacctgcagatggctggccacggtgagaagctcacaacggcgcggaaaatcgatttggggggaatcgcgaattgaggagctacggtgaacgattggaggcgaggagcaatgcactgggcgcgtaacaacctagaggagcacgctgaacgcttagtttatagtgatcaacagaggtggcgcccaatttggggaagacacgctggcggccggagagagagggaggtcactgacgcgagctatcgtggctttcacctaggcaatgactcaggcgatagacgggctatctactgcggtctactgtgacgtggtgaaatgactgacgttgtggcataaccgaatgaaatggcggcacgacggtggcggtcgcgcagacacgtcgccggtgcaagggtacagcgaggctggttctatccattccctcgcggatctttttacgtctatggtaatatcctgcccg

SEQ ID NO: 46330 - DNA, 440 bp, Zea Mays
cgggaatacgatccccagtccccggggcctgtcgatcagcaagcacactggggaccctgacaaccggggtccatcagtcagctagaggacaatagataacgtctacccggaagaaccatcccccggatgaaccacgcgacaccgagcctggggtcgagcgtggcggaacctgacaagggggctaggcatgccaaaggggaaccactctagtgaatctcgcgcctagcccgagaccggcccatcataaatgattggaagtattaagtgcacttggtgccgagccacatcgaaggtgctggtccacctcccagtcatgaccgacaaaccccttggatcgtagagcactcataacctacaagcctcttggaccgcaacacatttatggcacgtgcatccctcggccaacactgcactcatgacctatcgagactggacctgag

SEQ ID NO: 46331 - DNA, 646 bp, Zea Mays
gcgagatgcttcgcggcggcacagatgaccgatttgggggaaatctcaattccttgggctacggtggatggcaggacgtggttggggttgcgttgggtttataaaaagggggcagagcaagggaagcgctcaatttataaaagccgaccacggttgctccgaatttgaatgagatttggatcacggcggtgacagaatattgtgactaaagcgagttcactgtggcacgtactggggcaaggtattacgacggtcactaggtactatccacgactcgtgacgacgtggtaatacgacctatggcgtggcacgactgagatcgccggcgtcccccgtcgacatcggccgctcagccatgtcgcaaggcaattgagtgcgatcgataagcttacatccgagaccaaatccacctcccttccgatctttttacctctcgcagttatcctcgcgccatagagtacgaatcacagcactggcacaaatcacgtcgcgaggatcaccggcggcgagatgctgtgctctctgatattttcagtcaatgtaccatcgcgatcatgttcaatctatctgatagagcgatttgaagagcttcttttttcagattttcaagtgacaaactactaatccgactacaacaaagttgttg

SEQ ID NO: 46332 - DNA, 636 bp, Zea Mays
caccgctctcagttgcttgttcacggtggaatagagaagggaacgcagatgagtggtgagggagatgcactttttcccctcccgaaatttcctcgtgcgatcgaaggtggtgctcgtgcggttgccctctcgattttgtggtcgctgatggcggtcgcggtggtgtgcatccatggagatgggagcgggagtgatgatgggtggcacgagtctgggcggttgcattttggtagcctcgtggtcggatcgtgatttgcgctggcagtttcgtttctgattttgttcaatgtatgattttgaggagctgtggatttgggtttcgagcgattggaatttggaaacgagttgtgcttggggaaattcgacttcgggaagtggtctggaacagcatagaatcgtggtgatttgggcgtggtctggaggagagggacaatggacatgaacaagtattgtgctgcggcagaggagctgcagcgtaccacctcctgggggtgatgtcacgaggagcataggcaggtagaggtaggcgttgttggttgagttgagctcggatgattgattactacatgcaaagataggatagacgatgttccgccacctcggcgcggcaggggaaccggggaagcagatgttgac

SEQ ID NO: 46333 - DNA, 356 bp, Zea Mays
atcttaacagatccatcctatctcgaaaagattctatcctatcctaatagatctaactaatctcaaaagattctatcttagtcttaaagacccatcttgtcctaataagcatacttatccacaccactttgcttatctcataatggtgtaacaaacatgatctattccaaaataaattaagtagatcttatctagcttaatctgattacaccaattcaattctgatcccatctaatctggtcagatctcatctaacagacaaacatgttagataatactagtaaaataagattggatcctactcttataaatatgttttaatccaagttggactgagattccaatttagactagac

SEQ ID NO: 46334 - DNA, 630 bp, Zea Mays
tcatctcgagtgcaccgaattgcttgctggggctcacgttctgccgcgggcccgcctaacttcgtgggcagcccctttgtcgccaccttgtctggtaagaccactcccatggcgttcaccgttctgtctactatgattggcatgaattggagaagtgagcgaggtacgagagctctggatagctgttctccggcgagggcccgccgtatcgtgcacgacgccgccgttgctggagttgttggatgcgggaggtgaaggagatagttgtatgtcgtggatcacataatggacagtggagataagatgaagccatacccgttcatttgttaatccgatccgttgatcttgatccgggtggctgagagtagaggtagacgtgatcagctctagagccatagatctcgaatcgggcgattatggttagatcgggtttcataaaatctaggtcattggatctcgatccagcggctgatggcgcatatcagttcggcgagatgcagatctaatttggaccgttcggatgggatcggacgacccaggcttcaagataccccttcaccgtgggatattttcataacagaccctgggattttcagttatagaacccgccatccattatttgaataaaat

SEQ ID NO: 46335 - DNA, 658 bp, Zea Mays
aacaaacatttagtccatttcctattacaccctcgcaatatgctccaaagcgtcagccgctgcaggaccctcagcgccacctccttggagcaaggattgctcttctgctcctgcatccaccgcagcatcctttcgggccaccgagctttctagtctggcgaggtcctccacttcttcgttcattgcctgcaaagacagcacaataacgtctcaaacaacgaacacacacaacaccctcgccaaacccaaaacatacatgcgctagcgctcggtcggccctctctcggacgatgttgtggccgtgagggtcccacatcctatcgtagagcgccctagcaaagcgctttagcacgtcatcttcaatctagaacacgccacgatcgaagtcctcgttggctcggtcgaatgccttgaaatacctgcaaccttcgtgggacaaggcattcgcagccccttcacaggtcacgggagacgcataggacatgaggcctgtcacaatggacaggagcgactccagctcatcctgtagccaccctaaaaatctggtccccacctcctcccccgatttgtcgaagggggcgatttgcgcgccaaggtcacggtacgcatccacgaaaagcgtgtgcgcccggtcaacccagcacgggtggcaaactcc

SEQ ID NO: 46336 - DNA, 517 bp, Zea Mays
ctgacgctttctggaagccttcggaagcccaatatcaacaccaagcatagtacacatcaggcacgagcgccatccatggaaccatcacctgcacacacaatgttacatattatatcaatcacaacaatcaataaaagggtaaaacaaattgaatactaacctcacgatattgatcctcagtcaaatatatctttgaggacccttcctttttattcaaggggcctgcttcttccggatgattttgaaaatataggtttgtagcttgaattctcgcatagtatatggcatccttcaccagcttctttgcattgttttggaacacacgttcagcgtgccccatgtaatcctctccgtcaggcaaccaatatcgaagctacaaggcataagtcatagaattacaatattaagaaacataacaaaaacaataaagaattcatacccaaaagtcatgacacacaagtccctatctgtcggtgtggtttcgttcctttttaaacttgtactcgtcctaggtact

SEQ ID NO: 46337 - DNA, 789 bp, Zea Mays
ttaaggagcaccgaagtaagcaggctagttcgaagagccatcactattgcttcttaagagcactaccgtgtcaactggaagatgaaatgaaggtcgagcattatatgaaggaggagcactatgtggggaaggagcaccaaatgggggaaggaacataggaggagcaccgtatgaagcattgtatggaggagcaccatatgtccatattgaggagcgccatatagatacccatacaggtatatatgagggtattaagtgagtggtggaggaggagcgttgatggtaggaggaagagtgttggtggtaggatcatcactaggaggatgacgaggatctatggaaagttggtagggataccatatagaatataggtatacaaacagaggttgtggagtgaaggaacgatgacgagcaaaaacatcctcctgatgataatgtacgagagaaaggccataaaaaaccttcaccacactaataggggtgcctagaagttgagaagattggtcattgatcaagtcggtgaatgttgaaagtttggactccacctatgattcatattgaaatagatagtgagaggctacaatatgaaggaagatgagtgtattggagagtgagagtgtgaataaacctaaacccctcccctctatttgtcatttttaggaattttttcctatttttttacttcaaatggttcaaacaatatggaccaatcagaacacatcacatgactaaattaagatggttggtaccgaccagtaagaccgaattgtctaatgcattggtcgatac

SEQ ID NO: 46338 - DNA, 525 bp, Zea Mays
cccctgccaagttgcccgccggcgatcaccgaattcgctcgctttgtcacccgccttctccttccgagacacggttgatgtggccagacccaaccacacatcctttgccccggccgaagccattgacgcactccttgaggtccagtaaagctccctgaccacttctccccaccgcaggagctcgccaccactcattggagcccattttcctctggtgaacgtggccaacccaatatagcccatcgccaaccaattccttccacccaccacttcttcgtgaccttgtgaagctcctcggcccatcaatttgaacgctactgctaccgacaagccaaatcacttgctgtcaattagcccctctgcctgcgcgcatggaccagacgacctccggtgacggcatgactaccgatgtgaccgcctcgacctccccaacctcaccaagctcttcctcggacctctaccgctgccggtaagctgtgcctcgcttaacttcaccatcactgttccctgcaatggggaccttag

SEQ ID NO: 46339 - DNA, 357 bp, Zea Mays
gcacatctttgttgctactctctgcagttccagcactggtagaggggggaagtttgtggatttgtcgatctcgtcaagagacgaaaaggtgacatcagaaatcaagtttggaaggggaatattgaaacttgactgccctctctttgttcgagctttacccttgtgatggggggcctccttgcaacaactacacctgggggttccagtctgggtcttgcagccgtcattagcgagtttgatcctggtgctacgacgaagcttattgtcagagacatccgaggtaactcttttacctgtgttactaacttcagtcgtctggggggcactgaagatggggggttgaggggagtgaacatt

SEQ ID NO: 46340 - DNA, 818 bp, Zea Mays
gtttctggaattttctttataccaaaaattctttcctttatcaattttattcattttattttatacttggacaacgcgcattaataccagagagctcgggggctagcttatagatgtctcggactatatcgcaattgttttacacaggctcaggacggcgggtttattaaacaaaacaacagggactctttagcaaagttgtcgtgctgaagaggtatgaagcatccaaggccgcccgatcgagtctggatggtcgagattaaatttcccatcaaaccgaacaggtacgcaatgaaaggcgtctgataaaaaatggacggcccagatcatattagggttcaacactaatcctaaccactcgatcctagatctacggtcctgatccgatcgcgcagcgagcaccgcccgatccattcgcatccgattgatccagatccaacggctaagacctatcttctatctcccaacccagcggctagggacaccggcgtccagcgcccacggcggaggccatggtccggccacaccaacccacgaactcaagccctaaacatggattcgaggtatggtacacgtagaggagacattggtgaaccggatgatggatttcttaccgcgagaggaggcggtaacgaggacggccacggcatgagcaattccacggcaggaggtaggtcgacggcgaggaattaagtcagctcggttgacgattccccaacgtcccggccacgcccaccatcagtgtgtctccccgaagcgccctagcccagattcgaggccacgtcagtgacgcaacctcgggtcgacggcagcggctt

SEQ ID NO: 46341 - DNA, 600 bp, Zea Mays
gcttggtttgaaccgaagctaccgagcttcggcattctgcattgttaattctacgcaggatcttcgtcttgaggaccttcggcagagtagaagacccccaacactttgcttgcaagatcatccattaaatgtttgactaagtagtcgtccacaacattcacggacaaaacatggttttttatcctccatctcgaccctactaacatcatcaagaatagttatataggttagaactatagcgcagactgaacacatgctcttttctacataccaatcaaggaaaattaactaaaattagagccatcactctacagatgaactataaaaatcagactcacattgggattaggatgactcactgtacgaatgtgccataatttccatcatactgtgacatgtcgtcggccatctcgttgtcgtctattttgtcgcctcccatgctatctatgcccttccacccgctacaaataggatcatcccccatcattctgaagttgttcatgtccatcgccgctcacttctaattgtgtttgggggatttttttggttgaagaggttatcggtcctcaccgccagccatgtctaggtaggtgtcacacc

SEQ ID NO: 46342 - DNA, 586 bp, Zea Mays
agacatacttgaaagttgtacgccgaatgttcttatctgtcctgacattggggtttcgtaaataattaagtataggtgtcctccaatcacttgcatcggcttcattatcagccgattccattaagagaacatttttggtaaccccggacggtccggtgtctcgacgcggacggtccgcgacctggggaattggccctacaccggttatcagattttcagtgttgtgaaatctccctcgttttatccgataacctgatgcatcttgtgccaaattgttagctctatgattctcaactctagaaatatgtcgaatactgaattcgtcaaaagaatggattatgctccaacatttttcaaggtaactatttagaatactatcaaaacattgatattcttctaacacttgttggacaaccagctgagaatcaccaaatgccttcacatgttttactcccatacaatttaaaagttccaagccgaataagagggcctcatattcggcttgattattagtgcaataagttttcaatcggctagagaagtcgaaggagacatcacttggtgaaacaagtacgatgccaatgcc

SEQ ID NO: 46343 - DNA, 577 bp, Zea Mays
catcagtataccatggagtcgcagaagtcttcgggtgttgatcagcctcgtggccaggacgcgaagaggggcaacactggaggtctagcccacaagaggggcaagtctcagcatcagcgccaccatccttaccgtggcaaatcttctgactcgggtacttcgggaggaagtactcagaggtttcgggctgttcctaagcccgggctagggctgatgtgtttccgttgtggtgatgcgcatcgccatgcagagtgccagtggagtggcaggtgttctatctgcagtcaggaccacaaggatgtggtgtgtaggaggaatcctaatgggaagctcagatgggagccggtgacttcctcctcttctcagggcactatcaacatgatgtcaagtgctgagcagcagttttcagttccacttcctccacggcagttttatgtgcctgggacttctcagttcgtgccgatgcagggttttcctcagtatctggctgcgcctactcctgcaccaactactcctatgacgtctcagtttggagctccgcgtctgcctcacccggcagctcagtggggttcttctg

SEQ ID NO: 46344 - DNA, 372 bp, Zea Mays
tgattcaggccccatatattcctatcagggcagatgattagaacggttttgggcttttggcacagctagctacgacagcagcagcatctggtctatctcctactacgcattatgcacgcgatgtgacactacatactactgtttatagttgattgcgtgcgtgcatgccgtgtcgtccgtgtgtgaagcgactgatgatgaagcgcacgcaggagtgtgtgagcattgcatgtatagcttctggcttctgcccctcgctcgctcatcgtcccagggtccagtgatctgacgatgcatggccggccggctgaatcgtcgtgcgcatatgtttctgctacatttcgttcgttctctaggtatcagcagtctctc

SEQ ID NO: 46345 - DNA, 574 bp, Zea Mays
gccgccttcggcgaccggcatgtgggtctttgttcctgaccatgcaaatagtgtacgggggttctctggtgctcatggaagctacacatggtgtcacgtgtgtcgaggagcaaccagagccgagggattgctcaccagagcactccgatcaccatggagccaccgtgtctcatgggttgcattgtcgtcaccccgatctatggtaagatgcattctctattgttagcgcttgcatgaatttagttttgctcggttgccaaccatgataacgtcaccagggtggcgctctgtgaattctggcgtggcctccgccgcatacgggggcggcgccaccgtgtccgtgtcgtgtggggtgagggaatagccatgtgtcgtccgattctgtggggacatcccagattggatggtgtaatacctcttcgggtatttcaattcgggccattcgattgggcaccggtgaatgggattagatctgggcgtgtaatgcttcgagccgtggatctagaatcctatggctatgaaagagtacatgttcatatagcacgtggcctaatccgcgccgcctactgctgat

SEQ ID NO: 46346 - DNA, 2481 bp, Zea Mays
tcaagacatgcttatacccctctaagttggcatggaatgtaattagcatcaaatatactggtatatgaatagaaaatggaaaatcttcctaatcattattcgtttatgcaccctagtccacagcaggttaatttataagcttttaaagccacgtatctgaagataaccaagacaacataaaagttaaggttcaatgctcatgcagattttgtgcatgatatcataaaactcaaaaggggacgcacgagacacagtagctatcgaaatgatttcatgttagttgataaacaaaaggacagctttgccaggtatagacatgaatgacatagctgctgtgttgtcactgatcatctagtctttgttccaaaacttagaaatagattagacatagcaaccatgcatcaattactgtcgaccatagtatgacaggttctgaacttctgattgtactttattgaacatcatagtacattttgcccccaccagtcttatcgcacagctttggagccccttcactcaaactcaaagaacacatcatcattaagaacatgaccctggacagcccatgcacgtcaatgatcccatcattatcattataaccatatcaaacagaagatggatcaacagaacagatagtaggcaattccactcaaatacaaatataacagaaccagatcgacatttttggcatgcactactaataccaagtgatttttttcatggcttgaattttcatgaaaagtattccaaaaatgcaataattatgtgcttcataaaagcatatactaaaaagctaattgtccaagtgataccttgtataaaacacatgctgatgttcaaagcaacttatatagtatagctatatttgcaatttgagatagcagcagttaaacgttaccagcatgcttccaataaatgtacgttcagggttacagaagaggtgacaaaacacatttgtggtataaaaaatggacagatatgagatttcagctaatgttactccaaaccaaagaaccatggacattgtctatctgaaaccaaacatacgagataataaaaagctgaatatttgccaatatcgtcagatgccaaattttgtaactgagcaagtgccaaaatcaatccagtataattcagaagatatactagtacgtagtggctgtagcacaaataggacaatatgaaggaaaatggttagtcaaacttcactagatactgttcaactttcaggagtaatatggaaattaccgtggattctgctcaccattatgtaagtgtgagaatttcactgatattgaattactgactgatgcaagcacacattttttgtttgtataacagtagcaatgtagcttgtaaacagtaccaatgaattagaactcacagatcagcacattatcaatgccaactgccatggcaatatactgtcacaacgcttttgcagaaacaggtaacatgcacagactgtaataaaataagaaaagcgaggaatgttacacaagtgacttgactagctccctaaagctaaaattatagaatggtaactgccttaggagtgtcaccagcatgacagagcacaagctccaagcatttcgaggaataaaaaaaaagcacttcaaacctgttgagttacctggtgtctgtcaagccattcgatgtaagacttggtccttttacgctacaaccatcttcctccagagatcctaactttttttagttgtagctaactagctatcgttgcagcaagatcagtttgtttggatgtgcctaccgatcaggtcaataattcaatgcacggtaaaaatgtgcatatgtcataaaacacaaaatgagattcacagtacaaaactagctgtctaattatttcatgacgggcaatgcagaaatgataggttttccaggtggagacatgaatgaccacaattgcttgattgtcagtgatttgctactccttgctccaaaacttacgaacagatcagacagagcaaccacatgtcaactactgtccatgataacatgacaccatctgaatgaacagtacagtgcattttgcccccacacatcctagattttagaactatatatttgtggaccctttactcaaaggacttagcatcatcattcaaaagatgaccctggacgacacatggatgtcaatgatggcatgattgtaaccatagaaacaacacccagagtacaaagccaaaggatggtttaagttacttcatccaattgcaaatgcaagttatcacagcggtcatcacatttttggtttgggctgccaaatatcagtatacagaaaaaaatttatattaacaatatgcaattagtatgacttgtatttcaataatgtacaactctaattttaaatatcaatgatcaaattgatatacatgataccgaaaaaaaataatgtcaaagtgatataatatctcaatggtcaaaacttaattcttgatgccttgggtttttcagttctta

SEQ ID NO: 46347 - DNA, 385 bp, Zea Mays
gaacctcacaaaagaccatgccaagtactgtttcaaccactctgactcgacacacttgggaaaacgtctcatctgcgctctgtgcagactagggctcggacgcatgcccatgttcccgaacccagcctcaactctctatccagataaaggaacatgctatagggattgggtgtccttctcctaaccaaaagcgacacaagaacgagggtcatcccgacggccatgccactatagggcacgaacacaaggacgagagccatcccgccgaccatgccgctacagagctcggacacaaggacgagagccatcccgctggccatgccgctacaaagctcgaacacaaggacgagagccatcccgtcagccatgccgctacaagactcgg

SEQ ID NO: 46348 - DNA, 472 bp, Zea Mays
gcgcaataaaccagggaactacaggggcctctgcgcaagttgtttcaagactcagaatactatttgtagtactgcgggttgattctagaaaaacacagggactcttaagcaagtttccagggccgaaggggtatcggatgcgcacagccgttcagattacaaccaacggcctggattttatagcaagctacacgttacgcatgcgctcggatcacgatcctgtgatccacagagcgccacgttcacaccatatcccaatcgttcccctacggatctacggtcacgatcagttcacgcgactgatgactctatgagttgatctggtccgctcgttcggatcgaatggcacagatccacccacagaacaagtgcccacacattcaaatccgagccatccctctgagatccaatggcaccgggcacgtcacctttcccagctacccagccgacccaaactacggcggcgcgcgag

SEQ ID NO: 46349 - DNA, 615 bp, Zea Mays
atcggtagaaaccggccaaattcaaaatcaaaccagttcttgaattgaaacggcttgtccattgcttagcaacaaaattgaccacattctttcctgccttcgaaaatgggctcgtatcaatcatatccttgtctgcaccgtttgtggcttctccttcctaggaggtgttctttcaaacatgcatggcacgtacaccctcttgggaggagccatcactcgcctcatacatgccaccactcgcacgagcacatctcctaagttctcctcctctctcgatgcatacaatgcaaaccgcaaactcttcatagttctcatcgtatcgttagactattatggcaatgatcctaggcttccttttgtgtgaggtttgattgtctatttgtttcctcctacgagacgaacctgccaatgccaccctccatacctcctccgttatccttgctttccttttatcttggcccttgtcaatcttccaccgaaaagtaatcgacaacgtccagcggaatcaacactgcgacaaccttgcacattccccgcacgtgatgcaaggtgttgtttaaaacgtgtagcccccttcccaatgtttcttgcaatacttgcacttgaatatgggaa

SEQ ID NO: 46350 - DNA, 333 bp, Zea Mays
tgctaagaactggcctatatgttcacgtgtgtttttcccttgatcacccgaaaattttgcgaattcgggtatcctggttccctgtgggtatgggtggtgatcaaatcggctgtcataaggtttccgatatgattgccccctagggaccatgcttactccgagcttatctcggaacgccccggctatttcttcccttactatatcaatggcagccggtgcgagaccaccggctctctggtcaaacataggtggggttggctggatattagcatgctgtctttcccccccattggtttgagttacgtggtgcattttcatttgccctatatgggt

SEQ ID NO: 46351 - DNA, 662 bp, Zea Mays
tccattaaacaacttgttgaagtacactagccatctgtccttgatctccttatccttcaccaaaagtcgatctgcctcatccttgatgcatttgatttggttaatgtcccttgtcttactctcatggattctagccatcctataaatgtccttctctccctcctctgtgcctagccgttgataaacgtcatcataaacctacccctgtgctacactcatggctcgctttgcaaccctcttcgctatttaatagccctcgatgttggttgcgctcttgtcaaggtggaggcgcttgaaacactccttttccttaataactctttgcacctcgtcattctagcaccaggtgtatttcgcttcctgtttgcctcccctactcacactaaacacttataaaagccacctttcaaacacatgtaaccatatttagccacgtgtcgactacatcttctccttcttcccaaggtccttcgcctagcatcttgttcttaaatgtttgtgccacttcccctctaagctcccaccacttcgttctcatgatcttggcacatttgtgatggacacgtacccaaaaacagaagtccgccgccacaaccttgtgtagaggaacatcacactccctaggtatcaccttacgatctaagcaagcacgtctatcctcc

SEQ ID NO: 46352 - DNA, 368 bp, Zea Mays
ttgaaccggtttctgaaccggttttggtcagtttgaccagccgtcgtcgtcccttttctctcctctccaatcccactttctatcttcactctctcatttgttgcagccgccgacgccctcacctttctctcttcctctctcacatcctacactcaaatccctccaaaactatcaaatctttgtggagattgttggagatttgatcccctcgggctcctccatcatctctccactcttcgttgggattttcgtggtcgatttcacagatcgaggtattgtctcattttccctatttttgactcgatccaatatcgttcttgattatcttaagtatcttttcaaggatattgtgtagcttaggtgtatgg

SEQ ID NO: 46353 - DNA, 579 bp, Zea Mays
atcaaccgctactaagatagctaagtattccttctcatacgtcgataatccttgagatttaggtcccaatgctttgctcaaatatgcaattggatgacttgactgcatcaacactgcgccaatacccattttgcttgcatcagtttctaaacaaaagggctgagaaaaatccggcaaggccaaaacaggagcagatataagagattgtttcaaggtttgaaaagcctcttcatgaactgaagtccatataaacaagacgcccttcttgagcaacgatgtcaggggtttagccaagattccaaagtgttttacaaaccgacggtagtaacctacgaggccaaggaaacttcataattcctttacagacgtcggggtcgaccaagttgccacagctttgattttgccagggtcggtggccacaccagcagctgaaataacgtgaccaagataagtgagttgtgtttgaacaaacaaacacttagatagtttaatttgccactgatcacgcctcaacaattccagtactgatctcacatgtctaagatgctcttcaaaactagtactgcagacaagtatgtc

SEQ ID NO: 46354 - DNA, 434 bp, Zea Mays
attcgggtatcctggttccctgtgggtatgggtggtgatcaaatcggctatcataaggcctccgatatgactgccccccagggaccatgcttactccgagcttatctcagaacgccctagttatttcttctcttactatatcaataacagccggtgcgagaccaccggctctctggtcaaacagtggtgaggttgattggacattagcatgttgtattcctccccattagtttgggttctgcggtgcattactatttgccatgtatggttcataggattgactattcctttctagccttctaggcgaggccggaaagtactcgcaccacgggtttgggatgttgtattaatgggctggtgcattgtgtattgcggcaggaagtgttgctgagacgaatgaggatttagctaacaatcctcctcaaacaaccctg

SEQ ID NO: 46355 - DNA, 499 bp, Zea Mays
aacagtttgtggattctaaaggaggtgcaagtgaagacctcgggcaacaagtggcatcagagtcgtgctgactgtaggaccactgacctagggtagaattggtcttcttaaggactactaactaatatttcaccttaaaccttggtgttgctttaaaagttagtcaccttggctaactatgtgctacactcctatacatatattttacctcgctaaaatctttcatcataataatgttctatgctctacttacttattcttttagatctcttctcactcttatacttgcgatgtttttgtagatggctcgtattaagcacactgctcaaggtcaccattcctttcatgtcgcctcgccttgttgagcacccactttggctaattgtgttagggcagtcgaatcaaatagacgagctacaacaacaccaacaggagtaacaggagccctactcctcgcccttttagaaggaggagtcagttggcctctcctcctcgaccc

SEQ ID NO: 46356 - DNA, 636 bp, Zea Mays
ttttgagttaaaaatcaatttctattatcaattttctaaattctctattctctggactacgcgtcaattcacagacaactcagggggccacagcgcaagattccctagacttagagtacagtcactctagactgcgggttgattctataatattccagggctcttacacaaaactaacggccaaaagggtatcagcccatcggagcctttcgatccaacatcgacgctacagattagatcggcaccctgcccaaatcggtaatcaacgtgatccgaccaattagagatcaacgcccctcgacagatcaccacccgccagaccacgctacccctcggatctcatatctacggtttagatctatcgcgcgaaaaggtataccttgtattgaatcatggccgtccatacggaaatcaacggcccaacggtcgtcgtttacctacgatatacctaatggcggcgtaggcccctcccggtggtggagcatcaccggagaattcccggcagcattccagagccacaattcctactcccgcttcgagttttacagagccaagaacctaacgaacccgccaatgacattttcctggtggaccggccgcacatagagcgcgtccacgccactacacggccccgcg

SEQ ID NO: 46357 - DNA, 678 bp, Zea Mays
atggtgaggtcttcatgctcgtgtccttctacgagcgtggttttgggctgcccttgcacccgttcatgtgggggttgctcttcttcaatgggtcggagatctagaatctccataccagctcggtcctccacataacatgttttgtcacgatatgcaaggcttacttttgcatggagccccactggtagttgtaggggcatttgtttagctcatggttgtgcagcggccgcggcagtaagtcgttcgtcagctgcttcaccattcagttgtggagctcgtggcaatcggcttacatcaaggacccctttctgtactctatgcacaattacaatggcgagtggttttatgtcaagaaccttggagaagtgtgccgttatctactggtcgagttctagtgtctagctttgagtggaactatggtgcggaggccaagttcaaaccaaaggtgcagtacatgccagaggcagccgagaagctgaaggcacgtgatctctctagtgagaggttgatccgcaccattatgtagcggtggctacaagcccttatgacctgccagaatccgatgtggtggttcactagcgcgaatgaccccgactagcattctactgtagaccttatgaagaaggaggtcgatgctcgtgttagtggcatcactgtaggggtgatgtcggattttat

SEQ ID NO: 46358 - DNA, 448 bp, Zea Mays
gtggaatcaaagaggatggatcaatggcgaaggtggaattgttgaggtcactcctggatgcatagctggggcttggtagcccagagccccagatagtgggttgaagatgacacccctggtgacaacatacactatcgaggctctagaatgtcattgcggtgcgtcatgtgtgtcgtcgctgctactacaagagcatcctactaacctatgtcaagtcccttgtgcttcttgcaccgttgttcgactatgacctttcccttgtcagacctagacatatgtgttggctcctgattctcatccccaacagatggggtggatctaaacacttggtgtgagccataactgacacaaagttgtacaatcaatactcccctgaaacactatccctaaccaagactccgagaaccaccaacaactctaccaacagactccccttacttactaccac

SEQ ID NO: 46359 - DNA, 303 bp, Zea Mays
cgggtgtacctctgccatggaatccggcaattgcaagcgataagccaagctgcccacccgggccaagatagtgaacgatccaatatatctcgggctaagcttttcagagacaccgaaccgaacaactcctttagtgggtgataccctgagaaggacttggtcacccactgcaaattccaaatcctgtctcctcacatcagcataactcttctgacggctctgagcggccaaaatattctgacgaatttcccaaaccttttcagaagtctgttgtacccaatcaggaccaaccagggatctctc

SEQ ID NO: 46360 - DNA, 455 bp, Zea Mays
gaaaaaacgataatacacacccaaatctaatgaaaaaacacaaccaaaaagctaaactattgccaaacactcctaagagcagcaaccccagcaaggccccataataaggcatcttcatggatggacaacaagattgcgtggatgtttggggaagcattttcaaacacacaagcatttctatgcttccaaattttccatgctactaaactcacaatagagttaaaaccttttttcttttgcttaggcacatttctttcggcctctccccaccattcctagaacactgctgcatcatatgtgggagtaagatgttgcagttccaacctgcttagagttctaaaccatacatccctcgtgaagacacaagccaccagaatgtgttgcactgtctcatcctgctggtcacataggggacatctatccgtgtgacccattccacgatgagccagccgatc

SEQ ID NO: 46361 - DNA, 644 bp, Zea Mays
actagagaggtcagttttggagctgaagaggagctagtgtgtcgggccttgtgacttcaacggctacttttgcgaaccaatatactagagaggtcatattcaacttagaaccagttaatcgcggtccggtggtgcatcagcccagtttggtgaggtctcactagacctgcctccgtcagatcggtcattgaacggacaatctgctagaggtctggtgccacgcaaaaaagtgtagttttctccacttttctccaatagctacaaggggtagttacggctataaataccccccaaccagcattcaagatacataagagcttcaccaaactactattcatcacttgcaacaattccaagtctccaaactcctcccaaatgccacattcactagaattgagctagaaacttagtagtgccttgtggagtgttttatttgagctttgttgcaacaggttcttgtgttcctgagtttctttctcacctctattctcattctcgcttgtaaagctagcaagtgactctgcatttgtgttgaggtccttgtgggaacatcgggaaataaatcgcctgtgttctttgttttgttcttgattgtgattttttttcttcatctccctctctcttagttctcttgcttgagcttg

SEQ ID NO: 46362 - DNA, 375 bp, Zea Mays
agtaagtgtttgagcatggttaccctagcaagattgtagctggtttattaggctatcactttgatacagagagttgattcagtccttatacaaaatctggagcaaattggtaccaaatatgctctgtcaggccaactgaataagctgcgccatggtacagtgaacgggatggatcgggttcagataacctcgccgccggcgacctgtgcgcccggattcgcgccgacgtcgtgattcacgcccgaccgaactcagataagcactcctcggtataaagtatcacgctggagataaactccgaccattgttctcaccgttgtcgtgtcttgctgtagttagtcgcgctggcatcaccggcgtttgccgttatccggt

SEQ ID NO: 46363 - DNA, 372 bp, Zea Mays
gacagccggatgttcgcaccccaagctggaccgagtcccccacagatcaggaggtagccgaggcaggtgctttgctggctgaagttgggttgctgaaggagaggggtctgactgctgaggctgttgttgctgattttgtcttcaagaatattcaatcgttgaaagacagggcgtacccggcttatctgtatcaaggcctagccgactcaactcgggttaccaacagaagaattccctctacagacttggtgaaccgacttgagatgatccttagaggcaaggtgtcaaatgttggtgccccagtgtcatactcggcctggaacctgcctcctcccaaagccttcaccctttttgtgtcgaatccacctgtca

SEQ ID NO: 46364 - DNA, 577 bp, Zea Mays
gctatttatatattggcgcgcggccggggtgcttccatccatgcatggtgtggttgggtagttgggtttgtgcgtgtcgtccaacatgttgactgatttttctaacgcttctacgcacattgtgaaatgcctgcgcgctcgcagctcagctcagcaagctggtagctacgactggaaggttttgttctggtcgtgttttcagagtcgaccttcacgtccctgtgtactacattgtttatgttatctttgaacctaagtgttgccggccttcttctccgccgaaggttgttaatacaaaaacatcttcagcaaaataatataaaagtctttccgaaggttctcaagacgaagactctgcgtaaaaacaatattgccaaatgtcgaatctaaccaggggcggacccagccaaaaaactaagcaggggcatacttctaaccacatataaaatttagctgaacatgtacacgagtgagggcctctaattttcttaagatggagcactaatagtgaaaatttgtctactaactatagttaacaaattttgagccggggcctgtgccctcgctaagactaacg

SEQ ID NO: 46365 - DNA, 500 bp, Zea Mays
gcatggggaagctagccatattctccctagagctaaaaagacttcataaagaaaaggtactctgtcacgcattacattggaagataaaaacgtaaagcggaaagttttctatctcgtcctgcatggaaagtaaaaaataaatcgaatagacagtgtgaaatacaagaaaggcatagatagatgtggctggagacgtcactttttggacataggtagcttccatcttgccctactgcttgtacggacgaacgggaatatatatagacgatgcaaagctaacggaatcaatatctagtattctagctccatatatagcttacactgatatagtagtggtgtgcccttccagtcacccaaggggctttagcaaacctcagcatgctttctcctagattctcctatcgtgatcaacccctcccccgccgtttaatatattgcgataagatatgctggcgactgcagcagcccccgcgcgcggctacgtacctgcactgcacaca

SEQ ID NO: 46366 - DNA, 480 bp, Zea Mays
gccatacgcgaggggaggttatggattcgattcccaccgaccacgcgcgaaaaatgtcgagacttgcaactttgacggagatgagcgggcgccttctcctagaagttcaaatagatttacaaccgtcagtatttctattgaactctagtactgccagtacaaatatgtttacaaccgtcagtatagaacttatatcgtcaaagtatagaacttataggtatcaatgtcacctagtatcaaacatttacgtccctattttacgtctactatagaccgtgtaactagcacgtaggcggcgacggcacgcatctagtgtacaggaccaagggacgcgcggaagagtgcacgggagtcgcatttgttacgtgttgactgttgagctagggctcaataaactatcgtgtttggttcacggtagaatttgagaatctagtttgaaaatataaaatggcttgtttgttgcgggttgtggtggcttta

SEQ ID NO: 46367 - DNA, 1008 bp, Zea Mays
gataagatcgccgtggtaggggggggtgattattccggccgccacgcggtcactgatctttccggccatgcttggtcactagcgctgctctcctctgttcatccacaccatcaccgatttgactgctttacggtcacggttgaacgtggcaagctctaagagaagtaccgcactcggtgtcgtcgttgatcgccagtagggtctagtgatggttatcaccgtgaccgtcgcgatactcacgaagcctataaatccaccctgctctcacttcgttcgtctcaaataaaccaagcccaactcttcattcctcagttgcgaatccaacaagccactagccatcacgttctgtcccccatcctctgtgatcaacggaattccactaaaccggtttctttcaccgccgtgaagaactcttccatggccagaactcctcgggttagtgcatacccaattgattcgagttcttgcttgtttttagccccctattgctctcggagccggccaattggagtttacctgagtctcatcaccggaacacccctctgctccgtagagcgccgccgcgacgccctctctgtcgacccgcttttctactcttgcccatcccaaattctagcatgtacgtaaactctggtgaacccgtgaagcttacccaagcttcaatttagtcagccatgctttcggttatccggaacgcattgattcattcgaccatccgcactgtcgccatgaactggttgattcaaagccccgttagtaaaactgattgaggggaaatgcgtgggaggagttcaatcggtgtctgctgctcgggagcaccagcctttgcgccatccggccagtctaacctcgccggtgttcaaagctccgccgtgcgacgtcgtggtcctggcgcggcgaagaattagaagtgcaggggcttttctgcgaatgtcagtgagacgttaaatagtagctaagggttcttaacagatattcaaagcagcagggacctcggtgcaaaactac

SEQ ID NO: 46368 - DNA, 559 bp, Zea Mays
ggaaggggttctccagtataattgatatgagagttgatgcgcttggcagtagatcacatttatcttggctgatggagaagcttgatcataatgatatgacaattcgagccggcccagggaaggagctaaaaattacaaaggaaatggtgcaccttatattggggttaccaaatgctggtggaggaaagccattaggcattgatgagtctattgctacaaataatttaagggctgaacttggtttatccaaagaagaattcggtgttgcagctctacaagatcgtttaaggaaaggatttgacgatgatctaagcatcaaatccttctttctgatactgttcaataggttgttgttccctactgctagttggggaataactaaccatgaggttcttttaactgaagaaattggtcgtttccacgagatggattggtgccagctcatattcaatgatttatgccaagcggccaaggagtggtatactaggagcattaccaatgtgtctacaacaatttacggatgctccatcgtcattcttgtaagcatatcacctttttt

SEQ ID NO: 46369 - DNA, 522 bp, Zea Mays
cggtaccggtggaagttgaacccagaaaagtgtgtctttggagtaccggcagggaagctactcggattcattgtcagccaccgaggaattgaagctaatccagaaaagattgagaccatcatgagaatggaagggccacagccacagaaaaaggtgcaaaggcttactagatgcatggtagccctgagcaggttcatatcaaggctaggcgagaaaggcatgccattttacaaattgctcaagaaggtggacaagtttcagtggaccatagaggcataggaagctctagaggcattgaagaagttcttgaccacaccactagtgctcaagccaccgcgccgagctacgcccggtcagccggcagaagatctgctcctatacatctcatgcacgactcacgtggtaagcactgcgttagtagtcgagagggcagaggaaggacacacatacctagtgcagcatccagtttacttcatcagcaaagtcctcgggccctcaaagataaggtatcctcaagtccag

SEQ ID NO: 46370 - DNA, 678 bp, Zea Mays
gaaaacacgatagataatgcaaacccctcaggtaaagcataacaataaaacttattgataaaccaatagccatcattaattaactgcatcatagcgcaatcgcttcgatgagatcagttgcttgtggagtagacttaaactcgatcggcacgtggcaggcacgaggatacatgcatagtacatgagaatgagatcaaccatggcggtttctccggtatatgttgcatcagtttcagttagaggggatggtgtccttgactgatcaggattcagaagtgtctagctcagctgatctgaaggtgcaccaccgccacatgatcaacgctacggaattcaggtcgttacatacccctactatgttagtctatcctcatcagatctcttatctcatccccaatctcgtcccttattttaaacttctctctgcaaacaatatcatctacagttccgcatcctctatttccatgctccactggagacaggcttagctagtttaacatagaaagaacccttacatcagaattagtttatgtactttttttgtcaacttcgtcgggggcatcacatatggttgaaaagacactaaaagacctctcccttatgccagaagacaaggattattattgcatccatacttcatcagtacggtagggcacctttcccatgcttgctttgctt

SEQ ID NO: 46371 - DNA, 409 bp, Zea Mays
tgtgggttgcaagtcaaatatgtttctgcttctttattcatttttatcatcactaatccatcaaaccagaaccatctatcctgtcagttaactccactgcgcgtgtagatttaagtatcagtattaggttatccggagggcatatcttatatataccataaaataacaaaaggaaatcatagtgcaattaaattcatgccctgtagttccttctcagatagaatagcgcaatgcaagccaaataggcttgtgtgtcttcctcagctcagtcaagacaaaaacaagtgattctgctatgaacttcacatcaaatgcttttttaatcattttctctgttaatgtattaagtaccagccaaatatactgtatcttctactccttttgtttaacagttaccgattcacaagca

SEQ ID NO: 46372 - DNA, 684 bp, Zea Mays
gacattttcatataagctatggtcaaggggctcagaccaggaccaactgcctagtattttgcaaggaagcctcctcactaccttgaaaagttactacaaaaaatggatgcatatataagggctgataatgatttccaccaaagaagggaagagttccacatatacaccgaagtcgctagaggcttcggaggaaggtaccatccaagacatgttcgaagcatctataatcgatcatagggtgaggaaaggatgactcaatcatagagtcaatcaggacaacatgcaagctctcagcaacaaacttctcatagcacatttcgaccaccttatccgagaggaaggggaggcagaagatttggtggaagattcaatgtgcccccaaggaagcaattctacttgttttgtggtgaggacatgggccacactacaagaacatgccatcataccatcaacaagcagaaagagcttgcttcgttagctactcaacctttgcagctaaaagaggtgttcagtaaatcttcatactgttcaccctacatcccctaatatgttcaaactcagtcgcaagagccaaggccaagtctgtcttcggcctcaaatgcctcaagcaacccagtgatgaatacatggtcaccagttgcctccttcaggaccacctccctatgatcaagttcccgctaatca

SEQ ID NO: 46373 - DNA, 326 bp, Zea Mays
gagtcttcacagtgcattgggtaccaagctctctcttagtgttgcttttcaccctcagactgatggttagtcggagcgaactatccaaaccttagaagatatgttgcgtgcttgtgttctgtcttggaaggatagctaggaggatcatctcaccttggctgagtttgcttataacaacaactaccaggctagcatcaatatggcaccatatgaggccttatatggcaggcggtgtatctcccctttgtgctgggagactttgggagagagatctctggtttgtcctgattgggtttagtagacatctgagaaggtttgggaaattc

SEQ ID NO: 46374 - DNA, 516 bp, Zea Mays
gcttaagaagcctcgacttcattatcaacaatgaaggggagctagttagggccccgttgcctgtcatcctcgatggaaggcctcaaaatcatcgtagagaccctcaaggtattcgactcgactccttgcaagatcgtgacccaagaagagactagctagggcctaacagcatcaatttcgtgggaatggttgactccatcaggtattcagtgtataatatccttatgtcagattctagctacagcgtcagcaccccatccagtgaggcaagctatgatcccatgcaggagtgcttcatgactgaccccctaaagctcaaagcatggtggtacggaaagaactccaacaagtgtaacaatgcttgtggtggcatcctccccgttgcacctcgcccgagcacaggaacgaacgccacgagcctatcgaaatccggcctaagattgttgacgcctctcgaaagacgggccaggtaggccgcagcgtcgcttgacacatccacaacaaagtgctaggtgc

SEQ ID NO: 46375 - DNA, 325 bp, Zea Mays
ctgctgcttagagttcattggattgctcacccgattcctctatcaaagatttctccatagttatttatgggtaggtcacatttaggcaggttcgagctctcgtcgtgaaataataccatacgcctagtagctattgatctgtcatgttctggtctctcggggctttcctgcctctccttatatagtccaaggaggtggacggttacaggggtgaatacgagtagatcacatgatagatctaatttggtaatctagtcctataagaatccaactctctataattaaagtgtgtcttccttatccgttagaatcatgttctatctgc

SEQ ID NO: 46376 - DNA, 272 bp, Zea Mays
agaagttcgaggactaaaacagaaacattcctaagactcatgctactcctgcaggactacgggtttatttcaattaagcacagggactctttagcaaatgtgacgtagcgaaggggtctcggcaactgtgggccacccgatcatctatggacggctaggattaggtttcttctacaaacaaaccggtacgcaccagtcctaatctcggccatgcgatggagatccaacgaccgagattttattaagcgtgatgtgatccagttcgcctaaat

SEQ ID NO: 46377 - DNA, 740 bp, Zea Mays
cagagtgctaaataatagtatacgtaggaggtaggggatcaacgaaaagttgattccataatcattaggttatgcatacatcatatttaaactatactaaataaattttcccctcttatggagatatggcgcaaaccaagaccaccctacaaaaagcaaccggacctcatggtgtaccccagcatcagctggctcctagacacgaggggagcagcagcagaagcaacgatccaataggggatctagaagccagggtggcgcgactcatgtcagagctacgccacgggagtagggagcgtgcgcgagatagccgccgcattgttgaactgtcagcggaagtaaatcgcttgctgcaggaaattgcagaatgagacatgaccattgactaggccgtaaattcacgctctttcgcctgggattgtgaggccaaggctctagctcgggtagtggaactaagcgcatccctggaaaatctgcaagcgtattgtaacactcagcatgaagaggtgcacgtgttatatgatcggttgcatctaaatgtgccactagaagttgcaacaatgagagctagaccatctggaacagctaatggaggagctaatggggagttggacctttttgaagcccctccttccatgaacctcgcagatgaacgttctcccgatgctggcagtggtgcggccaaggacgaagataattagagtagtgtagtttaagtggtgtccttatgtaaagtaaat

SEQ ID NO: 46378 - DNA, 333 bp, Zea Mays
cggatatccgaaagtttcagtttttattttttcagcccacctgaaaccggccggcccagcccaatgcgacaatattctttattcaatcaccagcaaggcagcaaccctaccctagtttctctctcacctcaacctcacgcacagcacaaactcaagcggtcaagccaccagccgccggccgccgcacgcatcttcgctagaaagcagaagctcctcgtcggcgtacggcgtcgagcactcagctgccgtcctgccgcactgtcgccccagcaacctatcgctgccacactgccgccccagccacctgccgcactgccgccccagccatctgcc

SEQ ID NO: 46379 - DNA, 340 bp, Zea Mays
gaaaggcagaactcctgccattacgttcaaaaaataaactaaacaaatatacaagggaagaatatgactggtattgttagcttcatgtcctagaccctctgatccttcacagcagcaacattattaggtttttgcaaagggatttcacaatgaataggagttcagcaacaatattaacaagcatgcaacagaaaattcacacagatcttcattgaatctacctttgccctgaaaagagataggtctcgaagttgctactatagcatcagatagcatttatgttgtccgaaatgaatgtagaacttcatgcgaacacaagattgacttaatgacgagtgat

SEQ ID NO: 46380 - DNA, 884 bp, Zea Mays
ggcactggtacatgcatgaatgtacatatatggttaaacttgctaggacaaatcatgaacttgctaggtacaaacatgaattccatggtacaagcaagaacaaatcttatagtgcctatcacaaccaacacaaagagacacacctagggggacgcctcgtcgacctcggcgttggtgtccgaggctgatgcatccatagaggagatgacttcagcgcagtatttcaactggtcgtgctccactgcaagaaacgaggaatgtagaatggggaatgtggaatgaggatctagattgtagtggaggaaatctcgcattggggaatggggatctatattacggtcaaggaatggagaacggagaatggggaggaagaagaggaaggagagagctcaccggaggtactcacgggcggcagctacaccagcactgacggcgatgcgaacgaaagttgtgcccgcgcagactggttctgacggaggaggcttaatggctctcctcaacgtctaagagagattttgagtccataccggtggctacgtgtcgtgtggatttctaaatcgtcgaatctcttcctaacgtatatgttttgacgaagccgaatatgacgtgtttcataataataaaaatctctaatatatcgggttcttagtacccgtacctgaaatttcgagtaggtttagcttggatatacgaaattttaaaaacctgaacaacctacgaaatttctagaaaaaccgaacgcccagcccttacggatgacgagggagcaagctcctccagatgtggagaaatttgccattataaaatatagcagatgttgattcgaccaaatagagacataggtggaggattcgatagtttagaaaagtagagaaagaccaaac

SEQ ID NO: 46381 - DNA, 481 bp, Zea Mays
ctcggatatgtacttggcaatttcccttttcattctagtccaccaatataaagatctgaggtcatggtacatcttgttgctaccagggtgcatggagaattttgaaaggtgagcttcatctagtatcttctttctaagctcagggtccttgggaacaaccaatcgatctccaaaccatagaattcccttgctatcctgtcggaaacacttgtatttttctgccttttgcttgatcatatctttgacgacctgaacacccttatcctcaacctgtgcccttactatctgctcttgcaatgtgggctccaccgaaatatagcttaggttacctgaagaaacaacttccaggttcagcttgcacaactcatcacacagggtggtcactcccacatccatgttcatacaattgcactgggcctttctactcaaggcatctgccacaacattggccttccctgggtggtaatgcacttccaaatcg

SEQ ID NO: 46382 - DNA, 654 bp, Zea Mays
gcagtcacaggtgcaccaaacaagtctagtgcaccaccggataccgcactggacatgctaatgtctctctaacagctactttccagtgactatcaacctaactatctgtcgtttcagacatctagtgcaaacacaggacaaaccatcggacacgtctagtgagttctaagcatgcacttctacatgcactctttgtgtttctagaacctttgtttggtcgatcatttaggataagattttggcggttcttgggtattagttgacccgatgtctggaccaactgatatgtaaacatgtctccccccttggttgataaaagggggagcaaaataatgattggagagactatcgaactaggagacctccgggggaagcgtcaaccaattcatatgatcttaaagagtgcaacgtctaaggacagccataaaggtgagctagggactgatagactagaactcttactagacccatttctgaagggagagctagatggtcatgtgcccagtagcttcttaacttataatcttgttcatatttgtgttcattaatcatcagtcacaagaagatataggatactacacatactgtgattcgaacttttgtaaatcgtctacgtgttagtaccctattgtgcccagttcaagacaccatcgc

SEQ ID NO: 46383 - DNA, 580 bp, Zea Mays
aagaaattaaagaaatacttgactaatgcaaccagtaagggaaaattgccatagaaagcaaaaattttgataatgagttggtgattgacaagaggaggcttaggaagagataaataagctcaagcttgagaaagatcaccttgccctagcatgcaaaaattcaacaagggccaatacctcccaaatgagcttctcatgaacatagtcatgaaaaataataagagtggtattacatacaattctattgtgcaaaagaaagcatcaaaccaaaataaggctaagaaaaatcctaagcccatcaagtgctatgagtgtggaatatgacactttgctcacaactgcaaagccacaccaccaaatcccttgccaaagcattcaagaccttttgcatcagcactcaatatctacttagtgtcgggtatgataattaaggatacctagattaagcccttaaaatgtacttaaaagaactctgcctaggtacatcctctgaggatgaggaatcagatctccgcctcgcacgaggtcacatcgagggcctcccctaaagaggctccatcctgaccgaactgcccccagc

SEQ ID NO: 46384 - DNA, 530 bp, Zea Mays
tgatgttctctttgaagatagcaaattgcgttcatctcttcatgagtactctgtctctttgaacagcccaatcatttgtctctgccccacccattcattttcaggaattatgctaactcattaagcgatattggccttgtaccaaatgatttatgcactgcatcggagtgttttttttttgcttctccatatcctgcttagtctttgcttcagagaaaagggacaagcaccagcatcgcttgagcctttcttggccgaaatttgcttctccgggatcctggtgattcttacatcgtcatgctatagaacaggatatgaagtagtgagttatgacgataatatttgccaatccatcacttgtggttccccaggatcaaatttcgatggtttggggtggggacagtacgctctgttaagttttgagcaatcccctatcctggaggcttggccccaggaaaaggaatacaaccagctagccttttggttttcggatggctggatcttagtccctaagctgcttcggttattcc

SEQ ID NO: 46385 - DNA, 382 bp, Zea Mays
aatagaattcaagagttgaaggcaataggcctcactgctatccatgtggctggtacgtggagtccatacccttcacgagaaggcaaataacgcttgggagtatggcaaggatgtggactcttctagatccaaagtcgagcctatcaatatgtcaaaggctaaggttcaactccgatgacttttacttccatcagtaattggtctgactgaagggtgctcgatggagacttaatccctactcgagccttgtcttagggtatctttgatcacattcttattcatacttgaaagtcccttgtgggttttggtgtttggttgataagacaattaaaggactgagaaaggtgttaagtgttgaacaagtacttagtgaaaagcttga

SEQ ID NO: 46386 - DNA, 515 bp, Zea Mays
caagatctagggatcggacgcatacccgagcccattaactttgagtacaatacactagcggtccctaaacttttagcggtgtattatttaaatatctaaactctcaaagtgcacatctagattcctaaacaagatagcgtcgatattttgtcttgatgttgtatcaccatcttttggctcatttgggccgtgtaacatattggtgtccattgaggatgtgtccaagggtctatcatcatattagggttcaggtttttgcctcaactcattctttcaaaaacaacatcactgatcatcgatttgctgaaccccaccttcatgatcgatatagttgattgcaactttccagttcttacttgtgttctctattgtacttgtaggaataagccatcttagtgagatcattcgtgcaacatgggtgataacaataagaagtggtgtcgtgattaggaaaagtcattcattaagagttttttatcatcaacagagtttttctcctagcggtggtaatgagc

SEQ ID NO: 46387 - DNA, 736 bp, Zea Mays
ctttgttgtaattcggtcggtaacttgtcaagtaaaaattgaagaaaaacacctctgaagatgctctgtcagaacaactgaagaagatcctgatggtacagtagcgaaaagatcttcagattcagtgtatctcgccgctggtgaccttacgcagcgattgacgccggtcgtcgcgattcgtgcgccctggtttgcagataacggctggcggtgaaggatctcaacgcagggaagggtttgtgatgtttcaccatgccacttgccacttgccacacgcagggattcgtgccccctgattattcaccatgccacttgccacgcaattaactgaggtgtccttgccggagttcgccgcccttcatagccgcaccacaaacttagaagagttactacgtcgcagtagatagccgtaggtagtctgtccatcgcttgagacattgccccggtgaacgccacggtagttcgcgccggtgactcaccccctctttcggccgctggtctcccccttcaaaatttggagccactactctcggacgctataaattgagtgcgctgctagctccgctaggttgttacgaagctagagcacccaccctgccctcgattagccaccataaccggagaatttcgttcttcccccaaatctgttgtccgcaccaccgtgagacgtcgcgccgtggccagccatctctaggtccgccctcgctctccttgtccgtgttttagcacccacaca

SEQ ID NO: 46388 - DNA, 960 bp, Zea Mays
ggacatgatatggatgagggtgtcgctgcaacttcagaccaagcttttcaaccatctcatgacttacaagattatggcagcttcctccatcaatgatcacctttactactttgtcttgcactttttgctctcatttgaaaaagatatgtcgctgtccaatttcagcttctttcatttgaacactcaagatttgtgtaaccacaagagcagtaccatgctcaaattcacatcttgtatgttcttcaactttatcattgtcatctacatttcctgcttcatcttcctcttcactagctgatgtatattcgccgtcatcattcacaaggatcacacgattatttggacactccttaatgacatgaccacgacctccacacttgaagcactgaataccactactcttggatgttgaacccactgatgtagaagtagatgctgctgatttagaacccatgattggagcagcagcgttctttccactagaattaccttgaatatgggataacaagcctccagtcgaaccttttgacactgagggtgcaacagtaaaccttgagattgatttgcttcctttagtcatggttcgtgcaccatatgacaaaggcttgttgttcttaccatcttgttgtagctggcgttcagctttggtggcttgatgtaccaaatcaataagacgtcagtacggctgaaactcaacaatgcgctgaatgttgcggtgtaacctagccatgaaacgtgtaatggtttgctcttcatcttcatacacattggctctaatcatggccttctccatctccttataatactcctcaatagagaaacttccttgccacaaattctgcaatttatcgaaaagatcacgtcgataatgcttcggcacaaaacgaattctcatttctcgcttcatctcttgccaagtagcaataggatcctctccatcttcttcacagtcatgaagaa

SEQ ID NO: 46389 - DNA, 576 bp, Zea Mays
ctcagaattctttgatttctgcgaacaaagaagcatccagatcaaatatgcgtcagtagcacacccaagagccaacggtcaggtagaaagggctaatggaatgatattggaagcactcaggaagaaagtcttcgacaagaatgaaaagttcataggaaatggatcagagagttgtcgtatgtggtttggagcctaagaactcaacctagccgagccttgcatggaaacactcctttcttcatggtctatggttcggaagcagtgctacctgccgacctcaggtttggagcaccaagattggtcttcaaaaacatagccgaggcagaggctaccaggttggaggatattgatgtactggaagaagagggatggaatacaataatttagtcagccaggtaccagcaaaccctgaggcgctatcatgataaggctattcggcatcgatctttcatagtgggagacttggtccttcgtcgaattctaacaggggaaggacgacacaaattgtcaccattatgggagggccatttgtagtagcagaagtcacccggccaggatcataccggcttactcaaa

SEQ ID NO: 46390 - DNA, 293 bp, Zea Mays
ttgcatctgcgcagtagaaaccctagcttttttcaactgctcgcctgccctccttgttcgctctgcttcagaaatctggcccgtgtcaagcagaccgcgtgccgccgccaacagtacattgcaatgtcttcttcttcgtctgctgcgagtgcatcgccgaccatggcgttgtccgaggagaccatgagtgattttgcggtgatggagttgcagcctggccataccgtggagtttggtgcttcgaggatttcctcggtccgcgtgctggagatgcagcggcttggttactttgg

SEQ ID NO: 46391 - DNA, 721 bp, Zea Mays
gccgacgtctgttcatcgaacaaatcaatgcttggatatcgtaacaatggtgcaggaagaacaacaaggagggaaccagtttacctcagatgcaagtgcgcatacgcaaacagctactgctgtagatgcaattactccaccagcagctttgagggccccgggggttgatgatcagaccatatttgagacatcgaggatgacagtaaaccaaggaggatatcaccttaatactatgcgtactattggtgagcatgaacaggacacaccagtgattctgcagagacatgtaagtaatattgaactgatttggattttcagtattgtaggttaaattgtatacagtagaatgcagctagagctggtatgacattcagtggttatattgtgcatacgatgtaaaactatggtcagaaaaatgttatattgtacatacgacataaaattatgtagggtaccatagatgatacaagctatggaatatatgaatatacaaaatatattttatatttttgcacaggaagttacaattgatccgaggttggtacctaaagttggtatgacattcagtggtgtggatgaagcatataaattttatagtaggtatgcatatgaagttggatttccactgaaaaagtatagggaacggaaaaattgtaagtggttgaattgctcgatggaaggcaagagtgcaataaggggaatatcaaacccaaaggtacgt

SEQ ID NO: 46392 - DNA, 639 bp, Zea Mays
tgtctctatcaattctagccactccgtgcatggctctttaaatgtttcctaaaatttgaaacggtaagggagtcggacaagttcatactttttccctccttccttctttttggcattccccattcgctggaggttgggaaggttttgtttgccaagtattcttgcaccagacccctggtgctaatatgtctagccaccaccctaaattctacctcggttagttggcagggtgaccctagctgcatattgcacagaggtcgcgtcataccgaaactcagttttaggggactcattaccatggtcatgagcttctcctttttcttctcatcagctttcatgtagaaccactcactagtccacccggttggccatttagtgtggtagccaatcaccggggccttggtatccttccggtatgcaaaattgtagcacccgaagttcttgtgtagaccatcggctctggccttcgtctgatagtgcagttcgtgcactcggtagaacccttcggcattggcacttttaccttggctttgaagagcccatatgtaaatattgagcctaacaatggcattcgatgtaagttgatggagatatatttcaaatcttttcaaaacctcccctatcatatcgtacaggggg

SEQ ID NO: 46393 - DNA, 362 bp, Zea Mays
ctggccaagcttctagattcttctcgctcacttttgcttcgtgcatcggtaccacgaaatcgaagctctctccttcggtccatgtcgatgccatggaactaaagcttcgtttatgctttacacgctgcttcattatccttttagagtatttgaaacacatttgaatgataacataacgttttggggaccttcaacaatagaggccccaacagtggtgaagcttcaactagcgcgtcctaccaagcgaaccagctagcccaccaaactgttacaggtccgcaatccactaacgggccgcatgtctaataacgggtccgcaagacgtgcatacatcattagcctcatggacccgcgactctcct

SEQ ID NO: 46394 - DNA, 796 bp, Zea Mays
caagtactatcaccttcaaggtgcgaagtctatgttgtctgacatgatcaaactaaagcaacctatgatgcaaccaagtacgcgtcataaacgtccaacatcaccacggaaagtgaggtccccatcccgtttcacaacatgtcttcatagtgtacatacacacagcgaagggccgccgaccatactgcacaaataatacaaataacatcttgatgccctccctctctattgcgagctaggggagggcagcgttttctctcactaccgcaacacgagagcgagggcagcaaacttgctacattggctcagccttcggaataaggcctgccacacaaaaattaaacaacatcaacttcaactcttcgccctcaaaaagattccgcagatcttcctccccaatacacgtctcggacgtcgatgacagcaaatcccgctggccaccccgatctagccgaagacgggaccgttccatccccatctgtcgatgcctcccacttcgcgacatctcgccaacattgtgcttcaacaccacccttcgtcggtggtgctcttcgggcatcaccccagccgagggaacagacacttcgcgtgcttcaggctacagcaaggactccgccgtgaaatcctcatccgaagactcctcaacccacgaaaacgagctcccaaactcacccccatctgatgaccaagactcagtttcagaaccagacaaatttccactatcaggcactgtattcgcagacgccacaaaattaatatcatcagtaggggttgcttgcgtaggctcggacgtcgg

SEQ ID NO: 46395 - DNA, 662 bp, Zea Mays
ctggacgtccttgattcgggccggaggcctcattgtctcaattgctttgatcttctctgggtttgcttcaatgccccggtgcgaaaccaggaatcccagcaacttccctgcgaagacacaaaagacgcacttttctgggttcagcctcgtgtgtgttgcccacagcttgtcaaagaccagggttaagtcttccactagggtcgaccctctcttagtcttgaccacgatgtcatcaacgtatatatctatcttgtccctaatcagttcaccaaaggtcttactcatcgcccgtacaaatgtcggcaaggcgtttttcagaccgtaaggcattacaacataacagtaaagcccatccacagttacaaaagcggtatgcttcctatcttgcctagacatctagatctgatggaaaccagagcaagcatctaggaaggacaggaggtcgcacccagaggtagaatccacgatttgatctattcatggaagtgaatatgggtccttgggataggccttattgaggttggtgtagtcgatgcacatccgaagcttcccgttagccttgggaacgatgactagattggccagccatactaggtgatggacctcttcgatgaagccagcgcacagcagcttccggacctcctctcggatgaaatcctgcc

SEQ ID NO: 46396 - DNA, 444 bp, Zea Mays
ccagaccactcgcatcgcgggcaatctggaggagaaataggaaatcgcgctcgtcgccttcctctaggcaaatgccgacgtattcgcatgggaaccatcgcagatgcctgggatccccagggaggtgatcgagaaccatctgaagatccaccctgacgccaaatcggtgagtcagaagcctcagagacagtccattgagcagcaggatttcatctgtgaggaggtccagaagctgctgcacgctggcttcatcgaagaggtccatcacccagtatggctggtcaatccagtcatcgttcccaaggctaacgggaagctttagatgtgcatcgactacaccaacctcaataaggcctgtaccaaggacccatatccacttccacgaatagatcaaatcgtggattctacctctgggtgcgacctcctgtccttcctagatgctta

SEQ ID NO: 46397 - DNA, 486 bp, Zea Mays
tacaaattgatgatgatgagcctcagctagaggatgtggactttgccactaagagcaagcttacttctgttgtttggaaagatttcaaaaaagtcaaagtcagtgatgatgtcaaggctcaatgtttacattgccacaagaaacttggtgggaagagcattaatgggacaaaacatctccatgaccatttgaaaatatgcacactaagaaggatcaagctgatgggacaaaacaaaacacttgcacagtcatctttaaggttaaattcacaggaaggagggaaaatatttatggatgcatacaaggaagaacagaaaaaggccatagcttacatgtatggaacaaagtcaagagtagctattactacagatttgtggacatctgataatcaaaaaagggggtacatggctattacagcccatttcaaagatgattcatggacacttataaacattatcatgaggtacttgttcttgctgcctttta

SEQ ID NO: 46398 - DNA, 1060 bp, Zea Mays
aatccattccaatctccggatgagtcagccagtgaaccgaaaaccaccctggtggaaaccggttcaaccggttttcagtcaatttcgctaacgaccaccagcttttgggggctcctttatatacccctcacactctctctcttcattcacttctgccctctccacgaattcttggctgaccaactctcaaacaagagcattcagtccacctctcacacccaaaatcgcatctccttcaattgattgaaggacccttggtgtgaggtgaagtcggtctaactcgttgttgattttatctcgattctccctttctcttcatctctcgagctcatcacaaactcgaatcttgtgcggatttgttactcttagaaccttgagttccttgacggatagaggttgcttgggagtagcactgggcataaaacccgagccggaaacccaaagcccgaaatacccgagaccgtacccatttagcccgaagcccagtacccaaataattcgtgcgggtaacaaaacttaatactcgattttaattcgggcctaatcaggtatcacgttatggtacctgaaatacccgtttggcccgatttgttgctcctgctcgactgctttgcagtggcagatgtccgtttagttcctgctcaccttcctactacaatgttgccttgttgttgtgtgctgcacccgcacttctgccttgcttttgctgcgagttgcctgttgtgcatgtgagactgtgagtgtggacagtggatcaacgatgtgtgagaccgtgattagtgatgtgtggctatgtagaccgtgagctgtgatcagtgatcattgatgctcggctgctttgatgtgagtgatgctacgtgaaaaaaatttaaactaaatgcttattgtgcaggtttgcttcctggttttcattgtatatttacgttaaatattatattgtttgctgccggaatgtacaaagctaactacagtgaagcaatgtagcggataagtttgtagttttaaattgggtagaacgggctacctgaacccgaacctgaaaaatttaggtacccgaaaa

SEQ ID NO: 46399 - DNA, 307 bp, Zea Mays
ctcatcttgagcttagaaaaaaacacgttgattcacatgttgagaaaagaatgaaaaattgtcatcaacttggataaagcttgaatgacatgagacctaatcaccaagcatcacttgcaacaactctgattaccatcatgacatgtacgttccttctgtttcaaggtataccaccattagcattctagttagatcggacaaaccccatgcattacagaatctttaaaccatgaagcatgcaattggtaatcaactatcgctagggactgggacataattgcctctccactgacaacctccatcagaa

SEQ ID NO: 46400 - DNA, 692 bp, Zea Mays
cccccgccggcgatctccgaccaccggcggccaccatctccgtctgtgctccggctacctcgggcccctctccttccctcctcggtgagctgccctgttctcctccctctcggttctgtgagcagaggctcccttatcctccccgtttgcatcaattccaaattcttcaaattcttgtcaaatcaaatgaatccagttggtggaatgtgttcaattgtccccattatgtatccctgcaggttcttggctccttcgagagggttttcactcctcatatggccatttctccgaaaccctaatatctcgcccaccacgtgttcggtaaaatacccaaaccagccaaaaatgctcaaattgaacacaaacttttcaggcacctttacaacacttccagcaacatccttgccaaatttcacgccaatccgagattccaggcttcaatttcactaaattccccgtttcgagcgatcatttccgagccgagtgccctaatccctttttcttcgcctaaattcaaaccaagcacacacttcactcatattcacctatataaacctattcgtgaagtatcggctcaattccatatcgtttcgtgcctcaattcgaattccaaacctcctttgacactatttatccttcaaacgtcgttttcacgtcgtttgacttctcgatcgtctcgtctcgtgttttct

SEQ ID NO: 46401 - DNA, 627 bp, Zea Mays
agataaaaaatgctaatgaagccatatttgcgatatcagatcaatactgctattgaagtcggactgctattaaagcataaggaagactgatttcataaggacgaacacaaatatcagatcaatatatgtgatttcataagtctgttcgaacacaaattttggagaaaaaacaatacagaacctggtagcagtgacacaaattttggattaaaacataaacttaagtctgttcgaacacaactcgaaagaaaacattgacactgacacaactatatcagacaattggactgctagcagtgacactgtaccacctggaacctgcaagtagacatgtatttgtgtacgtaaattgcagtcactagtaataagtaattggaaatcaaatcatttgtacctaagcatcagaaagttggaccataatcttagctcgcaacctcatgtagtaggtcttttgttcttctgtcactgcactaagatccatagtcattatcctctcttcgtctctttgtttctgtaattgaatctcctctttcctcacctcgacaagtgctttttccgtgttaactcgatcgacttcaagtgcaaacgctttattgaacctctcctcttttttcagctctttctcag

SEQ ID NO: 46402 - DNA, 515 bp, Zea Mays
gttcagtctaaagaccattttggatctcatgagctaaagcaaagtgactaaagtttagccattttagaagctaaagaattacaatttaaaatagacgacttctcaaaacaaatattttggccgtgagggagaataacgaaaaagaaatcacaaacactttggaatcgacgattcattcccccccaagtctcgactcccgtctccagactctcgactctctacctaagcttctactcagccccatccctaagcgtctccttccgactctcatattgctctgcgctcgcctctaccatggcgactagggtttagtggtgccacaataacctccatcgcggccatcctcaacttcctatcggatctggacgaggcgtcgattcatcctcaacaccggttagtatagacttgggattcaactagtgaccaaaaatctggtctcggtcttgatcagttcgatttggcatttagtttttggttaattatgttctatcctagtcatgtgaggtttggtaaga

SEQ ID NO: 46403 - DNA, 801 bp, Zea Mays
gggtcccatctgggaccctctcgcccattctccggagtgggcccacagccggtgtatccccttgggagcatcgctctcccggttacattcgggaccgaggagaacttccgcacggagaacgtcgtgttcgacgtcgtggaggttaacctccccttcaatgccatcatcggtagaccgaccctataccggttcatggccattgcccattacaggtatttggtcctcaagatgccgtctccaactggggtcctcaccgtgcggagcgaccgcgccgccgtagagaagctgcacgccctggtggcagagactgctcgcctggacaacggagggggaacccctcaacccccggtaccaaggcactccccaaggtgccaaaggtacaaccattcggggcagacggtgtccccattaaagacatccggcttaccacggattccacccaaactactcgcatagcgggagatctgggtgaaaaataggaactcgcgctcgtcgccttcctccaggcaaatgctgacatgtttgcatgggagccgtcgcagatgcctgggatccccagggaggtgatcgagcaccatctgaagatcaaccccgacgccaggccggtgagtcagaaacctcgcaggcagtccgttgaatggcaggacttcatccgaaaggagtccgttgaatcgcaggctagtggaagacttaaccctggtcttcgacaagctgcgggtaaccggcacgaagctgaagccggacaaatgcgtctttggtgtctctgctagtaagttgctggggttcatggtttcgtaccgg

SEQ ID NO: 46404 - DNA, 422 bp, Zea Mays
gcgggtgaaaaacatcatggcatcacaggatgaataggtgatgcttgttgcatcgcctttcgagccgttttattcggtcgttttgttttagcgggtgatcgggttttctttgttagccgatcacatagaacgacctttttgctagcatatttggagagcaacggatcaaaagtagggccagatttaaccagccgaccatatgtgctttgcccttgcgtttcttttcttgctttgtgtggatgttgatgcctctgaccatgggcagactgtctagctgagtcagccggcactacaaaaaaaaggcaaggagtgtcggccaaaaccccacactcttactgaaataagccgacactctaagtataagagtgtcggttgaccgacactcttagccgtcactctaaaatggacgctcttattcgtat

SEQ ID NO: 46405 - DNA, 543 bp, Zea Mays
aggattctgaagatccatcatgagatcctagaaggactcgtatctttgaattataaatatgcaacatataaatctcttaccgaataatacattcctgatgaatgaacactctcctatgtagagagaatatctcctagttgagattatagttccttgatggaacctttccagaagaaataaagtctgtgttaaacaccaaagtttgataatccctataaagggataaagacccatatagacccgagaatgaatgaaatgaggaaccaaaggacttgaagtttgcttgataaacacatgtgcatgtcacgagttttaccgagtgtatgtacactcgtgtattccaccatatatggaattacggtatcctctaaagccctgatggcagaaacctataaggtttaggtgttactggcaaaatatccccattgtgccagaatgacagactacaacgatgtatctgatcgatgaaaaatccctaatggattatgatctttgatggacttttgttacaccatcatagatgttgcgatagatgaacgcctg

SEQ ID NO: 46406 - DNA, 672 bp, Zea Mays
acttacccttgtacccctgctgcctacttaaacatttcagtttatatgtccatgaacttcttgtcttctgaggccccttcctatttcgttgttaagtcattatctatcggcaatttctattcccttggtcttagtatgctcatatccttggagtcttgcataccctcatattttcatgtatgcttatcttcgtttcccaatgtctaagacacttcagttaacatgcccttgaccacccttgtttctgaatgatccatgagcgatcattttattttgcacatccttggctatctcgttaattccttgtaacttccctcggtaataatttttattacttgaaccattttgttgggaccttacctatcttacccttgcctgttctctccacttcgtcagtcctaccttaactctgtccatgattatgcttttcatcattatcacctttacccttattagctctatatcttaccttgatgtttatcttacacagaccctttaaaatctcctcatttcatctcaatctgagcattgtactttacctacttttcccttggtcgtatcctcctctttgtcacctacgcgtttttaactctatcctttgttgtgttttttgttatgtcatttgctcttctcacccctcgatcttatcttggtaattacactattttcgtt

SEQ ID NO: 46407 - DNA, 1716 bp, Zea Mays
gagcaaatttgagaggaagaagggtgcccatttttttgggatctctactgaaatgtctggggtccctgcaggagcaaaatacttggcccaaatcctgtaaaactgagcagacctctttctttccatgtgcatctgaaacacagggtcaggttgccactcttgagtgagcatgaagttcatttccaaattctggagaaattgattattgtttggttccccatcctgtgcatgatggggttgtccagcaataaaaaggagggggtccatctgaagaaccgggccatcaacctcttatggcccattgaaaggggcagcattgaaagcaggcccatcccctggcatcgcaggtccagcttccagaatgtgaccattctgaaggggagcatcctggatgggaccaatggaactatccgatgacaatcccgagtgctggttgctgagttgaagttcatctggttgaatgggttgttcatcaggcacaatgggctgagggatctgttgattaggttgaatgttttcaatccattggtcccaatccccctaggcattaccatcgtgttgggccggcaaatctcctcccaatggctccggtgggaaattgagatcaaagccagctagtggcaaaggttgacccaaaccaaagaaaaccacagggagctgatggccatcttccggagcatgcggaatagggtcctcgtcttgagcctgccctccaagcatgttctattgaataatttcgcactgaactgtccaagaatctccaacgaaaccatctgcctccgaaaaaacaatgaactgaggaacttcttctaaggacgtgacacgcacacaaagcaaggtcctggtcacatttcgacgatcctcctcccagagaatcagcctgccaaacgaaccaatagctgctttcaagtattctgaggaacagtaatccagaggaaaaccaagaagcataagctagcattcatggttgaaaaagagagccctatgattccaggcgtcattgtggcgaagagcagtgaaagaagcatccaaatattgttgagggccaagcaaaaccaaattatcccgctcaagaacactgttaaattgcaccaacacctgtcccaagtgtgagcgttggatatctctcaccccaatccttcggtgctccactaaatattctctaatcacgtctctgaccgtggggaataagacctcatgcgcaagtaaaggatggatattaataatcgcccaatcctcatgcattggcgggagtctccgcgagactgacctggccatgattttcgcgatgctggaccgccctggcgctgaagccaggcgggaggaagggctccgggtcgacacgccggtacgccattgcaagattgactgaggatcgccggcgagcaagaggcaaaggagcggtttggggttttggtgaagtgacacccagcgagagctccaaggacgctataggcgtctgttcgtatttttttaataaaaccgccctggcgaagtcttcgaagcaaccaaacttgggtggagacccatcagtcagagaccctggggtaaggcggaaccaggaactgtaatccaggaaatttgtcattccttccaaaatgtgactgctctcaaaggaagggaatgatgaaagaggaaatccgaattccgttttcttaaaattgcagaataattccaaatgcccctgaactttacaaaagcggcattggaacgccg

SEQ ID NO: 46408 - DNA, 704 bp, Zea Mays
gctgaatcaagaatctttactggcttctcacggtactgaagatctttttgaatctgcactgcctcttctttaatgtgatttttcggtgcttgcaggcatttgcggagctgggatacgtgaaatacattatggatgtcagacatggactctagtagttcaagacggtatgctgcgggtcccactctgccaatgataggatagggaccgacgaatcgtggtgctagcttccttttacttggaacctcctaacaccacgcatcggggagactttgaggtagacgaagtctccttcctcaaatctgagttctctccgcctgttgtccgcataactcttctgccgactctgagcttcaagtaatctcctgcggatcagggcaactttctcttctgcctctttgacaaaggcaggtccttctagtgcttttccccctacgttggaccacatgagaggggtctggcattttcgttcatacaacacttcgaacggtgacatcttgatgttggcctgatagctgttgttgtatgagaactccgcgtagggtagactagattcccaacttctattgaatgctagcacacatgctcttgatagatctccgaggactttgttaactctttctatctgcccgtctgtctgagggtgataagcggtgctgaaatctagcttggtgcccatagctttctgaaggcttgtccagaatttg

SEQ ID NO: 46409 - DNA, 555 bp, Zea Mays
tgaaattacatttacccctcctttttacacgataatgcttcacattcgaggatgtacatttatgatatttcaacacataaaacatgccacacacatcttatcttcgttgaaactcctttttggcattgcctttagataaaggttttcgttgtcccctcacatgattatttcatttactataacaagctcaaaccatgaacctagtttcaaagggattcgaatcgaagatccaaaaaaacatctccctttgagttcattatcgaaagcaaagaatagaaatgcacaaactacaaatgaaaacatcttttctttttgggccaaaatgatagcgagtgctttttacacttggtccttgattggcaagccattctggctatataaagagttgataggtgccgatctctgcacaacattcctcacatgtgcataaaagctattgcttgagctcaaccttcgaagctttttcacttattttgaattcgagcacttcatcatttagctttgcttcaagatttcctactatggctcgcattcagatgactgcttcggttctta

SEQ ID NO: 46410 - DNA, 348 bp, Zea Mays
aacagagtaaaagttacgttgtatttgtatcctttgggtgcctctgtgactgtgactgtgaggacacatacggtcagatacccgttgctcaaccccagcaaggatgtcaagaagatcatataaccttgttcgccgtacttcgcagtaaaatagaatgcaggaacgagaataaagcgtgcgagagctgctgctgtggtacacttccgagatctcagcttggcaatgaagggcacatatatctgcctatgagatcccacgcattgaacatacctgaaaagcacacagcagaggggactaaatttcatgtggaacgctagattatgccgaaatgtaggagctagtagtcac

SEQ ID NO: 46411 - DNA, 476 bp, Zea Mays
tttggatattgtcgtctctctcgctttgttgcaggaggaattgctgacaccaaatatcatgaccaattcccaaaagagctctgatcaagcgacagctaagcaacacaaccgtttccagcagggtgtgcctgaacagtctaaacaacactctgatcaaagtaaagcggcagctctaatggtgtatcgtcgtgctaaaggcttgtgctacaaatgtggtttacgatggagccaaactcacaagtgtagcacgacggtaccccttcacatggtggaggaattgtggcaattggttagtccttctgattcagtggatgaacagcaacctttgcaagatgagtcgaatcaagatcttatgattctgtcagttaatgcagttcttggcactgaggccctggaaacagtaaaacttctagccacaattttcgcaaaaaaggtaatcatgttggttgattctggaagttcgtcctcctttattt

SEQ ID NO: 46412 - DNA, 366 bp, Zea Mays
cttgactctttggcaagtgtcgcattcagatacgtacttagcaatttccctcttcattctggtcgaccaatacaaatgtttgagatcatgatacatcttgttactgccggggtgcatggaaaatttggaaagatgagcttcatccaatattttcttcctgagttcagaattcttaggaacaaccaaccggtcttcaaaccatagaactcccttgctgtcctgacggaagcatttgtacttatccaccttctgttcgagcatatccttgatgacttgaacacccttgtcaccaatttgtgccatgattatctgctcatgtaaagtgggctccactaagatataatttaaggtgcctgaggaaacaac

SEQ ID NO: 46413 - DNA, 331 bp, Zea Mays
gttttcatagccttttggtcatactcacttctagggctccaattgtccaaagtggtttgaattagggtttgggcaattctccccactatatgtgcatgataagccaaggcatgacttctaagatgggttgcacttacttaggatcttgatttccaagtttggtgtcatttacttaatttaagtcacatgtgaggatgggctttacttgtgtagtcttgagtgaaaaccctaagtaacacctggggtgttacacaatctccccgccatggacgcacccacgaccgtgctttctccggcaatgtcctcacgcccgtgccccttttgagccccg

SEQ ID NO: 46414 - DNA, 502 bp, Zea Mays
atgggagtcttcgtctgggcagcaaggagccaaggtatagccccaagcgcaaaatgcttctgcagcatgcacgaacttatgtaagaaacgaaggccacgagaaaagaacagtatcacaacaacttcggttgttatggatttatctcccatcccaactcaagctacccagcgccaacattttggaaaagatgaccgggaaattggatggaggaatggttttatgtgaagaacgacttggtagcgagggaggatgttaaggaggttattatgcgtcccctatggtcccgcttcggccttcgaaagctgaaggatgaaatcgatgaagccgccgaagcatgccagaaggcctttggtactgtatgcttcttcattggtacaagagacttgattcaagaacatatagcattcagagtatggccgcttgtagagaactgggaaatgccgaaggagactatcaccgagtctagcgaaggtgacatggttcgactgaaatatacattca

SEQ ID NO: 46415 - DNA, 299 bp, Zea Mays
tgaatggaggatcatatgaatcataccttaagtttgaggcgaagtggctagaggaggaagattgtgtggaaagggtaaagaaagcatgggtcggtgcaatggaatagagttgtggaggcccaaaaaattctgctgagggagctccatgactgggataggaatgttttgggggtgctggagaagaggatctgtaacataaaaaagatctagagaggtgtaggaggcaacaaatctgtcaagagagtgtatccgagaacatcttttgagatataagatggaacgcttacaggatcaactaa

SEQ ID NO: 46416 - DNA, 422 bp, Zea Mays
aaagaacaactttcggacctcaggacagatgaacaaggagtcctttggttcaagaaccgtctgtgtgtaccaaaaggagaggcatgggaagtcctgctcaatgaagctcacaactcagcctactccatccacccaggaaccaccaagatgtacctagacctcaaaactagatactggtggagagggatgaagaaagagatagcactgtatgtggcccggtgtgacacttgccaatgaacaaaagccgagcaccagaaacctgcaggcctattgcaacccctcccagtgcccggatggaagtgggaggaaatatgcatggattttgtaactggactgccccggacgcaaaaagggaatgactctatctgggtaataatagaccgtcttaccaaggtagcccacttcatcccagtgaaaaccac

SEQ ID NO: 46417 - DNA, 375 bp, Zea Mays
cataatagaatggagcaaaaaaatacacagcaatccttgttttgttgcatgctggttgctgctatttcaccatggtcataggcacgaccacggactgttgttgctggcggcaggctgcttctactatacagcatgtcacaggctgctggagctggttgctgcatgctgtttttatttatcaatttatcatggtgcatgtgttgttgattaatgaatgttaatttgtgttgtgttaacagttaactgtaatgtactagagaccaatgagacattgacaatgttatgactgtcaactgtcatgaactcattaaccttttattctctgtactcgaatttaaatctattggatgcgataattatgagttgagatattgt

SEQ ID NO: 46418 - DNA, 412 bp, Zea Mays
gtggcatgctcatgtttgtacttcaaattttgctaatattcagtttgctattcagtaatcaatgtagctttgacaaactaaccaatatgtgatgtattatgagggaaacccatgaaattcaggaattgctgtagcaaactatactgaatccagataagcaaggctagtgatttgaaccaaataaagtcatttagacatttatctaattgtgctctgaatttctgattcaactgttatagctgaattgaaagtcagtcttctgatacatttgtgatcttgattagtgtcttcattatgacattatatctaacattttatgaagtactagcataattcttcaccttttgatttggatttcgtgcacaggttttgaagaacagtaagcattgtagagtatgtgacaaatgtgttg

SEQ ID NO: 46419 - DNA, 371 bp, Zea Mays
gaacgatcgatgcatatttctctgtactcgtgtattattttagttaaaatgaaatggcatatgcatagttatttactcactcgtatattattctaggtaacgacgtgatagatatgtaagtatatatagctgtacccgttccagtacgcgtaccggtatatacgtacgtcaacacgtactaccagcgtagctggcaggttagcttcaggcgaagactctgcttgcgcttaattgtattctacgtacggtccacacgtgtgaaccagaaggattattgcggcggcgcactggtcggctcctttttttttccctttccacgtccacgtcgcaggatccatccggatcagctgacattctgcggccttcgctat

SEQ ID NO: 46420 - DNA, 785 bp, Zea Mays
acaactctttaatgacttcaaagacttctttttctgtaattggcaagtccaaatcctctaggttatgagagggcagccccaagtagttaagattaatagtgacagttctatccattcttgttcccagcaggcttctatagaaatcatccaccatcatggctttgtcagcatgatcagtaaacacattatctccagaaatcagctttgccacaaagttcttttttctctatctagcgtgcatatggaatagcttggtgttagcatctccctctctgagccaactgattcttgatctagatcgtgcaatggtgcgcttaaagaaggaaagggctaaggagtgctttttcagtccacatctcagccaatcctccaaaggggacaaaagtcttaaatcttgggctatttcaagcctgtgaagaatctctcttgctaaagctaactgtgaggccacatgcccaatcttttttccactccatttctgcaaagatctagcagtggcttttaatctcctgtcaaagtttagaactgggcagactccatcgatagacaaccatgcttcactgacagcttcctggaatccatccaactttggccaaaagggttcaaaatggaaccgcctcttgccaaagcagttgctctgcagaccaagcacaagatggtcacacttgctacgtccaccatgacacctgctacgtccacccgatggtcacactccgctcgatcggtgttctctgaccagtagactgttggtgctcacaacctccactactccggctctatcgctt

SEQ ID NO: 46421 - DNA, 369 bp, Zea Mays
gtcgtggattatatttcgtaaaatatcagggtcgagtttataagattttggactaagttgcgatgatctttcctcttacgtggatggcggattgatttacaggttcccgatgggctctttagtgaaaatgccaccacgaacggggtatcggttgatctaagctatctgatctataatcaatggtccagaatagatcctaacccccgggaaccgttaccaaatcttgcccatccactacacgatcaacgacctggatttaacttatccacgatcggatgatgaggtatgggagcataggagcagttagattgcaaacgtgcggtccagattaggatcccatccgaaacggtacgcagcacgcaatctcgg

SEQ ID NO: 46422 - DNA, 451 bp, Zea Mays
ccgactcaacccgggttaccaacaagaggattcctgttgtggatttggtgagccaactggaaatgatccttagaggcaaagtatcaaatattggtgctcctgttgcatattctgcttggaatctgccaccttccaagtcctttttcaattttgtgtccaatcctcctgctggtgacagtggttttggtcttagagtgcgaccctctctccaagaagttgaggttctggttgcttcacttggtgatcttcccaatgatgaaaagcaagttcactttgagatgcctatgagtccaggtgatgcagagataagtgctatgctggacatgttggttgaggattcatctgactcggtccctgttgaaacaatggctgttgcgactatcccagagcctgaaaaaaccgtgaacactcaaaagcttgatggtactcgcccgaaacgcctctgccaggc

SEQ ID NO: 46423 - DNA, 547 bp, Zea Mays
aaggcgtgaaccctgtggcgtgagaggtgggactccattgtgtttagtgcccacactacctcgggtaactgttttgcccacttgccttttgtcttgcagcagtctttcttcgattgcggtgaagatcttgccgtttgcaaattccacgagtccaatagactatgaatggtagactgatgtgaagactgtgcgtgtaccgatagaggcacaaaattctcggaattcttggttgtcaaattgttttccgttgtccactgtcagctcataggggactctgaagcgacagacaatgttatgctagaataacttttgtgttgtcttcgccgtgatcgtggatacggtccttgcttcaatacacttggtgaagtattctactacaacaaaggtgaatttgagattgccttgcgctgtgggtagcgggccgactatatcgaggcctcaccgttggagaggccaggtgttagtgattagttttgtgaactgcgaaggtgcccccgaccgaggtgagaatttctggcatgctacgcaggagtggactacgtggttt

SEQ ID NO: 46424 - DNA, 668 bp, Zea Mays
gtcctccgtggttttacctagcgcccgggcgtggattatgatgagaccttcagcccagtggttaaaccggcaacaatccacactattttgtccttcgcactctctcagcactggtcagttcatcaacttgacgtcaagaatgccttcttacatggcactctcactgagacggtctactgctctcaacccacaggttttgttgatcccactcagcctcgtgctgtctgttgtctcaataagtctctctatggtttgaagcagacgcctcgtgcttggtatagctgctttgctactcactcactctaggtttgtcgaagccaagtcggatgcttcgctgtttatctatcaccactggactgacatggcttacttgctgctttatgtggatgacattgttctcaatgcttctaaccaggaccttctatgtcgcattttcactgcacttcaaaaggcattttctatgaaggatcttggtaccctccatcatttcttgggtgtggctgttcagcagcattcagtgggactcttcctttcacaacaacaatatgctctcgatatttttgagtgtgttggtatgtctgattgcaagccgtgcagtactcctgtcgacactcatgctatggtctctgccatgaccggtaccactatcagcgaccccgcttgtatcg

SEQ ID NO: 46425 - DNA, 546 bp, Zea Mays
ggccgccatttctgcttagccccgatctttccggatttaccctcgccgaagttagacacctcacggccttgtgccacgtgcctcggcactttaaccacactgccgtgactcatattagcctatccagtgatcgccggtgaggttgccacggtaatggccaccaatcgcgtgcactagtacattttcttctctccgaccgccaccgcgccatctccaattcacgtgccaccgcccccggagcctataaattgagtgtgtcgtcggctccgtaaggtagtcaagcaacccatacaccaactcgtgcctcgaattatccaccagagaacttcaatttgggatttcccccaaatcaaccaagaacaccgtgcggtgtgagctaaccgtggccagcctgcttcaggttgattcataacccactgttgaatgttctagcatctctaggatctcctattgcttgtaggcacgattgattgaactagaccataccgaattgcccggaacaccgtagcatcttctcgggttttgccgtcattgtgaataggcgtg

SEQ ID NO: 46426 - DNA, 378 bp, Zea Mays
gatcactcaaaatttcttcgaaggcttctccatttatccattcaacgacaccttcggggtcgtcgtgtatgaagttttcttcagcagagtaggcacccactttagcgaagctagtttttaattttctcacgccatccaaggatttctcaaagcacctttccttggattcgtgaagttctttaacatttttctctagataatttttccaatatttgatgatttcttgattagcctgtgcgagtgcgcagttttccttagctttggctaattgtctccgaaggtcttcaatttcagttttctgggcttcggcctgagctttgaaattagcttcgtcgtcctttactttgttcaccaatgaaattaagattttgtcttttt

SEQ ID NO: 46427 - DNA, 1305 bp, Zea Mays
gtcgactcatgttgagatagatgttgtgtgcaggctggtggggttgcagcagtactaaaatccattgggcttcttctagattcttggcgaagtgcaggtcagactcctccaatggcacttatggcagcatgcaacgaagacctgcgacctctcgttgatggctgcctaggatccatgaggtgccttgatgtcgccaacaaataagatcattattaatttaaggattaagaacatcaaaccataaaatccatgtttctttgttataacaagcaatagagagctcatggatttcacatatatgggatagaaaggggcaggttatggattgggaaatgagacttgcaaactaattcattgtcaaaaaattggtcgagctgggaatttatgtggatgagcttgcttataaattaaaaaaataaacaaagcactctgccattttcccctttcactccaaagataccttttctaatcctacatgaccatgtccctatccatccatcaaagcaagtatgtggctgttgttctgttctccatggagcacatgagaatgggatttagaagatattccgagaagcactcaccacaagttgccttgattgccggtgggggtggaggttgaatctcctagacaacagcagggaccaagtcctaggcactgcacaacagcggggaacaggttactcgacaacgacggggaggcggaggttgaagcctggcactggacgacggtggggaagaggctccaactaggcactagacgatagtgaaggaagagattgccagagcgtgggggcggcgaggttgaagtggagatcggcggcagggagttgtaccttgattaccgacggcggcaggagagcagcgcagacggaagtttcctcagaataatttgttggcatgagacagaatagggccttctggctaggtgctatatttaagagtcaagcccacatgtcctatatcaatttaatgaaattttgtaaattaagatcactgttggaagtcattttattttgttaggtcctatattttaaaataggacctcgtttagggtccttattggagatgctcttattccatgtttttgacctattatcaaaggttttcccatccacaagaggagatgcagaaacttcttgcttccttaaataatcttgacaagttgtattgagatgcctctagttctcttaccactttggagaggagtcaccgtttcttggaggagctagaccgcaagagaaacgagctaaaagaatcccaggatgaggtgtcaacgcttagagagtctctatcttctaaagattc

SEQ ID NO: 46428 - DNA, 293 bp, Zea Mays
gcgcgggcgagcacgagtgcgcgctctagcgtctagcacaacgtcgagcacgaggcagcgcagagagaggtcgtgttcaagcgcggattggctccaaatctttgagattatggccatgatcccattgagagatctcttcccctgacatttctttgtcgtttgtgtgtggaggcttgcaggtttcgctgactggatcaagagatatggaggggtgaagttgggtttgtctcactgccgaacacagagagaagatcccgggtttgacgtgcccagagcatgcgtcccgatgccat

SEQ ID NO: 46429 - DNA, 692 bp, Zea Mays
atcatttgcatcatgccatcacatcatattgcatcatgacatcgcatcatacaccattttgcatcaacaaaagcagtgaaaaaacgagaattcctccttcagctttgacaaagactcatgaaagagtattaaagatgcacgttccatgcttgagactactgccatgtgaagtttgcgcttccgacaatactattcctatgcaacatctacactaagaatcaaacatcatacagtagcttcggcgaagaagggggatttctttatggaagcgtgaaaagaagggaaggtgttttttcgccgtcggctcaaaacggtgtgtacgaaggttacacgcttcataaagaaatatattacatcaacatacatacaaattgtttacaagtgtttcttacaaaaccaggaatcatgttcaaggacattaaactagcaaaaatacaaagttttagtcttccctaaggactttatcggtagcttcgttcaaaagcctgtcgaacaacttcttcaatagcctcattagcaattttaattatgtcgagcgcctctttgatggatgggtcagcttcggggttatatggttcgagaggtggagaaagctcagctgcattgaaacacaaatatctatcagagtcgaagctgaaaaacttataaaaatgagttaaaaagtgcatacctataagtctagcccgctcgac

SEQ ID NO: 46430 - DNA, 707 bp, Zea Mays
gggcgctgggtgtgaggctcacaggtcacggccccaaggcaggcgggacgtgtggggtggacccagagtgtcagcgcggagggtaaaatcatagtagtactatatatccacattaggttcttaatggattatatatagtatagatatagatatatatagataacacatataaaccattattgcaaaattagtatgctcatttaccttttccttttctatttgggcctttaggtggctcgtcgtcagcagcgaaactgtccggcttcttttatacactgatggtcaatacaacgatgggtacggtggcatttggccttcaaatttccgagctcctttagttttcaagcaatacgtacacattagttcgcgttatttattatgcactatgcacacactagtcacgaaataatctaatactgtttataagaaacaaggatacgaacattattacctggttgctgaatccaataaggacgaaataaatgatccagacatttctacgcacacgatttcttttctcaaagcaagtgacgagcgaggccagatggacagaaggtgttataacgggttaatcttctcaatgtgacaaagaggctaggcagacaaggaacttgtcactcgcaggagcgttattataggaaaccgatcgacaaataaataagtaataggaaaaggtaaaaggaaaaagcaaaaggcgaaaaataaag

SEQ ID NO: 46431 - DNA, 588 bp, Zea Mays
ctctaggcgactatcacgtctgctgctgcgttgcggtctctttccatgtgatggaattccaacccttcaaatttgtcttctaatttttggacggccgcacagtacttgcccatagaatcagtcgagcaatcctaatctttatttatctggcttatgaccactagtgaatctccgtataccatcaatatcttgacgcccagtgatatggcaatgttcaacccatggatcagtgcctcgtattctgctccattatttgatgccaggaatagtagcggaaacgcatacttgagttgttcacctctagggggcaatgaagaggatccctgcgcctggtccctgcagtttcagcaagccatcgaaatacattcgccatacttcagtagcctccgggttgtcaggaacttgttgctcggtccactctgatacgaagtcaactagtgcttgagtcttcactcctgtgcgtggccgaaactctatgtcatgagctctcagctcgcaggcccacttggctattcttccaatggcttctttgttgtgaaggatatcctgtattggaaacccggtgactactatgactttgtggtcgtc

SEQ ID NO: 46432 - DNA, 417 bp, Zea Mays
attgtcaatattccttctaaaatcccatctctagaaggaaacatgtagtgggcctaactgggaccaatgtgtcattctcaaggccccttgtcgtgaggggggcataccatgttctagctaagtccgggtcctccaagctaagggtcaaggctagacttggccaagtcttagggccctatagactagggcccataattaaaggcctcccaaacattcctcaagacacccctatgtccgatagccctaagattggacgacccaagaggtatgaccccattgccatgtgcacctttgatcaaggcgaccacatggtgtgggatagatgacataatgattttgtttatggtaaatgtgatggatgatgttacagttaaaagagcacactatcgtcatgcgtgtagctgacactatagccac

SEQ ID NO: 46433 - DNA, 1233 bp, Zea Mays
caaaagggccacccttgtgctcaattggttaagtctgaaaatagtgatccagtaagtgtttgagcatggttaccctaaaacctgaattttgatattcagtgacatgggatgaactttgggagtcttttcgaagatgatccaataagtgtttgagcatggttaccctagcaagattgtagctggtttattaggctatcactttgatacagagagttgattcagtccttatacaaaatctgtagcaaattggtaccaaatatgctctgtcagaccaactgaataagttgcgccatggtacagtgaacgggatggatcaggttcagagaacctcaccgccagcgacctgtgcgcccggattcgcaccggcgtcgcgattcacgcccgaccgaactcagataagcactcctcggtataaagtatcacactggagataaactccgaccactgttctcactgtcatcgtgtctcgccgtagttagtcgcgatggcatcaccggcgttcgccgttatccggccgggctacgtgcctcgacgctttaccccatcgcggtgagtcgctagaaaccgcccagtagcactggttcgtcgccggtgaggtcgccacggtagatgccactgagctctcgcgacagtacttttttcactctccggtcgccaccgcgctaactcaaattcacgcgccactgctgatggagtctataaattgcttccccagcctactacgctatgtaattgtgtaaccagtaaagcaacccgtgcctcgaatcatcacctagaactctccaatttcccattctccccaattcggtttccgccgccgtgagagcatcctcgccctggccaacttgtttcaggttggttcaagctctctggtcgtttgttctagtctccttaagacctcctaatgctgttcgacccctctgattgaactagaccgccctggatcaccgagaacgcccatgttcatccattgtccgcgttgtctccgtggacatgatgatttagagtctcattagtgaaattgagtaaggggaaatggttacgaggaatccaatttggtgtctgccgcacgggagcaccggtctttgcgtgatccggccagtatagactcgccggtgctcgggtctctgacgtgcgacgtcatggacttggcgctgtgaagaattagaagttcaggggtctaactataactgtcagcgactcatagaaatagtgcgatgaactcagttcggg

SEQ ID NO: 46434 - DNA, 683 bp, Zea Mays
aagaaaatgcaccacaatttatttaatgaaaacagagagaactttgaaaagtcatagaaaataatcctaaggagaaaacaccccaacctcaggaatgactactcttatgctaataagaatctaggaaaaatacaagttctgttgtttgacatttttcaaatagccagttagttataaatgtctttttggcattaaactttagaaaataacaactaaataaccactaagtcaccccgtgtgatttttggcacagaagcatgttattgcacatagatcccagcaaaaataacccttagtacagacccccccacctagataagagttgtagtgcaaagtaaccctctgccctaacttttgttatttttgtctaggatttatcccaattgtttttaacctcaagttcctaggatagactacagtgaccaatattaacccactgtaatttctacagaatttttggaaaattttagttcactatggtagttcaaacccaccttaaaagcataaatagagaataaaaagggaattggtggaaggaaataatattacactcaccactacaacaaaacctccctaagtgcccactaaaactttaagcgatgatcaaaatcttaacccactcaaaacctagactgataagtataaaacactaagaacttcgtacgacaaagaaagcctagttt

SEQ ID NO: 46435 - DNA, 424 bp, Zea Mays
cctatcgacatcgtcatgatttttgttgtatggcggatcgatgccttgtcgtcgtagtctcggggaatttttcggaaatgtgctggtgttttactgatggggttgaatgtacttgtgatgtcttggaataactgcttgacgtgcaagtatccaaaaatggtgaaaggtggtgtatgttggtaattagaaaatggtcacttcgttagccaatagtcaagcttatgccgagatttaaaatatgggcaatttgatttgaaaccatactcatctaggcgtgtggttaaataataataatttttgcttgtgtagtgaggtgatgacatgccataagtagtcatcgcttcctctaagtcttgagtcgggtcaatacgcattgtgtgttcatcaagatacacttcgcacctagtgtaggattgtgttcaag

SEQ ID NO: 46436 - DNA, 441 bp, Zea Mays
ctgttggtgctctatgcctgtgtgcggaccaaaagtctgcgcagaacctgtgtggagtcgactgcggcgattgcgggcaaaatcggtggattttcttccaccaattgctcaccggaggtagatctctgccgtgggacaaccaggcgccgtggacaacatcgcgctccccatcgcagccggtatgattacccttctctgattggcattagtataagcatcgtatttaatcggatgataggcaaatttgggtttcgaattggggggttcgctcgcgctggcgtgttacgccgccgtggccgcaaggttaccgccgttggtgacggcgcattagggatggtgctctggcaccattcatttcaccgttaacggccacgattagaatccaggtaccccttcatcgttttgaatctggcgcgttgatcagaaatcgtgtggccgaga

SEQ ID NO: 46437 - DNA, 454 bp, Zea Mays
ctcccgccgtgtcgggaggttgaagacgatgaaagggtcgtagattgtaaagtcaacggtgcagattaagtcaaggcgcgcgggataggcaggatgagtgtggaccgtggatcagccaagcaacggctctggttaaatccggcataccggctggagtaggttgatctacgtcgttggataaaaatcgtgcgggtggaaatagatctgaggattttaaatccgatgcgttagtattgcatcggagggctctcgattgcgcgcgggatcgcaggtgcgcgatctaatctgagccttcagatccaaatccaatggaccagtgctcgcgatacccctttgcttggcaatatctgaaaagagtccctggacttcttagaaataaacccgcagtccttccctgggtttgcctgagtcttggatccttttacaccagggcccctgcccttctcgggaatta

SEQ ID NO: 46438 - DNA, 306 bp, Zea Mays
actatgatttggaggtacattaccaccctggtaaggccaatgttgtggcagatgccttgagcagaaaggcccagtgcaattgcatgagcatggatgtgggagttaccaccctgtgtgatgagttgtgcagattaaacctggaagttgtttctgcgggtgacctaagctacatctcggtggagcccacgttgcaagagcagatcataagggcacaggttgaggataagggtgttcaggttatcaaagatatgatcaagcaaaaggcagaaaaatacgagtgtttcagacaggatagcaagggaattc

SEQ ID NO: 46439 - DNA, 315 bp, Zea Mays
tgcctgtgcctgcgagggcgctgtgtactttgtgtggcatggttggctatgctgtgctggtgtgattatagtcggtcttagcgcggatggtttgatgctgtcgcttctgcttttgttgtactagcttgaccgcgccctgaggcggcttctgcgcggagtctttgtgagagacatcggaatttctcgcacttgttgtgctaagtccggctgcacccttaggcgacttctgcgcggatggtcttcgcgatagacatcggaatttttcgcacttgttgtgctaagtccggctgcacccttaggcgacttctgcgcgga

SEQ ID NO: 46440 - DNA, 724 bp, Zea Mays
tgagttcattatgtgtgtttagtgattcatatcgtactatgtgtgtttgttgaatttagtgacttttaaatgacatgctaattttgtcccgagcagggcccagaggaaggaagtactacaatggatcaagatgttaatgttcccagataggtatgtagctaacctgagtagggggtaaacttatctactctgcgagtcttagggatgaagagtcatgacttccacatatgaattgaacgaattctttcggcgatggtttgaggctatgtccctgagcatgtctaactagcgcttgcagagttgagctatttcttccactaactttgtgcaagagagttatctcggaccgtgattacagacttggaaagaatggcacccatgttactatgtagtttgaagaagacctttccacatggtttctttaatccgatacaacatttgattcttcatctcctgtatgaggcacgaatgggggcccattcagggacgttggtgctatccaatcgagagatgtctaaagactgaaagaaatgtaaaaataaatgcaaaatcgaggcttccattgcagaggcatacatactggagaaggtgtcaaaattcacaacaacttactatggtgacaaagtgacatgcgtgtataatccactccgtcattatagtgatggcaaaaatgaatcaaacctcaacatttttcgagggcaactcggaagcgcaagtggttcaa

SEQ ID NO: 46441 - DNA, 1740 bp, Zea Mays
ctcaaagaggtatccaaaagaattccatgaagaaactaacttggatgaacaaggatttgctacatacagacgaagaaacaatggacgctatgttatgaaaggcggttacaaattggataataggtgggtagtgccatataatcagattctgttgaagacttaccaagcccacatcaacattgaatggtgcaataaaactatctttgtaaaatatcttttcaagtatgtaacaaaaggtccagattatagcaaagtatatttgcagagagtaagaaatggcgaagacataccttacgacgaagaaactaatacaagaaacgaggtcaaagaatatttggatactcgctatctatgtgataaggattcctgttggcgtgtgcttggatatgagatacacagacactatcctgcagtagaacgaatgccagtacatttacctaatgaaaattacataacatataatgcagcaagtaatatatccaatatattaactgaatcttttcttcggaaaacaatgctcactgagtggttcactaccaattcaaatacaaatgcagcgcacaatctaacatatattgaattcccatctaaatggcgttgggacgacaaaacaagaacctggaaaccgagacatggaagagaaagaaaaattggtcgtatatactatgtacatccatctacaggggaaagatactatttgaggatgctgctaatgatcgtcaaaggtgctcagagctatgaagacttaaggacatataacaatatattacacccaacattcaaagaagcatgtaaagcacgtggccttcttagtgatgataatgagtggtataatgcttttgatgaagctgccagatgggcaacctcggatcaactgcgacatctattcgttactatgcttctttattgcgaagttggagatgagtatacattttttgaaaaagtatggcaactactagcagatgatatccaatataatatgagaaaaacattgaaccttccctcttaccagatgcccataaatgaaataaaggatcatttaattgacaaattatctgtacttttcaacaaatatggctcaaacataagagattatagtttgccacaaaaaaacaattctacggggtcttcctacggtaatcaatatattgaagaagagttatcatatgacttcaatgctttattaagtgaatcacaggatctccacatgaaattaaatgagcagcaattacatgcttttaataccatagttcatgctgttttatcaaataaatctggattcttcttcttatctgggtatggaggcaccggaaaaacttttctttggaatgcaatcgtaacacatttgagagcgcagagaagaatagtcttaacagttgcatcttcaggtgttgcttccctactccttccaggtggccgcacagcacattcaaggttcaaaataccttgtgagctagatgaaacatcaatatgcgatattaaaagaggttcaaagcttgccgagctaattgaggcaacttctttaataatatgggatgaggcattcatgacacataggcatgctttcgaagctctagatcgttcacttcgtgatttactttctttgaaatctgcccaagctgctcaatttccctttggtggtaaaaccattgtgttaggaggcgatcctagacaaatactacctgtgatagaaggtggcactcgggcacaaattattaatgctgctataactaactcacc

SEQ ID NO: 46442 - DNA, 714 bp, Zea Mays
gccatggataaggctgttcgcactaggcggatcctaatgaggaggcctagcgtcatggtgcttgaagacattgtcgctgatgtcgttgtcgtgcctgatgtcgcgagccgaccatcttcttccgctgctcttgcaaccgatgcttcctgcaagtatgctccagcacaatgattcgcctgaaaaacacttgttcattgagttagcactttttagagaaaaagtgtagcgtgagttctgtgtgcatgtaattgttatgtttgaactgattgttccattagcagggtgctgaaaacacccctgacactgtaagcaagatatttctcttcaaaacgcctcccgatttgagttagctatttcgtcactagggtatggtggtcaccctaacctgtgtacgcatgagcatgtcgcactaacttaaggtgtttctgacttaagcggattgctcagttagtagggcatagtgatcaccctgagtcatgtaagcgtgatcatgtcgcaccgacttaaggcgttcccgacttaagccgattgctccattagtagggcatagtgatcaccctgagtcgtgtaagcgtgagcatgtcgtaccgacttaaggcattcccgacttaagccgattgctccgttagcagggcatagtgatcaccctgagtcgtgtaagcgtgagcatgtcgcaccaacttaaggcgttctcgacttaagccgattgctccg

SEQ ID NO: 46443 - DNA, 451 bp, Zea Mays
tgatagtacaaggtttggagaggcatttgagcttaaacatttatgagggattgtcctacttatatcatcgcacacaagaacatatatgcaacatgaacaagtagaacattaagaatggcattcacacaatagttgtgattcggtttggcttcctgtcacatggtgatctccatctccaataatctgcccatcatgatgatctccatctccatgatataggtatgtcatccttctggtgatgagtccttcaagacctatctaacgtatgcaagtaaccaaattacatatacgctttggatcatcacattttgacacataggtcattacatcaaattaggaaaatacatatggctccagtcgtattgccctggtcatgacacgcaggtcatgaataattcattaatatgcatcatatacacatgatagccataccgatcacaagatgtccagc

SEQ ID NO: 46444 - DNA, 626 bp, Zea Mays
cattctctggtctccaggtccactccaacgcgttgacacacggtaatccggcccttcagtttaatttgcatctccctcccaacacaacacttaataagatttgatttgggacgacgacgataggtgaggtggtgctactgtcgtgcatcgtgctggtgtgcctcttcaccctgcagcactggggcacgcgccgcgtggccttcctgttcgcgcccgtggtcgtcctttggctgctcttgctcgcggcactcggcatctacaacatcgccgtctggaacccgaggatcctgcgcgcgctctctccctactacgtcgtcaggttcttccagcgcaccggcaaagacggctggatctcgctgggaggagtgctactctccatgactggcaccgaagctatgtatgcagatcttggccacttcactgctgcatccataagggtacgtatgattagttgtctgtttgccatgacatgcatgagaattaattaatcgtgcctgttaattaatcgaacagatcgcgttcgtgggcctcatctacccgtgcctggtgttgcagtacatgggacaggcggccttcctgtccaagtctcccgactgcaacatccacttcatcttcttcgagtccat

SEQ ID NO: 46445 - DNA, 349 bp, Zea Mays
caacccggaggctacagaagtatggcgaatgtatttcgatggctcgctgaaactgtagggagcaggcgtaggaatcttcttcattgcccctggaggtgaacaactcaagtatgctcttcagttatcattcccagcatcaaataatgcagcaaaatattaggctctgatacatgggttgaacattgccatatcactgggcattaagaggttgatggtatatggagattcactggtggtcataagtcagataaataaagactgggattgctcgactgattctatgggcaagtactgtacagccgtccgaaaattagaagataaatttgaagggctggaatttcatcacgtg

SEQ ID NO: 46446 - DNA, 731 bp, Zea Mays
gcttgggcgatgacggcgagggcaacggtagcagcgatgacaacgacggccagggtagcgacgacgacggtggcgagggcaatggtgacgatgacggcaaggacgaggacaagggtggtggtgaaggcgacaatgacgacggcaagggtgaaggcgacgacaagggcgacggtaaggctggcgacataatgctactggcataaatattagtatagtgtagcagcagcagtagtagttagtagtagaataatgtagtttagttagtagtgtagtgtagtataagtagtaatgtaatgtaatggttgaggggtgggaggccgactcatgatgagtcggatgagtcgatcttaagtttgtaatgatctccccctgtgaatgaagacacggtttcctgctaatctattgttgtgtgccctgtttttgcatctgatggttcacttagcattttagaggtaatgcccgagtgatgcttgcttttctgcgattcaaacttatcccgagctatcggcctaccactttgcgcctgacttaacatgccaacccctacttctgttgatgtcctcttgagttctgaaccctagttctttcttttttttctccaccgctctctacctttctgagttcccgaatacgtttgcatcgtttgagagatcacgatggcgcccaagaagagaaaacagagtgctactattctggccatcccgccaatcgatcccaacagtcaactcccc

SEQ ID NO: 46447 - DNA, 522 bp, Zea Mays
agagcactgcgtaagagatgcatagctttcactgtggcctgaccaccggcgatgaccggatatgctagagcgagtcactgcgacgaagtactgtgtctaggcacgtggcatccgagcagcaggcggctaactccggtgagcttatctgaaccggccgtgagtcaagcggacacagtggccggggcggaacagtgccataagctcatccttagtgcccgatttttcaccgaggagcgttatccgtgttcgaccgggcgtgaatcgcgacgccagcgtgaatctgggcgtgaggtcaccggcggtgaggggggctaaacctgtgatcttattcaatcactgtacaatcagaacaccattcagtttgtctgacagggccatttgcagggcattaatctctgttttctgtgtagcaacttgttaatctctctgtaacaaagttctagccctataatccagctacaatcttgctatagtaaccatgctcaaacactcactggattatcttcaaaagagctcccaaag

SEQ ID NO: 46448 - DNA, 433 bp, Zea Mays
catcaggcgagtagataccagcagttaacaatgttttgaaggaccattggtgtcagcaacgatgatttcatttggcacggaaaaagcatacatattgatctttctaagagcgaatgcaaagcccattaccttgggggtagttagaggttcactttacaaaaatggagcgcctggttaggtagacggtcagatttcgggcagttggacaatttctctacggcgcatgaggtttccaacgcctttgtttgaagtttgaacagagaccaatcagccaaatcaaatgtgccgattatcagtcaacgacgctgcaggattctccatttctttggacagagatacttgcacgtattctgcaactacatgaaccttgactaccggctccataaaatttctcacccgagtctcttgatttcttgatctgccttgacgcctc

SEQ ID NO: 46449 - DNA, 581 bp, Zea Mays
ccgttacgtgccacgtgtttgtgcgctggtcctcgtcgttgtgactcactgggtgcatgtccggtgatcaccggaggaagcgccacggtgaaagccacccaccccttgctcctgtgtccatattccctccggccgccagcacgaccttgcgaaattggacaccaccgtcgatgggatctataaattgagtgcgccacaatctccgtagggcagtaagctatccagccaccacgaatcagccgcaaccattcgctagaatccacgaattttgaattcgccccaaatcagtctccgccgccgtgacgaacagctcgttgcggccagctcgattccggttagctcgcgtccctctgtttcttgttctagcatcctcatgtgcccttgatgctcaccaaaccgtccaattaaactagaagcccaccaatcgctgggaactcgaactaatatccatggttttcgctgtcctcgtgggcagaacgaaatagatcaccaatcatgcaattgacttaggggacatactccttaggggtagaatcaggtgtgaaccaaagattagcgtcggtcttcgccctctccggccg

SEQ ID NO: 46450 - DNA, 782 bp, Zea Mays
gttttagttttggtaataccaggggtgttacatcctttccccctaaaaataaatctcgtcccgaggttaaatctcatggctaagtagtggaaaaggaaacacatcacaatctcattccttatttctattacaaggcagggggtgtgggtgccccggtcagtttacattaaggataaattacaataaacttaagacttacaagactctaaaaacttaggaaactaattatttaggaactccttagattcccatgtagcttcatcttcagaatgcttattccattgcaatttgtagaatttgatagtctttctgcgggtaaccctttcctgttgatctacattcttaatagggtgctcagaataagttaaatccggctccagatcaacattagaaacttctaccactttgctaggcacttgaaggcatttcttaagttgggatacgtggaatacattatgtatgaccgaaagatgtttggacagcttcactttgtaagctatgggtccacactgtgctagtatttcaaaaggaccaacatatcgtggtgccagctttcccttgatgccaaaacgatttactcctttcataggtgaaacctttagatatacaaaatcgccaacttggaaaaacaagggtcatcttcgcttgtctgcataatgtttgtgacgatgttgtgcaatcttcaaacggtgttgaataagtttcactttctcttctgcctcttttactaaatctggcccaaagaaaaaccattcaccggaccctgaccagtttagtggagt

SEQ ID NO: 46451 - DNA, 489 bp, Zea Mays
ttgccagctccacatccgcctccctgtggcatcgtcgcctcggccaccctggtcgcgaggcactctccaaactcacttcggctatccctggttgtaataaaagcttggagtctttgtgccatgcatgtcagctaggacgacatgttcatcttccttttaatccttcagtgtctcgagcgtccaacaactttgatcttattcattgtgacttatggacctctcctattgttagtgtctctggttacaaatattacttagttgttcttgatgactgctctcatcacctatggacgtttcccttacggcttaaatctgacacgttttccaccctgtctaactttttcgcctatgtgtctacccagttcatcgcacgcatcaaggccgtccagagtgataacggccgggagtttgacaactccagcatgcgcaccttcttcctcacacatggcattcactttcgcatgtcatgtccctacacgtcctcgcaga

SEQ ID NO: 46452 - DNA, 495 bp, Zea Mays
cgccgcaccattgttccaccgccgtcgcagtcgattctagcgtgcgtcgtcggcgtgaacccgtgaagccatataggcaagaggagggacgtccgggagggtatatccctcggaatcggggtgcgctgcgcgccggaagtccgggaatctctcaccggagcgggagcacagccgttcgtccgcaccacagcgcctatcgatcagtgtgagttgtccgcgcctgtaagaattgctcccttctattcatcatcaatttagttacgcttagaacctcgggttcgggaatttggtgcgatattgcctgggattgcgttcctccggcgatggtccgccgcgtgtggggggcggcgccgccgcgtttggctgagggatagtgagtagcgccacgggccgtcagatgatctcttgacggtcttgatcaaaccagagccataccggttgggtggaatactcgcagcccctggatcgtgatcctgcggctcgggatggaatcgc

SEQ ID NO: 46453 - DNA, 707 bp, Zea Mays
aattttgcggatggagacttggaggggatgatgcggtggattcttagcgaaactcgtgattacaaaagtgttctctcagctcaagaagactactgcgcatggatatgcactctaagcaccgcttctgttctagttaagtctaggtgcaatcatgtgaaaacttgcactgatctagactttagggtttctaccgacagcgtccgaaggtcgactgtcaaggctttagaatggtctaaaaaatctcatctgatatatggaatagaggtggaaaggaaatcaacattgaagaatcaatgaagaatagggagaaggtttgtatttggttaccttcgtcttaattgtgcgaagcatactcacattgtgacttccaaactttttgtaggcccgacaagcagctgaaaaatctggaaacaatagaaagaatctgcaagggaagaaagttgaaggtacttatccttttctgcatctgctagattttcattgtgttcatgttttgacaattgtcttctaacttttgctgagaagtttcgacttcacaggtgatcattgaagtaaagcatactgaagccaaagcagtagctgctagggctacaaaggaggtcgcagatgatgttgctcttaaaatctatgagcagatctatgatgagatgatgccgggccacaaagaaaattgaagaaactatgtggggaacaatgattctttattg

SEQ ID NO: 46454 - DNA, 785 bp, Zea Mays
gtcgacatctgggtcatgcattggagaaggagacctgcgggacctttttgagggagaagagtttaggttgatgttgtttaatttttgggaggccggtcttattccgaaggaggagccgatgtaatagtgtgttgccctcgctgttttgttgcgatgatgagtgaaaacgttgccctcccccacttcgcaagagaactgcgatggccatgctcgtgatgggtaaatattctgcgtatagtgtatactgtgatgtgttgtgcaatggtgtgattggtggtgtctctgagcccttcacttgttgttcatttgtgattgagctatgcaatttgttgtgcctattgcgagtttgctgcaaccttaggcgattttggtgtggatagacgtgtatgtgtcgaaggcgacttcgcgcttggtaggtgactctgtgcatctgttgtgcttatccggctgcacccttaggcgacttttgcttggatgatgtattttgtagaagactttgcaccctgtgggtggtgttacgcacttgttgtgctttttcggctgcacccttaggcgacttttgctcggatgatgtctttgtggaagactcgcaccctatgggtggtatcacgcacttgttgtgcttttttggctacactcttaggcgacttttgcttggatttgtcacacgcagaagctgcctaggttggccgttgcggtgacttttatgcgtcaaatgtcgaagaccggttttgcggtctctttcgacatccaaggtcgcggtgccgttttggacttgtttttct

SEQ ID NO: 46455 - DNA, 538 bp, Zea Mays
gctgggggcgtgatgatcctacggacccgatgatgcgcttaatttatagcaagcaagagcggtggtcgggaatttgagcgacgacgcgcggcggtcggaggagtggaaggttactagcgcagcagattggtgtcctattaccgtggcagtcattccggcgatcaatagagagttacaatgggtcacggcgatgcggtggaggtgccaaggcacgtggcacaaggtcgtgaagaggcagtcacctgcgaggttatccgaagtgaccgtgacaggctcggtacggtggccggagtagattaatggccggagtttatccacggcgaggattcttactcgatcccaggcgctatccacacgatccaagcacgaatcacggcgacatgagcgcgaatccgtgcacggctcgtcggcggcgagtttctgaacctgttttccctggtgcactgtaccatggcgaggtgggttcagttggcctgacatatcatattcaaggcaaattttctctaaattttgtatggcaacacatccaaggctctcc

SEQ ID NO: 46456 - DNA, 826 bp, Zea Mays
agaggtggtgggttagaggaataaaagaaccctcaatgacatgcctcgtctaatccccgactaccatgaacagtctcacctcatgttttcgcctcgaccaaccctcgaccccgagggaccaagggcaggacgagctgaccctaggtcttcgtctcacccgacctctaaccgcccgaagggtcgagataaaaagcctcacccgacctagggggctacaaccgacccttggaagccaggactcacgagatcaaaacgatgaccactccgggaaagggtggaaaagagtcaggctctaacataggtgtgtggtttgaatgacatgatgagagatggtatgttagcatacgggctctgacattagggacaatttgaatgaccatttcaggaaaggcatgaataaacatgcatcacctgtacgaaagttgaccatggctcaaccactccatggcccggaggacaaccaaagacacaatgcaagttaagacaaggcacatcagcatgacatgtgtggctacagtaacatgacgaaaggggacgacgtcgactaatgaggtcctttggccaatgagtatcctggacaacaatgaacaacctagcaaggttgggccctcgttcgcccaatccgacccctagattcatgaatagggcctcccttctccttggtttgtaaaaggaaggggaggaccatcatagaaggcaacatggaacatgcttgcacaagtagcccacacacttgtaacacatagagcactccaccctgttctaggactcattcactagagacttgagcaccaagccttctctcgacctgtttgtaatccccctc

SEQ ID NO: 46457 - DNA, 676 bp, Zea Mays
tgacaaccttcgccccaactcggtcccgaaggcatcctaaactctcttcggcaacaccaccgaagagcagcgccccttgctaatacccgcaagatatagcatagtccctcaattcttctttttcagccttagacaactcttgcccaattatgttttgaaagttgaaattcttttcttccgaagcatcttcggcaagctccttctcttttccagtcatcttctcccttttttcaggcactgcagccggggtttcctcagcagctgcagcagtttcttcgtcagccatattcaaaatcatttcatcaatgacagaaagtgtgttttccaaatttgtggctttggctgctgcagcttcggaagtagaagcttcggcaggagcagcttcggatgctgctgttttcggcgctgaggctgacagtggtgtttcttcaatagcctcaatgacagtaataattcttcgcttttttggttcagcgggcttctcggcagccgaaggctccttcttttgtaaaagcttcatcagttccggtcccagtggacttagcttattaggtagagattcggtcattacctttaaaatttcttctacgtcagtggcagaaggtgttgagggaatttcttcttctaaatcaacttttggcttcggagctgtagcttttcttttcctagaaacggc

SEQ ID NO: 46458 - DNA, 715 bp, Zea Mays
gtaattttcggtggcaggaaccatctataaatcattgaacttttgacacgcttgacatcctttgcaatacttaaaacaatcaacaatcatattaggccaataaaacccgacccttaataaaagccactttattttttggagccggttgatgagtaccacaaatgccttcatatacttcgaccatggctaatatagcatcattagggcccaagaacctaagcataacatcgctaggagttcgatgataatgttcatcattaatgagaacatatttaaaagatgttcattgaatactcatatctgctctaacattaggatcccacaattaagtaatcaggggtatcctccaatcaaccgtatcagccatgtcattagccaaactagctaaagccattactgtgatgcttctgttgacgatggataatatggtggctttgcctggacggtctggcgtgtacagtgcagacagtcctatgaccacccagatggtctagaacctatgacttcggtgcactcacaactctgattatcctacattttgaaatatgaaatttcccccaagttatccgaaaccttgaagcttcctgtgctaagtcggtagctctggaattctcagttctaattatataacaaatgtcaaattcatcaaaaaatgtattatgtcctagcacctttcgacataatcattcaaagtaccatctaagcattgatattc

SEQ ID NO: 46459 - DNA, 623 bp, Zea Mays
ggagttttttcctgacttatgccaatcgcttagctggtaaggcatagtggtcaccctaagatgagtagatgtgagcatgtcgcatcgtcttaggtcgtcgccgacttaagtcgattgttccgttagttgggtatagtggttaccctaagtcgagtaagcgtgagcatgttgcaccatcttaagtctttgccgacttaagccaattgctccgttagtagggtattgtggtcattctaagtcgagtaagcgtgagcatgttgcaccgtcttaagtcattgccgacttaagccgattgctccattagtagagtatagtagtcaccctaagtcgagtaagcgcgagcatgtcgcaccgtcttaagtcgtcgccgacttaagccgattgctccgttagtagggtatagtggtcaccctaagtcgagtaagcgcgagcatgtcgcaccgtcttaagtcgttgccgacttaagccgactgctccgttagtagggtatagtggtcatcctaagtcgagtaagcgcgagcatgtcacaccgtcttaagtcgttgccgacttaagtcgattgctccgttagtagggtatagtggtcaccctaagtcgagtaagcgcgagcatgtcgcaccgtc

SEQ ID NO: 46460 - DNA, 493 bp, Zea Mays
attcaagtacaccagaaagattctcaaggattgacagcggtctctgccaaatattgataaaacagtgagacaaattaagttgcttatagagttcattgacattattgaggaacatcgcgatctttcgattgaagaatggaatttccgagagcttctacaatccaaaaatgttgacctgctccaaattcagaaaacctattggaaacaacgagcttccatcaattgggtcaccaagggggatatttgctctagattttttcatgctcatgcaacggtaaagcatatgcgtaattcaattgcgctgctctctgatgacagtgggtcattcttttcagatcatgacatgaaagctagccttctgtggaatgtcttcaaatgtcgcttgggttcttctgacttttcgaaaaatgtttttgacctctctggcctgattatgttgcaagagggcttacattggttagaggagcctttcacaaagcaaaaaatcgacagc

SEQ ID NO: 46461 - DNA, 301 bp, Zea Mays
ccttggatttttgtgtaaaaactcacccatccatctgtagcaaacttgtagccctttatatcgactacaattctgctatagcaattaccctcaatcgatcagtgaatctaactctaaatcaagctctaaattcatccaacttcactgttagtgaggattcagacttagggttgcctgacagtccgactttgtgcttatttttctccaatttctattcagcaccagtgctcaatcacttaatcaaacttgtgctcctatgattggtctacaactttgctatattgactttgatcaaaaactt

SEQ ID NO: 46462 - DNA, 359 bp, Zea Mays
gttcttcttctctccccacgtagcttcatcttctccatggtgactccattgcactttgcacattttgatcactttactccttgtgacacgagtcagtgtatcaagaatcttgacaggatactcagtataagtcagatcatcttgaacactaagatcatccattggtagctgctcttcgggtaccctgagacacttcttcaattgggatacatggaagacatcatgtacatccgcaagatgatcgggtagttccagttgataggcaacttctcccactcgttttaggatcaagaacggtccaatgaagcgaggggacaacttccctttaactttaaatcttctcatacactggattagcg

SEQ ID NO: 46463 - DNA, 1122 bp, Zea Mays
ccgtaccgagtttgtcacggtcgcttcggatgagcttgccggtgatagctgcttcacggccttgcgccacatacctgggcacattcaccgcatcgtcgtgactcactttggccgtctgatcatcgccggtgagggctgccacggtagatgccacgaattccttgcgccagtgacctcccactcctcggaccgccacgcgtcgtcgtccgattcaatgtccaccactcttgcctactataaattgaggccaccgtgagctccgtagggtagtcaagcaccaagccacccaaaccgtgccctcaatcgatcatcagagagcttcaattttgaatttcctccaaatgtctcaagaacaccgcagaaaagacctcatcgtggccagcccaattcaggtcaaatctcgcgcgctgcattcttattttggcacccttgcttgctcttgatgctcaccgacccgtccaattgagctagaacctcatagatcaccgggaacgcgctggattgcccgtggtgcttgcggtcaccgtgggcagggcgctgtagggcttcaatccagaaattagttgcgggaaaacatttgttaaggttcgaattaggttccagtcgttaggtagcaccggtcttggcgtaacccggctagtagtggctcgccggagctcggctccccgccagtcaccgtcgtggactaagtgttgagaagagatagaacttgaggggtgtttgtgtgaggtgtcagtgactgagttaatagtgtcgcgaccccactttaggttattcaagaagccagggttgttcttgcaaaagtcgatgcgggcgtgcacgcgggggcgcgtttcttctgttattgggctgacttgggcccgattcggtccaatactattcacagtttttttccttttctaccagagctaaaacaattccagaaaattgtagaaaaatgctaaaaatgcaagaccaattttgctagattcctaattttccatagaatttaataaaaatagttttaggatttttaatccaaacaggaaattatagagtatttaaaacagctcaagaccttgcttctggatttttagaaaataaataataaatccaaaattcactaaatttttaggataatct

SEQ ID NO: 46464 - DNA, 548 bp, Zea Mays
gtccacaatcacccaaatagagtcataccctgcaggagtgcggggtagaccaacaatgaagtccatgccaatttcttctcatttccactcaggtaccttcagtgggtgaagtaatccagtaggtctctaatgttcagcttttacacccgcactggattgcgggttaattgtaaatactcccacggactctttagtaagactggcgccgcgaaggggtatcactggatctggaccgtctgacctaaaatatgagatccagattagatcagcctaaccctaaggtcacagccgcaggacctctagttgacgccttggatctaacacgtcggaaccgattctcgtgcgccagattctgatcggacgaccccgattccatcgccccgaaccggtattcggattcgattaccaccgcccgatcaagcaccagtgacccagattgttatgcgtgaataggtacgatgaatctaatcgtgaccgctcaagacgaatcggacggtccgcaacccgtcttctcccttcaccgcacaagtgcggcgacacggaattcc

SEQ ID NO: 46465 - DNA, 342 bp, Zea Mays
ggggtgttacagaacctcacttatcttatccttgattgttttctccacttcgtcactttgcgagtcttgccataactctgtccatggattatgtttttcatcattagcacctttatctttatcacctctatatcttaccttgatgtttatcttataccgacctttaaaataccctcttttccatctcaatctgagcattgtattttaccaacttttcccttggtcatatcctcttctttgttgcttgcgagtttttaactccattctttcttgtactaataaccttggttcttctgcacctttacctctcctcttataccattgtctattaccgcctttgac

SEQ ID NO: 46466 - DNA, 799 bp, Zea Mays
ctaagttttagccagtattaatatgatcccaacataattggaatggttgaaatcggagttaaagcaaagaagttatgcatttcttaagtgtctagcattatgtttacactataatgcattttccaagaattttattatttatttcattcaatttaacatggttagggatgacggtctaaattcctgatgactcaaggttcaaattgaaaattttaggacctttctgaatttatcttaacactatgtggatggcgggttcattcatcaaaaatacaaggggtcttttgccatttctgtcagtcgaaggggtatgggactatctgggccactggattttgctccaaccgtcccgattagttccaatatgctacgaaccgatatatgatactagcaccggatctgagatccacgactcacgagaggctagggcgtatttgaaatggggccctcggatcgtatctaaacggtccaagtatggaacacgatggatcagatttgaacccttcctcctgagttcaatggctaagatcacacccacctgattagttatcatggtctaatctccattgccctcgccaggatcaatgactaccaccatacgttcggctcatgacgttcgaacgagacggcgcccgtgctcccacggtggtgccatggccagaaaatccacacagaggctcagtttctttgtactcaaaattgatcggtgctacacagtgcgagggctagggcaaacacgtggggaatggtatcaccggaaattacgtggcccagcacatccgcccacggcacaggcggc

SEQ ID NO: 46467 - DNA, 607 bp, Zea Mays
ttgcgatggtacagtaacctgacgaagatcgccaggttcagtgcaccgccaccggtgatcccgcgccgtgatcctcgtcgctgttgtgattcgtgcccggtggagtgcagacaactacacatggtgaaaaatatcgcacaagagatgaacttggggcactgtttcgccctgtcgtcgtacccacttgcacgggcgacgtggctgcgcgaccatcaccgttgtgccaccgtctagctcgattgtgacacgccttaagtcgtctcaccactcgttgcaagtcgtgaagactcggaagtgaccgtcgtagatcgtaaaccagtgaacgccacattagcaaactccggtgactcctcccccttttcaccgcgcgcacttcctcgtccaaattcgccctcctcgtggccatcctctataaattgatgcctcagcttgttccgattacttgttacgaacccaatgaaccagtccttgcctccaatcattcaccatagcctctcaatttctcttttcccccaaatatgttttccgcgccgccgagagtctctcaccgtggccaaccctcctcaggttggttcatgcctctctgttggatgttctagcatctctt

SEQ ID NO: 46468 - DNA, 346 bp, Zea Mays
gccgagtttcatgttttcatgtagggcgatctctccgtcggcgactattgtcgcaagatgaaggggatggctgaggcccttggtgatcttggagaggtcatccacgaccgtaccatcgtcctgaacatgttgcgtggcctgaatgagaagttcacccacatgaagctccacttagggcgctcgaagccgttcccctccttcaccgacgtccacaatgatctcatcctcgaggagatcgactcccgcgcgcctcacctccgcctccgtccaccgctctcgtcgccagtaccactgcttcctccatcgcccctccccctggaggtgtcacggcgcccgctggtgcaac

SEQ ID NO: 46469 - DNA, 632 bp, Zea Mays
cccgggagtttaggtgggtgcagtgggaggagaggtcatcgtagtggttgtcgagggtgtggaggtatccgtccatgtagacaatggtggggtcatcctcggtggggtctctctctgacagagcctgaagtcttttcctccaggtgggggtatttttgttgctgggtgggaaataatgaaggggggtctcagagatctcttggctgtagttttggcatagctgtttaagggcttttcgggctacactttggcaagtgtctgggaagcggtgcccggtgaagttgacttggaagggagggtggtttgggtagcttcggctttctcccaggtagactgccatagagcacttttctactccattttcgtgtattccttcgagacatattcgggcttcttgcggatccccatgcgtagcgcgcaactccgtaagaggtgaggggaatccttcttcccctgagcaataggatgtcctaataacctaggagtcttccatctggtagaagaaaagaagggtctgttaatatcggggaaaggagagagagtgtttcttggggggtaagaggtgttttcttgttaaggcaactttttaaggtcagggctgcggtctacggccagtcctataggctctgata

SEQ ID NO: 46470 - DNA, 788 bp, Zea Mays
tgggtgtagcccccgagctttgatttgattttgaaataatcaactcaaaggttttcatcttattcttttttccaaaataatctttcagagtggcttggtgacaacatatgtccatatcttgtttggtctagagtcaaatcgatcggcgacgagctagagtccggccagtcggaacagagaggtcctggctggacgccacttggccatggacttcaatgcctctgccgattagacttgtgcttggtgatggcatctggacttcctcccatttcgaccgatcttctcccttatcgtggtatatattcattgcgtatatgttgcaggtctcaccactttagaaaatctcggacaatccgagcggtacacccaatgggtgtgcccaatgggtgtctgcctagtaaaagatgcccatcatgtagtcttgaagaagtaacttgatacgatggagaggtgtaatactccgtttgagcggtgtactatgattccatccggtgtcgtgttatgtgaagcggcgccacgcgcctgactcatttctaggaggtttgaatcgccattgaattcttgtgactgttcggtgagcgagtaggaagtgaacggtcatctctcggcccctttaaatagcccgctcgctttggctactcccccacttgttttcgttcatttgccttcttcttccttgcttcttatccttccgaaggagtgatggctggagggaaaaaaggcaagaaggggcaccacccagccgacgggaagcgcaagtgccccaagtcctccctcagaggactttg

SEQ ID NO: 46471 - DNA, 356 bp, Zea Mays
ctttgaggttgaatccttgtattgtgatgagttgtgcggggagggggaacttagtgggtgtccctgcatatttgcttttgttcttcttgatggggttttgcctgcacccctttttgcatatgtgtgtgtatgcacgtgacaccgacttaaaccgcttctcgacttatgtcgactactctgttagtagggtatggtgcgcaccctttgttttgtaagcgtgagcatgtaacaccgacttaagccgatcctcgacttaattcaattgctccattagcaaggtatagtatgcacccattgtttgtaagcgtgagcatgtaacactgacttaagccgatcctcgacctaagccgattgct

SEQ ID NO: 46472 - DNA, 931 bp, Zea Mays
acccaaagcgtccacgccgagtgagccgctcgactgcacctatcgaggaaaaaggaagaagaggccacttcggtgactgtcatgcttggaccagggtgcatgcccttctgctccggttcctgatgatgtaccggcagaggccattcctgaggttgatgccaagggttgtgatcgtgcacaggttgctgtctgcctgtttgacgaggacaaagaggaagaagaagaagtcccgctgatccacaataacagccggcactatagaggtagcgaggggggtagtgatattccttctcctgctctgtcggctcttgtcagtcttcaggggctttcaatatcagactttgatcaagtactggatgaagtcgtccatgaagacatgctatcagagccttctgcagatgatatcccggccgtctgtttagagttcccagacggtggactttccttgcttgattccgctgggcaagaggtaacccgagcggtgtctcgcacatcgtcgactttggagggtagtcttccatgtcgagacgctggtctaagtcatccgactcccatggacgtggctgtggggccctccgccttagaggtggctactgcagaagacccagcccccgagggtggtgccggcagttacccagcccccgagggtgttgctagtagtgatccagctcttgtgggtagtgcaagctacaacccagcccccgagggtgttcaggtgggctctctttcccacgcctccatggacatccacgttgggtcatccccacctcggtccgatggggcgacggcggtacgtgcttccacagttttaactggacaagtcaccttagaggtcggtgagctagatgcaaggagcctactgtctgctggtggggctgaggttgccccggatagtgctcttcagatcattcctgctgaccttccctcatcg

SEQ ID NO: 46473 - DNA, 742 bp, Zea Mays
ctataacgagtttagacttataaagggaggtatgaacttggcttatggtggggcccacctccaatagtgattgtggtggatgtctgatgtgtgctcaggtgagtgcacatggttttgctagagcaactcttcacactgagatgttattttaaagtctgcaacatgacacttcatttcaacagcttgacttgtatgacaatgttgctttatgacaatggatgtaagtgggggcttactagagcgtacaatcatcaagaaggctagatgcgagcttgtggtttcttcacgcaagtttctcactatggatggtgtcggttccttccgtctggacatgaattgttgtggttaggcatcatcaacttgtttgggatgaaatttactgtggtgtacaatgagctcaggctagtgctggaggtcgctagaagaatgacgagatagcatatgtaagttatggcttatgtaattttgttgttgtgtaacctcacatacttattgagtgcaccccacataaactagtataaatctttacgttttgttacctctttcgtgttagaagcatcactagtgctagaaacacttacgatatgtgtcaattttctttgttttcgtttacatttaaaagaatcatcacacatgccttggttgtaacgattcaaaatagatacgcttatatcgacttctaaagttggtataattgtagctacttggaggtagaggtacaactctgtattgccactttatg

SEQ ID NO: 46474 - DNA, 442 bp, Zea Mays
agaaaatcaagtattgcttacagctggggcaacatagtgccaataatagcacaagcttcatttctagagagcaaagatgtattcatccaattatgctatatggattattgatactttgcccaatgacatcctaattcttgtaacactccagctgctttttacaccaaatttcagagcaaacacaatctattttttcatacaagtgtttcaattctgtttgaggacaacatgacaatttccatctaatcagtggaaatgagagggaaggggggactctgtcccagaagataactacatgctggcaatagaatctaatttatgagagaaccaaatgcaaaaaaaatccacaaagtacaaatgacatctgatcagtggaaatgatggggtgtggctctgttccagaagagaactacacactggaaatcaaatctgatttataaga

SEQ ID NO: 46475 - DNA, 688 bp, Zea Mays
aaggttaagtagttactttgaattttatgagataatattagaatttatgttaggacgtgagctattattaaagcacattcttctaaataaataaataggtaaatacgatttgtatgtcatgctgggatatttgtttgttgcatttggtttggtgagtcaaaactgggatttaaacttgaaacaaatttaaacaagggatatacaaatgaaaatagaaaaaaggaagataaaactgaaacagaaaaaaagaaaagaacaagagcttgcctgagctgaattctgcgtagttggcccaataccctcaacactgcaccccgctcaaactcaccacgacactcatcctgagacagacggaagtgcggccgcatcgcgtggtctcattgacgggtgggcccgctcagccagcaagccgaccgtctatgctgttgtctcctactgacaagagggaccatcgggccaaccatagggatcactcacacacgcccaatcgttgtcaagtggacccacctagtcaaagctttcccctacccatgctcagctttctgttacaggcgcaacaaaccttcccatgatggacgggggttgtttagacgattccaccaccttagcttcgaatccccacctctatataaccagccgcaatcgcgtctctttaccatcaactcggtgcctctaagtcttcaccgtc

SEQ ID NO: 46476 - DNA, 409 bp, Zea Mays
actcttcttccaacatggcgcacacccggattgcccagtactgctgggttccatccacggctacggtcgctcccggctactatggtggcgctgccaaccaacggttcacgctggcgtctatctcctcggtggtggcgtgcactagctcctatgcgtggttatggccgaagggaaacagtcggctgaattatatactcgttggagaggggtgtccgaggtgcttggtcaagcaaacctcatgctgatccggtattcacggagcggtcagcgacaaacgcgtcgaggaagacggctccgaaagtggctcaatcatacccgtatgcgaaaatatttgttgatgcaagcacatgcataccatgcaaaagaatacgtgatcaagtcttaatactgtcggcagggtgaggaaaac

SEQ ID NO: 46477 - DNA, 278 bp, Zea Mays
ctgatgcttacggccggacaacactgtttgctttaatttgctgaccctggcctgatgagaatattatatctgcaatctggaagatgtgcatgtttgatgcatgacgagcaaattgtgcagctagctagccaagcgaacagaatatgaagaatacccagctctctcgtggatcgaagaacatttaaaagcagctcatgcatcttttctaatcagttttggcaagcaggctgggtcgtcgtcgttaggtttgattagatgtccgtcgctccctcctccga

SEQ ID NO: 46478 - DNA, 723 bp, Zea Mays
cttaactaccactgtacgtttcacctccgggaaaaaagaagaagggacaatcttgccttgcccgtttcacctccggacaggtgtttaattaggaggttggaaggcgcgcttggtgcttgatccatgagctaccagtactactagaagtttcattcaccagtcagtgaccaccgaatgctagccagtagccaggcccaggcaattgcagttgcaggtcggctggactgttcctgtgctccgtgatgactcatctagtagtaacatgtcaaatgcatgcccacgtgacggtgggtgcccctgccctcgatcgaaagtggaaaggctgcacgctgcaaaggctgcctggagccttggacctcacgcacctcacctattagcatacacgcggcgcaccatcgccgtgaaattatttggtggcgactacgactagtaccccccgtccaaccaaaacctggcgcgaccatgtgcatgcgcagacatcctgtgctactgacctatactgttgccgctaccaccgactcggacaatgacctaatctagcgcggaccataggctggtcggcctgatcagtcgatatgagcactcagcagacaaggaaattagcgagcgggttacggttttcgcaccacaatgtcagcacgggagtcgtgcccgtgtcttgcaaccgtttaattaagcatgtagctgaccataacatgaatgagaacgaaaattttaacgatc

SEQ ID NO: 46479 - DNA, 337 bp, Zea Mays
cacctctatatcttacattgatgtttatcttatatctgcccatgtcaatctgagagttgaattttatccattttcccttggtcatatcctcttcttgctgcttgcgagttttaactccatccttcgttgtgcttatgtttgttgctgcctttacctttcccatctctcgatctgaccttggtgattacactatgtctgctatctaaaatctccaatctctcatctcagttcgagagtggtgttttacttctcccgcctttggtcgtaacctcatctttgccacgtgtcaatctggccttagctccattcttcattgtactcatgcccttggttctcc

SEQ ID NO: 46480 - DNA, 459 bp, Zea Mays
aagtgagagcagcggtgagctgaagtcactggggcctggtgaattggatcaacgcataacttgtattgatctcaagtgatctatttatacacgtacagaaggcggtggccgaacctaacggatcacagctgatcggccatgcacctagagaatcggcagaggccgttacatgaacaagagactcggtcctagctgttacaactggatagactcgttgacaattttatcttcccgttgcaatgcacggtcatccacctagttataatttaagtgaggatagagatctcgattggaatttatcgctgctgggaagagaaagaaataacgccacaaaagtttgtgggatctttacaggaatgtttttttttagcgtggacaaggatgaggagccaaaaccgatggctagtgccggccgacatcagtcagcgcgcgctatggcctacggcctgtggctgtgtg

SEQ ID NO: 46481 - DNA, 536 bp, Zea Mays
gcatgaaccgacggtaaaatcctgcaagtctaagaaaacttcgaatctgcgtgaccgtcgtcggtgtaggctagccctgaatggcttcaaccttgctgttatccacctcaatgccctgcagattaaccacataaccaagaaacgagacacgttgcgtgcaaaaggtgcatttgtccatgttaccaaacaagcaagcagcatgcaaagcatcaaaacagcacacaaatgttctaaatgctcttccatagacttgctgtaaataaggatatcattgaaatagacaacaacaaacaaacctatgaaggctcgtaaaacttcgttcattaaatgcataaaggtgctaggagcattagtcaagccaaatagcataaccaaccattcatataatccaaatttcgttttaaaagtcgttttccattcatcacctagtttcattctaatctgatggtaactgctgcgcaaatcaaccttagagaaaataacggcaccactaagctcatctagcatatcatcaaggcgtggtacaggatattgat

SEQ ID NO: 46482 - DNA, 601 bp, Zea Mays
tacgtgctcacctcttatatcatttcagtgtacctatgtgcccgcttgcgagactcccctcctacctggtttttctcttgagagacatgccgaggtagcaaatatttcctatttctatacttatctactgctttgctgctcttgcttatcttttctaattctcgtgcagcgtttcagttgccagtgcaggatggtgcggacaaataatgtcaccccatcaggaggaggagatgaccatgaccctcttcgccccttcagacatgacaagggcaaggatgtgtaccttgagcagcatggaggcaagaagaagcagaagttggatagagctactcaagtagtagtagcagcagcagcagctgatccggcagagtaaggaggttagccgaggatagcttctgatcatattgccttctaggtctgtcgcctcttgtctcggactcgctccactcctgctcagttcgacccctcagcaccagtcaccactaccagtccaccttcctccactatgccagcttctgccactcttgagcctaccaccacacctcctacaacctccaccacacctgcttccgctgctccctcttccactccaccagttctg

SEQ ID NO: 46483 - DNA, 287 bp, Zea Mays
cattggccgaggctatcgctgccttggtcaacgccatttctgataatacgcgcttcttgcgcgaaatggcgggcaaccaattccaacagcattgaggcagagttctccctcaaggaccgcgtgacactacttatttggaattctctgagactcgaccaccgctcttcgttaaagtagaggaacccttagaagccgacgaatgggtgagagtaatggaacaaaagtttgggttaattcgatgcatggagacgcaaaagcccctattcgcagctcagcagctaagaggg

SEQ ID NO: 46484 - DNA, 325 bp, Zea Mays
gaagaagtttcaaaaacatctctccgtcgtgtaatatcatgtgacgctgatagcagcctgcgctccgtgagtaccgtgtgacttccaccacaaagctgcttcaatattagcctgactgcctgagcattaaccttggtgtgcctgctctgcaccagacagtacaagagctaatacgagctcccgtgacagttttttgctagtctttctcgcgctcgcgctcaatttgcaggtgctagctagctttcgttgtgcctgtccactggcaggcactttcactctttcagacttgaaatggagcatatcatatgatccgtcagtgacagga

SEQ ID NO: 46485 - DNA, 960 bp, Zea Mays
caaccatctagatatggccacagacagatttgtctcactctctcaagtcttcattgcttctttggttcgtggtcgcattatcttcttcaaggttagagcgatgatcatcctgatgttcatccaccggtcaaccatgaacataaagcagtattcaagtagatcatacgattctaagtctgagcataagatcgagttggggtcggtgtagtagtttgagtccaagtcgaggtcaaagttgagtctgagtccaagccaacatcatgagatttggtcgactcagagttgccaagatagagattggatcttcaaagtcttgatctcacggtgtcaaaactgttggaagatctgtagctgggacaagcccgagattttcaagcgagttggcaataaatcttaggatatcaaaggtgaaacacattgttgccatcaactctctgctgatctacatgaaaaacctacttggtgcaccaattatcaaagatcgttcaactgtattaatatatggtaggtcacgtgattgaaattgaaggtaaaggcatgagaaacacgaaaatttatacatgtttggtctctcgatgtaagataatattctatgtcctatttgtggttgttcatgtattttgcgagatgagatgccttctaccctcatggggttcccatgtccctccttgtcggtgttcggttccgaggacctaaccaactagtgaaatgatgttgcgtgtccctaacccagatggtgatgcaagttgacacaagtctttttatcctggttcgaccctacttccagtagaggaggataagacttatatttcttgcacctaagtgcttgcagtagggagtacaagcaaagtgggagagggaaagatcccaagtcctaggagatgattgaggcaagtgccaataccgtgtagaggagaaaacttgtgaagtgtctgccctctgtccttcagaagccaagtg

SEQ ID NO: 46486 - DNA, 752 bp, Zea Mays
gacgcacctgcagacctgcttcagagttccctgatctgggtggcttgaattcgttgatgatgtaattctaggataggaaaggctggacaaaagaagggatctaacctttgaagctctacgcgttctgaagtgccaaagatgtcatcttagagaggggaacaaagtaagtgtggccaggacagatggaagggcattgattaccatggaagcgagtccagcgatgatatgaatccgatggaggcgcccaagctggtgtgcgacggcaccttgaaaagagtcctgcacacaactataaggtcctgactctccactcctgtagaggtgcagtctggttcccgcgcaccgatgcacgtcccccgtcccagcctcccgcagtgcttcctattgcaacgcatgtcgcacggctccatcacgcccatgcctcgttcactgtccgcaacacacctacgcgctgtgtgccaccggcatgccgctcggcggcgtgcgcgcacgaagaagaaggcaaggaattaacccaaacgcacaacaaattctaatctgaggaagcacgatggaaggcgttcataaatgtgggaatgggaacaggcgagacgaagacaaaggcagcgcgggggaagggaggcggtggaggggggcatacccgccgtcgcgttcatcgagtttaacagcgtctcctcgtcgcgacgacgatgaagtggcctccgtcttctttttcccaccgccaatcggtgtcgtcatgtggcgtctagaat

SEQ ID NO: 46487 - DNA, 733 bp, Zea Mays
cttagctgaatagtcctttgatccgcattgatgatagccttattctcggctaaccaattcatgcctaaaatcacatccacatcttgtccctttataactatcatgttggtagggaactcatgtccagccaatcttacgggtacgtggaagactacttccttagtaaagatttgacccccatgtgattgaataacaaatccctcccttgattcaatactatgtatgcaatgcttctcaacaaaagtcttggtcataaaagtatgtgatgcaccagaatcaaaaaggatgatggtgggatggttggcaacaaaaaacgtatccatcatcactgattctccgtccagggtggtcgccacttgagtgtagtaaactcgcccagttttccttggatttttgctcgccggagtgtttgccacatttcccttgccttgagacggttcccagtagtctgttgagaatttgatttattctgctttagatagggatagtccttgatgaagtgtccagacttcccacaattaaagcagctattagaagaactgggtagggcggggaaacgagcaccaggggcactcggctgattttctgagcagggggagtggggcggataaaaactggttgcttgaaaggaaatgcgggtggacgagcagaagagccatttgggttgaaaggacaaatcaccaacctcgaccgctttttagacccttgagatgatccttcacccctatatctc

SEQ ID NO: 46488 - DNA, 1102 bp, Zea Mays
tggacggcgggttaatttctatggagttcaggggctcttctataagatagccgtagcgaaggggtgcgggtaaacccctgtcgcccgatccaaaccgaccgccaggattatatcgacacgttatgtgaatcggtatacagttgccaccatcagatcacagatccactacccggattttatgtagtgaaggggtacgcaaggtatgatcttggccgtcaacatcaggatcaacggttcacaccaaccccacttaaatgccatcgccgatctaatctcaaacgtacacccatgatccaatggtcccagatcaccgccccttctaaccactacacacgacggcgctgctggcctgcacggcggaggactcgccgacgaggggcgccaagatgctcgggtgtcccaaacatgattctcacgtctgatacccagtgaaaaccaccgcacgaacgatggggataggctcataccggcgatcgtgacgagaagtgtgttgtccacggtgagcggcggattcacgacggtgccttgcatccgataaggaattggggtggcaccatggggtcttcccgtatactgacattagggcaagagcccacgtgcgaaggagatttctcgggtccgcaaccaaggtgcgtcgtgagcccgcaggcacggatatatggcgacggcggatttcccggtgaactcacacctttccctctgcctcagcgatgagctcgattcccgcggccggttaggttgggagaactgtgatgccatgggtcttggttttatagggtcgaccccgcgaatcctaggcagaggaccacggattccgcgtgccacgcatgggttgttaccgtgcgctcgcgaggttgttccgaggtgggtgacagggttgacggggtgaccccacatgcaagcgacacaacgaggtgagaaggaggtagatccactggccaagagggtccacacgacaacgtagcaagtaacccaactgcgcgcgagcaggcactctagcagtggggtctgcatggtggtgaaacggaggacccaaggtccctaactgtcggcgcaacgcagctgggccgagcgcgcgaaaagtggaaactgggccacgagg

SEQ ID NO: 46489 - DNA, 431 bp, Zea Mays
catggagacagtccgtggaacgacatgacttcatccgtgaggaggtctggaagctgttgcatgctggctttattgaagaggttcatcaccccgtgtagctggccaacccagttgtcatgccaaaggcaaacagaaagcttcggatgtgcattgactacaccagcctgaataaggcatgccccaaggacccgtatccgctgccgcgtatagatcagattgtggactctacctcggggtacgacctcttgtccttcttggatgcctactctggtttccatcaaatccggatggctaaggaggataggaggcataccgcttttgtgacagtagatggactatattgttatgttgtaatgccctacggtctgaggaacgccttgccaacatttgttcgggcgatgagtaagaccttcggggacctgatccgggac

SEQ ID NO: 46490 - DNA, 1043 bp, Zea Mays
cttagagtgcggccctctccagaggaggttgaggctttgattgcttcgcttggtggaatccccaatgacgagaggcaggttcactttgagatgcctactagcccgagcgacgcagaaataagtgtcatgctggatatgttggctgaggattcctctgactcggctcctgctgaaacactagctgtagcactcatcccagagtctggaaaaacattggacattcagagacctaataatattcgcccgaaacgtctccaccaagctagtcatccaacttctcctgctgaagggaagaagaagaaaaagagacggcttcggcgagtgtcatccttgaatcaggatgccggcccttctgctcctgctgccggggaagtgccagtgccagtttttgttgaagctgaacccaatgggtgtgacccgactgatgctgaatccaatgggtgtggtcttgatgatgctgaccccaatgggtgtactgtccgtattattgatgaggatgaggaagaggaagaggaggaggaaatccccttaattcggaagaacagtcggcgctacatagcctgcggggagaatagtggtgttccttctccagcttcgtctgctctcgttgatctgcaggaattgtctctggcaaattttgatcagactcttgaagacatggtccctgaagacctgttgtccgagcccgcagatggtggaatgatggaagtttgcactgatgtgcctgatgccgggttagagttatcccgagcagcgtctcgttcctcgtcgaccttggagcgtggtcttaagagtcgagaggctgatctagattgctccgttcccatggaagtggttgaaagtccttcagccttagaggtggctgttacagagaactcggtccccaaggatggcgcttgcgtttacccagcccccgagggtgttgccggtgatgatccggctcgggtgggtagtgcgagctatgacccagcccccgagggtgtccgagcgggttctccttctcatacttccatggatgttcacgttgggtcttctcctccaca

SEQ ID NO: 46491 - DNA, 441 bp, Zea Mays
cggggactgggtaacagccagcaccaccctcgggggctggggtttctgcagtagccacccccaaggctgagggctcctctgtcacctctatgggagtcgtgcgactcggacaaacatcttgacattgaagactgccttccaaagtcgacaatgcacgagatactgctcgagatacctccagcccaacatctggaacctctgaacaaacagccatcacgtcatcggcaatcggctctaaccgcatatcctcagagacgacttcatcaagggcctgatcaaaatctgatattgacagtccctgaagactaacaagagctgacagagctggagaaggaatatcactcccccctcaatacctctgtaatgccggctgttcttacagatcagcgggacttcttcttcatcctcatcaaatatacagacatcagctggtgcacgatc

SEQ ID NO: 46492 - DNA, 663 bp, Zea Mays
ttctattctgggcaaggggtacttgttcttgattgtgacctcattcagagctcgataatcgatacacatccttctggtgccatctttcttctccacgaacaggacaggggcagcccaaggcgaggtgcttggctggatgtaatctttatctgatagctcatcgatctgcttcttaagctcaaccaactctggtccagatactctgtaagctctcttaaagatgggggcggtgccaggaagaagctctatggcaaactcaacttttcgctcaggtggcatgcctggtaggtcctttgggaacacatctgggaactcagacacaaccttgataatctcaagtggatctgctcaactgctatcaacagtcatctgataacaacttcctttctttggcttagacgggactaactctgtcaccacttcctctcctagtggggacatcaacttgattgtcctcctatcacaactgataactgcctgatacttgtctagccaattcatccctaggatgacatctattccctgagtacccattactatgagattagcgagaaacgttatcccccttatttccacacttacattaaagcaaatgctatcagctcgaattctaccacggactgagtcaatttgaataggggttgacatggtagttattggaag

SEQ ID NO: 46493 - DNA, 553 bp, Zea Mays
actttaggggcttgaacaacccaccacaatccacgcgaatacaagctctagtgtatctggcgtcaacacatgtgcgactatcagggcaacgacaacacatcaaaccttcgtaaccagcgcaacagatgcagttgtggcttggtagttggggtacacgataagtacatgcaacaggcacaacaggcgcaacaagcacaactgtgactcaatagttacgacacacatgcaatgccttcagggcccacgaaaattgtgtgactcggtgatggcggtccgactcaacgggagcgatccgattaagcgagagcgcgacatagcaatcacatgacgctgccaagttcatacgacacaaatactgcgtcatgttaccagggcgcaactaatgcttagccaatgtcttaacttagtcgaataataatgtaacctgatcgccacatctgtgtacccacaataccatttaatcacactcgatgtgagtccaaaagctcaacgcaacataaatatttagagcgatttcagtatgcacaatacaaccttcatatgtattttaatt

SEQ ID NO: 46494 - DNA, 481 bp, Zea Mays
cgatcaactacaagggtgtctcatgagggggaagaaaccgaggccactgaaacaacaccaatttcagaagtaatgaaacgatcaggtcttgttgtagctgacgaaggtacttctaatgtcgaagctgaacagactgtgattgagggtgaagatgttgagagcgaagaagactacagtattctgatcccaacaaagcctagtcatctaggttttgaaaaatctactatgtctgaagacgacatgcctttgatgatgaaactaggttattttggataagctaaaaggaaacatgctcgatttgctggagaagagactgccctagaaccgaagaaagatgaagttgtggttttcaagagcttcttcagagcggggcttcgatttcccctgaatgagatgataggggaagtcctaaagaacttcgaaatatatctttatcagctaactcctaatgctattgttaggctcagcgtttttatctggg

SEQ ID NO: 46495 - DNA, 542 bp, Zea Mays
atatactttgaaggtatcttttcaacttgtagatgcatgaaggctcttaaaagatgaacacataatagacctgaaagcatgagggccaaccattatatttttaatgataaacattattttgtacaacaatcaacaaaatatataatatgcacttttattggtataatcaagcctagatgtacaaacctatatgttcccactgtttgcactcgcatgtatactctccagcttctatgtccgctgttatcttgaattgatgttgtccccacacaattttattagatctttttgtatgttgtacgatccaatctttattagaaccgtttgtgtccttcaatattatgtatgcagtggtgtatttcattgattcctcaaatatattcataacagctcttgtgtatgccctagagactctcacttcgaacctatacaacgtatctgttgtccttggtccctttaagacgttaatatcataattaaataatgtatttacataaacatgtatgccatacattattgataacaaacacgatataccttgc

SEQ ID NO: 46496 - DNA, 365 bp, Zea Mays
cagataacaagtggataaaactttgcttttctgtattacaaaacatgagcacaagttaaggttattatacacttggtgtgtgcatcaagaaatagcactatagcagtactgtcttttattgtgggcactaaagaagtgctcctaatcatgaatggacgataatggttgtatagagtgaaacaaaagaataggtaaaagacatcaatatttgcctctgtgaagtagcagtatgaaaattgataccatcatgccaatttatcctgtgatgctattctttgaaaacttgcatggagcatcctttgtcttttctgatgtgatgctttttcttgcggggtgttgctacaattttatactcctattttaag

SEQ ID NO: 46497 - DNA, 645 bp, Zea Mays
ttcgactgcaagccttgctccacgtctgttgacaccgaggcgaaggtctccgacgatgccagtgtcgcggtaggcgacgtgatgacctaccagagcgttttcgaagccctccagtacctcaccttcaccaggcccgacatcgcatacgacatccaatatgtgtgccttcacatgcatctccccgcgggagcaacacctcaccgctgcaaagtagatccttcgttacctccgcgacaccctcgaccacgaccttctccttcgcccctctctggcctccaagctggtcgtctacatcggcgctgattgggcgggttatcccgtcacgcaccggtctaccttggtctacaccgtgttcctcggtgccaacctagtctgctggtctttaaagcgacaatttgtcatatcccactctagctttgaagccgagtaccgcgccgtggccaacgatgtggtcgaggcgtcctgactttgtcagctgttccaggagcttcacaaccctcttgtctgtgacaacctcgtctagtgtgacaacgtcaatgtggtctgtctctccaccaatcccatgcaacattagcgcatggatcacgtggagattgacctacactttgtccgctagtgtgtcactgtcagcaatgtacacgtcct

SEQ ID NO: 46498 - DNA, 999 bp, Zea Mays
atctgatcgaggaggcttttgaatgatcatcgacacttatatattttttctcttttcctatagttttgtcttattgtaggtaacatgtggcatgtaaatgtagccctcaagtgttgcattcaataatttatctaaattcgtgaattaatcttttatagttagagttggcagtatgttgtgccttgactaaaggatgcataatagatccttggttcattactttaggatacatatttgtatgttgtttggcttctcttgcctagctaatacattgagaactattaaagatctgcgcgacgatttatgctaaaattcacacttatttacgctgttttggtttacgttttacgcaaaaatctgcccgagacagaacccgcgcacgatcggacacgcacgatttttacaccgtaatttttgggcctcattcgtcattatgaaacagatctacgatttatgctaaaattcgtacacatttacgctgttttggttcacattttacgcaaatatccacccgagccagaacccgcccacgatctgacgcacgcgattttcacgccataattttcaggccacattcgccgttacaaaatagatatatgatttacgctaaaattcgtaatcatttacgctattttggttcatgttttacgctaaaatctgtccaagtcagaacccaattacgatgggacacacgagatttttacgccgtaattttcgggccacatacgccgtttcgaaacagatctacgatttacgctaaaatttgtattcatttacgctgttttgtttcatgttttacgctaaaatccgcccaagccagaacccgcgcacgatcgaacacgcgcgatttttacgccgtaatttttgggacccattcgtcgttataaaacagatctacgatttacgcaaaaaatcgttatcatttacgctgttttggttcacgttttatgctaaaatctgtccgagtaagaaccgtgcacgatgggatgcacgctggtg

SEQ ID NO: 46499 - DNA, 475 bp, Zea Mays
aaagaaaccagggacctatgcgccaaaaaagaggatggcgggtagatttcctaaaacgagggggttcttaagcaaaacttacacgcgaaggggtacagggtaatctcagccatcagatcagagatcagcggcccagattagatcgcacgggcgcacggacgtggctgacaagcggggccagcgcgtcagcgggccagggcagaccgaccagccaggcctagaggcagagacgcggggaaggggcaagagagagaggtggttggatccagatcggagggctgggattagacctgctcaggttaaatctaaactgtccgatctcggacgaacgaccggaatctaacggccaagggtgggcatgggcgcgacggcggtgctcggtcctgcggcgagaactcgccggagacgagaaggtcggccacggcggggcactagaggcccggggactagcctgggcgcaatcatggtggtttgg

SEQ ID NO: 46500 - DNA, 356 bp, Zea Mays
aaccgatttgggggaagttagaaattaaagctcactggtgatcaaccgaggacaatacttggtggctgggtgcgtgatgatcctatggagctctgggaggcttcaatttatagagcgcaacagcggtggcgctcaatttggctgagaagtgctggtggccggagagggggaggattactggcgcaaggaattcgtgtcctacgtcgtggcagtcactccggtgatcaacggagagcgagagcaggtcacggcgatgcggtggaaatgcctagacatgcggcacaaagccggaaggtggcggtcaccggcgtgcctatcgggttccaccgcggcaagttctgtacggtggccggaat

SEQ ID NO: 46501 - DNA, 1650 bp, Zea Mays
ctgcatcaaggtagagaataaaccacacatgctgcagcataccatttatgtacgcggttggaacccgtaccaaatgctttgtagtggcgacgctaccctggggcgtcaaaggtgtcagaggtgaaggcaaggtgtctgtcttgtgaggagtgtcttccatgctgctgcttgcaccttgtgagaacatacgcgaagactggtgtgtccctgtggttgatgttgaaatgtcaatattttgattgcctagttcctttacagtagcattgacctggaagcagacgtttccagagttaattgtgtgcccagagaagctaacgttccaaatgaacgtcctttcaagcagctttgtgattgcatctggaatgaagcctgatggagtgttcgctatgagcatatcacaaggccttttgacaattctttgagccatgcgcccaaagagaatgaagtctgtatcagcggtctcgtctcctgcagtgacaagtattttatacctgaaataagaggtgtcaatgacttagtgtggttaacatagtaggcttgtaagtcccaaaggaattaatatgtaaacaggaaaacattgacgtaaagaaggtagaacatttttgtgctgttggggggggctgagtggtgatagagaatatagtatatgaacttgttgtatagattcatgtcatgtttgatgcacacaaaactggtacattgagttgacaaagggaagagtgctgctcaacccgaggacacgtcatctaacctttggacgggcatagcaatgttagcacaatcacggtttgtgcatttgtaagagtctccatgagtgacagctatgcaggcgcatttttctgcacgagttataccaccacttgctatcaattttccttatagtgactgtaaccaagaattcctttccctgcatggaaaataagaaatagaggcaatctcaaataaatgtgttatgctgaaacctaaataattgtaactccagtctgcctctaatagaaaactgcgggctcaatggcattttttggagagataaatgtttgtagcagtaagaatccaagtgggcaaataatttgcatagctgcttgaattgaaaattagagttgccttacttcaattgaaaatacttgggttataagcaattgaagagttggtgcattgctgtctttttccatctaagtgtcgtaggactgacatgattattgctcgtgtgaccaacttcttttgtacgacacataatttgcattggaccattgttttttagctggtgactggagatgtcagtcgttaattgatcctatgacttcaatccctcaagctttagatttattagatatgctctactgatatttgaagttgttgttatatgacataccatgacttcttttgggctacaagttgcgaacacgtgccacccaatgatattcagtgtcgtaggtcatagaaataaaataaggaacaacagtaaaacattatccacacaactaatttatattgactggaaatctggagcaccaagtatgaagtaatcttatgcattatgtgtatatttggaagctattgacggcagaatagaataggtactgggtatgtcgtgtaccttgttttcaaacggatggagatacttgatgtacgacaccttttgctcctcag

SEQ ID NO: 46502 - DNA, 590 bp, Zea Mays
ataacacgttgttttccgattgggctgactttggtcgtagtttgttgtgcgaaaacggtatccattgacatcatacccagaatatttcttgaccctataagcaaagtcgttggctacttgtctcaactcggcactcatagacggatctctttggccctgcaagtattcacaagttaaaagacgctaaattgagttcatagacggatctctttgacaaactaagcatgtaccttacgtttgaaccaggaaatgaaattgggcaatccatttctcgcaccctttctaagaagagtgtcatattcctgtggagtgggctcccttgatcgacgctagaattcatgaagaaattgttccatgtatggcgtcacttcttcaaggttggtcaatacatatagcatgatatgccgccactcttcatgtgtcagggtcttggtggtcgagccacttgcgcttctgagttggcctcgaaatatgctaaggttcgattcattgtcgccattcttgtaacgagggggtggattatgcacgctcggcagtttgtcaccataataagttgttgtgaagtttgacacctcctctagaatgtatgc

SEQ ID NO: 46503 - DNA, 671 bp, Zea Mays
ccaatgcgacttgttacctggtatggcccaaagaagcgaggacccaatttcgacggagcagccgcggtgacacccactgctgtccgctgttgtaaacggagccatacccagtctccttcttggaattcgacctctcgtcgtgactgatcctgatatgtcttcatcacaatttgtgcttgtaccagccttgccttgatttcagtcagaaattcatccctttcctggagctgctgatctaccgctgccacctttgcgacacctggatggtaagctaataatgctggcggctctcggccataaactacccgaaagggggaacatttgagggcggtgtggtacgaagtgttgtaacaaaattctgcccatggtaaccactgtaaccaagttcttggacggtcgcctgctaggcagcgaagatacatgataatgatccgattgaccacttccgcctggcatcagattgagggtgaaaggcagaactcatgtgtagcttgacccctgctaagcgaaacaactcggtccaaaaagcactagtgaaaaccgtgtcccgatcactgacaatggaacaaggaaaaccatgaagccggtcaatgccatcaaagaaggccttggcgactgaggctgctgtgtatgggtggcctaatggaatgaaatgcgccattttggaaaat

SEQ ID NO: 46504 - DNA, 416 bp, Zea Mays
agatctgatctcactcttgtgcttgcgacatccttgtagatgcccctgaccataaccttcttgccttttgggatttattcctcttccatcattaaatttctaccatttggcaatccttattcctttgttattgacatacatgtatccgtgaattctttaatactcttgttttaaatacttacatctgaatttctacttcctacttagacatttcagtttatatgtccatgaactccttgtcttcggagacccctccctattccgttgtgaagccgctatcttttggctttttatattctcttggtcttggtacacttgtaccattggaatctggcatattcttatttttatatatgcttacctttatatcacagagtctgtttaagacatttaagttaacatgtccctggccaccc

SEQ ID NO: 46505 - DNA, 754 bp, Zea Mays
cagagatatcctcatcagtaaatcctagaatgtgagcaaacctcttgtagctcactttatactagcttccttcgatgaaaaaattgagataaggaaagttgtatggactttcctcatcagcatgtttaatccatagagtagaataaaactgagcaatgatttcagcattccaatcatattggaatgtcatgatggtcttcatccttttttgctcacaggccttcaatgcctgtgtcatctcaggatctccaatagcttcgcatccatcccagttaataaaacgctgatggaggatagactggtgcttctttggaagcataactgaattatagaaatcaacatgaaggagagtccagaacgattaccatcaatcctgacatcacgaacacagaatgtaggattttggaagcgcatatcttgaagaagggcagaccctccgttggtagtgaaatcaatgacatgttcgttggcggaatgacgggcctgcgcttcgtgaagcactaacccctggataatgggtgcattagcaggagggagattaacatcatcatcttttcctccctcgtcatcgctggtagcctccgaggcttgtggattcatcgctggacgagaccggccggaggggttccaagccgttcgtccgcgaggtccatgagacctagaggcctcaccacctggcatgacattgccagatccgcgcccgcgcttggatctggaccgaggaggagtgtcttcacgaatttctggggcttcg

SEQ ID NO: 46506 - DNA, 379 bp, Zea Mays
ccggaacatggcagctgacaccttatccacgctagggttgagccgagcacaggctgcctcaggtgtcttcttccaagagattcaacaacccagtgtcacgtcagggccaagggaagaatgcaaggcaatagtgcaagcggaaccagatccaaatgactgaagggtaccaatcatcaaatacatcaaaaatgaagaagagtcagatgatagagccacgaccaagtgtatcgcaagacagtcggctcactactcagtcataggcgacacactatacaaaagaggggtcaagggtgttttcatgaagtgcattgacttaggtgctgaaaaacgcttattggaggaaatccactccaggcaatttggggtccatgcatcatcg

SEQ ID NO: 46507 - DNA, 655 bp, Zea Mays
cgggtcctcataacacatattggatccatgggctgttagaaggccttagtggaccggacgactggtttcgtgggctggccggctaacttagacccagagacggcgcaagacttgaagtccaaggcatcatggcaatccttttcgataaggacggcacgaagctctgcgtcgcacacaaatcagaacggatttccgagcatgcaagatgggtgatcaggaagaatgccaatctataatcctgaactcgtcgtctatatatggcggattggctacccctacaaaagatagagcacctctcgtagcctgagagagcattctcatctcttagatactttgtaaccttgaaccttgagaaagatcatctccaaagcacaccagaagtagggtattgtgtaatccagcagcccgaacctatataaaccctcgtgttccgtcgtgttaagcacaaaccattgagctgcagtcgatctcgtcgaccacaaaaggcactacacgacataccagtgtgttgctagtaccaaacaccgacagagttctaatctcccccttttgttaattagcacttttaattctaattctttttaagtttaattacctgataacaaggtatattacggtactataaatattgtatattttttaaaatccaaaaact

SEQ ID NO: 46508 - DNA, 652 bp, Zea Mays
gccggagaaccgtgttcgtgcgcgttgagaatcagggtggttaggtgcttcgggactcggcaattgctcgccgtctttagcgttccgcctggatccgcgccacgccatggtcagtggtgttcgccctgctattgtcggtatgaaaccccctccgaagttcgccgtcgggccaattacatttttcgggtagtagaactagtggcggtgcaccgttggggcggattcgaccaacgccgatgagctgcgccgtcgcgggtgtagcttgccgccgcgtccgaggtcgggttggggaagacaggtctcggccgttcctcctggattccacgatctagattagtcgatgcgcatcggtctgggtggtcgtatctgggccgtcgattgtatggagggcgatgcagattacagctggagaatttaaatcttagccgttaggagccgatcggactgtcaaagatccctcataccccttcggtcggtcgatttatcaaaagaacccctctattatttagtattcaaccatccatccgcatggactgtgcgctgggtcttggacatcttaccccgtggccgctgcactctctggaaaatgaggcccagtccagtgctgttgtaaattgaataaataaactggaaaatagatttttaatacaaa

SEQ ID NO: 46509 - DNA, 563 bp, Zea Mays
gcggcgggttggctacacaattttgcagggacacattagcaaaacggccagcgggcagatcgcgcgctaaacccgagccgtccgatctcatcacaacggctctgatccaatcgtgcgaagggctatccttacgagctaatctcaatcgttgcccaaggatctgacggtcatggacccaacttccccaaccgagccaactcacggcagcgccgccattcccacccggcgaaccacgccggagtaacaccgacctacaccgccagtaagtaattcacgctcagaatctcacagaaccaaattctctcctacccgagttgactgggcgggttttatcccgggttgcggtcgcggtgatctagtctgccacggttcgtggctgtggtatagtcacggcggtgccaagctgtccggctcactggatgtgtaaattgtacacggcaatggactagggagtgcggggcggacacgagtaaggtgcgggttgctcaccgaattcgcgttgaggtggatgctggtttccgcgcgggtggcaaagaaggatgtcgacggcgagaaattaacgg

SEQ ID NO: 46510 - DNA, 354 bp, Zea Mays
cggccctttactctgcatattatatatctttaatttccgcatgaggtttatatatgtctcatgatcgacttctgctgttctgcagaatcgatcgaattggcatctagcttgtagtagctactagaggctagagaggctagccatagccagtacatgagcagctaatggtgtgattaaagctgatgggtttgggaaagtagaatggaggctttcctattcctatcacattcgcacgaggcatagctagctaggcagtaggctagggctcttgtctcttttgcttgacagttcctctcatgattttgattggagcatgcttcttgtttgtaatttattaccaagcatatatagtgc

SEQ ID NO: 46511 - DNA, 545 bp, Zea Mays
agaaataggaactcgcgctcgtcaccttcctccaggcaaatgctgacgtgttcgcatgggagccgtcacagatgcctgggatccccagggaggtgatcgagcaccgcctgaagatcaaccctgacgccaggacagtgagtcagaagcctcgcaaacaatctgttgagtggcatgacttcatccgaaaggaggtccagaagctgctagacgttggcttcatcaaagaagttcatcacccaatatggctggccaacccagtcatcgtccccaaggcgaatgggaagcttcggatgtgcatcgactacaccaacctgaataaggcctgtcccaaggacccgtatccactgccacatatagaccaaatcatggagtctacctccggatgtggcctattgtcgttcttagacgcttactctagtttctatcaaatccagatgtctagggaagataggaagcataccgcttttgtaacagtggatgggctttactgctatgttgttatgccgaacggtctgaaaaacaccttgcctacatttgtgcgggca

SEQ ID NO: 46512 - DNA, 534 bp, Zea Mays
gccaaaacacgtagtacaaaaaatattgtacccctaagtttctccaaccgcaaagattctttagcctttttagttgcttcggtagcacgatgagcatgtaaaacaaaatataatgtgttaaatactactacgtagaaaccaaagggcaaaattcaacatccaaaaagaaacctttccctcaccatatctaacaacttcttctgccatttgccttccactagcaagccagacgtcataatggaactttcctaccatttcaacaacttcggtcgaagggtcattaatatcagtagcagaaaccttaaactctggtcgaatcacaaacttcacatgctcgcaacaagccttttcaagcaacgaggctactcaccatgcacccatacaagcacaaaagtctcctcgaccgataaggacttcgtcgaaggcctaaacttcaccttctatccattttattgctccgtcgacatcaccgtgaacaaacttttcatcactagaaaaggcaccaacgtgagcaaacatacttttcaatttctc

SEQ ID NO: 46513 - DNA, 349 bp, Zea Mays
taagaaacttctgcacttcgaccttacaggtcggaggtcccacattccgaatagacttgatttggtcagggtctatctctataccatgttcatggatgacaaatcctaaaaacttaccagccgacactccaaaagcacatttgcgtgggttcatttcaacccataccgacgcattttatcaaaggctttgcgcaaatcagctacatgagaactaaactcagccgatttgactacaatatcatcaatgtagacttctacagtgtttcctaacagctcatgaaagatcaaattcatagccctctgataagtagcaccagcattttttagaccaaatgtcatgacaacccac

SEQ ID NO: 46514 - DNA, 376 bp, Zea Mays
gaaaaaacgaccatgctgcaaggtgctgcagccatggcgtgaggtgcttcaagctacagcgagtcgggtattcgggtataataatacccgatccgatattgtataagacttatacgtatccatatcctccaaatcaatcgggccaggaattgtacttgtacccgtgcccacagtgtacccgccggatatcaggtacccagtggatatgttattgtagactaaataatatcatggaaaacgagtaagcaatatcacatttcataacaactgatgagcaacatcatcgattcagttcacataactacctcactacgcgtagagctggcaggtcgctggagcttggaagcggagctggcggcgcggcacggcgtcgagc

SEQ ID NO: 46515 - DNA, 673 bp, Zea Mays
atgaatcattgaggccatgaggactatgctagatgaatataagataccggacaactattgggttgaagcagtcaacactacatgtcatgcaatcaaccgcctctaccttcacaagatctacaagaagaccgcttatgaacttctcaccggtaacaaatccaaagttgattactttcgagtttttggttgtagatggtttattcttaacaagaaagctaaaagctcaaagtttgatcctaaagtgggcgagggtttcttgctgggttatgcatcaaatgtgcatggataccgtgttttcaacaactccaccattcttgttgaaatagcggtagatgtgacatttgatgaatctaatggctcacaagggcttgtttctagtgacattgcaggaaatgaggagctacattgtgaagctatcaagaagcttgcaattggtaaaatgaagcctcagagaaggacgataatgaaggaaaatttggatggcaatgaaataattgatgggagtacaagggtggtgggtgatgagtcctccatccaagtaaacccatcaacctcaagccacccaactcttgaggtagccatccatccacaagaaatgctaagtgtgttggaagatgaagaagtggtggatggtggagttcctctcgaacaagaggacggcgaccaattcaac

SEQ ID NO: 46516 - DNA, 526 bp, Zea Mays
caccttcctgccccaacaaacaactagaacaaccaagtagccctagcgcaagtaggaggccacgcatgcttctattgtggggaacaaaaccactgtgcgaagcactgtccgaagaaggcaactcagcagtcgccagcagtcaataccccagctagacaaggagcaccatagcaagcactaggaggccgtggtcatgcttacaaccgtggaaaggtgaaccacttggaggccgaatcaatccaggatgctcaggacgtggcagtaggtatgtttccagtcgaatcccatccagcaaaagtattatttgacactggtgccacgcattcttttgtttctacatcatgggtagaagcacataacatccccatagaatcaatttttgcacctttaagagttaattcagttgggggaaaagtttagtctgataggatttgtctgaatctaaggatcgaaataaggggatagacttccccgctaacctagtagtaatgggtactcaagggttagatgtcatcctagggatgca

SEQ ID NO: 46517 - DNA, 934 bp, Zea Mays
accgaataatcacatgaagagaatctgaatgcaacgtcgatcggacacgagttgcaaccgaacgaaccaagcacggttgatagatagagagtaggaggagtcgactcggatatagtagagtactactgtgccagtgtcacatgcatacatctggcggatcgacaccggcctggtacgtacagcagcaagcgaacgccgcagaagcgacaccacagctgctgctgccgccgccgccgccgtctggtgattaatagtagtagtatgataaaaaaaaggctcggcagtgcttttggcatactaggagctactaatgatgcaaacattgtgtacttaggtttgtcagataggagtacttaattataagtaactgtgaggcagcagtactgtcctaatccatggtggctttgttgtccccttctccatcacactactagtagtattagtagctagtagctagtagcaataagtacaccgcctataggcttcggtcgcttcattccaagaggccaaaacaaaaagggcaagacaacgccggcacgtagtaggctataggcagctagctcctgcacctctgctgcagaccatgcacacacacatgtaatgtttgttcaggccgtggtcacgtctcttcgcaacatttactcacccccatttactactacgtactgcgctgcacactgtactactctctaggacgtaccttcctcatgcacgcagcgaccactaattctcacacacacgcgcgctacggtagtagttgcttgcttggagtcagaggagaacggagggtacgtagaggagctgggaggaggaggagcaacagaatggtaggtactttttctccgttgggaaggaagaggcaaccggcaaggcgtgtggtgagatgacaggcagtttgaactttggagtccgtgtcaaaaagctttgaaaagct

SEQ ID NO: 46518 - DNA, 532 bp, Zea Mays
catctcaatattcatttcataaccatcattttcgaccttaattatatagtgattcttataaaaaaggataagcatgcccatttatctgacataatgatttatcagttgctggctttctttctttttctagtttatcactatgggacaaggtaatatctgatatttatatctgaaaattattcttgtgaacattcattcaggatataaacatggctctattcagccaattttgctaatgcctttacctgctacattctgatcaaccggcttttgcgtgattgtcttacttcataattatctttcagaaaatgtaactaattatgacagaaaacttcaaaaatcgccattatatttcatgactaagtaattcattattatctttttgaaatcttaagttttcattatttctgaagttcaacaattatttaattttgttttgtaagttgtagcacaaaagggtagacctggtgcagtggtgaaaaccgtctcactgagtcaccaggccgcagcttcgaagcagcctctcccatcc

SEQ ID NO: 46519 - DNA, 1052 bp, Zea Mays
attggcttgaccatattactattagcccatatatgtttctatgagaataaaactagagcttgattgatcttagcatttatatctagatgacattcaagcaaggttcacaatattgaagaaatgattctctcaatgaatgttaaatatgatgtgactcaagaatgtcttgataggttgaagatagcaaggaaaatgtttcgagggactaagcgaaggtgaaggttaaagcgacggcttgtggaccgaggtaccatggctaagatgaactaatccgctatgaagagttatattgttttgatgcatcagtaaagatgtgtccctcaataagtgactggtttgacaaaaaaacttttaaacgctgccgaatgaagggatggaacaaaggctttcgaaaaatgaataagactcactaagaatgaacaaacaacctcatggaattggggcctcccagccatggcaagcaaatcattgagtgcctcgtccctctgcatgcttgtcaagggtgaacgaagcactccatggggcttgaagggcttggaagctcaatccacatcgggttgtggtaaacctatgatgaggtcgtaggagcaggggagtcccctccatgcgactccgatccctccagatagggagaagcggaggtaggcccctttgtatggcttgctggctagataggagcgattgtagctaacagtctcaaaaggcataagggtgtcattagcagtatgactatatcctcctctcggaccacttacggttcaccagctatggctaagtgctctggtaggacaccaccactgttgccccatggtttgaccaagcacaagaatcttccatcagaggggaaggtgacctcgactgcactcccacgagggttctcctcatgcagggagcaatggtggaaaagcctcaaatccttctagcaaaagagaaaaaatgggtacttgagaacaataggcatgagagaggaagaaaagaaaagggtcgcaccctatccctctcggccttttaaggagcgctttgtctggctctagctcctaaaaacgcttctg

SEQ ID NO: 46520 - DNA, 1194 bp, Zea Mays
taatatagttattttattcaacttctggaccggggccactatttccaggaagatcagggttcaaaataagaattctgggacctatccgcaatactctttatattatagtggacggcggattaattcatcgaaaagccgagggcctacttgcaacaccgcacggccgaaagggtacgggccaactggggccgcccgatgaaggctcaagggcccagattagattcagaactttaagcgaaccattaagcgttggtggccgcccgatccgagatctacggatcggatttaaaatacccaaggtggcttcgaatgcgcccgatccccaaccaacggtccggatcgacctcacgcagaacgtttactcagatccaatctaagcctttgatctaccgattggtggtcacgatttaacgcagcaggaggtatacacgactccaaatctggtgcgcccgttgagcatccaacggccgaggtcgaaccaacctcccatcgtcctgagtccggtgccgccgacgaccagcgcggtggcgccatcgccggtgaaggtcaggacacgattctagcgcgtaaactctcagagtatcggtgttacatgcgaaggagacgatggcgaactcaagagaggggcacttaccgactgtggtgatagagacgaggtcagccacgacgattggcggcacccgagctacggcgagcaattcaccgagacttggctacgccccaagttccgatgcccactgtaaagtctccacgaagctcgagggatgttcttaaacccgaaagcgagaacgcgacgaccgtgtaagcttgattaccctacggcggatctatggtggcggcggcgctctcgagggttgatggaggatggctcaggggagatgccagggcttatatacaaggggtgatcccgcagcccgcccttcaacaacccgagcattgcgcgagagatacggaaaatccgttgggattgggggcgcgacatacggagtttgagccatgaatacacgcgttcggttgggtttgacggaaggaagaagatacaccggacagacggggcccacatgtaagcgccacaaacgaaaaagaaaaggggagagcgtggagtgggctggtgcgggtgaaaagtaagtgggccggcgggcgcgacttagccgataggtgggccgagcagaggaagaaatcggcccaggagct

SEQ ID NO: 46521 - DNA, 419 bp, Zea Mays
cgcgtgggctgctcctgtgtgagaaggaagagggaaggggttcatggtaggggtgtgcgattgtatagaaaggagagggtatgtataaaaaggagagggcgcgagaggtggttgtcaatttcacggcggctcttgtcctggccgagtgagagagacagctgcgcggtgagttgcatgagacaaggttagacagagttagatgggtggtagacagggttagataaaattagacgaagacggtcagagctggcccgtgggcccaagatgacgaggtcgacgccgaagggaaagacgaggatagacgaggatcgccgacgcgagcagcatgtcgttcgcgggaagacgcggttcagtaatctcgcgaaaaggggcacgagatctggaatatgttcgacgagaggaagaaatatatatattat

SEQ ID NO: 46522 - DNA, 707 bp, Zea Mays
taacccaagaattaacatttcatgtgagccaaattaagcatgagcaccaaattaacttaagaataaaagatctaccaagtgtatgtctaaagaatcatgttccaagaaaataaagttttcaaaaagggagaaatgttgaaaccctaataccaaccctaagtgagctaattaagtagaattgaagaaaaagggtaaaagaccatgaaagatataaaaacatggcctaggccaattataaacattaaattatactaaataagctacaataaagattatggaagcttggccaaaatagtttaataaaaactccaaataagcttctcaagtgagggttcaatagggatttctgaaattcagaattcagaattctcaatttcagcccttgagctaaagaccaagcgtgttcaccttgatccctggctcaattcctaatgaccccattgacaaaattgtgcctaactaacccctctatctcatgtcagaagatggcatcgggacgcgttccttggacacgtcaaacccgcgatcttctctctgtgcgcagcagtgagacaaaccagatttctcccctctctatctcttgatccagtcagcaaaacctgcaagcctccacacatagacgacaaaggaatgtcagaggaagagatctctcaacaggatcatggccataatctcatatttggagccaattcacgcttgaactcgac

SEQ ID NO: 46523 - DNA, 624 bp, Zea Mays
tttatctgatctaccattttcctaaaccgcgcctcaattaccatataagacaagggcttctacgtaagtattcccgtgactcagatttaccccgcggtggactgtgggtttattcataaaaaggacagggagtcttatgcaaaaagtggtggccgaaggggaattggccaatcctagccgcacgatctaaaatcaaccgtccagattagaccattttattacgaaacaacgcgcgatcacagacgaacgacaaccgttgattccgagatctgcgaaagagatcagttctaaaccaatgattcgcgccaaccgcacgattagagatccaatggctcagacccatcctatccctaccggtacgcagactagatcatgaccgatgcccctggatccaacggcacacagccatcctccacctcacgaccgcccagagcatggcgccgctgcccaggcaccacgacggacctcgccgccgccgggtcttcttccgatgcggcccataatttaccaccccgactaccgcaacacgatgccaagattaaaacgaatcgaggttgtaagctcctaccagccgtgacgtcgaggtgagggcggtccacggagagacgcaatccgcggcggcct

SEQ ID NO: 46524 - DNA, 852 bp, Zea Mays
aagcactcgtccgcaatatatgcctcagcgattgagcctttcggtcgtaccctgttcgtcacatagcgcttcaaagtatacactcgcctttcaattgggtacacccaaccatattgcataggacctcgccataatgcctcatcaggtacatgcacagctaaatgcaccatcacatcaaagaaagctgggggaaatattttctcgagcttcaccaaatttattggaatttctttcctcatttcagccaacacatcccttttaagagttctgctacacaattccctgaaaaatttccccagatccgatagtgcttcataagtatccttgtccaaaaatcctctcatggcagctggtaatattctttgcaaaagaatgtgacaatcatgtgttttaagcccttgtaatttggttccctcagtatttcaacatcttgatatgttggatgcaaatccatcttgaaacttcacttcccgcaaaaaatcacaaatggccttcttatattttgtgggcaaggtatatcttgcataaggcatctcacatgaatctacattccctctaaaatgcaactcctttctaatacccatatctttcagatcaaacatagctttaattgtatcctttgtcttcccgggtatattgagaattgtcccaatcaagttctcacatatatttttcttaatgtgcatgatatcaagattatgtctcagtttcaaattcttccaatatggtaacttccataaactaaccatgcgactccaaattaccacatgatccttgtccaaattagaacatttccatttcctacttccttgttgcttcccaggcctaacatgtttgactctctccaattca

SEQ ID NO: 46525 - DNA, 600 bp, Zea Mays
ccgatgatgagcccactgtactgggggaggagaccctacaatacgaggcacaccaacgtcgaaacaagcaccgtaacattcgacttcaccaagagaccggggaataggatctcgctcagcttgtatcccgggactactatggtcaatgtagtgcttaaaaatttgtgtggaaagtgatgtcatcatacagtctggtgccaaggtaagttctttctgcgaggtctttctgaaagtttagctgtgtaaaattttgcattacttattggtatccacaagtttagtgcacttcattgacaaaacatgttgttctaggatcatgcattgagtcgaaactctactccaaacatatgcctccaattcacttgttattcaagaaattgttacctataggatagtagtagtgcttaagctttgtagtacatgttcaaacataaaagagcacacttttaactttacttccaagtatttatctcataataaatggagatacaacagtcacattccaacaatatattgataatatagtagatgcctattgtcagcagattatttaaaatcattgacttttgtgtatctatagtttgtcttgtcattatctct

SEQ ID NO: 46526 - DNA, 1330 bp, Zea Mays
ggcgcggcgagcctcgacgtctggctgcgggggtggatcgtcgtcttggcggtgggggtcggcaggatcgacgagggagagtggaggtgtcccaaccatacccggcgcacagggaggatgcgcagaggtgcagcggaagagtgagaggggaaagactagtcccggtctcgtgataccatgaaagaggatggctgggaaatgattattggattgattattgagggagcccaaggctcagtacatataggcaaggatgtcccagaaacaggaaagtgctaatctagagaatcaggaaagtgctaatctagggacaccttgccaatcagatccaatactaccaaaaagggagagaggctgcagccgccactgcagcagcaccctctagggttgcagccgaccaccctcctgggccaaccgaacaccctcaaggcccatgggcctatacagcatgctaacactgatgataggccaaacctttttgtaaaatctacctttgtacccatctggtgtcagaaggaagtgacctgatggtgtgccaaacctcctcctcagtgaccatctgctcaagttcttggaggttcagaggacatctatgaaaagcttccagattcagggctgaaactctgggagggaccattccaagcagcgaattataaaaatcccaaacagcctcctttttctccttttgatcaacgattattctgttctgtacctggatttttccaataaaattcttcttcttcctatatctggcgtgctggtgaaaatattcagtgttggcatcactttctttcatccacagcagcctactcctcaagcgggctatgattctcgccagggaaaccaaggccagataatggtgttttaatcattgtcttagccactcttttgtggggatacggatctggaatctcttgcaatttccagcctatgaagaatttctttagccatcaacacctgtctttttatgttgcccacctttttctgactccaagattgcagatgcttagacagcctctttagtttcccagcaaaacactgcagagggcagcagcactccaaaggttgcaaccaagaatgctgcacttcttccataaaaccctccattcttgtccaaaaactctcaaaatgaaagctcctttttccttgtatgagctcatgtaaccctagcaagagggggcagtgatcagaatatacaaagttctattaattcaagcttgaggggctaacagtccctaccatttaaaccagtcaactttccttatgacactgattcttgccatgccttcaacaagtactaaaccttgccgctgtgccttgctaactgaaa

SEQ ID NO: 46527 - DNA, 1210 bp, Zea Mays
tagaggcccaagcgcatgaacgtggtaagtgtaaccagacccagaagcctcccattctattttatgtaagcaggaagcccaagtgatgcctaggaagtggggcccctaggccgcatagggaagatccgccgcaccaggacgctgttaccccaggagtaggtggaaggcgatatgtttttgcaggatacgaaccacctccaaaaaagcacaagtaacaggaagggtggattaactagccagtcacgcaacctgcacgcgacgtggcgagcgggtcgcatcatgtctcgttagagccacccacaccaagcggggtcatgatggccaatccttccgctacgccaccctggtaagctatgccatgtcaagctaggtaaaaaaaccaaaactcgccccaatctcctgtgtagagcaaggggtgggctaagcaagctcctagagagtcgcaagctaggtgaccgggccataggtcatttgctcagctccacatccaaggtcgtacctcacattctcctgaggaaacccagctgatggggtggccatgaggcccccctttggtcggctaggccaaccaaaggactgatataggatcaaataagaaaggactcgataagatacccccagcgggtcaaacacccccatcgatatcgttcatcgagagatgccctcgcaagaggatgatcggatcttacatggatgacccgcttgtagctcgatagcccttcccctgcaacgactaggtcaggggaggaaggccctctccttggaaaaattgaaaggagaaacattccaaggggaagcacgcttgacaaaacaaagatggcaaacggaggaagcaagccaggaacgacggcaaaacggcaacaggtagattctcgcccagggtgtgatgaaccgtcgcaggaaagggcccgcccctcacactgcatatacctccaagcaatccacatggattacttgggggctcgggcgccagcatctagcatatgcgctcgcacacacccgagacactggccatcaaaagtgagccaagcagtggccaaaggaaccacgcccgatgcatgacgaaccatcgcgaaaaagggtttgtcccttacactgcttaagccccaagaaatccacatagattactcaggggcttggggactacgtctagcagatgcactcacgtgcacctagaaaggcaaccacacagccagaaaactaggaaatg

SEQ ID NO: 46528 - DNA, 429 bp, Zea Mays
agcgcgtggatcaagcgggtcaccgagaatttctcgtcggggctgcttctccgccgcggcgctgcctgtgtcgtgggcagcatctacggtggcccgattcctcggtatgagaccctcatcgagctcgttatgttcccaatcatgcgtagcacctactctatttggggatcacattctagggcgccttggctttgttcgccggcgagctcagtggggcggtgcggcaccgccgtctctggttgttggcagggaagagggtgatggccttgtgaccgtcaattttaagatgagcggtggaaattagacacgggtatacccattcgatccttagatccgcgccgttgatcatattgtgtgcagccgggattagctggtggcgtaccgcttcggggatcggatcgggaccgttgatctagttggttgcggctc

SEQ ID NO: 46529 - DNA, 590 bp, Zea Mays
attggctctcggtcactgttggatttctccaccatcgttgttgggtcaccatccgacctgaccagggaactccatgcgacggatttcggtgagatttcccctcctaggaccgattcattctcctctacatgtaccgtgcttagaagcgaggttttgttgccggggtgccgtggcggagctgtgcggcaatggcgccatggcggtgcatactcaccgccggggtgggatgaaggatggagagagagagagagagtgaagcaaggtggtcgccgtggacagtggatctagggttcaacggttgggattagattggtctcataccctctgcattttttatctcggtcgtggatccggaatcaggcatgtaggaatctgatccggttattttaaatctagagcgtcgactttagatccaagggccaagactgcgtaccggttcagggtaggggaagtctaatctcggccgtcgaagacagatcgtgcggcccagtcgcgcagatatctcttgggccggggtatatttcctaaagagaccctataattttctcgaatgaacccgtggtccatctacatgcataaaccaatacaaa

SEQ ID NO: 46530 - DNA, 654 bp, Zea Mays
gtcgcgaggaaaggagagggaaaagatgatggataagagatgatctaaataatattgtctattggatttgagtgggtaaaggaaaaaagtgttatccaccgatctaaatattggttttgatgatatagcaagtctgatacaattattatacagtgtatgtcgaggccaacggagtatttatagaagtacagtataaagtgtactgccaacacactgaagcgcattcgccgagcttttcttttctttgtcgtaagaaccatgtataatctggcctaaacccgttcagtttccgtactgttacgggtccctgatcccgatgggtggtaccaggttatgatacatcttatttgattttaatcctcacagagtctaatgctaagattggttattccttttttttgttctttgtcatcgacagatttgcttatgaaacattggatgtctatcacaagctacagcaagttggatcagaccactgaaggaatgaacaaatcagagatgagtaaagatggagaaccagagactaagagcaactccagtagatgaccaaaagaagctctaagccaatatttttgagggttacatggaaaatcattccttcagcagctccccaaaatattttggaaaagtagcagagcccgaaaacatcccttg

SEQ ID NO: 46531 - DNA, 504 bp, Zea Mays
aagaaattttcactggcgatctgagctagggacaaatctcatgacataacacaaaatagacaccaggagtgtcacacttcaacgacaaatcgatgcacaggcaagcgaaggccagcagtgaaaaatgcttcaaaaacaaccaactccccaaccagctccgggacctcctcggttcctggagcacacccacaccatccccaaaataccctaagcactgcatctcatgcacgtggccttagtaaatccttgacgtcctgaatcaaccgtttgccattgcagacaaatgccgccaaatcactaactgttttctccgacgacggtgcgctcgacggcgcagttgcggcggacgatgacgaggaagaagacgacattacatatcgtctgtagttgcgaatggtctgcttcacatgggccagttcaccggtgacgagaagcagaaggagcgcatcaactttttcaaatctagtaaacgagtgtgtttacgctagcgtgtgaaagtttttc

SEQ ID NO: 46532 - DNA, 1537 bp, Zea Mays
acgagagagagagagagagtaagcgagaggtgacaagtacgtgatgagaccgtgaccatctaccaatactacgaacaatgatccactgctcatcgctatttatccattaacaaacgcatgcaacctcatcctcaatctctgcagctctccaaaaaagcaacgtgcgtgcgtgcgggagaaaatatcgcaagcaaggcgggaagcttcaattcaaccatgcggctgctcaccaccgccttgcttaaacgatccgatgctaattaagcaggttgtaacacagtaacaaggcatggtttttgctctttttttttttttgcagtacgtacgagcgacggcgaggttggttggttccttttctttggtcttgtcctactacgcggcgcgcatatatgcagtacgcacgaatcttttgccaaatataacgagctgaactggaactctggacgcttcttgacactgccgtacgtgtgacgtaactcctgattgattgataggtagatagattgatatgctgaacgcaggggagctttgcttgttctcgtttcagatagcttttgttcgtcagtacagtaggccgagatccacaccaaactgtctgcctgcatatgtactgtctctcgacgtttgttgctagctatatatgtacacgtacgtacgtgtatgctacttctgaattggacagctaagcgcacgtgtactgctctcccgtacgtctgctcatgccagcctggtgtacacagcaactccgaaacattccaagactagcgccgccgccgctcagatatcggtttgatgatatatacataatacagtacacacctgaattgaaaaaaaggaagccacatcaggggtttagggtttaggggctctcggcggtaattttagacaacccaatgatcagttaacttcccgactgatgactttgctgtaacgtagtactcatcacgtacgcgcctggtgaggttttcaacaaagcatcttttcccgtccccacgagctcttccaaacaccgcgagaacttaacgagctccgcggcggcggtgaacaggtaggtgctctggtggccgttgtacgtacggtagttttatcgccgtttccttctgttccagtacgttgactgttcttgtagtagcgctcgatctagcagcagcatgccccctgtactatcctggtcggtacggtgacctctctgtgactctgtgtgttcaatttctgctgcggatcgacgtcctacactcctactctactactactaccacaaccatagccacagaggtcgctaagctactgggagcagaccgacgttgcccgcgcattgaatgcgttcacaagtgaacgaccaagctactagctaggaggctatatagaggaaaattaatgtttgttcacacgcatcgaatgatcaaatccaaacgcgcgcaatgggtcggcctctagctgatgctgatctccacggctggcagctagctctagctctctcagctcctctccgggcacaaagtctcccccccttcgttcacatttcacaccagcgtta

SEQ ID NO: 46533 - DNA, 643 bp, Zea Mays
cttaatgtagtcgttgttcttggatgtaatgcttgagtaacgacttggaatcgtcgagtcgcattttagatttgcctgcatattcgtagagaaaaaacggctgatttactgttagtattttcagaggtggcaaccgagtggttctttttgcgatgccgacgttttagaggtaacagccgagtccttttgagccacgtcgtcgttttagaaataacggccgagtgattacttgtgacgtcggtgttttagaaataacaaccgagtgataacgggccacgtcggtgttttagaaataacgaccgagtgaagactggtaacgtcagcgttttagaaataacagctgagttatattgggccacgtcggccgttttggaaataacagccgagtgatgacttggcatgtcagcgttttagaaataacagctgagttgtattgggccacgtcggcgtttatggaaacaacggcctagtgatgactgggcactttttagaaatgacatctggcccgggaaaaccccatttgtactacgtcgtcgcatgcctctgcattctgagtcctagccctgcttttctgcatccagaccttctctgcttccttgtgatcttgcttctgctcagttcgctagcgagattgagatggcgc

SEQ ID NO: 46534 - DNA, 593 bp, Zea Mays
tgtgatcgggtttgtttatcttgattattgttttcctgctcgaaagcaaggagggaaaagaaaaattgccacttcgacctcttctggtgcgccgaagccgaagagagtcaaggtcctgacccgtaggccgaagccacaatttttagaatagatggctgtggtgcccacgatagaggaggtgaagtttattgaaagtgtcgaagctgcccctgccatgctagctgaagctagtgctgatctggtagaagagccggaaacaaagaaaacagcagaagaacagccaaagttgttgagtcctccagttgtgacagggttgtcaaagctatgaactgctgtaacaacaactccaaggaagaggaggatggctagctttttggatgtgttttggaatctatgaaaacaccaactcctgctcctgcggaagcttctggcgagaaaattgaagatgcaaggaaagtggttactgcaagtgctgcttctactcatgcgccagtaaggctgatggaagagagtcttccggaaaagtccacatcacctgttcccgaagcgcctccctagggtgatttggaacacattgttcgacatgcttcggg

SEQ ID NO: 46535 - DNA, 372 bp, Zea Mays
cttaaacccggttgaacgcgcctctcctgttgaactgccttttctcacaaaagttcaaagtttttattgagacttgcaggtgtagcctattcatcccctctaggctactttcattcactcaggagtcattctttgctgctcagagtcatgctaatatatccatgaggtcccttagacttttggatattgcagcactttggcatgcagttggtctagcaatttaggctcttatcacctatttgcttggtttgtctgctctgctcagtatttctgctcgacacgatatgtagtgggtcagagtcttctatgcctcagttcagattcaccctgaccgcgagtggtcccgtttcaggtttgagggagaggacgtga

SEQ ID NO: 46536 - DNA, 558 bp, Zea Mays
cagcagccacctctaaggctgaaggtccctcagtcacttccatgggagcagtgcaatccagaccagcctcctaaccctcaagaccgcgctccaaggtcgatgaggcgcgggacgctgcccgggatgaccccaacccggcatcgggcacatcagcacaaacacccatcgtgccaccatctgccggctctgacaacagatcttctggaaccatgtcttcaagagtttgatcaaagtttgccagagataattcttgcagaccaatgagggcagacaagacaggagaaggaacaccactactttccccactagctatgtaacgccggctgttcttccgaatcagagggatttcatcttcttcttcatcatcttcatcaacaacacggagagtacacccattggggtcagcttcagcagggtcacacccattggggtcagctttagcaaattcaggcactggcacttcctcagcaacaggaacagaaggaccggcaccctgatccaagctagacactcgacgaagacgtctcttcttctttttctgcccctcagcaggaaaag

SEQ ID NO: 46537 - DNA, 578 bp, Zea Mays
ctgataactagagacttcacatctttgcgataagcaaaattgtagcagccgaatttctcgtgcagcccatcttctctagcttttgtctgataatgaagctcatgtgcccggcagaagcctttggcaagcggttctgcccctggcttcggagagcccagatgtagacgctaagcctaacgatggcgttaggagttagctgatgaagataaatcccaaacttctccaaaacatccacaatcatctcattcaaaggaaatcttaatcctgctttaaagaagcttttaaagactaccacatcatccttttctggcttcggagtaatttcatctctgccaaagcgaatcagcttctttttggcttcactgaaatagcctaacttcatcaacttaggcatatcatcttcggtaatagtggacctcccaaactccaggtggctgggtttagatggcagggcactgtaatcatcttcagattcaccttccttagcatcaacctgctcagcttcagtggcaggtgcaccttcgtcagaaacatcctccggcactaccagccccgaccgtttcatcacttcggaaatc

SEQ ID NO: 46538 - DNA, 552 bp, Zea Mays
gttttacaaccgtaatgtttaacaaaatattgtgtcgtttacatattgcaaatcaatttttaattatgcattaatgaatatttttaagaactataaataccaatcaaattcacaaatcactctcttctccatgccacagaagatctcattctctttcttcctttttttgctttttcaaccgctagccgacgagtggcttgctccttttctagttgctggtgccatgcaactacaacaacagctttctagtggctgtccgcacaacaacaacgaatgctgctggccgacggcgccatgctggtggccgtccgctgctggcagcattcgcgggtagtgatagcggatgaaagaagttcgctagacttagcaggcgccgagaacctccggtattatagaggaccgtgtatagcgttcgttgttgcacgataaagttagaggagaaacgttaaatatagagttcaaaacgctttaacgttctttgttggagtgagtcttagatcgtcggacgtagagaagggggcgtgcaggggccttgtcccctctaaccctgcc

SEQ ID NO: 46539 - DNA, 1123 bp, Zea Mays
gcggtgtcatattatgtgagaatgttgcgctgtgtgtagcttcatgtcgtattgggcttgagtgatttctcacggcccatctgtggggtaacgacccactaataagggtttggctgattttttcatggcctatatatataggtaacggtccagtgatagggaaagagaaataagcataccctcttcgcgcgtgacaaagaatgaccgtcaaaactgtagagccaggaaaactggtggtttaatatagcagagaattgcatccaacgacgcatgggcaacctctcaagcaagaattgcgaataaggggaaaaggctaaaccagacacctcggagaggaggcgctctccaccgtgtccagtgtcgagtcagattgaatcggatcatgtctctttgttggacatgtcaggatggatttttcggattggatcgttttttggctttaggtcagggtggatcgggttttgggtcaatccgtgtctagaccgtgtattactatgggtcaaaagctacgacccatgtccacccattgcattggtcggatcgggttggaccagtttttttttcatgcgggtcaggtaaggtgtctgtgctcaggtttaccgacgagccagatgtcgaaaatgcccgtgagggagtgtatgacgccaccgtggatccatagctttctccctgaaaagggcccacatgtcaatctctcatggagataatggagacgtggagggccaatggtgtaataggtggcaccgttttggccattgaaggagcggaatcgggtttgttgcgagaggagggatagatccagagggatacatcaagaattaggaatccgcgtgagaaagatgacgaaatccaaaactacgggggatacccatggtccatctcttacaaatataaatcacgtggggctcggttccagcaaagggagagagagagttcattttggattgtaaagacctgttgaagacgaattcattcgaggcagttgtctgctatctcatcaaagagagggacacatgatctacgtccgagttgtaaaataggcgatggaggggagtgggaggggaccaactatatatatgtgtttaattagtatcacacgatccatccacaaaatgatccaaag

SEQ ID NO: 46540 - DNA, 380 bp, Zea Mays
cttggccaagcacataaaccttaccaaggtacttttctacagatctcaaagatgtagttcaaacaataactttagcaacttttatatttgataaaacatcaccaatagaaagaacagaaaggccaggtaaaggaaaataccttgcactggacagctcacatcacagaaaagaagccaatttataccaactacctgcgaaaggaaactatgaaactctctggatttataaattggtcactataatgttttcactataagatatgtattgttatggtttgagtgttgattggaatgtgggactgctccaaatagaattactctcgcggtcttgcccaagcaaaaaaaccaatataatcgaactacttctcatactattgaat

SEQ ID NO: 46541 - DNA, 445 bp, Zea Mays
ggcgccgctgcccgagcagcggccctccatgggcgacgtggtgaggatgatcgagagcgtgccggtggagcagtcccccgcgcccgaggaggacgtggacgtctcggtgacgtcgccgtccatcggcatcaccacggacgacggagatggtcgcctcagctactagctgctgcccgctgtactgcccagcttctgttcctttttcttgtgtgtgatcttgacatggatcttccatgtatggctgattggttgacttgaacacattcgtctcatccggtttttgcacgtctgagtctgagaatggacccatgctcactgttgaagctgcggctgtagtttacctgcttgtttggcgtgatcttgagtcttgactgatatgcatggttctctacttctctggccattgttcattgtcacacccgggttttaggggtccaaaacccgg

SEQ ID NO: 46542 - DNA, 568 bp, Zea Mays
caggaacaaggtcggaggagaagagaaactcaactccagctaatgacaagcccatgtgtgcattgtgataggtgagagcttcgaaggctagctgctgcttcttgcctcttgcatttctcttttcttgctcgcgctccaaatcttcttattgcggtggcttggcaagcgtagtggttgtctgtgtctgcctggcgacgacatttgctgcacgcgatctcttgcagtcgctactcgctacaacaaggcttctggggatgccattgttagctgattcttttcctcactggtgaagggcagctggttgcttcagctaaaagagtcgagcagaccaacaatgcaatttagctggagcatgatcagaattcttgtctgtactgcagacactgctctggggtctgtttatgcgcaacaacggtttatgagaggagaggtggcccccatctgtggccgcaaaggagcttggccaactgcgacaacgacatcctggctctggttgtaattgtagtatttgttggtaaataattttatcgaatattttgtatgccgttgcaaagcacgggcatataac

SEQ ID NO: 46543 - DNA, 680 bp, Zea Mays
tgagcctctgttacacaatataaaacatgaaataattttgttattataaaaaaaatattcagaaccttacaaatatgaaattgtttgttgggtatgcataacattaacctgtcggggtagctcctcatgtttaatcctctttgtcacaacttttcttaaaaatcttgtgtggctttcagaaatattacgcttcttcagtgctggcatgaagtcatcttcatcagaatcaagctgaattgtttcattggtcaaattttgactgtcaacatttggaggatttccaacttctggacatggattagactgttctgcagagggaatgtcaacactgaaacactcctggcttgactgaattgttatacgtttggggttatttggaggacggtccacgtgcttcatttttttaaattaaaagctacatacatatacacaatattgtaaaaattaaactgttatatatgcatatgtatttattgtgtggtatgattgaatcaatgaacctagttgttttaaataccaagcttaaaacatctgaatatactgttctctatttacatttgcatacatatactgaactgttcaatcataaggaaaaactgaatatgtttcaataaaaacagaccttgctgtaaccaataatgtattagctgtaatcatctaaaatacataaatgtatgcac

SEQ ID NO: 46544 - DNA, 411 bp, Zea Mays
attaatctcaaacaaatatgcctgtgacttaagaattggtgtggttggatgggatggtgcaagcatcgaggctaatgaaacaccgagaagctagtttagaatttagagccttatacaacatgttcagactttgatagcctgagagcattgtttagaatttagaagcctaaggtataaaggaaatggaagattgtattagtataaatctagatcaaacgcaccacatgttcaatctgggaatgaataaatcaaacttacatgcacaagaatcagcatccatcctccatccacaacttttgtaccttggcatcacgctagtactaatcctcctctaccataggaaagaccctgcttgtaatcatgtgctgcataatattcatgtttttaaaaaatacttaataccagtagaag

SEQ ID NO: 46545 - DNA, 428 bp, Zea Mays
tgtcactcttcgttcattctgtctcagttcctgtctgcattacttttgtcccacctctccaaaacggagctccttgacaatttcggttcatacttgcgtgtggttgctacataatgatccgtgtcctttgcatggtctgacttcctcaactgcaagattggtcctctacatccatgaaaggatggcctcaatacatccatgaaaggatgccctcaagggttctactgttctaggcatctttgaaacggttagcttcagtcaaatacaagctttttaaatcctgctgagtggttttcaatactttgaacatgaagataacagtttactagaaataacaagtttcagctgggttcaggcttctaatgctctaaaccattctctgttgtggcctcatgggttactgttatgtacatcgagacatgttaggg

SEQ ID NO: 46546 - DNA, 975 bp, Zea Mays
atttgcttatgcagatcagcatagcgataggcggtaagtcgtcggacatggtgcggtctctttacagtgcacatcgggtgagtctgaactttgtagctctttccgaagtgcaccatctctgcatccactgtttaatgggcttgtcacacttaagacagtgttttttgttgctcatataagatcatataacatgttgcagagatagtacttatttggatgttcatgttttaatccatatcttcatagcaaataaatgtatctaagcttcagttcagcttgaataccatgttgcaccttatgatccttgtagattgacacatttcatttcttttggtagactttcttatctcttccagaacatcaagctactgccatggggtttatcgcgctggtgactggtcatcacaatgcttcggttagcttatctcggttacttgttcgaattactatttttttggatatgcagaatgaccctcaatttctttcatttattatttgatcaagtgaacatttgttccatatgaagctacgatgctaagctcgttataatgaagatcagcacacctgatcatcattgttccaacatatccatgccaattttatattaaataagaatagccatacagtctctttgtttcatgatttaagcttgcttggcttggtgcagttctccaaagctatcattaaacatttttttaccattctctcgtcataatatgttgttcacaacaataaaatcatgatcatagtaaagtactttgaaatatgaatgcaacagtaaccattatcataacactatctacataacattagagtaataatcagtcaaatgtcaccaactttaaattttaaatgtgtttgccccaaaagaaagcgaggctgtactctagtgatgatgatgtttataacatcaaataacgtccaacctagagccgcttgggtcattttgacataattgggagttcttaggctcag

SEQ ID NO: 46547 - DNA, 523 bp, Zea Mays
ttttgagtgtggcttgaaagtgaagtcttgatctttgcaatgaatgagagttttgtaagcttgtatgtcattgaagggggtggttgtggttttatttatagtctccaactacttcctagtcgttgccacttttctaccacacgtggacaatctgcgctcctagtccaaacagtacgtccctgcaagatcaacggctggattgcaatagttagttacaacgactatatcaacgactataatcgcaatagatgcatcttcatatgttagataaagcctgttgtggatggtctagtcgtgcctccgaacggctcacgtggacgccaaaaatcattttatcgaacccggcaccttcgggttggtcttattcttcaatgggtgaacggtccacacagtgacacagggtgccggacgatactctctttttttgaactgttcatagttcatatgttagattttacatagttcttgtccgatctgatctttggtactccggatggtccggggcaagggtctgaatggtccg

SEQ ID NO: 46548 - DNA, 605 bp, Zea Mays
gcgcatacggtagctgacggtgagcatgaagaccatccaaaattgtgtcctcgatctcacagataagaaagtcgaccacgtcaaacttagaatgtgagatcaaggcaccaagaagccatagctgaatatgtgtagtggtctctctatatcccatcctgggtagcagtgttcgtctcatcagctcatataagtacttcgccgcagtggtgaagtcagctggagagcttcgcgacccatctgtgaaaggaggtctgaacagggccgcggcgtgagctgtggccggtgcaactctaccgtgagggcgacgaggagggtctaaggtaccatagcatagactatggagccgaatcgatgactctggaaatccaaagagccggcatatctggctagcatgcagagtgacatcctctctctcgaagcggaacatcatccactgatgatctatgacaatccacactgtagcataaaacactctgacccactcctcaatatatctgccactcgcggtcagtagagaaagtagtcctggcagataggagagatgcacctctgaatcagcacctgctgcgagcagaaaagcaggtagatccaatagccggtgcgct

SEQ ID NO: 46549 - DNA, 462 bp, Zea Mays
aatccatttgaacgggacgccctgatgtgatctctacgccctgttgtgtagatgcaagggatgaggtagatcctgctgtcgtgcatgtggtttggttgcaagatctccagatcttgcgagcatgtattgcgggcccatgtatttcttgggatactcgatatgtgatattgtgaggagtactttagcagtagaatttgtgtgagtccctcatcatggggttttattatggtctggtaggtgtactggagtggagtttgaaaccacagtaacttccattgttatgttggtctacatatgtgtttggtgatggaactatttgttggagtctgatgttgtagtgttgtacgttctggtgttttcccatggttggagttccaaggtgcgaaaggtgttctggtttagttctgccaccatgctttattagtttattgttacaaggactcctgaacatgccagcatttc

SEQ ID NO: 46550 - DNA, 499 bp, Zea Mays
ccgcaaatgcctgcaagtaccagaaagtcacatcgaagaagaggcaatacaaattcagaaagatctttagtactgtgagaagccaataaaaattcttgactcagcagtccggaagacccacaactcagaagtgagactctgtaaagttcagtggagcagagaaggggaagaggaagctacctgggagagtgaggactctttgaggagggaatacccttatcttttctcaaatccagtctaaatctcgagggcgagattcctttaagtggggtaggtttgtaacatcccaaaatttcaacctaaggtttggaaccctaatctctcaaccccccttatttttatctctccctaaactccaccccttaggtcatctcatcatatgcatacactttgattgttagaagcacctcacatagattatttttagcacctaagattgtttagctaattgttgttgaaaagaaaaggagataaaaagaaatagaaatagaaaatagaa

SEQ ID NO: 46551 - DNA, 480 bp, Zea Mays
taatattaaagaaatagaggccgagtaaacaaagatattagaagttacaagcccttcggcaggaatgacagtgccgaaggcacaaaaagatctcacgacgactcccaagagaaaaaggatagtcaatgtactagatgtgctggagacaataaagtcttccagcactactccgaagaagactgccgaagcgtcgaaaacacaaattgacacaaaaacatccgaagacgaagctacaaagagccagaccgtggccgaagttgggccttcagagcccgccaaggagaaatccttggaaaccggagaagaaatgaaaaaaagaggctacaaagcaaattctgcctaaaaaaattctctcttcaactcccgaaacatcttccagagtgcctgattatattgtacgacatgcttcgggcaaaaggctatctgaagaggaaaagcgagaagctcaatattatgcccagaaattaaaatatccaaagg

SEQ ID NO: 46552 - DNA, 832 bp, Zea Mays
tgagtttcatgcctctgttggacttagctatgccttagcgtgcaaaaatgctttctattccattgatgatacatctattgctttgccaccggctattgctaaccttttgtaagagtatatggatgtgtttccctctgagatacccctagattaccacctgtgcgaggcattgagcacaagattgatttaattctaggggcgagcttgcccaaccgtgctgcctacaggaccaaccccgaggagactaaggagattcagcgccaggtccaggaccttctggatcgtgggtacatttgtgagagccttagtccttgttctgttcctgttcttttggttcctaagaaagatggcacttggcgcatgtgtgttgattgtagagccattaataacatcacaattcggtatagatatcctattcctagattggatgacatgcttgatgaattaagtggttctattgttttctctaaaattgacttgcgtagtggataccaccagatttgtaagtctttaggcgatgaatggaaaattgcatttaaaactaagttcgatctttatgagtggttagtcatgccttttgggttaactaatgcgcctagcactttcatgagattgatgaatgaggttttacgtgctttcattggtaaattcgtggtggtatattttgatgatattcttatctatagtaagtctcatgatgatcatattgaacatttacgtgttgtttttgatgttttgcgtgatgcacgtttatttggtaaccttgagaagtgcaccttcagcaccgatcatgtgtcttttcttggatatgttgtgacatcgcaaggcattg

SEQ ID NO: 46553 - DNA, 336 bp, Zea Mays
ttcatccatggcttctagccctcagaatttgcaccacagcttgaaaattctgtcacataatattagagaaattaactccaatattaaatgtaattccttgcgcaataacattatggaaactaactgtgacatcatttgtattcaagagacaaagaaagagtcctttgatgactcctacatccgtcgcttctgcaacagatcctttgataagttcgctttcggaccttctattggcgcttctgggggcttcttaacaatctggaaagtctctcactttgatgctgaggtgattgatcaaaattctttcggtcacatgatttctttccgtagaaagtt

SEQ ID NO: 46554 - DNA, 382 bp, Zea Mays
tggggacctttgttgcctgactcgtcggttgcccatcaccgcgggtgggattcgatgtcgtgtaatcgctggtgagaaagtgctcctctaaatttacctacacctccgctacgttcgtcgctagtctatatgtattatgcttgaactggaattggggggatccaacattggcgccgccgggctcacacctgtgcaccgcctcggcttgggctaggggaagaagaaagacaggagccgtccattcgttgatggacgggcgagattagaatgaggctatatcaaactagtttgatgtcttggcccttagatcgggatccggtggctccaaatcaatcgcgtccattttaaatcataaccattggccttcaatccgatagctaaa

SEQ ID NO: 46555 - DNA, 825 bp, Zea Mays
ctccaaatcattttaaactttaatgggatgtttattaaaccaacctatgatgttgtgtgcatttatgcattttttagacctagtttaccaaagactgtaattatttgatgtatttcgtaaagatatttgttacaataccatatcctagctagaaaaatctaaaaacttgtatggaccattcattttggtgtacaatgttgacaaaatagtttcaattcattcggacaaagtggtgacacacatcctaagaaaggcatacatctctcatataaggctaattactaagtgagagatgttattgcaagtgagagatgtatagtaccactatgtcaaaaatatttcaaaatattataacatgatcataaaccaaactaatgtgtccatgaatagataattgcaaaaaaaacatagagacaaataaaaaacaaagaattaatataaaatggtaggcaaaacacaaaaaatgtctccttgcaggcgcttaaacctaggagctcggtctcttagttagcaggtcaaaccattgagctatgcatgtgttttcgatatatacccagcgctaatatacttaaacgcattagcctccgcattgcccaacacattgggcgccaaaaaacatgtttcgccgtcgtcactaaaacagacgccgctcatcctctatctcccccactcctcttctttctcccccactattttctccaaacctaatcgccgccgtcaggacacgaccgctgtcgacgacctgccccctcgactaggtacctcaccgccgccactaggacacatccaccgtcgacgacctgccccctcgaccaggtacctcac

SEQ ID NO: 46556 - DNA, 302 bp, Zea Mays
ccaaaccacatggttcaactccctacttctagtcgcacgggatgactgaaagtggaaccgtcctaatgaacaatgtagttatctggtttggtgatctaattttgttatttgttagaccaatgcactagggtttgatgctctcctaaaaacaaccaaagagcaactgtaagtatcagactagtcatatgacacccatcagaccatataaaatggtctgataattcactctgatcacatagctagggttcgtcgtcaggctagtactgttctggtctgacaccattgtctactatagtatgatg

SEQ ID NO: 46557 - DNA, 761 bp, Zea Mays
cgaccctctgctgaagaagttagtgctttggttgcctcgcttggggagattcctgatgacgaacggcatgttcattttgaggtgcccctgaaccctagtgatgcagagataagcgctatgcttgatttgctagctgaggattcatccgatgctgatcctgctgggacgttggtagtggcgcccctcccagaggctgatacgactttggatgttcagaagcctgtcagtgctcgcccgaggcgcccttgccgaaccaatcagcctgatccttctgttgatgagcagaagaagaaaagaagacgcctccgacgagtatccagttttgatcaggacgctggtacctcagttcctgctattgaagaagtgcctgcgactagatttactgacgctgaccccaatgggtgtacccaatccgctgttgatcccatagtgggtgccccatctgttgttgatcccaattggggtgctgcttgtgttgccaatgtggatgatgaagaagaggaaaatgagattcctttgactcggaaaaacagtcggcagttcatcgccagtggtgaaagtagtggagttccctctcctgctttgtctgccctcattggtctgcaagaactgtccctggccaactttgatcagactctggaggatatggtcccagaggacttgttatcggagccagtggatgatggtgcaatggaggtttgcgctgacgtgcccgatgctgggttgaggtcatcccgtgcctcgtcgaccttagagcgcga

SEQ ID NO: 46558 - DNA, 326 bp, Zea Mays
taaactacaacttttatatagcacatatttacgaaaaacacactttactttactagattactcacacaaccaaaactgtacatccataaaattcagtttgctagcacaagagcacttaactaaatcaccaagcaaactcatagagatactatcaccaatttcttaaattcaaatcattatgacctagttgtaaagtttcaatttatatcaaggcacttaagtatttcaagaaacatgcatgcccttgtttacttctatttttcactaattgttcttataattataaaatgtgtgtcattttagcaccatatgaaactatctaattt

SEQ ID NO: 46559 - DNA, 603 bp, Zea Mays
atcgatagttgtttatgcaaaaagtgtattggttttatgcatgagatcggtgattgtgatagtcgaagcgaatgaggagtatgattagtcctgttggagccacttgtgctgttgatgtcatgtgcataatgtggggacatgtatgtgtgtgtgtgtgtgtcgtggtgtattatagcagtggtggtgtaagatatttgattgaggtgtgtgggtatatgccgtaatatggttatactcgtgacgagaaaagatgtatgtattatgtaacacaacatttaggttgctattgtataatcgtgtgaaggatgctcatgatggtcgtgtgattgaggggtgatgtagtggcaaagcgagaagtaagtttagtattttaaatggttagttgatagtatctatcagtgttgtcatgatttttattatatagtggattgatgcatcgctttatcaatcattacattccatgactattggataaataattgtcttgttgatcgattagaggtctagtatgagtgtcatcgcagcgcaaaaattgttggaagcacatagcgttcataagtcggtccttgtcaaaattgaagaacaatccgataagatatgcac

SEQ ID NO: 46560 - DNA, 597 bp, Zea Mays
gttgatctttatggtatgtatctcatgcctttttgttgatgactcgtgatcagccaaatcaaatatacatgaggtgcgactccatgcaaacttgacaaaaatttagttgtgctagcgttttttgccttctttggggtgaatgaggaaatgaattttggtatataatttttttgtttgttcaaggtcttttgtggtggagaaggtggagcccttgatggcaatgctactggtagagacaatggtcataaagaggatgagggggtggagaaggtggagcccttaatggtgatggtggtggtggggacaatgggttagaaagaggataagaaggtggcaatggtaggtcaaaaggaagagactgggtagcaggtgaagattgacgaggtgaggatggtttgttagcaataggatctgcatgtgatgacccttgagttagggggcatgagaatatgatgatggtggctcgaccaattggacatcccatcgaggccaaaggatgaaattcttcatagcctgttcaagtgtctcaatacctttgggcccagggatgtctagcatgtcgtccttgtatccttggacgactgccgacacttctac

SEQ ID NO: 46561 - DNA, 405 bp, Zea Mays
tttcggtatttgaaacctgaatattatgtcttgtatgaattccacggctttagctgaggttaaagaagcaatgggtttgaactctatccatttagtgaatttgtcgattgctaccagcacgtgagtgtatcctccttgagctttcttgaaaggtccaatcatatctagcccccagcatgcgaagggccaagtcaccggtatggtctgcagttgctgtgctggtagatgttgttgctttgacaagtactggcaagcttcgcatcttcgaactaactcggctgcatcacttttcgctattggccaatagaatcccgacccgaagaccttcccgactagtgtcttggacgctgcgtgtattccatgttgtccagcatgaacctcatctagaagtcacttcccagtaga

SEQ ID NO: 46562 - DNA, 497 bp, Zea Mays
cggcgacaggactccaatgcttcctcttgcataagagcgagcgcacaagcagtatcaacaacagttttgatatcgtgtttaaggccatccacaaaatgcattctatctatcagaaaaccttccacatggcttgagcgtgtagacactatttctggttccaaaattacgagtcagggttcctcagaattgattgatggcaccatgtcaggggaatggtcctactgggaagtggccgagagtagcagcagctcccctattccagcatgcaaactttctaacaaaatgggtggtggccatgagattttccaacaccgagtgggtaagatcctcccaataatgacccaagcagcaggggcgctaagagggaatacctagaacactttgtgtgcagcacaaacattgtcatggcgttgacaaagttgcccattgaggtcgccatagggggtcacaacgacattctgtaagtatgcaagcacaacagcaatatgcacctctaa

SEQ ID NO: 46563 - DNA, 495 bp, Zea Mays
gtaaaatgggcaggcaaaaagtcttttgccttgcgtatggagaaatacctgccctcttgtttccaacaaagaaggcaaaatagctggatggagaggagtgaatgataagagacaaacatgggaccagatgtcagaggcacaagaaaaaatgcctggcttccaccgcaccatccagtttcgcttttctctctccttaatgccattttgcctgaccaggatggctcccctgttggaaacgtgtagcacaacatggagaggcaaattggctttggctggccatttgcatggcctgttggagctagtctaaatagggaaagctataaccttatacaaggaagactataatcagtctatactaggctatgtacaactatactttacatatatgtaacacgaacttttaaaacaaggtaatagaagcaaatagactacaagggcagcttaacacaactgttgatttggtttagtagtttattggagtaatttttatctgaa

SEQ ID NO: 46564 - DNA, 709 bp, Zea Mays
agaagccagcgagtgccgcggcccaacaagcgcttcactggtgaggaatggcgacggtgagggtaggcccatggggcagtgcgagacgtaacctgtaaataatcctggcagttgtgcggggagagacagaggatatacgaactcggaaccggctgtgtccggaggctggcgtctggcggcgcgccgtgtaaagaacctatagctaccttcaattctgagagcttcgagagaggcgacgggtgccgggagcggcgcccaactcctccccatatcagttgtcttacagttggtattcagagctggatcttccccacgattatttcaccagatcgaagacaggggcgatggcgccgtcgaagactgaggactcaatggcgcagctcctcgccaagattgaggaaggcaacagggagacccacaggcgtatggaaacgatgcaagcttctatggcaaacatggaagcgacggtaaaaggggtgatgaaggaacacggcgagttccagagatggcggccggaagtggagaagaaggtgtgggagatgaatgaagccctaaaagtcatccaagtcgccatcgagaagcaatcgcagaagcaaccagtggacacctcatcggcaccgatcggggatgcgtcggcttccgctcatctgggagtgccgtcgatcgacgcgacgattgggcaacctcgccaccgattcgttgaaaacca

SEQ ID NO: 46565 - DNA, 542 bp, Zea Mays
gacaccttacggccaccttacggcggtcgggcacaagcatacaaataagaatacatgaaaaaggaaaaactaggaccaccagagggttaaggccatagacttctaatgcctactgccccggccatgccccacaactgagcatcttgctgaatatggagcaggaccaagctgctgcaaggggaggtaccatcaaacacacatgcattcctgtgtttccacaaccatcaggctaccaagatgatagtggaattaaagctttttttgtgtctcttatgagatcgtttaatattgtggagatgaacactgtttcatgagacagcaggtgagtatttcttgcagagattgttcctttgagcagtaagcgactgcaatggacattttttgtataactagacatgcccatggattcgccttgtcatctttgatatgaatggaaaacttcattctagagactgaacatcattacatcttaggctctctgcaactataaagatggtgttttttcatgagtttacttggtttaagttatttgcacaatgtca

SEQ ID NO: 46566 - DNA, 446 bp, Zea Mays
tggcaatctcgcatccgtgtgcttttgctgagacatcaatgcgcgatcgatcgtacgtaggtgtctgatgttgtcgtttcgctgggtatcgcggggggtacgtagggaatgcgatttctaggtttatcctttcatataagtgattttgattggggggatgttacatgatactcgtgatttagacgtaagttgtctatgctgtaaggctgatcttaatattgagctccctgatactaccatccacgtgcagcttcatctgttccattgtctgaaatgcaaacttgcaaagtatactggtttcacacccgactcatccattagggatcctgaactgctgatatgcatgttcaatacctactctgcctgttgtcctctcgaatccatttactatccatgaggaatctgaaattgcagatttatcttgttatttttggatttttttcaaa

SEQ ID NO: 46567 - DNA, 328 bp, Zea Mays
caagcgtgggtgctatggatgggtgattaccctatggagctcgcagtgcgctcaatttataacgggcttaagcggtggtcggggatttggacgaagacgcgcggcggtcggagaaataggaggtcactggcgcagttgattcgtggagaataccgtggcggactcactggtgatgatcggatggctaatgtgagtcacggcggcgcggttaaaagctagagacgtggcgcaaggccgtgaagcggctgtctccggcgaactcatccaaatcagccgtggtctggtcgggtacggtggccggaataaaataatggttggagtgtttcca

SEQ ID NO: 46568 - DNA, 350 bp, Zea Mays
aaggccaatgtagtggcagatgcacttagccgtaaggtttcctgtcactgtcttacggtgaagacctctgacaatacactatgccaggagatggagaagttaaacctgggaatgatccaacaaggagccttaagtcaactaaagcttgaggcagtccttttacaaaggataatggatgctcaaagggataatgagggtatgaaacacatccaggagaaaatagaggccggaaaagccaaatgtttcagaaaggaggatcaaggcattgtatggttcaacaaccgcatagttgtgccaaagaatgaagagatccaccagcgaatattagatgaagcacatcttagtcgcta

SEQ ID NO: 46569 - DNA, 715 bp, Zea Mays
gaaaagaagaaaattggtttgctgccaaaagacaacggactgtccggtttgcaccggattgttcggtggtatttatagcggaggtcaggaaaacggcgagcctcgggaaaaattcagcaggtagcaccagactgtccattatgcaccgaacagtctgacaacagcggcaatggtcacctgcagcacagaacgactactatcagaggcaatgtacattgtccgctagcgcacttgacatgcactgttcaatgtccggtgcaccacctgactgtgcagttattgctacttttctccaacaactatttgagtggttggggttataaatactcctcaatgtaacttgtttgcatgaatttacactatcacacgttgcgtccaaacctagtagatctatttttctcctccatgtctcacctaacaacaacaatgtaagataagtcttgtttcttacatgcgcaaccaagcaacaaccacaaacacttccttctccttccttcctgttgccatcttgcatgcgtaactaagcaacaactgagtgcttcattcccctccttcctgttgtcgtcatatattaatctcccaactttgcaggttcttacgcatcgccatggaggacctagaggatgaacttgccatcctactggacatcgactcgccagtcgccaccgccattgcgtagacctattttcccccacgtctcgcctaacaatctctt

SEQ ID NO: 46570 - DNA, 410 bp, Zea Mays
acgcgatctcgcgtggtggcatgcgatgcgatgcacacactgctccacttcctctctctctctctctctcgctctttttgcaatctttataaaaacagcacggcacacagttaattaaacaactgacgtcttttgttgcatgtgatcgatgattagctagcgtctgaggcactgagcacaggcaaggatatgatgcagcgcgcatctgccggcttttgcgcaattgcaacagtatatgtgagagaagggaactagcgctagcggaggcctttgattagtggcgggacggaatcgataaataaactagtccctgggcacatggatcaggcagcgcgcgggggggtggtggactggtggtagtagtggaccacggatccgataaaatcggctattaaatccggaaaggcccc

SEQ ID NO: 46571 - DNA, 543 bp, Zea Mays
tatatatatgacccaaaccagtgtgtaagacatccaagagataatcaacaactcaaataagctagagcaacatcccaacacctccaagtgattcaagtgcctcatattatgtaatgtgcttagagagagctttcacttgaatgatatgagatagaacggttgtgtttgagctgaaagaagagtgtgtttctatatttgagctttggagctaggatcccatttgagaaagtgtaaagcgggcaagaacctccaagttatggagtgccttgtggagactcggtctcaccacttgagcaaagagaaaagggactcaagataatcattggatcacttaagtggaggaaagggttgagaaagacccaatcctgagaggactccttaacaaagatgttggtttcaaatgaaaactaaactctagaaaattaatcatcgtgtctcttgtgctttggcttttgctatttgttttcctgtcctccctaaagttctattgtgttggtattcacttacctctatgatattgcaaaaggtcattccatacattta

SEQ ID NO: 46572 - DNA, 510 bp, Zea Mays
ttttccatttgatttttcttaggttttctatttctctggactgggtgcacgatatccagacaacacagaggtctcggggtaagaattccaagacacaggcaacaatgctcgggacggtgggttagtttctgtattctgcaggggctttttaacaaaataggcatggtgaaggggtacgggataactctggccgcccgatcaaaacccgacgggtgcgattagatctatcacatcatgaagcggtacgcgatccagtccctcagatcaaagaccaagggttaggatttaaaacgcgcccgatccaatccgttcccacatcgaagatccgacggctgaaacaaacccaagccgaagcggtacgctaactctaatctacgccatacatccaaaatccgacggctcacattcacccccccttcaggaaaccagcgcacggtggtgccgcctgcctatacggcggcgaccatggtcggagatgacccgtacgacacccagggacgctacctctaa

SEQ ID NO: 46573 - DNA, 538 bp, Zea Mays
ctgcagcaaaaccggttgaaccggttttggtccgctaaccagccatcgcctcctcctttttctcctccccttccttctttcactctttaccctttcatttgtgactgccgccgtcgccttcacttttcctctctctctcacacacacactcacaccacactccaaatccctttcgagtcatcaaatccttaaggagtttgttggagatttgttcctctcggcctcctccatcaactccttcctcttcattgggatttctgtggttgaatcatcagatcgaggtattgtcttttcccattttcttgactcgatctaaaccattcttgattatcgtgtgtatcttttcaaggatactgtgtagtttaggtgcttgccacacttaaactgttttcttttgtctcgagcattgtttgagtttagttgtttggtattgttcgttgtagttgaaccgctcacatgaacggttgaagtgcatgctcaatatcatacgtgtctttactcaaacgtgtttgttaaaatccttgaacatcgatttcct

SEQ ID NO: 46574 - DNA, 555 bp, Zea Mays
cgcataataagaaaagtcagtaaaataaaataaagatatccatgggcaaaaaggtcagcaagacagagcagcaagcaatatgagtggagtagtacgtctggcctgttattattaaccaacctaacccgtgccttggtctgtctcgtctttgtgttatctaatgcggtggcttggtattattatagtatcacacgccttctggccccaagctcacatctccttcttgggcgtatagcttgcattgcatgcctggagctgacaatgcctcggggcaagggcaatggagcatgcatgatgaagtgcacaagcagcagttggtgcagatcaatatcacacagatcatcaggatcagttgaactaccaatacaacatgcagggctccagcgatattccatttgcttgctgctagctgcctagctactctgcgcgcgttgtaccgctatgaagatgcctctcgtccgatgtgacgtgagaggctcagtgatgggccctctcttcccccatgatttcatgaacacattttttttacagggaagcttccaatggctggagctc

SEQ ID NO: 46575 - DNA, 599 bp, Zea Mays
gccggggccttacaacatgggccggattgtacacgggccccttcttgcattgagggagacaaagccttggggacttcatggtctcggtcatctagtagccaaagtcttcgatggtcttcgcctcgactcatcggatcgaaggaggcacttgggccttcgcatgggcgatgtccgcgggccttactagcagagcctattgacagggccttcgatttgtgatacgtcgacgtggaaatcctcgagcgagggggtgtgctccccttcgccccaacaatatatacaagactctctactataaagaactgagtcatgtcatttgtctctccatctccactgatttgccactgagcactacaaaacttaataaaaggaatgggcaccctgtaaatagcgttctcatgctcggccctattttaccgtgctcaaaagcgctcgccgctacaactcttttttactctatagtttactccaactcgatagagtactacgtgaggttgataattgcgagcgatctaatggtttcattcatctggtctatgttaccaccacgtcagcagtctcctgcgtttttattttattctattcaacggtcaaaactt

SEQ ID NO: 46576 - DNA, 582 bp, Zea Mays
cggaccgtccgcgacaggcagtaaaagtcgggcagaggcagcagacttgttatttccactctttgcaactcctctctcgctctccactcgccaaaaatgtatcctttgtcgattgtgcgcggacggagaagggaagttacgcacggacagtccgacagcttgtgaaaagttcaaccgacatgtcgtcatcacggtatttcataatctcatggatttcatcaactctactcaatttttgggattattcggatttcctctctgatctagaattgagcaatagttttacaaatctgattggtgggattgttagtgctactcttcatgaatgttgtgcaaaaatttgaacgcatttggatggatattctctgcggattcctcacttcaacgattgaggcgagtagggttctatagagtcgcccctggccggtcgcggcccgtccgcctggtgggcgcggaccgtccggacctgtggcgcggacagtccgaaccctgtcagagaaatgcacttcttttctctttgattgtggtgattggtatcaactattcatctctggatgtctgtcacatttattgcagtggttt

SEQ ID NO: 46577 - DNA, 1107 bp, Zea Mays
aaaaataagctcaaagttgtgttgtcagtcactctgatgactgaatttaggtcaccagtgacattggccagattttgggtcgaattggagtaggatctagtgctcgattgaggatagttgctatagtcaatttgtagctggttggttgagctacaactttgttaaagccgaattagtaagtatttacataaaaatttgacaactaggctctgcaaagtggtctgtcaggttgactgaatgtgaatccaatggtacagtgtactggaaatatcccaggtttacagaacctcgccgccggtgagccgtgcgcccagattcgcaccaaccacggtgattcgtgcctagcgtagatggataacggagaagggtaaaaatcttggcactcggattgctcgggctcgctcaccgttgtgcccaccgtacccacttggaccgcgactggtcgggatcatcctcgccggcgttagccgctcaacgatcatgcgccacatgccttggtgtcttaccatgtcacagtagcttgtattacacacgtccggtgatcgccggtgagctcgccacggtgaaagccaccaattgcttgcgccagtgcacccccttctctctggccaccaccacaccatctcaaattcatgggccaccgctcggggatccaataaactgagcatgccatcggttccgcaaggtagtcaagcacctaatccatcaactcgtgcctcaaatcatccaccagagctcgccaattcgagatttcccccaaatcgatccaaaacaccgcgcaaagtgacctcgccgtggccagcgtgctacaggtctgatcatgtcctctgctctcttgtttcagtacccttatgtgcccctgatacttctcgacccaaccgattaggctagaacccattagatcgccgggaacgcaccatgctgtccagtgatcgcgctgtcaccatgggcattatgatttagagctcaaatcttgcaattaagtgaggggaaatggtcgtttagggttgaatttggtgtccaacaaaggggagggctagtcgttgcttattctggccagtacaagctcgccgaagctcggaatggcgccgttcgccgtcgaggacc

SEQ ID NO: 46578 - DNA, 883 bp, Zea Mays
ccgactcgcgcgtgcctctacgcactgaccagtggggtccctgcgtcagctcttccttctcccccgcaacgaactgcgcagaaatcgccgccattactgggaacgtgaacgacctccccctctctccaagccgggaccccgtgggataaaggagcgctcccgtgacccattcttgccctgccctcttctcgcgcgagctcattttccccagaaatgcaccgccaccgccgacagtgctgcgttcgcggaaagggtgagatctgccaccatagacccagccctgtatcaccgattggtggccagtggggtgtcgggatcgttcattggagtgtggggattgttggtgtgaagtattacgctcagtcgtccgcccaaacgcccgggattcctcgccatcgctgcatctccgccgtgcgtcgcaggtggcttcgttcggtcctcaattccggtgagtaaacctcataccacttacgcccgtccgctgcgatggtgtagcacccgacagaatcaagaatagtgcactaaatcactgggtccatgactccggcgatggcactcgccgcgggttagtgtgcgccgccgtggcccctccgtcggagttgagggaagggtcctgcaccgttggatcattgatggacgatgtagattagattctgcgtacccttttgccaggttcgatctggtccgttgatctggatcgggcggtagatcgacgaccagcgatggatctggatctcataaaaccgtaaccgtcgatctcagatcctgcgatcctggatacgtatcggttcgcgagaataataatttaatctggtgcgcacatcttggatcggacggtctcgtttagatcttaccccttcggccctgaaaacttgcatgagtc

SEQ ID NO: 46579 - DNA, 341 bp, Zea Mays
gtttcaagtgcaacatgacaaaactaggaaagacatcctacacagtcctcatggcttcgtgcaaactcaggcattacttggaggcatacaaaataagaatccccacagaccgaggtctaggtgacctattcagaaaccctgaaccatatgtcagaataaaaagtgggcagccgagcttttcggctacaacgtcacattcgaactaagaacaacaataaagtctctggtcctcgccgacttcatagtcgactggatagggccctcggtgtcaaaccaacaaagcacataaacgatttggaccatccactacgatggcgcatggtgccatgtgggggcaggtt

SEQ ID NO: 46580 - DNA, 1070 bp, Zea Mays
cggtgaattagtcatctatgtagtgatctgtgcaagtgtgtgtgactgggaagttgtggtctgtataggtgtaagtgtgtgacctgtcatttgtggtctgtgtaagtgtaactgtgtaggtgtgtgtgatctgtgtaactgtgtgatctgtcatctgtggtctgtgtaagtgtaagtgtatgtaagtgtgtgtgatttgtcatttgtttaatgtgcagctcttatctgtgattttgtaagtgattttgtgatttgtggtagataatagagtggtagattaagagtgcagctctaatctgagtaaccatatagttgtgaacttgtgatttgtctaagtgtaacaggttaagctctaatcgtgagttaaatatgttttgtgttttgtcgggctcacgcgggcataggctactacatgggtcgtgcttttcaggccagcccagcacggttaggcctctatcgtgtcgtgctcgtgaggggtaacggcccgtcgggcggcacgacaagacacgtgccgggctcaaacgagtcggaccgaaacttactcgggtcgagccgggccatgtcgcctgttggaacatctatagctgtgtcgtccagcgtctccgcgcgaacgccggagccacaatacaatacaacttgatacgtcatgtagattatagtcatgaaatgccccctagatggctaggttccagacttatttggttcgtggctaactgtaccacactttactcaaagttagccgaccgaattgaataactaattttagacaaataaaaaggtaaattatcacaaattgggcaacaaatgaaacatgccttcgtggttggcgggtgcaggcttggcgtgtgggctaaacgctacaccaattttgcgtaatcgtaacggcagccacgtgcgcgcgtttcctgacaaccaaacagtttctggcctctctcactcagactcactctcaaaaataaaataaaaactggccaaactcagtctgtttaataaattaatttgatgtcaaaactgctgttgttgttgctaccgcagtaccgtgtctgcctcccaccttgactgcagaatcc

SEQ ID NO: 46581 - DNA, 568 bp, Zea Mays
ccctgtcccactatcgtggactctgtcggcgattcggtgactccgttggcgaccaaaccctagccaccaccctccggtttcaagtcccgccgtcggccaccgcatcgcgctcgtcgcctcgtctatgtggatcaatcaccggcggctcacaggatctccctcttctctccctcctgtcatccacggaccacgtcgggtacggtatggactagctctccttcctcccttcctccttaccgtacatcatcgttagctggtggtctgctctgtgcctccgtcgttgctgtgctcccgacgtgtcttgtggttgtggatctcctcccaggcagctaagtagctaaccctaaccgtaatccctaagtccctaacctaaatcgcactcagcttctcttaatcctctgtcgttttggtcaagtcaccatctctgctggccagatctccatcttcctctcttctccggtgctccggctgcgcaggtatttagtattctccatcttcttctctactgctcgactggtaattcttctgatcctctctaatcctatcttttgttctattaactattaag

SEQ ID NO: 46582 - DNA, 586 bp, Zea Mays
gttcggtgatgggagagaattagcccaggtaaattgacgcccaaacatctcaatctctctaagatcaaagctatcgatgaccgcattgaacaaaaatggccagtagtcacaatatctatcattattttttctttgctattgcgcaaaatattgaagtctccgcctattaaggttggtaaggagttatgatgtcatgttttcataagttttgttaagaatgctgctttatggtcatcttatgccggcccaaagaccgccatcaggatccaactaaacttatcagatttgttgcagagatggaattcaatgtaaaactccccttccacaatcaatgatagttcaaatgtggattcccgaactgctaggagcaaggagcaaacctctagatattccttttggagatagacagtgccaaaccaaataaactcccccaacagatgagccaaaatcgattttgacatatcttgctttctcgtctccataactgtgacaaagtctagtccattgcctctgactgcgtcggagatgtatatgtatttatccaagcctaagagacctctggtattccagaacatgcctttaattt

SEQ ID NO: 46583 - DNA, 435 bp, Zea Mays
cagatacaaaatgagatgataccggtaaccaagtgaaatgtcctatacgtacctacggatacagttaaaggaggtctagcctgccctgcagctgcggatgactcgtctacacaataaaccaaacaccggccgcactctggtcaaaaaggaggtatttctagccttccctgcagctgcaatcctagactcgtgtacgcaataaaccgaacaccggccgcattctggtcaacgcacgttgagagcacggttgtacacgggtagacaaccaatcacgtagttagagattgttctgcagcctggaagaaaagaaatagaaagctttgagcagttgagccatttactacttgctagttgctacgccaggacaattatttacaatacaaaatatgatttatacaacacaagactctaatgagaggttttccagcaccattt

SEQ ID NO: 46584 - DNA, 908 bp, Zea Mays
ggttccacgaaccacgcgaaccatttttttagtgtgcctcaacaacattctttttagtgtgcatcacgtcaatgacctccacatatgcgagtcttagggatgaagagtcatgacctccacgtatggattgaatggattcttcctgcgatggttcgaggctatgtccctgagcatgtctggctagcgcttttagagtgccccagcaacattcttttcagtgtgcatcacgtcaatgttgtgtggaaggagcaggtcatcataataggggagcgagtcaagcctgacttatgtgtccacatatgctgctcaccatataccacaaaaccaccttctggattggccacgagcctatctatttgttgactaattttggcaccagtcatcattgcaggtgggcagtctatcactacgacacctttcgtaaagttcttgatgtctaggcggaatggatggtcaggagggagaaattgtcgatgtttatcgaacgacgaatatgtgccaccctttttcaaccaaatgaacctaagagcttccttgcaaactgggcatgggaacttaccatgaacacaccaggcgcagaatagcccatacgccagtaagtcatgcatggcgtactggtaccaaacatgcattttgaagtttgtcttcgtagctcagtcatacgtccataccccttcctcccaagcacgtaccaattcatcaatcaaaagctccatgtacacgcccattttattccttgggtgtccgagaattatcaatgacacgaatatgttctgccttcgaaagcacacactggggggagattgattaggataacaaacatgggccaacatgtgtatggggcaacgttcattctatagggattgaacccatatgtggccagcacaacacgtacattacgagcctct

SEQ ID NO: 46585 - DNA, 460 bp, Zea Mays
gccatcctttcaatgaccagcaccatgctcaccacttctgtagctgccgcgatgtataaatacaacggctccccaggctctggggctaccagtattggtagggacaccaggtgctgcttcaactcttgaaaggcttgttccgcctcttcaaaccaagcgaatgggtcggacttccgcaacatcttgaagaagggcagtgccctctcagccagcctcgaaatgaagcggctaagggcgactaacgaccccgtaagcttctggacgtctttgatgcgggccggaggcctcatcgcctcaatccccttgatcttatccaggtttgcttcaatgccccaatgcgaaaccaggaaccccagcaactttcctgcggagacaccaaagacgcacttgtccgggttcagcttcgtgcgtgttgcccgcagcttgtcgaagaccagggttaagtcttccactagggtcg

SEQ ID NO: 46586 - DNA, 702 bp, Zea Mays
ttatgcttgttgtagggtcgaagatgaggccaacaagcacatccaaagacacgcgacatataataatttggagaactgtgaaaaatacactttaaagggctagtattatcgatgacacgagtaggcatgcgatttattagataggtggcggtgagaaaagtggcatcccaaaatttaatgggaacatgtgcatgaactaaaagagcaagcctggtctctacaatgtgtcgatgtttccgtccattcaagccatgttgctagtgtgtgtgaggacacgagacgtgattggcaatactcatggagcgaaagaaagtgttgtgtattttttgatattctccacccaatcagattgaatacatttgatctttctatcaaggagacgctctacatgagtcttaaactctatgaagatacgaggagcatctgtccgggcatgcattaagtaattccagcaaaatttgctaaagtcatcaataaaactgatttaataaaaaacccaccaacaggcaatagagctagaggcagagccccaaacatccaagtgaataatctccaaaggagaagtagaacgatgaacaaaatgtgtataaggcaactaatgacttttagcaagccgacacgcattacaaattgacgatgaattatctctagaacacgagagtttatttaaatgcaagatagaccgacctacttggggtgcaa

SEQ ID NO: 46587 - DNA, 662 bp, Zea Mays
cggaagcagtgttgcccgtcgacttaatattcagggcaccaaggctaactttcgaaagcgtagtcgaggcggaggccaccagactagaagatgtcgatgtgctagaggaagaacgattgaacacagtaattcagtcggctagataccagcagaccctgaggtgctatcatgataaagctgtgcgactccggtcctttgcagtgggagacttggtccttcgccgaattctaacgggggaaggacggcacaagttatcaccactataggaaggaccattcaccgtatcagaggtcactcggccaggctcataccggcttactcaaatggatggcacggaagtggggaattcatggaacatagagcatctcagaaagttttatcctagcaaggcctcaaaagttctcaaagaaatactatactctgtaatcgggggacttcatcatcaataaagttttcattttcaaaggcattcagattcttgacttccagctgacctcgatttgactgggcttgaaatcggcacgcttactcggcttagggtgaccactaaaccctactaacagagcaatcggcttaagtcggctacgacttaagttaatgcaacatgctcacgcttacttggcttagggtgaccactaaaccctactaacggagcaatcgac

SEQ ID NO: 46588 - DNA, 442 bp, Zea Mays
tggcctcttgcacgggcaagtggtgtgctatttggagacgaactcccatccggagcacacatacatatatcggtagctgccctgagcttctgattcttccttttgagtggtgtatctgcccctggccttattacctgctcatccctagaagaaggtactactgatcactacttctcagttagatctcaacttgttcgacctattcagtttacacatatgttagaatcatacattttctgagtgttttgaatttgcttgtcgatagacatggaagtaaacatttctcatagcatactctgggttgcagaaaattctcatacaccacatgaaactgactaaatatacaagtgggttttatggcatacatatggctagtttagaaactcaaatcctcttcaggattggaggaaaataaaggagaaattagtaaatttaatttccc

SEQ ID NO: 46589 - DNA, 856 bp, Zea Mays
caaactgcccgctatcatagacattacattatgttgtcttcttcttcatcaccatctaccgcgattgcgtcgtcgaacgcgccatcgtcggagaagacggttagcgaactaggggcggtagtggagttgttgtcgggtcataccgttgagtttgggacatcgaggattttcttgggccgcttgcaataaatgcagcatttaggttattttgggaacggagttgggcgcgctctaggagccgaagaggtcctagagcagaagggggaattggttgtctttgaagcgtttttcactgccggcttagcctgcctgcacatcgatttattgttgaggtgctacgacggttcgaggtccagattcatcagttaacgccaaacaccatggtgtccctggcgaagtttgtgtgggcggtgactttgtactgtggtgagcctttggtagaggtattcgccaaaaattattgtctccatttgcagaaaaaggtgattagcggcaaggttgtgcagtttggtacttgcacctttacgccaaggactggaaagactttgggtgaagtagtggagattgtaccctgtgccaagaataagtggggtaactggtgggacttttagttttacatgacgctggaggacactaagggggtgcccgggctgcctcgactattttgtgctcgcacttatatattgcttttccacagtttcggctgaagaagggagataagaacaaagaagtcgttcagcgtgcagctaggacgagcagtggtcgcgatttggcagaagagtttattgcgtgagaggtatggccactttctcatggctgtgatctaagtgaagtgagactgcgcccgatgcccttc

SEQ ID NO: 46590 - DNA, 342 bp, Zea Mays
cacaaacataggactacttcaaattgtccttgatggtgattacccactaggatcgaacatcttgagaactaggtatgtttagtgaggtacaaccataaactttgcaagccctagtattctaacgatctcatggtgagcaacatcaatattcatcacctcaaagtgtagaaactctatttggaaattctattctattgtgaaggttacaggaagggttactaccttaggggagttcttgacttgcctcaaatcatatcgtagaagtgcttgactcggcttaaaagaattcttggacaaccccacatttctaaaggtcttagtgaagggatggttggggcttat

SEQ ID NO: 46591 - DNA, 391 bp, Zea Mays
aaaggttgttcagagctatcgtatatccttcatcttcaacgtttttctgagccctaagcgcattgctaagaattaagccctgcaagaggcgaacagaattaagtatggcaaataaaatatttcgttttcaaatacaaaattagctcttttacctttatgctattatacgctaagctgtcatcaagctcatccttcgataagattgaaaggctatcttacagcttcgggaatccgatgcttctacctatcttccggcaaacggatatctctttattatccgggagacaatacaaaaacttttcttccccactgccattaaacactaatgccccctcgtgtattttaatttttgggcatagtgtagtgcttctagcttttcttcttgagaaag

SEQ ID NO: 46592 - DNA, 413 bp, Zea Mays
cggccagcatttgcgtttggttcgggctgcaccgccgacatggagcgctctcttgctaccgggacgactgaatcgccacaagaggagtgcttcaagggcaacaagggcgggttcagagccctccccttcatcttctgtgagttccgccctcgatctcatcttactggtcatatggcaagtaaaacgttcttcgttcattgcgttctctacaagcaagtctgtacttgccagtacgtatagcatgggatcttcaagtagttcatcttatgaattctcactggacttaatgcccaaagaattctcaaccacctcgcttcccttcgacttttaatgggcaataactcattcgttcggtgttttttggatgcctagcaaatgagatgctggagaaagttgctggattcgggctcaac

SEQ ID NO: 46593 - DNA, 838 bp, Zea Mays
ctgccgatctgatcttcggggcgccgaggctgatctttgaaaacatagctgaggcagaagcaaccaagctggaagacattgatgtgctggaggaagaacggttgaacacagtaattcagtcggccaggtactagcagaccttgaggcgctaccacgacaaagctgtgtgacaccgatcctttgcagtgggagacttggtcctccgccgaattctaacgggggaggggcgacacaagctatcaccaccatgggaaggaccgttcatcgtagcagaggtcacacagccgggatcatatcgacttactcagatggacggcacagaagtggggaatttgtggaacatagaacacctcagaaagttctacccttagcgatgcctcaaaaactcttgaagaaaagttgtactctataaccagaagatttcatcatcaataaagctttcattttccaaaggcgttcaaactcttgattgacaactgacttcgattgggcttgactcgaaatcggcatgacttgacttagggtgatcactatgccctactaacggagcaatcggcttaagtcggaaatgccttaagtcggtgtgacatgctcacgcttacttgacttagggtgatcattatgccctacaaacaaagcaatcggcttaagtcagaaatgccttaagtcggtgcgacatgctcacgcttacttgaccctaaggtgatcactatgccctactaatagagtaattggcttaagtcggaaacaccttaagtcggtgtgacatgctcacacttacttgacttaggttgatcactatgccctactaacgaagcaatcgacttaagtcggaaac

SEQ ID NO: 46594 - DNA, 331 bp, Zea Mays
aaaaggactaaattgcaattactttactgcttagactggatgacgagttaattttggtacaacttggggtctttttagtaaagatcgcacgacgaaggcgtatgggatgatctgtgccgccggatatgaagtgaacaacccagattaggacttctcgacgaactaatatgattcctggaacctcggatcagtgatctacggtctggattctaaatgacggagatcgattcgtatccagccgatccaagatcgacggccgaggcacatccaatcgaaacggtacactagatttaatcaagaccgtcgattggctaatcaacggccaatgact

SEQ ID NO: 46595 - DNA, 624 bp, Zea Mays
tttggagaccagtaaaaaaatctttgggccgatatcctcagccgcggcccacttcctttttcctctcccactccagcccaccgctatcccttctagaatcccgcgtgggctgagctctagaatgaatcatgggccccactaggcagccactctaccggattcatccaaatgtgtgcggacacctgacgccaacctatgggcccactcaacctgtgacttccgcacgcatatcacctcgacattaacggttggaccccacgggacaggcgtcccctctcgtatagctcaaacccagtcgccgccaggtgggccgcctccgtcagtttgatctcctcaaaccggactgcggcagtcgcggccgagatcaccgggtggctcccgcggacttgctgccacatatctcatcaactgttaggcgcctaagaccgaacaccgcacccggacctcgtgtataaatacgtgagcgtggcttggttatcgccataaacaaatcgggctaggggattttaagaagcaccaccgccagggttttgtggtgataaccgtgtgtctgcaccgttggctcggaaggattggtggggcgcaaaaagggtcaagatcctgggcaccggagtgaaggtagga

SEQ ID NO: 46596 - DNA, 353 bp, Zea Mays
ttcggctcgaatgggtagcgcaagctgcgacccagcccccgagggtgttgccggagatgatccggctcggatgggtagcgcaagctatgacccagccccgagggtgtccgagcgggtcctccctcttgtagttccatggatgttcacgtaggatcttctcctccacactctggttgcatggtgatagcccaagcctttggtcaaggagtcgctttagaggccagcgtacccgacgacaaagttttgggttctgctgatgacactgaattggttcctactgattcgttgcaagttgctccaggtggtgatccttcaccgagccatcagttgatatctcacgatttggggtcccc

SEQ ID NO: 46597 - DNA, 416 bp, Zea Mays
gctctccgtgtgacctgggggtgtcgcacgggtgcaacgccttcataccgtagaagaggataccccttatttagggtaccggcaagtacctacttagacaactcttacatattcgccaacactcctctgtcactgagtatgtagagcacttttctcaattggtagatcagttgaatgcatacaatctgccctcagatccactatattacacaaccaaattcattgatggcttgaggagtgatattaaatctgttgttttgattcaacacccacgagatctcgatactgcctatgtgctcgctcaattgcaggaagaggtggctgaggcgtccaagcagcaggattttaaaggatcaagtcacacatttactaaagctcctcccactgatgatcgaccagctgtgacggtgcccaag

SEQ ID NO: 46598 - DNA, 671 bp, Zea Mays
ccaccaacgaggctctcgttcacgaactcaggcaggggcgactaaagacaaccgtcgacctcctcgacattgtgactgagttcgctgatggggaaggcgtagtaggggcaatcttcttcaaggggaaaagcccccatgacgctggtgagctgagcgatgagaagagggggcattaggaataccctaacaagcgctagaggaatcacccactccgatgcagcgagggccggaggctctaggaaaggaagagacagatgcttgggcgcgagagtgcgataagcgtaaccgaccccaagcaccttccctttctatttatgcgcaggcatagagagccagaatgctgcctgagggtggaccctccacgaacagcattagaggatccacagtttcgaccgcaaccaccttaggccccgagtagggaggattgtatgccttgcaggtttcacacgcctagggcagagcgccagggggcacgatgcaagggatacaccagtaacggatgaggcggctaaccaccacatcatgtcacatgcgcacaatacagagaataggttgtttcatgtcccatcatgccacccacgccaaacaccacatcatgccacctatgcattccccatcgaacacaaatcttattgtctcccggttttcgaaaccatgacacatctagattt

SEQ ID NO: 46599 - DNA, 571 bp, Zea Mays
ctgacattcgaaccatgtatgtcccaactccttggcatatcttttttcatcgaatacttccctacaattttcaccacttccacctccacctcccaaccctgtagctcaatggtgaaggaaagactcaacaccattcaatccttcaagaaaggcatcgggcgtagcttcacttcacccacatcccagccatgcgcaagcggccacactccataagtaataaactcctccaccaagtcacatccgctactcaccttggaggcacggcgaagggcatcttcattcacatctcctttctttagtttaaagtatgggaaggcgacacagcaatgtgagcacattatggatggaggcagccccgaaacaccttcgacatccttcaatgacacaaagaacaaaaaatcccaccaattcccccacttgttttttgcacgtggaacgattttcacaacttcaccctgtagtcttcctagtctttggagtgaacgtgcacaaaccaaactgcataatcttaccaccagcaaccttcttctgctagtggaggcaatagttcttagcaaatacctcaaccaaa

SEQ ID NO: 46600 - DNA, 623 bp, Zea Mays
gatgtttcttccttggcctaatttaccgaattagatttggacagaacttgcctgatctattctggttctgaagtagccatcccagccacctgtctcgaggtcatttctgaccaaaggctattccaggccagttcagatatcagtttcttggctgtagacgcgtcactcttggcggtcagttcgtggtatatctgtgtcatgcatgggatctgatctgatccatctgtgatatggttcctgcgaaaaggatcatttagggccaggaagattcagatcttgtgtagtcatattcaattgctaaaggttaactgaactggacaagaaagaaaggtacctgccatctgatctgtgatccccagcatattggacatgaaagaaaggtacttttcgtcagtctatctgaagaagagtgcagacattcatgttctcatcttctttgccacaaaattcactcaggcaaaagaaaaaaaaacatttaagctttacacatgttgaagactatatatgtgatttaacccgtgtcgggggactctgaattcagccggtgctactgctacgcctatttattctagttcaccttcccactaactatgagctggtaccatgcgcctcaggaaaagaac

SEQ ID NO: 46601 - DNA, 664 bp, Zea Mays
ggccctagtgctttctcctgaaccactagactctcgaccgaagtctttggactttgttcttctgagaggtaggctctccacctcctttggatacccttattgttttgctccaacttattctatgtgttacaaaaatcctaggagttggagaggagggcttagtcatgggcagacatcttatctttgaagtcttggtccccctcttacaacctaccgtgcctcttcaagttttggacattatctactattagggcctactcctgggtcacgaagccaatgacaatggtctacataagctattggtggaggtctatatcttgttctactccgatagatccacgatcagatggtccagattgagtcttggatagatcgaatggttcttgggttaacattcgatatgtcctgacccactagcccattttccagtgcatggttcatatagtaaaagattctccagatcttgagcggacttacacttgctacaattatgtgcgtgtcataattctcgatatgaatatccttcttctattgttgtgtatgaatcactagatctgctttctataatcttatgtactacaaactatgaaggcgacaactatgcacgcagatctaaaatagttgtcgctatgtcatttatgttgatttcatacttgactaaatt

SEQ ID NO: 46602 - DNA, 537 bp, Zea Mays
tgtctgtgaattggtttttctggggagttttcttttttattctctcacataatcaaaccaacttgcctaatctattccattactatgttctgtatcattcttgccatatcatttttccttgtcatattctgacagaaaactggacaagtaacctacaacggaacttcgcttactgaattctttgtacaaaggacttctgcgtatgtcagccagacagacaaccatattggagaattgacagtgagggaaactttagattttgctgcaaaatgccagggtgcaagcgaaaactggcaaggtaaggctccctttccttgtgctttgcaaatacttaggttgttcatttgaataattctgtcattgttgatatgccttacacacattgttgatatgtgtagagtgcttgaaggagctacgcgatcttgaagggaagagaggaataagaccaaatccagaaatagatgccttcatgaaggtccttatctaattcacatgtaaacttctcatattttattttgcttatctacataatgttct

SEQ ID NO: 46603 - DNA, 768 bp, Zea Mays
cctaaattggccccagatcatcatgattcaccaacaccggaggttcagaagttcttcgacctcctcaaagcgtcagaagagcctcttcatgggcacaccgatgtgaccattcacgaattcgtgacacgactaatgtcaatcaagtccaagtatgcattctctattaattgttacaaagagctcatggatttgattagtgaggttcttcctacttgtcacaagattcccaaagacatgtaccagtccaagaaattgcttgaaggtcttggtatgaagtatgagaagattgaagtttgccaaggcaattgcatgcttttttggaaggaacatggtagagagcagaaatgcttaaaatgtgggaagtcgaggtacgtggagcttgtaaatgaagaaggggagaaggtggtgacaaaggttacacataaacagcttcggtacatgcctctcactcctagagtgaaacgtttgtttctctcgaggaagaccgctatgcacatgaggtggcataaagattgtaacgacagacaagatgggttaatggtgcacccattagatggtgatgcatggaaggctcttgacaactttgatccagagtttgctagcgatgcaagaaacatttgtattggcttggcaacagatgatttcacgcctttcaatatgaccgctacgtcgtattcatgttggcctgtcattgccataccgtacaaccttccaccagctctttgcatgaaatatgagtttatgttcttatgtcttgttatacctggg

SEQ ID NO: 46604 - DNA, 456 bp, Zea Mays
cttggtaagatacattagagcgtgttcctgtgttccacctgagaggagcgtgtagtgaaattattatggataaccgtcaccgtttgtttcctatttttgtgtttcgatggcaggcaacgacgaagaagaaatgatccctactgacttcgatgaatgtgttagccgccaagatcttgaggcaaacaacaagctcctgaaggagcaaatgcaggagacggtccataagtcagtgcatgataccttcattgacatgaaccttggcaatatttatgagaggctggatcgacgattgtcctagatcgttgacagacttgctgtgttggagacgcaacaacaagcaccaccaccaccacctcctcatccacgtcttcccgatgatgcgttgtttgatgaagaaggtaattatgatgaagcggccaccagagatttgttcctacatcgccgtcttcatcaaaa

SEQ ID NO: 46605 - DNA, 303 bp, Zea Mays
aggcttttttgcctcatgtaatttgtaaagtatgtacatttgttgtaataaaggaatgagccccataccacctctgccttgtaccaaaaataaggaaataaagatatgtcgtgtttccttttccattacttgccccagtaagaatttgggagtgactgctatagtaagattgaagctggatagtagagcaacaactttcttaaagatggattaggaagtcgctgcatgaaaaattaagatccaggccttgcaagttgggctgtcaggctgactgaagaaccatcccatggtacagtaactgaa

SEQ ID NO: 46606 - DNA, 1025 bp, Zea Mays
gtcgtcgatcttctcgaagagcggggcgtcaagaaagagacgggtcagccgacgtcttcggtcgagagccaggacgctggaaagggggcaaggtcagacagcgtctagcgtcgggaaggaggcggcggtgtcaggaacagggcatcagggtgtattggctccggtggcgtcaaaaaaaatggacccgatgaatagatgtgaggactagaccaaagatgagggaagttgagagaagtgcacatggcaattttagcctatccaaaccttcatgtttttatgtactttgcagtaagtaaacatttggtataagaagttataaaaaaaattgaggagggaccaatcatcgtgtatgaacagatgattggttgtctacgggagcaaaaggctggcatatacgcgctgctgcaactaaggcacctttttacctgctcgcctgcatgcgtggggaaatggagaccagacatcactagccatccatgccaatgcgagtcaaatcccttgctacctgtcactaagctccagacgctactgttaccctactcgccatatttcatgtcggtcgcgtgttgaccatgtgtgagctgataattggttgcctacgggagcacagggctggcctatacacgctgctgcaactaaggcatcttttttacttgctctctttcatgcgtggggaaatggagatcgtacatcgctagccatccatgctaacgcgagcccaccacgatggagcatgcgaaccaatcacgaattagacgatcctcgttgtgtggcgattgcagtatcaaacatgtgcgccaccaggaagttcacgacatgtttaaatgtactacaactaatacttagctgctaaaattagtttttagaccggctaaatattagctctggtgaattaaaactggcccttagtctatatatgggtgtgtttggtagggtgccctaggggtaatgtggcctggcgtagtagttaggctaacctagggttggatccaattagtcaggagggattgtttggttcacttttc

SEQ ID NO: 46607 - DNA, 609 bp, Zea Mays
aacaacctcatcttccttcggctttggaattacttcttctccagcaaagcgaatcaattcatcttcattttctccaaaataacctagcttcttcatcacaaccagatcctctgcttttacaatggattttccaaattcaatatgactaggttcggttgggcacagaatactatcgtcctttgcacttttgttatcaccccgacttcggccacaacttgttcagcttcggtgttggaggtaccttcggcagtagctccctcttgcacaaccagacctgaccacctcatcacttctgatatgggagctatctcgattacttcaaactcatctccctcacgggacaccctagcagtggatcttactctggccatttcagtgttcaacttattttagatgaagttgagcttaagtgaagaagcgcttgtttgaaagcacaatgcagagagcttcggcttcgattcaaattttcaacagcacaacggtgcaataacaatgaatgttgtgataacttctcaccaacctgtctgtttatatagtcctgcaggagaagaaggcaaacagccaaagcgtgtatactgactgaacggtagaccggccagcgctcggaat

SEQ ID NO: 46608 - DNA, 370 bp, Zea Mays
gcccctcgccatagtcggggaaaccctagatgaagactccaccattctagactctctcgcaaacaaatctaacgctacaaaaaaatataagtcctcttctgaggactcatcgtccatcctagcgaatggactcagtaattctttgcttcccgacgaccacgaatcaaagtcaggcccgctgtcactaagccctgtcgaacttcgacacatcaacggtgcaacgttttcaacatcaccaaatatttcctttcccttgcccaataggccaaaatctacttgtgcaggcccagtcgccagaacccgcgcagttgtcgactttatgtcgactttatgtattaaatagacagtgaaaatatggtcgtatcaatcc

SEQ ID NO: 46609 - DNA, 972 bp, Zea Mays
tatgtgactatcctctatgcaatagacatgggttttagtcccattaatatggtatctcgctaggttagggtttctctcccaccccataactgtcagccaccacatgcctaggccccctgaccaacactgcatccgttctaccgttctcgggaggttcgtccctcactcccgggggtagcccccacccttatgcctatatccctgcttcccctcatcctctccctaccactactactccgatccatcctatgaactaatagctcccatccaccgcatgctcgctagggacgtcggtggaccgacaacagttagctttgtatccatcatggagctagaggagcaggcgccttcgagccaaatgccatctatgccaccatgaaggagggccatagtgaggtgtcgacagccatgtacgtggctctagacgtcttcgacaagtgttacgtccagcccaagtggtccagccattgcccccttccccaagacgctgccaacctaccccgtcggctgcaatcaagcctctttccctcggcggcacagatggaccatggctgaccccccgacttctcccctccctcgatggcatcccctctgccaattgcgcctccacccgtgcttgcttctgtggccactgcactcgtctgtgacgtcgtgcctgcctctgccaatatctcctctagcggcgacgtgtcaacctacacgttcctctcctctagcgtcggccacctaagcccaaatctagcacttccaccactggctcgagcctccccgccctcacatgcctcgatggcactgatgtcctcaccctcacctgatgcaccaaccacgagccacatcggtgcagaagttggtgatgtgatggcctcagccggagcttcggctctaactccagctgccacgcccgtcacgcccagcacacacatggaacccttcaagcttctcccatcactgtcgccgctagcccctgccggg

SEQ ID NO: 46610 - DNA, 444 bp, Zea Mays
atttgttgagggcctggagggcgaagacacggtctccgtcgatgagatctttggaggttagcttgtcgacgtcgggtactgctaaagtgcttgtccgcggggacccatgtttcatttcctgcggggtcatggcctccgatccgtatagcaggcgaaagggagtgaatccggtcacccgacactcggtcgtgttcagtgcccagactgcttcaggtagcaggtcggcccatttacccttcttgtcgtcgaggagcattttcttgattgctgtgaaaatcttgtcgttggcgcgctctacaacgccgttagattgtgggtggtacactgaggcgaaggcaagcttggtgccaatggagaagcagaagtccctgaagtcttggctgtcgaattgtttgccattgtcaactgtgagctcggacgggactccgaatcggcagacaatgt

SEQ ID NO: 46611 - DNA, 1502 bp, Zea Mays
gactgcacagaaattcttttggcaaaacattgtttgccgcttcggagtaccgtccgaactcacagttgacaacgacaagcagtttgacagccaagacttcaaggatttctgcttctccattggcaccaagctcgccttcgcctcagtataccacccgcagtccaacggagttgtggaacgcgtaaatggcaaaattttcacagctgtcaagaagatgctcctcgacgagaaaaagggcaagtgggccgatttgttacctgaagcggtctgggcgctaaacacgactgagtgcagggcgactgggttcacccccttcctccttctatatggatcggaggccatgaccccgcaagaaataaaacatgggtccccacggacagtctcgtcagctgtccccgacgtggatgaacccacttcgaaggatctcatcgatggagaccgcgtcttcgccctataggctctaaataaataccaagcccaaacaaaagcatggcgtgaccacgcagtcatctcgagggaattcagtgaaagggacctcgtactcgtccgaacagctcggacagagtccaggggcaagctggagcccaagtgggagggccctttcatcgtcaagacgaaggcgtcccccaacgcatacaggctcgcgacgccatccggcgaagaattggagcattcctggaacattgataatctccgcaaattttttgtttgactgctcggggcccgcccgcccttgtaattcccacaacaattttattctggcccgcactcttttcctcccggggggtgagatttttaatgaggcggagccatgtaatatacaagcaaaaaatcccccgcaaaaatctacgtcgaaagaagaccgcatcgacggtcttcgacattcgaccaatacaaagtcaccgcgaggggcagcgctagccaccctcgcgtgcgacactccgcgcgaaaagtcgcctaaggttgcagccggactagcacaacaagtgcgaaaaatcgaagtcttcctcaaaagactacccgtgctaaaccctacaccaaactgtccgcgcaaaggctgactacaggcgcgtcggaccgatatagtaaacgtactagaccaagcgcgcaacgcctttataagcataactggatgcgcgcaggcgcacaacctcatcatacaaattacagttacatatgtacagtgagggcatcacaccttacatcggttcaaccttcggaatgattctcatctccctatagttaaatagcattatcctaagctcctcaccctcaaaaagactttgcaactccccctcacctacactcgcaacggccggcgaggacaacaattcctgcttgccagccctgcccacacgaagccgaccaccatccacctcgctcactctacgcttcacaaccgcccttcgccgcctacgcccaacgctcggaccaggcacaacttcagcatccgcagcacgcggcgaagcgtccgccgctgccacatccaaggccgcaaagta

SEQ ID NO: 46612 - DNA, 433 bp, Zea Mays
ctcagggtgatcactataccctactaacggagcaatcggcttaagtcggaaacaccttaagtcggtgcgacatgctcatgcttacacgactcagggtgatcactatactctactaacggagcaatcggcttaagtcggaaacaccttaagtcggtgcgacatgctcacgcttacacgactcagggtgatcactataccctactaacgcagcaattgccttaagtcggaaacaccttaagtcggtgcgatatgctcactcttacacgactcagggtgatcactataccctactaacggagcaatcggcttaagtcgaaaacaccttaagtctgtgcgacatgctcacgcttacgcgactcaggtgatcactataccctactaacggagcaattggcttaagtcagaaacaatttaagtaggtgagacatgctca

SEQ ID NO: 46613 - DNA, 495 bp, Zea Mays
tataagttgtgtcttggattgcgataataataggcaaaccgatgtgtatggtgcatagcggcctaggttgttgcttgggttaaccaacttgttagatgtctttagttaagctcgtggtcacgatgaattgcttgttgtagtctaaatgcgtatgggtatggtcgcggataaaaagtattagtgctcatgtgatgtctaagttgaaatgcaaattattaggtgaaaagcgctttgatatccatatatgccggatttgatgattgtggtgaatgcgttgttaattgcgtatggtggttctagtgctcgaactgacatgtataaaaatttagtaagtctactggttagttctcacttggttattttaactctaacaattgtcaaagtgttagaataagtcaagtctctagagcaagacaattcttgaattatatagaagctgaaatttattgattgctgtttggactgcaagtactgttttcggtgtgctgtatgttt

SEQ ID NO: 46614 - DNA, 1229 bp, Zea Mays
ggagatctgtgcagtattgatcctataagtttacagcaaagttgaagaccaatattttgtgagtaagtgtgatgtggggaggtagctctgtttgtgtggagaaatttgagaaatagagggatggtctgtcaggccctcggagttacagatactgaaaactgatcagatctgaatttgcagcgcaagactcaacattggagcactataacccttgatccacgagtttttagtcttgggcttctatagcaaacttgtaaagatttgtttggtaagcaaatattattaactaaggttggcatgtattacttggaatctggtggatcgagggggttaaagttgggatgtccaggtggttgccaggtgcagtttcagaacctaaaatgtgatgctattgtgctgaattttcagaaaaactgtgtaatcctcttgaccttggaaccattcaattcttcattcttgggcttttgggggataatcattatataaaacttgaagatccattgtaggaggacatttcttctgaagaaggatatcccagtctctattttaaattcaaagaaaaggttaccccaagtcgcttggttaaatagaggtgtgctgaatttaatttagattagatgcagtggatagtttggattgggtctgtgcatatctgaagaagttcttttttccattttccctacctacgtgtttttaggctgtagtggataagaagggcagatgtttggagatggggttgctggagaaaaatgtgctgcccaggaaaaatggacgcactgcatctgaagccaggtggagtccaggaagccggtagaaacctgtgactcagctgtgggtgcgctcccctgtccaaacaccagcaaacctttaccctttgcctcactgtagactggtcttatgtggacataggagtcgaggccgcgtgctagctcatgcaaacctcagctgaaacacatcggcgcccagataagtgcaagtccggccgagtgctctttgttttactgtaactgtgaccaccagtgccgtaaaccatctctccctgtttgtgtttcttatctaaaaccgagcagagttccactgtctataccccacgctcctaaacgcctggtcatgtcagggtgttcagtctgatgtcgtcttgagaatctttgctcctcagtctggtgagcacgccgccgatgtctcatatcatcataatctgtcgagatcgatgctgttattattgataa

SEQ ID NO: 46615 - DNA, 357 bp, Zea Mays
cctttcatcggtgagcagttagcttctctgctctacctggagccagacagtgaacttacggtaggctatgcatttattgcctatttatcttgtttccaacgttcccattacccttctgatctcatttgcttgaagtgtctatttcctgtctctgatatttttggatatgggttcaggctatgctaatcgcagcagaggccaaacaacaggaggaaaaagcaaaaggagtcagtgccgacgaggtagctgataatcaagatactgtgttgttcgacgataatgaagaagacgaggaagaggaaagcgaagaggaggaagaaggcgccgaccgagagcctcaagggaggggaggaagag

SEQ ID NO: 46616 - DNA, 667 bp, Zea Mays
gggagttgaagagagagttttttcaggcagaatttgctttatagcctcttttttcgtttctcctccggtttccaaggatttctccttggcgggctctgaaggcccagcttcggcctcggtctggctctttgcagcttcgtcttcggatggttttgcctcaatttgcgttttcggagcttcggcaggtttcttcggagtggtacttgaagactttatcgtctctagaacatctagtacattgaccatcctttttctcttcggagtcgccgtgaggtctttttgtgccttcggcactgtcattcctgccgaagggcttgtaacttctactatatttgttttcgcggcctctatttctttaatattatcagcctttggcatcatagccggctcttcattcttctatgtaagagcaggtcctttggcttcagtagtcgtagaggtctcactgacaaactcgggcactgtggccggttcaataaagcgtggtcggtgagtaaggaccttcacctttttcctcttcggcgcaggctcgcttggagcagctgaagcatcatccttaccggaagttgcaccttttcttttttgcccccgtagtgggtagcggtagtcaggatacataaacccaatagcatcagaaactctgttgagcctcttctttttccggcct

SEQ ID NO: 46617 - DNA, 340 bp, Zea Mays
tccacatcctagcaactactaggctgcatttcttgtttttgtatctcttttgcactaaccatggcagaggatgcaaatgcgcggcctccacattctccacgaacagcgggcaacattttgaacgtcaagtaaggttacacacagatgctctcaacgaagatgttcaagtaaccaatgagcgcattggtcaattagaaacaacacaaattgttgccaacaacatattgaccacattggaacaaacacttgctgctactaatacctctcttgcagcaattattacacgattagataggatggaacaatttgggcgtgaaggtaggcaacaaggtgataatga

SEQ ID NO: 46618 - DNA, 575 bp, Zea Mays
tcaattaaacaactcttatctgtatgctatttgttcttgctgtgtgtggtgttaccaactcgtccctagtacttgcccccctgggatgtaggctcgatgtgtcgaggttggataccagggtacctaagaaagagttggtgacccggcccccaggaggtagcttcaactgggacctgaacctgtacatagcttcggctagggagcgttagtagcacacccataggacccatcgtctggtatcagccatcctttgattcatgcaacaggacctgcaggattgggtctgggaagccaagtcgtgtgcccagaccccctgaatcacatctccagatactaggacacccatcgcagagtggtggagcatgcaagcttagggtacgggaccaggctaagcggctatacagttccggaccaccccaggagacgtgcgtccattctctagaaccagaccccgggttgccggacccacagagctatagttccaaatactaggatacctatcacagagtggtggagcgtgcaggcttagggtacagaaccaagctaagcggctacacagctccggaccaccctag

SEQ ID NO: 46619 - DNA, 496 bp, Zea Mays
cttggggcccagaacaagctattgccttcgagtctttgaagcaatatcggtccgacctagcaacattaacaagtccagacccagggttacccctgctactctacatcacagcttcactcggtgtggtcagcgcaaccttggtccaagtgaagactagagagggcaagactcacaaatgcccagtatattttgcctccgaagtacttacaaggtccaagtgcaacatgatagagctagaaaagatagcatacaccgtcatcatggtttcatgcaagctgagacattatttcaaggcacacaaagtacgagtcactttagatcggggtctcgaagagttgctcaggaatccagaggtgtccgccagaatagccaaatgggtcgtagaactctccggttacaacatcaccttcgagcctagaacaacaatcaaatcccaggttttggctgatttcatagtagcttggacagggccttcggaaccactgtagtgtcatgt

SEQ ID NO: 46620 - DNA, 410 bp, Zea Mays
ctattcgattctacgtcttctagatccgtcttggatgacttaccgaccccaagacaaccctagatcttaccttgacaagcctagtaatctgctaggagggtgaatgtctttaggtctctttctcgacctgatttcttaatccctagacgactatacgccatatggggatgcccgagctaagcctatcgcccttggagtaccctaagatctttccctagggacgaggtctaagttcctgtgagaaggaacacggcctgcaccactacccactgcagaccgtctggcccggagtgcagaccatccgaagcgatgcagggaagaaatcgctcctgcagcgaggtcatataccatccacgccgctgcagagggcaccgtcagacgatacactctgttatttagtatcatatcgg

SEQ ID NO: 46621 - DNA, 1018 bp, Zea Mays
gttttggccccctaaaatccgggtgtgacaaggtctctttatttgggtggaagtggagcttagaagctacagggtggagttctagctaagtcttggcttaacgggcctcgggcctcctagtcctcgtcggcgctcctcttcctcctgttcatccttgtgggttcgtatccatctgaaggcgtccggttgcctaagagctctctccttttgacccccttgccttgaggccagcctctccttttataggcagggagaggggtcgatcggtggtggcttccctgagaagaaaccgtaaggcaagggtaaaaccaacgttttacctcgggtggagccacacatactagtggggcccgaggttgcttggttgtctcgtatttactgtggcggatgacgtaggggcggcgatggtcctatgcgtcatcattatgtctacgccgacccctggcctcctagcctggggttcggcacaacccgtggtgtagtgccctgcgggaggtctgcgtactcaggcctagtccgataggacataagtgtgctataagccgagtggtgcttgggccattaatgcaccacagtctgaggggctcataggtcatgagtgctctgcagactgatgtgctcgtaggtcatgagtgggaagtggaccgccgccgcgctgtggctcggtcccagcgtggttaaatgcgatcaactatttatggcgagtcaatctagaccggacgcgggatccactcgaatagttcccttccgacatgcccgacttttcctgacaggttccgccacgcccgatcctggctcggtgccgcgggattcgatgggggcgggtcctttcagggttgacacgtccgcctctcctaactaactaatgggccccagcgatcaggggctctttcctcagcgtactctctgaccggtgtgccccggggaccgaggatcatttccccgacagtgggcaacctcttatccaggcttgggctagccatgcttagtttgtcaaactgcacatagttaaactgca

SEQ ID NO: 46622 - DNA, 737 bp, Zea Mays
ttgccgactttgttttcaagaacattcagccactgaaagacagggcctatccagcatatctgtatcgagggctagccgactcaactcgggttaccaatagcagaattccttctgtagacttggtaagccgacttgaaatgatcctcaggggtaaggtgtcaaatgttggtgctccagtggcatactcagcctggaacctgcctcctcccaaagccttcacccttttttgtgtcaaatccgcctgtgactgatgacaatttgggccttagagtgcgaccctctgctgaagaagtcagtgctttggttgcttcgcttggggagattcctgatgacgaacggcaggtccattttgaggtgcccctgaaccctagtgatgctgatataaatgccatgcttgacctgctagctgaggattcctccgacgctgctcctgctggtacgttggcagtggtgccccttccagaggttgatacaactttggatgtccagaaacctgtcagtactcgtccgaggcgccctagccgaaccaatcagcctgagccttctgctgatgagcaaaagaagaaaagaagacgcctccgacgagtatccaattttgatgaagacgctggtacctcagttcatgctactgaagaagtgcctgcgagtggatttactaacgctgaccccaatgggtgtacccaaactgctactgatcccaacgtgggtgctccatctgttgctgatcccaatggggg

SEQ ID NO: 46623 - DNA, 533 bp, Zea Mays
gtcgaggtcgtggtcgcgggatgggtgcacgtctgacccatggtattgtagcattcttttccatgtgcaggaacatatcttccgatgtgcatgagctggctaggcgtcagcgggagactgacgacaacctccgtcgtcaagcttcttccatgggtatgtcatttgctccccgctcgcctgatgtgcctcttcatccttcgccaccagaaatcaatgaatggcaccagcagacctatggggtgccctttatgtcagctgaagatgaagaagaagacgaagaatattttgatgaccgtgagcagtttgtcctgcctccccccagggggatccgagtcaatcctcttcatatcctcctccccatgatccttcaggaagctatcctcccccagcttagcctggggaagaaaactttgcggctaacttggcaactcaattctttggtccgcctcctcctaagtggtgatttgtggctgatggttctctcctttttggtgctagttgccaaaaagggggagaaggattctcatcttggc

SEQ ID NO: 46624 - DNA, 625 bp, Zea Mays
tcaacgattaacctggggggttcgctcggtcgtgaggagggtggtcggcgccttgccaggggcgaatcgagatccagcgcctcggaatttctcgacggcgttcgtgtgccacggttgtccgcccgccgcatggtcgaccttgttcgcaacttaatcgtccggtaagtcttctcccaatcgggtcgccttgatcccttgtgcaccttgcgctagatggagagtaggttgatgcagagactgcctggtggacacctccagtggggagcacggtcgcaggctgttcaacactgtgctgggtttcagcagggggaagaagacagctcagctgtcgtcgattgtttctcggacaaccctgattagatcccaggataacccttcgtggtgttaaatccaagccatcagtcagggatcgtgtggatctggttaggtctaggggtcgatgatgtttagccgttggatcgtgatcccacgatcaatattgcataccgattcgttttaaaaagaaatcagatactggcgctcggtttttaatcggacggctagctctgctcgatactccctcggctgaatctttttacacatgaacccctcggcttgttcaaaatcaacccgccatccatttttc

SEQ ID NO: 46625 - DNA, 672 bp, Zea Mays
ctccttgctccctgccatccgtagcgggtagcacataagctccagaaatacccgcagaagaggaagcccccggagtgaaattaacagaagaaccccactgagccactggatgaggcaggcgtggagctccaaactgagacgacataggagtagacggtgcaggagtaggggcgacctgatactgaggaaaaccctgcatcgacacaaactgagaagtcccaggcacatagagctgttgcggaggaagaggaactgaaaactgctgctcagcacttgacatcatgttgatggtgccctgagaagaggaggaagtcaccggctcctatctgagcttcccattaggattcctcctacacaccacatccttatggtcctgactgcagatagaacacctcccactccactggcactctgcacggcgatgcacatcaccacagcgaaaacacaccagccccagcccgggcttaggaacggcccgaaacctctgagtacttcctcccgaagtacccgagtcagaagatttgccacggtaaggatggtggcgctgatgctgagacttgcccctcttgtggactggacctccagtgttgcccctcctcgcgtcctggctacgaggctgatcaacacccgaagacttctgcgactccatggtatactggtgttgcatctcca

SEQ ID NO: 46626 - DNA, 819 bp, Zea Mays
tcatcaaaagatacaccagactcagtttcccttggttttctagcatggatccaattagctgtcctttcaccaagttgctcggacagcgtcggcaactctgtagccttcttctcggcgtcttcttgtctctatttaggaacctgacgcttgtaaccacctgtgctaaggtggtggtggtatttgttcttcttagatagttctgaatttgcctcacttagcgatatgaaattagggctgctcctctgctctagaaatactgcccactgacctgctgagattttatatttttcgtcgggtctaggtctttctttgcaaactttgtattcatctcagacctcaagtttcagaaattgattgcaaactgcttcattgtgtattttttcacgagttcttctgaaccccgaggcaaaacgaacctcgttattagcttattccacatttgattcttgacatcatctgatacatctctccactatcggattgtgatgtcaagattatctctaactaagaacccaagtgcattccggaacttaggcagtgcctcttctggagctaggggctgaccattcgggctcacgtctgcgattttatatgtcttgtcaagaaacttgtttagccccctatcacctctgttccgatcgctctgcttccttttccttgacctctcggtggttgtctcggtcgattccggtgcgccttgggtcggttccggtgcgccttggatcggttccggtgcgtcttgggtcggttccggtgcgtcttggtatcgtgccgcagctttttcgagcatcgcacgaaattgagacaagacctcctatt

SEQ ID NO: 46627 - DNA, 598 bp, Zea Mays
gtgattgcttatggttcaaggtagttgaggaagcatgaggggaattacccaactcatgatcttgaattggccgcagtggtttttgctctaaagtcttggaggcattatctttatggcgaggcttgtgacatttacaccgatcataaaagtctcaagtatatttttactcaaaaggagctgaatttgaggcagcgtcggtggctcgaattgattaaagattatgatttgtccgttcattatcacccagggaaggctaatgtagtggctgatgcccttagcaagtccggggttccaaaagtggccttgtcgttgatcgctgatctcgaccgtttgtggatcactttgtgttatgtcggcaccgctagtgaggagactcggatgcttattcaatcctccctcatggagagagtgcgtgcggctcagcagcaggatcgtctattgcaggaagctcgaaagagggttggtgatggtaaaccccgggagttcaccattgatgagaatgatttggttcatttcaagggccgtctttgtgtgtctcagaaatcagaggtgaagatggatatcttgagagaagctcataaaacgccttacaccgttg

SEQ ID NO: 46628 - DNA, 522 bp, Zea Mays
ctcgcgttgccgttgtcgttgatctctactctatattccccggaatcgtagcgttagcatgagctatatgttagcattggttaagaatccaacgaggaatgtaattgtcaaatggagcctcttgtcaaatgctatcactcgtgtaacttccatcatcgtagaaacgtgtttgtggtaggtacatatccacgggtcttatcataatttaggaattgttcaacttacggatgacgcatgtctcatgttggaacgttgtttagttataagtcatggagcacacatcattagagtctagaatgtgatgtatgtattgtagatcagaaatgcttcacatacgatccatccatacgactgaagtacaaccaacgttaggctacctccagcaagctcctgtaaagtctcctgtctgatatatctagcggacgacagcgtccggtaccgctccagcagcaagtgctaaaccaaacgctaaaatataccggacgttgctcagctgctatatttgacggatcctctatcgct

SEQ ID NO: 46629 - DNA, 748 bp, Zea Mays
gctctctctcgcgactagccggttcatcaacttgatgtcaacaatgcatttcttcatgacaccctgtctgagaccgtgtactgtgttttgccttctatatttgtttatccaactcatttggaccatgtttggtacctaaacaaatttctttatggcttgaagtaggtgccccgtgcatggttccatcgattttctacacatctcctctcattgggttttgatgtagctcagtcttatacatcactattcatatttcactgtggcagtgagactgtctacctacaactgtatgatgatgatatcgtcctcacttcctcgccaacatatctgctacgtcgcaccattgttgccttgcagcaagaatttcctctaaaagatccccaacccctacatcattttcttggattgtctatgactaaacaacatggcaccatgtagctatctcgacatcactacatcttcgaaatccttgagcgtgctggtatgtctgaatgcaagccttgcagtactcctattgatactcagtcaaatctctcacccgtagaagaccctaacaatgccaccgattaccacaacattactagtgccctatggtacctcacttatagttgtctagatattgcttatgctatccagtagacatgcttatttatgcataacacgtaggctccccacctttcattggtcaaatggatccttcattgtcttcgtggcactcttgattacggtctagctattctgatattca

SEQ ID NO: 46630 - DNA, 495 bp, Zea Mays
tctatgcttccttggatctgtacgagattcgttcgaaacggcgtggcccagggtcgggtctgcctgtctacaacaaaacacaacgttgttgttgttgtgggggctgcggtaggtaggaggagtatatatacttaggttttaatggtgttgtttcagtctctcaagggccagattaggattcttatcctttgggttttcgacttgcggttgagtggtctctcggcagctccaagagctggtggctggttccctgaccctgctcaagctgtctctgtctggttttcttctcctccttttttccccttccttttccattgctgctcagctcaaccggattccctgagcttctctcaagctctcttgccgttcttcccagcgcaaggaaaacgttttcgctgtcgatgattagttagtgccactgttatggtgggccttgccggcgctaaaccacgctatgggagtgagaaactaatgggcctaaggttcagcccaaag

SEQ ID NO: 46631 - DNA, 666 bp, Zea Mays
tcgttgaaggatcggtaccaatgttgaatctttttttggtgtgctgaatgcatgttcagcctcaggttgctgcaccgacgatgtagcctgtatgttgggagacatcagcgtggggtgcgtgtcccagtgacgcacgagcaagtgattgtcgaggcgcggaataatactcctggcatcaaggcacgatggtgtctgtacattggggtgcggcggcgagctatggtccatcgtggtcgaggcgtcgggacacagacctgtagtcgaggtgtcgggacgtggagctgtagccgaggtgtcggagtgcggagttggagtcttggcgttgggccacggtgacgccggcagctggccatcgagctgcatcgcaggagcatccaccatcgggagaatacgaacagctcgtggcctggaagcttatgagacaaggaagcttacgtgagaagcttgttctctgttggaagacaaggtaaagaaacaaagatcgtggagtgcgggaggtgttttttgcaaaatagtcaggtaccgttcgattcaatatgtacgatctggatgttacttgtgcacatgtgcatttcttagctatgtgcattcgatactttgccaaataacatgcccacaagctttatctattcaactctcatgctccactagtttgctccatgcccg

SEQ ID NO: 46632 - DNA, 504 bp, Zea Mays
aactctaagtggaaattgtttcctttctctctcacaaagaaggcgaagcaatggtacacgaaagttgaagaaagtgcaaatggagattgggtgcacttaaagacaagttttatcttgcattcttccctatatctcgtatcgtctctctgccaagggcagccctcggctttgagcaacacaagaaggagtctacaggtgtagcctaggccaagtttttagttttaatacactccggcccagacttatctttacctgatagcgtgttattgcaactcttttgtttgggtctcaacatagaagttgcccaatacctcaacatggccatcggacggtcatttacacacaaacctatgacagaacaaaagaaaatccttgatcacattctagaaaagcaaacttcttccgtcgtagaaaccaaacccctccaagaaaaggccatgtcaagatgtgaggagccctcactagccgaatccaaacccataccattcctagattcgattgatg

SEQ ID NO: 46633 - DNA, 581 bp, Zea Mays
gaattctgtgccctggtggcttcacgcggcacagctgcgacatttatgtaggctaggtgcaaccacgccaaaactgttaataagccaactttcaatctttcaacatcagatttattacccaaatttggaacaaccgaagcccgaagcatagggaacagatttattacccaatttgggcaaagggcgggcgtgaacttgccggggatgaagcacgaaaactgctaaacttggtatggaacttttacctttgtcttctctaccttggttttcctttattatatttccaattactttataccttcgtcttttctgcaggatggtggcgccgaaattcattaagctgaagcctgttccaaagggttgaagatcctagaacttccctttctatctatatgtagaagacttaggaactctttgcatcatttggcaaaaaattgtaattgtcagttgaacaaaatattgtacttatttgtgaataccttgtaatataattttaccatttcgctcctgtatgaattgctttgttgtggacgaaaccaatgcttgtaatcttttgagtcgaaggcgaaaaacaccttccc

SEQ ID NO: 46634 - DNA, 423 bp, Zea Mays
gcatccactaataaagacaaatagggagaagcactatttatcttgatcaaggcttaaaagatttgcaataagcaatttttgcctagtattctcataatgaaaagatttagaatgcttacaaccacaccgttgaatgttttgaagatctcattatccaagtaggtgttgttgcccttgatgtctttccttttcatttgagtgtcctccctttatggtcgacccctttttcctttcaaacttattgaaaatacttaagagagatgttaatagcacaagggagtaaatgatgaatgatggtttctttagatagaaaataagaacaattcattatccataagtcacatatacatgaagtaaacttcttaacattagtgcacatcaaaagaaatatgcactctttaaacattttgatcaatcatagga

SEQ ID NO: 46635 - DNA, 372 bp, Zea Mays
ctctaagtttgagagccaattcaactgagatccagtgcaaatttgtgaatgatttccataacaaacttgtagctggtaggtggcactacaactttgatgcagaaggctggttctggtgccacataaaaaccgaaggaaatcaagctccaacatgggctgtcagatggactaaatggcgatcccatggtacagtagcctgataggatcagaacgccagcgcggcttgctcaccgccggcgacctctttgcgccaaaatccgtgccgccgccgtccgggttcgtgcgcgataggaaatggatagagtcggagttaaacggcgcatatgtggcaccgttccctgagtccagccggagacttcaccggcagccacc

SEQ ID NO: 46636 - DNA, 1977 bp, Zea Mays
cttttgaacaaataaatagctaagtaatcttgggtgctagaaaaataataatctatgtgaggtgcttctaacaatcaagtgtatgcatatgatgagatgacctatggggtggagtttagggagagataaaaaaaggggggtttaggagattagggttccaaacctctggttgaaattttgggatgttacaaacctaccccacttaaaggaatctcgccctcgagattcagactgggcttgagaaaaggtaagggtattccttcctcaaagagtcctcactttcccaggtagcttcctcttctccttctctactccactgaactttacaaagtctcacttctgagttgcgggtcttttggactgctgagtcaagaatctttattggcttttctcggtattgaagatctttctgaatctggattgtctcttctccgatgtgactttctggtacttgcaggcatttgcggagctaggacacatgaaacacattgtggatatcaagacggtatgctgcgggtcccactctgccaatgatgggataggggccgacgaatcgcggtgctagctttcctttcacttggaaccttttgacaccacacatcggggagacattgaggtagacgaagtctccttcctcaaatctgagttctctctgcctgttgtccgcataacttttctgccgactctaagcttcaagtaatcttttgcggatcagggcaactttctcttcggcctctttaacaaaggcaggtccttctagtgtcttttcccctacgttggaccacattaggggagtctggcactttcatccatacaatgcttcgaatggtgacatcttgatactggcctgatggctgttgttatacgagaactctgcataaggcaagctggactcccagtttctgttgaatgttaacacacaggctcttaataaatcttcgagtaccttgttgaccctttctgtctgaccatctgactgggggtgataggcggtgctgaagtctagcttggtgcccatagcttgctgaaggctcgtccaaaatttggaggtgaactgagttcccctgtctgacactatctttcttggaatgccatggagtcttactatctctttaagataaatccgggcaagggtggctcctccaaaggtagttttcactgggatgaagtgggctaccttggtaagacagtctattattacccagatagagttgttccctttttgcgtctggagtagtccggttacaaaatccatgcctatttcctcccacttccattcgggcactagaaggggttgtaataggcctgcaggcttctggtgctcggctttagttcgttgacaagtgtcacaccgggccacatactgtgctatctctttcttcatccctctccaccagtatctggttttgaggtctaggtacatcttggtggttcctgagtggatggagtaggctgagttgtgagcttcatcgagcaggacttttgtgcttccccttttggtacacacagacggttcttgaaccaaaggactccttcttcatctgtcctgaggtccagaagttgttctttgcgagctttttccataaatcttgctgtctccgtgtccaggcgttgagccttgcatatgaggtcttctagcattggcttgacttctaggctgtcgttgtttcccagacatgcattcagctaagctgattccttcttccaatcttccaaaaagtttgtccccttcttcccgaaaggtttttggctgagggcgtcgactaccacgttggcctttccggggtgataatggatctcaaggtcataatctttgatgagttccagccatcttctctgacggaggttgaggtctgactgagtgaagatatacttcagactcttgtgatcggtgaagatgtgacatttgttcccaattaggtagtgcctccatattttcagggcatgcactatgctgccaattccaaatcgtgggtg

SEQ ID NO: 46637 - DNA, 707 bp, Zea Mays
acaatagtgtcatattttttcggaagagatctaaggaacttgtgagtgaaatccacatccggtacattaaaaccatgtcccttgagctcgttcactatctcatttaagcgattaaacatgtcggacacactttcatcttccttcatgagaaattgttcaaactttcctttgcatacatacaactttgcactcttcataattgtggttccttcatgaatttccattagctttgtccaaatctcatgagcggttgtgagatttttgatgcggttgaactcatttatgtctaatgcatcatagaatacattcattgcttgatcattggttagaatattctcaagatcattgggagacggttcatcttccttcaatacaagaaatccatctctaacaataggccaaatctttcccccgtagctttaagatgcattgacattcttattttccaatagtcataattgttcccatcaaaatgcggcggcttcccaatgtgcacattgttgttattagccattttgtccaactccgggatgataaaatccacaatcaatggagtccttggctttgataccacttgtaggatctaggacatcggctagagggggtgaatagacggttttgactaaaataaaatacactagacaaatttaatcaaaacaacaagagatgtaaatatttctagccttgatggaacaacaaaatgtaat

SEQ ID NO: 46638 - DNA, 749 bp, Zea Mays
ggaatactcgggtgtgatacttcttggacgaagatctcgggcgggacctgggctcgactggatcccagctttgacaacacggctgctgccgcgttgcgatccctttccatgtgatggaattccaacccttcaaatttgtcttctaattttcggatggttgcatagtacttgcgcatagaatcagtcgagcaatcccagtctttatttatctagcttatgaccactagtgaatctccatataccatcaacttcttaatgcccagtgacatggtgatgttcaacccgtggatcagtgcttcatattctgctgcattatttgatgctgagaataataactagtgtgcatacttgagttgttcacctctaggagcaatgaagaggattcctgcacctgctccctgtagctttagcgagccgtcaaagtacattctccatactttggtagcctcagggttgtccaggacctgatgttcagtctactctgatacgaagtcaaccagtgcttgagtatttactgtttactctgatcagaactctatgtcatgagcttctttgttgtggagaatgtccccaattggaaatcccgtgactactatgaccttatggtcgtcaaagtagtgacggagcttgcgagcggttagaagtactgcgtatagtagtttctgaacttggggatacttcatttttgagggcccaagaacttcactgatgaagtaaagcggatgttgcaccgggtatgtgtgtccttc

SEQ ID NO: 46639 - DNA, 374 bp, Zea Mays
aggtgccctatagactaataaatatgtgagcccgttgtttttctgcaatagaaacgcagaacccattatataccacagattgcagtgatgccacaatgcatggaaatagcctaaactgcgatgatacatatacaaatgtgttcatttttgtgtcactcttcgaactacaggcaaggattagagacacagacatcaaagacactgaataattcctaagcaatcgaatgtatgttacgctagtcttttttcagattgccatcagtttcatcatgagatccaaatgcacatgggaaaagtaattaattctgaaatagatgaaaagacagaacaagtagtacaacttcacacgaaaacaaaaggacgtgtcagatttt

SEQ ID NO: 46640 - DNA, 281 bp, Zea Mays
gccagagctggacaaattcgtggtcgttttcattgatgatattctggtttattccaagaatgaagccgagcacactaaacatttgcatggactttatcgtgggattgcccaatacctcccggcaccatgattccatttgggtcattgtggacagattgaccaagaccgctcatttcttaccagtgcataccacccataagacagaaaaatatgcagaaatctatgttgatcaaatcgtgcgtttgcatggtattccaaagaccattgtatctgacagagga

SEQ ID NO: 46641 - DNA, 846 bp, Zea Mays
agggccatttagaacttatccaaatgttgaaataacccaaagtccatttcctactcaatatgtccttttctctaagtctgagttgtttctctgcatttgaatttctaaatccaatctcctaaatctgtaataaaaaacttagcaaactagttaatccatcaagttgtgatggtcatcaaacaccaaaatcaatatataaacggctcaaggcttatttccctttcaacgtgacgcggtcggataggagcgagggttgagcggtggcgacgcggtgcgccctagccggggtgagggctaggcaatggtagcacggcatagccgagtgggggctaagcagtggtagtgtggccaggagtggcgacaatggtggaggtgtgagaaggatgatgagaggcagacaaacacacatgagggtgacatgattaggtaaagtagctaattttggtcgcctaggaggggaagtcggcccaaattagtaatttctgttggttgaaagcatatagacgatgtaaattactactccctttgtctcaaattataatccgtttgaccttttttgccaactttaatcgacttgtcttatttattttttggtgaaaaaatgaaaaaaaatcaaaaccatacttaaaatatattatacgctaaataatattatattaaatttttttaaataagacgaaacagtcaaacttagaattaagagtcaaatggattataaattgcaacagagagagtaatttctaactgcttctcccggccgatgaaaaatgtttagtttctgtaggccgctctaaaaatccaaagaagttattttggaccataaaaatttcttattttttttgttgt

SEQ ID NO: 46642 - DNA, 1649 bp, Zea Mays
tggacgtgtactatttgcaagatacatgagagcacctatggcactgagatatgggtaattttgtcccaagatctcctcattgtcatccctaggtcgaaaaatatccttctccatatctagagaccggacgaccataggggttctaattggatatgacttgttcatattgaacttttccaatattttctggacataggctccttggtatataaaaattccagaaggtaaatgctcaagttgtaaacctaagcaaaatttggttttacccaaatccttcatttcaaactccgtctttaaatgatggcgtgcttcattaatatcattctcatttccaataatgttgagatcatcaacatataccgagatgatacaaaatccagtcggtgattttttaatgaagacacaagggcagtcatcattcttagtgtatccctttaaagaaaggaattcacttaagcgattgtaccacattcgccttgattgatttaagccatataatgacttttgcaattttacacaatacatgttacggtgtgccttttgattcggtatattaattccatcaggaaccttcatatagatttccgaatccagtgacccatatagatatgcggtcactacatccatcaactgcaaagatagatgattttgtactgccaatgatatcaagtatcggaatgttatgccattcatcactggagagtaagtctcattataatcaattccgggcttttgcgtgaagccttgtgctaccaaccttgctttatatctcaccacttcattttgttcattccgtttccggacaaaaacccatttgtatccaacaggaaaaatgcctcgaggtgtgggcattacttctgagaatacttgtcttttataaagcgaggttatctctgcttcaattgcttccttccatttaccccaatctgagcgttttttacactctgtcatggattggggttctgggtcaatgaggatgtcagcaatttcctcagagaaataggtgtcgacaatggtagcctttcggtcaaaagactttctagattcgatgtaattaatggcaagttcgttcacccttaaaggttcatcgacatttcccaggtcgataatcctcgagttttccgatgcccccactttggatatgcgcattcctaaaggggtttgtggatcatgtccactttcatcaatggttaattgatgtgcattcaccgtctttctctactttaaagcagataaatcctgcttggatgccatgtttcttccccttttgtttccaacttggggttgagtggttttatttggtacctccactctttcaggtgcattccttgcaggaataaaagacttaataacacctttgtaattagtgaatgcatctggcagattatttgctaaatcttgcaaagtaatgatcttttgaacttgaagttcagattcattagtacgtggatcagaggatgagatacttttagcatcccagtcaatttctcggcgttctttttggtacttattatctccccctaatgccgggaaatgttcctcattgaatatgcagtcagcaaaccgggccgtaaatagatcccctgttaggggttctaaatacttaatgattgacagagactgataactcacataaatccctatttttc

SEQ ID NO: 46643 - DNA, 433 bp, Zea Mays
cggggcagggatttcgcacctagggcagggcggcaaagcattgtgtgcacggaggggtccaagagaaggtagcagcgcttgcgccgcacatcgacggtgtaggccgcggagaagcaaacaacacagagcacgggggcaatacgtaactacatgcgttgtagtgtatgcctctgtatttagtctatttttctcatgcatctattaaaaaaattgttatataaagaacaaaaagtagacacacttacagaaaatggtacatctcactcacaatatccgacaattaacccaaatttccttggtacgtaaatgacaggaaaaaaacaaaatgatgatttaggtctgttgtgtgacacattaatgatcgggtcgcgtgtgggtccattttactatatatatcaagttgtagagatacgttttacattttatatcatat

SEQ ID NO: 46644 - DNA, 801 bp, Zea Mays
atgctacacaagcatcaaccttcaacaagccatttgtaatcaacacaaatcaatacttgacttgatctctcttgaatgatatgatccactccatgtcatcatgtggacttgttggtttgttgatcgcaactccgcttgctcttgaccattgcctcggtccatcggcgccaagttcttgctcaagcttctccgccatgtgcggtccatcgtgctaaagcctctaacttgcccttcacacttgcaatctggttgtcatagtcaagtcatgtctcttgatcttctctatctagccatgtggcaccatgtcatggctcatgtgcaatgagctccttcatcataactaattgagcactatcaacatgaccaagacacctcttcaccatggcttcaagtgttgttcacactagtgtacctttggattaagcacatggtatctcaacataaacacatattagtccaggttgtcactcagttacgaaaatcaaaccagggtctttcactagcaataagatcgaagtgggcagttggctatgcaacaacaaggcctttagtcccaagtaagttggtgtgcataggcagaggctagagatgaaacccaacaaaagaatgatgaagtaaagttaaataaatataaaacagtaatatagcatcagtggtaataaaagtagtgaaggatgtttgattatcatggttctggcatgtggatcgttaattcctattcagtaaaaaattgttgcctacttccagtctttcttgcctatttttactacatccatgcaaattttgcctcatttctacctc

SEQ ID NO: 46645 - DNA, 940 bp, Zea Mays
gctttccttagtggataggctgaagagcagcgaagcaaaacttaatgcacaatcctaagctcataaagccgaagtcgaaggcctaaagaaaaaacttgccgaaatgaatgaggatcttgaagttgcaaaggcaaaataagaaataagtgaatggacaagctcaaggttgcaaaagaatgtggaggagcttcgtgaatccaaggaaagatgctatgaaaaatccttggattgcgcaaagaaactaaaagacagttttgcaaaggtgggtgcatactcatcggagcaaaaatttattcaaggtgatcctgaaggaatcattcaatggattagcgaagaagttgaagcttttgaagaaatacttagttaccgtggagatttatgtgccttcgccggtgcccgagggattgaagcagttttggaaaaaactggctgtgaacatgttaaagttgcagcccaagaagaagtcatcttctccatagatgatataaaggaaccttcggccgaagctactctgatgggcgggaaattttattccgatatttggatgaagggcggtcgtgagatagccgacggagcaataaagaaaaatgaaaaagaatctcatgatgctcaagtagaggcaaagaaagctgaagaagctgctgaacgtgcattgattataggtaccttcatttaacacccttttgctttattattcatttctagcttcgaaccctaattatcatatactttggtacagccggccttttgccaccaccagagccattcaatcctgaggctgactccatcataaaagaagccttggatgtgatggaggtcgccaatacaatcgttgacgaagttgctgataggctactgaatgaagctgtcgagagaatattaaaagaacactagattcttgttaactaggatatttgtatatatatgaatatattaagtt

SEQ ID NO: 46646 - DNA, 680 bp, Zea Mays
cgtctgtactgactatcgggttgttgatcgtcggtggaggacaaccatctcggcgttaaactccggttagtccagccctcccatctgcggtgttcagggactccccaggttatggcttgcgaatgatgaatgtggggttaggtgcgggcctggaggttgagcactgctggttagttttgcggcgtgcggtgccggggaggatggcacttccaccgccgggcgcgctgccagtcgtgccctggcgtcgcgctggggaagatgacttgatggccgtggatttgaaaaccagcggtcgagatcatatcagagacattgtgtcggctggggcacaccaccaccgttgatcggtaaatcgacagatatatttggatctcacccaataaaatcaggacccttgatctcacaatgcaaggcccaaattatagcgttatgtagcttctcgccaaaaccgatcgtggccatcggtcgtcgtgtgggcgaataggattagatcacgcgacattaactatggtccatggatctctcatccaatgactccagtagcataccagttcataaagcgccagatttaatcttgaccatggggcacggatccaacggttgggatatcacgataccccttcggccggggaattatgcagaagagaccttgtagttttttcaaaccaacccgtagtaca

SEQ ID NO: 46647 - DNA, 644 bp, Zea Mays
gtagcaaccgccgtggtaactcaaccacgacgctatatagggaccggagttgagccagggatgtgtgcgcaaccccatggaactataccatgacatgaatcgtgcgcgagaggcagcgatgtgggggcaatttctcgtcgaagactaccgcgggtccgtcgaccgtcgtggatagacctctgtcacgggcgaattctagtgaggacttgtcgtatagttttgttcttgccttcgcttcgtgtagctacttcgggatggacatttcgggctcaaaagtcgttgtttggctaagtccggcgatgtcgccgccgtagcagctctggccgccactggtcttcgccgttaggatagggtgatggcgcctgatcgttgatcttggggtgagcgaccgtgattagatcttacataccggttcgatcaaactcacctgaggcgttagatctagatcgggcgtgcatggtttgattagggcattttaaatccggggccttcatccgcgatccgacgtcccctgttgcacaccggttcgttcgaagctaagtctaatctgggccctcggttgatgatcgaacaacccagagcaaagaataccccttcgtactgcgtatcttgcaaaagagtccccgaataacttaggaaacaac

SEQ ID NO: 46648 - DNA, 642 bp, Zea Mays
atgctatcaaaatggaagtgtatgagagtggggtcttagcaagagctctaatgttttgagaattgtttccaagcgtgtaaaaaggctccccacgactagccaccctcacatatttatagcctaagcaataaagcttgccggttcgactttaccgtcattgtgtacattgtgtagtctgttttggtccacccgatgatgttcaaaccattggcaaatggatttttaagaaaagggtaaagatggatggaaatgcttacatccataaccataaggcattattgatggcaaatgttttaaacaagtttaaagtgttgttgatgatgaaacctttttgtcgatcgttatgttaaagtctatttagattaatgtagcaattgctgcccattttgattatgagatttggtagatggatgttaaaatggcattcccgaagggaaacctaagtgaggatgtgtacgtgacatagtctgaaggttttatcgattttaaaagtatcagaaaattatgcaaacatcagtagtctatctatggatcgaagcaatcatttcggagttggaatctttgttttgatgaagtcaaaaggttttgcttcattcaaaatgaagaagagccttgtgtttacaagatcgttagcgggagcac

SEQ ID NO: 46649 - DNA, 493 bp, Zea Mays
ggggtgatttccggtgatctctgacttgggcaagtctggagagcgcgaggggatgaatggccgaggcttggggcggctttataggcacggcgcggtgcacgggcgaccgtggaccggccagcacgcgtgggcgtgcactgggaggcgcgggtgcgcgaacgggcgtgaaccggaggtgtcagccacggtcgaacacgtgtgcccgttgcctctgcccaagttcaagcgctggttgagtgcaaatcttcgcgaatttgggcaagatcgctgtgaaggatttgttcacctgaccttgctttgtcttttgtgtatggacgtcgcgtggttttaggctagggacagggagttgtagcgtcaccaaggtgctagtgtcagaatgtctggtcctgaggtcaaactgcaccaaaactatgtcaaacgaatttggtttgagttcaaacttttccagggcgtgttcaaggaaatttggcacaactttgatatttggatctcc

SEQ ID NO: 46650 - DNA, 875 bp, Zea Mays
cgaggccatcttggtgcactgcccggccacaaccaccatgcgagccctagcatatccatggccgcacgaactggggacgggaaaagcgacaacatagcgggagatacccttaccgatgatgaggccttgacgacattaatcccgacgacgaaccgcaagcaccggcatgccccagctccacaacccattatccttcttatttcctcctctctctctctgttacccgccacttgccttgctcgcgcatggtgactatttgcccagcggctcccggttttatagaggcaagggcgggatccgccatggtggtcggttgaggaggacccgtgcatatttttaggagggttggttcgtcgagatggtgcttgacaatggtggacgacaggggcaaagagaggtgcacaacatatatacccttggccccagggcaaggaacgcgtccagcctaacggccacggtgagcccttaggtagcaaccgcggcatgcaaccagatgctcctgaggatacggttgactctgactcgatggccctgctcgcccgagcttgttcccacaaccatgcggacccagtagctgagcccctgcccggcggtcccaacaagaggcattctgtgcggaccaagtctgttattccgtttgagttcaatcccacaccgggaggtagaagactatctggctaagggggtccacacgacatcgacacggcaacagaaacggatggcgtcattcaggatgtcatggtgacatcaatgaattaaaatatggtttcccaaggtggctgcgcgcatgacgctgtcgatccgtccccaccagtcattggctccggtagcacaacatagtcgtgcgtcacgtgatgcgaggggctgaacgcccg

SEQ ID NO: 46651 - DNA, 826 bp, Zea Mays
gttcgtaagcacattgtgcggccgaaacacacttggtcgacatgtgagaaacaaacgacgtttcttacaatgtgcaaaagaagttattgaagccatttcttcgtgtataaacaaagaatactaaaaagaacaagggcacgccagatgaccagaacctacccaggactttttccatatggcccacatataaaaaaaactagaaaaaatatgtcctagaaattcctaagaaaatcaaaaacaaaaatcatctctccaatgctgactccgtttccgacgaaaagactgctttacctccactagtgaagtagtttcttcgtgggattgaaaggttaaaagggggaaaaaagttaacccaccagcagcagtgatgcaaattaattaattaaacggccggcacaaaaaaacacacacacacaacacaaagacgccgggcctgtggtcgcagcgaccggcgggggtgcatgcatatgcatgagcccagtgtcccccacctcgaccggattaattaaactgctgctctgactctgagcagttaacaacgtgacaaaactcactgcatgtgcacgccatcgtctatatactagctagctaggaaattaacttgttgccacttggtgcactgtcgtcggtaaggttttcgttttcctatgcatcgcgcacgcacgtaagccccttccaattcgtgcattggtgttcatgtcgcttaattttttactaccaccaaaaaaaagataagaaaatatactagttacgtgatgcatgcatctggtctgccatctccatctgaaactgcatgccgcgtgccaacaatgcacgtactgttatt

SEQ ID NO: 46652 - DNA, 339 bp, Zea Mays
caagtccgtataattcgagagaatttgagggtggctcaaaccagacaaaagagctatgctgataataggagaccactggaatttgaggaaggcgattatgtgtatctcaaggtgtcaccacttcgtggaatgaggagattcaaagttaagggcaaattgtcccctcgctatattggaccattcttgatctttaggcgagttggggagatggcctatcaactcgagctacctgataatctatctgaggtgcataatgtattccacgtgtcacaactgaagaaatgtctcagggtacctgaagatcagctaccaatggagaaccttagtgttcaagatgat

SEQ ID NO: 46653 - DNA, 430 bp, Zea Mays
gctgagctccagcgaggcggaggttgttccgaggctgagaccgacttcgggcaaggcgtagtttcttccgagggctagaccacgttttgtcgtacgcatgtcccatcacgatcatcgtagttggtgaaagtggcagacgacgtgggggaacaaaagtcgttattctcgggcacacatcatcgtagttggtgaaagtggacaggaccgtggtcctgtcgttcctgttcgcctgcgatgtcacgtggggtaggtatacacattgaatgctcgtgtcctcgtggttcccacgatatttgactgatgtcgggctcggggttgtcctccttgcctgagatgggctcgagcgaggtggaaacagacattccgtgaagggagaacctcaggcgggactaggatttccccgaagactgaaaccttttttggaatattt

SEQ ID NO: 46654 - DNA, 432 bp, Zea Mays
ctgtagcaagcacccgaaaaattagttacgtctaagaagacgactagaatgagcatgcatcatgattgtcgcattatcattgtctcttgtgcaccaacatgcttctctcacctttattccaataataagaacttgtgaataatgtgatgtactcctatgttaggaactataagaaatgtcctacctcgcgtcggattggtaagtcttgttaggtcgtgttatgtgcttctcttgtctttctatctaggtggtattgtaattgtttagccctttttgccaaaaaaatgttgcttgttttgcccataaaaagaccccttctccaaataatctagtggttccctagtgaaaccttaaaaaaatcatgtgcttgttttggtgtttctagccctcgtgtgtctacccttgaatttacacctgcacaacttatagacc

SEQ ID NO: 46655 - DNA, 409 bp, Zea Mays
cttcatccttcttcggctctgggattacctcttctccagcaaatcaaataagtttgctctcagcctctccaaaatagcccaatttcatcatcataggcatgtcatcttccatcacagtagatttttcaaattcaagatgactaggctttgttgggatcagaatgatatagtcttcttcactctcatcaacattttcaccctcaaccacagtttgtttagcttcggcattagaagcaccttcgtcagcaacctcctctgccacaaccagacctgatcgcttcattacttctgaaatcggtgttgtttcgacggcctcggttttgtcccccgcatgagacactctagcagttgatcgcactctggccatttcaatggtttcaccttttgacaaagttaaccttaaacgatg

SEQ ID NO: 46656 - DNA, 436 bp, Zea Mays
gcaagttcccatggcatatttcactctagttatcctattattgccatgatctagatatagaaaaagattccatgttcttaaaagaataaggtgtcatgtaaggaattcaaatcctaaggacacttataaaagggaatctttctttatgtctagaatagtgagactaatgttcttatctaagtaacctaagtagtctcacatttagagaataagtttctctatggaaatgcgtaatccatcatgacaagaaaaatcaatccaataatttatgttgtgtgtcttattgcttaaattggatgtgattcttcttcatttatcgctctccatgttatggattagatttattcccatagtatcaagaatttaactattcttgttttataagttaaaactaagcatacatcatggaataatctagctcatattataaaatttc

SEQ ID NO: 46657 - DNA, 1066 bp, Zea Mays
caagttgaagaagtatgcattttggctgtccgaagtggctttccaggggcatgtgattaatcagcagggcattgcggttgatcccaggaatgttgcggctgtggtggagtggaagagaccctctagtgtctctgaaattcgaaggttcttggggctcgctggatattatcggcgcttcataccaaatttttccagcattgctaagcctttgactagacttttggagaagggtgttctcctcgtctggtccagcgattgcaaggtcagttatcagacattgaatagcaagttggtggacgccccaatcctagatttgcctgagagtggtaagtgtttcacagtttatacggatgcttcgcgaattggacttggctgtgtgttgatgcaggaaggcagagtgattgcttatggctcaaggtagttgaggaagcatgaggggaattatccaactcatgatctcgaattggccgcggtggtttttgctctaaagtcatggaggcattatctttatggtgaggcttgtgacatttacaccaatcataaaagtctcaagtatattttcactcagaaggagttgaattcgaggcagcgtcagtggctcgaattgattaaagattatgatttgtctattcattatcacccggagaaggcaaatgtggtggttgatgcccttagctggtccgaggttccaaaagtggccttgcagttgattgctgatctggaccgtttggggatcgctttgtgctatgtcggcaccgctagtgaggagactcgtatgcttattcaatcttccctcatggagagagtgcgtgcggctcagcagcaagatcgtttattgcaggaagctcgaaagagggttggcgatggtaaaccctgggagttctccattgatgagaatgatttggttcgtttcaggggtcgcctttgtgtgcctcagaaatcagaagtaaagatggatatattgagagaagctcataaaacgccttagaccgttcaccctggcaaaaccaaaatgtatcgggatctgaagcaaaacttttggtgaaagcagatgaagtgataggaa

SEQ ID NO: 46658 - DNA, 310 bp, Zea Mays
cttgttgattggaagccggatcgtctgtatgacatctccaccaaatcgatagttaccttcacctgacggaagatcgggcacccccattcctatcatcctccttgcactggggctgcttgactgctctaattggttctggggcaggaagacggggtgcttgattattctacctctggaattgacttccttctagctagttgttctagcagtactgctgctgatgctgagggtactgcctctgatgcgtcacgatgcctgatcttcacgacgtaggatcaatcttcagataactagctttagagaagccaag

SEQ ID NO: 46659 - DNA, 450 bp, Zea Mays
attagctacatctccagaactgtgatcaagtcttaggtcctggctgactttgtcgtagaatggacggaagcccaagtgccacccctcgtcgaggacccaaaatactggaccatgtagtttgatggatcttacctcaagatggacaacgacacaggagtagtcctcacgtcacctcaacggcacaagctctgctatgccatccgcctccactttgacgccaccaacaacgtggcagaatacgagaccctcatcaacgagctctgaattgtggccaaagtaggagcatgacatctccacatgagaggcaactccaagttggtcattgaccaagttatgaaggcagttgagtcacacgacccatgaatgtgcgcgtattacgatgaagtacacaagttggaagagaagttcaaaggctttgagctccaccatagctatcagtgatttaatgcc

SEQ ID NO: 46660 - DNA, 1150 bp, Zea Mays
atagaaagtcattctcttcatcaccttcgtacactagggaccctcgaggatacttcagttccttagcataatgttggtcctcagcaatttgccactgtgttagttgctttcccaaagcgtgacggataataaaatcaagatcttcagtatacaccgcttcaggtatcggcagtgataacttctctggtagactctcctttacttgctctattgacctaatttccgaaggtctaggagcagcgcctacgtcgatagctttttccaactctccagtttcatctttggccatcttagcatgagcaggagtagccatcttcgaaggcctcagaacaacgtctagaatgctgaccgtcctcctccctttcctaggagtttccactagaacggttgcagtccttgacaaccctggcattactggaggactgtgcaccttcggctgttgttcggtcttagaactctattgttgtcttctccagacgaatggtgggaactttggctgttgcagcgggtatttccatcgtctgttccaaagcttccaaaaacaacattacattaaattctcttcaatataaagcaaagaaaaaagtattacctctgaagctgagaaggcatctatgacagactcaacaatctctgtcttcgaactccctgcagtaggcagtaaagcaacactctccaaaatacgactttggctggtgagttacaactttcattttctttggtttcggcgcagtagagggggttgttgatgcaattttctttttcaccccttgcctccgaacctgaaaacagtaatcaagatggacaaaaccgatgacatcgaatactctattcagccttttctttccacgggcgccgaaggtgacattcatagcttcatcttcagcattcgtataagctcccaacaaatcatcactagtcacctcaatggcctcaagccattcatcatctggctccccaaactgacttctatagcgttaggaatatttcaggtaaactaggccaccttcgcttgaactgtctgtggtctccttcagcatttcccattcattaacaaggggccaaaacttgaaagttatgtgctcttggaccaagtctctggtgccaatgtagctgcacacagtgttgaaggctaccaggcaggcatgag

SEQ ID NO: 46661 - DNA, 747 bp, Zea Mays
gaaaattcgatcatgcaccagggtagagagagacagaccgaaagcgacgtgatcgttcgcgtctaccggcgttccgttgcttgctatagctgccttctccgactccgattctctttatctgacgagagactgaatgagttaacgtacgtacaggtcggttaggctaaaatggctaatggtgggtgctagtacgccatactagcagtaataagtaggaatgtaatcgaatcggatacggacagatattacttgttctatatctggttttatatatttttcttcggatttagattagatatagatattatcaagttgtgtcgtataagatttaaattgatttcgacatgttagatattcaaatttaagaatacggatacgaataaagatcgaatatggattactcggactcaagatacggatgctctcttgcacagatcgaattcgtaatatccatatcatttacaacaacctagtaaccagcatctcgtaaaaggaagctacgggtgcagcaattgtgagcatcagacagtattcaaaacagcacgaacgggaaggaacgtgagcaagcacaaaccaagggccagcaggacgtcaaccacgtcgaacccaagattagaagcaagaacgaccgtgggtagaaaagataaaaaggcgtctgcagcagggccggcaaaggatctagcgctggcatgcagtctggatgaggagtgaagacaaagcaagctagcaggcatgggctctgctcat

SEQ ID NO: 46662 - DNA, 727 bp, Zea Mays
cggtcttgttggtgtgtgggcgaaggctatggtgtaggttgcggcataggtgatcatagggagaatacggacagtgttgtcccgtcccctctgcctatcccttcacacctcagtaatgcgcaaggaataatagaagtcataatgaggggcgcccaagtgacgcaatgagtcaatggtcttgccttggtaacacgcgagcttctgacgcgacataggccttgcgggctatgcatgccacctgcattcaatgagtggtgcgtgccacttatgactgttgtgatcatccgcgtgctctgcctgccttgaatgtaggagggccccttctgctagaggcttacgtccagttcttcccgacggcttacgtcacacgccatatgacacatggcagcatcgggtctccagcctagcagggagcaattagctaggagtctatgtagacgtggcagatctagaccacccctaactgggggttcagaaggtattcagaggagtccaggtccctcttacacaggcctagacacgtggtagcaccgaacctcttaaagtgggaggtccgggtagcatacgcaggtgtccgggatcatctagagagggtctggctcctgggcataactgcagggagtcctcatgcttggggcatgtggaggctcctgagccctactgttggggatctggagagccctacatggaagctggccctctcctaaggccagtggtcccgttggac

SEQ ID NO: 46663 - DNA, 317 bp, Zea Mays
ctcaatatgggcagtgacttggtgacaactcccttttctgggttttgacaagaccaattccactaacacttcttctcctaatagggacactaacttcattgttttcttgtcatagctaagactggcttgatacttggttaaccaattcatccctaggataacatctatagttgtatcttggttacccataactattagatcagcggggaactctatctcccttatttgaacctttgcactagggcaaaatctatctgtttgggtccttccaccaactgaacttactctcataggtggatacatgggtgctactggta

SEQ ID NO: 46664 - DNA, 276 bp, Zea Mays
attaacttgtgtgttatgttgctttcatagatactgaaaattcaacagctgtatgatggttcatcatgtattttctcccatggtcagcagcggtttcgtcttttgcgccattggttggatgtcgacggagtagtaagtctttattaaggccttttggatccactgtgattatgctaatcagctaaagtaatgtaactgtgatccaaacaggtcttaagtaaaaagtatgtagctctctgaactagaaggcagagatcattttctcatggcattttt

SEQ ID NO: 46665 - DNA, 710 bp, Zea Mays
aacattagggttctaaaacattttggatatgaaagtactacataacacactactagcttgttcaatcagaatcacaatctataagtaactcatcttcagagtcattcgtcgtgcaatcctcaacgacaacctcgttccacttaatgcattgtccagtatgacacttttccgcgtttctcttataataattggcttctgcttcatctgcagctcgggagaatagctgatcctcagccttagtttcatcgcacttctgcttgtaataagtggcctctacctcttcggcggcctgagacataaactcgtcctcctcttgagcacgtaatcctgcctcagctagtgcgatgagctcactcaacattgatgtgtcctcctcctcttccccatgtaatcctgccttagcaagagcgataagctcactcaaccttgatgtgtcctcctcctccatcagctccaccgttgccatttttcctgaacgtatcttgcacgtgcctcatctgcgagatagttcacggcacatccaatctctgcaaatgtaatgagataaattagtttgcaaagtcaggataaataaattgtaccaacaaaactatcatgtcatttttctcactcacttcccttgagacgatcaacaagattctccaacatctgtttctcgactctagccgtctcccattcccttgcatcatgtgctctcttctcattcgtcg

SEQ ID NO: 46666 - DNA, 687 bp, Zea Mays
gcacaaggctactgagccccgatatgtggacccaggaacataatagatgtagtacttggcgctactcatgtttgctactgggtcgatcttcttatgccctgacgtctaagatctgcgtagcatcggcatgcaggggaagcttctcgtataagggatgatgagcacagtgcgccccgcagcacgggtgcactgtttgacagtggactggacatgtgcgctgactgcaagatggccctagcgccgcctgccagcggagtggataggacacatttatatgctgagtgggcacatcgcctgccagcaaggtggacagggcgacgcgtcctctgcgcaataaatgcagagaccacgcggcctaaattccttacgtcaggctccgcccgttggcttatatcacggacaacgagctacgtggcagcatcgggcctccacctgagaggggagcgcaagcgcatatgataaggcctgtacacgtgtcagtaccggacccttgcttatgccagggtctcccctgtcccgggacctcgttgtggcccggaccttactcggggggatctagaccccatccaaggggctcggcatgcttacttgggagtcccgggtcgtaatcgggggtccgggctatgcgtacaggggtccgatgctccctcgtgggggtccggtccaactgatacatcctaggatgta

SEQ ID NO: 46667 - DNA, 332 bp, Zea Mays
gcgatgtgacatgctcatgcttacttgactcagggtgaccactataccctactaacggagcaatcgacttaagtcggcgatgacttaaggcggtgtgacatgctcacgcttacttaactcagggtgaccactatgccctactaacggagcaatcggcttaagtcagcaatgacttaaggcggtgtgacatgctcacgcttacttaacccaaggtgaccactaaaccctactaacggggcaatcgacttaagtcggcgatgacttaaggcggtgtgacatgctcacgcttacttaactcagggtgaccactatgccctactaatggagcaatc

SEQ ID NO: 46668 - DNA, 425 bp, Zea Mays
ggaagaagatgaagtccctttgactcggaagaacagtcggcagttcatcgccagtggtgaaagtagtggagttccttctcctgctttgtctgctctcattggtctgcaagaattgtccctggcaaattttgatcagactcttgaggatatggttccagaggatctgttatcagagccagcagatgatggtgtgatggaggtttgtgctgatgtgcttgatgctgggttgaggtcatcccgtgcctcatcgaccttagagcacggtctcgagggtcaggagactgacttggatcgtcctggtcccatggaagtaactgagggtccatcagccttagaggcggctactgcagagaacttggtcctcaaggacggtgttgacacttgcccagcccccgaggatgttgccggggatgactcggctcggg

SEQ ID NO: 46669 - DNA, 569 bp, Zea Mays
cttttatctatacaccgtaccagctggacgttcgtgcgtgtacagtagtagtattccctctatccctgcgtgccctgcccgggccggccggtacgtctctctctctctctctctctctctctgcgtgtacacagcaggagcagcgagcacgcatgccatgccacggctgacaccctcctcttcccccacaccagggacgacaggccaccctgcttccgcttcgcttccccggcctctagctctgacctgcacgttgtttctctctgctgcattggaaatgctgccgctgctccacatcagtgtatgcacgtagaactactactgcaggcagtgctagtactctgctacgcttgcacgagccagcgtccgtctccttccgtcctcccgcagtatacagactttgcgcctgcacctgtactttagggctcacgtgttcctcagctgctcctactcgatcgcgtacagtacgtagggcggtcgcgtcactcgtgccacgaacctccgcaaccctttgaaaactctcatttgacgtcctcgcagtagatgcttcgtctcgatctgtctttgag

SEQ ID NO: 46670 - DNA, 390 bp, Zea Mays
tactcgtcgagatggttaagggagctagagcggccgggttatataggggcagggcgagtccgagcggagcagcagcgagatcaacgacggagttcgcgggttctggtggtaatagcctacggtgacttcgggttcctgtttcacgcgcggcccacggggaagacaatcctggcagcatgggtccaccaaccagagaggaaaaccagagggtccgagcgcgaccgtacaagcggtcccacacgccagagccaccgggatgacagccatgagagcgggcagtggctggccattgggccccacatgtcagcgcgaagagccaccagctgggccacgacgggggaaaggttaatgggccaaaaacgtatttccgagcccatcaagttctctttt

SEQ ID NO: 46671 - DNA, 374 bp, Zea Mays
gctagggttacttgggacagagaggaagccgaagctgctgaaactgctccaatctctgaagtgatgaaacggtcagggctggtagtatcggaggatgcacctgccactgaagctgagcaggttgatgctgaggaagttgaacctgaagatgattacagtgtcgtgccatctaaaccaagccacctggagtttgagaggtccactattaccgaaggtgatatgcctaagctgatgaagttaggctatttcagtgaagccaaaaaggagctggttcgttttggcggagaggaaattactccgaagccagaaaaggatgaggtggtagtcttcaaaagcttctttaaagcaggattaagatttcctttgaatgggat

SEQ ID NO: 46672 - DNA, 1527 bp, Zea Mays
gaatgggatgctcctgaatcgaaaagtacaacagcgggggtaaattcaactaggaactcaccaagcactactcccggggcttgctgagcttcttgagtgtcggcgtggttcactcgtgccttgccatgaaactaggtcttgctcagctggctgttggaggagggtgccttgggggcgggtgctggagcattcttggggccatttaccgagttggagtaggtaggcaaggatgtcttcaactgaggacaattattcttgtagtgactagggtttccgcagtgccaacaagcattagttggaggttagttgcttgcaatagatggggcatggagggaactttgacccggctggctgaaacgtgacggagcggaccctgctggcttgttgaagctcgaccctttgggaggaaacccgaaagatcaaactctctggtgcctgtcctgttgctgagctcgaaggacttgaaacttcctcttgaggtgaccttttcttcttctctagccctttccacttgtatggccttgtttgagaggtgcgagaagctgagaaaatcttggctggcaaggatagtcttgagttctggtcttagccccttcaagaaacgggccatcttcttggcttctgtgctgacatcatcaggcgtatagcgagccaattctgtgaacttgtggacgtattcactaacatatctccctccttgggttaattcccgaaattcttcttctttgagttggtcgatccctaggggcacatgatgctctcggaaggcggcttcaaattctgcccaggtagcatctctgacggtagcgctgcaagtatcccaccaggatagggccatcccggagagttgatgagcagcaagatgaacacgctggttctcagggcatccaatggcctctaacttcctttttattgtgcgcagccagtcatcagcgtcgagcaggttgctagatccgacaaatgtgggaggcttgagccttagaaaccctcccatcctgtcctgaggccttcctccattcgggcgctgcttctcaaggcttctagtgaggacctcaatgagtcgggtttggttggcccagaacttgggctaaatctaatggcagctccggaggtgtagggaggtgggtttcactcccttctccaccaacttctccttcagcacctaggggagaccgtgctccaatctctgaggcggtaggcgtggttttattcgaagccatctgccagggggagaaaggattactagtatgcatatgccatattttttttcaacacattattttattcatcactcaagttcattacaagcatgcaattgtcacagatcacgctacgcgcgggtgttttctaaggtgcttccaaactccctttctaaggtgtccccaaattccctgagaagatcgtcaaggctagctagggacatctcctcaacatctgtcaagttttctatcctggagggaggcagtgttggcggggcttcctcttttcggtcagtgtggcatccttggctcttggtccgctttcgga

SEQ ID NO: 46673 - DNA, 417 bp, Zea Mays
gatcaaggattatgacctagaggtacattatcacccaggaaagaccaatgtggtagcagatgccttgagttggaagttgcagtgtaactgtgttctgatggattctcgtattgacaccttgtgtgatgagctgagcaaaatgaagattgaagtaattccttctggtgctttgtctcagatttctgttgagccagctttgcaagaccagatcatcatggcccagctcagtgacaagggagtgcagattatcaaggagcatctccatcagaggactgagaagtataaatgtttccgccaagatggaaagggtatattgtggtttggaagcagattggtggttcctaaaaatgagggtctcaagaagagaatcttggatgatgctcatctctccaaattctccatgcatccggggagcac

SEQ ID NO: 46674 - DNA, 341 bp, Zea Mays
aactgaagaagtgtgttcgattgtcgattgagatcatagcagaaccagaattggagatagagccagatctatcgtactcaggagtacctttccaaggttctggattgcaaagaaagatcaactcggggctaaatcgatcaaaatgtataagatccaatggagtaatcactcagaggaagaggctacttgggagactgaggaattcctgtgttccaacttccccgattgcctacctacggaaattggtacgtaatcatgcccaacccctcctcctgcccttcgaatctaaaattcagaaaaatgatcttaaattatactccctccatccaaaaatcttcatc

SEQ ID NO: 46675 - DNA, 894 bp, Zea Mays
ccactccctctctcgactagcttgtaccccctactatgagcacttaggtgcaagataatataagtctcatccccctccgctggaagtagggccttctcttgccagaactaggataaactttgtgtcttcttgcatcacccatctagaccgggacacacatcactaattcactagttggttaggactcccgggtcaaaacaccgatagatggcacgccaggtagggggtcgctgcatgttgacaccacgttcccaccaagactctagatggacaatcatgggcaccctttgcagctcggcacggtgatctggttcgggagtctcgagttcatgtcccttggcttcggctatgacatggtgctcctcccatctagacacccatctgacgtcgactaccttttctcccaaccagggatcacgaccatgcctgctcccctggctggaggagggacatccagacctccgttgtcgtccttctcgctagaggagacgtagatggaacaatcacaaccacgctttgggtcgaccagccgatgcttccaggaaagctgacgacacagactccctcatgagggagatgttgtacgttagcttcgcgcccagagcgtcgacatcaacatacattactctaacatcgactccactagctccccctcctatgggtcaggaggtgccaactccaccaatagattggtaggaaccatcggtattcaatcccatccccttccggtttagctttgatcctccagactacccccatacaacaagcacctacactagtgtgtattaggaactcctaggtcttcatatgcggtcgacattagatctgcttgcaacctctcccaactcaaattacgtaggctccgaggcagaagatgatctatgtcctggccta

SEQ ID NO: 46676 - DNA, 395 bp, Zea Mays
caagtctcttgagtatgattgaggcagagtgccaatatcggaggtgaggagagttgtgtgttgtgaagtgtgtcgcccccacccccccgttgaaggccctgagttcctctttttatagtcgcaaggaggaggcccaagggtacaagggttgatgcgcggttgttgtggtcagaggagacgcgtccgagccctgtagcgacatgactggcgggatggcccttgtcctcgtgtccgagccctgtagcctgttcttttgacggggtagagagccgaggctgagctcgggagcatggtcatgtgcccgagcccagcctatacatgggcacggatgtcgagttggagtagttgtcacagtgcttggtatggtcctccacaagattcgcggaagaataggt

SEQ ID NO: 46677 - DNA, 293 bp, Zea Mays
caagaaagtaaagaaatgaaatattgattgattggttcgattgttttcttcgacaatcggtcgtactccatatatagggaatgtctagacctgtttctaggtgtcctcgaacataatccacgtgattagatagataagcacgtacgaaaaaagactttcttgtctacgttaatctagtcacgaatcgttcaggctatcccgcagactatctgggacgcagaccgcccggccttcctagatgccacatacggtgctcaacacattcattatcatgtcacttaccgcaccccttg

SEQ ID NO: 46678 - DNA, 543 bp, Zea Mays
aaaaaaataatattcagaagcttacaaatatgaaattgtttgttgagtatgcataacactaacctgtcggggtagatcctcatgtttaatcctctttgtcacaacttttcttaaaactcttgtatggctttcagaaaacattacgcttcttcagagctggcatgaagtcatcttcatcagaatcaagctgtactgtttcattgatcaaagtttgactgcaacatttggaggatttccaacttctggacatggattagactgttctacgcacggaatgtcaacactgaaacactcctggcttgactgaattgttatacgtttggggttattcagaggacggtccacgtgcttcatttttttaaattaaaagctgcatacataatacacaatattgtaaaaattaatctgttggatatgcatatgtatttattgtgtggtatgattgaatcaatgaacctagttgttttaaataccaagcataaaagcacactgtataaattttgcatggcaataataatgtctcaataaacatctgaatatact

SEQ ID NO: 46679 - DNA, 717 bp, Zea Mays
atttaatccaggagcatatagccttcagagtatggccacttgtagagaactgggaaatgccgaaggagactgtcaccaagtttggcgaaggtgagctggttcgactgaaatacaccttcagatacggagataaatttgatgaaccaaatgatgactgactgaaatgtatcgaagctacaagtgatgaactgcttgggccatattccaaagtggaagataatgccttatccacatcctttgggggttggggaaaaaagagattaaacaatgtttttgatgccattggttttgtttaccccgactactgctacccgctgcgaggacggggaaagaagaggaaggttgctgctttggccaaaattgctgcttcggccgcccccgatgagcctgcgccgaagagcaaaaaactgaaagtccttacccaccggccacgctatatcgaaccggccgtggtgcctgaatttggcggagagacttcttcggctgctaaaccaaaggagcccatttctcctacacagaaggctgaagaaccgactataatgccgaaggtaccctcagccgagctagctgagtcgaagactgataaggctgaagagctgaaaatcgaaagaacaaaaatgttagaagctttaagcccttcggcagaagtaacagtgccgaaggcacaaaaaggtcttgcggcaactcctaaaagaagaaggatggcaaatgtactag

SEQ ID NO: 46680 - DNA, 655 bp, Zea Mays
gtctaagtgagcttgtgcctatgttgggtctcagtgtgtctgccttgtaacgtcgtgtgccctcccttttatagctcaaggggggacatacaagggtgctgggccccgacatgcgggcccaggggcaaaatgaagggaatacatagagaagtatccaatgctagtgtcgcccagaagatctccgagcgccataatgtccgtagtatatacagtattgatatctggcagcacccttggtaacgcgcgagtcatgatgagtgcagtgcatgtggcagcataggcgtactgcctgccaacggaatggacaggcacgccgcccgcagagtggcctggtcaatgtccatcagcggagtggaacgggcacattaaatgctgaggtggcacatcgcctgccagtggagtggatagggctcattaaatgctaaggcggcacaacacctgctagtttgataggcggcgtgccttatccgcaataaatatagaggacgcgcgacccaagggccttatgtcaggctccactcactggctcacgtcacgggcagtaggccacgtggcagcatcgggtctccgcctgggcggggagcagaagcgtgcatggtatggtccagacacgtgtcggctccggacccccgcctggcattgattaaggcctgag

SEQ ID NO: 46681 - DNA, 565 bp, Zea Mays
cagtatcataaccgacttggggtccaacttcacaagttcagagttcttcgatttctgcgagcaaaaaagcattcaggtcaagtatgcttcggtagcacacccgagagccaacgggcaggttgaacgagctaacgggatgatattggaggcactcaggaaaaaggtattcgaaaaaatgaaaagttcgcaggaaagtggataagggaattgctctacgtcgtttggagcctaagaacccaacctagccgagctctgcatggaaacactcctttcttcatggtctatgggtcagaggcagtattgcctgctgatctcaagtttggggcgccaaggttgatctttgaaagcatagcagaggccgaagcaaccaggcttgaagatgtcgatgtactcgaagaagagtggctgaacgcagtaattcaatcggcacggtaccagcagactctgagacgctatcacgacaaggccgtgcgacaacgatccttctcagtaggagacctcatcctccgccgaattctaacgggggagggacggcacaagctatcgcccttatgggaaggaccat

SEQ ID NO: 46682 - DNA, 971 bp, Zea Mays
tagcgctttggttgcttcgcttgaagaaattcctgatgatgaacggcaggttcattttgaggtgcctttggatcccagtgatgcagagataggtgctatgctggatatgttggctgaggattcttctgacgccgctcctgctgaaacattggtggtggtgcccatccctgaggctgacaaagctttggacgctcagaagtctgccaatgttcgtccaaaacgttctcgtcgagctgttcaagcctcttttcctgctgaaagggagaaaaagaagaagatacgtcttcgtcgggtgtctagcttggatcagggtgccggcccttctgctcctgttgctgaggaagtgccagtgcctgaatttactgaagctgatcccaatgggtgtgatccgtctgacgctgatcccaatgggtgtgttgtccgtgttgttgatgaggatgatgaagaagagggcgagatccctctgattcggaagaacagccgtcgttacatagctagtggggaaagtagttgtgttccttctcctgccttgtctgccctcattggtctgcaagaattatctctggcaaactttgatcaaactcttgaggacatggttccagaagatctgttatcagagccggcagatggtggcgcgatggatgtttgtgttgatgtgctcgacgccgggttggggtcctcccgggcagcgtcccgcgcctcatcgaacttggagcgcggtcttgagggtcaggaagctggtttggattgccctgctcccatggaagtgactgagggaccttcagccttagaggtggctgctgcagagaactcggccctcaaggatggtgctggcgcttatctagcccccgagggtgttgccgaagatgatctggctcggatgggtagcgcaagctatgacccagcccccgagggtgttgccggagatgatccggctcggatgggtagtgcaagctatgacccagcccccg

SEQ ID NO: 46683 - DNA, 590 bp, Zea Mays
gtaggaggaggaggctgcttgccgatggagttcaagtatgctgacatgtatgcttagttgacgaagaccgctatattatttcagatagtgagttagctagtaggaccagactggtgcttgttattgtgttggtgtgtttaacttgtccgctttaatttattttcagatcatcaataggctttggtagtttgttggggggtctatctatcagtaggaccttggtgttgtacatttagcactattatatttctttgccgggagaggctgcctgattgttgtgagcttaaacactactttgtgcgtatgtgtcattcagtggctaacatacatgcaggcgagagctctagctattgcagtcatcgatgtcaaatgaatgtgtgtgagagcagtgctatgatcacgaacgaagcacacatttttatagtcaacattaaggggaacttgattatatttgttattccaatcaacaatctatcctagcggccagccacaagcgtatcagttagcaatgtcagtgtatgatcgagaacagagttaaaagctcagacctgcgttgatcgatttcgttcatcgcactcacataattgttt

SEQ ID NO: 46684 - DNA, 552 bp, Zea Mays
agaagactacatgttgtgctagaggaaagagaagataggtgggctaaaggggctaagaggttggcggtaacgatccttgcatctagcagccgacaacattattagacttggtctaagatattagtattgtagtggtggtaggagaggtttgatcttcactgctagaggaagtataataaagctgactaggcgagttgtatatctatccacgtcataaaaatcctaagtcgagggaagagaaaaggagaaagaatagagagggtgtctattctatcgcctggtgaaacacgaagtatgagaaaatcgctcgcttacggcccggagcaagcgatgaattggtgcttctttcctcttgccattactctcatcacgtgcatggtgttgtttgcagccgatataaggctatttctagcaacgcccttaaaatttcatcccttaaaaacattttttgtcctttacagttctctctaaaaaaattcgtcatctatatcttcaccatcttcaacagcgtactctaaattttatcctctataatataccaactacattaac

SEQ ID NO: 46685 - DNA, 390 bp, Zea Mays
ggctccttccgcgcaaagcaggcgagggggcggctacagtgaacccctgcatctggcgtgagagagaagagtgtcgcgaggaaggggagatggtagcgctcgccgctacgcgaggaagggggagactgtagccccaatacgatgaacaggatcagcgtaggggaggggaaggggcatgcattggagtcagtcttaggcttgcatggcgtggaattctttgtgcccaaactccaaagccttgacagttggacttcatgctctctttccagcatcggtttccatgctgtttatatatatgtgttcgcaaatatgataccggcggcaaaaggacaagcttttatcattggttaattaacagagcagcagttgaggcctagcctcggactaaac

SEQ ID NO: 46686 - DNA, 927 bp, Zea Mays
gcgagataaaatcttttgtgtatgtgtagctcccactaaatatgtgcatgagttttgcgatattaccattgacttgatatgtcaatttgcgacatatttagagagagagaacaatcaacaccatacacaaaaatgatgaggtataaaacataattggatagaaagagtaaaaattacacattcaagctcattattgcatagcatatgatatgaaaaattctacagctattacaacaatgagaactcatctcatcacatcataaaagtgtttgtggcattcgagccatgcatgcatcaaatagttattacagaccgattgttcattacaaaaataaaggggtactgcataaagggtactgcataataaactttctccccctttttggcaacaagaaccaaaaagagagagagaagcgtcaatccaatgatcaccagtggggaggaggatgatgaggagcaaagaggtggtgcgccaggtcagaggcaaagtgttcctctccagactgggtcggaggaggagcactgccagaagggtcctggggcggagggtaagaggacgattggcccggatccccgtgatacggaggcgggacaaactgctccggatcatcaaaataagtttcttcttcttcgacgtcatcagttgtcgtaaaaggcaccccatatgcctgctggtaccactcgttgacatctggaggaggagggtggagaggtacatcaggagagcggggggcgaaagggagtacccaaagcggaagcttgatgacgtaggttgtcgtcggtctcccgctgacgtcgagccacctcatggacatccgcagcaatgtttcggcacatggagaagaaaaccgcaaacccgtgggccaatcgggcacccatcccacgacctcgaccacgaccacgaccacgtggtgtgggagatccgcg

SEQ ID NO: 46687 - DNA, 379 bp, Zea Mays
ataacaatagatcttctgccggctgattcgacgtagctcggcatggtggcttgagtactggtggtgtagtcaggagcttttttagtgcctctagagcttcttgtgccactatggtccactgaaacttgtccatctttttgagcaacttgtataatggcatgccattctcgcctagccttgatatgaacctgcttagggctaccatgcatctagtaagcctctgcacctttttctatgatcgtggcgcatccattctcatgatggcctcgattttttccaggttagcttcaatcccttagtggctgacaatgaatctgagtaacttccctgtcggtactatgaaaacacacttttctgggttgagcttccaccggtagcg

SEQ ID NO: 46688 - DNA, 787 bp, Zea Mays
ccagagggggcaaagtgggccatgcccccctcaattttatacaaacctattatacgtaatgacatttattgttaagtggagaaaaaatcaaagttttgatatgatatagtcctattctaaactggctcaatctagctaaaacgagttaataattagctgcctcaaacaatcatgtcatgagcctccttgtcagatcctctctaacctagttgttagctgtcttaaacaaccttgtcatgagccttctcgtcagatcctctccaacccagtcctcacatctattacttcgtccctaatctttttgacgccacctaaaccagtttgccttgatgcccgtttcgaccgtcgcctcctcttgacgcaacgctgcccgaccctgaccctttctggcgcctccacccccgccctgtcgtcgtcacgacatcggcccgcccgacaaagccaggtctcgctcatcgcaatgatgtgacccgtcttcgcgaccaacaagcttggcgaaacagcaagccctgtctctgagctggagacgtcgcttgaccccaccgctttattggcacctctgcccttttaggagatggacatttgatatggtacacgactttgattcggtcataaaaaacttagtattatgtttgcttcttttattcatacaatttttattctttgaacttgtatcgtatattgacatgaaacttgaattctataccatactagtttttttgtgatctcgcttgattttgtcacgtgatctttctagcccccgtaaattctcggttttcgtccgcca

SEQ ID NO: 46689 - DNA, 632 bp, Zea Mays
cagtgacccatgcaccagaaaggataggacaataccccatatcgggtgtatgcctacgcgtgctggaaggtgacgcaaggggtacgatagaagatgatgaacacgacccttaacctcaccgtaagcccactttgcgggactcaccaggtaccacgacgttgacaccagacaagctatagggatccgtatggaagagcggacaaggcataacatcgtattaggagtacgacagcgcacacccccacggacgacatcaggaggactagaaaaaccaggggaactagtcaagcgctcctgagtagaatacaagtcctaactgtacaggtcacccttgagctataaagggctggacaaccttctttcttgacacgagcacacttgttctaacacgctcctgagcaattcatccatgaacactacattggactaggcccactgcctgaaccagtataaccccttgtgccatagttccttagcttggatccgcgtgattcatcattcgaagtaagtccgcgcttgtatccccgccaaacataaatctattgtcccctcagttttcaaaactacgacaaatcttttgcaagaaaattagaaaagcctaattcaccccatccccctcttggacatcgtgc

SEQ ID NO: 46690 - DNA, 325 bp, Zea Mays
taagggctttaccttgcagcatgtggaccgagccaagaacgaggaggccgatgcattggccaaagcagcagccagaggcaaggccttgccctccgacgtgttctaccatgtcatcggcacgctagccgtccgcagcccagagggcctacaaataaccaacgacaccgaaggccgccgcatagtcaacctcatcatgaccaaagactggcgagcgccaatcaccctattcctgcagggatattaccatccaagcgatatcaacaaggccaagcgcctcaaacaccgaagccgagacttcgcactcattgagggccagctttacaag

SEQ ID NO: 46691 - DNA, 370 bp, Zea Mays
tgaaggtgtgtccttcttgaccttcgtctgaggagcattattcccgtaaggagataatgcttcgagggacgagggtccttaacgattaacaattgtgttgccttgttcttgactcacaacatttgggaacaattggccaacaacgagggcgatatttttgtattttacatgatcttttgagtatcccgttttgagatagccatgcgtacaaaaggtagttattgagtttgttttactttcaccactgcgtcacctactttcccgggtggcgccggtctgggctatcgcgcacaactctcacaaggtgaagtgctgcgcaaccgagcctccatcccaaattcccaacgcacttgccttccactgctgctct

SEQ ID NO: 46692 - DNA, 668 bp, Zea Mays
ccgggctggggctggtgtgtttccgctgtggagatgcgcatcgccgtgcagagtgccagtggagtggcaggtgttctatctgcagtcaggaccacaaggatgtggtgtgtaggaggaatcccaatgggaagctcagatgggagccggtgacttcctcctcttctcagggcactatcaacatgatgtcaagtgctgagcagcagtttttagtacctcttcctccacaacagctttatgtgcctgggacttctcagttcgtgccgatgcagggttttcctcagtatcaggtcgcgcctactcctgcaccgtctactcctatgccatctcagtttggagctccgcgcctgcctcatccagtggctcagtggggttgttctgttaatttcactccgggggcttcctcttctgcgggtatttctggagcttatgtgctacccgctacggatggcagggagcaaggagacgtggtgacaggtacgatttcagttgattcgtttgcagcccatgctctttttgactctggcgctagctattcgtttgtttcggaggattttgtgtcgcgggatggtctttcggtgcagaggttgggtcacccaattttggttcgatctgctaatggctccattagtagttgttcagtttgtcagggggtgttccgtcattcttgc

SEQ ID NO: 46693 - DNA, 783 bp, Zea Mays
attaaatgttgcggcagatggagatcttctcccttggccttcgcacggatcttcttactaggatgtgcctttgtcccgtctaccggtgcaagttggctatgagtggaatcagttatgctgacgtgcacaggagccaattatggtgacatgtgcaaaagttatcatgatagacccgacctgtcacctctgattagtgatgcaaagggcacttcgcccaagccagcggctgttcatgatgggtgccacacatacgcgtggagctgagacacaactacctgcctcggtaacacgcagcttattgtgcagcacatgtgcgcggcattgagacacaactgcccacctcgataacggacagcttactatgcggtcattcgagcatgcacgaccagtctaaagctgcacatgccttgcgctagcaatgcatgcctcagccacccgcattaaatgtaggcaggcaagcacgctaccagccgaaggttggtgccacgcgcccacgggccatgtggcaacactagacctctacctgagcggagagcgaggaccaagagcgcatgttggcttgaagagttgggcatccccttgccgagggtctagatagtacatgtggaggtccacgacccacctacgggggtatgtactcatggtagcagcccctgagtattttcacccttgggacatgtggtggcaccgggcctgttcataagcggggagcaggtccgaaggctaatggccccatcaaacgggtacgaacccctaggtctggctgctcagttccttagtaca

SEQ ID NO: 46694 - DNA, 394 bp, Zea Mays
ccctgttcaatattttcttgccccgtcccccgaaggctgaggataaagcgtcatcttcggctctggtatatgctccaagtaactcgtcgctagtagcttcaatacattttagctagtcgtcatctagttcgacaaaccggtctctgtatctgaaggtatatttcaaacgaattaatccaccttcgctggacccggcggtctccttcgacatctcccagttatccacaagtggccataccctgtaggctatgtgctcttggatcaagtctcttgtgccaatgaaagcacagacattgctgaaagcctttttgcatgcttcggcatcattctcaatcgccatagtcggccttcgaaggccgaagcgagaccagatggggcgttggatggtcccttt

SEQ ID NO: 46695 - DNA, 397 bp, Zea Mays
tggacgaggtgaataacgattctgattaaaaggttggattaccaacctagttcgcttctcaggtccttgattaggcctgtcacctccaaatcccttggattttccatggcctgtgttcttggattccactgctagtgctgtgttgatagctctactgtaagtaaggtccatacaagtggccattttcctctgcagcctgtcgttgagtcctcgcatgaagcaattccttttcttcagatccgtatttacttgatcaatagcatactgggacagatggttaaacttgttgagatactgcattacagtatctcccccattctttagtcgaatgaacttctcttgtttcatgtgaagcactccttctggaacatagtgtttgtggaatgctatctttaac

SEQ ID NO: 46696 - DNA, 818 bp, Zea Mays
catgcaatgttggtctcgtacttaattcaggttattatatatatattgccccagtaaactgaataaataatttaatataggctacaatttcatctagcaaaagaacaaaaaaatcatgcacccctggggaggagctagctggcagttagaactgttagtgatgcttgcaaaagacttttctctcctatttggttacctacatcctcgaagccggacacgcgcaggaaacggacgaattttatttctccacgcgtataggccaacgaagataaaaaagcttattttacatctgtgcgtacaggtcgagatgctgccgtgcagttaaccaaacatgcgcacaaggatggtcaaagcatacaaaggaccagggcgcgggcgtccggccaaccaatccgtagttcgtgactgaaagcgttcaataatcatcaatatttttggtgctgccatggaacaactcatgtcccacaaaatacttgtattaatttatcgtactaacaacatatgagatccacctaccagagctaaacatcgatagacaatggtgactcccataggtctgcatctcattgagcattatctctttaatagagtatccgagatcaaaacaatctcccataaaacaaaaataaattaatttgagatttggaatccagggcacgcacatggggctacctacatcatagggaacacactaacgccgaggaagccatctgcaacgtaggacctattataaattgttttatactgcccaaaaatagaataaacattttaatataggctataattttagctaacaaaagaagaggtgcaaaaggaaa

SEQ ID NO: 46697 - DNA, 320 bp, Zea Mays
ctgagttgggtgtgcatgacctattgggctccagcaaccctaatttgttgggcctcggccaaccccacctaggctgggtgtatcatttggtatcagagctaaggcccattttaagaaggtgggaatgatgaggacatcctccactattacccgttggcaaaagacgcaattggcccaattggcccaattgtagtcggatgacgaccgtgtgagcctcagaattatcccacctcgcttaacttgggaggaggaagccactttaaaaggaagagccacccttccccattggactagtcttttggggcgattggacatttccc

SEQ ID NO: 46698 - DNA, 681 bp, Zea Mays
ggatcatacccttgcatcttgccgtcttggtcgcctccgattttaccccgctgtgcgtacataaatgtgatttcttttttcttggttccttctgctgcttcctttgccttcccagctgctgtggagcgacgcgcatttctcgccttcctttgggcgtccgtgcgaaatgtacggattcgattttttttcgccgcttaaggtttctgattggtttgttttggtttaaaaacttatctaccgcccaatgctgcttgcattgagggtcgtactagtcgtgtcgaatctgtcgatgctaagttgaggatcctttcacactcatctccctgctccgcaatggtgaacaaatctgggtccctgcctttctgatgtgttcatcccacagtgagcgaatttgggccgttacttttgctgatatattatgttcctgtataaagtcgccatctttattcgattccgaataatgccgcgcacacctcggtagattttcctcgtggaattcccgcaaacacgacgtcacaaaagtcgctattgccatccatctttgttggaacgggacagaaaccatgttcttctccgccggagttgtggccttcgcgtctagtctaatcggccctctctctggtgggtttgaacagttcagatgcgtgatgccgcccgcacttgcagcgccacaacctcggc

SEQ ID NO: 46699 - DNA, 362 bp, Zea Mays
gtgtatgtagtattgagagtgtgattgagagcctgtgtgaacctgtccttgtaacgctgtgtgccttcccttttatagtttaagggaggcacatacaaggatgctgagccccgacatgtgggcccaggaacataatggaaagaataacattatgtgcgtaactaatgctagtaacgcctgagcaatcaccgggagtcttgatgaccacagtccatgcagcattgatagccaaaacgtacgagtaatggtgaataacagcacggcccacgtgtcgtggactgtgcatgccacctgtcagtggaatggacagacgcacgtgtcatctgtaatgaatgctaaggcgcgcatagcctagaggcgac

SEQ ID NO: 46700 - DNA, 410 bp, Zea Mays
ctgggggtaagttaggctcaaaggaagtagcatttcatgtgccagtagaattgggtgggcatacctaccccaccaatatgatagtgctaaagggccaggacatagatgtgatcctaggtatgaattggctagctcaacatgaagccattattgacacaaagaaatggactattcagataaatacagtgttaggaggaagtcagttaaagatccagttgtcttctctagaagaagttcaaggaagggcttataatgtgatagtcgaatagttagttaatatcacggtgctgcaagaatttccggatgtgtttccagaatagttgccaggttcgccgctagaacctgatgtggaattctctattgaacttaagcctagcacaactcctatttctcggagatcatacataatg

SEQ ID NO: 46701 - DNA, 354 bp, Zea Mays
aacctagagaagatcaaggccatcatgagaatggaagcgccacgatcacagaaaaaggtgcagaggcttactagatgtatggcagccctgagtaggttcatatcaaggctaggcgagaaaggcatgccattctataaatttctcaaaaaggtggataagtttcagtggaccacggaggcacaagaagctctagaggcactgaagaagttcttgaccacaccaccaatgctcaagccaccacgccgagctacaccgaattagtcggcggaagatcttttgttatacatctcctacacgactcacgtggtaagcaccgcgttagtagtcgagcaggtggacgaaggacatgcatac

SEQ ID NO: 46702 - DNA, 524 bp, Zea Mays
cgaccgtggtggattgaggcctggggtgcagtgaaggttgggcgaattcttcgccggagttgggatcggaactagatacgcggatcactgtcgaccggccccaccatcgctataatccgaggtgataattcactcaccttgttcatctttttgttcgcgttcggtagtacttgaccgtagtgaatttggggcgtcgctgtagccgggcgacctcgccggacaccgcgccatggggcggcgccgccgtgtccatggtcgggatggagaaaaatgccctaggaccgttgatcaacggattgatggcaaagatcagttagagcttaccccttcgcgtacctcttctgcaccgttggatttgataggagtggccatgattagattccagataccccttcgtcgttttggatctggcgcattgattagtgatcgtgcggccgggagggtgtcggggtcgcaagcaatcctcggccgtcgatcttggatcgggcgttggatgtgaggaactgatttgcggaaggataggt

SEQ ID NO: 46703 - DNA, 496 bp, Zea Mays
cgcagactgtgcgctgactgacggcgcgaaggccaaaatcggttcaaccggtttttataccggttcaaccggtttccaccagggagaaaccggttgagtggcctactcagccggtttactcaaccggtttccagatattgcccggaagggctataatagcacttagcaaatatgacatgagatattttaaagataaaaatgttatttctcatttcatattgctcaaacaatcaattttcatccgttaagtttgatcaaaattttagttattaagtcacgtttcgagaatccaagatatttagctcactcctaagaaaacaaaatctagtctcatcaaggggttttgtgaagatatcggctagttgattttcgttgctcacatgaaatagttcgatatctcctttggcttcgtggtctctcaagaaatggtgtctaatgtcaatatgtttagttctagagtgttgcaccggattgtttgcaagttttatggcactct

SEQ ID NO: 46704 - DNA, 675 bp, Zea Mays
gcaagagctatatcagttattcgaaaagtatgcccggtctgaagagctccaccagcgaaagatcgaatcacaacaaaaacccaaggacaccccgcagtccagcatgatatgggtcagaccggcgcagtccgactttggccggccaaaccgcaaccaaccataagtgaacactatcaccaatcaacagcagactggagacactgctcgtcgccaagagtaccccacacaatagggccacagtggcaacccagaggcagaggcaaaggccgagtcccacaaccgtgatggttctactacctttttcacggcaaagactccacgcacccccaccagggactgccctgaaaccaaggctaccaaagataggatggccagaaatcaaccaaccgacaaccaacgagttgttgcacacacctaccaccccaacaataccaccagtgacaattccacaatgaaccattccacccccaccagcaaaaccatatgtaccaacaacaccaagagatccaagcccttcctccaccaccacatcaccaaaatcctccaccaccccaccaacacccaaacaagaggacttcgccgatcaacctttccgtggggtcattcacatgattacctagggatcgagcatagacttcagcactaaacgacagaagaaagatcactctcgaagag

SEQ ID NO: 46705 - DNA, 301 bp, Zea Mays
cggcaacataaactaaaaatttgttagttctaaactccatgccaattgcacatttcctattgtaagatgtttactgaagcagcaaaagtaattaatattttgtgtagtttctgaactccatggaccttttcacaatctaaattcttccatatcctggacttcttctaaaggacctattctggggatctagaactctgtccaattccatgtgcctcttgtatcctaaggttgttatcattatatccatcctctatatctatcctttacatatttctctaaaagattcttctctatatatctc

SEQ ID NO: 46706 - DNA, 501 bp, Zea Mays
gggaccatactgttaacagtacggttttagatccctcccttctgtccctttgttgcaagtcttgccttgtcaacttgggttgaccagcaggcacttggtcataaggaggtggtcctgggacaaaggaagcagatggtgaacacgcactcatcgctggctacttgaggtatttgaggccgaaggaaaactttgccttggctcctgcgactaaggctagatatactctaggatgtgaggtgaacagtatgagtatgtattgaacacctcttttgactgtgacggttgcgcggctgacgaagcaagctctttctaccaccaaagcttcggcctccccttccacctcttggagcaggtggacgaaacatgctgcgcgaaggttgctgctgagagcttgcctattgctgccccgactgaccctaatactgggccatcttttcctcaccttgcaccgggatatggatacttcaaacatgccttggatgaaaccttcctccgattccc

SEQ ID NO: 46707 - DNA, 644 bp, Zea Mays
agtgcccgctctgcggcgagatcgtcggcccccctcgcacgtcgccctcgacaggcggcccttccctccgatgccctcgcgcttgtagtgtccccgccgacgaggcgttcacgctgtgcgaggtgctggtgcgacaccgtcacggtgtcacagacctgcaggcagatcctcctctacaggcccgtacagctttccacccgtcctcagaccgacgtgcgccgccattcgcctccgcctctccctctgcgctcgactgagcccgaccccattcactgcgcaagcaacccctgccctcgacgtcgatcagcgccgctcccccgttccccgcaccacctcccccttggcgctcccaatcccattcatcgtgtatgcacccccgccttggacgccaatccacgctgctcccaccgcccccaacaaccacgggacaccaccaattgctcccccaacgccgatttggcaacgccgctcctgttccccgatttttgatgcacacgctaccattcctcgatttgcgccatatccaaggtcgacggatcctccaccatcacctcgcttcccataatgtggcctgtgccatctccaaggtcgatgcatccaacgccgctgctacccgatctccaaggtcagtggatcctcctccg

SEQ ID NO: 46708 - DNA, 468 bp, Zea Mays
ggaaaaaatagggctcaacaccactagccagcagccaacaactcattggagcataaaaaccaaatcagagcacaaaatcagcacaaaagctgaaaacaaagctagtccctccagaaagaggtaagcggctcaatacaactagcaaaaactctaagaggctcaaatctccccctgtcaaaacactccccaaacagctccaaataactagaatcctaaaaaattcagaaattaatccccttgagaggaaagcccaaaatatacaagtttctcccccttgaaagaagtctgacgagaactcaaaatctctcccccttgttgagaaatggactcatcaagcacaaacaagggtaaaacagaaactcgccctgagattaattgggttaaaagccattgacaaaataatcaaataaatcccaaggtacattagtggtggaagaccgtgagttactttcttgatgaccttttgtc

SEQ ID NO: 46709 - DNA, 811 bp, Zea Mays
gatgcatacaatatatatgaagcactagttataaccattacttatgggtgtcacttgctgctgtcgtagggtctatatggttgactagacgggtgaatagtgttttttaaaacttaatcgagttggctgaccgaaattattgcggaattaaacttaacggtctagccacatccgagatacgaccacagcgaggtagctagaacttgcggccacgacaccacgtgtgcatggtgttactaatcatggcgaggcagcctaggccaatagattgatggccacagtatgaaagtatgttgacattgcaccgcgacacaacattcatgcaggagtagtcatggaaacacgcacgcagtgtcttcatccttcaggcagcctgggtcgaaactttgtggtgcacacgtggcttagatgtctaccttgttggtccccatatgcatagaggtgacccaatgcacaagcacgctggtgatgtatgcaatctgctctagagattgtatcttttatacgatttggcttctagttccaattgcttttaatccatcaggacacctaggagactgatagggagtggccggcaacgcaactcgactacaaggtgtggtttgtcttcgggtggttccacatgttgtgcttttagttgtcatccttatttgcttgggctcctaccaatttgcgcgttgccagatgagagtgcaaagtgcaccgttatcaaacaccacgaccacatgaagaaacacctcggtgagcctaaggagccatagggtagagtgtacctaaagttgcccaaaatgagccccgtgtaatattggag

SEQ ID NO: 46710 - DNA, 556 bp, Zea Mays
gtcaggagcactattgttattaccttgctggcggtgttggtgtggcataccttctgtgttttgatgaatacgacgatgtaggcgcaaatctctggtggccgcttcatcataattaccttcttcatcaaacatggcatcatcgggaagacgaggaggtggtggtggcggtgcttgttgttgcgtctccaacacagcaagtctatcgacgatctgggacaatcgtcgatccagcctctcgtaagtcttgccaaggttcatgtcaatgaaggcatcatgcactgacttgtggaccgtctcctccatttgctcctttaggagcttgttgtttgcctcaagatcttggcggctaacacattcatcgaagtctgtagggatcattgcttcctcatcgtcgcctgccatcgaaacacaaaaacaggaaacaaacggtgacggttatccctaataatttcactacacgctcctctcaggtggaacacaggaacacgctctaatgtatcttaccaagctcttaaaagtgtctgacgaaatacaagaaaaggatggtacaatcgga

SEQ ID NO: 46711 - DNA, 286 bp, Zea Mays
ggctattgacgaagctatcgacaagctgttgaacgaagctgccaacaaagtcctgaaagaatactgaagttgtgtatttttgatagttttgtttccttgtacgtagctttggtttttgtaagaaaaattatcaacacttgcatgtatgttgatgtaatatatttctttgtgattcgtgaaaccttcgtacataccgtttttgagccggcagcgaaaaaacaccttcccttcctttcatgtttcagaaaaatcccccttctttattgaagcaactgtgtaattcttg

SEQ ID NO: 46712 - DNA, 582 bp, Zea Mays
cactgatgtgacgatcaggttacattattaatcgactgagttaagacattgactaagcattggttgcgccctggcaacacgacgcagtatttgtgtcgtacgaacttggttgcgtcatgtgattgctatgtcacaccctcatttaatcgaaccgcttctgttgagtcggactgtcatcgccgagtcgcgtatttttcgcatgccctgtaggcactgttcatctgtcgtgatcatcgagccacaattgcgcctgttgcgcacgttgcgtggacttatcatgtaccccgattaccgagccatagttgtgcatgttgcgcttattacgatggcttgctatgctgcgtagtcctgatggtcgcacacgcgttaacgccacataccctagagcttgtattcacgtagattgtggtgggttgtttaaccccctaaagtcacattaagtgcaaccttcttaaacaattttatttggctctatattttatttgactgtgttgtgtggcatcatatttatatatcgccaagtggccataacaactatatcaagctctatagtgcttggaaatctgggaaattaaattgaaa

SEQ ID NO: 46713 - DNA, 504 bp, Zea Mays
gtctagacaagagtgtataaataaatcttcaaatattatgcattatatgtggtatagtcttattcgcaaaaatctcaaagcatgaatataaaatcagtttggtgcggtttgcgtgcggctgcatgggcagcgcctgcatgtcggcgtacgccggtacctctagagcctggccgcgcctccgttcaatctgtacacgaagcgacctgaactaagcaagacttgctttaagactccaccagtgatggtgcatgccggcgtaccaaccaaacatgcgaagagtgaaccgtgaactcagtcttcgttgcaatagtttacttgttatccgtatagattttgtttaagagattaattagagacctagtttagagtgtgagaaatagaaatcctaacccattcctttcttaggccctccatgttcctttcacgtgtaatatgctttggatttcgttcatgtaccggaaacaaacggaaaggtgacgcaatcaaggagccagccagatgaac

SEQ ID NO: 46714 - DNA, 1242 bp, Zea Mays
ctcaaggtcgttgcctgacttgcctagaaggctagaagggtgatgcttaatgtgactggaaatccaggcctcaaaaaaggtatagaagatagcaagactccagacaatatggcacacactgaagatgacttcagatcagctatgtgggttgcagcagtttcttctgtagttgtgtggggtgggggggtgcaatctccttttatgtggctcctatcccaacgtaacaatctcaagatccgagttgttgcagttggcaaacacagatctgtcattgtcactgggtaaaccactgtaattgtcacactagcagtcatctgattcagttcaaccctctgatgcatgtagctgttcatcatgataatagaaacaattcatgtccaaggtggcaatatttatattgtaccgggataaccatcacaataggaattcaaaacttggtcgtaagttcttgttagtagttaacagacatgatgtaactgatccatggtaagatataattctgttgaagtgggtcctgttactcctgtatgaatgcatgtggaataacttcttgaaaagtcacatgtaacacgtgacatttggtaattgaaacaaaaatatgatgacatcaaaccctaaacaacaaaattgatgttccttagaaacaacaagagaaactaaattcatgtgatcaattcattatctaggattatgcttgatgtaaataatcgtatcatacaacacatcggttaagatacattgaatcatgcacacaatgagcatagtacaacactacaactcaacgttaaagtacctgcatatacaccacaatcacacagtcctattttagatgtatctgcaacatattgggtttaagcttagaacagtttcttttttctaatcatatgcaccacaatacattatccacaaaccaagttgaggtaaatttttcacaaggaactgttgcacataactctttcaaaacaagttcagcagattttctaagcaaggacagtacgaaggagtaatcataaaaaggttttagcaaatagtaacaacaggaagcaacaaaaaaaagacaaaaatagttcatacaagaaagccttctttacctcaaagtgatgactaagtagaagaacatgttagagaaactatttggtcctcccttaaaaaatcactttcgtttctttctgcatccaggtgtcctgcaaaattacaaagtatggcaactaatacaaatttaaagaattggctgtatacttg

SEQ ID NO: 46715 - DNA, 546 bp, Zea Mays
ccatgaatggcccttcccatagtggcgacaatttgtgtcgtccttcctacgttagaattcggcgaaggaccaagtctcccactgcaaaggatcgatgtcgtatggccttatcatgatagcgcctcagggtttgctggtatctagctaactgaattactgtattcaatcgttcttcttccaatgtatcaatattctctagtctggtagcttctgcctcagctatgttttcgaagaccagccttggtgccccaaacttgaggtcggcaggtagcactgcctccaaaccatagaccatgaagaagggagtgtttccatgcaaagctcgactaggttgagttcttaggctccaaatcacatacggcaactctctgatccactttcccgcgaacttttcattcttgtcgaagacttccttcctgagtgcttccaatatcattccattagccctttctacctaatcgttggctcttgggtgtgctactaacgcatatttgatctggatgcttctttgttcgtataaatcaaagaatttagagctagtgaaat

SEQ ID NO: 46716 - DNA, 552 bp, Zea Mays
gttccaatatcattgtgaatgtttttttgggaccattctagcgtggattgtggtgggatgctaaattttttgtcaaaatatttttttcagttctcaccgaaagaaagaaaattttggaagtttcgagccaatattctatatattaaacccatatattaaacatgggagcaagtctggccgttgaagctatctatgtcgtcgtttttcccctcatccatctgatcttatcttagcgacaataaccggtcttcacgtccatgcacgacaccttctgtaaactgtcgtattatccttgctgatctcaaacatgtggaggttggtcttgcatagtgaagtcagagtttctttatcaagggatgcagctagacaacggtaacatggggcatgcttttggtcgtggacaagttgaggttgtttcgcgcgtctgaggtctagtggctgatgggagcgacacgttggttctagatagcagccttatacttctgtcgcgtctacctggctttgttagggtgagtcattcatggtctatcatgaaaagtcaaaaccattgtc

SEQ ID NO: 46717 - DNA, 784 bp, Zea Mays
cctcattactattcaatctgcagttggaatcaactctaattaaccatattgtggaagcctagaaaatagatgccggaataactcatatcaaggagcgtatggcaatggatcctactacgtgtttccaccttgataacaaaggtattctttggtttaagaattggctagtagtcccaaatgtctcgacattgaggcaacagatacttgatgaatctcatacctcctggtattccattcatcctgggagtaacaagatgtatcgagacttgaaatcgtgattctggtggaccaagatgaaaattgagattgctcgttacgttgctagatgtgatgtttgccaatgggttaaggctgtacatttaaagtctgatggacccttgcaatcgttgcctatctcagatgggaaatgggaggatattggtatggattttattataggtttacccaaaacatccaagggttatgactctatttgggtgattatggtccgttttactaaagtcgcacactttttgccggtaaagactttgtattcaatgaagacttatgccgaactatacattgctcggattatgagtctgcatggtgtgcctaagaccatagtgtctgatcgagggcctcaattcgtttttagattttgggaagacttccacaaatatcttgatactaagctaattcatagttcaacctatcatccacaatccagtgggcaaaccgaaagagtaaatcaaatcttggaagacatgttaagggcatgtgtgttagcgtattctggaaaatggga

SEQ ID NO: 46718 - DNA, 870 bp, Zea Mays
gtagaaaccgtggtctcacattaaagaaatatttagctaaatgattccgtagctgtcctgccaattttggaccttgtagccgacagacgctagtgacttcggttgtcctgttctgtgaacattctgttgaactttcacaatcaaggtatgcagttataagtggttgacttttgatttaagtttcctatatatattgctctacgattatctaaatatttcagttcagtttgttacatagtgtttgaaaattggaacagggcccgtgttcctttactcaacaggagtgttggagatattgcatgttgctcagccagaaatggtgaaagacatgggccactggactccatcagagctcgggaagccacaacatataatgaaatcacggaaacctctcttcggattaggtatactagcagcaaatggcgacctttgggcctatgagaagaagatcctggcaccacagttctttgtagaaaaaattaaggttctaaagtattacttaacgagcccataatataactgcatcaccagcctaagcctaactgtgttgttcttacaatgatagggtatgatagggctaattgtggatgcaaccgttccactgttacaatcatgggagaatatgctcgatggcacaggaggtagtaaggagatctatgttgatggatacctgaggaacttttcagcggatgtgattgctagagcatgttttgggagcaatttcgtagaaggaaaagacatattttgcaagctcaggcagctccaaaagttgatttctgaacaggatacacttgttgggctgtctgcagtgtggtaagtggacttttgatccgttgagagatttctaatgcgatgggaatggacaccttg

SEQ ID NO: 46719 - DNA, 481 bp, Zea Mays
cactttgttggaggaattccaggatgtctttgttgttccataacagctactaccatccagaccttttgaccaccacataccattgttccctggctctataccagtcaattctaggccatataagtactccccattccacgaaatcgaaatcgagaagcaagtttcagggttattgaaggctggtctgatagtgcatagtgtcagtccattcgcttctccagttcttctagtgcaaaagaaagatgatacatggcagttttgtgtcaaatatcgcaaactcaatgccatgacaattaaaaaccggttccctatgctggtggttgaggagatttttggatgagctatcaggtacccattttttctctagtcttgatatgacatcgggttatcaccaagtcagaatgaggagactgaggagtataaatctgccttcaaaacacaccaaggtcattatcagtttcgagtaatgccttttgtcctc

SEQ ID NO: 46720 - DNA, 525 bp, Zea Mays
tagcgactaagatgtgcttcatccaaaatttgctggcggatctcatcattcttaggcacaactatgcggtggttaaaccatacaacaccttgatcatctcttctgaagcagttggctttaccagcctctattattctcatgaatgtgtttcattccctcattattaaatacacaaacaaacaaaactccaacatgatgcttagagtagtttattagatttttgttcacttaagtatggttatgtctatgttctatcatgtagatgacaaaacatgtaatacaatcaattcttttccttattactttcagattgggtattacaaatcttacccccttaaaaagaatctcgtcctcgagattaagaggaactaggaaagaggtggggaaattctatgcgtagctcttcttatctctcccaagtagcttcatcttccccatggtgactccattgcactttgcacattttaatcactttactcctcgtgacatgagtcaaagtatcaaggatcttgataggatactcaa

SEQ ID NO: 46721 - DNA, 956 bp, Zea Mays
cctgagtaccactgagctaccgaaaataaatgttactattggaaaacaaatcttgaccagaccaccaaaatccaaatgataccctaaacgttagaggagcacatcatcaagacctaagtacaaaaacattagttaacactccaataatacatgatgacagctatcatctctccttggtttgtgtacgcttctttctaaccaatttagacctagcaatgaatgtgcctcgattgccttaagaaaaaagtatttacttagcacataatttctagctgggatgaaagaaacccatggccaactcactggtcaaccatagcattgttgtaacatagtcttggctgacgacacatttagtattaaagctcaacaatcacaaacagcggaacaaatcatgcaaaaagatcatacatattccaagtaacaaactgtgtgaaccaaagatgtagtatgcatagcccgtccctcacaaatccaggtatctggaactcatgccaacacagacacacgcaccaaagagtaaaaattcaccaaccacacacggattctgcaccggatgatagacggtaacacatttcgtgcaaagaacaaacatcctaatgcagatgcagacggcatgagggggtctagcagagcaaacgtggacttacggagtcacagacaatgtctacagggcggcgggcagcaggagcagaccacacgctgccatgacgacggtgggtgcccaaaccaaagtggcgaacaactacaaagacgggctagagaagctatcggttccaggacctaataaggcaaacttggattgaggagagagggaagaaaatattaaaggggaggaaagtactcaccgtcgtgcagcacagagcgcagtgctgttttcagccatgcctatcactggtgaggcatgggagcgagggagatgactactggtacggtgatgacggctacgcgcccacccg

SEQ ID NO: 46722 - DNA, 500 bp, Zea Mays
cgcacatccaaggaaagatgctttgagaaatctatggactgtgtgaagaaaataaaaaccagttttgccaacgtgggcgcctattcttccgaagaaaacttcatacaaggcgaccccgaaggcattattgaatggttaagtggggaggccaaagcctttgaagaaattctaagtgaccgcggggatgtatgcgcgttcttcagtgcgcgaggaatttcggctatcttggagaaggcaggatgcgaccatatcaaaaccatggcctaggacgaaattgccttctccgtaaatgatacgaaggaccccctcagctgaagcaagtttaataggcgggaaattttataacgacatctgggcaaatggtggccgagaaatggctcacgaaattatgaaaaagagtgaaaaggacatccatgagacccgggccaaagcaagacaagctgaagaagttgtagagcgtgaaaaacgtataggtattatgtcgtgatttttaactttgg

SEQ ID NO: 46723 - DNA, 403 bp, Zea Mays
aatgatgacagggaaaatcatacccagagcagtcagcaaaactcacaatctttgggaatgcaacaaacctcttacaggccaccagctccaaggcacagaggggggagaagcttcggaggacagtttggcactcagcccaggagattgttctgcttattctgtggggaggataagggatacacaacaaggacgtgccaagtcacgatccaaaagcagaaggagatcgctgaagctgaagcgcggcagaatcagccgaagcaggtcttgcatactgcttcatgatattcgccatatatccctgaatatgtgggcaaccagcaacctatggcgtcagttgcttcggcgagtcattctcaagctgcttgggctcaattaccaccaccactggtgcctaccttggttc

SEQ ID NO: 46724 - DNA, 983 bp, Zea Mays
cttttgagatggcatagaaggtctgaccctggggtttgggtgaccaaagggacttctaatgatgcagtggggatgccatgcttttccacaaaactagtggcgatgaaagaatgagatgctccagaatgcacagtagcgggggtaaatttgactaggaactcactgagtactactctaggggcttgttgagcttcttgggcatcgacgtgattcactcgattcctgtcatggaaccgggtcttgcttaactggctgttggtggagggtgccttggaggcggatgccgaaacattcttggggccatttaccgagttagagaaggcaggtacggatgtcttcaactgcgaacaattatttttgaaatgactggggtctccgcagtgccaacaatcattggttggaggttggtcgcttgcaacggattgggtgtggaaagaactttgactaggctagttgagtcatgatggagcagatcctggtggcttgttgaattcgaccctttggaagggaacccaaaagatcgaaccctttggtgtctgtcctattgttgagctcagagaatttggatttttctcttgaggtgacctttttcctcttgtcgtgctctttccacctggatggccttgttcgagaggtgcgagaaactgagaaagtcttggctggcaaggatggtcttgagttccggtctcaaccctttgaagaaacggtccatcttcttggcttccgtgctgacatcatcaggtgcatagcgagcaagttctgtgaatttgtggatgtattcactgatgaatctccattcttgagttaactcccgaaattcttcttccttgagctagacgattcccaagggcacatgatgctctcggaaagcagcctcaaattctgcccaggtagcatctcttacggtagcgctgaaggtatcccaccaggatagggccatcctggagagatcatgtgcagctaggtgaacacgttggttttca

SEQ ID NO: 46725 - DNA, 381 bp, Zea Mays
tatgttgaaacggagaatgcagataagaatagaaggtctcatgtgactatgcaagatttcttttgctatcgttttcattataagaaaaatgagccaaagccttttctgtgttatggactattatcaagtcactttaaggtttctctaaatataagtcaacttcaatatatttacaaaccaatcagtttcaccttctacaacaatgtgcaaaatgtcaataaacatttctccaaatgtaagtcaacttcaatgtatttactatttcgagttcattttgtttaccaatttatttacatttatatgttccgttctaacacataattatacatacaagcaacaagacaatcttagaattgtgaagaccaggacctggaaactttt

SEQ ID NO: 46726 - DNA, 878 bp, Zea Mays
cgcgcatgtgggatatctgcctctgtctggcgggtcccacgtgtcggccacacctcattcctaggcgctgatgcttggtcactgcaccgtggggtcgtagctgtcagccaggcccatcatccctgttcgcgcgcggacgaatcgctgatcactgggatcggtgtgtcagctccttcttcttcgctgaccgccgaaacagaatcccctaaatccgcgccgcccagctgccgttcctctcagcgcggactcactccatgcctctcaacagcgcaacgcggtgtttgcttgaaactaccgcgtggggccacctcgtcggatgaatcttcttcgttctgttaggattgtgccgcaaatccccattgccgaatgacgaagcaggatctccgtggctctagggtatatataccggtggcactcccctccttgaaccccaagtctcgacggttagtatctacgcctcgccatgacctccgagcatgaggaaacgctggtgggagatcgaacgggaagcagagaatgggatgaaggggggagtctcggattggggcaggagaccgtagcatcgtggcctggatcatgacttgagcttatgggatcatccgtgtcgtgccgcgcgttcctagcggtttgccggccgaggtcaacccctggagcttcatggcgcgtgccggagttggtggtcggcgtcacgccgtggaccgggtcgatcagcccccttttgcatcggtgagcccctttaacgtgttcaccatcttctatgccctctaatacgcgttactgtgtctcaaattgggggcgtttgtggtgctagcccgtgttcaccagaaccacaccatcgtggtgccgcacccttgctgtgggcgggagtctcactgcca

SEQ ID NO: 46727 - DNA, 454 bp, Zea Mays
cgcagcactctctcaagagcacgccagtgattatctcctagtttcgacacaaaccgacttagcttactcacagcataagagatgtctgtccttgttgcacttgcaaggtacatgagcgagccaatgatctgggagtatgtcaattgatcccttgctattctccgattctttctcaatagcatgctagggtcataaggtgttggagcaggatcacagtcactaaaaccaaagcgactcaataccttttccacatagtgagattgtaactgagttaccccaccatcagcttctctaacaagcttgatgttaagaatgacattagcttctcccaaatctttcattttgaaattgctcgatagaagatttttaacttcctcaatcacattgagatttgatccaaagatcaagatgtcatcaacataaaggcacagcataacagactcaccccaccata

SEQ ID NO: 46728 - DNA, 315 bp, Zea Mays
gaaagccaaaacatatcaggtcgggaactcttgcctgattaaaaggcaaggagccactcttttccatgaagtcggcatcacccccaccgtgatggcgagaacgtgggccaccacttcctccttctttaggttcatggtggagttacgatcaaagtcgcccttgtcggtgaactaccacattatcctatagcgagtcgcgagaggctgaagtcggtgttgcgtgaaggtacaaattagcctcttgcctagaaggccacgtttgcgctgcttggtgacatcatctagtatatacgatatcttcagcttgaacttctt

SEQ ID NO: 46729 - DNA, 696 bp, Zea Mays
tgggaaaattagcatgcacatgttgacctaggcactgtgggcagaactgatatgggaaaggggaaagggaaggacaaggagaatctgaatttgctgatttttgttgctgcagcccttgatcctagatataaattgtcagacaccaaactagtaactgggagatatttagtgaggaaaatggaaataatgtttgggctgctattaaagatcgtgttttccaattgtttgaggaatataggaacacacatgctccaagtgatgttacagctcaggataatgatcccaaggaaccaaaacaaagcaaaggtggtagggtgaaatcccttcttgccaaaaagttgaagttacatggtgcagtaagtggcagcaacaagtctaaacttgaaaagtaccttagtgaagatactgaaccagaggataataagtttgacattctcggatggtggaaggtgaattcatcaagatttccagtattagcaaaaatggcacgtgatgtgttagcaattctagtgtcgacaatcgcctcggagccgtctttagcacaactagacgaagtctcgatgacttcaggacctccctcactccattcatggtgcaagtacttgtttgtactcaagattggctacgaatatcaactccaatcaatattcaggaggacacggagagattagtagagttagaaaaagctactcattt

SEQ ID NO: 46730 - DNA, 563 bp, Zea Mays
aagccattggtgatcccgagatgacacaggcattgagggcctgtgagagaaaaaggatgaagaacataatgacattccaatacgattggaatgatgaagttattgcacaattttattctaccctctagattaagcttgttgatgaggaaagtccttacaactttccttatctcaatttctatattgaaggcagctggtataaggtgagctacaggaggtttgctcacatcctgggatttactgatggagatatttcaggagacaaaatcaagattcatgactttcgtcctcccaccaaggatgaagccaaggattttcatatctctgagtctggtaaatattgggagtctaccaatctgcacaagtactacagatacataaattctctctgcagaatgactctcatccccaaagggggtaatcaaatgaatatcctgggagagagcaaagtcttgctctcattcatgaagccaaacagttctgaaaacataaatgtatttgatatgatttggcaagaaatcatccatgctgcctgcttctctctcaagggatgtcttcacgca

SEQ ID NO: 46731 - DNA, 595 bp, Zea Mays
gacctccctataacctagacaaacataattagagtataatccaatttactaagtctcagaaactcacctctatctcactttctcagtttccccgtttcacctcaaactaggaccaaagtggcactttcactacaagtcaagttagagtacaaaccaaagtgccaaatacataataaaaggtgtatgcaacatattcaaatgttcaaacctctcatacttaacctttttcatcatgttaccctttttgtcctatttgagctcgatgttggactccaaatctccgagtcacatgacttgatcattctagccaatccttaagctccaacatctttcaatcatcacttagaacatttccaaactcaggagtgaccacaactccatattaaagtgcacttagctctttgggcccttataggttctgactttgatacttttccaccttctagtgaccatgactccactcatgctaagatgttgagccttatgacttaaaccataaaccatatgaattacctcaatggttgtaagtcatgtccttgtgtcaaggtcttcaacacaccttgcctcttcttagcttgataaaccttgacctctt

SEQ ID NO: 46732 - DNA, 594 bp, Zea Mays
accgatacttggtctgggtggatcgcgtggtcgtcgggggcggcgcaggcgctgccgtactcagagccagagaaagaagacgatctcgcgaccgtacgatccggattgtgcggatgggattagatccggggttaacccaatgtgagccatcgatcgtcagtttgagggctcggatttgatgcaaggtaccctttcactcaattagattcaggccgttgagatgtcatctgatggttgtggatggataccggttcataagagtgcgttgtgatctggtccacccaagtgtgatcggacgactgatagtaaaccgtaccccttcgtccgagctattttgcagaaaagaccctgcgattttcagaaatatacccgccgtccctcgtcggttggtgatcctcacatctgggtccctggaatttactttttaaaccctgcatgtttgaatattaatagccgcagtccattttaatttgtaataaataaataaaaccctggaaattgatttgtggtataaatatgatgcttataactttgaaaatccataactatctcattttaagtccgttttaatccatttcaattacattagactca

SEQ ID NO: 46733 - DNA, 365 bp, Zea Mays
cgcagttctgagttcgtattctaggttgagtttggttgctagtttagatttgtttttgttcagtttgattctttccatccgcttccatcctacaaaatcgaccctatccacaaaacatatcctatctcgaaaaccgaccctatccacaaaacaaatcctatctctaaaaccgaccatatccacaaaacagatcctatctctaaaaccaaccctatccataaaacagatcctatctctaaaactgaccctatcctcaaaacaaatcctatctctaaaaccgaccctatccacaaaaccgaacccccacccttccaacacctcgccagaaatcctgattcggagtccaaacttaaaacggccataac

SEQ ID NO: 46734 - DNA, 538 bp, Zea Mays
tctagagctagaaatgtttcatgctactagttggaagaaagaaactctaaccctaattgggtaggggatatattatatatatccaggaatgtgggtcaaggcccattacaatataaacagcacactaacactactgaatcatgcttgcttccaacaatgcatgagatgcacccgcttaaaccctaaaccatccaagcaagtgaagtggtactaaacaaattatagatccagtagcacaagttctaacagaaaggaccacggttcaagcaaatgcattcagaactcatgtcaatcgtcatagtaataaccaaaagatggtaacccattcacctcatcgagcttcttatcacgatctcgtaaagatgactttgcttgtacaaacttttcattccagctttcgtattgctccctgctaagatcccgataggcaagacaaagagtacgcaagccagcagaaccaaattgctctagatgttctctgcttgtctttttcatatcatgatttccatcagccaatcgttcatatacgacattatca

SEQ ID NO: 46735 - DNA, 477 bp, Zea Mays
ccgaaaccaagtgcgacaaagttcaaaagaatatcgacgagcttcggacttctaaagaacaattcttttatgttgcttcccactgttgcgtgaaactgaagaacatgttcgccagtattggagctttctcgaatgttgaaaatttttgtctctagcgatgctgaaggggccgtaaaatggatagaaggcgaatttgaggcctttgacgaagtcctcactggccaaggagatttttgcgcctgcgtgggagcccgaggggtagtatcgttgcttgaaaaggctggttgcgaacatgcaaaggttgtaattcaaccaaacttcatagtttcagctgatgatataaaggagccttctaccaaagccattgccttatgaggaaggttctattatgaagtctggcttgatggtggaagagaggtagcagatgaagatatcaaacagagtgaagaagacatcatttccgatactaaattctta

SEQ ID NO: 46736 - DNA, 397 bp, Zea Mays
tgcattccttgttgtctaaaatgagatcatcaataattgatggtaccttaatcttgcaatctaaaagtgcacaaatttaataattactaacactaacataacttgaattgaaaattagtattagtaggctacagtagagaaaataacacatcaattttacctctattagatgcaatataccagtccttggtacaaactagtgcctcaacaatatcaggctctagacgactgcgaactttactaacaatacgcccactagagctgaaggcagattccgaggctacagtagagacttgaatggccaatacatcacgagcaaggcgtggcaaaacaggatatgtcacttggttagccttccaccatgataatatgtcaaactgcagacctttaccactag

SEQ ID NO: 46737 - DNA, 1084 bp, Zea Mays
tattacttcaccccatccttggttctgcttcaaaatattagtcacctcgactaattctatgttgtgctcctatatgcccccttgccaaaagtattttattctagtatggtctatatttctctcaatctagtagatctgatctcactcttgtgcttgcgacatccttgtagatgcccatgaccataaccttcttgccttttgggatttattgctcttccatcattaaatttctaccatttagcaatccttattcctttgttattgacatactcgtattcctaattttttaatactcttgtttcaaatacttacatctgaatttctactacctacctagacattttagtttatatgttcatgaccttcttgtcttctgagatcccttcctattctattgttacgtcgtcatccttcgttttttctattcccttgtcttggtatgcttgtatccttggaatcttgcataccccaatgactgttcaagacattttagttaacatgtccttgaccacccttgtttcttaatgatccatgagcgatcatttttattttgcacacctgtggtaatctcattgtttccttgtaacttccttcgataatgattttttttacttcaactcttctgtcggaacctcacttatcttatccttgattgttttctccacttcgtcactttgcgagtcttgccttaactctatccaagaattatgcttttcatcattatcacctttatccttatcacccctatatcttaccttgatgtttatcttataccaacctttgaaatatcctcttttccatgtcaacctgagcattgtactttacctacttttcccttggtcgtatcctcttctttgccacctgcgagttttttaactctatcgtttgttttgttttgtttgttatttcctttacccttctcatcactctatcctaccttgtgattacattatgtctgttatctaaaatctctagtctcctatctcaatttgagagcagtgttttacttacctcacccttggctatattctcttctttaccgcatgtaagcttgggtgcaactccattctttgttgtacttata

SEQ ID NO: 46738 - DNA, 530 bp, Zea Mays
ccaagaattcattttatctaggaaaatcaccatataactagcttttgatgaaccaaatgatgataactgtttggcaagaatgaaaataggactggtgtccgtcaagatccatcttcaacaacagatattactgctctcatacgaagaaatcatcaggagtagagaggatacaataggtctctacaagatcttcatatttctatcacaaattatcatcactagtagtctattggtcaagacatatgactcttctggctccgaggaccaaggacatgttaatgtctaatttggcttcaagctctgttgtgatgtcggattccatagttatttgtctactcttctcacttctagtagatcggaggtagataatggtaagcatgccaaatggtggaattcagtgtagttcggctacataaaccccaggtgtccattcaggaccgacctttaccatttagcttacaatgtataccaaacttgtcaaaggactatcccgagtcaattcagtgactataagtatttacaattccgag

SEQ ID NO: 46739 - DNA, 516 bp, Zea Mays
ccttggaaaagggaacgtgcaccagggagtatcctgctagccgcattaagaaaccccctagcagtgcgctttgttttcctaccactcatcatgttcaatagaaacacattaaaggtattagctccataaaattaagtgaattaataaaaataaaataatacatcacataaaattaaattatgcattacacatcaaaattcatcggaatcacgatcaaggagtcttcttcgatccaaagctcgcaatgtgccttttttgttccttggttttgttttcgtttcggtgcaacacactcatcagcagtgacatcgttacggtctccgactagtgagttcaatgcaacaccctcattgatagtaaaagtggttggcaattcttcttcttgataaacatcatcggcctgttcgtcttcgaattgataaccagcagtgcaaggagtatgtaaatgttccctaaggttcaccttatgaactacccaccatgctttaaacttcggatttgggtacgacatatagt

SEQ ID NO: 46740 - DNA, 487 bp, Zea Mays
caagaaaagacttcatcttggatggtggatcttgattcatctgaagttctgattctattcatatccttccttgtcgatgttgatcttctcttctccggtcttgatgtcttcaaccaggttaggggtaagaggttaagatagatttgtaggcagtgacttagtaggtagctatatgctagatggaattagttatgtaacctgctttcgtaggtcaagttattaagtagggtcaggttgatctaagatctcaaacttgcttataggagcagggtctaatgtatttccttagcattagctaatcatgtttgagcgacacccattaggtttgttcataatagattagataggatgggctatgactagaataggttagatggatctactagggtagaataaatattaggaggatacattataatcttttgagataagatgaattggttagaaatgggatcttttaggataaggtaaatttcttaagttagat

SEQ ID NO: 46741 - DNA, 299 bp, Zea Mays
atccgtgtgaagttcctggtaatgacgagagagttgtcggaattgaagataaagtggatggtaaagtggattctgtggatgccaatcaagattttaaagaatttgattgcgaagagatgttgcgccatatggaaccagaaatgttgagtttctatgggatcacataaagggctacctaaaatggagggactggaaagtgcctcaaaagaacctttatatgatgaatcaaatggttgtgacaaagagtttactacactgcgtacagttctagaacttcttaagttgaaggctagcgccgg

SEQ ID NO: 46742 - DNA, 465 bp, Zea Mays
cagaaattggagtaaaatgcctccaaagtcgggctgtcaggcgatttcaaagggacattcagtatgcacaataaactaaaaggatcccatgttcagggaaccttgtcgtcggcgactttcgcacggtgattcggactggccaccacaattcgtgctcgattcgggtcggatgttaccacgaagatgaaaagatctaaggaggattggaccgagccagccccgtcgtacccacttgcccgacaacgtggctttgtggccgtcgccgtagtgaccgctgtttatgtcacgaaacctcccaagatattaggcccacctactaatgtccttgtcctaaggacctcagacagtcatgtaggtgcactcaatggctcgacatgtccgattatctagatctccatcacatcgcccaagagctcttatcccataacatagacattgcacaccattggagtaagcggaaaggat

SEQ ID NO: 46743 - DNA, 924 bp, Zea Mays
gaggagcacgctgtgtacgtgcgaggcaccagcgatgatttgctgatcgtcggagtctatgtggacgacctcgtcgtagtgggagcaaaccaggcagaagttgtcaagttcaaggacgagatggtgaggctcttcaacatgagcgatctcggaccactccactactacctgggcatagaggtcagccagagcgcaaggggcattacattgtgccagagtacctacgcacgcaagatcattgagaaggcagggcttacgggatgtaactcatgcaacactccgatggagccacgcctcaagctgagcaaggcgagctcaaatccaccagtggacaagactttgtaccgcagcatcgtcgggagtttgaggtacctagttcacacgcgtcctaacattgcgtttgcagttggctatgtaagtcggttcatggagaagcccacgactgagcactggagcgccgtcaaacatttgctgaggtacattgccggaacaaagacccaagggtgtgtttatcgccgcgggaaaggaacattggagttgatcggatacagtgatgccaatcacgccggagacggtgatgacaggaagagcacctctggcgcaatcttcttccttggccagagcccggtcagctggcagtcccagaagcagcgtgtggtggcgctatcgttatgtgaggcagaatacatcgctggcgccaccgcggcgtgccaaggagtatggctgtcacgcctgctttcagacttgctgaacacaaaggtcgtcgcgccaatcctctacatcgacaacaagtctgcgcttgccctcgccaagaacccagtacttcatgatcgaagcaagcacatcgacatccgcttccatttcattcgagactgtcagcaacggctcgttggagacggatttcgtccgcaccgaagatcagat

SEQ ID NO: 46744 - DNA, 713 bp, Zea Mays
agtccatgaacacactgtttatcaagtacatgaaataagctggcgcattcgtcaaaccgaatgacatgaccgtgaactcatatagtccatacttggtgatgaatgttgtcttcggtatatctgagggtcgaaattctaagctgatggtagcctgacctcagatctatcttcgagaacacactggctcctctcaactgatcgaataaatcttcaattctgagcagagggatacttgttcttgatagtaacttcgttcaaggatctatagtcaatgcatatcctctttgtgccatccttcttctccacaaacagcactagggctgcccaaggtgaggtacttggtctgatgtagcctttctctgacaactcatcaatctgcttcttgagttccaccaactctggttcggacaatcgataagctctcttggaaataggggcggtgcctggtataagctctatggcaaattcaaccttcctttcaggtggcatgcccggtaactcctcaggaaacacatatgggaactctaacactacattgatagcctctgatggtttaatctcctcaatatgagcggtgacttggtgacaacttccttttcttggtctagacaagaccaactccactaacacttcttcccctgataaggaaactaacttcaccgttctcttgtcacagctaagactggcttgatacttggttagccaattcatcc

SEQ ID NO: 46745 - DNA, 335 bp, Zea Mays
tggttaccaggccagtctgaagatgtcaccatttgaagctttatatggcaggaagtgcaggactcctctatactgggatcagactggagaaagacagttctttgggcctgaacttattcaagaggcagaaaaacaagtccgtataatcagggagaacttgagggtagctcaaaccaggcaaaagagctatgctgataatcgaagaagaccactggagtttgaggaaggtgatcatgtgtacctcaaggtgtcaccacttcgtggaatgaggagattcaaagttaagggcaagttatcccctcgttttattggaccattcagaatctttaggcgag

SEQ ID NO: 46746 - DNA, 1482 bp, Zea Mays
aaaacattaacgaatttccatactggacagttcacagccgaatatgtggaagcattaaaaggtatgcacgtattctctctcgaatgtaagagcgaataaaattactacttcttaaaaataaaaaatatgtaactaatacacaatcatttcactgcacaacctcatacccaaataggtcatactacggaacaccagattacgaatgctcttattgtcatgctgtgttctggtatgctgaaagggtcaggagtaatcaacaggattcatctatcagatataacaactgctgcaaaggtggaaaaatcagcattcctccctttaagcctcgacctgagcctttagcatctcttgcaagatttgatggtaatgccacatcaagaaaattaattcgcaatattagacagtacaattgtctgtttgcttttacatcaatgggagcacaaatagataactctgtcaatgatggtcgtggtccacctctctttaaaatttgcggccaagttcaccatcgtattggaactttgttgccagacgatggatctcctccaagattcattcaattgtatatttacgacaccacaaacgaagtccaaaacagaataaatgctttagacagtggtgacagaacccaagacaatttcgatcctgtaataataagaaatttaattaaaatgcttgatgatcataacccattcgtcaagaaattcagaatggcaagagatcgtttggcggataatccgaatgaagaattcactatcagacttatcggagcaaaggaaggtgatcctatccaatataacttaccaacaacagatgaattagctatgctggttgtcggagatttcacattagacacattcaaacgtgatattattattgagactcagaacaaagagctaaagcgaatatcttcactacacccagcatatatggctctacaatacccactgctttttccctttggcaagagaggtttccagattggagttttgtacaatggtgccacatccagcggacaaaatgcacgaaaacatttaactatgcaagaatattattgctaccagttccattatagaaaaaatcaaccaaatccttatttgtgttatgcaatgttatcaagtcaagccaaagtagatgctagagcatgtattgatgaaaatagactcaactacataatcaataatcaaaggaatctacgaatggaaagcattcaaggtatcacagatgcagttagtcgtggatgcatcagcggtgaacagatgggaaaaactataatattaccagcatcacacacaggaggcagacgctacatgatccaaaattatcatgacggcattgctatttgtcgagttcatggaccaccggattttttcctcacattcacatgcaatccaaattggcaagagatacttgaaagtctatctcagcctggtcaaaccccttcggaaagatctgacatcattgttcgtgtttaccatatga

SEQ ID NO: 46747 - DNA, 505 bp, Zea Mays
ctcaatttatagatgcatcgggcgacggtgatgaattcggccgaggggtgctggcggccggagaggggaggcgagctctgtgcgggggaaacgtggctttcatcgtggcaatggctccggtgatcgccggacatgcatccggtgagtcaccgcgatgaagtcccgcgctgaggcacgtggcgtgcaacggcgacagctcgacggtggcgaggctatccgttcgaccgatgagctggggaggaagtacgacgggcttagccgccacgaggctcaactcaatccgggcgccagatatttaccagcgcgagcttatctgctgcccacggtgcacgaatcgtggcgatccgtcaacaaccccggcgaaaagtcaccggcgacgagcaggggggtgaatcgtgatcttcttccgtttggggcttactgtaccatggcgaatggagttcagtcatcctgacagaccgtttttgagcttaattttctcccaaacctgtatggcaacacatac

SEQ ID NO: 46748 - DNA, 475 bp, Zea Mays
tttaggtgaatttttgcgctaaatatatctttgggcaaaagtggaccttaggtaaataaaacaaggaagattgagatctctcaccgagcaacctaaaatttgataccacttgataaacccaacgggtagaagggtgcccgatctttcgatgagagatgatggaggtggaaaacttgtgggagaacgacattggctgcccgactaccacaaccaagatggtgtggcgccttgagcgacaggtacactgtctcctgataactacgatttggggtggaggtcgacgttgtgctatccgactacaacaaccacaagggtgctgcgccttagcgatagttacactggctcctattgttgctactcttgtcgtgccaagaatagccttgaacctgcaagcaatcgagaacaagcaagaacaagataaaaagcagacactcatggatctcatagagttggggttctgtttcaagtatccagg

SEQ ID NO: 46749 - DNA, 906 bp, Zea Mays
gtcattcccaagtgcctaactatatcaaattcaggcatgagaataaagcattctaggtcttaatgttcgaaggttgtccacctaaataggagtgactcaaacctcccgaacctcgtagtagatgtctcaaatcgacaagccaatgctatgaagatatgctaacatgcatttcttttagtatgggcaatttgttccatcaaagaatagtagtttcctaacaacacgttccattgtcgccttcttgggtcaagaaccaattaaggtggaatgatccttaactcgctctgatactaattgaaggatcgaataggcgaccagagggggtgaatggaagccactaaaaattctttccaaagtgatcatggattgtttcccaaagtttagccccaaaccccaatgacaccaaaagctccaaaacgaggccaaaacaagaacacctttatcaattgtcgattggatgttctgaataagttccaaggaagcaaaaggaacttgatttggataatggatagtatgaaaaaaatcaaacggaaaatagtcagagaagagtggcaatgccacttgaatggtcagtagtgcaagggcacgagagtgccactcaacttctccattcccttagttaagaccaagtgcccctcctttatcgctcatagtctatcgacacgaacctgcatgaccttcgcctttgtcattgaccactgtctccagactccatacctacgcaccagaagccatgagacattgcatgaacacattcacgtccgttttagttcacacaactcaacccaagacattactcttgtcgacaatcactcaacataactcaaaccacaatggcatatattgatcttgtgttcgtagacttgactaaagatcaatccaagcaacactactctcatgagtgtg

SEQ ID NO: 46750 - DNA, 1000 bp, Zea Mays
gatgggccgttgtggcctcgcaggtggcgagggcaagcaggggtgcatctctcgggtgagacagggcgggggcacggtgcacacatgtggacgcccatagtccagtcttatggagtagtagtagatttggtttttatgcacattaaggtattgcgtcttgatccaaatcgtagattgctgccccctcccatggccaccaccaccatcgattgtggactctggccggtgttggggcgaagacacgacgctaccctcaactatctctaagactatcgaaacagagggagaaaaggcgaagaccaaagggactaccaacaatgcgggaataactgtttcacggtcgcgacgaagtctaccaaacatgctaggccgcgaaggggataacttctgccaaaggcctgaagatttggagggcaacagagaagacccacgacgcctaaactggtagacttcgctccaagaggcgtctatgtaacagagattaccatcggcagggcccacctataagtggcttgggagggtatcaactgtagtgtaaccgagaaatatatggtcctgtaattaccctgttatactatgtatggcgggaatatagttggtagctaggggcattacggtacttagtttaccaacccatggctaccccgatcctgtaactgtctggacacgcttagtaatacaatctcgccagcagtttgtcacttgattgtgctactcactccccttgttcccgagtgttgggttacgaattcccgtgctaatagctggttttatcatgtggggagatagatggtggatcagaataaccaagaacatgctgtgatgcgaggagggcgacaaacctgttgtagctgcgaggagcgaggcgaaccgactgcggcgacaacgaggaagatgaaccactcttgaggtgtcggaggcactcactctaccgattggcggctgcaatgtccgtgatggaaactcctcgttcggctgcaagggaaagacgagccaaaag

SEQ ID NO: 46751 - DNA, 732 bp, Zea Mays
cagcgaggtggacgaataggtggagcggaagctggattggtggaggtggtggtcgcagcgggtgtggtggaaggctcaagagcgaaaggagctagagaagtgggaggtggagtggtgactgggtctgaagaagtggatcagggagtggaggagcaagtccgagatgagaggcgacgaactcagaagacgatctggtcagaggaaatcctcagctgacctccctgctctacctgatctgcagctgttgcggcggcaattgctgcatgggtggctctgtccaaccgtctcttcttcttgcccattgctgctcaaggtgaacagtcttccccttgtcctgtctgaaaggacgaggagggtcctggtcatctcctccccctaacggtgtgacattcttcgtccgcaccatcctgaactggctactgacacgctgcaagataatgagaaagggtaagcatgagcagtagagcaataagtaaggtctgattagagtgaagtagctaccggggaatgtctcgagagagaggaaccaggcaggacaggagaagcgcaaacgggcaggcagaatcactaaaataacagaagaggtgagcatgtattagtcacatagtcataagtatatgaaatgtgaataaatacatacacagagagttatgacacaaaaactgatagatttggagaaacagaggtcaaacgacgcgagaacggcgtttgaacggtgaattgtgccataga

SEQ ID NO: 46752 - DNA, 480 bp, Zea Mays
cagatttgagagttgtgaccacaaatgtatacatgaatgaaaagtacgtagtatatatagtgctactattaagatggggaattgtcatattcaagagtgcgtctctttcgatcggtagagaaaatcctggttcaatgtggttcggttcaaccgccatcacaagcaagtctagacgtctataaaaccgccagtgattaaatttacgctcgaacctagagttcatgcataagtgattaagtgtaccacatgacatattttccgcgtgcacattgaaaagcgaatcccttgacttatggtgtctataaattccctaatcaactcacctaattaaattctctaatcaaatccctttggttcatgatgaccggacgtgcgggctgttaacactatttattatactcaaacttaaggatttttaagatcatgaatacgacgcatcagagttattaacgtctctcatgtgggctcgatatttaaggt

SEQ ID NO: 46753 - DNA, 564 bp, Zea Mays
ctataatgtgctcctcaaaatcaacaatagatcagagattcaaggtgggtcgatcccagcgagaagaggctactagcatcttgtgtttccatcgaccctaggtcaagataaaacgatcccctgactctccccccattgcccctctgcctccacccccgcatagactccctagccttagctatagatctttcttgttgagatcgattgcctccccactagtctcatcgccctcattgacgaccggggtgcatatctaccatgtcgtcaccctcgccaccaacaaaagatacctatctcatcaccatccccaactacataacagagcctcgactttcgtaatcaagattgtgtgtgaagttggacatggtgaggcacatgagccttccacttgatctctaatctcttgccattataagtctccataacaacactcatgttcactccattcctatcttgtctttgtgtgctccatgggccacgatgttggaagtgctcatcggcttgagcggtgtcgacattggttttgttgggtacccgattgtggtggacgtaggacaagaattc

SEQ ID NO: 46754 - DNA, 691 bp, Zea Mays
agctaacctctaaactggaatattgtaccaaatgtgtttgatagtaatgtgtgtttcttgcatttgattctgccaaattcctgtacaattttgtgctgtcaataacctcgaagtatgcctgttttgtctgaagtttacgatataattattgctggtctcatgcatgtttgcccatacacttatgatacaatagtcatcattctatgcccatacattattctagttttgtctcaagtgtatgatacaattatcagtgttatatacttgaaacaggctcatttttttgcacagtcatggttcatagtctaatcatcttatgcatcacacaacgcagtgttatgcattttttcacatacatgtatgctaagtctatgtacactcagtttgctacagacctgttaatagcttatgacaaatgacacatacatttatgccagtttgcaagtatatttatgatactttctggaatttgtgaaataaacacaggaatcacatttacatccagatatatttttatcttatggtcttctactctctaccagatgaatcatcatctccgacatccaccgttcgttttttcgacgttgatgtctcattccattgtggggctgcagctatgattttgttccttgaaccaggaggccgtcctcgcttacgtccagataggttagccaatcgaaccctattatcc

SEQ ID NO: 46755 - DNA, 406 bp, Zea Mays
ttaaagttgcctttgttttctgtttcaacctatttaatttagaaaatattgcttggcctatgcagacatgtttgtgaatctcacaaccaggtcttttgtgtctaccatccttttttattcatagtgcttctctttgtcgcaatagcttgctttgttgttaactaccgccaatataaatacaagtttcgacatgcgcaaattatgaaaacactttttttggttcataacatttcctaatgtgcaagaacaagagaaacagaggtctggcaaccatgacctcaaaggaagggtaggcacacacctggccgatcgagtccatgtgtgcaacgaggatcttcaaggctcacatcaccgacgccattgcagcaagcctaacaacagtcaaaacatgcattaggatttagga

SEQ ID NO: 46756 - DNA, 458 bp, Zea Mays
gaagtatccccgggggtccttagtatacggaggagataatgatgatgatttcctctactgtctaccagatagtaaggagatcaatgtttaccgtgaaacgatggataacatgggggtatccgaagcttgaacttggtttgtctgtgatgactaaggatcagtttgcagatagccttgcctacaacagcctgaaggtttgtatactttggcttgtcattttgtaatttgtgttacggtgaactatttttgtggtatttcttatcgttgttatgtgttcactcttcggcttgattctaagcaaggctctgaaggcccaagaagatgcagcggatgagagctgtcgaatagtgcatggaaaccttcattcggaggtcataacattgagaaacgaagctcttaagaaagataagatcctacactctttagtggaaagattaaaatctagcgaagccaggctt

SEQ ID NO: 46757 - DNA, 355 bp, Zea Mays
gttcaaacgaaatggggatgacaaaaaaataagcatgacagtaccttttcaaacgaaatggagatgccttccttgctatgtggtgacaagatatgattctatcgacgtgtgcaattagtactggaaaagtataatatcagtgcagttagtcatggagttgaacagaacctaaaaatacaagatgatacaagactcctcacaggaatggaaaagggctatgctgacttattaaacagcagtcagtacatattttctttcatctaaattactctttgtcagggaaagttaggatgaaaagtagccttgcacatagccaagaaattttacactgcgctaacaaattgtgatatgaccg

SEQ ID NO: 46758 - DNA, 321 bp, Zea Mays
gacactttctcttcgtgaagccagaaaccagaagagaaaggctactagcccaacacttcaggatgaagagctagaccaggaaatcagggacctagaagtcattcatcagcaggtgtagaggaagaaggagaagatggcccgtctggccgatctgtagaagaggattgatgaagctgctgaagagatgcatcatcttacacaggatgaccaggactgaaggtctcaacacagggagctttgtcaagagagctcatacaatgatgatgaatggtacgatgattttcatcatggcaacttcactttgatgatacttctccccta

SEQ ID NO: 46759 - DNA, 312 bp, Zea Mays
gttgatgttagatttgtatgattcacaatcagtttcataattttgaggcaatgttagagtcggttttctatgcgtgcggggggcgcaaccaagtacaacaataaattgtaactgacattgttgaacacattacacatggctggtgcctggtgctgaaccgttgatgcacggttgttagcggtggcagacaaaaggaatttagaagcaactaaaatcttattgctaccttgcttctagaaaatcagatagattctataaattgcgaccgcaaagtcggattgctaccttgcatgaatgatgcagcctgcctta

SEQ ID NO: 46760 - DNA, 654 bp, Zea Mays
tctgacccttaattgcacgaattcggcccggagtccttctgcccacgacgacggcgaaacccgagggaaaactaaggtgttcttggtgatttagtgcagtctagttcaatcaattgggtctacgagcaacaggagactcatgggatgctagaacaccaagtagagaagcaagaaccaacctgcggatggctggccacggtgagaagctcacagcggcatgaaaaactgatttggggggaatcgtgaattgaggagctacggtgaacgattagaggcgaggagcaatgcactgggcgcataacaacctagcggagcacgctaaacgctgaacgttgaatgctgaattgggaagacacgcgggcgggcggagagagagggaggtaattggcgtgagctatcatggctttcactgaggcaatgactcaggcgatagacatgctatctactgcggtctactgcgacgcgatgaaacgattgacggcgtggcataagcgagggaaacagcggcacgacggcggtggtcgcgcagacacatcgccggtgcaagtgggtacggcgaggcaggttctacccattccccgcggatctttttacgtctaaggtaatatcctgcccgagctgagcacaaatcacggcagaccgcacggatcgtgg

SEQ ID NO: 46761 - DNA, 460 bp, Zea Mays
gggagagtgggtgatgcacgagggactgcatttagaggggtttggaccactggccatggtgcgtaatgccttgcgtcttcttggttgctggttgtattacttggaagtctgaaatggctaagtgttgcgcgtgttcgaacatgtgttggttctccttagaaagggtcccctttcctttttattgtccaaggagatggggttacagatcatttgagactgatctggcagctattgaaggtgtcagtgtccatccacgaacttgtggatacgtcactaacatgtcgtgggcggtcaaagtcacccacaccctgtgggtggtggaagtcgtctctagacattgacagttgtcgtccatgcatgcgccatagtggcacactattgtcacgcccaggacatatgagcctaacacaaccactctctgactatcaactccttgattattgcggtgtgggcaactcgg

SEQ ID NO: 46762 - DNA, 478 bp, Zea Mays
ggctgcgacacactcatgatctattgcgactaagcctgagtgcgcaggctgatggtagagcgcaaaactacgagccacgtcgagcccagcctacgaagcccagagtcggcatagtctaaatgatggcacctgggactcgcaaatcccacgccatccgccataaataatatgagacaatcaggcgatcccgggcccacgaacacgtgtggctttaccctaggtagaacgtttggttttatcgttgccttatgactcctttccatagaagccaccgttggtctacccctcttccagcctataaaaggagaggttggccctcaaacaaaggggctggcaagattaaggtctaggttgagttcacttggatacgcacccacaagcacaaaacccaaacgaatcgacgaacaagaggaaaaacactgacgaggactcagaggtcggagtcccgtcgccaagccaagacctagttagggctcca

SEQ ID NO: 46763 - DNA, 546 bp, Zea Mays
ggagctcactggggaaataatttataggatctatcggtggtggtgtccaattttgcgaaggtgtgctggcagccggagcgagagaagagttactagtgacgatctatcgtgacgattgtggagtaataagctatggtggtcactgggtaacgaccacgactcatgatgacgtggtaagatagccaaaggtgtggtgtgaccaaggaaaaccgcggtggccgtggtaatggccgtgcggccacgttgccggcaagtgaatgggtgacagagcggctacagggttctgagttcatccaaggcgaagatttttccatggtcgatcataatccatgccacagagggcacaaatcgcggcatcgacgcgaatccgggcacacgagtcaccggcggcgagggggatgaacctgaagatctttttcagtgtactgtaccatggaaaaccccattcagagcctctgtcagagcactttgcagagctttgatcttaaatttctatatggcaactagctaatccttctgtaacaaagttgttaatctacaatccag

SEQ ID NO: 46764 - DNA, 299 bp, Zea Mays
ccaaggtaggtgtcaatggtggtggtggtggtaactgagcccaagctgcttgagaatgacttgccgaagcaactgatgttgtgggttgctggttgcctacatactcagggatgtatggcgaataacatgaggcagtatgcaagacctgcttcggctgattctatcgtgctttggcttcaactatctccttttgcttttggatcatgacttggcacatccttattgtgtgtcccttatcctccccacagaataagtagaacaatctcctggattgagtgttgaaccttcctccgaagctt

SEQ ID NO: 46765 - DNA, 768 bp, Zea Mays
agccggttggccatttggtgcggtagctgagaactggagccttcgtatacttgcgatacacaaaattgtagcagccaaaattttcatgcagactgtcggccctgcccttcgtctggtagtgcaactcatgcactcggcagaatgcttcggtatctaggctcatcccttggcttcggagggcccaggtaaagacactaagcctaacaatggcgttaggggtcagctgatgaagatatattttgaaacttttcaagacttcccctatcatctcattcagaggaaatcggagtcctgctctgaaaaaactcttgaaaaccaccactttgtcatccttcggcactggagtggtctcttctccggcaaatcggacaagtttcctttcagcttccccaatgtagcctagcttcatcatcatggccatgtcagcttcagacacagttgatttctcaaaatctagatggctcggttttgatgggatcaaaatactataatcttattcatcctcttcaacatcttcttcagcaacagtctgtttagcttcggcaacagaagtaccttcgtcagttttcctctccgtcacaactaaacctgatggtttcataacttcggaaattggcgctgtctcgatggcctcggtctcttctccttcatgagtcacccttgcagtcgaacgtaccctggccatctgatggattttttgcggttcgtacgaagatgtttcttttttgtagttttgacgaagctcactttttttacgaagctaactct

SEQ ID NO: 46766 - DNA, 1370 bp, Zea Mays
agtgagattgagccaactttggagccttgtatttattaatccatgaggatttttgcttaggtcaatacatcaaaattgtagagccatgttaggagaacaactttgattaagtaactaagcattggtgctgtacaaaaatttgagaaaaataagcctgaaaatgggctgtcagtcactacttaagactgaattttgagcaacagtggaattggatgaactttgtgattgaattgtgggagatttagtggatggttgcgcaagaactttgtaacaaagtgatagccggtacattggacaacaactttgctacaaatggattagtgagttactacatcaaaattggagaacaaagcctttcattttgctctgtcaggcgctctgaagaagatcccgatggtacagtgtctgaaaatatcagggatgcaatgcaccttgccaccggtgacctcagcgactggattcgcaccgaccaccacgatttgtgctctctagtgtgcagattatgatcagcagtgaaaagatcttcaccgtggatgagaccatgagctggccccgtacccacttgccatgcggccagtctaggtgacctcgccggagtttgtcgtctgccgctcggatgccacgtgcctcaaagctttaccacgtcgtagtgattcagtataagcagcctgtccatcgcctgaagcattgccttagtgaccgccacggtagcttgcgctagtaacttacccctctctccggctgccagcatgtcttccccaaattgagcgccaccgttgttgatccttataaattgagtgcatagctagctccgctaggttgttacgcgcctagtgcatcgctcctcgcctccaatcgtccaccgtagcaccttaattcaggatttcccccaaatcagttttccgcgccgcagtgagcttctcaccgtggccagcaatctacatgttggttcatgcctctctacttggtgttctagcatcccttaagtctcatgttgctcgtagacccgattgattgaactagaccgtgttgagtcacctagaacacctcagtcttccctcgggtctcgccgtcatcataggcagaagaattccgggccagattcatgcaattggtgaagggattagggtcgctaggggtggaattaggtgtcaaccaagttagaaccctattcgttgcgtatttcggccggtataggtttgccgaagcgcgcacgccgtcattcaccatcggggacctcggtaagtgaagaaacagaagtacaggggcttaagtgtgaacgtcagtgagacagatgaatagtgcgtagggattcttaaccagttattcgaatagccggggtcatctatgcaaagtcgccaacgcgggcg

SEQ ID NO: 46767 - DNA, 414 bp, Zea Mays
gttagagcagcagtgcgccagtgtctaagaaaaaaaaaaggccatgaacctcggattttaatccaccttggcaaaaaacctgttcttttttgttttgtgtgtgtgatgtctgatgagagggtggggggaggcccagatattcagagctgtatgggatggatagagatccagtacctaggaaaatcaaggcgagatcaacgtcgagaggtttaatccccccaacgccatcagatgtgatgtgatgcgatccgtcccgcgccagcgccagagccatcatgtgatgtgttcccatgtgcatgtactcccggccggcccacgcgagtgtgtcgtaacggcgtcagaatcagagaccgggactattcgcccgacaagagattgcttcggctgtgagaatcgtttctacgagaatcacag

SEQ ID NO: 46768 - DNA, 315 bp, Zea Mays
gacgacggctagaatctctagggtgtggctgctgcagtggagcgaaggcgactcggtctctacggtggagaagaacaaggagacgacgacgataatggctagggttcggccgtagcgtgcgttgcgggtgaggtgagctgaataattgcgtgctcgtgggtggaatcatgggcccgatacacatactctgctggacgaaatctacgtgaaggcccatggaccgacacgtggattactgtttcgtaaacggaaacataagacatcgtaataccaatatttgtgtggggactaatatggctgcccagattgcgggaa

SEQ ID NO: 46769 - DNA, 861 bp, Zea Mays
atgttagtcgtagttggttctgcagatataggcatagaaatagtgatatgtttgacctgatgtaaccctaaccttgtcaagtatacaaggcggattagggacccctacaaaacgattggatcttctcctaggctagctagagaattgttcccacgcactatgtaattttgaactcaagagcaattccatcacaacaacacacatatgatgtagcgtattacgcatctgtgcggtccagagctatataaatctttgagtcctgtcgtgcttcgcacgaaccattgagctaattgtcgatgttgccaaccacgaaaaacactacaacttgtggacaattctgctaataccatcgagctaattgtcgatgtcgccaaccacgaagacaggggtaatgttacccaatgctccactaattttcttagctaatcaccatgtaaataatgcaaaaataccctcctagcagcctcccatctgatttgtccctcccaaactcaaatcctggcttcaccccgcatgctagactacaacttgtggacacctctactggctaggggcgcaaacaaccaatgttgggtgctacgatagctagagatcgtgggccaccatgagaccaaccgactgcggttgtgatggttggtcgactaggggtagcagttgatcgaggaagagcgacgcctaagggctcatttgattactctagaatggtttcttcgtaatggttctagctagaatgacaggtttacttgtattaacattgattagtcggaatagtttctagcctcaatccgagttaaacgaacggggccgagggaaccctatcgtcgctgtggcattttctcgcaagtcatcaacaaaagaggg

SEQ ID NO: 46770 - DNA, 631 bp, Zea Mays
tgaccacaatccgcaagcaatatattcctccaccaaggcagggctgctgctagtgttcgacacatggcgcagagcgtcttcatccacatcccccttccttaccataaaccatggaaaggcaacatagtagtgcaagcatagaatagtaggaggccgcctgggaaccccttcgacgtccttcgtcgccacgtaaaacaaaaaatcccaccaattcccccacttattcttcgcgcatggcacaatttcaacaacctcacctgaagtcttctcggttcttggcgtcaacgtgcacgtaccaaactacacaatctagccaccaatgactgtcttctggcaatgaaggtagtaattctttgtgaagacatagaccgaaggctccccccatatgtagcctccacccaaataaatttgccagcgccaccatatcatttggtgtaagctggtggagctagacttcgaagcgagctaggactttgataacggtgctcaggtaggcaaagaccggttgtgaaaaacgcctagcgacccctctggttcacggacctcttcatccctctaagcgcatcctacgctgcctaaaaaataacccaaatgttgcatttcatgcacacgccccgaggagatctgcaat

SEQ ID NO: 46771 - DNA, 748 bp, Zea Mays
cggaggacggcacatctccgtgggcggggatctctacgcaaccctcaatggtaagaaccccaccaaacgattcgtgtccgtttccccattgtgttgcgtggccggattggggtatggtgcgcccagggttggatcggtcgctcgccggtgactttcggtagtggtgtagtcatgagcgccgccgctcggtctggctcagggaagaagggaacgtcgtggccgttgatggggttaatcaacggtgtgaattgggggctggatatcgggcagcgggggccgtagatttcgaatctggcggttgtgggttaattggatttcataaaatctgggccgcagatctggggatcagcggtgctcagtgcataccggttcaggaagttgatcgatttaatctgtgtcgtccatatccgatcgcacggctcaggatgctagataccccttcgccatgttcattttactaaagagaccctgaacgtttatgaaatgaacccgccatccatcctaagccaaaataaattgtagccgagcccagaagattatgctttagcccctgcattccgagaaaattatgtccctagtccaggatctttaggaaatcagaaattaataaagaaaaggagttttggtataaaaataaatataggaactttcttaaatcatattaaactcattttaactccaaattgacccgtttcagttcctgtaattttgtattaatattgtttatcacccagtacctttgtttagc

SEQ ID NO: 46772 - DNA, 372 bp, Zea Mays
atggggctcacttagggtttttaattagggttgaaaaattttatctttcaagagactcaattgttttgatcatgacacttttaagtataagcttggtgacttctttattacttaagttattttggtactcatacctactttagttcacataaaataatggtccttggtttggctttttaagagaaaccctaggtgacactggggtgtcacagtaccgaacccctatctgtgtggagggcccgcgccaaggatgtgggttcgctgaagccaacaccgaccgaggtccagaagccacgcaagaaggttcaatcatcacacttgtctgttcaagactcatcctaggtgaccatgtggcgttgtccctgagcatac

SEQ ID NO: 46773 - DNA, 417 bp, Zea Mays
acgtgaagcattaggaaatagacgggtagctaggtggctatttatataggccataaaggctattactactactattaggatgctgtagaagcacccgaaaaattagttaggtctgagaagatgactagaatgagcatgcatcatgattgtcacattatcattgtctcttgtacaccaacatgcttctctcacctttattccaataataataacttgtgaataatgtgatgtactgctatgttaggaactataagaaatgccttacctcgtgttagattggtaagccttgttaggtcgtgtcatgtgcttctcttgtcttgctatctaggaaatgttttagttgttcaacccttttccccccaaccaacaaaaaaaattatatatataaaaggttgtttgtttcgctcatgaaaagac

SEQ ID NO: 46774 - DNA, 507 bp, Zea Mays
cacagatggtaattgtagcctcttgtgtttgtagctgcttccgggtaaccatcattcgaaccatgtgctgcgaatgagacgagtaaccatgaataatgaagaaatgggcggaggttcccaagctacagcctgccatattatatattataggagaaaaccccatgtactgactgactgatgatggggcgaaacctgggcatggtattatggtaccaaaggcaaagggagaaaggcaactaacgcgcgtgacgatggtagggaacacatgtcgtcctccatttaatcaaggaaagcaatagggtggtgccgtgtccagtggagatccatggacagagatggatagccaggcacaggagcgtcacgattcctagcgttctcggcacagagatcacacacgacacgacgtccaggcaagtggccgccgtgcccgggaagatgatccatccatcactgggacaacaacaaatgaatcagtacgctgttggatcttttatgggcttggcccat

SEQ ID NO: 46775 - DNA, 560 bp, Zea Mays
ttacgttccaggttcgaagcacgaaacccatcctttccttaatgtctggcagccaggcgaatgcatccaaatttgcttcgtctttaagtacttcattagctatagcatactgatcagattcacctttaatatcattctgtctaagatatttcattgcactcgagtgggtcatgcgatgtgatgactcaggtgtaccaacttctgagctcctccgccgagtctagcgggtgaagggctgaatagaccttgtgttgctgctgctgcgttttgtaggagacatggttctacatgccattaccgctggtgtcttgaactcgtcacagaaacaaaagatttcatccaactcagtttcaaattccacaataagtgcgtacttttctgaggacaactcatttttcttctgcaatggaaagtcaaacttagtggttcaaacagaggaatacagcaaaatgttcaaacagggaaatacagtaaagtggttaagtgagtacatacttgttcaccatagacagttccctcaagtgcaagtgatgcctccatagtcatagtgtactttcccc

SEQ ID NO: 46776 - DNA, 390 bp, Zea Mays
ccgggaattttacgaaggacgcgcggcggtcggaggtagaagaaagcactggcgcacgtgaatctgtggcatctattgtggcagtcactccgacgagccacgaagaggcacaagggttcacggcgatgcgatggcgaggctcggacacgcggtggacaacggcgatggcacgacggcgatgagattccaatccgagggcggtgagaaaggggaggggtaccgcggctggccggggtggcgtccagctcaccggcggcggggatttttaccgagctatgtttatccgatggccacgacgcacgaatcacggcgagcggcaatcaacagcgacgggccaccggcggtgagggcagccgcgctggcggtctgatctagttcaggctactgtac

SEQ ID NO: 46777 - DNA, 659 bp, Zea Mays
taaaattttatcccttaagttcacatttgtcgtcgtttcactcaaagatcacatgtgatgcttatctttccacgtgatttgtgcttttattcatgctgacaaggcgatttggtctgcagagagggtgatttggttcgcagcgagaagggagaatactacagcaggtttctctgccacggcgcccgcggcgacgtcgacgcccacgctgacaaggatgctcagttcatcacgagcgcgaggaggagggtgaagattagttggagcacgccgctgaccccgacgtcgtcgactccgagcatggagttgctacaaaacagcgaccacctcgatgtatagctcaaagtatgatatgctcctcttctctgctatccttctccgctcccctcatgctccaccttgacttgtatgtgctagccaaagatagttgtgaactgagcactcaagccaaaccaggttgtagcaacctggcctttagattgaatcttctgctcaactaaaatttcttgcaaattgctattgttctcagccaatagaaggttcgtaggatgtctggttaactggtgtaatgatgttcaggctcccttttaattgtacagagtctatgtaatgtatgcatcttagaaaaataagaattctggttgacacaacataaactttgt

SEQ ID NO: 46778 - DNA, 991 bp, Zea Mays
cctcgctcaggcgccccttcgcaatttaccaagctcatcgcccacacctggccacttcagtgatgggggctagacatcgtcaggccattgctcacagcacaagggaacctaaaattcagcttcgtcgccatcgaatatttttaccaaatggatcgagggtagagtagtctccacaataatagcgaagactgcacaaaaattcttctggcaaaacatcgtctaacgattcggagtcccatccgagctaactgtcgacaacggcaaacagtttgacaaccaggacttccgggaattctgcagttccatcggcaccaaggcagtgttcgcctctgtctaccacccacaatccaacggtgtcatcgaacgtgccaacggcaagatcttcagcgctatcaagaaaaggctcatcgacgacaaaaagggtaaatgggcagaccaattacccgaagtcatatgggcgcttaacacaacagaatgccaagcaaccgggttcacacctttccgcctgatgtacggatcctaggcaatgacaccgcaagagttaaagcatggatccccccgaacaaactaatcagccgtccccgacgtcgacgaatcaacctctaaagatcttattgacgaagactgtgtcctcgccttgcaggccctaaacaagtatcaagctcagactaaggcatggcatgacaacaatgttgtcccaagataattcaacaaaggggacttagtactcacgaggaccatcagaacagagtcccggggcaagctagagccgaagtgggaagggccatacatagtcaaggcaaaggcatccccaaacgcttacacgctaacaacatcatatggggaagacttagagcattcatggaacatagataacggtaacacccctggtgttactagcactaaaaattgagcataacatcatatgcattgacatttcacattgtttgttacacctagagtgcattcactaggtaaaatttcaaacaag

SEQ ID NO: 46779 - DNA, 626 bp, Zea Mays
tttggttccaatcacattttgcttatgtctttcaactaaggaccagacttcattccgagtgaagttatttaactcctcttgcattgcaactatccaatctggatcacccagcgcttcttcaaccttaagtggctcaagagaggaaataaacgagtaaaattcacaaaaatttgctaaatgggatctagttgttacccctcttttgatgctgccaagaatgttgtccacttgatgatctctttggatggtatgatggactcgaggatgagccactgatggttgtctttgaatttgatcttcatcatcatcctcttgttcaagaggcacttcattaacaacaacttcaggttcatcttccacaattgttgtcagttcttgtggttgatgaacttcttcaaggattgggtgacttgaggttgatgggtttgcttgagtggtggatttatcacctgccacctttgcgcgcacatcaaagacctcattttgtcatccaaaaggttccttcttcatcattcttttcttgtggtctcacttcacctattgcaagcttctttatggcctcacaaggtggttcttcacttcctgcactatcattagaaacatgcccttgcgagccattagattca

SEQ ID NO: 46780 - DNA, 1137 bp, Zea Mays
cttggtgccccgaaatccgggtgtgacacaattcaaccttgtgtttgcacttgaaccatacaaatccatatgaattacactaatggcttcaattcacatcttcaaatgttgttgtcttcaatgcaatataaccctttgtagcttgattacctttgacccttgcagtgatctcttcttcaccttggctttaggtaccttagtcctcttgactttctcccttgcttagtccatcgaagtcttcattgcctttgtccttggatcacaaaattgactctaagtcatgtccattgattcccgacttatcattgtccatccatcatctttacaaccttcttgtcttgtgatatccataatccataatccataacaaaaggtactagggcattacaaaggctcaatgctaggacacatccaggcaatcccgcgatcgtggtgacccatggtcgcgccctaactagggggaaccattgattatatcctccagtagaaggatgtcaaccatggcctcgacagccatgccaaaatcttcctccatatcctccagagtgccaccagccatgtcctctgataagtcaccgatgccgagctcatagcccgatcagaactaaacgaaggctagagtgctaatagcaccacgacaagtgccacaacgaatagcatggcaaacctggttcacgacatcgaaaaggcgctcttatcgatcaacgccttgggcatggatgagggaaatcaccttattgtcaccctcacgaagactcaacgcctctagttctagttttggggaaaaacatagaaagcgaggagggttcaggatagccaaaagaaacctcagcagaggaaaaagacctctaacctgcgacgcgacggtccacctcttccaagtgggcgcgaagactggccaccacaccgtcagtggcctagagagtcgtgtcagtggtatccaaactctcctaaagatccgagggggtctgcatagaaagaattgaaatcctgtcttgatagaaaggcatctcgaaatccttcctttggcccatcaagaacatctagctgcacaagatggaggagatgaaagaacaacatgatctcgaggactcggtagcgaaaagtgaaaggccaaaccccgaataaatcatccgc

SEQ ID NO: 46781 - DNA, 556 bp, Zea Mays
atttggagttcatatgaattctctacaatttaaacaagttttaacatttatttatgcattaaaaattgatttctgcgattatttcctattttcccaagtctctggatcgggcctcaaatacagagaagtgcaggggcaaaaccgaagttgtcccaagacacagatcactggcgcatggagtgcgggtttattcctaagaaacccagggactctttagtgaaataaccatcgcgaaggggtatcgagagatcttggccgcccgatccgcaacggtcggcccagattagaagttttatacgctgaaccggtatgcaatctgagccgcaggatacgtgatctacggcttagattagttcctaacgcgcagcgcacttctacccttggatccaaatcgagcggtccacacgtgcgatcgatctgggccgtgagttcgaaatcagcggctactgatcgtcttcttcctctagctgaccgagcgacggaaacaggcacgcccacggcggcacgcacgccggagcaaccccaaccctcgctctacctccccatgttgaccccc

SEQ ID NO: 46782 - DNA, 271 bp, Zea Mays
tgtgctcggtttgcttgtgctcggtttgaactgaagtgccggtcaggtcatgtcaggtctgcttgtgctcggtttgcctgtcttcagtcacttgttcagtcgctgttgcttgtccattgctgcttcagtctgcagtcacttgttcacttgtgctcggtttgcagtcacttgtgcagtcactgctgcttataatgtgaactgaagtgctcggtgtgtaaaggttagatgtgtccatttctgttgcttgtccatttctggcgcttgttcagtc

SEQ ID NO: 46783 - DNA, 552 bp, Zea Mays
gttttgggtggccagcctacatatgaggatcatgccccacctaaggaccctaaaggccacaatattgcctttcagttctttcacttggcgcaacccatggatcagcatgaacatggcaacaacaacatgttgcaaaacaataatcaagttgacagtgggggatgggatgtgtggcttaagcttgattaggttgatcacgccctggacaaccaagatgatcacttccctgatgatgatgatgtcgtgtcgtacgctccgacacccaaataacaactggtgatcaacaatcaatactctgcatgtttaccttcccagatcctcctctggattggaggacacccactggagaatgggcacgttgtaaatcaagtacttcacattggggtcatgcatcatgctgatggtccctgcttagcctccccgtgaaagacttcttgcttcacctggccatcttcaagaaatgggacaatttgtttgttcctaggaccaaggctagtgaagtgatctctatgtccctctcttgggacccttcgttcaatgttctagtgaagt

SEQ ID NO: 46784 - DNA, 632 bp, Zea Mays
cggggacacagctatggcagggacttgggcttcgggtggatttcttccttcgagctgagcttcgaaggctgcaatctagacatgggcttcttcaagttctccatgtacccttaagagatccagggtagcactgtctagatcactgttaagacctgccaccacacctacaagggtactgaggcgatcttctccagcttcacctggaacaacactggtcttactttctccacgtggatgtagggggagatgtatgtactccgtgttgtgcagctgctgccgataagtgtggttgacggaccacatagctcttttagcagcattgctcaccgaagcagcataggtagacagtgacatcagagactcatgggctgatagagtcctaaaacctctgtctcctgcatccatcactctgatatgcacccgagtgaggtagtaacaagcccgaggaggctcagacactcgccttgtgtcatatagaggtcgaacataggttgctagagcatgcagtacattatgtagcatgtttgggaagtgtcccatctcgaacattgaggtgtaatgcttagtgacaggccatatcccaacaaagttgtcctcctgctcatcgttggcttcttcattgttgttttctt

SEQ ID NO: 46785 - DNA, 674 bp, Zea Mays
caactcgagagcccatttggcaatcctcccagaaatgtccggattgcggctcacatcgcctagggggaacgatgtcaccatagtgacaggatgcgactcaaaataatgcttaagcttccttttggtaattagaacaacatactgtagcttttgtacctagggctagcaagtttttgcgccagtgaggacttcgcttatgaagtagatgggatgatgaagcgggcgcgtgccttcttcccgtctctccacgacgagcactgagctaaccaattgggcagtccctacgatgtagagtaggagcgactccttgtccttcggtgggacaaagatgggggctcgggtcaagaggcttgtaagaccgtcaagcacctcctacgcctctgcctaccattcgaagtggttggccttcctaagtagcttgtagagcggtagcccgcaccccctgaggcacgacacgaagcggctgagggaggtcaagctccacatgacttgttggacgcccttgaggtcccgtatgggtcccatatttgtgatggcggaaaccttttctggattagccttgattcctcactcagataccaagaagtcaagcagcatgcctctgggaatgctgaagacacacttttctgggtataacttgatacattttgtggcagaaccgcccgaattattcc

SEQ ID NO: 46786 - DNA, 377 bp, Zea Mays
cggtcccttcgtgacgatggtgcccttcctaaattcctttctctgccttctgaagggtgattgaagggtagaaaacatctatggcaatcaaagtaacatatcttgccaccagcactaagacgaaaacaatctgtatctttagcacaataaggacacgtcaatctaccatgcatgctccatccagagaaaataccatacgccataaaatcatgaatcgagaacagatatgcaacacgaagattgaatttctgcttcttgaatcagtcataggcttccacaccttgccatagcttctttaactcttcaatcagtggttgatgcatcacattgaggcataagccaggatgctcaggcccaggtataacaagacataggaa

SEQ ID NO: 46787 - DNA, 529 bp, Zea Mays
cggcgattgttgaactcggggaagaggcgtcaaggcttccgtgggtgatgaggaagacaatgtggcgtttggcttgggcggaggacgattgtggaggcacgaccactgagctttgtgagcggcgtcaatggcggacaacggcgaggcccatggaagaaggaagggagagcgaggagtgagggaaatggggcagtggattgtggagaaggccaaggcatgctccactatgggcttaagcatgcaggtaacgcacgcgtgaggcaagcatgcgaggggaatggctgcacgtggccagaactcagcgaacacgtgtccaagtcctcgacacttggcggtgatgtcgggggaaaattcaaaggtgaagacaacaagggaatcaagtgcttctagcattgctcactgtagcaaactttctcctcgaactataagctacatctttcctatagcacttaaggagattagggcttcgacttaaaagttaatgacctcctaacttgggtttgtctgagctacaaaaattagagaaaac

SEQ ID NO: 46788 - DNA, 427 bp, Zea Mays
cggaatccttactgcaagacaatggcaagaagccttgcgacttagtgcatctgccaccaggttggcctttcctgggtgatagtggatttctaattcataatccttaatcagctcaagccatcttctctgcctcgtgtttagttctgactgggtaaaaatatacttcaaacttttaagatctgtatatatatgacagatgtttcccagtagataatgacaccatatgttaagggcatgaaccagagcagctaattccaagtcatgagttggataatgttcctcatgctggcaaaactgtcttgaggcatatgctataactcagccctcttgcattaagacacatccgaggccactgcccaatgcgtcacagtacacatcaaaaggcttttcgatgtccggctgagcctatatcggaacagtggtcaac

SEQ ID NO: 46789 - DNA, 435 bp, Zea Mays
gtcagtgttgttggcttccggcgaattttcacggggaaagtcctcgccgtgatacacccagacttcatagtcaggcatgtagccatatttgcaaaggtgccccgacagagttctcttgtcttgacatctacaaatccgatacatactacatggacaacgcacatccgtgccggttcttgatatagcaaaagcacgatcaataaaatcctttgtctttcttatccaatctactaagggatcattcatacgccaaccttcatatatccatcgatggtcctcacccaccatatttgattctaaaatagtagaacacatgattcataaattgtttccggtactaaacgcatatcgatcgtgtcactacatctataggaaaagatagttcctaaacccacccatgagtgaccgatagagcaacgatttatgacgagcaac

SEQ ID NO: 46790 - DNA, 834 bp, Zea Mays
caatgccatcattgacagaccggccgtgtaccggttcatggacatttcccattacgggtatttggtcctcaagatgtcgtccccaaccggggtcctcaccgtgtgtggcgcttgcggctatggagaagctgcacgccctgacggcagaggctgctcgcccggacgacggagggaggaacccctcgacctctgggaccaaggtgcctaccaaggtgccgaaggtgcagccgttcggagcagacaacgtccctgtcaaagccgtctagctctgcgcgggttcctcctagaccactcgcagtgcgggtgatctggaggagaaataggaactcgcgatcgtcgccttcctccaggcaaatgccaacgtgttcgcatgggagtcgtcgcagatgcctgggatccccagggaggtgatcgagcaccatctgaagatcaaccctaacgccaggctggtgagtcagaagcctcgcagacagtttgtcgagcggcaggacttcatccgaaaggaggtccggaagctgcaagacgccggcttcatcgaagaggttcatcacccagtgtggctggccaacccagtcatcatccccaaggcaaatgggaagcttcagatgtgcaacaactacaccagcattaataaggcttgtcccaaggacccgtatccactttcgcgaatagatcaaatcgtagattctacttccggggacaaggtggaagtatacgttgatgacatcatggtcaagactaagagagggtcgaccctagtgggagacttaaccctagtcttcgacaggctacgggcaacccgcacgaagctgaacctggacaagtgcatctttg

SEQ ID NO: 46791 - DNA, 354 bp, Zea Mays
ggcaaccggaattttcagggtgcacatcagaaaggtcgggagagctgagaacaccgagttaacaagctctaacctaccggcctgggagaggagagcagaagtacaggacaatctcttctcaatcctatgaatgagcggtaaaaagtggcagattttaggctttgacagaccaagcggaacaccaaggtaggtgaagggcattgaacccgtctgacagttgagtgttctggctagaatctccattttagccaagcaaacattgatggggtacatacttgatttgttatagtttaccttgagccccgtcgaagttgcaaaagagttcagaacagctctgagaaaaaataattgtct

SEQ ID NO: 46792 - DNA, 1296 bp, Zea Mays
cttgcctgcctagaagtctaacgagatacttccgcagaatcacgatccaacacattgatagaagcaaaaatgaagaagtcaatttgttagtgaagaccataggtagagggaggccctaccctccaatgtattatgaagtcatacacatacctttcatcagacatccagatgaaaacatgtggttaatcaacataataatgcaagaatactagcgagcaccaataatgctatacctgcgaggccactacaactcaatagacaaaatgaagcatccaggctcaagtatggaagctgcaaatacatagtagtcgaagacaacttgtacaggaaaggagtcacccaggcactcctaatgtgtatcaccaagctcaaagactagcaaattacttaccgaagaatacaatgtgattggcggctaccacacggacccaagagattttgcatccaaaatcatgcgctaaggattattcttgctaggaatcgtcagagatgccatgcatgtggtgccgaactgtgaagcatgccaaaaaattcatcacaaagtggatcccctttgaaacaaacagaattaatagcccccacttggccactccgttgttgggggatagtcatagtcggtcccctccccacagcccaaggcaacatcaagtatgccttggttgttgttgaatacttcaagaagtgtatagaggcaaagacggtgtccaccataacttcatggatagtgcagaatttttttctagcaaaatatgatctattgctttggagcccccttataaatcatggtcaacaacagaaaacaatttgaaaaccaagcatttaggaacttttgcacacccctggagaccaaagtacactgttgggacagaggccaaacctaaagtcgatgacctcgattgaccctccataaacccacctctagaccatgactaattgtagggccaggataaaccaaagtcttcatcgagctctcccatcaggacattcgtcctggtctctaccaaccatcgtgcgaaggtgagagctcgacctccaccctggaggacaagcgaaggcctagatacggagaacaaagtcgtggacctcgccacccacaatagtttggaaggcctggatggattgccctgtgcctagtgcgaggggtcctaagacgcaaaggctccatggtagtgaaggaccagaagaaaagaccacactaggtcgtcggtccattgtgtaccaccctgaaggccccaccggtaagtgttgttactgggtagatatttgggtgcatctgcccaccgagcttcaccatgc

SEQ ID NO: 46793 - DNA, 546 bp, Zea Mays
taatctcgtcctcgagatttaggaagaatgagggaaaagatggggaaaatctatacgaagctcttcttctctttcccaggttgcttcatcttcgccatggtgactccactgcactttgcacatctttatcacattatttcttgtaactcgagtcaaagtatccaaaatcttgatcgggtactccgtgtaagtcaaatcactctaaacactgagctcttccattggtaactgttccttagggacacggagacacttcttgagctgagacacgtggaacacattatgcacatccgatagactagcaggtaactcgagttggtatgccatctccccaactcgcctaaagatcaggaatggtccgatatagcgaggggacaatttgccctttcactttaaatctcctcataccccggattggtgataccttcaaatagacatgatcacccaccttaaactccagtagtcttctccgggtatcagcatagctcttctgtcttgattgtgcaattctcaaattctctcttatcattcgcacttgttcttctg

SEQ ID NO: 46794 - DNA, 337 bp, Zea Mays
caatcatcacattcaaaggaaatcttaatcctgctttaaagaagcttttgaacactaccacctcatccttttccggcttcgaagtaatttcctctccgccaaaacgaaccagctccttttttgcttcactgaaataacccaacttcatcagcttagacatatcaccttcggtaatgatggatttcccaaactccaggtggctgggtttagatggcacagcgctgtaatcatcttcagattcaatttccttagcatcaacctgctcagcttcagcggcaggtgcatcctccgatactaccagccctgaccgttgcatcacttcagagattggagcgat

SEQ ID NO: 46795 - DNA, 577 bp, Zea Mays
tcgcactgctaatgacgaaacaagcaagagatctgctcctttaaaattgagagaagcgttgtcggtctgcattgtgctctccccttcaattgcagaacgagcaacgtcgaaaaatacatgcagtacagaaaaaaaaaaagagagcctgtcagacaacctgtaggccatcccaaccaggcaagcctgatcaaggaacgatcctctacagcaaccagagcaagcagtacagctgaactcctggccgttaatcacgctctggcccacaggtcatgactcatcaaccaggctaaagtgcttgcctccttattaatcaaggatgcaacggtacgatcctatagaacagatcctgttcaagtaaggtcgtgctaccggactccagagctgaacttttaagctggctactacccaatcgagcgaccgaggtggtactaattggtgggagtgtccggcaaatcgtgtactgggtcgcatcctatgtgtgggctttcaggtcgagcccatcgaggctgcattagcctgacctctgtcgagcccatctagatgattgtagttcacacttcgcagagctcaacctttg

SEQ ID NO: 46796 - DNA, 380 bp, Zea Mays
tgcaaactattcctgtgtgtaccaacatcgtcaaagtgtcttattgaaatgtgtgcaaacaccaagggtttgagatgccacataccacttaggcgtctatttgtcaagtgtgtgattcttttccacatcaatgtatgctgtccgttaatgttatgagctactcccagttaatatttggtaaatatgatgcattagactgtacgttcttccaacttaggtagattctccatatagcacctgtaaacttgccataaagtcatgctcatatgtgcgcaattgaagcttttcagtccttttatccagctaatctctatcaattttttgagaaaaacacctttctgatattttaacattaactttagatatgggcatatggcttt

SEQ ID NO: 46797 - DNA, 383 bp, Zea Mays
atgttgtcttcggtatatctaagggtcggattctgagctgatggtaacctgacctcagatctatcttcgagaacacactggctcctcccaattgatcgaataaatcttcaattctgggcagggggtacttgttcttgatagtaacttgattcaaggatcggtaatcgatgcacatcctcttcgttccatccttcttttccacaaataacattggggctgcccaaggcgaggtactcggtctgatgtagcctttctctaacaactcatcaatctgcttcttgagttccaccaactctggttcggacaccggataggctctcttggaaatagggggcggtgcctggaataagctctatggcaaattcaaccttcctttcaggtgg

SEQ ID NO: 46798 - DNA, 412 bp, Zea Mays
attagcaacaacacagtactcaacctcagcaatgaagcgggagacaatgggctaacgcttgaaggaccaaaccgtgtaggcagagatagaccgccaagtgtccaggcacccgacctatttagcatcggtatagacaaccaactcatgcatggaggagtgccaaagagctcgtagtcaacattaccttaaagatagtaaaggatctgcttgaccagacttatgccagtgcccctaggtacgggtacttgaggcgttacaacgaaactaggcatgtgcggagagggtaggctacggggcccaccttcaaggtaggctaggtcaacaagaccccctgaagggatggagtacatgatcgggaccctggctacgcatcaacctagggggtccctcaccacatatacctttgccatgc

SEQ ID NO: 46799 - DNA, 356 bp, Zea Mays
cagtgtagaggaagaagaaaagcctgtagaagaggggagaaggagatgatttgtcacctgcgcatgaagaacaacggagcaggcacgcaaggaagagggtgacgacggggctgctcctctagcgacacgaggaagatgacgaggcggctcctccaaccatggcaacacaacacatagagaagaaagggcgtaggttgctgctgtgcgagaaggaagagggagggggtgaggttgctgtgcgcagacggttttgtgcgaatccgagaaaaatgggatgaggcgcgtgcatcgtgtgggagcagacggaaagttggggaagagagagatggcagttgggtccacagctgacgcgtggg

SEQ ID NO: 46800 - DNA, 471 bp, Zea Mays
cccttgcgtaatatcttggcgaccgatcttctagacctgcaccaccattcctggaaacgacatgtagaggttggatgtaccactgcaactaagtttaaattccggagaaccaaagtccagacttagttttctacaattcaatacttaaaaaaaaattagtatgtagccaaagtttggaataattgaaccgagataatcccaaaacgacacttatttttgattggggagcttcactagctcttctaagaaatttgcggagaagagcttcaactactttgagtattctgttagacaccgtttgtgctgaaattgtagtaagccacaattcgtggtaaacaatttattcaccatacttgcggtagtttggtttatatgtatggcagatggggctagaacctaagaaagtggcaatcacacattttatcgtgacttgtgaacaagcaatggtcaatcttgtggtctttgcttgtg

SEQ ID NO: 46801 - DNA, 727 bp, Zea Mays
ttttttggcaatgttattaagaagattacgaagtatttaaataaatttttatataattttttatgtacattattttctccctacaataaaaaaaggtgacaaaacatctgaatctgtattcgaatagacatccgaattttatatcaattatttaaaaagatatataatgaatttaatgttagttttttatgaagattaatagtctcaatgctaaaaacaagaatataaatttacatagcaaattctctatgttatttgttcacaatcgaagaaataagaccgaaaatttgacatccgaataaatatccagatccatccctacccacgctacatgtctaggaacgaagtccgccatcgcgcaacaaaaaatgagaaatctggagaacgcagttatgctagctaggagaaccgaccttgcaggagcctataaacctggtgcccggaaccacatcttcccagtgttactagatcgccgtgtgaggaaatccaattccatcggccaccacggacccctccatcgaactcatgaatcgccgtcgattgggcctagtaggtggcttagacgggtggttggtctgtgtcacaacttttggggggctcggtgaactgcagagaccctcagagtcggcgcaattcctcgcctgcattgagtgtgccgccatcgggccattgcaccgtgtccagtcctcgccaccgcatggataccgataaggacgctcccccttgc

SEQ ID NO: 46802 - DNA, 618 bp, Zea Mays
tgtctcttgcaacggacccaaagccttaggttgctctgtcgacttccttagtcctagctcttcggctggttctgatctggtttcgacgggtgcagagcgactgggctcacgtgtggaagtagacccctcaataggcttcggcacttcagccgtttcagcgcgcttggggcgatgtgttaaaaccttaacttcttttggctttcagtgtattagagatcgtcgaagcgacaacttttcttttctttccttgctttcgcgaaggataacagtattctaggtatacgaatctgatgacatcaaaaaccctattcagcctctttttgccttgacccccgaaggctgctgtcatagcatcatcttcggcccttgaataagcaccaagcaattcatcactggttgcttcaatggcatccaaccagtcatcatttggctcgtcaaattggttcttgcatttgaatgtatacttcaagtaaattaagccaccttggctagacccagcaatagcctccttcggcatttcccacccacttccgagtggccacactttgtaagcaatgtgttcttgaactaagtccctagaacctatgtaagtgcatattttgttaaaagcatcttggc

SEQ ID NO: 46803 - DNA, 328 bp, Zea Mays
gacggagtgaaggtagatcaagtccggacaccaatggcgtgattggatgcgcaactgcgtgcgcccaggacctgtgcgtccgttaactgtgtgtgtctggtgattggtgagttgcacgagttgacgctggcctgcacgtgcgaatgtaacctaggcgttttttggtcctgtacgcctacatgcatggagacgcctgcatgcgtggagacgtggggaaggaaatgcagcgagcccggcgtcctcgagcctagccaccaattacgccccaacgatcctcggtcgaacgagtggtgtgccccctctcccccaagtgccgggttaacatcgg

SEQ ID NO: 46804 - DNA, 640 bp, Zea Mays
tgattttccaatcgccattgttgagcttcctaacatgcataggaatcccaagatatttaaacggaaattcccctcttttgcacccaaacaaattaatataatgaggcttttcatctctagcttggccaaaacagaaaacctcacttttacgataattaatctttaggcccgagacttgttcgaaagctagaaagataagttttatgttttctgccttaaccaaatcatgatccataaaaaatcagagcgtcatccgcatattgtaagatagatagcccgccatccactaagtggggggtaagaccatcaacttggccattctcttttgcccttttaattaatatggcaagcatatccactacaatattagaaagaaccggagacaagggatcaccttggcgtaaaccttttcttgtttgaaaatttccccccacctgatcattaacttttatacccacatgaccccaatcatgaccgaatttatccatgagcaccacttactagaaaatccattcatccgtaaagtctgctgcacaaatggtcatttcactttgtcataggccttttcaaagtctatcttaagaataacaccactaatttttttcctatgtaactcatggattgtttcatgtaacactac

SEQ ID NO: 46805 - DNA, 654 bp, Zea Mays
gaacagcgccgcgttcttcgaccacacaattccgtcgtcgtcgcaatggagtccgggttacgccgccgatctggcctcgactggtggattgagagcttcgtgaaattgagcgaatcaggcgttgggtcgtcgaatctggaagccatggcgtgcataactgggactgcacaccgaagaaagaacaccaccgcggatccgcgtgacgccgtgggggaccctgttgctgcctccattaccggtgagaaactatttaatcaattcggatgaccctcctcggtatgttgcgcccaaccgtgaccaattttgcgccacggctttgattcggccgttcaccggcgtacctcgtcgcgcggcaacaccaccatctctgggaggtgcctggctgccggggtgtagttgggggcgatgcggtggcccttggttcagcgatgaacgccctagattaagccacacgtaccgattcggccatgagctttgagaccgttggatcttaatgggtggttcggattggatccgggcgataaagctcgggccatttgatctccatccaatggtggaaatcgagtactggttcacgggactttgatctgatctgggccactgatcgtggatggacgagcgagatcgtttctaggttgttttaaatctgggaca

SEQ ID NO: 46806 - DNA, 575 bp, Zea Mays
agtaaaatgctcccaaagtcatattggcagacatgttgaagaaggcattcagacacgaacagttcactaaagaaaatcaggttcactgaacccgccaccagtgatctcgcgtcgcgattcaaactcgtcatcgagattcgtggaaggtttggaatagaaattaccggagagtgaaaagatcggcgggggaaggaacttgggcactgcgctaactggtctgcagtgcccacttgctcggcgtcatgacagagttaccaccatcgtgatccaccagtcatccttgcaatgccacacgtagcctcgcttcacccccatcatagtgagcgtggcatacggtgatacaagtttccgagtcactgagccacatgtgtgccatggagattcaacctctgtgaaaaaacccgactgtcgtggagctcgatctcatcccaaatttgtgaagcgtgcgattgatccctttaaatttagcccccctgctctgcctatctgttacacatctagcccaccctcagccagcccctctcgtccaccatagcccgtaggcttcagatttccctggagttggtcaccatcgc

SEQ ID NO: 46807 - DNA, 415 bp, Zea Mays
ttcccaatggctaaaagctgactgtaacaagatgaaaaaaaaacaatctttgattctcttgggcagtacgaaattgttgtcatgaagcgaagccagtgttggatggtgccaggtcaagcaatttgcaatcgataaaaagcttagcgccttttccatagtttttaattgtgtggccataccataggtatcaagaacgaatccaaattttgtgatcacgttcaaacggcgctagactatacacacacgttacctaggattaaatataggaaatgatgtgggacggaatgggatttaatccgctccattttcatctctactccttgctcatatgttctaatgctggttcctgcccttttaggctatatctactgccacggtactattgaccaatctatatctaccatcatcagtcctt

SEQ ID NO: 46808 - DNA, 412 bp, Zea Mays
gcctgggctagcaaatgggtcaaacgtgcatggtactaacacccttcgcaagtgcgtactatccactgcgcatcagacaccatggtgggctagtagaaaccttgttgaaaagcactcccaacaaggctttgtggggtagtgtggtgtctacagatcccttcgtggatatcctttaggagatgtcttccttggttgaccggggtataccattgttttaccctcggatggctcttcttgtatagatctttgccgttgaggtcttgaggacaaaggacttagcacgtcgatggagtcatcgtgcctttgttttgtctgtggggagcatgacgtgaagcagatagtctttatatgatgacctccagtcgtcagtggactcggcaaggtggtcctgcttcctaaaatagcaaatatt

SEQ ID NO: 46809 - DNA, 581 bp, Zea Mays
gggttcggctgccgcgatggagcgaaggcggctcagtctctatggtggagaagaacaaggtgacggcgactcggtctccgctttggagacgatgaaggcgacgacggcaagaatctctagggttcggccgtcgcggtggagcgaaggcggctcggtctctgcggtggagaagaacaaggagacggcgacgagaatctctagggttcgaccgccgcgtgcgttgcgggtgaggtgagctgaataactgcgtgctcgtgggtggaatcgtgggcccgatacacgtacactgcggtacgaaatctacgcgaaggcccgtagaccgacacgtggattactatttcataaacagaaacataaaacatcgtaataccaatatttgtgtggggactagtacggctgcccagattgcgggaacacaatcttctcgtggtcctggatgcccggaacatgcgcataccataagtgtataaactggtacacaaattagcataacacatattataatttgacataagtagttaggtacagtaagccaaaaagtgtccggtgcggtctgcgcacctggtcggtgggtggtcggg

SEQ ID NO: 46810 - DNA, 923 bp, Zea Mays
tttctcatactatacgtggatgatatccttttcgtgagcagtgataaagaatctgctattagaaactaagagtttcctatcctcccacttcgatatgaaagatctcagagaggcatcttatgtctcgggaattgagattcaccgagatagaaagaaagatgtattaggtttatcaaaaggccttcatacataatgttcttatgaaatttagtatgcatgcgtgtaaccacacacctgctccagtagtcaaggacgataagttgggaagtgatcaatgccccaggaaccaatatgaggtcacttcgaataaaatcggttccatacgcttcggttgtcggaagcataatgtatgctcaaatatgtattcgcccttaccattgttttcaagtcgggcgaccagctggtcgattcagaggacggatcaggcgcctaatcgcgattagggcgacgattaggacgcctaatcggtactctgtctattgactagagctgtagagcagacagaagtcatggaacaaaacactggtgttgtgaatgtgatggtaagaaccaagaaggcaagaactagactgcggacatactaataataagatagaaaagggggaggaggggagctcatcttgcccgttgtaagttgtcactggtgctgatctggagccaatgccggtgatctagagacgctggaagtgggtgcagagccggtgcgggtgaactgcagcagacgtcggttagtgcactggacaactgccggtgactgcactggaccctagccgccacgggttggagagaacgggttggaaaggggcgccgacagggttttgtgaggggaggcaagctgtttatgtgactgtagatgggccgtaaaaacaataaagcccaatagtaaaccctagccgccactaaaccctagtcgccagtggacg

SEQ ID NO: 46811 - DNA, 402 bp, Zea Mays
actcggtaggagccatgcggtatggtctcttcgcgatgggtgctgttccaggaatcagatctatgtagaactccacttctctttctggtggcattcctagcaattcttctggaaatacgtccatgaattcctctactactgatatactttccgttgttagatagaacatcattgggtcactggcgggtggctgtgcctggcaagagactgactttccctgctggtcggtgaggaggactgtcttgtctgcgcagctgataatgcttttgtgtttagttagccaatccatccctaggattacatcaattcctttggatggcaagacggttaagtctgccaggtaaactaccccacttaaaaggattctgacttgggagcattttagctggcataggaggtcgg

SEQ ID NO: 46812 - DNA, 670 bp, Zea Mays
caaagagccctccccactgttcctctgtctcgctgacatttgcacagagacccccaaggttctaattcttcacaagggaaagtccacgaccgtggacggtggagcaggaactccggcgagcttgcactggctaggatacgcgatgaccggtgctcccacatggctgacacctaattcaacccttaacaaccatttcccctcaatcaatttcactagcggagctctaattcgtccagcccacggagacagcgcagacaatggatgaacaaacgtgttcctggtgatctagggcagtctagctcaattgaatgggtcgagcagtattaggagaacctaaggatgctgagacaagagagcagagagtataaacaaacatataacaagctagccacggcgaggatgctttcacggtggtggaaaccgatttgggggaactttgaaattggcgcgctctagtggatgatttgaggcacgagttgctggattaggtgcttgactacatagcggagccaagggtgtgtgcaatttatagcgtgcttgagcggtggccggtgaatttgatggagacgcgcggcggttggagaggaggaggggcactagcgcaaacgattagtcgctttcaccgtggcggactcaccggcgatcaccggatatgcttaacgcgacctac

SEQ ID NO: 46813 - DNA, 475 bp, Zea Mays
agaccctaggtttgaggatgaagcagatgaagacaaaggggagattatccatgaaagcctagctatgttgatatcgggacatccactattaaaagtggccatattaaggtgttctagatacttggttagcttgatgattagaagttggtgagactagatagggaaggcacaacacctttacccagggaaggcaacatcattgtgtttaataacttcattcgtgttggactctagtttttagtccatcccatggttgtagaggtattgaagaagtatgaggtgtttttcgatcagttgacaccgagtacaataatgaggtatggtgactttatctaggctatccaaagctagatggccgaagcaagtgttgagtgcttctactgaattcacgaacaacattactagacgaaggcatatagaaagtaaggattgcacaataactttggatgctacaatttctagtacaggaaggatg

SEQ ID NO: 46814 - DNA, 482 bp, Zea Mays
cttctgttcatcaaatcgacagtagcctgcaataagttggttctatgtgttatgatttgaactaatactagctgtgtcattgtaggatcagtaatctccttgacagtcctttgctaaatgcctataaaaaagcaaggaaatatgacagtctacagttaattttgacctatctacaggatgaaatgtgcaaattatcttccaattttctaattggacattcaacattcaggcagccttccaattttatatgtatgttccaattcatttaacattttgttgcttcgtattttcatttgcagggctgcattcagtttttttctcatttggttgtgacttgtgagttaacaatttggggcatttctaatatctgaatctgatgttcatagattttttagtatgccatgccaagaaatatgacaatcgatacaggaatctgagttaacacaatgctgctctcgctatcaattgtatgaactgataaa

SEQ ID NO: 46815 - DNA, 364 bp, Zea Mays
cctagagtatgcaatgaaccgaatgaattgggttttaccctaaacagcgacgactgagatgccgcccacggcgatctgtggcccactggggaggagggagatcttgagcaatcccggcgactccgagcgcacactgaccacggtgaagcttcgaacaccttccacgccacactgcgaagctcctagtaccgcactcgagattggagctccgatgcggacccgatttccccacggcggcccatgctcaccgacctgatggtaaactcgacgacgatttggttcggggggtaggcaggtctagttgaggggatagggacgtcgtaggggcctggctttatggctgaggcatggaggtcggttgggg

SEQ ID NO: 46816 - DNA, 855 bp, Zea Mays
ggtaaaaagaggggaggggtagaatagggtttcaaacctggtttagaattttgggatgttacaaacctaccccacttaaaggaatctcgcccttgagattcagacggggctcgagaaaaggtaagggtattccttccttagagagtcctcactttcccaggtggcttcctcttctccatctctgctctactgaaccttacagagcctcacttccgagttgcgggtccttctgactgctgagtcgagaatcttcactggcttttcccggtattggagatccttttgaatctgaattgcatctgcatcgatgtggttttctggtacttttaggcatttgcggagctgagacacatggaacacattgtgaatatctgacatggattctggtagctcaagacggtatgctgcgggtcccactcggctaatgacggggtagggaccgacgaaacgtggtgctagctttcctttcatttggaaccttttgacaccacgcatcggggagaccttgagataaacaaaatctccttcctcaaatctgagttctcttcgtctgttgtctgcgtaactcttttgtcgactctgagcttcaagtaacctcctgcggatcaaggcaactttctcttcggcttctttaacaaagtcaggtccttcaagtgtcctttcccctacattggaccacattaggggagtctggcattttcttccatacagtgcttcgaatggtgacattttgatgctggcttgatggctgttgttgtacgagaattcggcgtacggcaaactggactcccaatccctgtcgaaagttaacacacaggctcttagcaaatcttcgaggatcttgttgactctttc

SEQ ID NO: 46817 - DNA, 660 bp, Zea Mays
cagaaatcgaacacctatgccaacttattttgagagaaactcatgattcggcttactctattcaccctggaagctcaaagatgtaccaggatctaaaggaaaagtattggtggtacagtttgaaaagagatgttgctactcatgttgcactatgtgacgtgtgtcagcgagttaaagccgaacaccaaagaccagctgaattactacaacctctcagagtaccagaatggaaatgggaagaaatcgatatggatttcatagttggactaccctgtactcgggatggctatgattcaatatgggtcatagtagacaggttgactaaagtggcacactttatacctgtaaagacaacttattcaggagcccagttagtagaattatacatgtcgaggattgtttgtcttcacggagtaccgaagaagattgtatcagatcgaggaactcaatttaccttgcgcttttggaaaagactacatgagtccatggataccaagctaaactttagttcagcttatcatctgcaaacggatgggcaaacggaaagaacaaaccaagtgttggaagatatgctaagagcttgcgctctaaagcatggtagaagctgggacaaaagtttgccttatgcagagttctcatataacaatagttatcaggcaa

SEQ ID NO: 46818 - DNA, 409 bp, Zea Mays
cgcgatctattaccacctctatctgagagagagaggccaatccagtgagagggagaaggaaaccttttcttttctgtgaagtagtgatagccccttcagaggtcttcaccttgggccttgactgattgtgtgactcagttttatgatcctagcttatgtttgacagagaaaagaatatagtaaaaaccttatggggacccggccggttacagtgagagggagaaggaacaaggtctacatgctttatccagtctagaaatggaatatataagagagaaggaagaagagagctgcatggatataattgttgcacaaaaacgcacacttgtactaatcctgtatgttttgtcgaactacaaacagtgatacgggcgatagagctatgcaatatctagttcttgtggcgtgg

SEQ ID NO: 46819 - DNA, 298 bp, Zea Mays
aacaataacttttctgccaaaaggtaaatctcttgccgctggtgatgaagtagccaagatgtcacgaaaggatctgtctaatgcttcaaaggcaaatctatgtgtcatcaatgcttcatcccatattactaaagatgcaacttggactaattggcagagcatcgtgccacatttgatgtcacaaactattgtttcatctagttcacatggaattttgaagcgagaatgtgttgttcgccctcctggtagaagtaatgaggccacaccagaggaagctacagataaaaaaatttgtttg

SEQ ID NO: 46820 - DNA, 512 bp, Zea Mays
caggatagcaagggtattttatggttcgaagaccgactggttgttcccaagaatccagaactcaggaagaaaattttggatgaggctcatctctccaaattttccatgcaccgcggaagtaacaaaatgtatcatgacctcagatccttatattggtggaccaggatgaagagagagattgctaagtacatacctgagtgcgacacttgccaaagaatcaaagccagtcatttaaaggtagcgggtaccttacaacctctccccataacatcttagaaattggaggacatttgcatggactttattgtgggattgcccaacacctcccggcaccatgattacatttgggtcattatggataggctaaccaagacagctcatttcttgccagtgcataccacccacaagatagaaaaatacgcagagatctatattgaccaaatagtacgcttgcatggaatcccaaggaccatcgtatcagatagaggaacaccgttcatagcacgtttcta

SEQ ID NO: 46821 - DNA, 329 bp, Zea Mays
gtgaggaatcttccatgcgcagagcccactaatgaaggggggttgcaggattgtgatgcaagaacccatcatccttctttgtcatccgtaatcttgaaaagtaattttccgatcacaagatgctgtttttttctttgatgcatgtctcgatctttattaaccagtttcctgaataagcttaaatatgtttgtgcctgaaagactatccgttgatcatagcctttgttgcctttgcatttcttcatcattacccgtaatatcatatctaacaccaaaatgctaccgatgcagaagcgaagaattctaacctagggtgcgtttggttctgc

SEQ ID NO: 46822 - DNA, 459 bp, Zea Mays
aaaaacatagtacatcagacgtcgcatcagacatgacactagatataacacttagataaggtatgtagcgtgtttgaggaggtccataaggcactagacatgtccagtgtaccatggaatactccactggatagggtacttaagaggttgcatagcaacccaagaaggtgtataatgcctggacgtgcccggtgtagcaccagccatgacatcaaatgtatttactcaaacaattagcaatggctagtttcaatagttagctgatgtggacatgcatcgacatatcagtcgagtgcatcgtagtgtccgacaagtatgcaaaaaatcttgcattgcttccaacgacttgttttggacatggaggctatatatgccaccccatttgaccatttgagatgtgtgagagctaagaaatatcgctagagttgagactccattcctatagttctatacaccacg

SEQ ID NO: 46823 - DNA, 644 bp, Zea Mays
gatcattgatcggacggcccagaacgtctcgtaccccttcgttgcagttttttgtcaaaaagcccccggactctttacaaaacaacctgtcgtccacacagttcaatggaaatcatagttaagccctcggatttcacaaataggtccttggaatcttcaaaacagcccctgacgaatatttgaaagcatgaaattaaaattaaagtataaacaaacttagataacccatatcttgctcatttaactatgttttagtccgttcaagttgcattagcttcgtaataatattacctacactttattaactttattttatcatgacacatgttgtcgagggtgataattaggggtacctggattatccctccaaaaaacgcacttaggagaagttaagacacaaccctcgaagggaagcaaccgagacacctcctaacccaaggcctctccctgagggtctcccacctcaggcaaatctctgcctcgcccgaagtcaccaccacttccccgtctcgcccgagctgatcccaggcagacacgacaaaggcgcccgaaggctggcggggaacactcacatttaatgcgcacacctaccccacgcagcgacataggagcacaatggctaacaagacaacggtcatgtccgg

SEQ ID NO: 46824 - DNA, 474 bp, Zea Mays
taccacgggatcgaggctaaccaatagaagattcaagctatctagtagatggggcccatctggaacttcaaaggagtccaacggctggtcggctcactaagtcgtttagtctctaggcttggagaaaagggcatgcccctatacaaactcctcaggaagggcgaccagttctcctagaccccagaagcccaggaagccctcgataggataaagggattcctaacctcaccgccaatattagttgtgcctagcctaggcgagactctcctcctttacgttgctgctaccacttaggtggttagtgtggcacttgttgtagagcgggcagatgaaggccacatactcaaagtacagaggaccatctacttcatcagtgaggtgcttaccgagtctaaaactcggtacccgcggatacaaaagttgctctacgcggtccttgtggccaaaagaaacgtgatacatacttcgatcggc

SEQ ID NO: 46825 - DNA, 993 bp, Zea Mays
cgccccttggtgaccggcaagggagcctttgctagaatctcggctctatctgatgtgtagttatcgagtcatcgtctgcctctgactttcacaatggcgagccccttcttctcgtacggcagtggggccagaggcttcatcgttgatatgaaatcaagtctttgggtgttgcaggcccagtgtccaaacatggttaattctgctcgggtaagcatgatcgaggtctggttcggcctttactccaacattgagcatttgcaaataactgatgtttctctctttattgaagagggatacccaggaagggctagatgccgccgacaagatagtatccctgattgtattcatttccattaaccttgaagttcattacaggtgcttgaccttgaaggtcattagtgaatgactaattgattatgttaataccattgttggacctagccaccccaaaaaaagcatgctagatccacgaatcattcgatgcaacaacctctaagatgatggtgggatgttgatatttgcaactatgggttatagatacacatcgggtcatcatggcattgttaagcttcgtgggacgcctacaaggcccccaatgggctgaccgttaggtgcccagtgggcctcagccaggtgcaactaaagacgaccaaacgagatatacaggtgggcgaaaaggttcccaagatcgtgccccgcacaggcaacgtacgcgcaggcctaacgaagaccaactgatcgctggaagacatggcacacttctagtggaagttgacatataggaatcatggtctgagattatgcggggtgatccctctttaatccgatataaggcggagtggcaacccctacaaaaacagtagaccctcatacctcattcattttctactttcaataactacttgtaatcctcaatcacaagcaatatacatctcagaactcataggacgtagggtattacacattcaagcggcccaaacatgtataatctat

SEQ ID NO: 46826 - DNA, 365 bp, Zea Mays
ggagggtgatcacgtgtatctgaaggtgtcaccgatccggggtatgaggaggtttaaagttaaaggtaagttgtcccccttgctttattggacccttcatgatcctaaagcgagtggaggaagttgcctaccaactagaattacctgaccatcttacagatgtgcacgatgtcttctatgtatcccagttgaagaagtgtctcagggtgcccgaagagcaactgcctatggaggaattgactgttcaagatgacctgacttatactgagtatcctatcaagattcttgatactttgacccatgtcatgaggaataaagtgattaaaatttgcaaagtgcaatggagtcatcatggagaaaacgaa

SEQ ID NO: 46827 - DNA, 607 bp, Zea Mays
gaaaacctcaattgttttagacatgattctttagatataaacttagtggatcttttattcttaagttgatttggtgcgttatgctcaatttggcttacatgaaatgatggcacttgagttagcattgagaagaaccctaggtgacactggggtgtcacaataagaggacagtgatgttggtgtccccactgggagtagaagtggtgactgagcgagtctcacccaagccaaagaaaggaggttgtcactagatggctattgatagcacaaatgtcgatccacttgaggctatcaaggttgtgtcagaatttcctgatgtgttccctacagatctactaagtatgccacctgagcggaaagtggagtttgccatagagcttatttctggcaccgcccccatttctaaaagagcatacagggtatctagactagagttggtagagctcaagaagcaaatagatgagctatcagagaaaggttacatcagaccgagtacctcaccttgggccacccatgtcctgttcgtggagaagaaagatggcactaagaggttgtgcgtcgattaccgagctctgaatgaagtcacaatcaagaacatgtacccctt

SEQ ID NO: 46828 - DNA, 630 bp, Zea Mays
agaccatgaaatgaagttacatatacgataacaaagacctcttcaataaagaggtacaatttttttctgactaaacaaataatgttagtgtcaaagtctacaaatacgttataaccccaccacaagcaagagttttacatatattctagtatggatagtgtatggttaaagtagcattcaaatgaccacctcatgcatcttcttgtggtactttgagtggggtctccaaggtgctagcttgatagaggggttagtgggaatgggagaacaaagttggataaagaccaccaaaacctctaagcaacccaagaaccaaccagatcttgatagcattggtcaatacacgaatgagatttgatgtggttccatattcatgagccttgttagcattggtcaatacgcgaatgagattcgatgtggttccatcttcatgagccttgttctggtacctcttgtgcaccatcttgactataaaggaaggtgtatgaatggaatgtgactccaaaaggaaaaataggtcacttaaagttaaggccaaagtccacttgtaaaaattgcacatattttattcatatgtgcaataggtttttctaagtgttgctatatatctctaattccaaagagttttgc

SEQ ID NO: 46829 - DNA, 610 bp, Zea Mays
gatgatatgtgcctatggttcaagtgtgatgagtgattgccaaagatatcattggctttggtttagtgttgaaaaccttagcatgagtgtggtgttgtgcaacatctcttttagtatgtgtgaagcacaaatgagatggccgataacgagaatgaaggtcaagcgggttcatgtaatggactagagcgatgaaggatggacgatgaggctcagaccgaaggacgatagaagtcggagaattgaccattggttttcacacctgtggtcattgacaagtacaccggctcatccttatagtcacccgaaaacacggttttacactgtatactgtatttttatatagtggagtttgaatacggggatataagtgcagagagaactaaataggagaagaaagaagaaaaagagaaagaaagaagataagtgctttgttgtgccaagtgtggtggtgacgtgataatgtctgtcgctcccatacgtacgctatagcgcgataagacaggacatgtggcgtgggcgcgtggtggcaacgttgtcctggctgctttaccgattgatctgtgctgtgcatcacatacatacacgcacatgatttcctacgctatagctt

SEQ ID NO: 46830 - DNA, 294 bp, Zea Mays
taagatggatcctaatgttgtttaacatttgatatgaaatgaataatcaacataatgttacatctgtaatatttttatattcatggatgatgaagacttgttcttcatgaccttcatccaagacccattatgcccgaaaggagataatgcttcgaaggacaaaggcccttaacgtttaacaattgtgttgccttgttttatgattaagtaataaaaaaagtgaccaacattggcacccacctccggtgaactcaaacgaccaccttcgtcaagagagctctacaaccaccttcg

SEQ ID NO: 46831 - DNA, 956 bp, Zea Mays
acacagctcacggatacagccaacgacgtgcatgcatgatggtcagtgcagtgtgtgtgtagaagtgactgctgacaggtaccactcactcactcaccaagagtcttctagctagttgatacaccgatggcgaacaattcggttcgtgactcgtcgtctctcgcaagtgtggcaaacaacgcgtacgtgtggttgtgtgcctttggccatgaatcccacacacttgagtgtacagtgtaggccactgagacccatttatttattcggcctgatccaaaacgagacagggaggcagagacgtccgggtggtgtgccgtctgccgtgtgcgtgtgcgagctcgccgacgtcgactaaccagcttttgctgccactactgcaccaccgagtgccgtcagctcgtttatcctaatcacaaatgtactaccgctccatgtcagattattaagatattaatttcaactctcttgaaaaaaaaggtcaaaacatttcaaactcgatcaaaaatcaacaaaaacgcaacacattaaaatagatatgctacaaaaaaaatataaatggataatctaatgatataaagctagtcaaacttgacatgcttttaggttgcaattcgatcgttgtgggtttttttttttattccggccatgcatgaagcccatcaatccagcggccagtcagtgcatgcaggtcaggtccaaggatatcagagagcaagaacacagtgacgacccttacctgatatgaccactactgattttcagaattcaaatagaactccactgtgctacatgtatgtatacatcgattcgctttggattttacagacatctatggtgcaaattttttttcttcacatggaacattaattaacctcattttcctgctcattttggtcataaagttgttgaacatatcatgcatatgcaggtcctggtggcacacactcaagaccaag

SEQ ID NO: 46832 - DNA, 597 bp, Zea Mays
atggattttcaggtcttataggaaagaggtgggatttcagaatctggatttcaggtttagtgtgattcctagaactgaagcttttatgtttagagaccactttggaagtctattagtggcaaatttataccattctagacttggagtattataataaagtgcaagaccacatgttggtgtataaatttaattaagggtcatgtcactaatgctgtataaaactggtggaaaaacctagcccaaaggtcctatcctcaaatctgaaatttcagacttagtgcagttcagattttagaaatgtgtataattggtctaacattggggcccttttgtggatgattagtggagtattgggccatatttgctatagagaaattgtagattacctatcagggcacaagtttgcttaagggagactggtttggttctacacaaaaatagcagaaaatggcgcctacagataggctgtcagacttctacatcttcagatggggaatagtgtactggtctgaatttcagtaatttggctcaactttggagctgtatggtgtcttttctaggaagtttggagctgagatctttataacaaaaatggag

SEQ ID NO: 46833 - DNA, 909 bp, Zea Mays
gtcgccgtggaaactcttgtgacctcggttgtgccacgacgtggcttgttaatgtgtggtagtgaccgtggcgcacttaagagtacaatcgtggagccattgcgccggtgaacgccacgaattctttgcaccggtgctcttccccctctccggccgccacgcgtctccttcaaattagcagccactgctcatgaatcctataaattgagcgtgccatcatctccgctaggtattcaagcttccagcgcacccactcgtgtctcggattgttcactagagagctccaatttgggtttcccccaaatcgaccaaagaacaccatgtgagtgagctcgttgtggccaacgctctacaggtccattcaccccctctgtttcctcgtttcagtacccttatgtgcccttgatgcttctcgacctggccgattaagctagaacccgtaggatcaccgggaacacttcaagttgtctgttgatcgcactgtcaccgtgggtagagagattaggggctagaatcttgcaattgatcgaggggaaatggttgttaggggttaaattaagtgtcagccaagctagagccctagctgttgcctattccggccagtacgagctcgccggagctcggtttgtcaccgttcaccatcggggatcacgggttgtgaaggaatagaagtgtgagggtcttggtgcaattgtcagttagacagagacaaggtaggaaggagtctttacgagtttttcaaacagccaggggtctctatgcaaagacgccagcgcgggcgcacgcgcgggcgcgtttcgcctgtcgtgggacgtctcgggccagattgagcccagtactgttgacctttttcctttttctttttctaccagactttggaaatccatagaaaattctagaaaaatgcta

SEQ ID NO: 46834 - DNA, 688 bp, Zea Mays
tagagaagacaggctacatgaaaattttggctgttataacttcgcgtatcgcaaggatacaaaggctccgatcctcagctatcgcaccaagtggccaactgtctggaagagtgagtggttttacattaaggccgatgagaagaaaagagggaaactgatgacgatggtgatgagcccactggttttaagcatcgggatgaccagacccttgtgcaacatgacggcagggttaagttagcatgccaactggctgtagcagaatttagagtggtggctgaacaaatcagcaccagggatctagttcaagaatacttgtctaacaggacgtctccgacgttaagtgaattcagcatgccaaagctaaagggaacgaagaaaacacttgaacttgtgcggttgccttatcgctttgagtttgagaagtagttcaaggagccctgccagagtggttgaagatgattgagactatgtgcaatgaaattttgggcaattataccaaaaaagatcaattaatgactgcagccttcgacacccgaccaaaatgaaggttgaatcgggtaatggacgctttaaattttgaataccctgattatgagcgactcagcaagggtgccgaagggacaaagagaaaaagggttgttagtgttctgagcaggcaggctgctagaatggtgaaagaggacgaaaa

SEQ ID NO: 46835 - DNA, 572 bp, Zea Mays
atatgcaggagcaagagcaacttgtgcaaaacaacggctagctagctgctcccttcgttcccccgatggatcccggccaatgcaagcgaaacgaagtctctagaaaagctaaggaccacgcgctgtacgtacaccgtgtttgatgagtcgtctgcgtctctcgccgtctagctaggagtgtacaccatctctagtcgagtcactctctcgatcgttcagctggaaacgatgtacatacgtgcatcatccccttgatgaaaaccatgtgcagctgctgaggaatggaccggacggacgatggatggatcgatcggagaaggtgagtagtgaggctataataataagcatgttttttgtcgccacctccaccgtacctccatggctccacacccctagctggactggaggtagtagcacacagttcaagctgaggagctgtgtgtggattatagatgtccaaacgatacggaccgcccgtttggcccgaaacccatgggcggatccaaggcccgggcagggtgggctgttgcccaggcttagtctccagcagacccattatatataggtgtttt

SEQ ID NO: 46836 - DNA, 412 bp, Zea Mays
gaagatgtctttagagcatagataggtttggttaagaaagggtagggtgaggaaagactctatccaagattgtggatcttgattccttttgaagatctggcttgaatcttatccttccttgatttgatgaggtcgatcatcttcgatcttcgttcttgaagtatttatccgaattagggtacgtagttaggataacttgtaggtaaggacagatggttaacaggttggtggcataagataagtgcattatgacaacatctaagatgggatggatggtcaccatgaatatgctggtaagtaatttgttcatgggtggtttggtttgatgtactaatttaagttaaaacatggccagcagggtataatctatttcactagtattaactagtccgttaagtaattcactttagat

SEQ ID NO: 46837 - DNA, 378 bp, Zea Mays
accatagcttccttcttgaggtgatccctccccttcggaaccaaggatgtttggtgttttccctaacacttttctggggcaaatgttgtcgcactggtattcttcacagtttacttaccctagtgctatgccatttgctcaccccgggtcttactattgatgcaggacggaggcctggagaacacgtggctcatggattccgactgttcgcgccacatgatcgaaagctccaaatggtttccagcctcgaccccgtgattggtaaggaatacatcacattcggggataagtcaagaggtaatgttgtttctcgtggcaccattcggatgaacaagagctttattctcaaggatgttgctttggtctcgaatctgcatt

SEQ ID NO: 46838 - DNA, 374 bp, Zea Mays
agaaattggagggatctaaaggagagaaaattcattgatacttaattaatttctctcaattctttagttaccaaaccagctcttaggcttgagtatagattgtaaaacataaaaattatatattttttacgctcgagtataaagtgtgaatatggatttgaagtcaataaccatgcttcgaatccacgattgtgtataatccatggctctagaaacatatggattcaagtttgtgataccataaaatgattgtttatatatcggatcgggtgttggatgcaaatattcatatgcaagtggaggatgtgtttgtctatactcatacatgattgatggtggtattgacccggttggtggtgtccaagctctataca

SEQ ID NO: 46839 - DNA, 761 bp, Zea Mays
ccgcctcgatctgctgccaaaagctccatgcaagcagcagggacggggacggcgacgacgtgagcgtgacctactgggggtaagtgaagtgtgtgcggctagcttaggatctcagattcttctgcagagataatgcacggcgacgatcgcaattgaaccaagtcattttcgatgtgaacagctagctggccggagagcattgctgtagcaacaaaaacagaggacgattgagcacacactgtacaaacaaataaccagaatactagtggtactctcggctcacaaggtccttggtcatctctagcctcagatcctgcggatacatttatgacgtatagaaatggatcgcacaaaaccaaaccaattgtcaattgacacgtgccagtttattctcatttcagtgtcctttggacaggatcctagacttcgcacagcatacatgttccctgtgaagggagctttccggatatgtcgaggtcgaatactccgactgcgaggtcacatttcaacaacgctaattacacacactaatgtggcatgacagacctgcctcaaataacgcatactcgccatccacttagcccttagtatccaagagaagctattaaataaaaaggaaccatgttggttatgaattgactactctctactggaatcaaaaccggtaccgagcaaccgggactaaagacgccaaccttttgtcctcattacatggccaagtactaaaactcttagttcttgattagaaccggtactaccgg

SEQ ID NO: 46840 - DNA, 705 bp, Zea Mays
ctgggagttgaattccccgctacgttgctgcgctagttccaataatcgatggtgccgtgagaatcgaaatcgaccgactgacgcgcacacacgtccgttccgtgcgtcgtgcgtgcacgtatcggcggagagcagggagcccaggaccaccccggccggtcgtctgcacatgcactgcaccaaatcaggacgccctggtgacgagcacgacgaatcgtcggagcaccgcacagtgcgcccgcggcaagcaaagccggccatcgactagctagacgacgacgaggactacgcagccccgcgtacggttggggccaagatttgactgtgatacctattccttctgttgggttgggatcgagagaggagtagcttcgcgtcttggcggatgaaagaaaaaacagtgacagcgaccgagcacgcacgtacggttggcgcgaaagactactctgtgtgcggtcctccaaagtccagatgagatcgatgacctcagctggagcgacttccagtttttggccggtcgacgagtacgtatagagtctttggggttctctcgtctcggctggtaggtaggttcctttctttctttcagaaatagttagcgagcagccagctgagagcacctttttccagccttttgaagccttcggtttgaacggcctgccgactggtgccggcttgcgtatccgattcgtttttttttttttt

SEQ ID NO: 46841 - DNA, 487 bp, Zea Mays
ctgattattccagttcttatatgttgttcttgcaatacgtgttgttttacacaaagctgaattatttggttagttgcatatagaaaccggcggcggccgtggttattggcaacaaaatcaaacaaccatggcgctcgatcgatttcagggggcggcacgtcttgcatgccccatgtgacggcagctaccacgatcgcaaccaccacagaatacttaatgtaatctaaccctagccagttaattagtagtatgttttttatcacccccttatctatcgctacgccgtcccggcctcatggaggggaacgagttgaccttagcttcttgcagccgatgatctatgggtgcagctggctagcagcagacaggttgcatgctgcgtcattccttggccgtgtgtgctgggatcaatgtcttttggcagttgcacgcatccaggcaccggtgtcgatcctgtcctgtgttttggcgtcaactttactgtgcg

SEQ ID NO: 46842 - DNA, 887 bp, Zea Mays
acattttgaaatcatgatatcactgatttgataatatgcttttggtttgagcgatttcttcatctcaattgaagtgaaatgctcaatcccagtttttagcagcaacattttgattggctcgcatttaacccccctctggtcacctcaccagtccttcaatgagtatcgaagccggttaaggatttcattaccctgatcggtttagaatccacgaaggtgacatgaacgtgttgttagcaagccaccattcttcgatgggacgaaccacccatactagaaaatccgcacgtcggcatatctttagagtattgggtaccgcgtctgggaaatctacctcaatgctgcttttgacgctaaagtgattgaccactccgattgagatgggtcccatgattggaacaacaaagctcccaacgctttgttctcgtgcctctcacttcttgagtttgagcgagttcgacatttcgctacagctcatcggatattgtcctacctcgagagattccatgagggaaacgatcatgtaaggaccagactatttgagacgtaccggcgagagtacaataactttgtgtagttggctggatagaccattgatacgatgttttctcggttctagtcgattgtgaacaagatacatgccaacaacgcacaacttccctatgatgatcatgagagagcgctgaaattgttaaatgctctggatcagaggatttgggaggtgaaggtctcagtgatcatcgagtcacccaactatgagacactcagcatggttgagctttttagcaagctcaagttcactgagattgaccaccagaccaaggctaagattgagatccctgatgcacccaccatggccctggtctctacaggtggttcgtcctcta

SEQ ID NO: 46843 - DNA, 1194 bp, Zea Mays
atttcaaatatgatcgcaacccactgaatgctaatctgactagttgcttatcagcaacctggacctagaagcatcgacttctagtatctcaaagtgctcatgaaatttgtgttctagttccaccaagagtaaatagaattaggcggcaaggttgcataccatgccaatgtggtaccaattagggacaatgagaataggtggacgtggaaggcttccctatcagccagtttccctagtctgctaggaactagtctatgtgctcatgtgtgctcctcccgcattcaccggctacttccctgcggatatggcacaatatcaaatcggtgatcataaataaggcttccaatatgcatgtcccatgctcgacacactaacacctagtgtgtccctaaacatcctggctacttcttccctaattttctctactacatctggtgaccatccactaagtttgggaatgaaaactttaggtgggtggatattattatgacggccttcctcccaggaacgctcaaaatgtgtatttggtgtcctactatcgccactccttcctaccatgtatctctcaagccctctggcagccgaagaatattcgaccatgtgtgcatgaggtgctgtgacatggctataatgtgccctaggtgggatggtgtaatgttgctgagatgggtgtgaaaactgtgcatattgtgcagccccctattgtgcatacacatatccagatggtccgacgtgaggggctagatggtctgcgaccgggccgaatgagtcgaggttatacatggcatgtctggccgcatatggcgctgcttgggtggcatgcgcataagtctatgtagggccggatggtccgacgaaaggtgtaaaacggtccatgatatggttggacagtttgagattaggttcaaacggtccagctgtgcccagagccggttgtgtacctgggagtgacatgtgtggttgcgatatgaatgtgttcatcggtataccatatggtgtccaagttggtgatgacccatttattgtcgatttgtcatgtgtgggtgccttcatgttaggttcaaatgaagtaaaacttggaataacatatttttcatatgaatgagctaatcccctcatagactcatctatgtattgttttaattcatcccatgatgttctagtaaagactcaaaacatggatctagaataatt

SEQ ID NO: 46844 - DNA, 330 bp, Zea Mays
ttcgtgtgtgtacaaccttgactcgagacaccatagcacgatagacggtatgacaccccacagtctagacctgctaagctaggggatgcgaagaggacaaggttcataagggatatacacccacaacaatcgctccgacaggcctcggtgtccttgagaccttgctcccccttcaaaccctaatccccaatcttcatccaccctcgcctctctcatggcgccgctctcacgtttctcattattgtctgccactgtttttgtttcgctcgttgtactcctcgtctccattgacctctccaccattgaatacctcctcgcaattgctcctgc

SEQ ID NO: 46845 - DNA, 438 bp, Zea Mays
gttccacaacccactccactagcagtaggacatactgttttgtttcttgttttcttgtcattacactaactatggcaggacacatgggggatcacgaggataagaacaccattccatagtcccctcgtaccaagggcatcatacagcattttgagtgacaaatgcgcctgcaccttgatggcctcgctgaagacattcatgttaccaacgagtgccttggtccacttgaaacaacacaaattgaagccagtacgacgctcctggaattacgaatagcccaagccaccaccaacaccaccctcgacaccatcatgacactactagaggagttgtcccagtagcttggtgagctatagggtggcattgattatggtggtgacaccgagaacgacgatcaaccccatcgtcaccgacacggatctcgccgtgtggtatgta

SEQ ID NO: 46846 - DNA, 651 bp, Zea Mays
tcgaagagtggtgccctgggatcccgggaattcctcgccggagttggtagaggcgtcgtgctcgggcgcggccgtggccagggattacggcgttccgattcaaggtactaacactgctactgcattcgctaaatcatcaggaatgtgtgggtagtctcgggtgcgcctttgaagcagtgattcgccagttggcgctcgccggtggtcggccgccgcggggaaatagcgccgccacgcggccctgccggaaaagagtagacgatggcgctggaccgttgatttcgggttcgacgactgcgattaggagcttgtgtaccgattcgatggcttaatccgcgccgttagatatagatcggacgctcagtcgagcgccttaattacattaactcgcaacactcgatctttgatctggcggacaaggttccataccggttcattcgtgagatgattaaatcctggtcacacatcgtggatcgggtggctcacgggggttggtaccctttcggccaggatattttgcagtcaggctcctacgcttatttgaaactaacccaccatccacatgaactattcactatgtcttgggatttttgccccgaggcccctgctgttctctattttaatgcgcccagtccagagactagaaattca

SEQ ID NO: 46847 - DNA, 454 bp, Zea Mays
gtttagcgtccttgtacgtagctcttgtttttgtaataaacacttatcaacaatttgcatgtatgttgatgtaatatatttctttgtgatgcgtgaaaccttcgtacatatcgtttttgagccggcggcaaaaaaacacgttcccttcttttcactcttcagaaagaaatccccctctttgccgaaatgactgtgtatctcttgccatatacgttgcataagaataccattgtcgaaggcatgaaccccgtatgatagtacctctgttacaagcatggatgatgcctttgtaatacactcttctcattattctttgccgagactgaaggggcaattttccttgtttttccagtgtatgtatcaatgcaaggtgatgtataatgtgatgtcatgcaatatgatgcgatggtatgatgcagatgatgttgcatataacataaaaaataagactttg

SEQ ID NO: 46848 - DNA, 456 bp, Zea Mays
gcgccgcggtaggaaaactgagtatctcaaaatccctctcaaagacagtatcaagggatggcgcttggagtggttcattgttgagaattatggaaactctctccctcatcagttggttgggggtgctatgcttgatttgctggctgaggactcttctgatgctgctcctgctgggacatcagtggtggcgcccctccccgaggctgatatgaccttggatattcagaagcctgctagtactcgcccgaggcgcccttgccgagccaatcaacctgatccttcggcgagtatccagtttggatcgggatgttggtacttcagttcctgctgctgaagaagtgcctatgactgaatttattgacgctgatcctaatgggtgtgcccaatctgctgctgatcccaatgtgggtgctccatctgttgctgatcccaatggggttgctgcctgtgttgcta

SEQ ID NO: 46849 - DNA, 498 bp, Zea Mays
gatgtaatgagtcatgtgatgttagtgacgatgaggaaaaccaggtaataaaattcatattttgtaatgttaaaataattgaaacatatgagtatatatggtcatagatttttttaacaggggaaggaggaatacataataataaggctggggagggaatggatgaagctgacaattcaattacatgccacactatagtatgtaaagataaatatataatcttgcatgtagtaatgtatgtaatgaatatatgaaatcactggactccaacatattctataatgcaggatgatcataatattgtgactggatgtggacctgcgttagaattattaacagctgggaaacaggtaaatatgcaaaatttaaacaatttggtatggttatggatatgatacattgacatgatgattgatttgggttatgctatataggtcgacaacattaaaatgcaacatttggtgtgttacaagttctccgttacacgtatcacacgac

SEQ ID NO: 46850 - DNA, 362 bp, Zea Mays
gtgaatgcccatgtgagggccaaccactcgatcaggtaactccgtagatagccatgagccttctatatgtgcaagtggtgcttcggttgtggcctcccccaaatactcctagctgtctcgactatcgagtttttagccaaaacacaacaatcctcgttccctccagtacatgatgtcgaccgcaccacaaaaaaagttagtgtgatcttgcaagattacaagctctactagtacaacctacgatgacacacgcaaacatcaagtgataaaatggtgtgtgcaagctccaaacctatctaattggtctaagtaacctaatcacttcacaaaacatctatgctaatcactgagtgatatttgag

SEQ ID NO: 46851 - DNA, 736 bp, Zea Mays
gtcgccgacgtctaggctacacctgatgcctcgagtcgaccttcttcctcgattgctcctgcgaaaaacattgcccacagagacgtttcgatgtagtgacatcttgctaaacactgaatgtactatgaattttttgtgttggttgtgtttgaatattttgtggatagggcactagaaagtgtccctggtgttgacaagtataacattctgttgtcctggagtactgattgttttcgttgttagggtataacagttatcctgaacaattgtgaaagaaaatgtggcgtgctggttttgggactttttctcacttaggccaatcacttggctggtaaggcatagtggttgccttgagataggtagatgtgatcgtgtcgtgctgacttaagccattgttgacttgagtcgattgccccgctagtagggtatagtggttcccctaagccgagtcagcgtgagcatgtagcatcgtctcaggtcttcgccgacctaagccgactactccgttagtaggatatagtggtcaccctaagtctagtaagcgcgagcatgttgcaccgtcttaagtcatcgctgacttaagctgattgctccattagtagggtatagtggtcaccctaagttcagtaagcgcgagcatgttgcaccgtcttaagccgtcgccgacttaagccgattgctctgttagtagggtatagtggtcaccctaagacgggtaagcctgagcatgttgcac

SEQ ID NO: 46852 - DNA, 489 bp, Zea Mays
cacgcacaagcagtggccacatgttgtcaggaaagatagcagagataaagctaggagaagttagtattttcagatttacattggttcttgtactacgagaggagctgaacacagcgtttagggagaagttttgagagaacatgtttggtaggaggagctgaaaacagcctttgctgacttaagcttaagtgtttcaaattctctcccctctggcttaagaaacgcagcatatttttggcactgtcaccagaaaaattgggcttacataatggtattgaaagaaataaatcatcgctaattttaaccacaagtgatgtaatgtgcattgtatttattgtaaaacaggaactgaggcaatgtttgccgaccttggtctattcagtgtgagagctatacaggtaatcgaacactgctatttcccggctttacatttttctgaatgcatgcacacactaactactaaccacattgattatcacaagatgtgat

SEQ ID NO: 46853 - DNA, 650 bp, Zea Mays
gaaaaggttaaaccttatttccctttcagcgagggaaggcccatgtgggaatttttagcatattggatttgtaacaaaaggcgacttcaatcgaataggagtagcaatccctttatctactaaaaaagaaatcaatgaagatcaagaggttcccgacatacgctttgccctcgtaagaccccaccaaaacagaagacaagttttttcaacctaaagtaccaatggcccagattatattttcaattgaagtaccacgaacaagtcaccaaggagactaggctatcgtgcctcgcaggaagcaagtaaagggctctacacctaccaaagaccatgccaatcaacacgaaggaaaccatcgccacaaagacccatgaactccaaaaaggccactgaggccaagatccggagggcaaaaggttcaaagtggaaattacatgtcacgtgaagatcttgtccatccaaggaagttattacaaaacggaacaaacaagagaggcgacctaagtgccagtgggcgggtcaccagcaggcgacactagactctagaggcccatcagtagggtcttcatatccgcatgttcagtgagcactctggcatggggtagacttgatcttcaattgcgtccaactcttcctcgcttcgactgaca

SEQ ID NO: 46854 - DNA, 380 bp, Zea Mays
attaatagtttcttcttcaagggataatttggtatattatgtttatccacaaatgactttgttacgaaggaatgagatgctccagaatcaaataaaactgatgcaggtatggagttaataagaaacataccatacaccacgtcggcatcctcaggaaccgattctgctgtcacatggttgactcttcctctactttggttctgtggagtcttgttctgtgcagatccacgagcaggggtgttctggtcattcctctggttgttgttcttctggggtgtctatgggttacgtctggggcagttgttggcatagtggccaagtttgccacacttgaaacagccattcggttgaactggggtagttgcattgttattcttggc

SEQ ID NO: 46855 - DNA, 376 bp, Zea Mays
cggtgggcagatatcttctcttggtcaccgtgcagattctctgactagtctgaccttcaccttgttttgttggcgtgtgggcgaaggctctggtgtaggctgcgatgtagactatcataggggggtacttggacagtgtcgacctgtccgctccgcttgtctctgtagtgggaatattggaagtcatgatggatgctgcccatacacgacgcagagaatcaatggtctcatctcggtaacacgtgagttactagcgcgccccacgccttgaggactacgcacatcgtctgcttttaatgtggggcgcacgctgtttaccactggtgtgaagaggcacacatcccgtccgtacttaatgcgggtggcccccatgcta

SEQ ID NO: 46856 - DNA, 706 bp, Zea Mays
ggatgtttggcaaaaacccctgttacaaagttcaagctggattgataagctacaactttgatgcagagtactgggttagtctccacacaaaatttagagaaaattcaccccaaacaagctctgtcagaccatctgatgaagcctatgatggtacagtggcaaaaaaaatctacagattctatgaatctcgccgctggtgacccttcgcggtgattggttctgatcgccacgattcgtgcttcaggtctctggattgggctcgccggtgaaaagatcacgccgcggataggtccgggacactgtggccgcgctgtccctcggtcatttgcgccacgacgtggccttatggccatcaccggaatctgtgttgttcatcgcgattgtgccacgcctcaggcccttaaccacatcgcaatagctcgggtcatctgtatctggtgatcgccagagagccgccatggtagatgccaccaatcacttgcactagtgatctcctctttctccagctgccaccgtgcgagaccaaattcactagccaccgcttagcacccttataaattgacggcacggtctgctgcactaagttatcaccaagccaaagcacccatccctgccctcgattagccaccataaccggagaatttccttcttcccccaaattggtcgactgcgccgccatgaatcacctcatcgctgctagctgctt

SEQ ID NO: 46857 - DNA, 677 bp, Zea Mays
ccggtattgtttgttgagaagaaggataaaagcaagaggttatgtgtggattatcgtgctttaaatcaagtgacaatcaagaataaatatccgctacctcgtattgaggttctttttgaacagttgaggggtgcccaggtgttctctaaaattgatttgaactctggttatcatcagttgaggattcatgaggaggatattgagaagacaactttttgcaccaggtatgggcatttcgtgttcatagtcatgtcttttggcttaactaatgcccctactgcttttatggaagcaatgaattggatgttacatgagttcttggacgactttgtggtcgtgtttctggatgatattctgatttattcaaaaaacggaggaagagcatgagcgacatctccgtctcgttctgggtgctcttaggaagaatcatttctttggcaaattgaagaagtgtgctttttggctatctgaagttgctttcctgggtcatgtgattaatcagcagggcattgcggttgaccccaagaatgtcgctgttgtggtggagtggaagagaccctctagtgtctctgaaatccgaagtttcttggggcttgccggatattatcgacgtttcgtgccaaatttttctagcattgctaagcctttgactagactcttggagaagggtgttcttt

SEQ ID NO: 46858 - DNA, 571 bp, Zea Mays
tgctctctcggatcactggatcgacgaggagcgggtaatcgcccggatggtcaaagttatgccattggtccgcccgagtgaaggtgatcgggtgcgggagaaccggtggtcgccaccaatatctgatggtcattgagcttctgctgcctcttgctttcttgagacccatgcccgccgaagatgacgttgacttctccatagacgcgtgggaatgctccacctcctcccccttcctgttgttggggctgtcgaggttctccgggtcctcctcgaggtgggggaggtggtagaggttggaagggtcggccgttcccaatggagtgtttgaagtccttgcaattccggagggtgtggcgcatgtccttgtggtacgggcactgggtgtcgaggatgtcgtccagtgtacgttcacctccgcggggtgcccctcgggcgtgagaggcgggtggtccagcggcgtggacttcttcacgaggcctcttctcccaacatttgtcgggttgttggttcgtgtcgcatcggggtaccgctggcgtaggctttgctcctctgatgaggtcctgagctcgct

SEQ ID NO: 46859 - DNA, 432 bp, Zea Mays
gttgaagacgcgagatcaccattcgatctcctttgggtgactgagattagaactgggataacccttcgtgtgattaatcgggtgccgttagatcgagatcgggcggcattggttagatcagaaattataaaatatgggtcgtcgtatctccatcaacagccagcgcatcatacccattcacaatctaatctgcaccatgcattatagatccggtggtcgagaacctaggatatcggttcgctctggcaaatttgctaatgagtccctgaattccttgagaatgaactcgtggtccacgtcgactgtgtagctgagtcttaggaattttttctgtattaatcactgactttttgtatattttgcgcccagtccagataattagtataacagagaaattaaattataaatggatttttaatgtaaaaataaatg

SEQ ID NO: 46860 - DNA, 416 bp, Zea Mays
ggcagcagctgagggcagatgaggcagcacgaacccattttggtgaatcaaatgacgatgagtatgaggatgaacttcaggcggctctgcatcagtcacgtgtggagcacaaatatagttagagggctggtgcaaggtatggcagaggtggcagatctggatcctctagatagagggtatctcgagggccacttgataggatgatgggaaggagtatggagacaaagagcaatcgacgtcgttcggttttattttttgtccaagatggaatctgtagctcaaatagctccagttcttctaactatccgtctggacaaagacacaatctataacccttatgcatgataatgccaatcgggttagggaccagcaggcgaagtaccaccatcgatcatgtatgagtatggaccccctcc

SEQ ID NO: 46861 - DNA, 508 bp, Zea Mays
gggtcaatgatcaacgacccaaggacattgtgcctgacatcttcgtcgcctcctctgaccgtaggctctctgttcgggaggccttgaccgatagcgcatgggtgagtcatattgatctccacgcgatccacgcggttgatcacctaaaatagtttgtggacctctggtcctttgcccattcggtctccttggtgcaaaacacatatgatcgcatcgattggatctacaacgcctacagtgaaatattctgcagcatctgcttaccagattcaattcatgggtcacacttgtttcaatctcaaagcccttatttggaagccatgtgggtcatataaatgcaaactcttcgcttggcttatcatccgcaaccggctttggacctctgataggctcgcagcacgtggatggctgcatagtccttcttgtccactctgcaagcggcactccgaaacacctcatcatattattgctagttgcccctactcaaggagaatttgggacgccctag

SEQ ID NO: 46862 - DNA, 315 bp, Zea Mays
gcatgtcaccttcggaaatggtggatttcccaaactccaggtagctgggtttagttggcactgcactgtaatcatcttctgactcaacttcctcagcatcagcctgctcagcttcagcggcaggtgcatcctccgatactaccaaccctgaacgcttcatcacttcagagattggagcagtttcggcaccttcggcttcctctccgtcgcgagtaaccctagctgttgaacgtactctggccatctcatgattgaatttcttgtttttcgaatgaagttgaaattttttaaatttgtcgaagctctttcttgtta

SEQ ID NO: 46863 - DNA, 624 bp, Zea Mays
atcagttcataagtatagataagaagggtttcattcatgtaatgctagagccgatggagaagcggctaaatcctaaataaagttgaaatgatgagtacacacaaagatcatgaatctttggtcacgaacagttcggcttctaaggccggatggtctggtctttcacaaaacagttcggactttaagaccgaacatctaccgcagcgtaaagacagtgttacggatgacccggtccccgagatcggaaaacccgctatcacacaaagatcatctaattcctccgtgggggacatgatagaggaatttagagatcttgataaactaggacaggggtttacatcggctgatcctttggaggagattgacataggagatggtaagactccaaggccgacttttgtaaacaagaccctggagaccaatcctaggaatgagatgatcggtctattgaaggaatattcagattgctttgcttggaattacactgagatgcctggattaagccgagagatcgtagagcatcgactacctattaagtccggtttcagacctttcaagcagaaacctagaacatttcgtccagaccttctcccacggatcaaggacgaaatccaccggctgcta

SEQ ID NO: 46864 - DNA, 497 bp, Zea Mays
catcgaaaactctgttcagtcttttcttgctccgacccccgaaggctgaggacaaagtatcatgttcggctttggtatatgccccaagtaactcgtctctagtagcatcaatacatttcagccaatcgtcatttggttcgtcaaaccggtccctgaatctgaaggtatatttcaaccgaactaatccaccttcgacggacccggcagcagtctccttcgacatcccccagttatccacaagtggccacactatgtaggctatgtgctcttggattatgtctcttgtgccaataaaagcacagacattgctgaaagccttttgacacgcgttggcatcactttcaatcgccaccctcagccttcgaaggccgaagcgagaccagatggggcactggataatttccttaatgtcctccctctcaatcagattattcttaacataaaaccattcctccatctaggccccgggccaccttttccgaaatgttggaactggg

SEQ ID NO: 46865 - DNA, 675 bp, Zea Mays
cttgttcgtgtttggccaccccattttatagttcaagggtgcaaccttttacaaagtgttgggcggtctgaagcatatcgggacttgttttctataggagttttctgtatgtagcttccctgatgttgacatccaatacatgcgtaaacatatgcccggtatggtgagttgctctgccacgtcccatttgttggctaatgtagggtcttctaatagtggagctccatagcgggtgtcggttggccccatgttgtagtgccggggcattaggggccatacgcattgttgccatcccattgatggagacccatcagcactaacccgatgtgacattgtgtcagcgagggtgcattaggtggcgacgtgccttagcgtggctagcgtgggacaatagtgtctgcctcgttttcatactaggagggtacaatcgtacaggcgtgcgcctgtcaggcgcctgacgaggggtcatggaactggggtccatagatgtactggtccttaccacatgccctcacgtctctatcttgcctagttgctcggtggagagttgcttggcctgtccgcttcgcagagttcctcagtggaggcttgctcgattggcttcacctctatggccttctacctaattgggccgccatgagtaatgggactactttggggtaccatattcatggg

SEQ ID NO: 46866 - DNA, 515 bp, Zea Mays
gcggcgggcagcagcaggggagggaaggggaggggagcagggacctaagacagtcgacgtgactacttgaggccgacgttgacgcttgggctggcacaacatggccctagaaggacgacagttcaaccaaaagaccaaaaacatttagaagcagtggggatttatttgggccatgcaccaactggcccagggcctggttctgtccttcggctgagcacgtgcagcgacgcgatcattctctccagcaaacgaacaccgccgcttggaccctaccttgtcagtgtagacgttactcgaatctgcacacgcctctgtagtcgactgcatgtccagttgctcacgccagcctcgacgattccatcaggtggcaattcattgtggtgcaaagttaggacttccaccataaccatcccggcacgacgcagccctctgagccgcacgtcgccggtacagcgaccgtgaggatctctcccctctaccatcgagctcgtcccctactcgtgagtatctctccg

SEQ ID NO: 46867 - DNA, 488 bp, Zea Mays
gatgttcgagtcattcaaggtcccaaaaggcatagaggatgcagtaaggaagtcgatgctctctgctatggccaagatgtttcgtgggtggaagaccgagatgaatagggattttgttaagaagaatagggttcttccgcctaagaaaatggggaaaatcaatcaagctcagtgggaggaatttgttcgtcagaagaccgaactgaagaccaaagaacttggcaaaactaattctcagagagcgaagatgaacaaacacccccatcgcctggggtcaaccggatatcaccataaagttgtgcagtggaacaggataatcgaggaagctatagctaacggcactttggacccaatattaaaagatatcgatgagcgagctattcgttggatcttagatctggcaggtttgaccgaggacggcaaacttttgcatccagaattggtaggcaaagtttcgacaaaaaatcaagaatatgcagaaaagagaa

SEQ ID NO: 46868 - DNA, 711 bp, Zea Mays
cgaccgcgacgctttcctcaacgacgtccgtggtcgcctacagcaggctcaagagtacgctcgccaccactatgatgctcaccacagagacttggagttccaggtgggcgactgggtatggcttcgcgtgcttcaccggccaacacaaacactcctgccaggcaaccgcggaaagttgggtccacggtacgcagggccatacaagatcctggaacgcattggcgccgtcacatacaagctcgagctccctgttggggctcgcatccatgacgtgttccacgtcggagtcctgaagccattccgtggaacgcctcctgcaaacacaccacatcttccaccgctccaggatggccgcctgcttcctcaaccggaacgtgtgctgcgtgctagtcttcgccgcggagcatggcacgttctggtccagtgggctggcatgaactcaggcgaagcaacttgggaaccagtcgactcttttcgttctgagtatcctacattccagctcgaggacgagctgttttccgaggaggcgagagatgttatggtcggcaaggtgtatcagcgacggcaacgtggctagatcgcgtgcgacgtaaacatgggagcgtcgagtcagtttgtatcagtttgtagtgcgtcggttgtcattagttcaaactctaggaagttatcctttcctttgtccagtatatgtactgatgtatcaaatggaaa

SEQ ID NO: 46869 - DNA, 469 bp, Zea Mays
gcaaatttggagctctctactgctctatccatagggttatggattatggtcactataacaaggttgtagagctaccataggagtacacacttgattaagatacttggcccggaaaccatatggaaccaggtgtaaaacttacccaaaagtggactgtcagactctgggttcagacttggctaaatggctaagtgctggaattcagtaaaacatagccatgtttagaactctgtagtggctaatctgtggagatttaagttaaaaatcctatagagaagtagagctagagtaatagactcagttgggttaaaggtaacacccctaaagttgcttggaacctagagtaaaggtgaaccaatgatgggttggctgatttctggagtttcagatggtgaacagtgaactgaattgagtttcagtgttttgagagcagatttggagcctatttgtggcaaatctatgaagtttt

SEQ ID NO: 46870 - DNA, 761 bp, Zea Mays
attttttttaattcctaaccagaattcgaactcgtgatctctggcgacccacacacggcaggcgaccgtcggcggcaggactaggaaccgtgcgcgggggcgagaccgctgccgacttgtgggctacaacgtgttggacgtggagctgatcgttggatggcgactggcgtggtccgcacgagctcaaactagtggcagtaaccgcgggactcggaatcatgatggcgtgttgtggagcgaatgggcctgccagcatgagaaattactaggtcagactaaggtatggcacgagccatactatgtcatatcggacctttcatcgtagtttgtttggttcaaagttagggataggacaagatcatctctaaagaaatattctcgtttgatgtcgtccctactccctagctatctcttaaaattgggaggacgaagctcctcacatcccacacatacacatttattcttcacgtccttctctcatccttccttccaaccaaacaaagaacaggatcaattcatctctacttatccctcataccaaacaaaatacatagaaagtcaaatccctcaaaccaaatatgactagcaatcatttcatccctcaactagggtttatcctatccctagctagtctatcccgtaaccaaacacatgataatttcttaagagaaaaacgatagtcgaccatggcttaaaaacacaacttcttgcgtctcttcatatcctccgtcttggccatttgtcaactctatatattgttg

SEQ ID NO: 46871 - DNA, 468 bp, Zea Mays
agaagctgaggaagtcttggctggcgaggatggtcttaagctcgggtcttagtcctttcagaaaacgggccatctttttggactcggtgctgacatcctcaggcgcgtagcgggccagttctgtgaacttgtgcacatattcactgactgttctcccgccttgagttagctcccggaattcatcctccttgagttgaactatcccctggggtacatggtgctcacagaaggttgtttcgaattctgcccaggtagcatctctgacggcctcactggaagtgtcccaccatgctaaagccattcctgaaagctgatgagctgccagttgaacacgctgattttcggggcatccgatggctttcagcttcctcttgatcgtgcgaagccagtcatctgcatcaaggggattgctggaccccacgaacgtgggaggcttgagtctcaaaaattctcccatcctatcctgag

SEQ ID NO: 46872 - DNA, 397 bp, Zea Mays
ccaatcgccaggaaatggaatgaatgggacacctgggaaactcaagcttgagaaacttgcaatcaataagttctctccaactagcctattgaattccatcaaattgagaagagaaggtcctctttctctcatgacagagcacaaagaagcattatggagcacgtattcgccaaccacaaagcccgatacttctgttctaaataggctcattgacgctggtgtgtcaccaaggattgaggagtccatgtcggtagtcaacaatgagatattgtggcagcacttcttggagttgacgaccaacttccttgtgccttttgggccgtatctgagaactacaacaccatcagaagggacttcaccttttgttgacccaccattgctaccaccgtttcatgca

SEQ ID NO: 46873 - DNA, 941 bp, Zea Mays
atcaattataactatgataactaattttagtcgttttgtaccgaaaatatagattggtcaagtcgtttagtaaaacaacatatcacacatacttgcaaattgttttcacgtcataatgaaatatatatccatatgcaaattagcaagtcaatttttagaatagttcatagccatccgttcagaactttatgcgaaagaatgttggctctatgtctgcttatacgaaagaatgttgtctcttccctttactaaaggagggtgaaataagttttactagcagcgtcgtaccggaggtgccagtagccttagtgtgccagtcgctcctcaagatggcctcactggcaacaaaatgttctctgatgagttgactcgtgtgcttgactgagattgtactttatctcttctgtcagctaagctctgctgaattcctccggcatcaacgttagcacgatggttcgcccaaccgagcatgtccccgattcacaaaactatatagttgggaacctcacagttagattcatagtagttaatagtttgcttaaacaaactgacgtggttgtttgatctatgcaaaagatggcactggttgttggttttaatagtgaaatgtcatcctaaccatttaactagctatgtccaacatattatgtatttatttctctaaatattgccagctgctctacaatacaaattacatggttgcctcactatccgtttccaacaaactttttgggggtaaaatcaaactgaaattcggcgatggctcgtccccttgcaatcagtcttctacctttcagtttctcctccttagtgtggcttcgcatcaatctatgcagagaattaaagcaaatgatgtctcctctgatcttgagaatttttttggatgacctgacatgttataagctaaactttaccagcattttatcttttcctcagttcct

SEQ ID NO: 46874 - DNA, 640 bp, Zea Mays
tgcacccggctttgttccttaaatccaggtgtgacacattggaacagagtcgcaccaaagtatgtggactacttggaagctacatcattgtggctacttaggggcactaccgtgcctataggggggaaaatgggtacgagcgccatataggggaggagcaccatatggaagagggaatagaggaggagcactatgtagaggagcatatgaaggagcaccatacgatctacaaagaggagcaccatatgaataaccttactggtatgaagggtatggataagtggaatattgagcaggagattcagtggtaggaggagagtctgtcatagaaggtttagtggtaggaggagatcaaggagcatcgacgaatggttgatacggatatgaaggaggaggatacatatatggaaaaagagcttgtaaacttagggaaagagaacgaataggaacatccttccgccgatgatggacatgagaaataccataaaagaagacctaccgcacatcgataggggtatcgagatgttgcggagattgctcgttgaggaagttgatgaacgaatcaaagtttggactccaccttgaatccataacgaaaccgagagtgaaaggctacaaatagagaaggcttgtaaattgg

SEQ ID NO: 46875 - DNA, 418 bp, Zea Mays
gtctctgcggtggtgaaggagaatgcgacagcggtggaacgacggggggagagtcttaatgctcacggcgggtgcggtggacaagaagctcacggcggcgattaatctagagttcgacgggcgcggaggagaagcagcatacggcggcggatttggctagggttcggccgccgcgagaattacgggagagatgagctgaaaaaatgagagctcggatccttgattcgtgggcccgatagacgtaagctgcccagattgcggggacacgatcttttcgtgggcccggatgctgcgagacgtgcgcacaccaaaagagtgtaaatcgtaacaaggttgagcataacgcgtagttataattgacgtaactatgtattacagtcagccaaaaaagcgtgcgcgccggtcagcgcacctggtc

SEQ ID NO: 46876 - DNA, 469 bp, Zea Mays
ttggagccctatatctgccaagttataaagtttttgccctaggtcaccacatcaactttgtagatatatgaaaggagaataactttgctatagagatcatgccttggtaccatgaagaaatatgagataaatgtgccccaagttgggctgtcagtatgtctgaaacctgaaattggatattcagtgacatgggatgaactttagtggccattttgaagatgatccagtgggaatttgactaggaatgctatagcaaaagtgaagatggtttgtagggctacaactttgctgcagagcattggttgtgttgccatgaaaaattgggagaaaaattgtcctaaacattgactgtcaagctgtctactgaaacatcccatggtacagtagctgaatcagatcccggatgcatccccctcgccgccgatgatctttatgccattattcacgctgtcgccgcgattgtgttcac

SEQ ID NO: 46877 - DNA, 518 bp, Zea Mays
cgggcactatggcgtcgggtcggtgtgcaccggcgggatcgccgccacggtggagagatctccgccgcgcagccggctagttggggaggggagtgtgtgagccattggatcatgggtgtgtggccacgattagatttggatgccggttcgtccagtctgtttatgagttgtttgatctcgatcgggcgattctgggacgggttggagtattttaaatccacgtcgtcggtcgtcgatcgaacggatatgaatgcataccggttcagatcagggcatatctaatctgggcggtcagatgttgatcggacggtcgacattcaatcataccccttcggtgcgactgctttgtaaaatggtccctgagtttttgcataatgaacccgcagtccccgtggtagtagtctgagtctagtaaacttttgtaagtttaaccccaggcttctctgaattagtatgcttagtccaggaattaaagaaaataggaaaatagatttagagaccgattttgtgtataaaaa

SEQ ID NO: 46878 - DNA, 577 bp, Zea Mays
gtcccgactgaggatattcatgaggctgttatctttatgccatttctcatccaagtactagccctgccagtttctcctttcttccacgaccttctcgacttttattctctgaatctcacccatttaaatcccaaatccgtgcttcaaattactgtgtttgttcatctttgtgaagctttccttggaattcttcctcactttgggcgttggaagtacctctaccactatcggcccaggatggctggaggacagcatcaacttgttggcggtgctagcctagaacttcaccaaggcaggaaagttgagtatcttgacatccccttgaaggacagtattaagggatggcgccttgagtggtttaccatggaaaaccataacaagtcccatcctgcccgatcagggaggcagcctgacgtacgaacacccaactggacagaggtccctatagattcagagcttgctaagtctagagtgctgcttgtagagatatgtgcattgaaggataggggcttgactgctaaagctgttgttgttgatttcgtcttcaagaatattcaacctctgaaggatagagtct

SEQ ID NO: 46879 - DNA, 341 bp, Zea Mays
cccactcccgcctccgattagccatcatagcgccctaattctgttattccccccaaatcggtcgtttgtgccaccgtgtgtcactccaccgtggccagtcgctctcaggtccgccctcgccctccttgtccgtgtttcagcactcttgtatgcttgtgatgctcgttggctcaaccaattaagctataccacaccagatcactagggacacatcgggaatgtctcaaacttcgcgggtatacgtgaactgagctctagggtggcgttcgagttaaattagtgattcccagtggatcctcatggtttgaattaggcgtagaccatattaaggcgtggatcgt

SEQ ID NO: 46880 - DNA, 634 bp, Zea Mays
ggaaacacgaaatttggagactctggtggatgatccgaggcaatggctggtgcgttggatgcgtaattacctagcggaactcactggggcagcaatttatagagtcctacgatggtggcgtctaattttgagaaggcgcgctcgcgaccggagagaggggaagtcactagcgcaagcgctattgtggcttttaccggggcagtgtctcaggcaatgagcaagctacctaaggcggtctactgcgacgtggtaaggctttgagacacgtagcctggccggataacggtgaactctggtgatgccagagcgattgaccgcggagggacacgacgaccggtacggcaagcagccggattcaccccgcactggatattttcaccccgccccgacgttatctactcttcccatggcatgaatctcccaggcgagcgttaattgtggcggcagatcatcggcgtcgagctcatggcaccatagatctttatggtcactgtaccatgacgatcttcatcagacactctgacagcgcgttttggagagcttcactctctatttttcatgtaacaactcggtcacctgtctgcatcaatattgtcgttcaaagaacaagctaccagtttgtcataaagatctt

SEQ ID NO: 46881 - DNA, 380 bp, Zea Mays
ataaaaataacctcacttctagaatcaagaaatgatagtgtcaagggcgtcggggtttagggaagcagggcctcggctacggaattcgtagtctcggtaagtaatagggcaaggttttttccctcggcggcctatgttgaaggcgccctatgttgaagacgggattcgggaaaagaggcaatttgttattgcttaattatcatcgaatctcatacacgaggtaaataggcccttggccactaacaaaatggagatggaagtctcctgaactagtcagtaccgcgggttactgcaggcatggtttatgaggtgtcacctagtcgtcatctaggcgacatggcatgctgcgtgtgctgggcgtcggggtcaccacaacctcg

SEQ ID NO: 46882 - DNA, 910 bp, Zea Mays
gtgatgaatggattggataaaaatatctaatagctgcgatgactcatatttttaggaagtgtgtcatgtgatggtcgttagtttcgtttttgtgcttaggtttgtaagtaggtatgtgcgcgagtatgttttggcgtagattaaaggttcatagaggagaaattggtacgcatgtgtgttaatcggagagccgactagttataattggggatgaagtgagtagattggaggtataggttttactcgataagaagttcgatcggtgtggtttaattgtttgggcatatgtagtgtagtggtggtataaaaaaatgggttagaaatcgatcggctaaatggcaagttcggttagagttgttttgttacttgggattgtgtggtgaagtgatggcatgactacgtagccatcacatcatctattgtgtgactatgcttaagtgtgccttgatataaattagagggtttatggttatgccatgatagtctagagctaaacgcttgtggtactcatcataatcttgcttggtagtcaaattaagtcttgtttgctcccgagctgaaattgctacatgtatgctctctgttggggtgatgatttagtaaagaaagttatcttttaggaatatgtgttctatacaaaagatgtatttgacttcaattcctaaaatgtcatgatcttagaattaatggtttagaagttatgctttcacaaattcagtaactgaatctgtccaatttctgtacagatttcagaaactgcattgttttcttaagttaaggttacaatcagttcatggtcattataataaagttgtaggtgctgttcgtatcttgcttgtgttaaaattgcataaccataggcctgatggtttaagagttatgaattttacaaactggttgatgtgttttg

SEQ ID NO: 46883 - DNA, 768 bp, Zea Mays
tttggatcttttgatgatattttcactttgcttttggcttttaaccaaaaacatttttgaaagtgaatgccaaatgttcaatgtatggtggtgttgccaatgctttcaccaagggggagattgtgaaattgtgaaatcatgtgtgatgaaaacattgggtttattgacattgagacattgtgataaattattattgtcattgcaaagtgattttacatgcttttagataaatgcacgtgtgcgattatatgattttgatttatgcatgtgtgttaacatgtgttttgatattgttgtaacacactcaatggataatgttgcctggattaaccttgagtcaagtcgtggacttgtgctcgtatatagttgtgtgtgttgtggatgtgcaggttatgaatgaggtgaaacttggtcggagcagcgacgaaactagtttttgatataaagtttaggtacgaactgttaaaaaactaggtttcggggctaagtttagggaggaactagggtccttagtcggagaagttatgtgggtgtttcagtcgaagaatcgttacatatcatgattgtgtgcgtcaaagacgtgcacaaaatatcacatttgagatatattggaaatatcttagatagaaaaagaaaaatgaaaaaaaggagcccacgtgcacatgcaggttgcatttgcatgcatgcttgaggacgttgcatggtcctttgcgtgtggacaagcaagaggcctgtagcgcctgggtgcagtcaagaggacgacttcag

SEQ ID NO: 46884 - DNA, 742 bp, Zea Mays
tctcagaatggatcatcgtgctggggtaaaatggagcggtccagtcctggtaaaagccttgttgtgtgttgatatctgccctcgtgtaaatctacgtctgtgcttctttaagaccgttggggaagcgtgttggtgacgggagtccagcgtcatcattactactcacgtccatctcttcccacatcgaccctcggtcttcgtagcttgatctctagctttccttcgacatcttgcgtgcttcgtagggcgtcggaggactcaggcttgggcttgtaggccatgagtgggagactgggaggtggaccgactcgttcacatgtcgtggctcggtgccagacgtagttaatgcggtgtgcgtgataatgcggtgtgcgcgatattgatgacgagagcagtcagtcggccacacatggaacacatcgagtggttccctagtggttcgtctgccccatgcttggcttcgcctcgccctgaccccaggctcggtgcacgagggtcatccatgggtggatttacctcggtgggtctctctccatcttttatctgactcgtggccctcttgggcctagggatctaatcccgacaagtctgctccaccttattcagctttgcttgtaactgcgctatttaaatagggatagctagctctataaacctcgttctagggaaaaaagtggcgtccaaggtcaattttaggtgttttatggagcatataaagggatacctcaaactctaaatttta

SEQ ID NO: 46885 - DNA, 850 bp, Zea Mays
catcgatgcgtgcatggaccgaagtagaaattaatgctagctcggtgagaccgggcgcggcaccaccgtagtatcgtctctagccacgacgcggtggctggggcaagcaggggtgagggtcagctggtggcgcttcctgccgtcgtcgggacctgcgcgagttctaggggcgtgatgtcgatgttcagtgcgttggggaagaaggcctttgcgccattgattttgatatgtgcggctgtgatgtaggggctgccctggccattggattcgtggtggagggcttagatgagggcgcggttggcacttgttataccaaatctgggcccttcgactacgatccaatggtctccatagctcactagtttatattagggcgaatttaatcgtggccctcggttgtgatccgacggctggaaatccaccataccccttcgttggaccttttacgtatgagccctcggagaaaatggaattcaacccgcggtccgggcagctaaagctctgtgtctggggatttattgcacctgggcccctggactttcttgtaatggtgcgctcggtccagataattagaaaatcggataaattcattaggaaaatacattttagtgtaaaaataaatgctagaacttgtttaatttatataaaatgcatacttggtccaaattgacccatttcagtctctataattttgtaacaatgttgtttgttatctattgcctctgtttttacatgaaaataataataaaattgatctcttaatcaatcccatatcaaatacataaaaatatttggaaattcataacttccccatttaaactccgatttgatccgttcaagttgcgttagt

SEQ ID NO: 46886 - DNA, 305 bp, Zea Mays
gtcaattgcttaccggagatgggcgtgtgggcagatccgcaccacgtcgtggccagacatcgtcgcgccatcatcgccggtgagtcctcgtccatcatgcttgctttgttcgtctctgcgggaaacgctagccgcatcgtgtttgggctcagggcactcgccggttcgtggggtcgccggtgcttccatcgtgggggtgtggcggcgccacctgtgctgaccggaaaggaagaagggtccctcaccctcgatccagggatggacggatattgttgatcctgggcataccgtttctagaccgttga

SEQ ID NO: 46887 - DNA, 534 bp, Zea Mays
atgcaccttttaaacattttgatcaatcataggaaatttacttcttcatattgattttattatcacaacttaaaagcatatcaatatgagaacagatatagcaaaggcatgaattagactctaatggacaagtgcatttatgagaatgagattgagattgaatgcacaactagctgacttaagtccaataaaaaatctattcttcaaaggtagaatatgataatttagagcaaatgaccgttgatgggaactatatttgattaagaagatgagttcccatacctttgcttttacctttcttcctttgggtgaagagtaacccttgaggcttgcacttactttttcgtagattttcatcagtaagctcaagagatatgtcattagtaacacaagcactagtttccctttttgtaatcatttttgacaaggaattgaaagtagattactaaagcacggaaactttataatatgaactagattattccatgatgtatgctcagttttaacttataaaacaagcatagttaattcctt

SEQ ID NO: 46888 - DNA, 672 bp, Zea Mays
gccggctcgaattgtcatgtcattatggtcgagcttttccatcagccaagctaaatgtgatctgctgccgagtgcgtcaagtctcatatcaagaatactggaaaatcccctccgtgcaattgcttggcgatgtctgtcatttaatatctggatgcttactaatacatcttgggggttgcatctcacgttaagcctctgttgaaaaaaaagtatacaatgaatatcgtaaacatttacatctgcataatcacaactcaatgtttaactcaaacctcaacacaacatgatttcacgcataaaatgatatattgccatagaccataaattctaacctgtcgggggggtccactactttcctccgctttgtgactatcttcttcaagactttcctaggactgtcgtcgaagttacgcttcttggataatggcataaagtcatcgtcctcatcagcagtctgccttgtttcgtgtctaacagtctccgccggaacacggggtatgtcaacactaaagcactcttgagtagactgaattataatcagttttggattagaaggaggtcggtctacgttcttcatgtctgatgttcctgccaaatcaaacaacacatatacataaaatacgtaaaggatcaataaaaagataagcgcaagtcaattcagttcagttcatg

SEQ ID NO: 46889 - DNA, 468 bp, Zea Mays
tccaccctagggtacaccagctcatcccgaagttgggcaacattcctatcagcgatctactcaatcgacaccactggagacaccgcatactccgcatactcatcaggctgccccactggcatcccaatgagacctacaggccatggcactgctacaggcaccacatgcttcaaatgtggtgagactagtcactatgataatgtttgtccaaagaggaaccccaacacaccgcctcatggtaattctcagggcaagcagacacagactccaggcagcaactatggttacaacactgtcggggttaatcaaatcaatgttaaagctaccgaggatggtcctaacatcgtcattggtacgtttttcattaattcagtgccagctactatactttttgattctggagattcatattcattcatatctactcattatgttcatgcaaatagtctaccttaccttgcactgcgt

SEQ ID NO: 46890 - DNA, 1054 bp, Zea Mays
aaaaaacggagattaatgccctgcaaatggccctgtcagataaactgaatagtgttctgattgaatagtaactgaataagatcgcagattcaccccccttgccatcggtgaccttgcgcccagatccacgccgacgtcacaattcacgcccggtcgaacacggataacgttcctcggtaagaaatatcacgccgtagataacctccggccactattctcaccggtcgtcgtgtcccgccacggttaatcgtgatggcatcaccagagttgaccgttatccgacccggctgcgtgcctcaaagccttaccacgtcgcagtgagtcactgtaagccgctctatatcattggctcatcgccggtaagtctgccacgatgaaagacacgcagctcttgcgccagtacatctccttctctccgaccgccaccgcgccaactccaattcatgcgccaccgcccccagagtctataaattgagcatgcagtcgggtccataaggtagtcaagtacccaagccaccaaaccgtgcctcctattgctcaccagagctcgccaatttcggatttctcccaagttggtccgaaacaccgcgccttgtgacctcgccgtggtcagcgtgctctagttccgctcatgccccctgctcttttgttatagtttccttgtgtgtccctgatgctccctgacccggccaattaagctagaacctattagatcgtcgggaacactcggtgttgttcttgtattgcacggacaccgtgagcagagaaattgggagctcgaatggtgaaattgagcgaggggaaacggttgttaagggttgaattaggtgtcagccatgttggagcaccagtcatcgcgtatcctggccagtgcaggctcgccggagttcctgctccgccgtccacggttgtagactttcccttgtgaagaattagaaccttggggtctctgtgcaaatgtcagcgagacagaggaacagtggggagggctctttataggtatttcaaaccgtcagggtctcctacgcaaaatggacaccgcgggcgcgctttc

SEQ ID NO: 46891 - DNA, 347 bp, Zea Mays
cctcgtttcagtatccttaggtgctcttgatactctctgacccatccaattgagctagaatccattggatcatcgggaacatctcggtcggtccattcctcgcgctgtcaccatgaacagggtgatgtagagctggaatccagcaattaagtgaggggaaatagtcgtgtagggttgaattcggtgtccaacaaaggggagggctagtcattgcgtagtttggccagtacaggttcgccggagttcggtctggcgccgctcgccgtcgtggacctggcgttgtagagaaacagaagtccggggggatttttgtaactgtcagtgagacatgggaatagcgtcgcgac

SEQ ID NO: 46892 - DNA, 527 bp, Zea Mays
atgagtactgcctttggtgcttgtggaaagagaatgctcaatagagttttttgatgtaattggatttatctatcctgactactgttttccagcacgaaaacaaggaacaaagaggaaaatcacaactatgacctcttttgtcgtgccgaaaccgaaaagggctaaagttttaactcatcaaccgaggtcatattccttagaggggggctgttgcactgcctgctgcagaaaagatggaagttgttgaaactaccgaagctaccccatcagctttggagataatacctgttggggctaccgaagctgccaccgctcagctagagaaatcagaaccaaagagttctaggaccaagcagcaaccgaagctacagagtcttgcagcaatggcagggttgtcaaagacatctaccgttccagcggcaactcctaggaaagagaggagaatagccagcgttttggatgttgttctgaagccttcaaaggtgtcgactcctgcttctactaaggtttccgaggacaaaattgaa

SEQ ID NO: 46893 - DNA, 697 bp, Zea Mays
ctactttcaatcttacaacattgtcataccttcatcttagccaccgaaggacattacaataaatagagaagctactgaccgagttggaaaatggaccaccaagattaatgaatttgtaattgacttcatgcataaattatctatccaatcccaagcattggcaaatttcattgctgactagatgccttgctcacaagatgaggcaagtaccctagaagaagctatctggatggttttctatgacgggtcctagagttcctttagagctagcgttgccgctatcatcatcacaccttcaaaggtgaatacttcgtatgtggccaaactagaatttcagtgcacaaacaaggttgcaaaatatgaagctctactacttggcttgaggaatcttaaagctatgggtgtaaaaagggcaatcttaaatctaattcctaggtgatcaccagtcacgttgacaaaagtagcaaggccaagaacccgacacttgagaagtatcttgatactgtttgaaggatggagagttccttcgatagattttctataacaaatatatcaagggtagataacggacatgctcatatgctagctaaatcagtggcccagggtctccttctatctcttgaagtattctttgaaaccttgaagacaccttcggtagagttaatggaaagagtaattttgatagtttttgccactg

SEQ ID NO: 46894 - DNA, 491 bp, Zea Mays
gtagaactcatctagatttggtgtagtacctgtgtagctgcctgcctgttcgctgttcgtttgctggtcgcttgctggtggctcagtggttgtggttgtgctatgcttgttcgcttgctgtacgtcagtatcagtgtgattcactgatgggtgatggttcactgtggtggcctcctcaccgtcgcttgtttggacatctatactgataactcatcctcctcctgacctcctcactcgccctcctaattcctattcccatcttgcagtctcccagtcccagaatcctcacaagctagcacctagaatctagcctctttgttgtcgtctctggtgctccggctttcaaaggtatgtctttagtgtttactcgtctctggtttagctcctcgggctcgtggtcgaagttggggtcatggaccttgacgcggctgcagaggaggaggagcgctggcttgaggatcacaatgaggcgcaggatgctaggtactttc

SEQ ID NO: 46895 - DNA, 1205 bp, Zea Mays
ctagagtttatggtgctactacgggtagaactttctaagatgctcgatattccatgagttccctactgtagtctcgtccatctgaggtagccggtaagaccctggccgacttacttctgcgataacgaagggtccttcccatggcagtgatagcttgtgttgtccttcccctgactgtacgcgacgaagcacaaggtctcctactgcgaatgctcagtgtcgtacttctttatcatggtagcgtcttagggtttgctggtacctggccgactgaatgacaacattcaggtgttcctcctctagcacatcgacttcctcaagcctggttgcttccgcctctgctatgttctcaaatgttagtctgggtgctccaaagactaggtctactggtaacactgcctctgatccgtataccatgaaaaatggagtaattctgagtaaggctcggctaggttgggttcacagactccagactacataaggtagttctcttatccacttccccacgagcttttcattttgtcaaatactttctttctgagcgcttcgagtatcatcctgttggctctctccacttgcccattagctcttaggtgtgccaccgatgcatacttgatttggatgcatctctgttcacaaaagtcaaagaattctccgctggtgaagttcaatcccaggtctgtgatgatactattggttatcccaaatcggaatatgatttcctggatgaactcaactgccttggttgaggttagggttgcaatcggcttgtactctatcgacttcgtaaatttgtcgatagcgaccagcacgtgagtgtaccctccttgagccttcttgaaaggtccaatcatatccagcccctggcacacgaaaggccaggtgaccgaaatagtttgcagttgttgagctaataggtgttgctgcttagctagaaactggcacgcttcgcatctttggactaaatcagctgcatctttctttgatgttggccaatagaagcctgctctaaaagccttccccactagagttcttgatgctggatgtactctgcattgccctgcgtggatctcttccagcaattgcttcccaacagctgagtgaatgcatttcatgaggactctgtcggcccctctcctgtacagcaatccccctatgacagcataatgggcgactgccttgcaatgcgctcagcagcggcctta

SEQ ID NO: 46896 - DNA, 460 bp, Zea Mays
ccaacaatacaaatacattacataaataaatatattaactcaattagtaatagaattcaattccaacgaaacaaacggggccttatagaaattatacgcatcatcaacatctcagaataccataccaatcctaggaattaaactaggatcgatcgaatctggctatgcagaacatgtaaaatcattatatcaacatcaacttttcatttctcccgaacataatagcatcgctagagaattcaaatcataaacataggtaaaagcactgaacttacgtgcgattgtaatatatttggtgtatccatctcaccagatcctattgtattcatcggtccgcacatcatagttgtcagaacaccatctcctccacatacttcatggctactaggtccactcagagttgcacgtggtgtctcgttcctagggcaagcaacaatggctctgtcacacccggttttgg

SEQ ID NO: 46897 - DNA, 491 bp, Zea Mays
cgcggtggcggtcggagagaggggagagcactgttgcaagagattggtggctttcaccatggcgagctcatcggcgatcaccggatatgtgtaatacgagctactgcgatgtggtaagacaccaaggcacgtggcacatggtcgattgttggctaactctagtgagttcatccgaatcggccgtgagtcaggcggacacgacagccggagtgaacagcggctcaagttcatccacacggtgatatttactaccccaagcaataatcagtacttccttgagcatgaatcatagagtttggcgcgaatctgagcgcgcggtcgccaacggcgagatgaactgaacctaagatatttcgatactgtaccatcagttcctcattcagtcatcgtgacagaccactttgcagagcctagttctcgaattttcatgtgaatacttactaatccgtctttaacaaagttgtagctcaatcaaccagctacaaatcgac

SEQ ID NO: 46898 - DNA, 893 bp, Zea Mays
taaaaaagaagaaaaaaagagaaaaaaggaaaaaaggaaaagaagataaaagaagggggctgaatctctaaatctgttgtttctctttgtgttgtgctagttgttctttttcagtgactacctttgtgcctaggctcacgtctctagcatggtttagcctagaaccagcacagtaccaccgttgaacgattattcagcttgcttttgtaactaacgtggtactagtgtattccttgcttcagcccacctacaactctacatatttcgactacagcttgataggtcgtgttgttgcggtaccgatacacttattccacggttgcagacttgttggttgctgacccctcctgttgagcaaggtaagaattggtaagagcttgtgtgacaggttgagagtgagcgctttacagtagctacatcctaatagttgtagagtttttattccttcacttctttttttattttgttgcctctgttcgtctaaccatggtaggattggaggatgatgatgcttctcataatatgtcacactctcctcgcaccaagggcatcatacaacactttgtaaggctggtgaagacgcacacggaaggtcttgataatgacttgcaggtgacgaatgaaaagatggggcaattagaggccacacagatcgacacaaacaccaaacttgcaaatgtggaagtgatagttgctcatattgacaagagccttatcgcactcttgaggcgatttgatgagatgcatgctaataccaatggtgggcgtgatgagggcgccgaaggtaactgggatgactatgtgttgatactaaacaagatgaccaagaagcacctaatcgtcggcgactacgtactaaccgtagaggtatgggtggttttcgccgatgtgag

SEQ ID NO: 46899 - DNA, 891 bp, Zea Mays
atttgattcacttctatatggcctgaagatggaaaggagttagaggaggagaacgtgtgtaccggcgagaagtagccaccgtgatagcatggacgccagtcaggcggtgaagaagccactgtcagatctgcaaaatcgaagtagttacctactaaaagctatactggaccagcactaaaattacaacccagcaatgcaccaacgtgcatcatcagacctgtagtgatgcaaataacagggaaaattcactacaaacaaatccttggctactgctcctaatcaccgcacaaattccaatcagaagcattggtcggttcagtgactgcaatcagcattggttaactggattcttattgggaaggtcttgctacctatacagagatccaagtttatgcgccatgtgtgtgcgcgcatgcatgaattaatgctatccattaacgaattaatcaccgcacaaattctgaatgcaatcagaagcgctgcatcagctaacatattcgatctccacaaatcacaagctaccagctcttccatccgttcagtgatgttgctgatctacggagacctacggacatagataacaggacgctcgtcgtttttgctttccgaagatctacggagccttacctgatcccagccgcaaggcgcaccagatctccgtctccgtcctgttgctgccgtctcgtggatgttgtggacgccgccgcagtcgccttcgtcccggagccgctgcagcctcccgcgccgccaacgagcgcagattctttccacgccgatgggacgagggttgtaacccggtcgagatgatgtgggaacgtccgggatgggccggggttgacgcccgaacaggcttaaacgaacgttgtttttgcgtggtccggtatttcaacc

SEQ ID NO: 46900 - DNA, 404 bp, Zea Mays
tatatatgtggggctccaaaactagctgtttgggattttctgcgtgagaccagttgaacttgcctgataccctggttgaactagtcttagaccctagttgaactggtttggaccaaagccaaatcaagttcaaaaaatctagtttgattggagtcaaaagtccaaaacaggttgaaccacctctagggtcggttcaaccgtcgggcctgttagcatgatagacagtctgccagtcagactagcagatagaaaagtcagaacaatctgctgaccttgacaccagttgaactgcccctaggtccagttcaactggttttaacaagagcggttcggagagaaaacccaagttgaactggccctgaggtaagttcaactggttttgaccagagagcttcatagctgaa

SEQ ID NO: 46901 - DNA, 377 bp, Zea Mays
cttcgataaaaatgagaagttcgcaggaaagtggataagggaattgccttacgtcgtttggagcctaagaactcaacctagtcgagccctgcatggaaacactcctttcttcatggtttatggttcaaaggcagtgctacctgctgatctcaagtttggggcgccgaggttgatctttgaaagcatagcagaggccgaagcaactaggctagaagatgtcgatgtactcgaagaagagcggctgaacgcagtaattcaattggcacggtaccagcagactctgagacgatatcacgacaaggccgtgcgactacgatccttctcagtaggagacctcgtcctccgccgaattctaacgggggagggacggcacaagc

SEQ ID NO: 46902 - DNA, 397 bp, Zea Mays
gatgatccagctgcaaaggctagtgattctgccaacagggtgggcgtaggcagaaactcctccgagctgtcctccagaatgactccgtgctccacccgaatgcgagggagatccacaggaatttcctcgactaccactgggtagacaggaacttgtcgtggcagagggatgaagttggtgttgatccgagtggtttgaatggtacggaccatctataagagaaaatgtcaatttagttgatgtttaaataggtaaggttaataaaataattttgtaagaacaaaattagcatgttttgaacagtctaggctttccatttctaactaatctaacgacctagagtcaacattgctttgataccacttctgtcacacccggttctgggggcaaaactgaa

SEQ ID NO: 46903 - DNA, 770 bp, Zea Mays
accacacactcccaagtaacaaaacaactctaaccgaacttggcatttagccgatcgattcctaacacatttttcataccaccactacaccacacatcacaaacatagactaattcaatcatacttcacatggcaatttatacagagtcgcagagtaacaatattaacacataggtaagcgacatttctttacaacttttggctaagtcaccaaacagtcgacatgatgactacgaaggcatgtcaccatttcatcacacacattcatctcctatatgcgcactaatccatttcttgcaacacactctctcacaatcaatccttactaaagaaacatacatacttcttatttatgcgcagaacataacacttcttaagataaaatgtcattataaacacattacacataattgcattacaaacctacttgttcactcgaaaacatctattcgaagcaatgaacccaaccgtacactatgtgcgaggtggaattcaatgaacgcataaggtgtattggctcgacttataattatagagaaagtgatgactaccttgacatgtcaccacctcactatttaagccaagacaattattaactgcatcgatcggacctcatatcacgcaacacttattattttaccatttcaaatacaaccacatcacggcatgcacttgagacacttcggttccacttaacgcaatcactactacaacacatttcgatacacacgttcgatagcacagtgctcagacaacccactcttccaatt

SEQ ID NO: 46904 - DNA, 536 bp, Zea Mays
caattactcaccagagctcgccaatttggagttttccccaaatcggtctaaacaccgccgcgtgaacacctcgccgtggctagctcatctcaggtccgttcatgccctctattcgcttgtttcagtgctctgatatgctcctggtactctctgacccggccaattaagctaggacccataggatcaacgggaacacattggattgtccgttgattgcacggtcaccatggacagagcgatttagggttagaactctgcaattgtttgaggggaaacacttgttaagggttgaattaggtctcagccgaattagagtaccggtcgttaagtattgtggtcggtataagcacgccggagctcggttctccgccgtgcgacgtcgtggaccgggggatgtgaaggagtagaagcgcaggggtgtatttgcaaaggtcagcgagacagaggaacagtgggaaggactctttatagaaatttcaaaccgccagggttccctacgcaaagtggacaccgcggtgcgggcgcgcgcgactttg

SEQ ID NO: 46905 - DNA, 544 bp, Zea Mays
ttttttttggggccttttgttcctgcttttctctttcaagaaagtacgtgatgcccctgcccaacttcattttcactgccggctaccagaatattcccccaaaaaacgagactatcattgcgagtagttgtcatgcggatttatgcccaatcctgtgatcaaaggggagaatttgtgccgtcccttagccctcatggccctgatttcaaattgtcaagtcaccgttgtcattagacagcaaggaggggatgagacctgagccatggcttttgtggattcctcttattatctgtttttttatttctatatcagaatatcacatgccccatccaaatggatgcatttattctgtaacctttcacaattcacagacactaaattcaggtcgctttgtttgcgtggctccccttgcgatcttgcagaatctattcctgaggaacaacaggctgctccacacctagttgtttattcacacattcgttttgatcaaaattgccacatccatccatccattgaatctataactttgaagcacactcacagg

SEQ ID NO: 46906 - DNA, 488 bp, Zea Mays
ctttgacaaggtgaccatgcagggaataagtggaacatgttggccctcttttatccattgcatatggtcccaaagaagctacaaccaggttgcagcagatatgccttgttatggcatatgaaaacacaaactgagatccaccgagccctagttgattccatactttctccaccatgccacaccattcacatacatccagggtaagccctcaaaccttgtccacccctctgtttcactgagaaggccagaacaccgagcaggcaatggctgtggtgaccacgcctactgaattccccacctccccgtggctagcctttcttggaaggtaatatgcttggtttgttcatgtttcataacccatgcatgatagtgatgctcacaatgttgctcgtttgaacgctaatgtagtaccctggctagaacgccatcgtgactgtccagaacgtggccacggaccaccttcgtttggactgatcaaatcgtgctct

SEQ ID NO: 46907 - DNA, 488 bp, Zea Mays
gtggtgtctctgaccggtggaccgcctagttatagttgcttcgaggagttcgcccgagaggtattaaaaaatctgaatcgtcacctctctagtccctaacgctttctttgggtgtcacttcatcaaaaccccaaactgctccttctctgtccgctggttggcgatcttcgcttcctactctgatggcgtataggcgtgttgatcccgagccctttcttccgccgggcttcaacgcttcgatggtcctgcatcgggaggttatggctaggtcagtgactaggcgtatcccgccattgcatgaggattgggccattatcaatattcaacctttacctgatcatgaggtcactttcccgtcggtgagggatgtggttagagaatatttggtggagcaccggcggcttggggtgcgggatattcagcggtcgcacctaggtcaggttctggttcagtttagcagtgtgcttgaaagagacaatcttgtcttg

SEQ ID NO: 46908 - DNA, 707 bp, Zea Mays
ttagcttgcgtgttaagagctttggcagaggcaagagctgatgtttttatggactctagaacaacatctagcatgctagccattctccttttccttggagtcgctgcgggagtgcttgatggcttaggcagtcccattgcacatgatggactcaacgtcttcaactattctgtcgtcttctctagttttggctcttcagtcgaatttgtactagcttcgactagcatagcatgacctagttctgtggcaggagcaaccccttcactaagcttcggcacatcggccgtctcaatgtgtctgggtcggcgcgtcaaaactttaaccttcttcgacctcgacacactgaatagcatgggatagcaactttccttttcttcccttgctttcgcatgggatagcagtagtatgggtacacaaaccgataacgtcaaatgccatgttcaatctcttcttgccccgagcaccgaaggcagttgtcatagcttcgtcttcggccttcgagtatgctccaagcagctcatcgctagttgcctctatagcatctagccagtcatcattcagttcatcaaactagctcatgtatcgaaaggtatacttcagataggctaaaccattttgactggagccagcgacagcctccttcggcatttcctacccgtttgcaagtggccacactctgtaagcaatatgttcttggaccaagtctc

SEQ ID NO: 46909 - DNA, 638 bp, Zea Mays
aaacgattgcagttgaaggggctattccgtgcaacactcctggtagtgctattcctgtcacggaaccttcagttgatgagggagtcccaatggcagttgcacttcagttgggggtcttggaatcttcagctctcgttcctgctacccttgtggcttctgcaagtgttactgtttccgagagggcttcatctgctctggctctacctctcccactcttcttggtcaacttgcaggttgctgttttgtaatcctgcctcttttttacactttcttttaacaggtatcttacttgttgatcttttgctgtacagagtgttttaaataatgtggtcgtcgagttgagagatcaagccattcaggtccctgggcagctatctactttgtcacaatctgatgccgctgttcttcagaagcagattgatgatttaaaagcgcaaaatgcgggtattgtggtcgtctctccttgtttggattgctcttgcttcctcatgtgcctgacttctgcgtggtgtctttcaactgcggcccgacggtattctgatattgaagagaggctagcccggagccaggcggaactcgatcaggtcactggatttctcgatggggcgcgggcgatgaacacctctttgcaatcaaaa

SEQ ID NO: 46910 - DNA, 476 bp, Zea Mays
atgattggtacatgaacgagtcaaccattgttaggacatattttggtgtgcttatataataatatcacttctataatgacctagctagattccaaagatatatttgagatatactagtggaatatgctagacgtctctctcctcagttgttgggttttataagtgtttaccatctctcttgtacacgattgaataatatattcagtgctaccttacattcccttacacctacttcatttcatgaaggatggaaatccaaagatgtcgtaaagaaacttttcaatatcgactttattgacctagtggttattcaccaaaaaactattacatactttcgtgtggacgtcctaaactatttctcaagtttttctataagtaacattatatgcaatacatacttttttcttacaattttatgttagtgtccactatcttttcatagttgtacattttgtaactatgttgtctaattttct

SEQ ID NO: 46911 - DNA, 368 bp, Zea Mays
tgtttaggtcggcactgtcggatggtaatcggaggcgttagattatatctcagttattttaaatcctgaacgttggtgggtgatctgagggttggcaatgcacatagagttataaccttcactggtgtaatttgagcccttcagctaggccttgtgttagatggaaaataacccgtcgtccctctcctgttgaatctaatcacagtttgatccctggattcttatgaaacgacccctgagctcttctggaatggtggccgcggcccaagtagtaaataaaatgagtatattgatatagaaaatggtttttgtacaaaaatatatctagaaactggtttaattcatacttaattcattttttatccttt

SEQ ID NO: 46912 - DNA, 588 bp, Zea Mays
aaggtgggactgggtgctttggcttcgtgataacatggcgcaacagacctggccatcaatttataggattgctaagtggtggctagtgaatttggattgaacgcggtggcggttagagaagaaacgagtcacgggcatggtgattcgtggccttcaccgtggcagcctccccggtgaccatcggacgtgcataacactggtgattgcgacatggtaattgctgaggtacgtggcgttcggtcgacgggcagccaactccgatgacttattcggaccggccgcaaagcagaaaggagcacgtcggctagctggattagtacccatagcccaacagcggtgacgatctttttacctcgcggcgttatccgggcttaagtgggcacgaatcacctcatcggtgcaaatctacgcgcgaggtcaccggcggcgagggggatctgcttctgttgatattttggtactgtacccttggaagctttttcagttagcctgacagccgaggtttagggcaggttttctccaaattttccatggcaacatcatcatccttctgcgccaaagttgtagacctatagatcatcttcatct

SEQ ID NO: 46913 - DNA, 614 bp, Zea Mays
gagatggatactcatcagctagctcgctcatgttggcggcggtgacaaatcacattttagacaacacctatcgccatttcatgggctaatcgcaggtggtcacacaccacgctaccgagcatttgaatcatttgttatacattatcaaagaagatgacacaaaggagctataccgagcagtggaggatagggagagtggaggactacaaaaacattggagaagatgtcgaagcacactggtgaccggtaacagagacgaagagggcaatagaggcacacgagttgtcagagaaggcgataacagaggtcgatgtcatggttggggagcacgatggtggagagtgcgcataggttgaccggggacgatgcacagttagtcggagaaggcgataatagaggccgatgtcatggtcggggacggtggagagtgcacgtaggtcgatggacaccgagtcaccgatgcttcgacgagaaaaagagagtgaaaatgagtagaggggaaggtggtttccatgctaggattgtatatttataaggaaaaggtctttagtactaattatttaaaacaatcgataataaatctatctttccaattctcacctagggggttttag

SEQ ID NO: 46914 - DNA, 660 bp, Zea Mays
cccccccccattcgtgcctcataggggagatgaagaatcaaatgctgcattggattgaagaagccgggtggaaacatcttctcaagcttacacagtaacatgggtgccaatctttccaagtctgcaaccacggtccgagataactcttttgcacaaagctgacagaagaaatagctcaactctaaaagcgctagccagacatgctcagggacatagcctcgaaccatcacaggaagaatccgttcaatccatatgtggaagtcatgactcttcatccctaagactcgcatagtagataagttcaccccctactcaggttagctgcatatccatcagggaacatcaacatcttgatccactgaagtacttccttcctctgggccctgcttaggacgaattcggccttaggccttctccatgtctttccaccacttggtggcttcatctcttggtttggtctatcacataacgctgccagatctactcttgcctttacgttatcctttgacttatcaagaatgtccataattgttgcccaaagtgcctcggcaacattcttttcagtgtgcatcacgtcaatgttgtgtggaaggagcaggttgtcataacaggggagctgattcaagcccgacttatgtgtccacatatgctgctcaccat

SEQ ID NO: 46915 - DNA, 1010 bp, Zea Mays
gtacgctcaactgcgagggtgacccgtgacggagaggaggccgaagccaccgagactgctccgatctccgaagtgatgagacaatcgggactagttgtgacagagggagccattgaagaaggtgcacctgctgctaaaactgaacaagatgttgaggaagaaatcgctgatgaagaagaagaagaggattatagcattctgatcccgtcaaaacccagccacttggattttgaaaaatctactgtttctgaagctaatatgcccatgatgatgaagctgggctacatcggagaagctgagaagaagctgattcattttgccggggaagaaaccactccgacaccgaaagatgatgaggtgttagttttcaaaagtttttttagagcaggattatggtttctgctaaacgagataattggagaaattttggacaattatgaaatatttcttcatcagctgacccctaacaccatcgttaggctcagcattttcatttgggcccttcgaagccaagggatggacccaaatgtcgaagctttttgccgagtgcatgagctacattaccaaacaaaggctagagaagacggcctacatgaaaattttggctgttataacttcgcgtatcgcaaggatacgaacgtcccggtcctcagctatcggaccaaatggccaactggctggaaacgtgagtggttttatatcaaggctgatgagaaaaagagggagaagctaaagacactggtgatgagccctctgagcttaagctttgggatgactagacccttgtgcaacatgaagctagggttaccatgccagctagctgtggcagaattcagagtggtggctgaacatatcagtgccagggatctagtgcaagaatactttgcgaacagggtatctccaacattgagtggttggaatatgcagaagctgaaaggaacgaagaaggatgaacttgtccgattgccctatcgcttcaaatttgagaaacaattcaaagggccttgcca

SEQ ID NO: 46916 - DNA, 402 bp, Zea Mays
ggccgattggtgccgagtgatccctagctcctcccccctcctagcgatcgatctagctgttgaatttacaccgtgatcgttccgttctgcggattttggatgctcaagtgctcgtactggtgcggaggggatttgatttcgtgggggctttgacttattgatcacccgtcgttttctaggacaaaccttatcgcaattaattcactcctttaccctttgctctggagtatgccatcattttgtcctttgctctggagtatgccagcatcttgctttgacagttcggtttgatatactgaatgtacagtgcagcagctgtgctgttggctgaattatgagtgagttcagaggagccttataattattggttgacttcactcttagggtgtgtttggttttgct

SEQ ID NO: 46917 - DNA, 710 bp, Zea Mays
gggggttaggcgtgccgaagggaaaccactcgagtggatcctgcgcatggtcccaaactgacatgtgataaatgaccgcccacattagctacacctagcgtcgagccgcagcagaggcgtcagtccgcctcccagtcatgacctacgaacccctcaggctacaaagcactcatgacctatgaacccctcagattgtggcatatttatggcccacgcgcgtcctggcctgcagcgcactcatgacctatcaggactaggtttgagtgtgtagaccattagcagggcacaacacgacgagccgcgccaagcctgaggctacaaaggctaggggtcggcatagcctgaatgatggcacctgagacccacgctacccgtgccgaccaccataaataatatgagacagacatacaaccccgaggcccatgagcatgcgtggctttacctcaggtataatgcttggttttaccctttgcctggtggctctatcttggggaagccaccactagctgaccctccctcgacctataaaaggaaggggttggtctttagatgaacagatacacacacaaggatggaccccagacgagaagccatccaaacggactgacgaataagaggacgctccgacgaagacccagaggctagagccccgcggtcaagccaagagttatctaggactccactctataacccttagctccacttccacc

SEQ ID NO: 46918 - DNA, 358 bp, Zea Mays
gagggtcataccggctcactcaaatggatggcacggaagtagggaacttgtgaaacatagaacatctcagaaaattctatccctagtaaggcctcaaagattcccaaagaaacattgtactctgcaattgggggacttcatcatcaataaagttttcgttttgaaaggcattcagattcttgactctcagctgacctcgacttgactaggcttgaaatcagcttgcttacttgactcagggtgaccactataccctactaacggagcaatcggcttaagccagcgatggcttaagtcggtgcaacatgatcgtgcttacatgactcagggtgaccactataccctactaacggagcaa

SEQ ID NO: 46919 - DNA, 661 bp, Zea Mays
gcagaagtgttatttgatactggagcaacgcattcattcattactgcatcatgggtagaagcacataatcttcccataactaccatgtcaacccccattcaaattgactcaaccggtggtagaattcgaaccaatagcatttgcttgaatgtaagtgtggaaataagggggatagtgtttcccgctaacctcatagtgatgggtactcagggaatagatgtcatcctagggatgaattggctagataagtattatgcagctatcagttgtgataagaggacaatcaaattgaggtcccctctaggagaggaagtcgtgaccgagttagtccctcctgagccaaagaaaggaagttgttatcagatggatgttgatagcagtgaagcagatccactagagattatcaaggttgtgtccgagttcccagatgtattcccaaaggacctaccaggtatgccacttgagcgaaaagttgagtttgccaaagagcttcttcctggaaccgcccccatttctaaaagagcctacagggtgtttggaccagagttggttgaactcaagaagcagattgatgagctgtcagagaaaggttacatccggccaagcacctcgccttgggccgcccctgtcctatttgtggagaagaaagatggcaccagaa

SEQ ID NO: 46920 - DNA, 591 bp, Zea Mays
atttaattcaattaaaacaaaaataatcacttccttcagtatactttttatgtatgctttctatttatgttacaagaacttttaggttaccttataatccattttaaaacccctgcaaaactgtgaggaattgcttagtaaaacactctgatttttttgtttactactcattagttactaatgttctcatttctaaaactatatatagcatgtctcatttttcttgtgtcttactgtttaacatatggtcacaaactattctaagacatgaacaactgattgggacaccttgcaaattctatccacagcaggttcgttactttccaagaaagggacaaaaagaagactgcaaccaacattttccatcccctttcccctcttcttcttcgctcatttttgttgcatttcctttgggaaacaacctccagatatctgatctgctgggtttgtgttctattcttttcttttcttttcccccttcttttatagtttcctcatattaggttgtgcagacaaagcattagaaaagaatcaatttgtacacttcgtcaggctttggctccaacatgtcttgtgaatttagtgtataaa

SEQ ID NO: 46921 - DNA, 502 bp, Zea Mays
attgcaccaggatctagatatagggcccccctgtgatcttcatggctgattgtttgcctgtacatgttaacaatagcaaagactctattagcacatactagcaaggtcaattaactgatggacaaatgatttgctaactctcttgttaacaattagctaatttattagtcacctcgtttgcaacctaatatatgctaaagccggcaaattatttaccggatggacggtagcagtttctcttgcattggttgggtgcgccgatcagctgggatgagcttcttcagctcgctcgttaagtcgcctctggaatggaatacagcgggaaaaaagcaccaccgcggaagaaaacaaaagcaacaatatacggcagggagggtttgactggcatatcattttttctctcctgaaaatataaatccaagtgctggccacgtacagtacggggttgctgtcgagttgaacgagctcatggcatcctaagacgatcttgtcccaatcattg

SEQ ID NO: 46922 - DNA, 484 bp, Zea Mays
catccatgaagctgacaaagccttggacgctcagaagcctatcaatgttcgtccaaaacgttctcgccgagttgaccaagcctcttttcctgctgagggggagaaaaagaagaagagacgccttcgtcaggtgtccagcttggatcaaggtgccggtccttctgctcctgttgctgaggaagtgccagtgcctgaattcactgaagctgatcccaatgggtgtagcccgtctaacgctgaacccaatgggtgtactgtctgtcttgctgatgataacggtgaagaagaagatgaaatccccctgattcggaaaaacagctgccattacactgccagtggggaaagtagcggtgttccttctctagccttgtttgccctcattggactgcaagaattatctctagctaactttgatcagactcttgaggacatgattccagaagatctgctatcagaaccggcagatggtggcgccatggatgtt

SEQ ID NO: 46923 - DNA, 444 bp, Zea Mays
gggcaggttgaggtaaaacagattatgtcaaggagaaggctttatcccaaaatgtttaagtcttgattcatctcgagatttgcttcgactgttatatccttccttgtggatgttgatcttttcttcttcggtcttggtctcattgattcgaggttaatgtatatcaatggagttagggaatatagatttggatgagatagactatatgatgtgggtcaaaagtttgtttgatgttagtggggataggcagattatgtaatccatcacgactctattggttggtttagatctcatgcacgtggctgagttggtttagggcactagtttagttttaagtgcatgaggggtatggccttattttttttgtaccagcattaagtaactcactttagattgggtcaaatctagaataaattgatatggttattttagactcgataagat

SEQ ID NO: 46924 - DNA, 546 bp, Zea Mays
catcaaaccaatgccacacagctttgggacttgtttggtaggactaatatcgtggattgagttcttggactatatacgtatatagggttgtaggtgccaagaatctagaacttgactttgcctactccttctgcatggcggttccatttggttgaacctgacttcgcctactcctaatttgtttaatgatgttattgagcatctcaaattgaaagagatagagatgttgggttgacaatttacttggacaaataatttagacgcaccaacatttgagaagttagatagagttcttatgagcctagaatgggaattaaaattccctaaatttatagtggaggccctcaacagattttgttcgaaccatataccgctgttacttaataggagggtggcttcacagtttaggaatcacacgtcgtttaagtttgaactaggatggctcattagagatggatttcatgatatgatctcttcgatttggcaacaagaaacgagaggtgacactaccatgggaaaatggtagaatcaaattagatctcttcg

SEQ ID NO: 46925 - DNA, 1060 bp, Zea Mays
gcaggggctaacatagaaatattccctagactcagattactgtcgccgaggacggcgggttctattctctaaaataataaggtctcttttgtaaaacgtactcgcaaaggggtacgtggtgatcctagccgcacgattaaggttatgtggcccagattagatccgagcccggtaggtacacgagccacaggatctacgatctacggctcaaaatcgatcaccgaaccggtatgcagatccgaccacacgatctccatccaaccgcccaggttacatgtctgccgattagtacacacattcaatcctggcctctcgtttctaaatcgatggctcactagtcctcttccccagccgagacgcacacccggcggcaccacgatttctagcgggcggacctcgccggaggattccctttcgccacgctagtggataatccacgcccgcatctacgtaaaaccaaattcaatgccccccccgagtcgattgagataagaattatcccggattgcgatcccagcggcacagaccacgacaatctgcgaccatggtgtagcggcagtggtgcccggccattcggtctaccagaattcaaattctaacacagctagggacaagggagcgcggtagaagtcttgagcgagatgaaattgctcaccggttaacagggtcgcgcaggatccggttcttgatgccgtgacgggtgatttgctccggccacgaatttcggcctgcctgtcggttaatccgccccaccgaggcaacatacgcgtgacgcgtgcactagtactgctccagtggacagccgtctaggaccaagcgccaggccaatcccacgccgacgttcgtggcactcgccttcccttctattggttaatttggtcgccgcagcttggatgtgtttgcgagtggaggatgaaggacatggcgaaccagcttttatctacggtcaaggcctcccgaggaacccacggtggtggttgagctcacgcccacagagcccgcggcgtccgcggccatcaacggatggaagccagcttcctcacccaggtaaactggacct

SEQ ID NO: 46926 - DNA, 591 bp, Zea Mays
gaagattccacactgaataagatcgaggagcaccatcattgacaatgacaccccatagcatcaactcagctcagctcaagacgtcttcctaggatccttaaccccggtatacagatatgtagggtgtactctatcctttagaggctgaatgtttttaaacacaaagtcgatcacaacagcttcagcagtcaagcctctatccttcaagttagcaatcaaccttttcttgagttcctcaaaacaattctggcatgcttcatcccatttgaactctttacctttctccagtagtgaggtaagaggtttcactaacttggaaaaactttcaataaatcttctgtagtatcctgccaatccaaaaaaacttctaatcttggacgcatcctttggttgcttccaatttagtatctcacttatctttcctgggtccagtttaattccaccatcagtaacaatatgtcctaggaaagcaacttccttcagccaaaaatcacacttcgagaactttgcatatagttggttgtcatgaagcttttgtaggactagccttagatgatcttcatgtgtttcttcattcggaaagtatatcag

SEQ ID NO: 46927 - DNA, 1706 bp, Zea Mays
gttagatttactattaaaaaagaaagaatactactacaccatatatatatttgtgattaatgaaaggaagaaaaagagaagggctatgctttcagacgtttttataaattgataggtagatggcattgattcaggtcgtttaaggcagaacaccaaatgttaaaatatataacacagggagctactagtgcaactttggatggatgttatggcggtattcagatatgcctattaatctaatcaatatcatattcaaaatttcagatacggtgacctgatgaattttagtagcagtcctcagtcttgctcgtcattaatgttttttgctgcttgacaacatgcacatggaagggcttctcacggcggtgacgataaagcaggcagagcgtagaggcagagataaacatggtgagaagaggacaaagatttcgccatctagccatctcgcccaggcagccaggagatgagaggcaatcaggtcacacgacaatgaataggacggagtgacctcacatgctgctctgcaagggaatagaaagctcccttgttggaggccaacggagcgacctcattggacggagctggcagtgcgaacggaaagctccaactgtgctgcaaggaccgccagcgtattgcgagattcaatagcctagggaggaagaagcagaactataagaacacagacgcagggtagatcaacgccggagagccgtcgccgccaccgccgcctcgtgcccttcatttgtgatgcctcagctccttcgtgtggggtattttccacccctcagggaccagacgtggttcccgatctggaacgaagaggaaatatcaggatacagtccatacgggggttaactgaatgcacatttgttcgtgggctgggcttctttccagacgagggaggtccacgggctttggtccttgttcccggccgggaagtgcttaaacgaacatggcctgaggggggtgatctctcataaatatagccaaagtagcttggagtacaagtatacaatctcctaaatagggaaagctataaccttatacaaggaagactataatcagtctatactaggctatgtacgactgtactttacatatatgtctaacacatgcctgcagtcgcagcgggagggtcccgacaaaagactggatttgaactcgtcgaagagctatataggcaagcctttggtcatgatgtccgtgaactgatgagaagatgggacatgaagcacgtgcacttgtctaagagcaaccttctcacggacgaagtgaatgtcgatctcgatgtacttggtgtggcggtgatgaacggaattggctgccatgtagacaacactcacgttgtcgcagtagacgaccgtcgcagaagcaattgacacgtggagttactcaagaagatgccacaatcagcaacactcagcaacaacgtggcccacggcccgatactcagcctccgcactggaccgggagacagtagtttgtctcttggaggaccaagagatgaggttgtcgccgaggtagacgtaatagcccgaagtggagcgccgagagtcaggacacccagcccagtccgcatccgagtaaacggtgagagactgaatggggccgacacccaggtgagggccgacacccaggtgaagaccggaggaaagcgtgcccttcaagtagcgcaagatccgtttgagcaaggccagatgtggctc

SEQ ID NO: 46928 - DNA, 585 bp, Zea Mays
caataccacaataactccgactgctatagctttgtgccccgctctgaggctagttatcctgtgcctacattttggaagaactggtcgggttcttggatgcaagagtggttttatgtgaagaacaacatggaccagagggaggatataaggggcatcattcaacgtcatatatggtcacgcttcggcatcataagaccttcagccacactcggaaatgatgtgcaagcgtgccagacaactttcaataatatatgcacctatatcggcacaagggatttggtccaggagcatattgcttacagagtatggccccttgcgagtggatgggaaatgctaaaggaggctaccgctggctccacccaaagtgtcctgatttatctaaagtacacatttcggttcagggatcggtttgacgagccaaatgatgattggttggatgctattgaggcaacaagtgatgagctgcttggagcctattcaagggctgaagacgaagctatggcagtcgccttcgatgctcgagggaagaagagactgaatagggttttcgacgttatcgggtttatctaccctgactattgtttt

SEQ ID NO: 46929 - DNA, 417 bp, Zea Mays
tcaatgtgttatgtaactttttatggccttgtttacactctaggtataaaaaagtgttatggtcctctaatatgcgctcgagtttttttctatcttttccgttgtcacaacctttctcttcatcatgcaacatttgtgcaagagcatcattttctttaggattttcaacctcaccaattacaatacctacaaaggaactatactaagcatagttcgaagttgtgtcgtcgtcctcctctttttcatcctctagaaactcgatttctccatgcttgctcaacaaatatagttagacatgaaacaagtttagaacaagtggagttgaattgttgttgatgaagagtattctctctcattcttacaatctctatatggacaacaaatgaaacctctttccttgtctcgcttggatgtctt

SEQ ID NO: 46930 - DNA, 345 bp, Zea Mays
cgtcgaaatatcatggtcttagacggcgaccatgagatcatgtaggtgtggtgtaacaaggcgatgtacaaggctgtccggactggccacatattgatgaagagacccggcgtcgtggttcctgatgatatcatagctgatgtccttgccgcatcgagtactacaagcaaagctccagcttctgcatgatactttgtaatgaccaaaagccgaatattggtcgattaagtaggaaggtgattcctcccggacgttctttgacaatttgaatctgagttttaaaactttgttgatatggcatggtgtgctctctttgttttgtagctagggacatacagtaccgac

SEQ ID NO: 46931 - DNA, 282 bp, Zea Mays
gacaagaatttctcaggctttttagcttcgtgtaagttgtaaaatatgtacatttgttataataaaggaatgaaacccataccacccctgccctgtaccagaaataaggaaataaaagtatgacacgtttcctattccattacttgccctaggacttttaatctcgggacgagattcttttatgggcgaaggatgtaacacccttggtgttacttccactaaaacatgagcatgacatcataaacattggcatatcatgtgtttgtcacacctagaatgcat

SEQ ID NO: 46932 - DNA, 433 bp, Zea Mays
accatgcccggatcaccccatagcgcacccccgaatgttaactggcccaaaacaaagagtacgatcgggcaaacttgatagtaacttacctaccggcgctaagggcaggagaggtggcgccccacggccaagggcggatccgcggcaaagcttgtgcgacggtgagaaatcggcagagcatcggtcgtccgattgccaaattagtggtaggggtagcttctttgtatctccatgattctttagagacacctgccgaggacccattgatgcccacaagcaagaacgatgatggtggcacaagctcatctctctcacccaatcgcgagctcactgttggcgctaaaatcctttgttcctggcagctaggatggggaggggatgctagcctatttatgcgcacgagtccggttaaggaggggagggtacggatgaa

SEQ ID NO: 46933 - DNA, 614 bp, Zea Mays
gctgtacagggtggactgcgggttgattcctataatgagcggggtctcttttataaaaccaccagctgaaggggtatccagaaaccctggccgttggatcaacgatgcacgtctcagattagaacctagccttcccgatttccaatcgcacgatccggaacaagcggcccagatttaaaatcgtgaagattcgtctgatacgaccgattaagatctgagggttggaatctaaatgggtcaacacatcctaatctcacccgtcccgtggccatccaacggttgagggatcgtcttcccccaacagagccaagctggggagcgcccctgcccatggcggccatctcgccggtgcttcgccaaattctaccgccccggtgactaagttcgagtaagcacgtgtggaaaacgaaattgatggctaggagaacctggaggaggtgtctcaccacccgagaggacggcgacgcggtcagtcgacggtgcagagccgaccgcggacaccggtgaggaatcagccaagctccggcaacccacgcagtcttcaatgcccggcgaggagacccggttcgccgcacgcacaggaagcccctggtgactagcgcgcaaacccgcag

SEQ ID NO: 46934 - DNA, 621 bp, Zea Mays
cgattagaggtcttatatgagtgttatcgcagcccaataattattggaggcgagtagcgttcatgagtcagtcctcgctaaaattgaagaacaatccgataacatgcacatgagtgttttaggtccttcagtagcaaatgcaagtcttatggagtttatgccatgtgttaatgtctctgtgttagagcccctaaaatgtactattttaggtgacttgggtgttaactaatttaagttgatcaatggttaagaaacactgattaatctgctccaacccatgtttttgagttgcgatgtctaaaatggttcgctaagtcttatacggtgattagccaactcatgttaagtaggagtcgattgcgtaagtgattgtgatatatatgttgtgtctcggattgcgataataataggcaagccgaaatgtaggttaattagcgggctatgtcgttgctctagttagccgaattgttagatgttttgtgttaagctcgtagtcacgatgatttgcttgttgtagtctaaatacgtatggtcatgatcgcgggtaaaaagtagtagtgctcatgtgatgtctaatttaaaacgcaaattgttgggtgattatcgtgaagaatgcgttgt

SEQ ID NO: 46935 - DNA, 605 bp, Zea Mays
gctaacttggattctttcaccttgtggacttgtcaacataattgttcctttggcacattgtatcactccatcacaacttttcaaccagtcacatccaagaatcacatcaacaccattagatcctaggaccactaggttgactagaaaatctattccttgaatcttgagattaacatggaggcatgagtgtgtggccttcatatcacctcccggtgaactaatatgtaacatcttcttaagagggtactttggtatgttatgtttttccacgaatgactctattataaacgaatgagatgctccagagtcaaataaaactgaagcaggtatggagttaataagaaacataccatacaccacgtcggcatcctcaggaactgattccgctgtcacgtgattaacccttcctctattctagttctatggagttttgttctatgcagatccacgagcaggtgtgttctggtcagttctctggttgatgttcttctgaggtgtcagttggttatgccttgggcagttgttagcatagtggccaagttcgccacacttgaaacatccattgggttgaactggtgcgttgttgttgcttttggcctatgtgt

SEQ ID NO: 46936 - DNA, 343 bp, Zea Mays
accgaattagtcccgcctgagccgaagaaaggaagttgttatcagatggatgttgatagcagtgaagcagacccaattgagagtatcaaggttgtgtccgagttcccagacgtgtttccaaaggacttaccaggtatgccaccagagcggaaggttgagtttgctatagagcttcttcctggaaccgcccccatctttgagagagcttacagaatatccggaccagagttggttgaacttaagaagcagattgatgagctgtaagggaaaggttacatccggccaagcacctcgccttgggccgcccctgtcctatttgtggagaagaaagatggcaccagaa

SEQ ID NO: 46937 - DNA, 541 bp, Zea Mays
gaaattttcaaacctaaaaatcttaggcttagggatttttgacttgaaagaaaccagacatggcacatggtcagagatatcccgaggcaacgttgttgcgcgagtgtttgggtaaattaccgaccaatctcgcgggatgaaaaaccaatcaagtctttgaagaaggggctccctttgcctattcgaccaggtaaaggacagaccatggagggggatttctatcaggtcaagctggctaatggcctcgttaaatttcaacatcaggctaagatctcccctaacaatatttctgttttcgggcctacgagtaagattgaagtccccaactatcagccaaagtttatcaaagggcatatttatattagagaaccagttgatgaattcaattttcccatgtggagtacagagcacgtaaatatttgtgataatccaggattcattcgacgaattagagaaaaattcaaccgaaagagcatattcattctgataaataacattgcccaccaatttcgagctattccaaacagtaatggaaccaccc

SEQ ID NO: 46938 - DNA, 389 bp, Zea Mays
ccggggtgggccggggttgacgcccgagtgggctgaaacgaatagtgttgctatgtgggtcaggatttcatccaaggggggctgatccaaggaggtttatttccaatccagaccgttcccgggccaagcgaacaaggccttatggagaagaacaaaaattcagacagggaatgacagaggtagtggagaggattctgagttgttcttgttccatgtccagaaccgttacaaccaccgacttatgccatcgccatctcagacacgtgaaccgccttaacagattaaaacggcccaggtcacaagcccagcccagacaccgacctaggccaactccaccaacgtcgtgcactcgtgcatgcgggcgtatataacactattttatatttttt

SEQ ID NO: 46939 - DNA, 976 bp, Zea Mays
ttggccgaaaagacctcaccagcaagaatgacggaacacccctgacaaactgaacaactactaatgaagccattagcagatctaaccaaaattgggtgacccaacctctgcaccgaaggaccagcctgcgacacaaaatcctccgaaacaaacgaatagctagcgccagagtcaaaaagagcatgggctacaaacgaattaactgaaatcgtacctgtcaccacgtctcctttctccccgccatccgcagcgggtagcacataagctccagaaatacccgcagaagaggaagctcccggagtgaaattaacagaagaaccccactgagccgccgggtgaggcagacgcggagctccaaactgagacgacataggagtagacggtgcaggagtaggcgcggcctgatactgaggaaaaccctgcatcggcacgaactaagaagtcccaggcacataaagctgctgcggaggaagaagaactaaaaactgctgctcagcacttgacatcatgttgatagtgccctgagaggaggaggaagtcatcggctcccatctgagcttcccattaggattcctcctacacaccacatccttgtggtcctgactgcagatagaacacctgccactccactggcactctgcatggcgatgcgcatcaccacagcggaaacacaccagccccagcccgggcttaggaacaacccgaaacctctgagtacttcctcccgaagtacccgagtcagaagatttgccacggtaaggatggtggcgctggtgctgagacttgcccctcttgtgggctggacctctcgtgttgcccctcctcgcgtcctggccacgaggctgatcaacacccgaagacttctgcgactccatggtatactggtgttgcatctccacacccagtgcctgctccaccgtggtacggaagtccaccaacggaaaggctcccagagcatgcctgatagaaggcttca

SEQ ID NO: 46940 - DNA, 1329 bp, Zea Mays
ttcttaaacatcacccgagcccggcccgacctaacccgtaagcgattcggatttaaatagtctaggctgcccagatcacggcgacggcggacataccaaactctggcgtgcacgaaccagggtctaggacctcgaagtgttccattcacggttatggtgagtctcagggattggtctagtgcactatgcccacatagatttatccagggagagtacagtttaatcagcccacgcgaagctggtccgccacggcgtgctagacagacccgatggcgttctggccggggtattatggtaacgttcaaacgagcaacgcccttagcatcaatatcatacatgtattatgaaacgtgagcaaaacgagcagattacctcccaggaaaagctggccacggggaggtgagtgattcggggaacgaagtcaccacgcgcgcccagaactccgcggttcagttaaagcaacggagccaaagggttgagaaaacgtccaggaagtaatttaagtgcagaagaacggtatgatacggtgaggagactatggggacagccgaaacttgagtgagttcaggtgttgaactttaatacactatgagagggcataggagttatcggcttggttgaggcttcctttaggctttcagggggaataaccggtgctaacatgatcataatactatgcatggcgaccacgtagaggtagatgtacagggaaactgcagaggtggtaaattctcccatggacagcaaaccagcacagtacaagcaggtgagtcactgctgtcaggctgcaggttagtctaatccaaaaccttccccctttgggctgtaaaaatcgtccatgtgaccccctctttttaccagaacgaaattcttgttgttttgcacttatccaaagtcatctggaaacagctagtggatgcagatctttttcctaagatattttcagactgcctgatctagttcagtcgacagcagcagccaccttgtcccctccatttctccaatttctttataatgacagagctaactctccacatcaaacttcttccctgaacattggtcttttaatttcttgtagacttccagagtcaatatcttacaggttttgagttatagagccccaaagtgaggcatatcacacagaaaccataatttcagtttattgaaactgaacccagaattgcagactgtcaaggcaactttgagggtatttaactacttattttacatggtaccaagttaatcattgtgaagtatacttgtacaccaatatgtactcttcaacttttctataaagatcccaattcaaaactgttcagaaccgacacc

SEQ ID NO: 46941 - DNA, 610 bp, Zea Mays
gtgatcatgtctatgccggacaagaccagttggcccgagttgattggctgggagattaatgatgcaattgaaaaaatagaagaacaacggtcagatgtaacattccttgagtcactagatgtgaatttgaacgagaccccgaggcctgcgaaccaactcgcacccggaactatacgtgttgtcatctacttcagcgtggacccaaacactagcgaggaaaccgttgaagaaactccatatattctctaggttgcctagcaaaggctacctttatacttttttatgccttgatatatgaaaggaaagcatcaattgaataatgcgagtgtgatgtctgatcttactttcatggttgatttcatacatttaagtgtctgtgttgaatctatatttagtagtgtcctactcaacatattgaattataaacaatgagatattgagatgtcttgtgccgaatagtgatatttgtccggtgaagtatttataagtgccttacttttaggcgcaattatatttgagaaattggtgagcaatacttgacacacttatggatggttcccggtattggtgtcgagcactctgatcatggattaatgccacaacagctttt

SEQ ID NO: 46942 - DNA, 845 bp, Zea Mays
gaggttggttgcttgcaacggagggggcctgaaaggagctttgaccctgctgactgaaacgtgacggagtgggtccagctggcttgttgaagcttggtcccttgggtggaaacccaaaggatcaaattctttggtgcctgtcctgctgctgagctcggaggacttggaatttcctcttgaggtgacccttttcttcttcccttgccctttccacttgtatggccttgtttgagaggtgcgagaagccgaggaaatcttggctggcaaggatagtcttgagttatggtcgtagccctttcaagaaacgggccatcttcttggcttctgtgctgacatcgtcaggcgtgtagcgagccaattctgtgaatttgtgcacgtactgactgacagatcttccaccttgagttagctcccgaaattcatcttccttgagctgaacgatcccttggggcacatgatgttctcggaaagcggcttcaaattttgcccaggtagcatctctgacggcagcgctgaaggtatcccaccaggatagggccatcccggaaagttgatgagtagccaggtgaacacactggttctcagggcatccgatggcttctaacttcctttttattgtgcgtagccagtcatcagcgtcaagcagattgctggatccagcgaatgtgggaggcttgagtcttagaaaatctcccatcctgtcctgaggccttccaccattcgggcgctggttctcaaggcttctggtgaggacttcgatgagtcgggtttggttggccagaacttgagctaaatctaatggcagctccggaggtgcggggaggtgggtctcactcccttctcca

SEQ ID NO: 46943 - DNA, 291 bp, Zea Mays
gaaaggccccctttgcggtggccaaaagcaaagaaacaagaaagcatccatgaggcaaagtgtgaggggtgcaagcactgatcgttttattgggaagacaattaagcaggtaagtggtggtgtggagagccttagcccagaaccgaacaagaatcgaggcctaaaaaagtagggagcgcatgccgttttggggagaagtgtaggggcgggacatctggaactagatgccatgggagaggaagaagacatgaaagaagagttatcaaactttctccgattgtcacactgatc

SEQ ID NO: 46944 - DNA, 466 bp, Zea Mays
atgtggtagtggtttatgatgccttagtggttttcgttacaggtaacagataatgacatgatgccactatcactttgtgtcctcactctttgtcttcctcgttgcggcataaaaggactcatcctcattttcgcgtgggagaaaaaacaactaagaacaccaccttattgttgttatggtactcgggcatactcgtcccaaattctacgtgtatgaagagtaggcctctaaaattggcatcgttcacgagttcatctgatcaggtaaaaatctgcaatcagtttttttgggttgtgtctttcaagtgattgctcgatgttcttcttaacggttgcgacttcttcctgctacttttcgacggttggtccctcgtgatggtgattaacactgcaaccgtattgtacgacatcgagcagaacgactacattaacaaaggctatgtcaactagcactagctctagtggcg

SEQ ID NO: 46945 - DNA, 612 bp, Zea Mays
cccgaagaaggtagaagcaaggcgcaacaaaacagctcaagggagcaattatttataagagggcacgacgcacgaaaaaataggacacaagccaaacatcacgtatgaaatgaagcgacgatttgacaccaagcttgcgaaactgtggaagtacgcgccgaaacaaaaggcactgcccgacccttcatcagcccccacagggagacactctcccctcaggggctacttttaggggaatgaccctcggtccctaggacccaccagttagagagtgtgctaaggaaaggagcccctaatcgctaggccccaccggtcagtcagaagaggcaggtgtgccaaccctagaaggacctgccccgatcgaaccccgtggcaccgagcccgggctcgagcaaggcggagcctaacaaacgaagtcgggcgtgtcggaagagagccactcaagtggatcccgtgtctggccctggactgacccctgtaaatgactggccacattaaccacgcctagcaccgagccacagcgtgggcgtgtcacaccagaatttaaggtcaaacccgagcgcgaatcaaatgtgtgcctggatcaagtctcacacatatgatgactcttgg

SEQ ID NO: 46946 - DNA, 327 bp, Zea Mays
cctgcatagatctcatctagcagttgcttccccatagtcgagtgaatacatttcatgaggactcctgttgcgccactcctgcagaatagaccccctatgatggtatagtgtgctgattgccttgcaatgcgctctgtggcagccttatcatccggcacttcctcattttttatgtatctaataattggctccctccaatcattgggatctgtctctgtctggtttaccgtgttgcattcttcagcatgtcctgcggtgatgcttgactgctgcacttctggacaaaaactcctggcggaacctgggcccgactggaccccagtttcg

SEQ ID NO: 46947 - DNA, 320 bp, Zea Mays
actaaactcatgcaaattgatgtttggataatttctttatccaacgcaagatgtgcatgggcttgaagctaggatctcgagtccgtgttcttgctatttaatccatgacgttttggttgttatgtttccatcctatatcatgcccttgttcgattggcataagctgatgccccttatccagtttttctgttttttaaggattgccatgttgctttatcaacccaacctaggaaagttatgcctgatcatttttcttagtttgatacctttggtttcctcatatctatcgagggcataccaacttaatcttatacttgttt

SEQ ID NO: 46948 - DNA, 500 bp, Zea Mays
gcgatcacgatcgcctatcaacaaatcaacgatcgagattttgagtaaccagatttatccctatccactcgatacaagatcgacgatagagatcgaagccgatccggacccatacactggccgtctgatctatgttaggcgaccaggattaaatcatgatgataacgaaccagtatgttacggtagtctttggatcccgatctaacggcttggattctatccggcaaaacgttaagctatactcaaccaccaccgtccgatcctcgacgaacggccaaggtactctctctcccaactccccgttgcgacggcggcgcgaacacccacgacgtcgcgttcgcctcctcggtggcgccatggccgccgagcacctaactctcctcaccactgtcctagacacatttgggcgcgaatcatcgagacggctactaaggtttgtatattggggcacttaccatagttggtgcgatgccagcccctcagctatggcgagggaaggt

SEQ ID NO: 46949 - DNA, 868 bp, Zea Mays
aagaaatcgaaactcgtagagagcaccgaaatcgagcagttcatcaacgaggtggccatactctcacagatcaaccatcgcaacgtggtgaagctccatgggtgctgcctcgagtccgaggtccctctgctcgtctacgagttcatctccaatggcacgctgtacgatctcttgcaccaccgcgaccgcgagcaagacggacgacgacgaaccttgctgcagcagctgccctgggaggcacgcctgaggattgcagctgaggtcgccggcgcgcttacgtatctccactcagcagcatccgtgtccattcttcatagagacgtcaagtccatgaacgtgcttttgaatgacagctacacggccaaagtctccgattttggcgcgtccaggtctataccgattgaccagacacatctggtcactgctgtgcagggcacatttgggtatctagatccagagtacttccacacaggccaactcaacgagaagagcgacgtctacagtttcggtgtcattcttctcgagttattgacaaggaagaaaccgatcgtcgatggtgacagcggttacaaggtaaacttgtccagttatttcttatgggaaatggagaggaggccgcttgaagagatagtcgacgtcggaattataggggaagcaagtacggaagcgattctaggcatggctcaactggcagaggagtgcctcagcctaacaagggaggacaggcctaccatgaaggatgtggagatgaggctacaaatgttaaggtgtcagcaagatgttgctccaagggcacatccagcaaagagaacaaatatgattagtcatgctattccgatgcctgctagccagcacggctcacgccaat

SEQ ID NO: 46950 - DNA, 701 bp, Zea Mays
cttgtgagcatctcgtgcgagggcaacgaccagggcatacttcaccggtgacccgtggtgccgcggagccaatgtgtggcggggccgacatctgcagcgccgtgatcctaggtaagaaaaagcccctgacacactggatgtcttcccctctccgtgattcacgcctgatactaaggcactaggcatggggtaggtatccgtggtgcggtgtggcatggccacggcgcgcctgctcctgtgctctggtttccgtcaggaggtggaagatgatgtaatagccgtcagatctgagcgaagggccgggatttgatcgggtatctcccctcgatggttaaattggggcggttggatcatgatcaggcgatccagattaaatgccgacaaaacccttcgccctggagtaatggtagtcgtcgatcttagatcgggtggacgcaagatgattttggtgcattaaatctcggccgttgatcctcgatccgagggcagccggtgtgtaccgcttcgacgttatgatgtgggtaatataggtcataggatctgatctaggaggtcgtggatcacacgtaccccttcgcccgcctatttttgctagagaccccgtagaaccctagattcaacccgtagttcatgacattggaaagaccattgcaaagaggctctggaattagcgaaaacaaccccgaactccctgggttttg

SEQ ID NO: 46951 - DNA, 491 bp, Zea Mays
ggggaagcactcgcgtgagaagggggaagattcaccggaggtcgctaacgtggtgctcactggctaacaatctacggcggtcactgtcgagtccttacagcttgcgacgacgttgtgaatcgactacggcgtgacacaatcgtggtgaacggcgatgtccacggcgatgaccgtccggccacgtcgttgcacaagtgcgtacgacgactgggcagtaacagtgccccgacttcatcccctgcacgagatctttcagcctacgtagttatccgcacgccaccgggcacaaattgcaacgccggcgaggatcacggcgcgggatcaccggcggcggtgcactgaacctggcaatcttcgtcagcttagtgtaccatgcgaattcctttcagtgcgcctgacagagcagattgagaagctccattctccatttttcatgtggagagctaccaatccttctgcaccaaagttgttgctctataaaccagcttgga

SEQ ID NO: 46952 - DNA, 514 bp, Zea Mays
gagatctacagctccaagtcaagaaaaatgtgcgttctatatgtgaatgcttgtttcgtagtattagttaaactcttcactcctctcactatgcaacccacagagttcaaaagtatttcatggcacactgtgtgttggtcatgcaactgcatgtttttttgaaataatctacagatactgaactgtctgaacatgagtgtgtgacatgaaatcagcttcaccaccttttgcagcttcactgcttgagcaatgtacatgcagaatggtgtatatatgtgctatgatgcgatgtaaggatcatcatcatctactctagtctggagtagatggcaaggtttagaaaggcaagcaaaaacattttgcaagcacaagtcaggtagctaatcgccaagatctgtggcaaggttgataaaggcaagcaacatgcttcaaaaatccaaatcagaccacagctagctgccaagatcatagtgagcattcagcaactaattcagcacctaattcagttttattt

SEQ ID NO: 46953 - DNA, 606 bp, Zea Mays
tagaccaaaagacataacagtgaactcatacaacccatacttggtaatgaatgccgtcttcggaatttctaaaggtcggatcctgagctaatgataacctgacctcagatctatctttgagaacacgctggctcctctcaactggtcgaacagatcttctattctaggcaaggggtacttgttcttgattgtgacctcattcagagctcgataatcgatacacatccttctggtgacatccttcttctccacgaataggacaggggcggcccaaggcgaggtgcttggccggatgtaacctttctctgacagctcatcgatctgcttcttgaggtcaactaactctggtccagatactctgtaggctcttttagaaatgggtgctgtgcgaggaagaagctctatagcaaactcaactttccgctcaggtggcatacctggtaagtcctccggaaacacatctggaaattctgacacaaccttgataatctcgagtgaatcttgctccttgctatcaatggacatctgatgacaacttcctttccttggctcaggtgagattaactcagctaccacttcttctcctagtggggacaccaacttaat

SEQ ID NO: 46954 - DNA, 354 bp, Zea Mays
ccgggatgggatgatgatgcgacgacggatagacagacccgaccaccgcccacggtgtgatgtgatgctaatggtaatggacgatggcgcggggcaggcagcagctagcgcctagcggaagatctcacggcccggggaatccgctcgctcgctgttgagttgagtggctcgcaccgctatcatttcttgcagggtcctccggttcgtacgtacttgacgcatgcagtatgcatgtacccgcgtggccatgcttgcttccacgtatttgacgtatacgtgacgttacctctagggtattcgcaaccgcatagttagtttgtcgagaacagtactattgaccgcacatattgctac

SEQ ID NO: 46955 - DNA, 1186 bp, Zea Mays
gttctgattaacaggaaacaggttcttttactattcctatgtgtcactgacggtttacagaaagccccttcggtttttatttcttcgggcaagtccccgatggcgttgagcgcggcagagctccggcgagctcctggaccggccaatcggggcaaggataggtgctactgagcggtctacaccaaattcatggcctatcaatggtttccccccaatcaatttcatatttggtgatctattttgctctgtccacgaggacagcgaaagctatagacattagttcgtgttcccagtgattggtgggcttttagtttaattggacggtttggagagcatcaccagcatacagggacatgagaacaacgcgcgaattggacggtgccttaccataacggactgaccacggtggagtggtgctttacggtggcggagaccaatttaggggaaaaggggaattctccggctatggtggacaatcgagttgaagaacgggtgtgtgggcttcgtgatgacctaacgcagctgcccgggggctcaatttataggcagcttcgtcggtggcgcttaatttggccggaccgtgcgggcggccggagatgaggaagaaccttggcgcggtgaatacgtgtccagtggcgtggcagttgttccggcgatcaacggggagttagagggagtcacggtgatgtggtggcgcggttgggacacgcggtgaacaacggcgatggcacgacgacggtgagcagctttacccgcgggcggtgagcaagggggaatgaactatggctagccggagtggcttccaggtcaccggcggcgaagatatttgaccccgcgatgttatcgacttaccccgagcgtgaatcttgacgccggcgacgcgaatcacggcgggaaaggttaccggcggcgggatttttctgccgcgaccgatctgatccgctgggggacactgtaccatcgcgctgcttcatcagagcttctgacagtcaatgtttgggctcaattttctctcaaatttccatggcaacctatctgaggctctgtagcaaatttgtagagctacaaaccagcaacacttcgactataggggttgaactcatttgagcactggatcaaggtttaattcacactcaaagttgaccctgttacactgaaaagctgaatttcagaatgaaaccagcct

SEQ ID NO: 46956 - DNA, 1219 bp, Zea Mays
tgaatatcctgaacccgaggggttcatacgtaaaagcgctcgaccgaaagggtatcggctgaatcaggccgtccgatcgacttcctacggttcatattagatttaggtttaaacgaagcggtatgtaatcatgatccttggatcagggatcaacagccgttattttatggggcgaaggggtatcgctactggtaatccggaccgtccgctatcagatcaagggctggcacgcgattcctgccttccaaactaatctggttcgtccccctagatccgaccgcccagatatcgtcaacggccaacacccttcttccccaagccgctaccagacgcggcggtgctgctcgacatgcggtggcgcaccgccggaggacattcgatttctgctcctggtgcatgattccttgccgcgatggatattactcgatgagaagcaagtgtataactcagttgaggctacgtaccagtgtttggggtaacccggatgatagcttcctcggcccgagagcatgtatgcccccccagtggttctacgaacacccctggcccgctttcggatccctaggcggcggtacggcgcactgcgatgaaatgggacctcgggcgaagctgacaaactcccggtggagttatagggcgtgactgtgtggctaattgcggagcgcgagggcaagggaagatgagggtcgcgactatcgcccccctatatcgaccgaggcgaggtggaggggcacgagctaggagcggcgattccgtcggtggttatttcgacgatggcggcgaactagatggagaaagggcactacactttatagcttggaatccaagccgcaaatcagggcggcggcggttgaaacggcccaaccgaggaattcggccccgcgattcggttaatagaacgtgaccgagacgcgatggaatccgaaaaccggaggtagaagaagcttctgacgtcccgggcccgcatgtaggtgggaagcgtacgcgctagagagactgactggttggggcccgcagtcggcgtggagctggagcgcggttgcttcatgggccaagcagaggggaaaacagcccttgtaggtaagtcagtccttttctcttttttatttattcatgtttcagatcccttttctatttattcaaattctaatattcgagtttcagaactgttttgcagattgttcactaattatattgcacaattaaaagtaccaatttt

SEQ ID NO: 46957 - DNA, 1047 bp, Zea Mays
aatactggtgtaaggccataaaatatagattggcactaaagaaacatgtgctttttacaatcatgtttaatattcatggagtttattgtcctctctttcgatgagtagtgttcctttttcagtctgtatgtgttgtgtcgatagtaaatagtgttagtgactaactactggaaacgaaaatataattaggtaccgtgtctttctatatggaccatcacgttcgtcaaggaacaatatttatcgagtgacaaagatgacacgttgaccatgtgtttttctttgtgtgtatatatactgaacatgtatgtgtattcatatataatataggatcattgtgcatatatttaattacatatgctaccatattatacaatttatgtatatgtaattaggttgtccttcagagttcagaggttgttccaagaggagtcggggagaatgaaagtaaaaccttggactgtgaactctatcatctatacctcggttatcagcctcagccgattaacataattcttcccaggaaaagaggtctctcttatgaccatttcaccgaagatgtagcctaccgatcacatatcaatagccagggtatactctgagcagttgagctcgaattcaagtgctatgtaccacacaacttagttcatcatgaagtcagcttcagtcgtggtccttgccaacccaaagtcctccattttcagatcgcatttgacattcagcactcaacatcatgttgctcggcctgaggtccctgtataggacatttgcgagtggacgtacttgagtcctcgaagaaattggtagacgaaatactgccccgggtaaaactaaaagtaaggcaacccttacacacgggttgtggtatattctgatgtaaaagaaaaaatagaggacgacacatcattgaacctgacaatgatcgtcagttaatagctggtttcatcgtaggcggtgatgaagatcagtgtggatggatcgccagtatggtggtcgaggaggaagaggaggttgctgatgcaacaacattcgcttccgattccacgcgcg

SEQ ID NO: 46958 - DNA, 559 bp, Zea Mays
cgcaagtgcaaatctatggacaagtctgccaccttctacttcttgcacgagcacaaagccacaaagaggatttgagattctactcccattggtcactttcttttggctcctgagagaaaccaagaataaggcaacacaaatgaggggactctcctttctccccttagtaaattctcttaaagcatatcataggatgggagctggtaggatgggaatgaaatcttaaagcttatcgaatatatagaaattatacaacaaatcatgacaaatataccttcaactttatagcatgacatcttaggcaatcaactcaattttgtttcctttccatataagtcattacaaagataccttcaactttacaaatgagagcatgaaggtaaaatagaacagctttgaaggcggagcaattctagtgcattccgtaacacatgggggtaatgcatggcactgttcctgtatttatagtaatgaagtacaacttcatatgaaattacaaacatgctaataagtcctatttacatgatctatgatatttgtgagggtagagttgtctttt

SEQ ID NO: 46959 - DNA, 684 bp, Zea Mays
ggtggagatagatctcaaacttctttaaaacttcacctatcatctcgtaaagggggaaccgaagccccgccctgaagaagctcttgaataccacaacttcatcttccttcggttttggaattatttcttctccagcaaagcgaaccaattcatcatcattctctccaaaataacctagtttcttcatcacaactagatcctatgccttcactgtggattttccaaattcaacatggctaggcttagttgggcacaaaatgttaccatcatcttcactttcgttatcactctcagcttcggtcgtggcttgttcagcttcgacattagaggtaccttcggcaatagctccctcttgcacaaccagccctgaccgcctcatcatttctgagatgggcgatgtctcggttacttcaatttcatctccctcatgggacacccttgcaatggatctcactctagccatttcgttattcagcttcttttagacgaagttgatcttgagcgacgaagtgcttgttcaaaagtatagtgcagagagcttcgagtttggttaaaattttcaacagcacaacggtgcaatagcaatgaatgctacgataacttctcaccaacctgtctgtttatatagcctttcaggagaagaaggcgaaccgccaaagcgcgcatactggctaaacgttggac

SEQ ID NO: 46960 - DNA, 711 bp, Zea Mays
accacatgtgcttgctcgcgatcgcgtcactactgaattcttctaattatttgattctatgatcatcatgttggtgcctctgccctaggagaaccaaacaactaggtttgtatatcatataaatttgtttcattatgctgattccatgactttcaaccagaatcattggtctggtggaatcattggtccaggtctgcatctatgatttatcacgttgcctaaaataatgtttcgcttctttctctggtaacattaggatgacaccaaggtctccatcggccggccttgactcatttgatgtcattgctggtatagagtatttcatacgcatggtaaacaatcaaaccacatactatacatggtcatggacgctgcagtcgtaaacttcttttctcggtttcaagataattactgccgtgctctacaaattacggtaccatgaaagtccttgttatcgatattattactttttttcttaagaattctactggtctataagcttttatcgtggatttcctcctggtttggttcattcatgcatgactgcagcgacagttgcggcaagcttcttcccttctccactgacaaaacaaattatatgccctaagctgccaataatgttttgctataaaagaataaaaacttcactttccaactgtttatgtttgtgttatcgtactttggtatccctagtattagcttcatcgacaa

SEQ ID NO: 46961 - DNA, 767 bp, Zea Mays
cgaacaatgaattccagctctttaacagttgcttcaggagtaggagatttggatttctcaggaacactctcctccagagctatcgatgcagtttttgaaggtatagcttcggcaggagcttctgaaggttcagcttcagcaagagtgtgggccatgctggcgtcaccagtttttcttgaatctttagcctgcgtgctaagagcttcgacagagacatgagctgatgtttttacggactccaaaacagcatctagcacgctagccattctccttttccttggagtcactgcaggagtgcttgatggcttcgacaatcctattgcacacgacggactcaacgccttcaactgttctaccattttctctagttttggctcttcggtcggatttgtcctagccttgactggcatagcatgacctggttctgtggcatgaacaaccccttcacttagcttcggaacatcggtcgtctcaatgcccctgggtcggcgcgtcaaaactttaaccttcttcgacctcgacacaatagatgatgccaatgtagtggctttccttttcctcgcttgctttcgcgtgggatagcagtagtctgggtacacaaacctgataacatcaaacaccctgttcaatctcttcttgcctcgagcactgaaggaagttgccatagcttcgtcttcggccttcgagtacgctccaagcagctcatcgctagttgcctctattacatctagccagtcatcattcggttcatcaaataggcttctgta

SEQ ID NO: 46962 - DNA, 314 bp, Zea Mays
acactcataacttccactaaatcgaccaattaaattaaacttagacccaacgtaccatcgaaaccaatggttctgatcgctggataaccttcctcttatttactcaaattcgatggataatattatttggatcatacatcatctctctccatcgccaccccaccatctccctcctctcactcgtgccgccaccgctgatctctctccttcctttctcgtaatcatagcattagcattgactatgtgatactatatgatagtatatatcagatttggtgcagtccaaataagcacatgccattttttactaatac

SEQ ID NO: 46963 - DNA, 881 bp, Zea Mays
ctccgctcaagtcgacctcgggcaaggccaagggtcgactactgcccttgggtatatgtatatatgccgagcaccttgtgccccaatcgccaccaaagcagagaggacgtgagattgaggagcgcgctgcatgactggagcgagaggagatcgggctgcactggaatccctgtctgcgtggtcgtctggagccctatttgtggcagaggatcatcaccgtggtgttgcaaacaccgtggtggcgttcgtgggagctagaagccaccaatgcgcgacatcaccgagagagcaggaaagtcaccaaagggagtagccttcgacgcctcggggtgtacgtcgtcatgaggatgataaggggttagggaggatcgtcgcgacctggagaacatgtttgaagcatcagcatccatgaagagtctcccagcgacgaggaattgctcgttggagtaacaacgctgccgcgtggcatggacaaggtgcctcgtcacatgattctcggtgaggaactcttacattgattcacttttacctcctcgtcatgtagggctaggtggagtaggaaccggagcgccaagatcagtggtgggtggctcgccggcgtgtgcgccggcgtgggaaaacagcgtcgtcattcagcgccatcggaaggaggacgaagcactatggtcgttgatcttgtatcggacggccacaattagatgtgggaaacccctttgatccattaaatgtatgtcgcatatcgcttgatcaacggctctgagtgcttactggtttgaggtctaatcctagccgtcggatgaggattggatgactagggagagatcacgttaagccagccgagcgaatttgttaagaagaccctaggtttttgtcaaataaac

SEQ ID NO: 46964 - DNA, 572 bp, Zea Mays
gatatttggtagaagaaaattctaatctttcatctattttcttttacaaaaataaatgcacatatatctagtagctagggtttgtgagggtttaaatgagttggtccaaaatacatttcggattatgcctttcaatttctagattacgaaacagagaaccaaccaaatttagaaattattcgatatcaactcttgctatcttggtccaaattgatcttgtatcaaacacctgaatgctccagttaatgtaacataaaagacatttcggagcgagcacagcaacagctcgcaagctcaagagtcaccacgacgctagcatgtcggacacgcggcaacagagtgagggaaggcacgacacgtggtgaggagatggagcggtggccgatccggataaacgagaaggatagcagtagggagataaggtgcatacggggaccttcgtggagacgatacatgtctttcacgtaggtgagaagctgtgttttgtcacacagggttgcgcccgccacgcgccatgaagccaaatcacagagagacacatgcaacataggcgtcaaagaatttcaaacgaa

SEQ ID NO: 46965 - DNA, 300 bp, Zea Mays
tggcccatgagataataaaaaagtccgaaaaagacactcacgatacaagagaagcagcgaaggcagctgagaaagctacggaactcgagagacggatagatattgcctaattgtttttaactttatgttttacttttgtgacttcgaacttatttatgttttgtaacgcagctgaactatctcctcccctggagcctttcgagtcattggccgaccccgaagcaaaaaaggaagatgaaattactaagatggccgaagctattatggacgaagctgtgaatcaactactaaacgaagctg

SEQ ID NO: 46966 - DNA, 948 bp, Zea Mays
ggacattgagaccgtgcatgtgcatgtttaccattttatgtcgcatgcattattttatgtcttatgcacttggtattggctattgtttgaactttgaactctatgtcttatgcttgtggacaactatttgtaatattctgtgggttgaaccatgtttagttcaaattactctgtgaatggttaatcgaggagtgattataattgctgcgtttactttacatattatctcttgtacgtctcgataaccatgactgtaggaaggtctccatcaaaactccgatctattatgtgtgttgtatcttcagcttgaaatatcctgcacacacatagggggagcttttcttacattctgagttttaattaggatttatctatctctcggacagaacttcaaatcaagataagtcctacgaaactcatctccaaaatccttcttatacctaaggtatgagggagatttggaaaaacaaaatttctcttgaatatattatgtagtgttgtcatcaattaccaaaaaggggaagattgtgaattatctaggccccttagtgatgttttggtaattaatgacaattgcttgtggactaacggttcttggagaaataagaatgcagggttggaccacatagaacaggaaatcttggagattcataagcattggttgtggatcaagtgaaggcaaaggtataacataggttttgtttttgccagtcttcaggagtttagagaagatacttgaccggattagtaggttagatagccgtactattaagaggggtcaatgactttgatctgtgtaaaacttagtgcctcatagagcatatagtggttgcacttgcatgaggactaacagcgcttcaaatttcatgagttaaaaatcttttcaaaagcttgtttgaaaagtgcaaagtcttgggatgcgcggaccgtccgggccttgagggcgga

SEQ ID NO: 46967 - DNA, 531 bp, Zea Mays
ctgaaggcccagttttgacttcagcttgagcttgcgtagcttcggcttcagcttgcccggtttcggcttcggcctgtgatttggcttcagtttgagcaattttatttgcaggagcagggctcaacgcctttgtagtctccagcacagcatccagtacgttgtccatccttctcctcttgggagttgaggcaaaagccttttgcctcttcggcagatttgccttcgtcggagggctcataatttttggcaccatattatttcttcaacctttggctcttcggccttatcaaccttatcttcgactgccttgactgtatgcgtcttcggcattacggtcagctcttcggcgctttgtgtaatcgaagtagtctgtgttgcttcggctgctgaagtggaccctgtgccaaattcaggcaccacggccggttcaatgtaacgtgatcggtgggtcagaaccttcacctttttgctctttggcacaggctcagctggggtgaccgaagcagcaatcttcctctttttctcttgtcc

SEQ ID NO: 46968 - DNA, 575 bp, Zea Mays
gttgtatatgtgtgagaactatgttggacttatgataaatgtacaaccatcagtttgttgtatgttaaattgctgattgcagaaaactggttattgtttgtatctgtgcagatgtttcagcctgataccgaccatagtgatgatgatagggatcatgatgaattattagtggcagcattgactttggatatttggggtagctcgtcaagtagggtacccagaagaagcatggtcgaaacaggtatccaatgggttgagcgtacatcggagaatagtgatgattgttatgacatgttttgcatgcgccgcactgtgtttcattgtttgcatgatacgttggtgcataattatggtctgcaaccaagtcgtggagtaagtacaaaggaagcggttgcaattttcttgtgggcatgcgggggtccacaatcttttagaaagattaggaacaagtttggtcactcgttagaaacaattagccgcaaatttagtgaagtccttaacgcaatttatatgatgtcttcggacgtcatcaagcctaaggacacacatttcaatgagattcatcctaggctaag

SEQ ID NO: 46969 - DNA, 777 bp, Zea Mays
ggcgaagcagagaatttgctcgagggccgaactcgtcgggcaaggcagagaaatcacccgaagactagactcggggtcgggcgaggcggagagattacacccgtgggctgaaccctgcttcgggcgaggtggagagattgcgcccgagggcctgtctgctctgcttgtcgtattaggtgtcccatcggagggtggcaggcggcgtgcatgcactgtagcatagacgtaatcatgatgttgcgccaggcgtgatcgtcgtcttgttagctactgtgctctgttgccgctgcgtggggtaggtacatgcattaaatgtgggtgttcccttcctgttttcgggcgtccatgtcttatctgcctgaggttggctagggtgagatggacggagcggcggcaacctcgggcgaggcgaagtttcgcatgaggcaggagactctcgggaggaggcctcggttttaacaggttcctcggctgtttcacctcaggggtttcctccttgactctctgagtatgtttgtttaggggataattcgggtattcctaattattacccccgacaagacaagtcatgccttaattgtttgtagggttgactgtttgtatgttgtcttcatgtaactagtactatagaattcagtttgagtttactttgtactaagtgcttgcatgttcagtctttcagtccatatattcaacaaacaagcatctttcatgtaaatttggcgtctaaactaaaggctgctaaacaatctcagccactagattggggcccgccgg

SEQ ID NO: 46970 - DNA, 354 bp, Zea Mays
aaatttgatagtcatacatattgccatacatataggagttcagctccatacatgactgctgtaaaatgtctgagcagcttaacttaaaacaaaatgtctgagctcagcttaacttaaaacaaaatgtctgaactccaagacattgagaccattagtttagttcacagttcacccataatgattgtccacaaggtcaaatataacattgtaatctagcatcaatcagaatcaaaggcatgtggagacttatcagattcagaggattccattgcaatgtcaccatcttctgaatccgatgaggactgctgcacttgaacttgaacatcacgcatcagagactgcaggcttcttaac

SEQ ID NO: 46971 - DNA, 552 bp, Zea Mays
actaagaactggcttacatgctcgtgcgtggttttctcgccttcaccgaaaaatttacaaaaatctggcatactagtcccttgcggatatggcacgacgtcaaatcggtgattataaggtttccgataagattgccccatgcttgacacactaacaccgaacttgtgtctgaataatctggctacctcatccctaattttttcaccacgtctggcgaccatccattaagtttggggggaaaccttatgatgcctgacacactaacactctagacgatgttgatccgaagagagatgaaggaaataggtcgaggaagattaatactagtgctaaactaaaactagattactcctgctcctaaggagtggaaagaactatgcaaataaggttaatatgataaataagtttgattggatcgattgtgtgagagttaatcggtcgtatcccttaatatatatttaacgaggaggtctagatccattacaagtcggttgccgaataaatcccgtaagaaaatagaaatcctaaccgtccgcgccgccaccgcagatc

SEQ ID NO: 46972 - DNA, 465 bp, Zea Mays
cagcctttcacctagatcatatggaatcagattgatctcatacaccgggggatttgatgcggccagtggcagtgacactaacgaaggcgacggtgacgatgaaggatctgcaatttcttcaacttctactctatcttcttcttgattttgttgtcccacagtagtttcaaccggaggtgacgcatggtccaaaggagcactggccgccttctttgctgctttctcaaaaagggatcatatgtctccgcttctcttcataattaaaaattctgaacaagaacactatcaattagtaaaacctccaagacaacagacaagtagataatgagcaaaacagcgaacaaaaaaatcaaaaccagtagacgaagaacctacgagaggtcatgagtatacctaataatctgatatatattgaagatgatataatctgatttagagaaggactgaagggtggcagaggcaggg

SEQ ID NO: 46973 - DNA, 286 bp, Zea Mays
gccgggttccggctccgccattgaatcaaacacccgatatgacacagactaaactttaatccctacaaccaaacaccctcatatgctgaaaatgcaaattctgagtataggcaaatcatggtttaagtttaagttcttgtcagatcggtcgtctagatcgcgtagcaaccatcctcacgctgaggcaatctgcacgttcgcttcctctgtccggatccaggtggaccgatggtttctcttattcgcgtcggccgagcgcacctacgtcgtttcttagggtgtgttt

SEQ ID NO: 46974 - DNA, 706 bp, Zea Mays
ctaccatccagtgtattcctagacttttggtccagtctcaacatttgtacatgatagagttgtgaccgcggggggtgttagatacccgtcccttgtaatgggcctggcccagttgttttggtctattaatacactgcccaccctattctagggttagagttttcatactcctacaaagtcacttagactaaccctccccacagccgctctaagcattagggagcagagccaactacattcaaggctctagctaggtctagagaacctagatttttagctccagccatcacccaacatacacattcatctaagaagcttctctgtagattgccagggaagggggttccccattgaagatcacgttgttgcggtgcagccaaacacaccacgcccccaaaatgatgacactgttgagccccctttttccttccattgggtactctaagaaccagacgtctctaccactccacgaaagagggttcatcaacaacaggagtaaaatggcccaagccgaaaggagataaaatactgaaccaaaactgacgagtaaagatgcatgaggctaggaggtgttgaattgtctcttgatgttgatcacataatggacaaacagccggatgaggtaaccctctattttctaacctgtcagtggtccaatacctattcctcatagccaaccaaaggaagatattgcatttaggaggag

SEQ ID NO: 46975 - DNA, 800 bp, Zea Mays
cataatcttgtaagtcatgagatggttgaaaagcttggtctaaagttgcagcgacaccctcatccatatcatgtccaatggttgaatgaatcgggagatatcaagattggttataaggtggaagttccattcaagattggagagtatgttgacaatggagtgcgatgttacaccgatgtttgtgtgtcacttgctgttgggaatactttggcaatatgaccgatattctcagcattgtggaagaacaaacaatacacgctagatctgaaagggagaaagtttgtactcaaacctatgacccctcaacaaatcatggctgaacacttacaaaagaaaactgaaattagtgcagcaagtagaggaggagaagagcaaaagaaattcagtgccatccacaatttggtgagtgagtgctacaagccaaattcaagagataaaaagaaagaagtgggagaacatctagttatgctaaccacaaaatctaagctgagagaagtgaggaacaaccaaaaccaagtgctctttgtacttgtgagcaaagatgatttgatttctcctaacgacataacatctcttcctagtgttgtggttgatcttctgcaggactatgaagatgtgtttccacaagaaacaccacctggactacctccaattcgtgggattgagcatcaaattgatctcattccaggggctgcacttcctaaccatccaccatatcgaacaaatcctgaagaaactaaggagatacaaaggcaagtgcaagatcttcttgataaaggttttgttcatgaaagtttaag

SEQ ID NO: 46976 - DNA, 730 bp, Zea Mays
attgaatattgtaaaggctagcaagaggatctaagtttgtgaagtaccttgtggagactatctcttattggatctgagggctcaagcttgatcgttgggatcgcttcagagggtcgagagagaccctgtcctttgggacacctcaatggggacgtataatttggaatcgaacatcggtaaataaatagtgtatcttcttgtgttctttactttttgttgtgatttgttcttctctcccccctaagttttcttgtttttagttctcattctaagtcacttcagttgctctctaaattaattatgcatctataagagcaacaagcacaagagaaccattttctctcactcggtttatattctctctcgctttaaccgctaattgggatcatgtgttgtttaagttttaaaattttcaggtgttgcctattcacccctgcaggcgactatcatgatccttctactcctttggattagacacctaggtagagttttggtggtcgatgaggaagaatcaataaggttcactgccgccatggttggacatctttggtcacccaggcgccaaacatgagattggatcctaggtattgtgtcggctaaagttggcgaaaacaagaggtattggtttccgtgtaggtcccggagttaaacttctcacttgagaagtctaatttatcgtcgtatttcgcatttcgatcctatacgagatatgaaaaccgctcaatttttt

SEQ ID NO: 46977 - DNA, 348 bp, Zea Mays
tgccgtttcagataagtcctgaagatccaatacgctgaaaatctgaagaacaccaaaagatctacggcactgttgatttggatgaacttggatgaatcggtgaggatttgatcgcctgggagtaactcggtacgtggcatcgttccgtgggctgagccacgcgtggccggagttagtcaccggcgaccaccgtgactcgattaacttttgccgcggtgtcacccatgcctcgatctccctcactgtgtctcttaccgacgtggtaggcatgcgctaacgaagctatccgtggccggagatcgctagccgagccgccgtggctataaatagcaccatgatccacggcgc

SEQ ID NO: 46978 - DNA, 378 bp, Zea Mays
cacttcttaagttgtgatacgtgaaatacgtcatgcacatccgataatctattgggtagctctaactggtaggctacatcaccttttctttccaaaatcttgaacgggccaatatagcgaggtgatagttttcccttaaccttaaaccttttcattcctctcatcggtgaaactttaaggtatacgaagtctcctacttcaaacgtcaattctcttcttctattatcagcatagcttttctgtcttgactgtgctgtcttcaaattttctctgataatctgcacttgcttttccgcctcttggagaatttctggaccaaatacttgactttctccagtttgattccaataaagtggtgttctacactttcgtccatat

SEQ ID NO: 46979 - DNA, 271 bp, Zea Mays
gtaggattcattagagaagtgctacatcctgagtggctagcaaatcctgttcttgtactcaaaatgaataaagtggattggcgcatgtgcgtcgactatactgatctcaacaaacactgttcgaaggattcctttgggctccctagaatagatcaggtggttgactcaaccgctggctgttctatgttgtccttccttgactgttattctggatatcatcagattagcttagcaaaagaagatgaggagaaaattgcattcatcaccccgt

SEQ ID NO: 46980 - DNA, 278 bp, Zea Mays
cccatctctaaccctcttgccttttcgaaatcactttgtatcctttctaaaagggtgattatagggaaggaggcgtcggtgaacatcaaaaaatgtttccttcttaccatgttctaacctatatgcttgtgagtcacccatacatatcggacaacacagtatgtcatggacacaccaaccagaaaaaatgtcatatgctagcagatcatgaattgaccatatatatgttgtgtgtagagtaaaacgacatttcagatgactatcatatgcctcaaccc

SEQ ID NO: 46981 - DNA, 297 bp, Zea Mays
cgcgtctgggccgtattctaagcctctcggcccagcagctccgtcacccagccggcccacttccccttctccatcacactcgcaacctcgttggtcactatcgcgtgggcccacccaaatagacaccgcacacgcgtatatctgagctaacgtatgggccctaccagcagactctcaaccaccaacacatgcaatcctgtgacgcttgcgtgtgggacccgatggttagttatgtctccaccaaatcgaaacagactcgcgcacgcacagggaatcgcaccaaccttgccggaaacc

SEQ ID NO: 46982 - DNA, 345 bp, Zea Mays
ctgcctcaaagtatgaaaggcatcttcgcacttttggctccaatcgtacttaactccctttttcaacagttcagtcattggtttggcaattctggagaaatccggaataaatcgtcgataataccctgccaatcccagaaaactccgaatctacctcactgtagtcgggggtttccaattcatcacctcttgtaccttctcaggatcaactgatatcccatcctgagaaattgtgtgacccaagaatttaatctccttcagccagaattcacatttagacaacttggcatacaaccgatggtcacgcagtctctgaagcacagtatgcaaatgtttggtgtgctc

SEQ ID NO: 46983 - DNA, 934 bp, Zea Mays
gcacgatgggcgagcgaagactgaacataaggttgaagccgaacatagaccatatcaccaatttgaaaggaacgctcggacctcttcttatcagcttgcaccttcatgcgaagttgggcacgagccaaatgctgtttgactaaatccatcatgactttcttctcctctatccatttctgcagtgagggaatcgggcagacagcagaagactctactccaaagtgacgaggagcgtaaccatacaatacctcaaagggagaaaaacccaaggctgagtgccaactggaattataccaaaactcagctaaatagagccaatccacccatttgctggggcaagcattcacaaagcacctcaaatatgtttccatgcactgattcacacgttcagtctgcccgtctgattgtggatggtacgcagaactcatgttgagagaaacccctgccaatgcaaagagtgtcttccacaactgactggtgaaaatacgatcccggtcagatataattgccgtaggcaaaccatgcaacttgtaaatgttctgcatgaagacatgagcaactgaagctgctgtgaatggatgtcgtaagggaataaagtggctaaacttggaaaatttatcaaccaccactaagacacaattcttgccatgagacagaggaaggccttccacaaaatcaaggctcactgttcgccaggcgccgtcgggtatagccaaaggctggagcagtcctgggtacctgctcctgtcgggcttggcctgtaaacaaatagagcatgccgaaacaaagtcttgtacactcttcttgagacctgaccaagcaaatagctgcttgatgcgcctgtaagtgactggaataccagaatgaccaccgagaggagaactatgcatagcggccacaatggaacactgaagagaatcattccggccaaccc

SEQ ID NO: 46984 - DNA, 833 bp, Zea Mays
gaagaggtagtgaaaagaaagataaaaaatgaggagaaatagaacaagaagaaggttgtcccaaaaccaaacctaggctagtcacctctcctctgcatgctcaagctatagcactagaagaagccccataacatccatgatatgaggtacttcaagtagttaaagtctctgggtcacaagaattccacccatgtcatgtctaagtggggtagtgttctagtaaggttgttgttgtggagaaaaagaaaacgtaggctaatatatgcaacagccttgtggtggatcagatcatccaaacaagcaagtttctagatgagaagtgctcacccaagtttcatgaataaagcaccaaaatatcaatcaagaaacaatccatgggtatgaagtgttgttcctacatcagtaaaagaagccacgagtcagatcagataattgatgcatgtaaattattggatgaaacaagctacccaataagtggacagtgaattagatcagataattggataaaggcttgtgtgttggcatcgctcctttgctaataagttagctgccatgcaaaagctagattttgaggatgaaatttgaacgaccagaaaccacgttaataatcataaagaagatgctcgtcaaaagttagatattattgaagttccatcttcgagatgaagtctacagtgcgaagatatgtagctaaagtacaactacacccataatccttctaaaaccaaatctcgaggatgagattgattttaaatgggatagatttataacacctcgaaaatttactctcagaaaatttcttgaacttgctctaaatttaaaatgaatttaaa

SEQ ID NO: 46985 - DNA, 817 bp, Zea Mays
aacaagtaaaatgggtatttattttgaattagctattgatcttgtcacacattcaaaacaactttttttcctaaaaatgaataaagcgcacatttaaagacatttgcataattaaaaaaatataataattaatataaatatacataaaataaaatatgcattttatgctggagtttattgcttgtccatatttttaatcttggttgaaattaaaattggactttgcaaaccgaaattaaaaaaaagaaaaactaaagaaaaaagaaacagaaaataaaaagaaaaaaagggaatggagacatacctgtgttgctgccgctcggtccagctttggtgttaagcgtagcccacatttcttttttttccttcttctctcctgcccctagaaaaatcacttttttaatcaatgatgtcaccatgacattgtgactgatgtcatccttgaccaaatgacatgtggggtccgactaccagaattgattagtttagtatttatttattccccttgctggacttaacgtcagctatgtggtcatccatgaatttttcgtgtcgctgctcccatgggccctagcgtcgggtctctccatccccgtacttctcgcacctgaatgtcacgggatcaagaatgccgccaatcgaggttcgttgagtcataaccgctctaggtttttttacgatttttgcgtaagatagattcggacgtcagggtataaaaactaaagcatcgtcgccccctgcataactcgcataggtagaactcgagtgcagtcgtagatagataagggagggagatcatcagcgccgcctgagtcat

SEQ ID NO: 46986 - DNA, 430 bp, Zea Mays
attagatctccctttctccaaccaatcacgtctagtttcattatgcctatgtaatgatagatccatgaaggctaaggcaggatcaaaatcactaggttcaggcatatgtgttgcacgttgaatgcatatacataggttgtagttcatgaacaccaactcatgtagcttctcacaccctagtctgttgcggagctttgtatgaatgaaagcaaatgtactacaattgtgctcacacccacttaatgaaacacattgtgcaagaagccgcttcgtaacacgttgtagagttggtgtctctaacccaaacatagcccaccagctggatgtagatgtattgctgtcagttgacattctccttgctaggtcactagagaattctcctcttttcctcttgaagaactcataccaacaagatacaccttttttggaa

SEQ ID NO: 46987 - DNA, 522 bp, Zea Mays
ggtttatataggtgaatatgagtgaagtgtgtgcttggtttgaatttaggtgaagaaaagagatttgggcactcggctcggaaacgatcgctcgaaacagggaatttggtgaaatttaagcctggaatctcggattggcgtgaaatttggcaagagtgttactgaaagtgttgtgaagatgcctgaaaaatttgggttcaattggagcatttttggctggtttgggcatttcaccgagcacgtggcgtgcggggaattaggttttcggtgaaatggccatttgaggtgtgaaaaccctcccgaaggagctaagaacctgcaggagagttcaaggcatacataggaacacattccaccatttggagtcactgggattcacaggatttggagaatttcacaaacggtggaaatgggagcctgtgcacaccaaaacagagagtgagagagaactgagggagagatggatgggctgctcaccgagagggagaggacgagcccaggcacacgatcgccggagcacgg

SEQ ID NO: 46988 - DNA, 580 bp, Zea Mays
gcaggggctagctcgcaagttttcccagactcagtaaacaccccgacgggatggcgggttgattcaatgaaaccctagggtctcatatggaaaattacccgagcgaaagggtatcagatagatctggccgttggattctaaatcaacagatcagattatctgaatccgtaagcgctgctagcccatgaatctaagatctacggcctggattttattgaagcgcgccctgattccagccaccagatcccgatcggagggttctgatcgcacgcgagggactctacatctaggatctaatccgcccgcccattgtccgatcaatggctggacacaacgtccccaggccaatgcccacgccaaacccgacgctaccctattcccagaagaaacaaaacgaagcacggagggccttacccaagggtgacggcgcagatagcggttgcggcggcccggtggagttccacggccatcccccggccagttcgctcgactcccccacgaggacgcccagtgaacgcccgcaatcaccaatggccaagcggcgaggtccgcgcgagttgaccacggcggccacatcgtt

SEQ ID NO: 46989 - DNA, 568 bp, Zea Mays
cgagtttgaagcctttaagactgaccccaactgtgcaaggcaaaatggcgcggcaaagcactagtatgcaatatgtgcaatgtttggagcacaagaaaaaagtgagaggcatccaacatgcaacgcatatggcgatgcattaggcaaaatcgtagcatatttattgcgttcacacggcgcatttattgtgttcacataacatgtgtgtactgctgtctgctgatgagcaatatgcatagtggagactggagatgatgtgcattgttagctctcctagaccacaacatgccgaatgcatagcaactctgcatgcattgttggaatttatgcctcgcgtgaacagtgcccgtgggggaggcatctcgcgtatgccttacatgatacataccgcgttggagtcggcctaagaggggaaatatgtggtgcaagtgcgcaattaagctatctagtgtattcgatcaaaatccaaagataactgcccttccatatagaatttagtacatattttacatttaaccccttatatataaaaattgtttggatggataccctagatgatttaatgatc

SEQ ID NO: 46990 - DNA, 422 bp, Zea Mays
cttagtgtagcatgtgcttagatagaagtcttgatggttggattatggtccgcctaccatttatgtaacctgattgtatacaatggtttactgtatgtgtcattatattttatatactattcaatatgacttatgtgtgtgactattgccgtataattaggtgtaacttactgcccgataaggcgcccaaaggggaaccccatgttctagttctatgaaaacttgaatctatttgcatagatttgtaaagctagggtttggattgagagttatcttgagaatgaggaaggagagcaagcaaagagagagggagagaaaatgtggatgccggagagaaggacatggatgtcatgtgtatatagaaatatatcccacacgagatagttggaattaaatgttttaggttggaaagcagacgagtg

SEQ ID NO: 46991 - DNA, 300 bp, Zea Mays
tggagaacaagaacatgcttgatgcttgtacaagcggtcaacggtggccggctggcaatggcatgcatgattggaacaccgggctgggatgcatgattggagcggcggacagccacgcacggtcgacatgggacacgggagtatgggacacatacacacttgacgttgaccagtaattgattccatcgtcattaatccgttactccctggggctttcttacattatcctaaaccggacattaatatatctgaccatctatttttaaacctcattttaattttgtactcactccatccaaa

SEQ ID NO: 46992 - DNA, 500 bp, Zea Mays
aaatgaatgtgatcgatctctcaaatgtggcttgaagttgatcacgcatgtgtcgtgttgcatctcggttctaaatatgctctttatgctatttatttggtattattgatgcatttttcattctaaattgctctagatagtttaatacaaaaatttgcattactcaattacataatatgtatatgcatgcatactaactcttggattggtcgaaatgtccatatatgagcaccaattcggatttgaaattcaaaatcagaaagtggacagacattggaaaactgagtatcaggccgcggaccgtccgcccatggaccgcggatcgtccgcagcatcaggaactggatagttcgatcagcaatgcagaccgtctgacctcatcagggcgcggaccgtccgccgcccctgcgcggaccgtccgcgacaggcagtaaaatcgggcagaggccgcagacttgtcatttgtgttccttgccccttctctcttgctccccactcgc

SEQ ID NO: 46993 - DNA, 836 bp, Zea Mays
cttttccatgccatgaataacaaattcattcttcatgtcttcgtcgtcctgctgcatttctaggggcacgtataggggtgctggatcccaacatgtggccctagtgatttagtattaaataacatacaacgtgaattattaaatgtgtggcaggtggagatattcgtcgttggcctttgtgcggatcttcttaccgggcgcgtctttgtcccgtcctgtcggcatgagttgctatggagtggagctgactatgccgacatgcgcaggagttatgatgatagacccgagctgttatctctgatcagtgttgcagagggtgttttgcctaggtcagtggttgttcatggtgggcaccacccacatgcacgacactgagacacatctgcccacctcggtaatgcctgacttattgtgcggccattcgagcctccacggcctgtcaaaagctggcatatgccctatgctagcatcacatggctcaaccacctgtattaaatgtgggtaggcaagcaggcttccatgcgaaggtttgtgccatgtgtccatgggccacatggcggcaccggacctttaccggagaggagagcggggaccaagagcacatgctggcttgaagacttgggcctccccttgcttggagtccgaatggtatacgtggaggtctgggacccatttgtggtggtctaggctcatggtagtgtctctgagcattttcaccccaaggacacgtggaggcaccggacccgtccctgagcgaggagcgagttcgggggccaaaggccctgtcagacgggtccaaaccctagtctggctacttagtcccttagaacgtggtt

SEQ ID NO: 46994 - DNA, 688 bp, Zea Mays
gaaggcctagctaaaataatacagggaggctactgcaacaactacccaaaactagtgaaagagacataaaaacaatggcagtatttaaaacatccaacaataatgtcggtgttttgatccgagggtcctaaccgacaagtgaatttatgctacgtgtcccggtccagatgtgtgatacaggacgacacaagatttatcctggttcgggcaagagacgaccctacttccagcgtgggggatgagacttatattatctagcacctaggtgctcatagtaggggatacaagtaggacgagagtgggacagagtcccatgtctctaagagtgattgaggcgagtgccaatatcgggagtgaagagcaaacggtgaagtgttgtcccaaccctcctgaggaccctggactcctccttttatagctgcaaggggaagcctaggagtacaagggttgtcgtgatgcctttgtgtttagaggggatgaacccgagcccctgtagcggtatggggcgacaggatggcccttgtcctggacgttgtctttgatcgggagaaggacgtccgatccctgtaacctatgctttgaccgagtagagagccgaggccggggtcggggctcggacgcatacccgagtctatccttgtcaggggcgcggatgagacatttgtaagtatatcgagtcgtagtggtt

SEQ ID NO: 46995 - DNA, 566 bp, Zea Mays
ccagcattgaagtggccatgtgtgggcgatcagctttgtgaattgtgaggggttgcccgaatggggagagaacttctggcacgcttcgcacgacctcgtgactcgatttgcagcgcagattatagcgggccagtagaaaccttgacggatcatcttggcggcgagggccctaggccccgactgagagccgcaagtgccgctgtggacttcgtgcaggatctagaggccttcggtctctgtgacacatttgagcatgggttgactgatccctttcttgtatagctggccctcaataagtgtgaaatcccggcttcggtgtttgaggcgcttggcctcgttgacatcacctggatcgtaatatccttgcaaaaacagggttattggggcccgccagtcttcggccatgatgaggttgacgatgcgatggccctcggcgttggtggttgtttgcagaccctctgggttgcggacgactggtgtgccgatgacgtggtagaacacgtcggagggcagggcttcgcctctggctgctgctttggctaacgcgtcggcttcttcgttccttg

SEQ ID NO: 46996 - DNA, 580 bp, Zea Mays
ggtgctacacgtggggaaagagatggcggagatgatggggtattactcaccgatggtcgagcggtgaagaggcccatccacgaggtagtgcggcccagcggtgaaattgttgtgccgacgagcaattaccggttcccggatcgccaccagagcccggagaccccacgcagaccaccagtgcaccgaaacgattccccagatacacccgtcgaggccccgtcggtggtggttgtgtgttgcggcgttggcggaacaagtggccatggcggcggccgaagtcttctccgaggcggctatggagggcacgactgcgcggctagtgctaaacgagagggcaagggaaggaggtggtgacgtcaattcttcccatataagggccgaggcgatagggaacgggtttggtcagctccgcccgggaggacttccgcgcgaaccgcgcggttgggtagaccgttgaggaacgcgatggcaaccgggagatcaactatgcagagacgcggaccaatccgtagagtccaagcaagtaggcgcgttcctgggatcacggccgagccggtcagcgcgatccgatccttgcgag

SEQ ID NO: 46997 - DNA, 492 bp, Zea Mays
atttgcatcaccgacacttgtaacctcatgcaggcatccttcataattttggcatcgtcttcatgcttttggagtagcgtccaagaacgacaccaataaattcctctgaagagtacctgcatataagtttgtatagggcttttatcaaaaacaacatcatttctacacaaccataatgcccagcaaatggcagtagcaccaaccaaaatcaacgacctccacctaacatttacatttataagccaactattgtaaatgtcctcggttttagtcggttcttttaggccaaaagtaaagctaacaacccgccaaataaacttggcataatggcaatcaaagaaaagatgttggatcgactcgtcgtctgaacaaaacacacactttccgttgccgttccaatttctttttgccaaattatccttagttagtataacccccttccttaaataccaagagaaaatcttgattttaagcggaattttgagcttccac

SEQ ID NO: 46998 - DNA, 357 bp, Zea Mays
agatatttgaaaagtaatataagttaatttgtattctaatatgttggctgagccatattttctgcgatgaacctaatcttaggcctggggatagcctagataaatctgtttctcccccaaaaagtatagttccaagaaattgatgttggtgatacagttgaggaagacatatttgaaaagtcatataagttaatctgtattctaatatgttggctgagccatattttctgtgatgaacctaatcttaggcctggggatagcctagataaatctgtttctccccaaaaaagtatagttccaagaaattgatgttggcggcacagttgaggaagacatatttaaaaagtcatataatct

SEQ ID NO: 46999 - DNA, 960 bp, Zea Mays
ggtgtataactctcatacttgagttaaagaggattctcacaccatcacactcaggaatatgttttgtaggttcaccatacttgtattgaacaagacctccatatggaccaatcatcaacaacacttcaggccagtagatggatacactatcgagtccactccaaactatttgctctgatgacaacactaagtctgcaagaagcttgccaatgattgcaactgccatcttctgtccaagtccaatctccaggtctccaccgttcctctcttctatagggtaagccgtaactacgagctttaaaaggctaaaagaatttgaccgagcaggtctaaaatcatgctgcaaataagggtctgatgaaccaaatactttctccttcccctcatcattttcatcctcatcagtatcatattcatcaaatatgatctacccaaccctgctactgatgaactctcgagagatgctaccattagagaagcattctgccaactccttcaagatctgcttcacagcctcagagctccctgcaccattaaattcaacggttgattccaaagccaaaagttgagagaaaataccgccaactccagtagcatcagcattttcagccgttgtgccaacctcttccactttactaacagcagcctgatctttagctttctgctccttctccaggctatcctctagcacactgccagccctagcaggaagaaactcctccatgtcattccagataggctggcccaacaccatcactcacacaagtccaacacagcccacacgatttacaacaaaaaagaaacacacccctaatcatcgcacgacaatggctcctcttcagacttcagcttctactacttctgtcctgcttcatcaggtgtgacactgcagggccctggagcagcaacaacatgatggcttcaggggcggcgacccattgccgctactgggcggcaccc

SEQ ID NO: 47000 - DNA, 444 bp, Zea Mays
ccagagtacgctcgactgcaagggtgacccgtgaaggagaggagatcgaagccaccgagacagccccgatctccgaaatcatgagacaatcgggattagttgtgacggattgggccattgacgaaggtgcacctactgccgaagctgaacaagctgatttagaggttgaaaatgttaatgaagaagaggaagactataacactctgatcccaacaaaacccagccacttggattttgaaaaatctactgtgtctgaggccgatgtgcccatgatgatgaagttgggttacttcggagaagccaagaagaagcttattcgttttgccggagaagaaaccactccaaagccgaaagatgacgaagtagtagttttcaaaagctttttcagagcaggattgcggtttctgcttcacgagatgattggagaagttttggataattatg

SEQ ID NO: 47001 - DNA, 505 bp, Zea Mays
tgggaccacgaagcaaaagctcgagctcgtgtggcagagcttagtgcggccctcgacagcctgcaaatgtaatgtaatactttacatgaggaagtacatgtattgtatgctcggctgcacccggacgtgcctgccgacactgctgcaatgagagcaggaccatcgggaacagcaaatgaaggacctgatgaggagttggacctttttaggcctccttcttccatgaaccttgctgacgaacagcctcctgcagcaggaaatgaagaaaccaaggatgatgaagactagaatagtatagtaagatattatacttatgtaaaataagtagtgatgtcaagttgtacgctggagtctgtataattattacattttggtaatgtaatatgatggtatatgttggcatgttatatttttcccaaatgtttctttgcctcagatgccatcacggactcgcgcacatgatggggcgaggacttcccgtggtcaggaagatacacccaacccg

SEQ ID NO: 47002 - DNA, 719 bp, Zea Mays
ccgaaggccatcgcattgtcaacctcatcatggctgaagattggcgggccctaataactttgtatctgcaaggccattaccatccaagtgatatcaatgaggccaagcgcctcaagcaccgaagccgggacttcaccctactcgggggtcagctgtacaagaaggggatcagtcagccatgctaaagtgcgtgactaaaaccgaaggcattcaaatccttcatgatgtccacaacagaacttgcggctcccactcaggacccagggccctcgctgccaaggtgatccatcaaggattttactggcctgcaataatctatactgcgaaccgagtcgcgaggtcttgcgaagcatgccaaaagttttcccctcgctcaagcaacccttcgcaattcaccaagataattgcccatacatggccacttcaacgttgggggctggatattgtcggaccactgcttacgggttaagggaacctcaaattcaccttcattgccgttgaatacttcaccaagtggatcgaggccagagaagtatccacaataacgtcgaaaaccacccaaaagttcttctagcaaaacattgtctgccgcttaggagtcccctccgaactcacagtcgacaacggcaaacagtttgacaggcaagacttcagggatttctgttcctccatcggcaccaagcctgtcttcgcctcggtataccaccctcaatccaacg

SEQ ID NO: 47003 - DNA, 475 bp, Zea Mays
cgaggcgtgtcaagtacgtcttcacttgctcttttcatctactcaccatctagagtagacgaagcttcgttccatccttcgcttctcgaaacatgcattcgtttgatgatggagttttgtcccatccttagtagcctaaagcagatgtccgaagcctttaggagttgtttcctagaaaaacttaaaacaacagacatcgttatacaaggacctttggcaaatccttctccccaatagtagtctctcacatgatttgttcgttttccataatgtgatcaaaccgcgaaactcaacaaagtgggctttgcacagaaggtctgaaaaacacctttcattgaactcgttattaaaaacagatacttgtcgggcactttttttgcgtttgaaaacatagagtacacaactaggcccacaaggcactgggtataagcccattcacctccatgtttgtcatgctttctttcctatataagcc

SEQ ID NO: 47004 - DNA, 327 bp, Zea Mays
caccgaccactacagcctcaagttccttctcaatcagcggctcgcgacgatcccacaacaccactgggtgggcaagctcctcggttttgacttcacagttgagtacaagccgggcaccgccaacaccgtcgccaatgccctgtcccggcatgatacctgcgaggagggggcagtcttgtctctctcggcacctcgcttcgacttcatcgaccgtctttgtcaagcacatattcaagaccccgctctcgtcgccatccatgatgagattaccgcaggcaccaggggggcgccgtggtccctcctggacaacatggtggcttatgccgc

SEQ ID NO: 47005 - DNA, 923 bp, Zea Mays
cgcgcgtgccccgggctttctctgctccgtgagcccgcgttgtcagttgtttcctcaacccctctccgagccagccgcaaccgaagtcgaggttggcaccgacccacgcggattgccgccaaagcaaatcccgcctcgcatagggtgtgaggttataaaagcgtgcacaaccctgtcccctccctggacccagccacgccctaagcgaagtctcgcaccatagagaagctaagcgaaaccaaggaaacagagttcctctgccgcgatggaatcacgggttcaccaccgttcagggtctgggatttggtctgggagcttcggcccactccaccgaatgtgtagtgggcggaattgagcactgaggagtcaccgggtcgcatgaattgctcgtcgaaatcatctctccgtcgcggaactgagtgtgcacgtgggcagcttccttcccatcatcaccattggtgagtcacctgcccattcaatcaccgtcatcccagcatcgtgttgcgctattaggaccgaagtttagaacccgtgtgtgtgaagtgggtgggcacggccatggcaccgtcgtgctgaccatgggcgtcgccgggttgggtagccgagaggtgagagatgggccctggcggtcgatctcgggatggacggctcggattcaaccgaggccataccggttcgggattggatttcaaccgtcgatcggatatcgaacggtcgggattaagagaaacatgtcgcttcggtgggtttggatccagaccttagatcttagatggaaggctaggattagatcactggtgttttaaattatggccgctgatctccgatctaaggggtaacatttcataccggtttggtttatgaagagtctaatctgggtcgttgatgtgtgatctggcggccgagatccaccaatacccttt

SEQ ID NO: 47006 - DNA, 548 bp, Zea Mays
aagcaccgaagccaggacttcgtactagtcgggggccaactatacaagaaggggatcagtcaacccatgctaaaatgtgtgaccgaaaccaaaggcattcaaatccttcgcaaagtccaaagcggaacttgcgattcccattcagggcccagggccctcgctgccaaggtgatccgtcaaggattttactcgcccgcaataatctgcgctgcaaatcgagtcacgaggtcttgcgaagcatgccaaaagtttccccctcgctcgagcaacccttcgcagttcaccaagctgattgcccacacatgggcacttcaacgttgggggctggatattgtcggaccactacctacggctcaaggcaacctgaaattcacctttgtcgccatcgagtacttcaccaagtggatcgaggccagggcagtatccacaataacatcgaagaccgcccaaaagttcttctggcaaaacattgtttgccgattcggagtcccgtccgagctcacagtcgacaacgacaaacagttcgacagccaggacttcagggattt

SEQ ID NO: 47007 - DNA, 299 bp, Zea Mays
ggggaggataagggacacacgacaaggacgtgccaagtcacgatccaaaagcagaaggagatcgctgaagccgaagcgcggcagaatcagctgaaacaggtcttgcatactgcttcatgctattcgccacatatccctgaatatgtgggcatccagcaacccacgacgtcggttgcttcggtgagtcattctcaagctggttgggctccgttaccaccaccaccactaccactggcacctaccttggttcataatcagcagccagaagggcatcgccaggcgcaacaacagcgcgatac

SEQ ID NO: 47008 - DNA, 447 bp, Zea Mays
ccatgccatccctagcacgttgctagcgcccctagctgccgctactgtcctactgtcgcacccctatacgccaaagcggattagcaaagggcaggtgagtggtggcggcattgatggttgccgcaggcatgttcatgaactagttcttgggctaggaacgagctagaagacgaggaagagatgacaggagcggctccaccaccataccttgttttttgtttgtgctccaccactaggtgtgtttatgtgattgtcgagctatgatcgtccttcaaagtatgataatatcttttgctctcatcactccagtcattgtcatcgtgcttcgcgcatcacttaggacaacgaagagcatgccacatataatatagcttgaacttagtttctttgggctaagcggaaactctcttaggtcgcttcaagcaacatatcatcgtcttctccact

SEQ ID NO: 47009 - DNA, 689 bp, Zea Mays
tacggcatcagcttttgcatctgattactttatactgtatgcagatagatactgatcctgtactcgtacgtacgcgtatcctatgttgattataatcatcatgcatatatactagcattaacttgtaggtagccaagctaagctagcatttgcggcggtcgatcgagacacgtagtacagttacctacctactagctctcccgagggtagctagttgtctcgtctcgtctccctctcgctagctaccatgcaagcatgcatcatctcgtctcgtcattgtatcgtacgccacatcgttatcgtttgttctccgttcattcatccattcattcggcggtgcagggtacttggtacgtagctacgcctagcctcgctcgtagtagcgtcaccgggaactgggagtgcagcgcaatgcgtgcagcagcaggttcgccaaaccatttttccataacagcaacagtaactattttcggccgctggtcgccaaaaaatagctagttaattttggtgttcgtattatttttggcggtttctaacacatctgccaaaatttaaggttatttttggtggcctccggtgccgtcgctgaaaattaacggttacaaactctctttttattttctctcgactcgacccgagcccgctcgttcaatttctcccactcgatgaccgctgccgccctaaccctg

SEQ ID NO: 47010 - DNA, 621 bp, Zea Mays
gttacttatcagagggctatgaatttgatctttcacgagctgttaggaaacattggggaagtctacattgatgatattgtagtcaaatcggctgagtttagttcgcatatagctgatttgcgcaaagcatttgataacatgcgccggtatggtctgaaaatgaacccacgtaaatgtgcttttagagtgtcggctagtaagtttttaggattcatcattcatgaacatggtatagaaatagaccctgtctaaattaaatccattcagaaggtgtgacctccgacctgtaagcttgagatgcagaaattcctcggcaaggtaaattatttacggaggtttatttctaacctagccgggaagattggtgccttcactcctatccttcggcttaaaacgatgccgaattcacctggggggcagaacaacaggaagcgtttgatctcatcagaaagtatttatcttcggctcccatgttaaaagcaccacaggtaggagtaccgttcaggttatacattgtagctgaagataaggttattggagttgttctgacgcaagagaccggaggaaaggatcatgtggtgacctacctaagtcggaggctggtggatgctgaaacaatgt

SEQ ID NO: 47011 - DNA, 582 bp, Zea Mays
gagcatcggaagatccaggcggggctggcgcgtagaatgggaagaatgagatggcgttgtggtcctgcacttgcgatgggatgcgggtcgatggtggtcctgtgcgctggatggcgacgaggggattgggttgcgattccttccattgtagcgaggcgtggattgcatttggggcacgaaggatatggatggggcatccgcggtgcatgggaagaaggattgtgcaatgggtggtcctgcgcgtcgtcggcaatgggattcctgcgtgctggattgctgcgaggcgtggatagcggcaaggggatgtgtttccttctgtggcagtgacgagatttttccttccatggctgaggcattaatcggtgaggggattgtggcgaggaccatgcggatgcaggggtagaggggagagggcgcacacggggaagaagggagacactaacatgtgggtcgtatgcgccgtgaggaggcagaactatgcaccacggtctacattaggttcttatagagtagtagagatataataacgactaaatattaatgttggttacataattttcatttaaaaagcatcattctttt

SEQ ID NO: 47012 - DNA, 390 bp, Zea Mays
caaatttggagcctgttaaaacgtttatttctcggagcaaatgcaaattcgagagtcaattacgtctcgtaactcctgtccagactcatttattcggactcttgacagttgtgatattatccgatctatgtccgaatccgctgtctcgatagtcggtctacgtccaaatacttaatctgaatccgcattctcccgcaagatctctttgtgcgaacctctaattaattcttatgcaactcgacttgttttctatatatcatcatttatctctatctatcaagtgtattctaaagatttcccaaagtttaaaccaaatatttgtatgaaattataaaccatacgcttgcttgaaactgctcgattaagtaaaagaaaatttataaattcaac

SEQ ID NO: 47013 - DNA, 393 bp, Zea Mays
ggaatatttgtggatcaaaaatttggtgccgtgagggaaactaagtgagttttgagttcatatgatagggctaagatgacttacttgaccaccctacctgtgtggtcacccatggacatcgagatgtaccaacaggcgccatgaccgccgcccgtcgacgtcgagatgtgcgagcatcggtcgcagccatggcccctcagggtggttgtgtctgtcccggtgactcacataaggatggtggtggcgccgccgaacggtgagtttgtcaacttcactgtggagtgcgactggatgctcgtcggcaagtcctatgtgcccgggctatccaccaatcatgcgaggaggaggttggatgccaaggagattgtccatttcgcctttcctttataagag

SEQ ID NO: 47014 - DNA, 971 bp, Zea Mays
tatttgtaatggctaaaactttctctaggttggcctcgataccctgctcgaagaccaggaagccaagcagcacccccctcataatgctgaagacgcacttttcgggactcaatttaatattgttagccttcagcttatcaaatgtttccgtgaggtcatgatgaggccttcggaccgcttggccttgaccatgatgtcaacgatataggcctctatggttcttccgatgaggtcaccaaaacatttgatcatgcaccgtttgtatgtggccccgcgttcttcagtgcgaacatcatcattatgtagcaatacgagccgaaaggagtaataaaggaggtcgcaggttcgtcagactgcttcatcacaatccggtgatagccttagtaggcatcaaggaaacttagcacctcacggtcggaggtagaatggaccacctgattgatgtgcaggagggggaacggatctttcgggcacaccttattcaggctggtgtaatcgacgcacattctccacttctcgcttttcttttggaccatcacggtattggtcagccactcggggtggtaatctctcggataaaaccggtagtgaggagcttactaatctcttccccgatggccttgtgtttttctttgtcaaagaggcacagccgctgcttcgctggcttcaatctgagattgactcgtaaatagtgcttgacaacctccctaaggatgcacttcatgtaagagggcttccaagcaaaaatgtcattttccgcttggaggaagtcgatgagcgcactttcctattttggagagaggttggatccgatgcgcaccgtccgtccgtcggcacattcaggatccaagggcacctcttttacatcattcactggcctgaaagttgtgcccaccctctttgcgttagatgcttgctcatctgtgcaccatgacaacttcgagagcttttgtttcgcagtgactccctcg

SEQ ID NO: 47015 - DNA, 318 bp, Zea Mays
ttgggcgtagtgtctggcttctagtatttcttcttgggatagtttcttccccgaagtatgtcgaatgatgtagtcaacattttcgttcggagcttcgggagcaggagcttcgatctttttaggtgcaatctgccctgccgttgtttccttaggcgcgacaggctccgtcttgatgggcactgaaggcccagcttcggcttcggactgaactttcatagcttcgacaattttcttaggtgcagggctcagggccttcgtagtctctataacagcgtctaatacgctggccatcctcctcctcttgggagttgtggcagg

SEQ ID NO: 47016 - DNA, 371 bp, Zea Mays
ctaagagcaaattaggacaagcaatcgcgtcatatgccaagtgcagtgtatatatataacaaaccttagcatggacagaaaataaaaattgcaccgaaaaggggacagattccattgcacacctaagcaaggtagccccttggatctccctataaatgcgcaggcagcaatcccattagagtgtggaagcagcacgcaacactgtctcctcccctcttctacctcgacccatcacctttgcatagcatatatagcgcagcagctcactgcaggcagacgaaacaccatctcttcacatcacatcagagcagagcagagcagagcatcacccgatcccgatcccgctattcccagcctgcagtagcagcagc

SEQ ID NO: 47017 - DNA, 392 bp, Zea Mays
agaatgagagagaaggacaccttaaatatatggtgtggttccatattcttttttcctcactactctgcacagtatcttgtacttgtcatcaaacactctctctcgtagcttctgccaaccaactgtagtcaatatatccactgatccatcgcgatgccatggtagctacctccctaccgaactcgttgctgagcaagcagatcatgaactaggagaatttagataaggtgtgtcgggtcctcccttgtcgccagcctcaaacaatatacgtattgtgatgattccactgcgcatgcctcaagagagtgtgggagagtacatattctactcattcgtgatggtgaggactatcatgactgttccttcatatcatagagtactacgaccttcag

SEQ ID NO: 47018 - DNA, 384 bp, Zea Mays
gctaaagatgttctaactgtgcctgcttccactgtatcattagagtccacttttagtttagctggcagggtgcttgaagactagcggcgacgcttaactcctgatatggttgaagttttgtcctgcataaaggactgggagctcgatgacttgcatagtcagcacacggtggagaaagacaccaaagaacttgaagttgtttttgaagcaatgtacctagaagaaactggtggaggcaaagaaagaagaggtggaggatctggtggagctggtggaactgtgggtaaatgaactatgtgacatctgttgctattactactctattcttctgttgtaacttgtgatgaactattaaactctggacttacattaaacctatatagg

SEQ ID NO: 47019 - DNA, 273 bp, Zea Mays
gagaaggatagtagaggagaggagcagatcatactttgagctaaacatcgaggtggtcgatgttttgtagcaaccccacgctcggagtcgacgacgtcggggtcagcggcgtgctccaaccaatcttttccatcatgacagactggtaaaatggaatgttagatgatccaaacaattttaactaaactaacaaggaccaagaatggtgatgcatcgaaaaaaggtaagaaataaatcaccctggaggctaggcataatgtaacaccacgtgat

SEQ ID NO: 47020 - DNA, 529 bp, Zea Mays
attgatatggcataggtggatattggggcgggggtgtccatgtagggacattaggtcttaattgaacattatgacctcccgtcctttccgtttggtgaggtgatccaatcggtcttacctgccgtcgctcctgagtgggtgagcgaggtcgctttggtggccgttcacttgggccgaccttctttttcacatacttagacaataattgagcaaaggtcgggccagaattgaccagtcgaccagctgccttgaatgtgttagttttccatgtacctatttctggtcgtcgtggtttgaaggtacgtggtcaccgtggttcctgagcgttgccggaccgtccgctggagtgagccgtactgtccgacggtgtctcagaccgtccgtgtctgtgcgtcggaccgtctgtgatgcgcagaacaggtgctagcacctggtttcctgcctacgcctgtccccccagcgttggaggtggtgatggtaactttcaaagtgtcccctccatcaggagtcttttccaccaccactttcc

SEQ ID NO: 47021 - DNA, 288 bp, Zea Mays
aacgccgacagtgtcaagcacgactcagtaattacctctaaaacgccaatatcatcagttatcgctcgatgattatttctaaaaacgctggcagtggtaggcgcaaagacgaactatcaaatgattataaaggaggagtggcgaaaaaacgaaagttttctcagaacaactaaaacttcttcattacatagtggaaggggtcttcgcaaactcaaagactgacccattaagaatcagcctttttcccctttttactacattacattactacattactcacattacact

SEQ ID NO: 47022 - DNA, 1173 bp, Zea Mays
cgttgatgcactcagtgatgcgatatggcccaacgaaccgtggtttgagcttgcccttggacagctgcggtagtgaagaggcagcgtgctgtcggaggcgtagaagcacccaatcgcccacggcataggagaccggccggtgcagcttgtcatagaaccttttctggatggcttgagcttgttccagccatgtgcggacgtcagtgagaagttcctcctgagcagccatggtctcggccaccgcagccacccgcgtctcgcctggttcataggaccagatagatggggtcccttccatacactaccttgaagggggtgtcccggagtgatgattggtacaccgtgttgtagatgtactctgcccatggcagccaacacaaccactgcttgggtcggtcccctatgaagcaccgaaggtacatgacgatgattttgttggcagcctctgtatggccgtccgactgtgggtggaaggctgacatcatatgtagtttggcccctgatagcctcatcaactcccgccaaaatgttgaagtgaacacggaatccctgtctgacaccatggattgaggcatcccatggaagcgaacaatctctttgaagaacgcttgtgccacagactcggcactgtaggggtgagccagtggaatgaaatggcaatatttgctgaaacggtccaccacggtgaggatcaccgacttgcccccaacccggggcaaagcttcgatgaagtccatgccgatgttggtccacacgacatgtggaatgggcaggggcagcagtagtcccgccggatggagatgctctgatttgttgtgctggtaggttgcacagccgcggacgaagtcttgcaccacccggcgcatggcggggaagtggaagtcgtggcatagtcgatgtagagtacgttgtaccccttcatggtcgtccccgtgtacagccgccaccaattccggcagcagtagcgagtccgggggaacgtacagccgggtggcataagccaccatgtcgtccaggagggaccacggcgccccctgctacccgcagtaatctcatcacggatggcgacgagagctaggtcttgaagttgagcttgacgaagacggtcgataaagtcgaagcgaggtgcagagagagccaagactgccccctcctcgcaggtatcacgccggg

SEQ ID NO: 47023 - DNA, 849 bp, Zea Mays
ggcagcagaactaacttcgctaggctttccttgaatgttaagaactagctgacctggcttgacgactgccggtttcaactagaggcgatgcagttggaaaaggcaaccatccaacaaggcctgaatggcaccagcctttagcttgatgagaaggcgaaagctatgatgttcctctggcgccacatccatcttgacctgaagggatggagtatctagaggtgaaagatcatctgctactctggatgaagctgcgtgggcgtattggtttgcagaagcatgtgatgctcctgcgtgcgcaacagaattaggccacactcctcttcctcaacttcaagacagtggaggctaataacattgacatccaccacattatcactcagctatgtttctgtggctagattgtcatggacatcaagatgatcaagaaacctatccagaccttccacccctccaacaatgtgctccagaagcagcacaacaacaagtacacaaagtactgcgaccttgtcaacatgttacttgctaccgaggctcagaacgggctcctaatgcagaactaagtacacactaacttctagtgttaggggaagaaaggtccatccagaggaaggggtcatgggcaccacgataatctaggacccagaggcgggaaatttaagaagtcgccatagagtggtagcatcattagcagtgtcaatgacgtagctatgcttttgtcatttttaccacatggaagaaacaaaatatccaatttttttgacttccagctaattggagatggaaatataattagcatcttttggtcacatgcgagtatacaagggggatacacttatttgggagatgttg

SEQ ID NO: 47024 - DNA, 547 bp, Zea Mays
gagagagagagagagcagtgaggtgagggagcaggagcatagacaatatcacaatacaaggcagcaacgaaattccacactaccgccgccgccggagcgtaattccaaaaatttcctctcactgccttaccaagtgacatctccatacccaaccccagaaaaggttctgagagggtaaaaccaacttaatctgccaaaaattggcctgcgaaattcctcactgccttaccaagtgacatctcgcagactaatgttcctaatctgccaaaagttggcctgcaaaattcctcactgccgtaccaagtgacacctcccagactaatgaaggatagcaaggcaataggatagaaacaaacgagaaatacggggggtgtgtgtcttttaggtcagggcttctggaagtcaccacttcaatcctgagaagagaaccatggaagccctttcttgatttaggttaccctacaaaatgaaatctgcaaggtgatgccatcacgctaacaaaaccagttccacctggtgaacatttttttctggaagctcacaaatt

SEQ ID NO: 47025 - DNA, 529 bp, Zea Mays
ctagtggccagcctgctccgagtaaagatggaaaggaaccaatgtgaaagacgaagtcaataatttggcatctacctcactggaaagtattagatgcccatcgtgcaatcgatgtgatgcacctcacaaataatatttgtgttaacatacttgatttcttaagcacatatgagaaggaaaaagatacactagaatcacgggaggacttgaaagacatgaaacaatgtgaaggcctgcacctagaagagagggatggaagacaagattatttatgtcccactagatacactctcaacaagaaagagaaggacatcatgtttaaatgcttgaacaatatcaaagttttagttggctacttctctaatgtgaaaaggctgataaatatgaaggacaagacatttgtgcacataaagtctcatgactatcatgtgttgatggcacaactgcttcatattgtgttgaggggtgtcactctaaataatgttagaaaaacaataataaagttatacactttcttgaatgtagtgtc

SEQ ID NO: 47026 - DNA, 1090 bp, Zea Mays
acttcatcaggaaacacatcctcaaagacaatacttggcaaagtagagggtaagtcattaataaaaagaaggttgtccttgtacaggagcacaaagaacatggcattaggttcactcaattcttttagatccccttcctagtcatcatgactaatccctcttttcccgatgtcttggttattggaggctgtggagtttttattggctttggaaactcttccttactattttgtggatcactctcaagtgcttctcgctctctcgctgtttcttctttagatcatccttcataatttcatccggtgtcaaaggaagaaaagagattcgctctcctttatacaagaaagacaacttgttggttcttccaaaaatctggacatcacgatcatataaccaaggttgacctagcagcaattgacatgcttgcatagggaccacatcacattccacgtgatcgttgtacttcccaacagagaaaggaacattcagcacgtggctaacacacaacgctccacaatcattaagccactgcatcttatatggactaggatgacgccttggttttaattccaatctgtccaccaattcttgactagcaatgttgttgcagctaccattatcaacaatgatgcgacatagcttatctttgatcatacctcgggtatggaaaagattgtggcgctgtccattttcttctttttcagcagtcacacttagcactcgaagagggataaaacagttatgatctccttcttctggttggatctcattctcttcctgttgaatttcttcatcaaactttggtctgttgtcttctggatcactgtctgattcccattcacatttttcattcaacaacatttttcttctacttggacattgagcagcaatgtgcccgcgaccatggcacttatggcatgcgatttctcttgtacgggtagaataagtagcgactgaagcttcagtcgggtctgatgtactaacagcagaccactgcttatttgcagggaatgaaactatagaagctgccatctttgatgtaccattggatggagaagacctagctatatttccttgggatcatcctgta

SEQ ID NO: 47027 - DNA, 574 bp, Zea Mays
gccgaagctcatggttagaagtggcgaccgatgatgggggacgagcagatatattttttgaataattgttcagtctctactttgtttggcgctgcatgcttcattgtactttcacaccgagagctgtatagaacctaatactagatgtattttgtactagtgcttttcttaaatctcatggtcatgacttgcggaccacgtactcacgcaaaacttgcatagtcctatggtacgattagagacggacggcagccgagaattccccaccggattttggctcttcatactcgtcctcgtgactaaaaaaaatctctctggggattcccacgaactttttttagggggagagggacatttcttctccatcctcgttttccgcgtggataaatccccgtcgggatcaccatcctgctttaattataattatgacatatttttttgttattaatgtaaaacatcagcacttatacacatggcagatgtcagaaatcattatgtgtacatcaaaataaacatatttgtacaacgagttatctaattatttattttttatcattatagtttacatgaaaat

SEQ ID NO: 47028 - DNA, 387 bp, Zea Mays
aaaggctactggaagctcgaagttaggcgggttgaagcttgaagagccaatgagggttaaggcaaggtggtccatgagggaggtgatgatgggcggtgatggtagtatataagttaatgggggagggaagaggtagattaagaggacttggtggtctcacatgtggggtgttgagattaggagggtagggttgcatggctagaaagtggtagccctctggtgtaaatcttgaatgtttattttggatgacattattattgtggccatgattgcttcctcctatgagaaatatatttacctttttccctttgttatgtaaagtaaaaatatattattaattatccaaacaagacatggaacctgaatataaatgttgtgagatgaact

SEQ ID NO: 47029 - DNA, 592 bp, Zea Mays
tttgataattcgattttatcttttttttttgtaaaccagtagcatatatatacgtttaggtacgcgtgtgttgaccggatgatggagcgagtgaatggcggtgcttaacgagcttcccatggccgccccttttttgcatgcttttggatcccctctctctctcctgcctgtgcctgaccgaacaaattccttattagcctgttgccgatgacaggacgccgctacgttatctttcttagccgttagccctagccctcccttttggtctttggctagcaacaacagatacaatggagaatctatctttctatccatccatccatccttgagcgcatgcagccccagctcgcccatccatcgcctcaataatgctatgctatgctatctatccatcactaccctgtctcgttgcttgcacaacagtgtcactcatcacgtcacaaaccagcgatcttgggatggtacacacagcatatcctgcctcgacgtgttaccgcctgtctgattgtatattgcattgcttggattcagtggtctctggtctcatgcacacgtcaacaacgaacgttgttctctatgtcagcagttgttg

SEQ ID NO: 47030 - DNA, 673 bp, Zea Mays
tttggatgcgagtttgttacctcagtttgtggatgtagtgataggtgataacttgtatgagcttcagttcagagtggaggagaatatggacaatgataatctggaaccgatggatatggatgacttggatctggaggttggtgatgatgatcagcagaacaatggaaacaaaggcattggtaatgcattggcttatccaaatgtggacgccacaaaatcaaaacaaagcagcaagcacgaaaggcaggacagtgaaggaaaatattcggggaagaaggtagtggatctggactcgattttggaggatggaagttcagggtcgggtaaattctagggttgggtttgggtgaggagttgcaggagcatttgggagaggacaaagttggcagaactaggtcgcagccagcaggtgtgccaggtagtctgctctcaggttatgagatggtcaaaaagagcggtcaggttactctagaggtggcgatttgtgctgctgttccggcagtgtatacgggttcatccgtgtcatatcgtagccagaggagggctacaacttcagcgggagacagtttggagagggcttccaggtagaaggcgtctcgcaacctcgactccaacttcatggaaggtaatgagtcgcttgttttatgcagtctttcggttcagcaagttgttg

SEQ ID NO: 47031 - DNA, 822 bp, Zea Mays
ttagcctgaccacggtggcggtgaacaccgaacacaatttcatgcgtttcgggtaattgagcatggtcaagcatagagggttgagccgacgagtatcacgagcatgtatgggcgctaaaacacgactaagaagagcaggagcggacctaggatcggctggccacggagcgcggaggattttcgcttgccggagactgagaagggggaaaatggtgtcgcgacgagctctagtgaaattaggaggtgaggttggggctacacggtcgcaaagtgctactgattcatcgtgcactgctaatttgggaagagatggaaaggatttcgcgaatttgggcttcaaccgagttcactagtgaggtggtgagtacctcgtcgtgggtagcggagctatttaaaggcgcggtggtccggctaacgatccacggccgcggattacatcgttcgtgcatggttaccacgtaaagaagaggcacagtgagggaggagcgaggcatgagtgacaccacgacggaaatgaccgagccacggcgaccgccggtggaatatctctagccacgctcggctaggttcgtgggatggtgccacgtctgaagttatctccccgcgatcgatcccttcaccaattcatccgaacacatctgattctacagtgccccagatctttgtcttcatttcagatattttcagtgctctggatcttcaatgttcttctaaaccgacccccttccaccctctccttctcttgattcttgttaagaacagggtaagctccattaataaagattgttcactaaacaatagccttcaaacttactataggat

SEQ ID NO: 47032 - DNA, 401 bp, Zea Mays
atttgatagatgacgaagcttggatagtgttctgtgatggctcatggagaaccttcggtgtagaagcagtggttgttttaatctcaccatcaaaaataagaacctgctatgcaaccaggctggaattcaagtgcacacacaacattgcagaatacgaagcaatcctgttgtggcttcgaaagcttaaggccatgggaataagaagagcgatacttaaatctgactcccaagtaatcataggtcaggttgacaaaagcagcaaggcaagggatctgaagcttgaaaaatatcttgacacagtctgaaggatggaagcctccttcgaagaatttcagtgaaaaatatcccaagaggggataatgaacaagcagactttctagccaagtctatggcacagtggc

SEQ ID NO: 47033 - DNA, 544 bp, Zea Mays
ctggctcctacctcctgcttcgtggcggactggcggtggcggctggcgaaatctcgcacctcctgtcaacgactactggtgacggcttgtttggacatctatactcatcttctcatctcttcgctcatcctctccccttcctcacatcctgaaccctaatcgggtaatccccatcctgggctcctggcatcctcatagtagtggtgttcctcctcgtccttgcggtggtgctctcaaggcgactaaggtgctcctcgtccttcgaaccctaatctccattctccaccccctatcttatgtattagatcttgatttcctaggtatcgcttgtgtcggtgccgtgtagccgtcgagggacctcagtcgccggtgaggagccagccgtctacgacacatcagcatggacgatgaccttcatctggccgctgtggaggaggagcaccggctagaagatcataacgaagcagaggatgcccgagccctgtttggcggtagtgctgccatcaacatcgacaatgatgatgatgtccctggtgccgccacc

SEQ ID NO: 47034 - DNA, 758 bp, Zea Mays
cgaagatgtatatactgctgaggctgaagaagctggtattgaggaagaagatgctgatgaagaggaagactacaacactctagtcccatcaaagcccagccacttggattttgaaaaatctactgtctctgaggccgatgtgccgatgatgatgaagctcggttacttcggggagatagagaagaagcttcttcgttttgccggtgaagaaaccatcccagagccaaaagatgatgaagtggtagttttcaaaagctttttcaaagctagattgcggtttccgcttcatgagatgattggggaagttttgaataattatgaaatttatcttcatcagctgactcctaacgctatcgttaggctcagcatcttcatttgggcctttcgaagccagggaatggatccaaatgctgaagccttctgccgagtacatgagctacattatcagacgaaggccagagaagatgggcttcatgagaattttggctgttacaacttcgcttaccgcaaggatatgaaggccctggtgctaagctaccgcaccaagtggccaactggctggaaaagtgagtggttctatgttaaagctgatgagaagaaaagggagaagctaaagacgttagtactgagcctgctgagtttgagctacgggttgactaggcccttgtgtcgtatgtcgtcggggtcaccatgccaacaggctgtggcagaattcagagttgtgtctgagcagatcggtactagagatctagtgcaag

SEQ ID NO: 47035 - DNA, 918 bp, Zea Mays
ttctaaatctacatcagtttcatctaaaccatcagatacttcaaaatcccctttatcatctagaccaccagctaagtcatgaaccaaattggctatgtcatcttcatctaaattgtttacagcctctatatcagtgtagtcatgactattaataggcacaaagtctctttccccatgataagtccaccttttgtatccctctttaaagccatcacatatcaagtgcgcacgaacttcattttcatctttccatagagaattaacacattttctacatggacatagaattttgtttccacctatagaattgctaaatgcaaactcaataaatccagctaccccatctatgttgaccttcgtgtgcctataaatattaggtacaataacaatatgttggtcaaaggtgattactacaaaataatggtttgtagtacattgttagaaatatacctaggttcattcatccaccttttatccatgttgtaccttaacaaatataagatgaaatgtacccttcacagcttcataatgtaagtgcaaaaagggtaaaaaagagggaatcattacaagtatcaaagataaaagttgaattaattagttttttccggtgcaaatcaacaggagatggaaaagtaacaagtaaagattaccactgatcaatggatgtcgtccaagcgttgttcacgcacttctccttctgttggtacggcgcccgccctcgtcctcgctagcagcagcagcagacttatgccaaacacaaataaatatcttcagttcttcaccataaattttttatcacaaatttacaatggcactaataaatattctgaaacctgaactatctttcttcagtcttgggcaccagcagcagactacaccaccgcacggtcatagggcacaacattgggtggtgctgcg

SEQ ID NO: 47036 - DNA, 919 bp, Zea Mays
agcgaggttgattgcaagcaaacggtttggaggacgggagacagagagatcacagcggcagcatgcaattaagaatccaagaacagcagacgctaggggggttgtggggaggcaacgtggatgctcacacagtgagcagagctgctaggccaggcgcggccgggcggctgcagcgagcggtggcttgagctttataacgggcggaggagtggaggacacggatggatggatggatacaggaagcaaggagcaaccccgcgggtggggtccgagaaaaggcgggcggcgaaggaagaggaagagaaggcagcagggtaagtggtggttggagacagcacaggaagaggacgatggcggaggtgggggacaatttactgacaataattgccgggaggcgagctgctgtccactgctcactcgactcctttgttgtacctagcgatggcagtaaacatatatacggtgtgcgtgcgtgatgcctggtcggggatgcatggtagggcggagggagaaggaactcggagagacagcaagcggatggaatggatggacgtgggcgtcgcaaaagattcagacagggaagggggatagaaaaggaaggccgaaggagaagcagcagctaccactctcgtcgtcggcgacgaagcagcagctagcaagaggagggagaggacggatcggctgaggcacctcttcgccttcggtggggtgctgcctttcgtttccgttgctttgcttgctccctcagcagcctaggactaggagtttcttgcagggctgggactgggttgcaactttgcaagcaagcaagtaaaggaagctcagggacgggacctttgtaggacccaagtgcagtgcagggctcctcgcttcaacttttgcagcgggaggtggaggcaagggtgggtacaaaagttgg

SEQ ID NO: 47037 - DNA, 499 bp, Zea Mays
gcgccaccgaggtgccactaacgcgcgtggtagggaccataccatgcttctactctcaataataaggctctggatagcttcgctagagtctcgacattgtgatacatcgaaccaccatgggattagggccctggatccctagattaccttctccggtgaagatcgtcgccgcggaggcttaggcaccgccatggtcaggtgcgcgagcatgggtgatgcgtccacgatcgtcagatccgatagggtcggtccagattgaaatcacgaatacctcttcgtgttagttagctccgactgctggatttttttatcaacggttgtgatagcttaccacttcgggatgacccccatctaatctaatcccttgattctagatcaggcggttgatgtgaacccatacccctttcagtcaccatcttttgcatgagagcccttatgctatttataaaacaacccaccgtccagtctaagtagtaaagtcattgcggttgagtccatt

SEQ ID NO: 47038 - DNA, 841 bp, Zea Mays
attggcaccaaggcagttttcgcctctgtctaccacccacagtccaacggtgtcgtcgaacgcgccaacgataagatcttcagtgctatcaagaaaaggctcctcgacgacaaaaagggcaaatgggcagaccaactacccgaagtcatatgggcgctgaacacaacagaatgtcgagcaaccgggttcacacccttccacctgatgtacggatccgaggcaatgacaccgcaagagttaaagcacggatccccacgaacaaaccaattagccacccttgacatagacgaatcaacttccaaagatcttatcgacggagaccgtgtccccatcttgcaggccctgaacaagtatcaagcttagactaaggcatggcgtgacaacagtgttgtcccaagagaattcaacgaaggggacttagtactcacaaggatcaccagaacagagtcccggggcaagctagagccaaagtgggaagagccatacatagtcaagacaaaagcatcgccaaacgcttacatgctagccacatcatctggcgaagacttagagcattcatggaatatagataacctacgcaaattctttatttaagatccaaggcccaagtgcctttgtaattcttcaaacaatgtcgatcaggcccgtactcttttcctcccggggggtgaggtttttaacgaggcggaggcatgtaatataataccgaaaagcccccacacgaacgatccagccagtatcatggtcatgggtgtcgaaaaaggccgcagcaacggtcttcgtcattcgacgcacaaaacagtcaccgcaagaggcagcctagactgccctcgcgcgcgac

SEQ ID NO: 47039 - DNA, 289 bp, Zea Mays
atcttttctttcctcgccctctgaaggccactgtcatagcatcatcttcggccctcatataggctccaagttactcatcgctggttgcctcaatacaatctaactagtcatcattcggctcatcgaattgattcctgtacctgaatgtgtatttcagatagatcaatccaccttcgctggaaccaacagtagtttccttcggcatcttccacccacttgcgagcggccacactctataataaatgtgctcttggactaagtctctggtgccaatataggtgcaaaccgt

SEQ ID NO: 47040 - DNA, 443 bp, Zea Mays
cgtccaggtcacatacagactcggatttgggtgatctttatatggatggaaagctaagaagataaacattcaaatagagctggtaccaggtccaaattcatgaggagtcgacgaaaaaatattccacaagttggtgtccagaatctgtctcagtgctgcgccactgtctttggccctttgggtcgtgtatcttgtcttggcccactagggttgcgacgagggggtcatagacgccccaaactcctttatccaaccaccaccccctcctctagggttgggttttcttagtttcattctatcaagaataggacacccttcattcggttgtggaaccccattcgtgagttgaatcgaatactttctgtgatttggtttcttctccgggcacttgctcgtgttcttcgattccgcaggcaagagtaagccttcttggcaaggtcaat

SEQ ID NO: 47041 - DNA, 371 bp, Zea Mays
caaggactatgatctgaagattcactaccacccaggaaaagctaatgtggtggctgatgcgctcagtcgtaaggcatgttgtcatcatttagtgacccaagccccaaaactaagtgaggagatgaggaagttgaacctaggggttgtacgccgctcttgcagctacaaccttaatattcgacctgtcctggatgatcagatcaaagaagcccagatgaaagatagaagattgatagagcttaaggatcgcaacagtgaaggcaaagccccagaattcagagtggataaagatggagttatgtggttcaagaagaggttatgtgtgcctaagcaaggtcatttccgaaagactattctagatgaagcacata

SEQ ID NO: 47042 - DNA, 723 bp, Zea Mays
cgttgccacctgcattgtcaagacagactccaaagttgtcgctggccaggttgagaaagaatattcagcaaaggaccccgcactcatgcaatatcttacggctgttcacagccttgagaaacaattcaagggtttcaccttgtagcatgtggaccgcgccaggaacgaagaggccgacgcattggccaaagcagcggccagaggcgaagccttgccctttgacgtgttctaccacgtcatcggcacgccagccgtccgcaatccagagggtctccaaataacaaatgacgctgagggccatcgtatagttaacctcatcatgaccaaagactagcgggccccaataatcctgttcctgcaaggatactaccatcccagtgacatcaacgaggccaagcgcctcaagcaccgaagccaggacttcgcacttattgagggccagctatacaagaagggggtcagtcaacccatgctcaaatgtgtcaccgaaaccgaaggcacccagatcctgcgcgaagtccacagtggaacttgtggttctcactcagggcctagggccctcgctgccaaggtgatccgccaagggttctactggcccgctataatctgcgccgcgaatcgagttacgcggtcgtgcgaagcctgccagaagttctctccttgtttgggcaacccttcgcaattcacaaagctgattgctcacacatggccacttcaacactg

SEQ ID NO: 47043 - DNA, 490 bp, Zea Mays
cacatttggagcaaaatcactttgtggatgcaaacagcagagcttttacttcttttttttatgttacagtatataaaaagatccgtagcaccaagagcttttactaaccaaaggattttcagaatgtgtacattatatttgaggcagacgacagaaatgggggctggcagaccactaaccacggaattcgcttgctgtaacaactgataataattggtataacgtctgagtatttctgttagtaccagtgatcacatcctctatgcaacttctgttggaaaagctttgacgcctccttgtccttgatcatctgaatcgtatgctgctgacgcttgacctgaccctctcggcttcttggtatgtaaccctcacgtatcttccgtttagtaagtagtctccatcttctccacttgagtgacgatcggcttctcggaggagcctccatcttctcgcttttagcgaccaccggtgttctggcggctcgtgttcc

SEQ ID NO: 47044 - DNA, 318 bp, Zea Mays
ccctcatgcacttaaaactaaactagggccttaaaccaactcactcacatgcatgaggtctatcccaatcaatagagtcatgatggattgcataatctatcaacccccacctaaaacaaacttttgacctacatcatggagtctatctcatccatatctatcttaaccatatcacccaactccgatgatatacactaacctcaaatcaaagagaccaagaccgaagaataaaagatcgacattgacaaggaaggatataacagtcaagcgaatctcgagatgaatcaagatttaaatatttcggatgaagtcttctcc

SEQ ID NO: 47045 - DNA, 400 bp, Zea Mays
gaccaactcacccctgaacatataacctaccagcatattcatggtgaacatctatcccatcctagatgtcgccataatacacttatcttatgccaccaacctgttaaccatctgtccttacctacaagttatcctaactacatgtccctaattcgaataaagacttcaagaatgaagatcgaagatgaacgacctcatcaaatcgaggaaggataagattcaagccagatcttcaaaaggaatcaagatccacaatcttggataaagtctttcctcaccctaccctttcttaatcaaacctatctatgctctaaagacatcttctaccctacataataaggtggctatacccatatatacccatgcttttctaatcacctgataatttgcgatataaaaa

SEQ ID NO: 47046 - DNA, 326 bp, Zea Mays
ggaggtggtgggtatagaggaagtggtggatggctccggagcaactagagctggtgaagtgggaggtggagtagacacaatggcggaaggtgtggagggagcagtggagcgaggccgagatgtgaggcgaagaactctgtaggctatctgatcagaagagatcttcaaatgtcctccctgctcagcctgctctactgctgttgtcgctgcaagtgctgcaggagcggctctttccatgcggcacttcttcatgccctcatgctgctcaagataaaccgtcttccccttgacctgcctaaaggggcgaggagggtcctcgtcgtctc

SEQ ID NO: 47047 - DNA, 619 bp, Zea Mays
cgaaggttgcgatgctacctgagacgcctccatcgctataggcggggggggggggggagttgcctccggctcctttccctcacaacaccccgaaggcattaggagcaccaaagattgtgacgccaccagtgtcgttccccccataccatgcctagctctagcgtcctccatgtagcgctccgtgggcaccacgagcgcaaagaggtctaccaccggcttatccctctagggcgagacgttggagctggcctcaacatccccataaagggatgggcttcccactgacgcatgggctcaaattccaccggaggatgtggaggtcatgtcctctatgttggtcaaaggagtgatactcctcctcggctccgtgtgagctaggcgctcgaccttcttctccctcttcctcgccttacaatatgtcttgtgcaccgttgaggccttcgcattcacatccctctttcgtttcttctccgccttgatagagacatcctcgggaaggggtagaagacatgacgccataggtccaatctcctatagagacccggacgatcatcactaatggaaaaagtcgaagaagtgggaagtgataagggaaaaagaactcatcaggctgctcata

SEQ ID NO: 47048 - DNA, 792 bp, Zea Mays
aaggctcccacatgagtggtgcatggagaagggaagcaagtctccccacacaaaatgcagagaggctacttcaaacccatgatgcatctttaaaatactatgtactgtgtagagttgcaaactagcctatggctgaatagatgttttgaatccctacctctacaggaacaacactgctatctcgcaattggagtgccctcccaattactactcccccaaaaagaaatggctatacccagtagatgtgataatcgtgcaaagatagaatctctggcatctaatggcatagtggaaagaacaattcatacatgaggaagccgacaacaaccgggcaatttcaactctaatcctaagcttgattgaatcggtatccaaatcatctaataacaaagaacaaggactagatctagacatggagtaagttcaaattcaatcgcaacaaagataccacggattgataccaccacaatcgaagaggggagctcgttcataccgttatcaggctgaggcagaggaggccgccagttgccgctggagcgatcatggtgaatgtgtccattaatgtcccttgaccggttccaatgtgccatcgtgaggatgaagagaaaaagcattgcaccccaactccacgaacaattcgccggacggcaccagacgcaaccacaccaatggcgcaatcgaaattagatgtttgaagtgcatttcaattttgaagtgcattttaatttttttctcagtttgatcttcctttgaaatgcatttcaattttctagttacagtatcagaaatttc

SEQ ID NO: 47049 - DNA, 792 bp, Zea Mays
tagagctatacagaaattggagtaaaatagcctggaagttgagtcatcagtcggtttggagtgaagattagactgacagtggcagtagattgatttgagagctgaattgtgcttgatcgagtggaggtatgaacaagaactctataacaaaattaaatctggtatgatggacaacaactttcctatggtcggcttgataggttgttgaacgaaagccaaagaaaaatgatcctcaaatcgctctgccaggcacggaatggacatcgccatggtacagtacactgaagaagatcctaagtgccgtgtgctcgctgccgacatcccgccttcgtgattcgagctcgcaccacgattggtgccgacgagacgtgaatccatacgtggtagaatgatctctggctcggattcgatgctcgaattaccactcttgccatggacaccatgtgtcctcaccgtgaatcatctgccgctgccatagcaagccaccggacgctccggctgtccacgcaactggttggggactcgtgtatcaaaccgccataaagggttcgcgataaatccgccacgttactggcctgtggacaccgttgaggctaacgtggagcttctcgggccgccgccgccgccgtgagtcagtgaccaaattgcccaccatcgtgatgacttcctttaaattgatcctgcgctcagtcctgcctctccgttacgcacccaagccaccctttgttcccactgttccaccatcgatagccaagaacaccggtttttccccatcggtggtcaccagcgcca

SEQ ID NO: 47050 - DNA, 702 bp, Zea Mays
ctcgaccacctcgacgaccgtgctcaggaacccagcggcagagctcctgcgcccaacccctaccggcgcccaaacccgcgcagccgcgcatccgagccgccgcgacagagccaagcaagccaagccccgccacgccaggagccatgcgcgcagcgcagctgccgcgaccccgatgttccgggaccgctcgccaaaacgttaatgcttttgtttcttcttctctctccctccatacaagctccatgaacgccaccaatggtgccttaaacccgtcggccgccctttattctccctctccccatcgacgtcttctcccctccctctccggtggctatataagccgatgctaaccacacttctcaccttgccccagctacttgtctcacctccattgccgtactctcctctgcgcagtgcatgatttggtcttctctgagttctccactgccagctgctcccatgtcattgtagctcagtccctttcaccggtcatgaacttcctggcacagcctcgctcgcactgctgctcaaggcccccatagttctcttctagtgttgttcaccgcgtacctcagtgctcgctcgcactccccacactctctcactcacccgcgcagcacctcgccagagctccgcctgaacactcaccaacgatcgcgtcgtccccgcccgtcgaaccccgctcatcgatgttcatccctg

SEQ ID NO: 47051 - DNA, 445 bp, Zea Mays
tcgcgatgaaacttccatgcaaaggatgataaatgcactatgcatatcaacaacatgagtgctccccaaataaaatatattaaacatatacttccacccattccaaataataaacaacatgtgtaacatgatcaaaccacaccctcaacatatgtaatcaatagaacatggatatcttcaaacgatggtacccaacatggaacatgagtacgaacacaaatagcagaaatataatcaagtataagacacattaatcgaccgacggaataaccaacactattttacttgcgttcaccaggaaacttggacaaagccctaagtgagatccggaagtccaccacctatttttgacacaccacttagtgcacaaaattcacataaccaacgctcataaacgacgccgtacctacgcacgattccaaacccgtcgcaagcgacttatcac

SEQ ID NO: 47052 - DNA, 386 bp, Zea Mays
aagaggatgtcagggtagaaaggagttttcgcgatgatgcttttctttccgtcctcctttgagggtgaaggtgtcggaaagatgactcagcgaggtctcgtccccttactcgggacgtttgcctccttctttctagtgatccgtgtccactcctttgtgggtgaggtggacaacagagttctttgggtaggtaagctcccgatttttggtttttaaaaggtcatctttgctcgagatgcgggcggctacgccactcgctgttctactcttgtttccttcgagatctccgcggaaagcttcttttctggcgggtctgctatgcggtgtagagttcccacctcatccactatggacgagacggttccaaagcagaacatggatccagg

SEQ ID NO: 47053 - DNA, 332 bp, Zea Mays
ccagggccaccacgacattaggtgtcaattggtggatctgcacgtcatacctttgcaagacctccgccacaaaacgatgcgcaggtaggcgaaggccggcgataaaaaatgcctcgaacacaactatctcaccctctggctcaggaatctcttccgccccagaactcgtccaactccattcccaaaataccccaaatgctgcatgtcttgcacgcgaaccgaggagatcctcgaaacgccgaattccaccatgtggcccgggtgtaactccaccgctgccaaatcgctcttggtatccttgaacgacgattcgcccaacggcgctgttgaag

SEQ ID NO: 47054 - DNA, 773 bp, Zea Mays
gaactttgggagccatttcgaagatgatccagtaggtgtttgagcatggttactatagcaagattgtagctggattatagggctacaactttgttacagagagattggcaaggtgccacatagaatttggagaaaatctgcccaaattatgctttgtcagttgttctgatgaacaatcccgatggtacagtgcacccaaatatctcagatacagagaatctcgccgccggtgacccttcgctgtgattgacgtcgatcgtcgcgattcgtgcgcagtgacttgcagataaccgtggacaaggaaagatctcaactcgggaaagggatagagacttatcgctggactgttcatcgtaacacttgccgcgcagtggacagaggtgtcctcgtcggagtttgccgtcagtcgtagtcgtgccacgtgcttagaagatctaccacatcgcagtagatatccgtaggaggtcagtttgtcgccggagacattacccaggggagcgccacgatagtttacgccggtgactcacctctcctctcggccgtcggtctcccctttcaaaattggacaccaccgcttagcgcccttataaattgatggcccggtctgttgcaccatgttatcacaaagccagagcacccattcccaccttcaattagccaccatagccggagaatttccttcttcccccaaattggtcgactgcgccgccgtgaatcgcctcatcgcggctagctgcccccaggtccgccctcgctctttttgtccgtgtttt

SEQ ID NO: 47055 - DNA, 338 bp, Zea Mays
gacagcaccagctcgtgggggtgcgagtttggagatgcgccgtgggaggaaaaccgagtacctcgacatcccactcaaggacagcatcaaaggatggcgcctggaatggtttatcctagagaatcacgagaattctctcccccctcggtcagggagatagccagatgttcgcactccaagttggactgaaccccccacagacttggaggtagctgaggccagggctctgcttgccgaggttggattgttgaaggagaagggtctgactgccgaggctgtggtcaccgattttgttcttaagaacattcagccactgaaagacagagtgtacccaactt

SEQ ID NO: 47056 - DNA, 808 bp, Zea Mays
tcggctaaggggttagtctatgttaaatatatcttatgtattcatcgtggtgtaggatagagtgggttgaaaatataaattatgtgacatgtgattcgtgttttaaagacgagatgtgcgaatgatcggttagtgtttcacttgtctagtcgataaacattgtcataaataattatgctaaaatttggcatgagaatgcattggggacacatatgtgcgtgtgtgctgtggtgtattgtagtggtggtggcataagatatttgattgaggtgtgcgggtatatgccgtaatatggttatactcgcggcgaggaaagatgtacgcattgggtaacacgacgcttaggtcgctgttgtataatcgaataaatgatgtattattgagcttgagtcaaaatgtgggatactagtggtacgctaggcaggcggtgttccaaataaataaatcggtggatgtggttgttgtcgtgcgtgatttattgttagtgagtagtttgaataacgagttatatgaggattatgttagaaactagtatacggcgtgtaactgtgcttgtgatgtgaataatatatcagtaggtatttgtaggtgtcattggcaagtgggatgatttcggttgtgcgataaattttgaagggcgaagaacatgtgtagtgtgtcgatcaagttaaccgataggttccgtaaatatgcttgtgatgcttttatgtgcatgataagatcgatgccttgccttgtcaattattgcattccattcccattggataaataaatatcttattgattgattagaggtcttatatgagcg

SEQ ID NO: 47057 - DNA, 397 bp, Zea Mays
ccacgggcgccgaaggcgacattcatagcttcatcttcagctttcatataagctcccaagaaatcatcactagtcgcctcaatggcctcaagccattcttcatctagctccccgaaatgacttctatagcgataggaatatttcaagtaaactaagtcaccttcgcttgaactgtctgtggtctcctttggcatttcccattcattaataaggagccataccttgaaagctatgtgctcttggaccaagtctctggtgccaatatagctgcacacagcgttgaaggctactaggaaggcttgagctttatcactattcacgatcgtgggccttcggatgccgaagcgtgattgtatcggacgctgaattatacctttcacatcctccctctcaacca

SEQ ID NO: 47058 - DNA, 607 bp, Zea Mays
gtttggaattcgaaatgaggcacgaaatgatatggaattgagccgatacttcacgaataggtttatataggtcaatatgagtgaagtgtgtgcttggtttgaatttaggcgaagaaatagggatttgggcactcggctcgggaacgatcgcgcaaaacaggaattttggtgaaatttaagcctgggatctcagattggcgtgaaatttggcaagaaggttgctggaagtgttgtgaaggtgcctgaaaaatttgggttcaattggagcaagtttggctggtttgggcatttcaccgagcacgtggtgtgcggggatttagggttttagggaaaagcgtatttggggtggaaaaaaccctcccgaaggagccaaggacctgcagggatatgtaatagggacaaaggaacacaatccaccaactggatgcatgggatttcacagagatttgaaattggtacaaggggtggtgctttggatgccacagagccattcaaaccgagagcagggagatagagggaaggagagcggggatgactgctcaccggagagggaagggtcgccggagagcaccaggtcgccggagagacgccggtgggggaagatcgc

SEQ ID NO: 47059 - DNA, 750 bp, Zea Mays
gtcaaatcggaataaaaatgaattagttatgagtaaaacaaggttctaggattatttatatattaaaaatcattttagaattatttttaccattaaacatcaattccaggaccgcgcctgctattccatagaagtccaggggtaaaactataaattccagggacttgaaagtaatgtatttccaaagcagatggacggcgggtttctttcagtaaattccaggggctctttagtaagatatccatggtgaaggtgtacggataaatctcggccatccgatttaatactgacggcacatattagatgcgtgtgaatgcgaatcgggatgcgatcacgtccatccgatgcgagatcaaccgcccagatttaattaaggcgagacccattcgtggccctcggatcccgatctaacaccacaggcgagataccccgaaacggtatacccagtctaatccacgccgtcggtgtaagatccaacggtcgtcgtgtctcttcccacctccagccagagacggcggcgctggcacagcccatggcggagccatcgccggagccgcgcaatccaacgccaaggcgcgtaatacatcgatccgagactcgcaacgcaacgtggaggaaatcacaaacatggtaggtaggatacttaccaacgacagaggcgaataggggggctgcccacggcgtactatagcccagccgccgtatccaaccctggcaacgaactctggccaactcgactagtttctcgac

SEQ ID NO: 47060 - DNA, 413 bp, Zea Mays
cacctgaaaaatctgttttttttggacagcaacataaccggattcaaacaacgatatctcctgaattataactccgaatcgagcgcataagtacttgttggaaagataacataaagccctacatgattctcatactgattaacactaattactcccgaaaaatccccagaaactgctaatactgctgctgttcatccccctgaaaaatctgtttttttggacagccacatacccggattcaaacggtgataactttcaatttataactccaaattgagcgcataaatactcgttggaaaggtaaggtaaagttctacatgatccccaaactgattttccttaattcctcacgaaaaaaaacacagaaactgctagactactgctgttcacccaccacctaaaattctggacag

SEQ ID NO: 47061 - DNA, 1007 bp, Zea Mays
ataatggtaattaaaacttgtgttttagtaacatgaaaatggaagattatgtatagggtttccatatgcaaagtacatcacactaaggaccgattcattgagtaatcaccaagactttattatgcacccataaggtctaacatggacaataggcttggccaaagtatacttaagatctcggatgggtcaatgcttactaggagtggtgcaaaagagggtctagggtataaacctttagatgccaagagaggtctagtagttttatttactcttttgttagccaccccttagaattggggtatatattgataaactgggttgaatcatgtagctggttaaaaacatccacgtcactctataaggaacgaccatgaagtgaaagtacctatcagacacctaggaagtgtgtaagggtcggtataactcggtcaaagtggaaatcttgtcttgtgggtaaagtgtgcaaacctcaaaagagttgttattatctaatattagttttactcatggttaaggtcaacttgggggatccccatagctagagtttcacataatatggtttgggcttggacttgttcttagtcacctgtacgttattttcatggcaattcgtggaggttatgctttcaccttaataataatgatgataacttggtcagctaaaacgctaatgcttgaccaatctagtatatagtcttcataaacattgctttagtgtcactagttaactacgactattgctcacacatgctttttcctataacaactccgttccatccattgcaattgctacttagatgatattggagaccaggaatacatggtggagttttaggagtttggtgattactttgcaaacgtgccatcagtcagatgcctatagagttgttagatttatagttataaaaatattcatttagactatttgtcttccactatgactttgtattataataacattatcgtatgatttagtttaagtgttatgtgatgctatttttactgat

SEQ ID NO: 47062 - DNA, 531 bp, Zea Mays
aaccatatgacttaggacactttattatcatggtttttgcactttagtccaaaagtggactaattttgcacttaaccccctagggtttggatttagggttttccagggtcctttttagggttttggtatttcaagggtgtgaatgtaatgtaagtcccttcttagtaacattttatgactatttttcttaagctttagggttttcaccatttgggtgttgttttacccctcagaaccatatttaaggttaagtaccctacactagggttttatttgcaaaataccataacaatacaacttgtttgaaaattttgcctagtgaatgcattctaggtgtatcacacatatgaaatgctaatgcaaatgatgttatgctcaagttttagtaacagtaacacctgggtgttacatcctttcccccataaaagaatctcgtcctgagattaaaagtcctagggtaagtattggaaaaggaaacacggcatgcctttatttccttattcttggtacaaggcaggggtggtttgggat

SEQ ID NO: 47063 - DNA, 293 bp, Zea Mays
agtagtccccaaaggaaccatgcctttatttatgataggaaaattgctagtcgttctcattataataggagttatgatcatgctgttaatgattcacatgctatgtttgcctctaattccacttttgttcatggaagaagtaggcctaggagaaatcatgttgtgcctcatatccctaggaaaatgtgcaatggaccttctactatttatcatgcttgcaatacttcttttgtactttcatgtaagaatgcaaaagtagttgctaggaagttgggatccaaatgcaagggaga

SEQ ID NO: 47064 - DNA, 1133 bp, Zea Mays
caaaattcttgaggattttgctctagatcaatatagcaaactaattcttgaggattttgctctagatcaatatagcaaacttgtagagctatgtaaagagaacaaatttgattaagttagtaagtcctagcactacatagaagtgggagaaaaatagacctaaaattggtctgtcagtcgagtgtagctctgaaactaaactgacagttaaccaggaccaagtttgggagctattttgagtatgatcaagtgagtatttgagtgtggttgctatagcaagattaaagctggattataggacaataactttgttacaggaagattagtaagttgtcacatagaaaatggagaacaaggctccacaaatcacgctgtcagaacaactgaagatgatggccatggtacagtgcgcaaaagatctttaggtacatcactccttgccgccgatgaccctcgcgccgcgatctgcgtcgttgctacgattcatgctctctggcggggagatatttgcagcagagtaaagatcttggcaccggattggctcggactcggtcacggttatgttcgtcgtacccacttggtctacggctggccggggtgatcctcactggtgttagccgcttaatgatcatgcgccacgcgtcttggaagcttagcacgtcgtagtgaacctgtgtagcaagcccgtccatcgctagaggccttgccacggtgaaagccacgaatcacttgcgccagtgacatcccctctctccggccgccagtgtgccttcgcaaaattggatgccaccgctgatggaacctataaattaccgccctagtgagcttcgctaggtaatcatgcatccagcgcacccgcccgtgtctcggactgtccaccagagctctaatttagagtttcccccaaatccattctccgcgccgctgtgaatcgccgactctaggtccgttcataccctccttgcccttgttccagcacccttggatgctatagatgcttatcgacccagccaattgaactagaccatgttagatcaccaaaacacattggattgtcctcggtttgcgccatcaccgtgaattgagggatgagtgtcaccaggggtagaaaaaggtgtcaaccgagttagggc

SEQ ID NO: 47065 - DNA, 312 bp, Zea Mays
gtcagaagaccgaactgaaggccaaagaactaggcgaaactaattctcagagagcgaagatgaacaaacacccccatcgcctggggtcaaccggatatcaccataaagttgtgcagtggaacatgataatcgaggaagctataactaacggcactttggacccaatactaaaagatatcgatgagcgagctattcgttggatctcaggtcaggcaggtttgagtgaggacggcaaacttttgcatccagaatttgtaggcgaagtttcgacaaaaattcaagaatatgcagataagagaaaaaaaaggagaa

SEQ ID NO: 47066 - DNA, 415 bp, Zea Mays
tcatgggggtccaccacgcgtatcagtcggtttcatcatcggcaccaagacccaactcatcggccacagctcaagctacatggcgttcgaggtagcagccatccaccatcgtcaagctctacccttgactatcgctaaggcagaacaggctgctgcctacacttcgaatctgacgcgcaacagtgctaaagtggtttaggtcagccatgtaccttttgtccataaggtaacatgaaaatgaactcttactttgtaataggatagcatttgtatgtgaaccagtcgcccacatcactttggtctctagcgttcatcacacagatctcatgtatccagtaatacaagaattttctctctgttcaacccttatgtattggcgccatcaccatgtttttaatctaggcatgattctctt

SEQ ID NO: 47067 - DNA, 385 bp, Zea Mays
ggtcattctaggttttatgtttggttcattgggaaatagatgtagattgagaatctaacacatggatcccaagtgacattctctttctcttccctgctctaccttcttccctaatcatgctcatcatacccccattatgtcacgtggttggaacccttgtaccacaccgcccgattgccacaactcctacatcgtgccctgcatccatagtttttaagctacgctgctcattgtgtcgtccctgtttgccacagccaaatcgccacccctcactagcaccaacgggtgctcgagcttggcctacaccaccggagttgggtctatgtgccaccaccacccctcatcgatcatcatcgtgctcaccctcgaactcgacccatcatcg

SEQ ID NO: 47068 - DNA, 1358 bp, Zea Mays
agagctcatataaaaagtttgggcaattttgggattaccatttattttctaaaaatccagaactaatggtttaagctagtttaaatgcctcaaaattccttatttaatctaaaaatcatgaaactatttttattaaatactatggaaaataagaagtctaggaaaattggtttgacaattttaggatttttctacaattttctatagatttctaaagttctactgaaaaagaaaaaggaaaagttgaaacagtgatgggctggtttcagcccaggcggcccaacatagaggggaaagtgcgcgcgcgtccgcggcagcgctagcgtttttacagaaaggtccctggcttactgatcattccgacatgggttcaaacactattgcatgagtcgctgacggtttgcagaaacgccctccggtttctattcctttacaccacgcggtccccgacggcgttgagcgcggacgagctctggcgagctcctggaccggccgaatggggcaacgactggggtcttcgagcggttaacaccgaattggacccttcccaatccattcccctaacctaatttcgcaaatgggtgcttggttgactctggccacggtgactgagagtgttgcggcgagacaaccatgttcccggcgaccagagggtttctagctcaattgcgtgggtcggcgagcatcgtagacctatgagagtacttaaacggggaagaagatggtatgagctgacctgaatggtgctggccacgacgagattgatttcacggtgttcttgaactgaattggggagaatccgaaattagtgctcgctggtgggggatttgggatacaggtgggtgcagtagctgctggaatacatggcgaagccgaaggggggctcaatttatagaccaagtgagcggtggccgggaatttgggttgaactcggtggcggtcagagaagaagcgagtcaccggcagggtgattcgtggcagttcatgggataagaagccacgacagtcactgggtaatgatcatagttcacggcgatgtggtcactaaccagaagcgtggcacaatcgtggcggaggacgcaaactccggcgacggccgcacggccacgttgccgatgcaagtggtcgggacacagcgaggccacagcagcccgaacttatccacgacgcaatctttccatggctaggcgtaatccactcacccgcagcacgaatcacggcgatcggcgcgaacccgagcatacggctcgccggcggcgaagttatccactccggtgatatttccagcattgtaccatgggatatgttcatcagtgtacctgacagccaagttctagggcagtttttctcgaaaattt

SEQ ID NO: 47069 - DNA, 706 bp, Zea Mays
gggaggtccacgtaaacgccgtcatgtgcgagagtatatgtattgaaggataatgcttaattaagcaggagaagactacacactattcaaggataaacgcgtcatggccgcgcaggcattgacgtagaagggatggatgtcaacgaccatgcatcatgcatggacggtcgagcacgtacgcctgacgtacagtggagctcaggccccgcctagctactcgcctatatatatatatatatacagcgagctgacgatgctgctattcgatcggagcctccggaacagtgagctgacgatggccttcgcccgaatttgtcccacgtgatgcgtgacgtgcaacgggaccggaatcccaaacagctagctaatgaacataggctaggctaggctacccgtcgactcgaatagactagctaggagaggcctacgaagaagtctctgagccaagtcggcaagtcgcagtgtaatagtacggcaccaccaacaacagaacatgcggctcgctcgctcatctggactggacatctggtaggccgccggccggtagtgctttgctctacgttcagaagaagctggtgggtcccggctagcctgccacagccatgcatccctggttgtatatatcgccatcacgctgcgatggcgcagccgcgcaggccactacgcagcacgttccgaggtttccggtcggcaagcctggtttttc

SEQ ID NO: 47070 - DNA, 774 bp, Zea Mays
gaaacaagtattagatgggttaggtaaagcaggaaaatgaacgccaggggcacccggctgagtggtttgagtaggggcggtagttggacgaatgaaaatcggctgcttgaaaggataggaggatgggcgaggaaaagaactatttggattgaaggaacggattgctagccttgatcacttctcggatccttgagaggatccctcacctccttcacatcccaacctttttgtcttcccttgccctaaattcttcgcctccatcgatattgtcgtgcttacagccctattgaaagtaagatccaaacaggtagccatcttccactgcagcctatcgctcaaacccctcatgaagcagtttttcttctttaagtctgtgttgacttgttctatggcatatttagataagaggttgaacttagcaaggtactgcattaaagagtcactgccttgcttcaaatgaaaacattcttccagcttcatttgaagaatgccatctagaatgtagtgctccctgaacgcttgcttaaactctacccatgtaatgagatgaccttcaggctgaatggctatgaagtttccccaccatgtactagcggggcctcgatgttgttaagcagcaaataggggcttctgagtctccgtgcatcggatcaatccaaatttatgttccatcacgcggatccattcatccgcttccaaaggttcttctacttcaatgaagacagggggcgagtttctaagaattctatataagtagcgtttcttggagcttga

SEQ ID NO: 47071 - DNA, 558 bp, Zea Mays
cttcttccatgggtatgccatttgctccccgctcgcctgatgtgcctcttcatcctcctccaccagaaatcaatgaatggcaccagcaggcctatggggtgcccttcatgacagctgaagatgatgaagaagagaaagaatattttgatgatcatgagcagtatgccccacctccccaccagggggaaccgggtcaaccctcttcatatcctcctccccaggatccatcgggcagctatccccccagctcagcctggggaagaaaactttgcggctaacttggcgactcaattctttgatcttactcctcctcagtggtgatttgtggttgatggttctctccatttttggtgctagttgccaaaaagggggagaaggtttgtcagcttggcagcttggcttggtagccctcaggggcttttaatttttgtaatgaacatctggtctgtaataactttattcacctgactattgtgatgcatgcggtgatggcctagagccattaacattttaatgatgtgatgacctttattgtaatagccagtaccatttcatatc

SEQ ID NO: 47072 - DNA, 943 bp, Zea Mays
aaatttgaaaggaaaatcaaaatagaaatttgaaaaagaaaagaagaaaaccatgcgtgggctcaaacccccgtcgcggcccacttacctcttctccgcaccagcccactgcacgcggacatctcaccgactcacgggccccgctcgccagtgttaccccctcccaccgaagtcaattacatgtgggccaggctcgtcaggtgttcttcttcgccaagtcatgctccatgctcgcataatagaagccaccgagatttcctgatacctgggatcataacaaactctccctcctgtgcataaatacgggcgctctgtggccgtctcgaacacctgggcatctaccgtcgtgtaccacgccatcgagaaaaacgagcccccgtgtgggcgaatctaccacacaggtcttcggggtggtagaagtgaccaaggagcatcactggtgttcaacgcaacagtgcgaggtcttccctggtacggagggcttgtgtcacgggcggatttccacgctggtggttgctaccgccatggatccactccctgccatcacctgggcaccctgctacataccgcacggtgagaattcacccacttgtccgccatagtctcctctacgcgaaaccatgttctgagtgaagctttcggtggggggttggcgtgtgggtattgaaagggaaatggccttaaaaccatttccttatattttggtgcttgatgaccttcacaaccattcggactaactagttttcctagtctctgattcacaggttcataagatcaacagttcagtttctaagtcagaatcagctcacattcaaccaaataggagtaaaacatggaatagatgaactaccaatagttctactctttggataagttctaaataccccgaggaacctattcaacacttctagaaaggttggaaagctcgaaatcaacatatcac

SEQ ID NO: 47073 - DNA, 328 bp, Zea Mays
ccgtgatggccgagttgcgccatcgggatccatgcgtgtaggaaagaaaagacagctaggaggtggaagaaacctggccaaccgttcgatctgatagggacgcgtgagattgatccgcaatttaccccttccgccttaaatctgcatcgtagaccttgtgaccgacggttcagatcaggcatacgtatttcatggggcgagtggtgatctggggcgtcggtgctagatcgtgcggctctggtacatcggcgggtagttttgatcttgggccgttggattgtaatccagtgacccgggtgagtgtcgattcacttataggtagaatata

SEQ ID NO: 47074 - DNA, 807 bp, Zea Mays
ctcgcgcacctgcgcctgtgcccgctgacgggtgggacgtttagtcggaggctgattcgtatcatcagtcttctctccctctggcgtgtgggcccattttgtcagcaaaatctcctcgccacgaccgcatggagcgagaccataactgactgcatgattttcagggatttggttccgattagcccttaatccgttggcatgggagtctatatagcactcgccgacctcctacaccctaatttccccggacctcgaccatcgcgaacagaaaacaatagtgccaggttgtgacaaggccaccgcaggtgggatccttgcttcactcgcgcctcgtccctggtttgctacctagtagcatcgtcgggaccttgggaagacgttcgtgccctcgggaaagtgaaggaacccgtggagcacgggtaatcgctcaccggagttcgtgagcgcgcggcgacctccctgcgccatggaccatagcactacacacagaaaaccctggtgagtgccctatcctctgatccactaggttctccacatcgcgaattagacttcatagcgtagaattgcattgtgactcaccggattgacgaggcgccggcgaaccgcgcgaccacgctagggagggcgacaccattgtctcgtggtaggaaggggggatggccttagaccatagatctagagataaaggttcggattaggttacgtcataccggttcggatgagagcagtccaggtcgtcgtgtgccgatcggatgggctatggggttatttaaatccgcgctattggattttgattggacgggagac

SEQ ID NO: 47075 - DNA, 433 bp, Zea Mays
acatacacaacacataacagtaaaaaatgttcacatgggccagatatatgaatggccaaatatgacatgatcgaagctacacacgaaatgcccaaacatatgtgtttcagtaaatgggtgataggtacctaaacttgcatattgccattcttgcaagtttcaactttgtagggcatgcctgtaatttttcatagtttcttgaatccaaatctattatttgattgattatgtctctggatatcaaaccttggaacttgaaattacatgattttcgacattactagctgctgtggtctttggtgcaagaggcaagcaaccaggaggtcttatatttgtctgggagactgtactcatcatgggagaaggaaacagggtatttttagtttactagcgaaaatgatcaatgttttcaagtcggacgacttgctggtcg

SEQ ID NO: 47076 - DNA, 487 bp, Zea Mays
cggctacagtaaccttcggcaatttagttacgtcatccctagggatggtgggagtaggttgctctgcttcggcagcggaagatgtcccttcaccaagcttcagcactgtggccgtctcaatgtatctcggccggtgtgttaagaccttaatctttttgccctttggcacaacagagatggccgaagcgacagttttccttttctttccctgctttcgcgagggatagcaataatcagggtatacgaaaccattgacgtcaaaaactctattcaatgttttcttgcctcggccttcaaaggccgatgccattgcatcatctgtggcccttgtgtaggccccaagcaattcgtcacttgttgcctcaatactgcttaaccattcatcgtttggctcatcaaactcgcctctatatctgaaagtatattttaaatagaccaagccgccctgactagacccggcagcagcctccttcggcatctcccattc

SEQ ID NO: 47077 - DNA, 576 bp, Zea Mays
tctgatcacagcgtacagaaacgttaacttctaatctctaccatccgttgcggatcaaacggtccccggtcctccttataaatcagcgtgcaatcacagccacacgtctcgcaatcgatggctcagattcacccgaccacatccgatggctagacctaatttaaacagttgaatatacgatcgacgatggcgtggtcatcttcatcctccagccacaccaaacggcggaatagagcctgcgcggcgtacgcacactggagacccgtcctagagcgacaccacaccaatagacccccagatcgatcctacatgattactaggctaaaggtatccgagtggggaaggactcacctgagattcggcaacgggaaatagttgtccacacaccatgcaaatccgcggccaagtccgggcaatggcgaggaattacgggcaccccgatggctcccggtctccctagttgtcaccactatgagcgcgatatcgtgatgaagatcccgactccaatctaggcgccaaactaccgcacaatccaagtatggcgtggtgtccctcaactccggcgagaagtacccc

SEQ ID NO: 47078 - DNA, 660 bp, Zea Mays
aggacgagattcctttaaggggaaggctgtgacaccccagtgtcacctagagcttttctcagtgctaactcaagaaccatcatttcatgtaagccaaattaagcatgaagcaccaaatcaatttaagaataaaagatccactaagtttatatctaaagaatcatgtcaaaaacaaatgaggtttccaaaaaggagaaaaatgttgaaaccctaataccaaccctaattaagctatttaagtagaaaagaagaaaagggatgaaagaccatgaaaaacttgaaatcatgacttaggccaattataaaaattgaaatacactaactaagatacaataaagattctgaaagtttggccaaaatagtttgttaaaaactccaaacaagccattcaagtggaggttcaatggggaaatctgaaattcagatttctgaatttttagcctttgaaccaaaaccgagcgcgttcaccttgatctctatctcaaaactctaagctcccattgacaaaaatgtgtctaactaatccctctacctcataccagaagatggcatcgggacgcgtgctctggacacgtcaaacccaagatcttctctctgtgctcggcagtgagacaaacccaacttcacccctccatatctcttgatccagtcagcaaaacc

SEQ ID NO: 47079 - DNA, 885 bp, Zea Mays
ctgaggctctcttaccaaggttgatagaatcatcattccagccttcttcagttatatcatcaattttaaagaaaatatcataaaggtaaggtttcacccctacctcaatgataggaggaatcatagccacgcttttgacatgaactttgaacctaaccatgtctttagaatccagagataggatatcaacttcttcaacagccccaatagtagagcccaattcacaaatagcctgataattttgtaattcctctggcacattttcggctacgacccaaactgcatgcagtttggacttaggtttggcctgagaactccaatgtgaaacagaaattttagctcccgacattttcattttcagttcagggaagttgatcatttcatcaagtttttcttgagaaggaaactgcataagataaccagcgtgacacttggtcgctttccaagtcttgccccaggggaagtgaaacccaaagtccttctcaagatcttccgcagaaatcaaaccttccataacagtgattaatcctatgaaactccttttcggttttctggacagaggtttcgcaaaatgggaagagtaaaaccctaaaccatcagccgccatacccacaataggcatacaaggtttgttttgcttcggcaacacacatcgggccgtcatgtgggtttctttgtgacaaatatcacaccacagagaccggaagcaatcccgagcatgatgaccatcgactccacatttttgacagaaagggcgacgcgcaacttcaagctcttttttcatagtaacgggaggggttttgaggatacctgtgtgacctccctcaccagcagacgaagcgccaatgtcttctttggtctcagcttttccaataatcggcttca

SEQ ID NO: 47080 - DNA, 553 bp, Zea Mays
ctaactatttgctctgtagattccaatagggccttagtctagacgcgagcgtgaaagggaaataattcccgtttttgttgctgttattgtttgctatacacaacggctagctgagttgtgaaatcgaatctttgtttcgtcatcttcatcactgaatttcagccgccaatttgatttgatgccctttatttgagctgcaccatatatggcaggggctaaaccctttcctttcctcttgttcaaataaagaagacaaaacacccgaccagcacacagaatgacatgtataactctgctaactgggctcctgagtaagttgtcttcataggtataaagtgtgccactttagtcaacctgtccactataacccatattgaatcatagccatcccgagtacggggtagtccaactacgaaatccatactgatttcttcccatttccatttttgtactttgagaggttgtagcaatcctgctagtctttggtgttcggctttaactcgttgacatacgtcacatagtgcaacatgagtagccacatctcttttcaaac

SEQ ID NO: 47081 - DNA, 380 bp, Zea Mays
gggaagacaagaccggtagcaccggcccgctagggaggacaaaaggcacgaactctctagcagcaagcccatcggagtggatgacgccggcgcaaatccttccgccgagcgccggcgcaccccatccaagtaggtggcacactatgtcgagcgcccacttcgactgggcatgctcgagatagtcttacaaggccatggtaaactatggcgacacaaagctgaaaccttgaaggcaaaggggcacagagagctcgaaggcgaaagggcaccgcgagtgggagagaagcaagacatggctgctactcgagggatgaacccctttttaaaggcagatttcctcgctcgcgcctcgaagcgtcacgggcaaggtctcccccgat

SEQ ID NO: 47082 - DNA, 406 bp, Zea Mays
aacggtgcagttggagacatgtagttggaagaagaaaagttaggtcgatagaagtacaggagcaccaatgttgaaagtagggagccgccgaaacaaataggacttgtcaatcggttttttcagttcggttttttcggtatcgcaaaactttggtttctagaatatggcaaccggtcggttgcgaaaatgtgtaaaacccgagtaattcggttttcataaatttcggttcggttatcggttttcagaaatctgagcagcacactactacctctcgccaggcgcccagcgaacacagcatacaaaaaactggtaatcttcgcacagcaaaccgaacggtatacatgcataccgccagcagtacaacatatgacgcatccaaaaatgagtttgaaaactgattatagca

SEQ ID NO: 47083 - DNA, 764 bp, Zea Mays
tgggatttggagaacaaatgttggcacttgtctatcattttctaaattaacttaggaatctcactctgttggcttggctatacagtctgcaactctaacaactgctccactgcctcttgtctaattaaggactccagttgaaagctagtcaccacatggcatgactgaactttagccagaaccccttgcagcatcatctgtcgattgccatattcaattttcatccacttgtttgtccagtgcatagacataggtatgtgatcctcgagccagtccatgcctagtatcatgtctttacccccaagtggtaggatcttgaagttagtcgaaaaagtgaaacccacacacaaccacttgcactcaggtactctatatttgctccacatggtacccccatctgctactcgaccctgaacaggcttgggcaaaagttgaactcctggcatcactcccataagatgatggctccccaaaaaactagccgagctgcctcaatccaccagaacaagcactcgctggcaatgaactaaaccctagagtctgatggttttggttccttcactaccactaacagcagcaacagatattacccgaatgctttcttgaacctgagactcattggtgttgcagtttcttcagttgcaccctctccatctatggtgaaaggatcatgatgcccaagaggggcggtgaattgggcttttctaaaattccaacaaaagttaaaccctaagcacgaggccaactttacccaactactagca

SEQ ID NO: 47084 - DNA, 586 bp, Zea Mays
ggcagctttgagaggtgtcataccctacttcctgtgttggttttctgtattgtggtgagtttacaagttgtgactacgagaatggtgggctgaggatgagatgaaaaaggtaggggtgcctcctagccttatatacacaactagagagagccccccgcaaaggtgtcgattacaatctccttgcttatctcctgatttgtagcgaactgtcttcctttatcctagggaaatcttgcgctctcgcgcccgagttattgccagtggttcagtctgtgggtgggcgcaacaaacccggcccgacatacccacgctcatgcaacagctaactcggacatgggcctctttcgtatcagaaccgactagcctttgctggtttcgtttatccagtccaccaccagtcacctcaggagggcgcctattgtgtggccccgaacacattttcgtgctaatgtggacccgagggatatccatcccctacaattacacgacacagatgagaacaaaacacctgtggatctatggctaaactaatgcaacctagaggagtaaaactaggagtttctaagtgagagccaaaatgcaaaag

SEQ ID NO: 47085 - DNA, 764 bp, Zea Mays
gcttttacacaggagatcccgcagggcctcccttcttgacggtccttctagatccagacagagcgcttgaacagagaaaggtgcagggacggggacagagtggtcctgtgcagctgaaaaatggaacactccagaggtggaggaagagggagcgaggcgagctgcgaattcaacggcttgactagcaaatgccgacgtggatagcctacagaggcgagttttagagctggtttcataataagaaaatatatatagaaattgttggatggagcgctcggttttggctaagccagtcaagccaaaaacccaagccgattagtgttttaaggacggagccaagcgtgtttgcttgctgtaagattagaccacctaatttggaggggggtttgacagaataaaagttgtaagtgggtatttgaaaacaccctaaactcgtaagtaggtttatgcagtttttccttttaaactagtatattgagcgcgccatgcgcgcttgtttataacttcataagaaattaagtataaatacagaaaaatctaaatcacaaagtcacatattcaacatttgtatttgcacaaacacaaatatcattcgtccacaatttataatgcttataaagcacaatttaagaatgaagaattaatggaatatatgttatatttaaataatgtacaattaatcaatgtgttataacttgtaagaacattgtttccttagctacatatatagtaaacgtacatatatttatagtactcaaatttta

SEQ ID NO: 47086 - DNA, 316 bp, Zea Mays
aaagaagctcaagctcgtcagaagagttacacagacaaatgcaggatacccttgtactttctacctgaaagtttcaccaatgaagggtgtatcacgtttcggggtaaaagggaagcttgcaccccggtatattggtacttttcctatccttgaaagatatggaccagtggcataccgactccagttacccaaaacattgtctgccgtacataatgtgttccatgtgtctcaattgaagaagtttcttcgggttcccgatcgaaccattgaagtaacagatgttgccttagaaccagacttgacatattcagagcac

SEQ ID NO: 47087 - DNA, 408 bp, Zea Mays
ctacaatgctagtctcggtcaatcacattacgaccaatgataataccaaaaataggtttgcaacacttcctaacgaggttctagcacctcattctgatggtcttcaacgtcagttccaacagctgcaagctcagatgatgcagcttcaacaacaattgcaagggcgtgaggaaggcacacaggctgaggtcaggcctatttgttctcatgtgaatgaacatgcggggagcagacctattcattttcatgaaaatgaaaattatacacatgctgggggtaggcctagccgtccttatgagaattacacacgagccgggggcaggtctatgcaccgaacttgggaccgttatcatgaagagccagagtcatctcgccaagctaatatgaggcaacacacctcgggttatc

SEQ ID NO: 47088 - DNA, 1158 bp, Zea Mays
ctaggtttttcatccaatggtcatatgctcttcatgaagttgcttctcctagtgcaccctctgtgatgacgcgacatggcaccctcgattcccaccggaaccataccgccggattttgaggcctaaaccggtaaaaccagccttctgtagcggtggatggttttgacgctcaaccaccgaaaactttgtgattagagtactccatacacatccaccatgtcctagacacgtgttctgctagtccacgatcatgccggtgacatgaactgctccactctggtgcgtgtctcaagtgtcggccactatgtatagtcaccaacttctctagttcctcaatgaagacccagcactcatccttcaccactcccggcccattggcacgaacccacatgaccttcatctcaccttcaccttcatcatcgaccaccatacatgtactacacacctgcacaccataagccgagagacatggttgcacaacacacacttgtactctcgtgattgcactaactcacaccaaagcactacccatgttgacaatcactcatcatcaacccaaaccacaaggaataagtcaaccttgtgttcgtaatctccccttgataagtgtattgttaataccaccgcacgaacacacaaatcattagaaaagaagatggtaggaacctgctcaaatgaccgaaagccaacaaaagagaaatgtgagtcatcgagagagagcaaagcttggtccttaaagaaatgggcaacggctcaacacaaccaagcacaaatggctagtcctcaagaagaggtagaaatgggctcaacaccactaactagaactcaattccagattggggcataaaaatagcaatagggctgaaataaaagctagtccctctagatagagtcaaaaggctcaacacaactagcaaaagctccgtaaagttcaaaagctctctctagtgaaaacaactccccctaaaacatagcttacaacctcatagaaaagaaggcatcctcaacaagatgtgagtgaaagaaaaacttcctaaagtctcacctttgcataactccccctctcactgacttgtcccccttgttgacaagtgcactcagcaagcaccaaacaagggacaagaaataagaaactccacctgagatatgaatgaaaac

SEQ ID NO: 47089 - DNA, 538 bp, Zea Mays
tggactggcagtagtagtagtgctgctacagcattcagcggcggcaggtgcagtgcagagtgcagactgatctcgcgcaagaaaacaagaaccagctccctccccacccgtggcctgcctgctaccagtacaaatacccgtgcctgcgcgcatccccctggttcattctccagctagcccgggctcaggagccagtatcccaacaagctgcaggtgcagctatataaaaagcgagcagctcggacatacccgcaccaaaaggacccaacgaagtccagccagctgagctgagcctcgtgaaccagagcatttgctccttcctcgtcctcctcgatcgacctctctccttggtgccgctgccgccatatatgaactgctagcacgcgcagcagccagcagctgccgaccggcctataatcagaaggccagaaaggatcgatggagaccatcaagtgctgcatcgcgtgcatcctgccgtgcggggcgctggacgtggtgcggatcgtgcactccaacggacgcgtggaggagatcagcg

SEQ ID NO: 47090 - DNA, 912 bp, Zea Mays
tggtaagatttatggccttttttttgttaactcacagtgaagcttctagttctagcactgatagcttaggtacagccacattagttaatgaacttgcactctgaaatggccagtcaaaatcagtcacaaattagaaaaaatatatgttgaaactgaaaataatgtatggtaatttgataggctgtgcctgtgcgtgtggtaatttatatcagtagttataggataggtaaattgggctgggccggcatgccgtgctgaggcagtagcctaggcacgaccttctcatcgggtcgggccggtcctaggctggctaaaagctcaggccataggtttggccatcaggcctcgggacttttggccaactatagctcagcccccttttgttaataccctgcactttcccaccattcctgatttttctccttctcatgcattcttttgccccatttcttgtttttccaattctctccatctcttacaccaccttaatatatacaagagtatcaagttgcataccgctttagacaactctgcaatcagcatgcccttttgtactgcttttttgcttatttttcattaggctagccttgtcacccctactcttcttaaaaccttcccacatttgccactaacaagttgaaaccagtgtctttcaggctttcagcatattcacagcttgcttgtcaccccaagccattttaaacattgtaattatagcagtttgctgtagtcttgctttactgcatatctaactgtaggtctatgtgttacattggctagtaaaaaaaacaataacatgaaaagggcaacagtgttcatgatttttttgcagcatgtccttttgttattaaaacatacatcatgtaattgtgattcagttgtgcaagttagagaagggcactcttagtttct

SEQ ID NO: 47091 - DNA, 639 bp, Zea Mays
gttccttcatgaattcccattagcttgatccaaatctcatgagcggttgtgagattcttgataatattgaacaaattgatgtctagagcatcatagaagacattcatggcttgatcattggttagagcattttcattgtcactagatgatggttcatcttacttcaatacaacaaattcgtctctgacaaatggccaaatctttctgcccatttctctaagaagcattgacattcttattttccaatagtcataatagttcccatcaaaatgtggtggcttcccaatgtgcacattattgtaactagtcattttgtccaactccgggatggttagatgcacaaacaatggagtcctcagctttgataccccttgtgggatctatgacaccggctagagtggggtgaatagacggtttttgactaaaagcaacaatactagagaaatttaatcaatatgacaagagatataaattctctagctaatgcaagtaagtgactaatgaaaacaacaatgacaaagctagaagtgaatgacaattaaataatcactagctactagcaatgaaattaacaagtgagaaaaagagacatcaggttttttttcctatggtatcggtgatttgtcgatcacccctaat

SEQ ID NO: 47092 - DNA, 516 bp, Zea Mays
gtaaaaagagactgaatagagttttttatgtcattgggtttgtatactcggagtactattattctttgcgaaagcaaggaaagaaaagaaaaactgctgcttcggcgatttctaacacgccgaagctgaaaaaagttaaagttttaacacaccgccccaagcgcgttgaaacggccgaagaaccgaggcctattgaggggtcttcttctgtatctgagccaagtcactccacccctgccgaagctaggacataatcgaccgaagagccagaactgaagaaagcagcagaacaaccgaaggctttgagtccgttgcaagagacggagctgccgagggcatcaaatattcctgcagcaactccaaagaggaggagaatggccagcgtactagacgctgtcatggaatctgtgaaaatacaaacttcttcttcagcacttgatttagagggtgaagccttaaagaaatcttgcgaagattgtgtggcacaaactacttttgaggttggaccctcagctc

SEQ ID NO: 47093 - DNA, 505 bp, Zea Mays
cttggcatagttactgagttcaaacattacatcacatcaatatccatagttgatcaacaaagaactaggttcactttcgttttgggtaattcgattcgattctatagtaaaactgaagccggcaccataataccgaagttcacattaaatgtgatgtacgacattgcgatcaaggaagtatactattgtcatgacataagcgatattcatacttgaatagttcattacatgccatcattccctacagccatgcttgagaatatcaacgtacaagcaagtattatatggtaccgaatgctacatcgattaccaactacatcatatccaataatgtggactttgattcttgccactacaacaagagatgcctacaacatatcagccactacaacaagacttgatcaaaactgtcacgtttagggcgtgcgtccgtgtacgacttgatgtttataacaagataggggtaattgaaaagcgagaagtagaaggtcatgacgctaagttg

SEQ ID NO: 47094 - DNA, 379 bp, Zea Mays
ggtacttctcgtggtcaggaagacacgcccaatccaccacctgtaccgccaacgttggccgaggctatcgctgcgttggtcaatgcgaccgctgacaatacccgctttctacgtgaaatggcgggaaatcaattctagcaacaaggcggaagggctcctccgtagagaccacatgagacttcatacctggacttctctaaaacccgtcccccactcttcgttaaagccgaagaccctctagaagccgacaaatgggtacgggttatggaccaaaaattcggactaatccgctgcaccgaaacccagaagccattgttcgctgctcaacaattaagaggccctgccagtacttggtggggaaattttgtggccattcaac

SEQ ID NO: 47095 - DNA, 564 bp, Zea Mays
gccttctcgcaaaactcccacagacacagtgaaccccgaggggagaactgcaggttcatttgtattaaactgagggactcttatgctaaatcatcacagcgaagaggtatctgctgatctcagtcgcacgctctcacacctacggactagattagatctacatttattaaaccggtacgctacgaggaccacccgatgttgaatctacggcgcggatcgtatctttacccggagtcatccgatccatccgatcggatctgaacggacccggttcactccgtgctaatcgctactcttggacgatcacagccgctcagatttgatccgacagctctggttccccaacccgaaccggtacccggtgtctaatccaagccatccgaaagggatcggacggcgccagcgttctcttcctcgcctgccagcgtccgacggcggcgccgccctggtgtttgaaatcgcgccggcgagcatacccaatccggtccctccgagcaccattccctgcccctactagtgctaaatgaagagaacggcctcgcgaacacagaggacgagtactca

SEQ ID NO: 47096 - DNA, 1460 bp, Zea Mays
caacgtgaggtgtcaccatgaagtgggggaacggtatccagcacaacccgtctcctaggatgagacctctgaagtaggggaaacccccaacaaaagaacgctccgagaaagccgcaactcccatcgttgtgatcgtcaccgcgcccaggaacgtgagcaggatcaaggtgaacaaggcactaggctctgacgcgagaacccacttctcccttggaacctattccctgactttgttcgagcactaaatacgctaagtgaggtcggaggggtccgagctcaaattaccaacatcctaccacacaccccagatgcggagggctattgacaagtgctcacccaagcggcgaaccaccttctccccctcactcacccactgaatgatcagcgccactccatcaacaatcggcgagacgcacggagcaacattaacacttcacgcggtcgtcggaatgaagaagagatgaggcggcgagaagagtacgatcaggatcatggtgcgctatcacacaaccatgccaccaggactgagtcagcagtggcctccaccaacggtccagccccgggtcgatcgagacgacacaacgcccgacatcagtcgccttctcggtaccgttgacatgatcatcaccggaaggaccgagtgacatgtggtgtctccgcccataccccttggctccgagcaatccaatggccgccaaacttgtcaacatcgacacatacgagcccaagaaagacccaggtggctggttgggtgtctatacgactgccgcccaggccgctagggcgacagaagatgtcatgacagcgtacctgcccattgccctggggcaggatgcactaaaatggcctagcatctacctcgacactgcatcaatgattgggatgacttcagccgccattttgtcgtgaactttcaatctctttccgacaaactggcacagccttgagacctcaagtccatcaagcgccagagcgacgagacactccgcccgttccttaggcattttcagaagatgaggaaccacatccctaatgtcatggaggtagctgtgatcaaggacttctaccgtggatccaatgactcagccttcatccgagccatcctctaaaaggcactcgccaccattgaacaactgttctgagaggcggacatctaaatcaccgtcgatgagtgagcctaggacctcatcgggggcatgaagcctgcacccccagcgccaaagaaagacataaaccagcaataggacaagtgttgggataagaggcatcaggaagaagtacacgccgttgggccaccggctgcttggccccgcgacacgccacgcggcggtatacggacactggacgagatccttgactcccagtgtctgtaccacaaggagatccgccacaccctgtgaaactttcaggacttcaagaactcagttggccacgaccgaccgttctagccgctactgcct

SEQ ID NO: 47097 - DNA, 345 bp, Zea Mays
ggaggtttgattatccgcagacccacatggatggtcagtacacttctctgaccaacatgttcgatgtcatggatacacagtttgatagcctgcaccatgaggttggtgggctttgtgatcacgttcatgagagtgttcatgaaccccttatgaccaggatgaacaacatgccacaaagtttttaggacaatatgggagctctatctagtcagtttgagactccatccaccaatgtcaactttcatgcacttgatcagaggcaacaatagctctagaatgacttcagtcaattctcatccatattcgacagtttctgctcccattactacaacatgtatcctcgac

SEQ ID NO: 47098 - DNA, 283 bp, Zea Mays
atttcatggtactaaggcatcacctaggagcaggggtggagcatttcatggtactaaggcatcacctaggagcaggggtggagcatttcatggttctaaggcattacctaggagcatgggtggagctacagtttgccaccaggatcagctgatcctacaaattttggaaattccaatagaataatatttgtcatcgggccagccgaccctgacgagttttggaaattccaacgaaatattactgtatgcagagcaaatagttcctaatggccacaccaatttc

SEQ ID NO: 47099 - DNA, 1167 bp, Zea Mays
gataagtcgagattgaagtgcaaatactacgcaatgagatgggattcgtgattatataggagttataatggttgatgtgatgagtagtttagcaaatgctagtttgcgtggaggatgtatcgttaagacatgagtgtcggagttcatttatattagtggtcgcgccacattgcttgaagtgtctcgagtgcataccgcaatatggttgtattcgtgccaaggatgtataggttttactcaattagaagtctggttgatatggttaggaaattgtttcggcttgggtagtgaggtggtaacatgccaaagtagtcatcgcttcctctacggttaaatgggaatcatgtgtgatgatgttacttatggggtgaatacgtattgaaatcttttatgttgtgcaatatgactagaaatgtgaaggatagatagggtgtttcagaaatgttagcaaataggtcggacaagcatgatagaggttgagtcacttatgttataaaattgatgctcgacatgttaggtaccctaaaaggtgatgttttaggtgacttgtgtgttatccaatttaagttgagaaatgggtaagagaagctaattaatccgctccgaaccatgtttcgagttgcaatgtctaaaatggtttgctaagttttatactgcgttagccaactcatgtaagtaggagtcgattgcgtaagtgattgtgatatatatgttgtgtcttggattgcgataataataggcaaaccgatgtgtatggtgcatagcggcctaggttgttgcttgggttaaccaacttgttagatgtctttagttaagctcgtggtcacgatgaattgcttgttgtagtcgcggataaaaagtattagtgctcatgtgatgtctaagttgaaatgcaaattattaggtgaaaagcgctttgatatacatatatgccggatttgatgattgtggtgaatgcgttgttaattgcgtatggtggttctagtgctcgaaatgacatgtataaaaatttagtaagtctactgattagttctcacttggttattttaactctaacaattgtcaaagtgttagaataattcaagtctctaaaacatggcaattcttgaattatatagaagctgaaaatgattagttactgttttggacagcacgcagtgatttccc

SEQ ID NO: 47100 - DNA, 774 bp, Zea Mays
cgttgtatgaaggatctgtgcaccatgtcattctgtgtgttccctcctatagcttacaaaggcattggtgctcacctacgtagaccccttatggtctacaaaggcataaggtaaagttggtcacctttctagttactggagcgctataggttgatcgctaggtgtgacagatagggttggtagaagagttggcttcaatgtcggtcttgacgtcatgtatatatacctatgtgaccagttgtcggtgtttggtacaggcaacacactacgatatatatcacgtagcactttttgtggttggcgagatcaactgtagctcgatggttcatgcacaacatgatagaacacgaaggtttatacatgttcgggccactggaatgcgtaataccctacgtcctatgctctgtggagatgatattgatctgagtttgaggttagaagttagagtgctctattagactatagggtgtggacgtcttttgtaggagtacctatgctgccttatatagatgacgagattaggttttacaagtttgacacttatcgttatccctacacatacggatgtctgttcaggtctacaaatgatgctgcatgcatggcaatcttgttccgacttatgggtgacgtagaactctgtgctagcttcatcagcaacggttactatgacaccttggtgctcaagcaagctttcttgtcctttggtccgagttagcgggctatcctgtaggcttaattgtgcagcccactcaggccttttaacgacccacagac

SEQ ID NO: 47101 - DNA, 1207 bp, Zea Mays
gcgaagtaccagaaccttcacaaccaagtggagaggcctatggtgcagcaggccgagatcaatcgatagacacccatcgacactatttgctacgacgcatgcacggccttgtcttggagcagggggcgcagccctcccaatccacaaaggcccgagttcctgcaaaaaaccatcttgggaaacccacgatgcctagtaaattctcgacaaccggcgtcgagagcaggaggaagtcgagcaaccacgcgaaaggaggtgtaagcgcagccccagcccacttgggtcccatgccttcattcgctccatcaggaaagcatagttcccaccaaaagtacaggcacctgtgaatgtcgctaagtatgatggttcttcaaacccggcgtatggttggaggactatcgcccagccacatggcaggaatcagagatgaccacttcatcatctagtacctccccatccacctcatggagggcacgagggcctggcttgagcgcctgtcaagctgcaccatccatgactgggtggaccataggaaggcctttgtcaagaacttctagggcaccgacaaacaccctcggagctcttggaacctcaaaagatgcacccaaaagagtgcggagagtcttcaggactacatccgaaggttttcatagaaaaagaacaaactctttgatgccactgacgctgacgtggtaagcttcttcaccaatggcatgaccaacgaggcgctcgtccacgagctagggctgggcgactgaagaccaccgccaaactcctagatatagcaaccaagttcactaatggggaagacacggtaggggccatctcccataaagggaagagcccaagcgatgccgacaagcccagcggcgaaaagaaggagcgtccagaacaccccgacaggcgccgaagaaaccatcatccctgatgcaacgagcaagaggtttccacagtggatcggcccctaggccaacgacgaaacgtgagggcaaccttttctagaaactgatggattcgtcgtgccaaaaccatgacttccctgttcaccgcaagctccacgaatgtgagctcctgaagcgcttcatctccaaaccgctaagcaagaaagcgaagccaaaggagcccaccaaactgacagaggaggaggcccccgccaaagatttccccaagacaacaggatgtcttatgatctttggtgggactgaag

SEQ ID NO: 47102 - DNA, 501 bp, Zea Mays
gggagcggcaccagcgaggattcttccggctagccccggcacgctccacctgagtaggccacgcaccagattgagcgccccctcagactgaaagtggtcgggatggccgagcgaagtcatggcttgtgcggtggcgcgtgtgtagagcagaagagcacgaaggcaaaggggcgcagaggagcacgaaggcaaagaggcgtagtcgattggaagagaatgcaaaaaggtaactgctgcacgcgggggtgaaccctttttcaaggaaaccagagtcctcgcccaaggaaacccttcagcgcgcccctcaatcgccgctggagatcacgtgcgacaggcaccaaggaccaagacaaacccagtccctgacatggggacccgggtccgcaggtcatacactttgtgagccgcatttcgggtgcagaaagaacgaactgccatgcgtgcctgtagagcaaaccgccgcatgcgcctgtagtgtgcctccttggcgccactgcaaaa

SEQ ID NO: 47103 - DNA, 599 bp, Zea Mays
caaaactcgtacgtgatattttgaataagttaggtctagttccaagttaacttctgatacatccatggtttgatcgggtactcggaggcacttctttagttgtgatatgtggaacgcattgtgtactgcaaataaagattctggtaactgaagtctgtacgcaagatgtccacatcgttcgagaatagggaacagaccaatgtatcggggtgctaactttcctttaactccaaaacggctaaccccttcattggtgatactttcaagtatatgtgatctccgacttgaaagatcaatggtcagtgtcatttgttagcataattcttttgtcgtgcttgagcttctctcaaattgtgtcaaatacattgaaccttttcttctgtttccttgaccaaatgaggtctgaagaaccatcgctctcccggttctgaccagtttaaaggtgttctacatcgtcgacgatatagagcttcgaatggcaccattttgatactctcttgataactgttattgtaggaaaattccacaagcaataaactgtcatcccacttatgtgtaaattccaaaacacaagctctcaacatatcttctagtatttg

SEQ ID NO: 47104 - DNA, 654 bp, Zea Mays
ggctcaattccaagtcatttcatgcctcttttctaatttcaaactatctatggcacaattcattgttcaaacgtcgttctcgcgtcatttgacctctgtttctccaaatccctcagttttgtgtcataactctctgtgtatgtatttattcacatttcacataattatgactatgtgactaatacatgctcacctcttctatcattttagtgattttgcctgttcgcgtgcacgtctcctgtcctgcctggatcttttctctctcgagaagtttccagcagtcaggtcaggatggtgcggatgaagaatgtcacaccgtcaggaggggagatgacgaggaccctcctcgccccttcagacaggtcaaggggaagatagtataccttgagcagcaagagggcaggaagaagagatgtatggacagagccgcacgtgcagcacttgcaatggcagcggcggcagattaggctgagcggggaggccaactccaattttcttctaatcagatagcctatcgagttcgtcgcctcgtgtctcggcctcgctcgactgctccccccactccttccgccacagtctccactccacctcccacttcgtcagctcctgtcgctcccgagccatccaccacacccgctatgtccaccaccttcg

SEQ ID NO: 47105 - DNA, 817 bp, Zea Mays
gcgtaagagaggacgtatagatccaaagcaaaggggaaaatcagaaaacaaagccacgtgccaaaacttacacgtatagatgaccatacgggtacgacacgtcgtcacagacaatggagaaagaggactagaactatggaggtgatggaggatagagcctcagaaaggagagaggaggagcgaaggactgcacggcacgaaagcgcggatccagtctagagtccatcggagacagagaagatgatgacgactagatctgcagaggactgagcaactgcacagcacaacgtcgtagatccaatacatcgacgacttgatgtacagaggcgaggaggcacgggggaggccggaggttggaggtgaggaggcggaggaaatgaatgcaaggaggcacgacggggaaggcgagggttgaggatgtggtggcgagtaaccgtgttggccaagtcggcaccctgtgttgaggaggcgtcccaaacacacactgcacggtccgcctgctatgtcgggttgtctcgagcacgattagcctccgagtcgtgctggctcatagccttagaaaccgcgcgcggggcggctcgcttagcacggcctatccgacatctataccagataccctgtatatttagcttggttacactacatggacattcttggagaggaatagatggttaggctagtaggtccccagcagcattctgaatcaaggaagaaagccccatggtctagccttgaaatctcaaccgcacacaattacacaaatgctacatggcgaataactttccaacaaagtgtgtacgagacaaaaggcacagat

SEQ ID NO: 47106 - DNA, 1337 bp, Zea Mays
atcaatcagaattaataagaattaaacattatgccaagtcaaacaatttgaaaagtatgtacctgtccaattcaatgaccttagaacacaagtaggcccaaagagcgcgagcacattctaattcagataagaagatgcatggtgcacaaacactcccaataggagtcttgtcaaatactgggccagagtcatggtcaactgtgccacctagcactgtctgaccttgctgcacaaaaaaggtgaagtatacgttaatcataatatgtaaacatgaaatgcacgctatcaagacagaaaatatatataagtcaagcttaaatactaacagtattaggtgtaacagattcatcagccctaagaacctcatcaatcaactctccaaatgtagcagctagattggactgctttgtaccaatattattcaaacattgcttgatagtggcaaatattttgccaacctctaagtcataatcaatcaacttagcttggaacttctagcgttgatgtacaggaagcatctgaatcttatttgccatcaggtcttgcataagaggcagttggatgtttatatttggaagtcgacaatattgatttgggtcttcatcaactgtttctggtctcattggagactgaagtaaaaaatataataatgatataataagtatggtaaagaaacagacaaataaagaacatagcgggtatgtgatctaacctcaagctgaccagtagatggcgattttgagacataacatgtctcactgctgctccgaaactgatgaaacagaatgaaaattaataaatatgtatatggattgactcatgccatgaattgagatcattatatgactactaaaatcattggatttgtaactactcataaataacattgttgtaaaaaacagaaaaattatgatagaagaaatgaagactcagggcaaacaccaaatggttcgccaccctggcaaggctttcgcttatcggccattgacaacgcccttatgatattcttattaaaatactttatgcgtggagtgccacttttgttgtttggagcagcggcatggtgcaaatgatccaaataatacagctacataacatatatatcatgagagtcatatacaaatgaacgtaaacacataatatatgtatgtattttcaaattgcaattgattaatataataaaagatttgccaaattaattatgaaacttacaagaacaacgatggaacaaccatatatcgtcgccgacacattattaatgctcctgttgtgccatttctgtgcagcctcatataagtcactaaaaatagatgacactaatcaatttgagggaaccg

SEQ ID NO: 47107 - DNA, 702 bp, Zea Mays
gtgagttcaattcctaaaagtgtagaggctctttagtaaaacggtatggccgaaaatgtataataatagccgctggattcaacatggagggtccagattagatcaaatatttagtgaactggtactatacgcctgccatccgatgagagatcgacgaacgcgatttaaaataaaagaaatctaatatcactcccacatcacccaatcgacggtctagatcgaacccagacgaacgagtatgcaattctaatcccagccgcatctcctcagatcaacggctaaagcgtttcccccatcacaccggccacgcacggcggcgcccgagcatggacgacggcaccatggtcggcaaccccgaattccccgctctcaggctcaaacttcgatgcgaaaggtgctacatgctacggggaagacagcgaaagagaaggaagggttctcacctagatctttggtgtggagatccttgcctgcagagagtagcagcatcgcggcggtgctgctgtttcgtcgagcgattcccggggccctgcttctcctttgcggatgactaggcactgatagcctcggcaactcctagagcacccactgatgccttccaacgacggctccattagcgccgcgacaccgattgaatcggtggcgatcaccgtgtcttcctctgcgatctcacgtcggtggcaacacggtgacgaccttcct

SEQ ID NO: 47108 - DNA, 498 bp, Zea Mays
gtgaaatattctactgcaacgaaagcaaatttgaggttgccttgcttagtgggaatggtccgactatgtcaatgccccatcattgtaacggctaggagtaggcgatcagctttgtgaaatacgagggccactcggtttgccacgcacacgatggctggccagtagaaaccctggcacatgaccttggtggtgagggctctaggtcttgagtgtgaaccacatattcctctatggacttctcgaaggggttcaatgccctcgaccactttgatgcacttgagcataggttgacttattccctttttgtatagctgccaatctatcactgcgaaatcatggcttcggtgcttcaatctcttggcctcgtcctggatagtggggtgatagtgcccttgaagatacagggttatgggtgcgcgctagtcttcggtcatagttagacttacaattttatggcctttgggatcttatgtgatttgtaggccttcgggatttctt

SEQ ID NO: 47109 - DNA, 555 bp, Zea Mays
ggagaccaggacaggaggtggggacgcgccggtggaagaaggtcggagcatgtatagtagcccgatgctatcacatcgagggtcctggtggccagatctttcacggaaaaaccagaagggtcaagctcagtggaacatgaattgtcggtggtgaactaacgaacagaaagaagattatgagtgatgtgagggacaatgagaacgtcgttgaggtagaacagtccagggagaaccgaggcacctactgaggtgtccggtagagtggaaccattcctaatgacgatcgaagtggggtggcaggaatgaggtgggtgagaacgagataacatgcctgctgtggggtggtgttgtaggatgcaccggagtcgatgacctagtcaggggagggtggagccaacgccatgatgttgtaggcggtggcaagggaggcggcatcctagcctctagcgggcgggagctgaggcggagcctgagaagtcgggggcactcaagagagtcggcgccggaggacgggaggcactcgggcctaacctggccacatggagatggttccgg

SEQ ID NO: 47110 - DNA, 290 bp, Zea Mays
acatcagttcggagaggttcgcctaagcctgttgtgtacatgttagactgttgtcgatgagacatgtcgtcacaacggcacaacagggtcaagaattggcacgaatactcttccacggtgcctgtgcgcttcagttcttttaaatcagccatgccattgaacctgagtggtggcccgaagcgcatctggatgaactcaatgaagcgtgtccaagtcagcacgccgcctagatcgcgctccaaggcatagaaccattccacaaccacaccttccaagtgaagcgatgcttg

SEQ ID NO: 47111 - DNA, 452 bp, Zea Mays
tacacctaattctacccttggcgctccactggggatcaccaattacgcccgaacgccatcctagagctcggtccacgtgcacccgcgaacttgaggctttcccgccgcgttctcgaggatcaagcgtggtatagttcaatcggcggagccgatgagcatcacaagcgcacaagcgtgcagaaacacggacaagaaaggcgaggatggacctgtaggtggctagcctcggcgcgacgtctcacggcggcgcagacaaccgatttggggggaaaacgaaattctccggctatgatggctaataggaggcgaggagcagtgctctgtgtttgtaacaaactagcggaacaggtcgaggcatcaatttatagagggcgaccgtgagtaggacgaatttgaatggagaagtgcttgcggtgataagggaatgagtcaccggagttcactaacgtggc

SEQ ID NO: 47112 - DNA, 699 bp, Zea Mays
caccttccacccccgtcgcaaccatcatgcacgctatcattgccgtcgtccactggagggggaaggtccccgccatcgacgctatcatctgatggatgcgcgatctacatcatcttcccactcattgggtctccaatcagagtcgtggtgaatgtggacggcagaggctggaagagggtgtctgcttctcctcgtggcatcatctgtagagctagaggtgaaggcatcatcgatctgctcgatggtgcacacgaggtggatgcggtagcgttgccatgggggaaggagacacacaatgacagcaaggcaaaggcaaaacagagggaatgcgaaggtagaaccctcttaatgtaagtagaggtttactcttttctctgattcgatgcttaatctaattagagagtctagccaatcgcatgtcgacatgtcctccattggcctgcatctagcaaagacatcaacaaactattccacaatctcctccatcgtgtcacaactcttcgtgacatctcagctcctcaccatctcctccattgtgtctattcctctctcctacactgctcatgaatttctcctatacttctcataaatatagtctaaggattctagctgaggggtttggtaatttctcctaaattttctccccagatcgtttcagataaaaaacatgcactaaatttgatggttttcaaataaagg

SEQ ID NO: 47113 - DNA, 517 bp, Zea Mays
aaattgtagaggaggtagaggcagcggtgcaaaagctagaggcaacatgtctaaggcggacatctagatgtcggtttgttgtgccacttgctacaactgatatgcaagtcactatttatgaaatatgaaacaacacaaataatatagtagttcaactaactaagagaaaagcctattgctaggtgaatagatctgcataatactggttttgatgcattttgtgctcagtttactgcctttgatacttctgatattgccttattgcttcctatatcctagcaatcttcatgtcctacgcgaaggtgtgagaacgagatgtttgtgacgaggacaatatagatgcccgggctaatcgatgaataaaatatacccaacctataagagtgcatcacagactcggtacaatcgcaagcatgagtagaacttgaaagaaaaatgaactattctctgtccatgggcttatcctcctgcggtagcatatgccaccttagagtcaattggttcgctcctctagtca

SEQ ID NO: 47114 - DNA, 1024 bp, Zea Mays
gaattattgaagccaatatcatcagattaggtgtgtttgtgccatggtttagccaccactttgctgcataaacaagttaataattacataattgtgacagaggcaagaaacaaattgaattctaaaaccatgtattcaaaatagaatcacctggattaaagttcttgtttctcctttgccttatggcaatttcatgtccaaatgtcccttgttgatcttggtacatgtagagttcttcaattattttgtcttgtgtttcttcatcaccaatcatctttgtaatgcaattaatcactccagctctaaaggatccatcatgctcaattttagacatctttggataataaaagtaaggattcaagtagtacccaactaagtgaagtggagttttgagcttgctatcccaccgcttatcaataatatcccaagcaactttgtagcggctctcatcattgtcaaacctctcagaaatttctttctttgcctcaagcattaatccatgaaagaatcccattgctggtacatcactgtccagtctcctcaacacatttgccaatggttcaaaaaaatttacagctatatcaacatttttccaaaaggttgcagatctcacaactttattggctttctttctcttgtcctttttcaagtaacccaactctaacacccttgtgtgagcatacaagacattagtgacctgccttgcacttgtgatagtttgctccactggctcaagcttcccaagatcctctagcatgagatctaggcaatgagcagcacatccattccaaaatattgagggcctctttgctgtcaataggcttgctgctgctgtattgacactagcattatcagtcatcacttggacaacatttgcctccccaatctcctctatgcatctgtccacaaggtcaaatgtacttaccatcttttctctcacccgagcagtccactgaatctaagaagcaaactccatgagcactatggacaactaaattcatcactcccctacccttcctatctg

SEQ ID NO: 47115 - DNA, 372 bp, Zea Mays
aaaataagtaatgaagtcaagttgtacgctggagtctgtataattattacattttggtaatgtaatatgatggtgtatgctggcatgttatatttttttccaaatgtttctttgcctcagatgccatcacggactcgcgcacatgatggtgcggggacttcctgcggtcgggaagatactcctaacccgccacccgaaccaccaactttggccgaggctatcgctgccctggtaaatgccactgcggataatacgcgtttcttgcgcgagatggtgggcaatcagttccaacagcatggtgggagagctcctcctcaaggaccgcgtgaaactacatatttggaattttctgagacttgacccccgcttttc

SEQ ID NO: 47116 - DNA, 351 bp, Zea Mays
ctcaaatttctaaagcaaaggggcgtgggttcgagtgctcgctttgcagtatttttgcccaatgtgttagagcggagggtgaaactgtggtatcacgaggtgcccacattagtttcttaatagattagtataactgctattgtttattttctaaacactaaggtatgtgtggtctattgtttattttctaaacgctaaggtatgtgcggtctagtggttaacctcaaatttctaaagcaagggggtgtgggttagattgctcgctttgcactattttttgcgcggtgtggtgggtgggcccaaagtgtcagcgcggagggtgaaactgtggtatcaccaggtgtccacatt

SEQ ID NO: 47117 - DNA, 343 bp, Zea Mays
tcgggcccgagatggcccatgccgccatagccgtgtcctccacggcagcctccgagtcgcggcgggacagggcgtcggccacggtattcaggcgccccggcctatattccactgagaagtcaaaaccgaacaacttgctggtccactgatgctgaggaactgtggacaagcgctgatccagcaagaattttagactgtagtggtcagtacgaacagaaaagtggcgcccccacaagtacgggcgctagtgacggacggcctgcacgaggccgatgagctccctctcataggccgccaacttaaggtggcgggctgcaaatggcttgctgaagtaggcgagagg

SEQ ID NO: 47118 - DNA, 767 bp, Zea Mays
ctgggggagtgtggggggctaggctgggcgctcgccaggggggcgaccaggggagtatggccatggctggctgtgcgtgcagggagggaggtgctggccgaacttcggccatgggggcgtacttgcagggaagaagggcagggagggatcaaccgtgtggaggggatgggctcgcaaggtcgggactagggaggggcttcgtcgggcagggtggacgctcgtgcatgagaaacagcaaagtgctaaacatggaagaagaagctcaccagggatagcatgcccgccagaggaagaggagtgtggacgacgaggcgcagcgcgacgtttgctacttgctctgaggttgagggaggggcgaggtcgacgactacgtggggtagttgctatggggttgaggtcttgaggatttgaaggagggacgattatcaaagccgtgggcgtgtcaaacagcaccagaaatggaggaggcggtttttggaaggaatgtatatgacaaggcgggcccatgctattaccaagttctatttctttgttattgtcgttgatttacaacaccttattgagtcgccatatggtagatgttggtgtttttttgctgcaaattggctgctactggaaatacctatgatttcatagttacgctgcttatatgcaaaattgaaaacactgatggaccgtgaggcctgcatttttttgtaaaaaaagatactaaattcatggatgaaactatagttatgtgttgatttgggctaggtgttttgttggac

SEQ ID NO: 47119 - DNA, 1118 bp, Zea Mays
gaaagtttgaaattcaagagctcaggtgaatgattaagggtgcgagcgggtgctatggcttcacaaagaactctagttttactgcgcacacttaatttgagagaagggggcagaggtagcacaaattcttgcttcggttcaactcactgtgtgctggatgttcatacctcgccgtggatcacgggctatttatagccgcggcggtccggcgatcacttcccagccatggataacttctttagtgcatgcctagcacgtagaggagaggtacagtgaggtaaatcgaagcatgtgtgacagcgcagcgagagctcactgagtcacggtggccgccggtgaataactccggctggactcggggtatggtgccacgtacgctttatctaactccggcgttatccgttccttaccgagcccaaattggaacggcggcggcacgaatcgcggcggtgagatttttttggcgctggcggtctgatccatttcgggacactataccatggcgagctccatttcagttaacctgacagagcgacttcagggcaatttttctctcagttttctatagcaacgtgaccaacactctacagcaaaattatagcttaatagaccagctccaactttgatacatcgtgcatccacaaacagtcacaggatcatgctcagaattgagcttgaagttcatgcaattccactgttagtctgatttcatgacttcaagtagtctaacagtccaactttgggcttaattatctccaaattcttctcaacaactatgcttacactcttaagcaaagttgttctcctttgataggtctatacatttgatgtggtgacctaaggcaaattctcactaatttgaaagatacaaaggctcaaagttgaatccatcacactgaaattcagacttaaccaaaagggtcaagtgtggctcttttgcacttaagtccaaatctcaagttttggattgcaaatcctcatgattaggaaccatatgacttaggatacttatttaacatggtttttacactttagtccacaagtgcactatttttgcacataggcccctagggtttggatttagggttttccagggtttcaattagggtttctggtat

SEQ ID NO: 47120 - DNA, 414 bp, Zea Mays
aacacaattcttgcactcccagacttcggtaagacatttgaaatagaatgtgatgccagtggaattgggatcggaggcgtgctcaagcaagaacgaagataaagtgcctattttagtgaaaagctaagtggtccgactctaaattatttagtttacgataaagaattatatgctcttgttcggagtttagaaacttggcaacactatcttcttcctaaggaatttgtgatacattcagaccatgaatcattaaaacatcttaaaggacaactaaaactaaatagaaggcatgcaaaatggtgtgaatttattgaatcatttccttatactgtcaaatacaagaaaggaaaagataatgttgtagcagatgctttgtctcgacgacatgctttgctaacacaactcgatgctaaa

SEQ ID NO: 47121 - DNA, 346 bp, Zea Mays
gaagccacaaactgctgaactgacaacttgagcttgggccatgaaaacaactgcttcacccgctgatatgttgctggaatcccagaatgcccaccaactgcagaagaatgaagggcctgtaacaccgcttgctgcatctgaacattattgcccagccatatttttcccttgaatcgaaggagaccatcctgtaggctaaaattgggcacagcatctgggttaatagataatttgctaattagggactgagcagtctcatccgataagtatccagccaaaacatcttgacaccactgtggagaacaaacagacatagcatataagctgtgctcatgatgtctgcgag

SEQ ID NO: 47122 - DNA, 420 bp, Zea Mays
gcacccatcaccctgacgtggatgcgagcgatgtagtagcaagcccagggaggctcgctcactcgccttgtttcgtacaaggggcggacgtaggttcctaacgcgtgcagcacgtcttgcagcaggttggggaagtgtctcgtttcgaacattgatgtgtaatgttcggtgacaggaccaaaccccatgaagtagtcctgctgggcatagttggcttcctcgttgacttgttcctctttgtcctcgttgtcatcgtcatcctcatcattgtcgtacccagagtcgtctgggtcgtcacctccgggtgcaggagcttgaatggctggtgtaggcggtgctgaggttgatgacctagctgtgaaggccagtgactctaccaacggggtgggcgtcggcagaagttccttcgagctatcttcc

SEQ ID NO: 47123 - DNA, 408 bp, Zea Mays
tacatactatagaatatatggagagtagcacgaagcagtatgtaggacctgctttggctaattctgtcgtgcttcagcttcaacaatttccttgcttttggattgtgacctagcacatcctcgttgtgtgtcccttgtcctctccatagaacaaacaaaagaatttccagggttgattactataccttcctcaaccaaagcttctccccctctgcctctcggggctggtggtctgtaagaggtttgctgcatacccgaagactgtgagtcgtgctgactactctgagcattattggccctatcatcgctggcatcgggattgtgggttgtcctgacatgcttggggtggagtcttcttccaaaggccctggtcatctcagaaaaactatatgcctcctcccttctttg

SEQ ID NO: 47124 - DNA, 548 bp, Zea Mays
tatttattagctccatgtattccagcagtagtagcaggatagccttttgaacatccaagttctcggggtctccaacttgtcatgttgtcgaactagtcctgtgatgtatgtctaagtctcaatgctacctcgtgaccttaagttattatgatgttaagatccttgtagtatgtgaccttaaatgttctaatgctgctgttcgtcctgaataagttcatcagatgactatattattattttcgttgttcatatgctttgtgtgctgtttctgtacctcgttttgtcgattagcttgagtttataacatatgactaaatgtctgccatctccacatatcctagcatggaccctaccaacaatgcgacatcgtcgcaggcgatgtcaaatccctcaaatgcccagcaatttcccccccaccccctttatggccaacgagcttcatgcaccagaatcctgtcgattgcaacatgatgggaaacattaattttcctagtcctgctaaaggtccaactacaatgtgggctcctattcagccagggaatactagt

SEQ ID NO: 47125 - DNA, 689 bp, Zea Mays
ctagcagcattgctgaccgaagtagcgtaggtggatagcggcgtcagagactcatgagctgatagagtcctgaaccctctatcccctgcatccatcaccctgacatgaatgcgagtgatgtagtagcaagcccgagggggctcggagactcgccttgtctcatacaggggtcgtacgtaggttcccaacgcatgtagaacatcctacagtaggttagggaagtgccccgtctcgaacattgaagtataatgttcagtgataggccatatccgctcaaagttgtcctactgttcatcgttggcttcctcgttgacgttctcctcttcttcttcgtcgtattcatcatcatcaccagagtcatctggatcgtcgcctctaggagcaggggcttggactgctggtgctggcggtgctgaagatgacgctccagctgtgaaggctagtgattctgccaacggggtgagcgtctgcatatgatgaaaacactcttccataggaaggtgactggcgcattgttagactcaatattcatcaacgtcatctacaatgtcttcatcatcaccctctgaaaaaatattagcaaggggtgagctcacttatggtcgaggctcaacaagtgggaggaataatgcaaagttaacaaggtaggctatggataagcggtaagcattttagttggtcaatatttt

SEQ ID NO: 47126 - DNA, 280 bp, Zea Mays
atggtatggtctccaatggtatataatgagttgttaaaggaactttagccattactgctgaaacatataaatacgatgggacaattagaatgatcggctattgttagtgttgacagatatacgttaatattatacttcttttcaagagaaacacacgtacccacctccaacggccaactgattttatactctttttcctcctccaataactgtggtagaccatactacgtactatgttcaaaacacggccagcagcagcagccagcagggaagatgggaa

SEQ ID NO: 47127 - DNA, 469 bp, Zea Mays
ccgcctcaacgccccattggatggcctcctaggcaacatcgaaccacgtgtggggttgagacatggccctagccgacgtcccgatgtcgcgcttcaccgctttggtggcagtaaatgccagctcatgagcccaatgtttagtgctaaagcatagcaagatgaagatcacaaagggaccttgggaacaaagaaggagcactcatagtttagcagcttacccggactggggcacgacgtccacgtccaccctcggtttctagctcctccggccccttcgccccgtggcaggcacctagggcgggacgacgaccctctcctccacaagcttggtatcgagcacctgggcagatcgatggtattctcctccaccatcactgccacctcagcaactgcaggaataggtcctggcttggctgacacccgtgcctcggataggggcgctgtcggcccttccacaggtacgtccgcg

SEQ ID NO: 47128 - DNA, 472 bp, Zea Mays
gggggcctggcagatcgacatcagcgacaggaaaaagggagacgaacctaatccatctatcgccgtaatcaaatcaggaacaggtttgcgtcaggggcggcggtggcggtgcggttaattagctgttaaaacagcgcgcgtccagcgtggtggtggtggtggtgggagagtggtaggcatccatccatcagcacaagcacacacggtggttgtcgcttacctcactttacacctaaccgccggagttcccgttccacgggtcacggcccccggcgtcctctttgcgaaactcagtggcagtgatgagctggggtggggccgtgggggagtcctaccgctaccacccaccaactcagctctctagaagacctaccctcccgcgattcctcagtcaagtgcctatgcctatctataaaatccagccccgcttcacccacacacccttggccttggcctggcgctcgcacctcac

SEQ ID NO: 47129 - DNA, 536 bp, Zea Mays
ttttgccccaccgcggtcgcgaatgcatcccacaatttcttcatcaaccccaccgaagagcattgatccaggctagtagtcgcaggatatagcaaattcctttaattctgatatgtcttctttggaaagctgttggtcgcccaggtgtcgtaggtcgaaattcatgctttccgaagaagtttcttcaattttcttccccttatcagaggtcactgccactacatctttctccacaaccacatccgatataagtctgtcgatttctgacagagtggttgcgagattctcggcttcggatgcggcagtagcttcagcatcagcgggtatagtagctttattcgccgaagctaagggcggggtctgttcaatagcttccattatattcatcatacgtcgcttcttctgccctccgttttccccctcgacagtcgaggcgatttcccttgactgcaagaggctagttagatccaacctcagaggacttagcagtgcaaatgggaaagattcagtcattaccttcaaaatctccgagaccg

SEQ ID NO: 47130 - DNA, 356 bp, Zea Mays
tttataggcgcagagtacaactttagcgaatttacaaccatgccctagaacctatttaaactatcatacatgccgagggcaaagttgtcctttccttcttctatcctgtttactaagcttcgaaggcttcttatggttttattcagcttcttcaagtatgcacacatggtgattgcccgaaacttctgccttcgagtagatgcatatcaacagtttcgatcgaagcctaccttcagcattagtcctgcaacatatagaacaaggtagaaaacaattattgaattagtgttttgaggaccttcgtgagaagaaggcccccaacagtagccccttcgcggtgctaattcgttttttat

SEQ ID NO: 47131 - DNA, 1225 bp, Zea Mays
tctcaaagtacaagttcaaccaccttctataataggctaaccagctataaggataacaaaatgtagcatgtggtaagtataaaactctctcttgcaacttaatcttacagacagaggttcaacacaatatgaagctcttcattgccccatatattctaaaagaattgctgaaaagaaaatgcatatcttgttttgtacaggtgatcgaagattgagtgtcgctaaccgtaaaaggtagtgctttagtaaaagaagcacaacaacaccaatgtttctgtaacaaaacatacacactttagctccacattttcaatgcaagaaataagtagccacatatggcatcatcagttcatcactgctcatgtgactccattttgaatgcaggaaataggtagtcacatgtgaccatatattctagtggaatgctaacctctatttttttaaaaaaaggtatttgaatctaacactgacacctgaatttacaaagaccacacgagcaaaagcaagaaaaaaatgtattttagttgttgtcaaataattgtcgatccaaattgcaactcaacatcccaagcgttgtggtggatcaaagtcttcccgtcgttccattataagctaatcaaataagctacatcgaagttatgcctcatccgatcatttgcccacaatacccaaatggggcattgaagcattcacatgggcataaacttctactcggttcatggcgttaacatcacagtcaacaggacgtagctgagttgaaaggaacaaaaatatctccatgaattgtactattttagactaacctaaaaacaattgtataaaaggggggcaacagaaaaaacatacacaatagagcaaggaggtgggtcagtgtagaatctaaaacattatagtcaaggcatgattaacatctctttcttataaaacaaaaaatgtgtaatattgtatccatattcaaaataccacttgtaaatgacaaaaggagaaacataaggataaaactgctaatgaaaagaattaccagcccttcaaatttctcaaggcacatacaaaatgaaatgtgacatggtacttctcaataatgggacaaagaaaacagaacgagaagcaactggtaagtaaatccagtcgttgtagttaaatttgcaaatataggtttcatgttttgttactaatcatggtaagtctaacataacgccaaacaagcctaaatattctcagcagc

SEQ ID NO: 47132 - DNA, 651 bp, Zea Mays
attgtttctgatcgaggatctcaattcacctgaagattttggaagagccttcatgagaacatggatacgaagttgaacttcaattcggcctatcatccccaaactgatggccagactgagagaactaaccaagtacttaagtatatgttaagagcttgtgcccttaagcatggaggcagttggaacaagagtctaccatatactgagttctcttataatagtagctaccaggccagtctgaagatgtcaccatttgaagctttatatggtacaaagtgcagaactcctctgtattgggattagactggtgaatgatagttctttgggcatgaaattattcaagaggtagaagaacaagtttgtatgatccgggagaacttaaggatagcacagactcggcaaaagagtaatgctgataaccggagaagaccactggaattcaaagagggtgaccatgtgtacctcaaggtgtcaccacttcatggaatgagaagattcaaagttaaaggcaagctatcccctcgctttattggaccctttagaatctttaggcgagttggggagatggcctaccagcttgagctaccagatcatctgtctgatgtacatgatgtatttcacgtatctcaactcaagaagtgtctctgtatc

SEQ ID NO: 47133 - DNA, 486 bp, Zea Mays
gctaaaatgaatttgatatgaattatacaagtttctgaatttatttctaaaccaaaaaccattttctgaattgttttatcccttttattcaatgattggactggggacactattctgcgaaagatcagggctatttcatatatttctccaagactcatactctccccacacggatggtgggctgattgtgtaaaagtgcaggggctctttaagaaaaggggtgcggcgaaggggtatgctcataactccaccatactatcacacttggatggaccagatcacatcacacgcttatgaaccagtatccacccacagccatccgatgacatctcaatggcctggatctgattgagtgaaagggtaccatgcatcaaatctgagccctagattcacgaatcaacgatccacggcgttcagacctacaatagggtgacgatctaatcctgaccacccatcttgagatcgacggccacagtcccgtcttcc

SEQ ID NO: 47134 - DNA, 567 bp, Zea Mays
atcatatcaacacccattcaaattgactcaaccggtggtagaattcgagccgatagcatttgcttgaatgtaagtgtgcaaataagggggatagcgtttcccgctaatctcatagtaatgggtactcagggaatagatgtcatcctagggatgaattggctagataagtaccaagcaattatcagttgtgataagaggataattaagttggtgtccccactaggagaagatgtggtagccgagttaatctcacttgagccaaggaaaggaggttgtcaacagatggctattgatagcaaggagccagattcactcgagattatcaaggttgtgtccgaattccaagatgtgttctcggaagacttaccaggcatgccacctgagcggaaagttgagtttgccatagatcttctccttggcaccacccccatttctaaaagagcctacagagtatctggaccagagttggttgaacttaagaagcagatcgatgagctgtcagagaaaggttatataaggccaagcacctcgccttgggccacccctgtcctattcgtggagaagaag

SEQ ID NO: 47135 - DNA, 426 bp, Zea Mays
ccctgttggggatctcaacactatcttggtaggctggtagctgattttttttttcggtggaccctatactacaccaatgtagcaacaagcttaagcttgtacaaggcattgtttttggataaaggggagtttatttcattaagctaatgaaaacagtgcccggtctctacattagccaatgtattggaccaaccaaaaaagatagcttgtacaaggcatgcatgtggcgcatcttttcctaatccttttggctccatttccatgcacggactcgaggacgacggtggccggccggcggtgtgtcgtgaaccaggggcacaaagtggaaggctgcgcagccgtggatcggtgacggtccattcttttgtttctagactgctagactggctagggtagagatagcaatagagacccttcctgattact

SEQ ID NO: 47136 - DNA, 682 bp, Zea Mays
aatttctttgaactacagggtgctctgtataaattctagggtctgctttataattcttttacacgtataaggacggcgggttgttaaccgggaagcctagggagttttatgataatctgctatgatagtatcacatgcatcgccctcgagccctcggatcaaacgtcaacggtcaggatcaaattacataaccagcgaaccggtacgtaatccagggtcatcgaatcttgatccaacggatcacaatggatcccgaactacatgagcacccaacaacccgatcaaatatctacggcgacgagaatcctggccaaaatgttattttatcccctaatcaggatcatccattgctggatccacgaccgcacgccccttcctcatcctgccatggccagaacagtggtgccgccgccccatacagcggcgagttcgctggactgccaccctgttgcagcagtaggtcataactcgtgtgcgaactcaagaaaaacaaagatgagatctttgtaagcttaatagaagagaccatactgacggtaagaagaccgaagcgagttgttcatggagtggggtgacttcatggcggcgcggcaactacggcgagaaatccgcactgcaccggggttctacgtgtggaattggtcatgcccgaagctcacccaagtcccaacaaggcgcccgg

SEQ ID NO: 47137 - DNA, 494 bp, Zea Mays
tccggcttccgcctcagtagggtgtgcaggtacactagggtgtagttgcgagtacaacacatggacctcctcatgcaatgtattgcaatacacctgcaggttgtcgacagttgagctaagttcctttattcgggcctgagcctttgcttccttagcgcatgccagcaaacgagactgtactgcccagtcaagtgctaagtcccgatcagcaagctgatcctgcaggtgacggatgtcccttcttagttcattgattctatctccgtctgcgacccaagcatcggtcctgtgttgcagcgctgcttgaagtcgactcactcgggcttcaaggtctcctatggggtcattactcccactgctactgctttcatgtcgaggagccagttgatgccgaggtactccaattggtccagtggacttgcgtgccattagccttgtacgtggcggcatctttctaagggggaaaatgttattagtataattcttagcatgat

SEQ ID NO: 47138 - DNA, 472 bp, Zea Mays
caaactggtgcatccagccaaatgccctggactggactggaggtgcagtattctgggggagccacgaaaactgcgctgccgagggaaaaaaggttcgtagtacaagaactgcacagcacactagcacagggagatcctcagatccggggatggcgcaatcaattactggcagtggcaacgccattaattgtttgtttactagtcatgggttaattggcatctgataatgatttattatatctatgaatgtgttatgtgtagggaagcattttctttattttccttgagccttcagtttcagtggcacgtacagacagtacatgtaaaatcgcttgcagtcgcagcaagaaatggtctgtcgactgtctctccaaagtttggcttctgaaactgaaagccattcaggtgcgccgttcctgcctctgtgttgtgttttagtactagcgtagaatttaagcgaccgttcctgtca

SEQ ID NO: 47139 - DNA, 458 bp, Zea Mays
catgttctaagtctagcatcgctatctccttaactacaaggaaatcaaccatcctcattgagatgtaacgaagcagaagcagttacgcataggttcagctaatagtttgaccacaacaccctaccgatgctgatttctgtaggagcagagaaatagcaaactgttgtttggtccttctattctatttagctcatggaggaggcgaacaagaagcgatacgtgccataaacatcgaaattccttattagatctgttgctagagcacacaggattactgctacataaacagagatatgaaagagttctcccctctaccattaataaagcagcaaatctctggcaatcttccttggattgcttcaatcctacatcaatactgagcacttcccccctgttccaaattgtgtatcattttaaaatttgtcctaactttgaccaagtttatagaaaaagtatgc

SEQ ID NO: 47140 - DNA, 680 bp, Zea Mays
tggaactccaacgctttgaatttttcctccaattttcggacggctgcacagtactagcccatggaattagtcgaacaatcccagtatttatttatctagcttatgatcactagagaatctccatatatcatcagcttcttgatgctcagtgatacgacgatgttcaattcgtggatcagtgcttcatattttgccgcattatttgatgctggaaacaatagctggagtgcatacttgagttgttctcctccaggagcaatgaagaggattcctgcacctgctccctgcaacttcagcgagccatcaaagtacattctccatacttcggtagtctccgggttgtctgggacctgatgctcggtccattctgatacaaagtcaaccagtgcttgagtctttattgccatgcgaggtcggaactctatgtcgtgagctcctagctcacatgcccacttggctatccttccgatagcttctttgttgtgaagaatgtcccctattggaaatcatgtgactactatgactttgtggtcgtcaaagtagtgacggagcttgcgagcggttagaagtaccgcgtatagcagtttttgaacttgaggatacttcatttttgagggaccgagaacttcgctgatgaagtagaccggatgttgcatcggatatgtctgtccttcttctgc

SEQ ID NO: 47141 - DNA, 713 bp, Zea Mays
tagggttggattacgcggatccgacttcgcctcacggtgcacctaggatttcaccctagagacgcttgacgatgatgtggagaagagagacgaaggcaatgggtgacaaggtatgtggtatgaggtgagacaatgaagtttttttctctcgctttttccacgcttgcgagatcatgtatagtgagggaggaggtactggactatagatcgtcaaatgggtcgtgcctgatggatcgacccgaagcacaactcatttaatagtgtcacggtctggattgacatgatttaaaatgggctcatggcggtccaacccgagaatcgtgttatgcctagtgttgggagtctactcttaccgaaggtcctcgaaacaccaagatatcaatcatctctaatttttttcaggtgctccgaataaatgatagaaccaccttcgtcctggaaacatacatgaatatggattcagaagcttcagttctatggtccaggtatgaaactctcgatcgatcggatggaggaggctttcggttgatcagatgaaggggaactctgaatactttctcaacatgactataaggaaaaatacggtggtgcccatagtgagtttcgtaggttgtgtataggaactgagggtatggttgtaatttcatacaaaattgtacatcgaactgtcactataaatagaggcacaatgccatgcacgactccattgctgg

SEQ ID NO: 47142 - DNA, 603 bp, Zea Mays
gatcgctcgaaacggggaatttggtgaaattaaagcctggaatctcggattggcgtgaaatttggcaaatatgttactggaagtgttgtgaaggtgcttgaaaaatttgggttcaatcggggcatttttggctggtttgggcatttcaccgaacacgtggtgggcggagttttagggtttcgggaaaatggctatttgaggtggaaaaaccctcccgaaggagctaggaacctgcaagaatactcaaggcacacagagggacacatatgaccacttggtttcactggatttcacagaaattggaattgaactcaaggggtggaaaaaggggtgctcagcctagagaacagagagagagaagatagaggaagaaaggaggctgctcaccgagcgaggggaggagcactggtcgaggtcgctagagagcagtggacgccagtgagggagatcgccggtgagagggtggatcgccggagagagagagcaaacacagagaacagagagctcagaggaagaaaagagcctctggctcggtctcgggctggaggccgttttttttaaaacgcgatatgggcgcaccggacagtctacagtgcctttccg

SEQ ID NO: 47143 - DNA, 924 bp, Zea Mays
gttttataatatatatgacataaaatgtaaaatggacccacatgcgacccgatcattaatgtgtcacacaacaaagccaaatcatcattttactttaattcatatcatttacgtaccaagaggtttagaaagatatacccatcctatgttgattatatcaatacttttacatttacatcgtcaaactgcaaaaacttggtcgcttcataaatttagactcaaaaaaggaatcgcaacattaaaatgattccttctaatctttttttattagaagagcacccaatttgcaagcaccatatggtttcacgagaacacagacgttttttctcttcgacacatgcctccggcctttgcacaccaaatcctatgtctagacacaccctcgttccatgaaaaatttgcaagcaccatagggtttcacgagaacacagattttgaacatagaagctgatgtcgtagttcgatccgagtgccctttcttctgattcaaacattcgagtgtagatagttggtaaaatttatttgtttctaggagcgtctaacaaattgaacacgaccctaatattgtcttcagtctcagcttgatccgaaccattttttatcttcaaaatcctagtttctgaaactgtatttatatgtatatttgtattggcattttcgagaatgaaatgaaattaagtgagaaaatccattttttctttattctccaccgcttttctttcctcttatccaatcagatattttctttttgcctctcgaagctgcaacttccaggtcgttctcatcccaattcccatcgttccttctctgctcgtgggcgcagccaacactgggcgctcagctccctgcccctcccatggcggctccccctgatccctccctgcgcggcttcctcttccctgctgcgcccctacgtagatctcc

SEQ ID NO: 47144 - DNA, 560 bp, Zea Mays
taaaaactaagtccatgggtctggctctactatgaagacaagcagaagtagatagcagcaatgtcttcagtaaagttcagctgctttcgacattctatttgtagttttatcctattggagcaacacaatgtagtagtagacacaaatggaaatcatcatatattggcacatgatgtccttcggtgactcaaattacatgaacaagaatacatacgtacacaggaatagaagtgtagaggtacaagtgctactttcactagaataaatggaatggagaatcagtgaaaccaccattgggattaaaaacatatttgtttaaaatcatcccggggatgccacatcaattccattatcatgtatatgggttccagaaacacgatgaacactatatatgaccgttccgttttaagagtatgatccccacaccttttggatgatttgcaaaatacacgagtcaccaacaaatggagaaaaactatggcaaccaaattggagttatatatgggaaccagattggcataaaaaataaaatgaacaataaagtatctacaaaacctcag

SEQ ID NO: 47145 - DNA, 1217 bp, Zea Mays
gacaaattcactaaatggatagagtacaaacccattgcttctctgacttcagccaaggcagtggaattcatacaagatataatgttcatgtttgggataccaaatagcatcataaccgacctagggtccaatttcactagctctgaattcttcgacttctgtgaacaacggtgcattcagatcaagtatgtgttagtggcacatccaagagccaacggtcaggtagaaagggctaatggaatgatattggaagcactcaggaagaaagtcttcgacaagaatgaaaagtttgcaggaaagtggaccagagagttgccatatgtggtctggaccctaagaacccaacccagctgagcgttgcacggaaacactcctttctttatggtctatggttcggaggcagtgctaccggctgatctcaagtttggggcaccaagactgattttgaaaacatagccgaagcagaagccactcgactggaggatattgatatattggaagaagaacgattgaatacagtaattcagtcagctaggtaccagcaaaccctgaggcgctatgatgataaagccatacgacatcgatccttcacagtggaagacttggtccttcgccaaattctaacaggggaaggacgacacaaattgtcgccactatgggaaggaccattcacagtagcagaagtcactcggcctggatgatatcgacttactcaaatggatggcacagaaatagggaactcatggaatatagaacatctcaggaagttttaaccctagctagatttcaaaagctatcggggcagcattgtattctgtaattggaaaatacatcatcaataaaaagacttcattctcaaaggcactcaaactatttatcgtcaatcagcatgcctactcgactcagggtgaccactataccctactaacggagcaatcggcttaagtcggcaatgacttaaggcggtgtgacatgctcacgcttacttaactcagggtgaccactataccctactaatggagcaatcgacttaagtcgacaatgacttaaggcggtgtgacatgctcacgcttacttaactcagggtgaccactataccctactaatggagcaatcggcttaagtcagcaatgacttaaggcggtgtgacatgctcacgcttacttaactcagggtgaccactataccctactaacggagcaatcggcttaagtcgg

SEQ ID NO: 47146 - DNA, 422 bp, Zea Mays
aaatatctccttgagaagcgtgctgttgttgatgttgataatggcaagttattaaatgaagatagtgatatcagatcggtaagttcaaaccccattgatgcacttattctttacatttatctgccaaaaaaacttagtttggaggttgtgctccgaggaaaattatttcaaaaattctagctgtagcatatacaagaggttatatcagtttttgttggataagtgcaggtccttcagtttttaatggatgatgtgtctgacttcttgtcaacacatttttctagttcaatggagagaagcaagactgatgagaaaggctgtgcttctacacttaaagctttcattgattatatatctttgagggaaactgaaaattttcgatcccgaaaggaggaaaataagaattctatcacattaacaac

SEQ ID NO: 47147 - DNA, 1062 bp, Zea Mays
acctccctagggtggtttggactatattgttcgacatgcttcgggaaagtgactatcagaacagcagattgtcgaagtgtaacaccatgccaagaacctgaaatacccccgaggttccttggtatacggaggaagtgaagaagaagacttcctctactgtatacgagacaacaaagagagtaatgtttgctgtgagatgatggacaacatgggctatccaaagcttgagcttggtctgtctgtaatgatgaaggaccaacttgcagatagcctcgcctagaacagcttgaaggtttgtatactttggcttcacatttggtaatttttgttatgacgaactatttttgtggtaattcttatcgttattgtttgtttcatttttgtttgccagggtttaattctaagtaaagctttaaaagctcaaaaagatgcagaagatgagagccaccagatagcaattggaaaccttcgttcggaggttataactttgagaaacgaagctcttgagaaggataaaatcctgctctctttagtggagaggttaaaatctagtgaagctaggctttctagcctttctaaagcagagcaaaggatgaagggatttgaagagaggcgattgaaagatgcaaagtgcattgctgacttggagtatgtgatgtctactcaagtggaattgcatagatctgaagtgcaagaattagaaaagaagcttgacgaagtaactggaagtttcaatgtggaacaaacacaacatgagatatctgatatggaacgattgagggtgtagaaaaatgttgaggagctttgtcaagctaaagaggaatgctacaatgttgctacggaatgtgctaacaatttgaagaatagcttttccaaggttggcgcattctcctcagagcagaactttatctatggtgatcctgacggtgttatctggtggattaacggtaaagctgaatcttttgaggagattcttagtcatagaggagacttctacacttttgccggcgcccgtgatgccgtatcggtccttgaaaaggttggttgcaaacatgccaaggc

SEQ ID NO: 47148 - DNA, 508 bp, Zea Mays
agaggtggaaggattccctcatctcttgcagagttgcgcgcttcgcatggggatccgcaagaagccggaatacgtctggaaagaataccgcgagaacggaactgagaagtgctttatggcagtctacctaggagaaagccgaaattacccaaaccaccctcctttccaagtcaccttcaccggacaccgcttcccagacacttgccaaaatgttgccccgaaaagctctccgacagctatgccaaaactacagctgagaggtctttgaaacccccttcgttacttcccacctagcaacaaaaatacccctgcctggaggaaaagacttcatgccctctcaggaagagatcccactgaggatgaccccaccatcgtctacatggccggatatctccacaccctcgataaccactatgatgacctttcctcccactgcacccacctaaactcccaggtggaaagcttagagcaacaggtcaaggaacttaaaaaggagaaggcgtccctc

SEQ ID NO: 47149 - DNA, 519 bp, Zea Mays
gttgatagcatttgtttgaatgtaagtatggaaataagggggatagcgtttcccgctaacctcatagtaatgggtactcagggaatagatgtcatcctagggatgaattggctagataaatatcaggcagttatcagttgtgataagaggacaatcaagttggtgtccccactaggagaggaagtggtgaccgagttattcccgcctgagccgaagaaaggaagttgttatcagatggttgtcgaaaacaatgaggcagacccaattgagagtatcaaggttgtgtctgaattcccagatgtgtttccaaaggactaaccaggtatgccaccagagcggaaagttgaatttgccatagagcttcttcctggaaccgcccccatctttaagagagcttacagaatatccggaccagagttggttgaactcaagaagcagattgaagagttgtcagagaaaggttacatccggccaagcacctcaccttgggccgcccctgtaacaccgcaggtgttaccc

SEQ ID NO: 47150 - DNA, 536 bp, Zea Mays
attaaatcttaagaggaagtagattatagagttttcaatcacagtccttttactctatgtgtgcagcttatataagaagcgcttcctagataaaacctatatttacaattggagtttaataagaagtacattatagagttttcaatcatagtgtttgccggtattatcacatcatagacaagtatggaaactctatgaccagaccagactggcttagtgaagggcaacataaactattttacctgacgaattaaaggactactgtaaagcagttgttgttgacatacttatctgagtcaatcattcaatcacatcttcatggtaacttttagcaataaagctgatcttcacatgcaggctaatcttcacatcttcatggtaacttttagcaataaatctgtcaacctgaaatgcttctgagtggggcctggaatcacgaaatagttaccagaatctaatgcagcatacatcacctgcatggaaatatttaattataatttttggtcagaggatcttcatccatatgacaatgactc

SEQ ID NO: 47151 - DNA, 549 bp, Zea Mays
accccagacgttcaagtttgagaacatttggttacaccatgatggtttccttgctgtggctcaagaagcctagaaccaaacaattcagcagtaagaccctgccaagatgttgatggccaagctcaaacgcatatggaaagtgttggggatatgatcctcggtccccggggcccatcggttagcgagcatgctggggaagaagcctccggcaactaggggccactggttagtcggaggagataggtagcatccaccctggaagaacccgctcttgaatgaaccctgcggcaccgagcccaggaacgggcgtagcagaactggatagcgggcagacgtactgaagggaaaccactcgagtggatcccacgcctaacctaagaccgagccatcataaatgaccggccacattaactaagtgtagctctgagccatagcggattcatctgtctgcctcccactcatgacttacaaacccttcgggtcgtagagcacttatgacctacgagcccctcagactgtggtgcaattatggctcgcacattccccagc

SEQ ID NO: 47152 - DNA, 1427 bp, Zea Mays
cctcaattgagttctatcctaagtctgaaaaacagtgttatgggctcaacttttgagctttgtaactttttaatcatagggtttttgccctaggtcaccacatcaaaattgtagagcaaacaaaggaaaacaattttgcttaagagtgcaagccatgttcttgtgaaaaatctgaagataatcatgcctaaagtctggctgtcaggctgttaaggtttgaattttcagacagacagtgtgaccactgagactttaagcatgaattcaagtttgaattattgagaatttgaccaaggttgctatgacaaaattgtagctggatggtcaggctataattttggtacagagagctagcttagtcaccacacaaatttgggagaaataggagctccaaagtgctctgtcaaccgttctgaatggggatcacgatggtacagtaaccgtgtggatcaggacgccagcgcagccaccttaccaccggcgaccgattgccgtcgtgattcgtgcgaccgccggcccactttgtgctctggatggttggatagtgtcgcggggtcaaatatcttcgccgccggtgacctggaagccactccggctagtcgtagttcatctcccctggcccaccgcccgcgggtaaagttggtcaccatcgtcgtgccttctccgttgtccaccgcgtgtcctaactgcgccaccgcatcgtcgtgacttcctctaaactccccatcgaccaccggagttactgccacgacggtgaacacgtgttcactgcaccagcgttcttctccccctccggccgccgcgcgtcctccctaaattcaccggccactaacgaagctgcctataaattgagcccctgggcagctgcgttaggtcatcacgaagcccacacacccgttcttcccctcgattgcccaccatagccggagaattccccttttcccccaaactggtttccgccgccgtaaaactcacctcaccgcggccagccctttccaggttagttcatctctctctttcccttgtttaagcaccctggttcctctgtgatgcttgccgatccttcaattcaaactaggggatcatcaatcgccgggaacatgatgatctagccgccatgcccgcggtcaccgtggccagagctccgtagttgatcataagcgcaattaagttagggaaaatgatcaaggtagccccgatttcatgtctgctgctcgggaaccctagccgttgccccaatcgaccggtctacgagctcgtcggagatcggccacgcgtgaacgccgtcgaggtcgtgtcgtgtaaaggaatagaagatggagggcctttctgtaatttgtcagcgacacatcagaacagtaaaggaacttgtatcctgttatccagaaccccgaggaccgctgtgcaaaatggccagcgcgggcgcg

SEQ ID NO: 47153 - DNA, 493 bp, Zea Mays
gttaccagaggataaacaatattattatggatctaatgcaactagaacagatcaaaaaggggttagaatggattaaatatgaattaaacaagtttctggaattacttttatacaaaaaaaaatgttttctgttttaaattttattacccactgcagtcctggacggcggccacaattttaaatgagtttagggtctatttcataaagtccaggactatgactattactggatggcaggttcattatgcaaaatcgagggaccattttacaaagcaataacaccgaaggggtacgggtaactgtgatacggccgatcaaatctgagcaatcaagattagatggtggatgtaataaattggtatgtagtgagggtcgtaggatcaaccatcaatggcctagttttcatttatgcaaggttgcatcgggaccgaccatattacgctcaacggcccagattcgagataggcgaaggggtatgtttcgcctaatcctg

SEQ ID NO: 47154 - DNA, 643 bp, Zea Mays
gagctgaaaaactgatggtgggagtttatgttgatgatctaataatcattggttgtagcagcaacatcattcaaaatttcaagtcacaaatgtccgatgtgtttaaaatgagtgaccttggagtattgtcttactatctgggcatagaggtgaaacaagattatctaggaattacaatttctcaagagatatatgcaaacaagattctagaccaaagtggctttgctgactgcaacacttgtgaagttccaatacagacaaagctgaagctgaataggaagagtgacagcggctgtgttgatacaacagaatacaaaagcttagtgggaaaattgagatatttggttaatactcgacctgacttagctttctcagttgggtatgtgagcagattcatggaagaaccacatgaggagcatctcatagctgtgaaacatattctgagattcatagctggaacaagggattggggactcttctatcccaagagaaatggaggcaaagcaaaattgatgggtttcggtgacagtgatcttgctagtgatcaagatgataggaaaagcacaagtggagttcttttcttcttgggggacagtccaattagctggcaatcaacaaagcaaaaggtagtggcattgtcaag

SEQ ID NO: 47155 - DNA, 839 bp, Zea Mays
atgctttatgtgcatggtaagatcgatgcctggtcgtcgagtctcgggaaattttcggaaatgtgctggtgccctactgatggggttgaatgtacttgtgatgtattagaataactgtgtgtcgtgcaagtatccgaaaatggtgaaagttggtgtatgttggtaattagaaaatagtcacagcgttagccaatagccaagcttatgccggaatttaaaatatgggcaatttgatttgaaatcatgcttatctaggcgtgtggttaaatgataataataataattggaagaatagtcgttcaaattggtcagtccgattaagaatgattttgcgtgtgaggtgaggtggtgacaatgccaaagtagtcatcactttccctatgtttataagtcgagtcaatgcacattaggtgttcataaaatttcacatcgcacatagtgtatggttgtgttcataacttcgaatagatgttttcgagtggacaagtagatttgtaatgcaaggcgtgtgatgatgatattcgtgatttaagtagatgtcatgtaattgtgtagggaagcttaggttaagctgcaagcgatgtgggaatattttggtaaagatatatgtgaaatgtgaacgagtcattcaatgtattcggtatgtcgtgtcgtggtggtatgaaaaatgggttagaaatcgatcggctaaatgccaagtttgattagagttgatttgttacttgggattgtttggtgaagtgatggcatgactacgtagcccgtcacgtcatctattgtgtgactatgcttaagtgtgccttgatataagttagagtaattcaagtctctaaaacgcg

SEQ ID NO: 47156 - DNA, 436 bp, Zea Mays
aatctcttttttcctcggctctcaaaggatgtggataaggcattatcttccgctttggaatacggtccaagcagttcatcacttgtagtttcaatacatttcagccagtcatcattcggttcatcaaatttgtccccgtatttgaaggtgtatttcaaccgaaccagctcaccttcgccagacttggtaacagtctctttcgacattaaccagttctctaaaagtggccacactctgaaagctatatgctcttggacagacagtaccaaacgctttctggcatgcttcggcggcttcatggatttcaaccttcggccttcgaaggtcgaagcgagaccaaatagggcgcataataacctccttaacatcctccctcgccactaagtcgttcttcacataaaaccattcttccatccaattccctggccacctcttc

SEQ ID NO: 47157 - DNA, 390 bp, Zea Mays
cttcttcctgatcaaatcataaggagttgggttgatcagagttgaaaagtggtgggcaagtaaaagtggaatcataaagagaagtgaaggtatcatggtgatgaagatttcactacggccatgcgcactcccagttgcttgagatcacttggcagtcgatcactagtagcttgcatctcttcttaaacactaaaactcggttcaagcataattaagaaaaaatcgtgaacctataggataggcgccttttttaatgatggccacaatttaagtatgatctcaataaagatgatctagaatgtgtacaggaagcaatcatagaacttttaagaccatggatgggtgtattgttggtcactcgttttgattcttgaaagacatcaaagcgag

SEQ ID NO: 47158 - DNA, 644 bp, Zea Mays
cgcccctacacaagaaacatgagttagaaaaaatagaatcaccctactcaaaccataacagacaccccacttaccggcaggcggcagccctgtctaggcgtcgaacatggtaacaccccctaccaggtagtcatcgacatacaactcctgccctattcctctagtcttcgacaccatcgtttcaacaacgcgcggtggcgaagatgcctttgtgggtgccactggtgtcgcagggggcatcgttgtagccagagctgcccccacgcgctggggcgcgatatcttggtgttgtgatgcggatccaccagtcgaagcggggctttctgcttcttctgttgggtctattgacaatctttatccatcaccgctaacacaatagcaccaatatttcttccgtaaggaaagattttctactcacgaaccaaacgagacatagaaaagtcatcgccggcggttcggggaatggggtccttcctatgccactgacctccggtaaccttcagcatgcgcaaagatgtttcccggagttcgggcgacgtcataacctcctgaggcccagcacatgtccccgtcaattcctcaacaaaaatccaagaggccttcggccccatcttttccctctctatacctttcacactatcttc

SEQ ID NO: 47159 - DNA, 643 bp, Zea Mays
cgggattggactaggtgttacaagttcagaccatctgcgtatagcactggacagtccgaatacatctctggatggtccggccatgcagttggacagtctgcgcacatagccgaacagtccgcgtatttgaccggacggttcgacgtagagtacatagaacctaatgataatgattattacccgactacacatccatctcagctaaatctccagctgtatcctacaacaccccagcaccataatatgacatctcagacatgtggggataagtacttttcagcctcctccagaagtactgaaagggacaattggctgtacaagccgcatagggcaagcattaatgccccagaaaatcaaagccagtggatatggagacaacataatatccaaacatccacacctatgttgcaccagagggccggtggactaccaccagccgacattgacatagtaagggagaaggtagctgggacgttctgatataagctcaaagttagcatgatcctcgggtggggggcagtcatatcggagaccctatgatagccaatttgaatatcacccgtacccttagggaactagaatacccgaattcacaaaatcttcgagtgaccaaggcaaaagcacgcacgagcacataggctag

SEQ ID NO: 47160 - DNA, 334 bp, Zea Mays
ggcggctacagagacctatcacaagcctgtcaatgccctgcgcttggtcagagcacgcctttgacgccttgcatttaatgtgggttgaggccttgtttccatgcgtctagcgaccacgtggcgtcaccggacccttgcctgggtccggagtagggcctgggggcaagttctgccttggagtactgggagcccttgttggcgacccgaaccctatatggggagggggtccgaatccctattcgggggtctggtttgtatacgtggaggtcctggacctttcagggagtctggattgcgtacatggggtccagactcgttagtgaaagtactgagc

SEQ ID NO: 47161 - DNA, 525 bp, Zea Mays
accacattaaatgacaagcaattcatgaattagattcaagttatgaatgatttattatgcttatgatgatgcttcatgattcatatgagatgtataatatgtctaacaccagaggtgttacacatgtgttctagccaaatgagagaggcatagcgctactgcaagaaagagctagtaagtgtgatcttgctcaaggctttcgtgttgcgttcttgtgctgtcgagctatcgagttgagatagttgttgttagcattgacacgtggtcaggtgggcgcaaacactcagagacgaaatagacgagctcaggtgcacgacaagatgttaggtagggaactctagcgtctcgttatgtgtgtcccatctcgctacaagacggtggtatttataggtccatccgggggtaggtggtccaaagtacattactgcccccagacaacgaccacattcttaaaacatgaactatacaacagggtaattatagtgccacagccccctagtagttacgcggacacacaattattcc

SEQ ID NO: 47162 - DNA, 1090 bp, Zea Mays
aagaaagggagatttttaaaggataagttcaaagtaagaatttaggtagaatacataaatatcgcaaaggtcaaaggcgataacacacaagggtatgagagaacagatgaaggcatagaatagtcaatggcataattacaacaaagaatggggttgtgtcaaggcttacgcatggtaaagaaggggatattgctaagggtaaaataagtaaaacatcactctcaaatggggatagtagattgaaggtcttagagaacggacatagtgtaatcaccaaggtaatatcgagagataagaaaggtaaaggtaatacccaaccggagcacaacaaaggatggagttaaaaactcgcaagcgaccaagaaggggatacgaccaagggaaaagtaggtaaaataccactataaaattgagatgaaagagagaaggttttaaaggacaggtataacataagcatcaaggtaagatatagaggcgacaagggtaaagatgataattgtgaaagcgtaaccaaggatagagttaaggcaagactcctgaagtggcgaagtggagaaaataatcaagggcaagataggtatggttccaacagaagggttgaagtaaaaattcattatcgagagaagttataaagggacaacgaggtcaccaaggatgtgtaaaatagaatgattgctcatggatcgtcgagaaacaagggtggccaagggcatgtaaactgaaatgtcttttaaacagacattgaggtatgaagataagcatacaggaaaatgtaagagtatgcaagactccaaggatacgagcatactaagaccaagggaatagaaattgccgatagataatgacttaacaatggaaaacgaagggatctcaaaagacaggaaagtcatgaaaatataactagaatgtttaaataggcaaaagagttttcagagttaaatatttgaattaagggacaatggtatggaagaatccaaaagatgcaacatgtcaataccaatgggaatagagatgatcgaatggtagcaatttaatgacgaaagaggagagaaccccaaaaagataagaaggttatggtcaggggacatct

SEQ ID NO: 47163 - DNA, 442 bp, Zea Mays
caaggacagacctatgggtggctggccacgacgcggtgtctcacgacggcgtgacaaaccgatttgggggaaaatccaaatttgggtgctacggtggctaattggttgtgaggagcggtgtactgggttcgcaacaagataacagagtaggccggggcattaatttatagcgggcgactgcgagcacgacgaatttgaacggagaagagcccacagtgatgagggaatgagtcacccgagcttgctaacgtggcattcgctgggcaaagacttacggccatcattggctatcctccacaactcacgatgacatggtgaaatggcttgaggcgtgtcgtgaccgaggtaaacggcggcaaccccggagacgatcgcacagccacatcgccggtgcaagtgggtacggcgactgagcggtaacagtgcccaagctcatccctcg

SEQ ID NO: 47164 - DNA, 645 bp, Zea Mays
ggaaggatcccaagtccctgagaatgattgaggcaagtgccaataccgtgtgaagaaaacttgtgaagtgttcccctgcctcctgaagtcgtaggctatcctatttataggtccaaggggaacagcgtggaggacgggagttggccgcgcactgtgaggagatgtctttgtatccctgtagatggtatggcctgtggaccggatcggtttggtgccagtcagctaagaaaggtcgctagtcaaatatcggagatgggctacatgaccaagtctggtgcccccaagaacaacaagttttctgtattttttagaaagaaggagcaacgactatgtgaaaggatcacgatgcccaagagggggtgaattgggcttttctaaaaattcaacaaatattaaaccctaagcaagagctcaacttcacccaactattagcaataagtaaatactactagaaaaacaacaaccctaagtcattacttcaaatacttgctaagcattgaacaaagtgaaatgcttcaattaaacgcagaatgtaaagcaaggttaagaagactccaattttttgccgaggtatcgaagagtcggcactcttccctagtcctcgttggagcacccgcacaagggtatcgctcccccttggtcctc

SEQ ID NO: 47165 - DNA, 384 bp, Zea Mays
ccacatcaggttcggaccgtccgggtatgagttccagaccgttcgacattgccacgaaagttctcctgattggttcggttgataacaaagccgatgcaattgattagagggcaactataattaattacctacgaaatcccagtgttaggacggagaggaacattcggcgtacagctttcaagtatgttttaatgagtgatgaactctaccgccgaacggtcaacgacgtccttcttaaatacttgggccaaggtgatgctatattagccatggccgaagtacatgagaggatttgtggtactcatcaatcggctccaaagatgaagtggttattgcgaagatctggcttctattggcctaacatgatagctgattgtttcaagt

SEQ ID NO: 47166 - DNA, 994 bp, Zea Mays
ctgacctttaaaacaatccaaaagagcccgagacactgttgcttcagtcgctgacatttacaccgaagccctccaagttctaattctttacgactcgaggtccacgacgtcgcacggcggagaaccgagctccggcgaactcataccggccaccatacgtaacgactggtgctctaattcggctgagacctaattcaacccttaacaagtgtttcccctcaatcaatttcactagcggagctctaaatcgtccagtccacggaggcagcgcagacgacgggagaacagaagtgttcccggtgatctagggcagtatagctcaattgaatgggtcgagcagcattaggagaacctaaggacactaaaacgaaagatcagatagtatgaatagacctggaacaagctggccacggcgagggctctttcacggtggcggaaaccgatttgggggaaaagagcaattcgtgggctctggtgagtaattgagagcacaagcagttggattggatgctggattacctaacggagccgagggtgtgctcaatttatagtctacttgagcggtggccagtgaatttgatggagatgtgtggcggccagagaggaggaggggtactggcgcaaacgattagtggctttcaccgtggcagactcacgggtgacgagctagtgatatagagcggcttacggcgacatggtgaagcttcaaggcacctggcatccgatcaacaggcggccaattccggtgaacttatctgagccgaccgcaaagcaaaggggcacggcggccagccgccggtgttatcccgtggcgaagatcttttacccagaagcgttatccggtcaccggtgagcacaaatcacaacgatggcgtgaatttgggtgcacggctcaccggcggcgaggttctcagaacctgaccctatccattcactgtaccattggaaatctcattcagagcatctgacagacaggattacagcatccagatct

SEQ ID NO: 47167 - DNA, 763 bp, Zea Mays
ctcgtgaggcggtgtaacggtggcggccgcgtggcggcgcgcatgcgtcaccgccccttgtcgacgcaggcaacgaatgtgcagccgtgtatcttgtccagatatagctgttgaatcacaagcagatatgggctccctgtcgctgccccataggggcgatgcggcggcgtctcccgtacagtgatctcgcggtggcggtggcggcttcccccctccttcccctcgacggtttccaggttcaggtcctctccttcctcccgctcccctgctccctggtcttcttgattcctccagcatggacctagcgcttttggattttcggctcgggatcgtcttcgaggattcccttatgctttgtttggcctcttcggtttgtcctgctcgtcctggacttctgtcgtccttttgattggtggtttcttttggaagatgcattttcaagctgaattcggattctgttggccatcttctccaagctgccctgggagggtttgcggcagactttgaggtgcatcagctttctgatcgggttttccggttttcagtttcctagaaggctgtgggttttcatatctacaattctaagtgtattgatcgtgcggaattcagagctttttcaatctttggaaccgtggtggccctaactagattcatgaattcaagaaatttattggtgaggagaatgcctcctggttgactgtttggcgcaagaagagcttatcttatgcagatactgttaagcttcctctcactggtgctaatg

SEQ ID NO: 47168 - DNA, 279 bp, Zea Mays
aatttgaaaaatctattgtatcagaaggtgacatgactatgatgaaaaaactgggctacttcggagagtctgagagcaagcttgtttgatttgctggggaagagataattctggagccgaggaatgatgaagttatcgtctttaagagcttcttcagagcagggcttcggttcccgctaaatgacatgataggggaggttctaaagaactttgaaatataccttcattagctgacccccaatgccattgttagacttagtgtgtacatatgggctctcc

SEQ ID NO: 47169 - DNA, 453 bp, Zea Mays
gtcattataagcctcacctaaatcaccaataagtctccttctgaacgtaagcatatagaagttggaggagatgacattatgaacagtgatatctttgtcataagcaaactcaaacaagttagggtacttgtcagccaacttatcattgccacaccagatgtttttccaaaaactggagctctttccatcaccaatattctttttacaataattataatatttgtctcgaaccgagagtatacccttccagaaatgagaatctaaaggtctcttcttcacagaaatgataggcttatttttaacatatttgttatgaacaatggattgccacaaaccactagaattttctagtctccaaatccattttgccagcaaagcttcattcattttttgcaaatccagaacaccaagaccacccatatttttgggagaacagactaaattccattcaac

SEQ ID NO: 47170 - DNA, 595 bp, Zea Mays
atcgaaacaaacagaaggtgagaggaaggcaaagagctctctgggcaaaaggtgaaaacgacgtttgaaggaaaaggattgaaactgcaaaggtaatggtctgaagctctccctctcggttagctttataggacgaacagaaccaccaaggtacgattcgaaaagcggctagatgacggtcgtttcgaatcccgcaagcacgcatgccgcgaacggtcgatgggaaggtagaacgtcttgtcgcattaaatgactgtgtcccctctgaggaaaaacacgacgagcgtcgttccgcgctccgcctcaaaaggtacaccctctcccctcgactataccgcctcctactcccctcggcaaccaaacttgaaagaagtgtcatctacctcgggcaaccccctcggaaaaggagcagcgaatcagaaaaagtcgtcttctacctctgcctattgcttcgggaggaaaaaaggcatgtaaagatactattcaaagatttgaaggctcggccctcagcagggttcagacaaaccatgtcaggacttcagggctcgaagcccaatactgatcaggggttccaaggctggcccctcgaaaggac

SEQ ID NO: 47171 - DNA, 641 bp, Zea Mays
ttctagtcgtgttgattggaagccggatcatctgtgtgacatctccaccaaatcgatagttatcttcacctgacggaagatcgggcacccccattcctatcaagtggtattcaaagactcaggtattaccgtcaggcttaccctagtttagtttaggtttttcatcctataactccagataattgccatacaaaaaaattctgctgtcctagaatcctgtttagccttgcaatttcatttcagattgctttgttgagtttgtgtctgtgtcgagtcttgttgcttgtttaggtcgtgtcgtcatcgtagttcaaccgctccgtcgctgttatttatttccgccgctatcccatccacctttcccagattacaagtcgagacaccacattactcgatttgccctcgctagccgcctagtgtgaactctcgccacgctagccctagattaggttgcaagccgcattgcattgcagcccctccttgtttcatcatctcgcgcttacctattgcttataccagggaggtttgtgcccctgtgctctatagctgccgctacggttcctaccaatgtgtgcccttgaaaaccataacttgaggtatcttccataaaacgggcataactttttgctcggtgctccgtt

SEQ ID NO: 47172 - DNA, 353 bp, Zea Mays
aaaaagtgaaaccatatacaaagattttgatctcccaaagagacaagctctagtcatctttcaaaaccttctcagcagcttcgtctaaaagcctttggacagcttcatcaacatcttcgtttgttatcctaattatgtctagcgcccctacaaagaaggatcagcttctggattgtatgtctctagagggggagagagctcagctgcaacaaaatacaagtatttgattagttcgaagctaaaataatttacgaagctaggtcatgataaatgtacctataagtctagcacgttcagcggcttcttcagttcttctagcctcttccaaggcatcatgggtttctttctccttt

SEQ ID NO: 47173 - DNA, 524 bp, Zea Mays
gcgtggcatacgccatcaggacccttccaaacggttgttaatgaccaaaacacagctctatctatgacaaaactggaccgtcacaaaaagcaaatgatgttaacgacactgtcaacttgcccgggcagacgacggattatgacataaaagtgccttcatccatgaccaaacctgatcgtcatagaatgaattcacttccatgacaatgcgtatttcgtcacataatggatacacatcgatgacgaaaatggatagtccgtcacaacataacaaatgtgacatgacccctatgactaattcggaatcgtcacaaaatcgtcacaaatctttatctgtgacgatacctacatatttcgtgacaaaatacgaacgtcatcgatgataagatctctactagtgccacggccctgagatcgaatgcatcacccaggagaatacgatctatggatcagattgcatcatgcgcccaggttgacggaccggatcggatcccagccgaacagatgcaccagacctaatctagc

SEQ ID NO: 47174 - DNA, 383 bp, Zea Mays
gttgtaatgtttactgtaatgtctgcaccagcgactacagtttactgtaatctgaaccaggcgcgtgtatattgctttgtgttgcaggcaagggcatttcagtttttttgtagtgttcagaatctaattagtcactacaaccaaacagagtagagactaaagtttagtcctaaggctaaaaaaccaaacagggccttaaactgtagaggctatcatgctagaaagatacaccacacacaccagtagcaagcgaaaaaaggcagtgtcgcttctcttatcggcgtcgaccccccttctccactcgcaaccaaaccctcgcatcgtacagcagccgcaccaaatctcaccgccacctccgggtccggggactcaagcgccccgcc

SEQ ID NO: 47175 - DNA, 735 bp, Zea Mays
tgctagccagattcgtcagcttttggattcaccgagtcatcgactcaccttcacagcttgtgttatggtacttctgatcctcctaggcgccctcacagcggagttgctccagctacaactcacgtcgcggccctgttccgaccacctttcacagatgggtcgcgatgctctccggcagatttcactccagtgtccaagtatttatatcagctcatgagacggacgctactaccccgaatgggttatagagaggctaccactcatatccagctctggctacttggtgccctgatctctcattcagagtttgatgttgttgacttccttatatgtgagatcgaggacacggtattggatggtcttcgtgcccgacgacagctgccatatgcacattatctctgttacattttcgcacaggtgatccagccaccgcagttccagggcactcttgaggcctctcgcctccactttggctcctatcgtcccgcccctgaggacctagtgccggtacctgatccagtgattgacactcaggcaaaggatgcgacttaccatcagttcgagactcaaggcacagcggtccctgatgatgatgatgattttgggattccgcctctgcctcctgtgcctccacgctcccatgatcatggggccaggagttcccatgctgcccctgctgcccctcctgcgattgaccctgctctagctacgatcctccagacccttactcagcag

SEQ ID NO: 47176 - DNA, 420 bp, Zea Mays
ccaagctactactgttctactagcttatctatgcatggaggaatacaataaagttagtggcttggacaatacaaaagagatttgggacactatcaagattgcacacgaaggaaatgacatgacgatgatcaccatgatggagctcatcgaaggtgaacttgggatgttcgttgtgaagagaggtaaagaacccacagaaacgtacaacaggctcaagaccccggtgaaccaaataaggaactatggaagcacaagatggatggatcacaatgtctaggtgcatgtgtgatacggaagaagtggaagtggccaacagtgatcacagctacgctccctgtggaacgcgcacccatcctccgcgacggcctccagacatctcccccttacacgatgttggcgttccccaacctaacacccgtt

SEQ ID NO: 47177 - DNA, 899 bp, Zea Mays
gctactccgcccgcgtgccatcgaagggctttaaccgaaaagctggggtgcgcaggatcgtgccggcattagagagcatggagtggaccaccggttcagcaccgtcatggattcaacgctgggatattcctccaccgcgagaccgcgtagcaccatgggctgagaactgcaccccaattccaacggtaaggaacacctcgtactaatttcttttcccgtcacttcttcgtgttgcgctagtagctgtggggaatgggcgctcggaagaatgatggtgctcgctccggcaagttgcgcagtcccgccagtttgatggggagcggctgtattgagtggaagcgtgtggtccttcaggtcgcgtggctgatatactgccgtcgtgatctgtgcgccgtggaccgtttcctgtgctcgatgtcggccgaaatttgtttggggattgagtttgggaagtcgtcaatcccggcgagggccgagtgaatcggggtatggcgttcgtgagggccggattcacgctctccggcgagggcgccgtcgttcgggtgtgctggcgcggccctgtagtgcgccgggggggaagaaggcgcctctgccgtttgatctgaacggacgatagagattagatgtggctcacccattcggcttgggcgactactatccgtccgatcaagatcggatgatggacatcgctttaggattcattaaaccggcgccatccgatcgttgatccaatgatcagcggtgcatacctgttcgcatagggagaggatctaatcctatgcgtcaatctctaatcggacgatcccaggcgctgcataccccttcgccgtgtacatttattaaagagcccctctgttttcggaaaaccaacccgcagtcctcgggaactatactctgtg

SEQ ID NO: 47178 - DNA, 826 bp, Zea Mays
tggtaatatccataaccgatctaagtttgaaacaacgacaatgctttgtaaaatgacacaactcgtagtgtttaaaattgcaaatctgaaaacatgttaaaacagtccaatttattttgcaactaaggcacaagaaaattctccgagtgacgccaaatcagattctcgatccaaaaaaattcaccgatctctcattcatctggacaccagttttcctccgatcttcgcatcggtcgaccaatggatgaacgccgtccaaattgaccaaacccgcgggagtcttttcccttaaataaagttttcttagcctagaagaaaccccacctttccttctctactaagcagaccagcccctctctcttttagtcccacacgctacccttttctttccctccccacacgccactctacttccctgttctatgcgcagggaacactagggagctctctccctccttatggcgcctcgtctccccatgggtaggacctcaagcatctccccaagatcccccatggtgaccccactccctagttgctctcccaaggagctggctactcggcgatgcccttcctccccatggccgagctccccctctgcttggtgcatggcgcctcccctgcttctctggccagggtgcaacaaccccttccctgctccaagctcctactcctcccatggccgccttcttccccatagccagccaccgtttctactgtgcctaggcgcttggggctcgacgtagctccctcccgaggccgagggcccccttccctagcactctccttcatgtgcacaacaatggtggcgagtcctttcctcctcctt

SEQ ID NO: 47179 - DNA, 548 bp, Zea Mays
tatgacaaagctctacatgattatcactaattacccatgaaaaatccctagaaactgctaatactactgctgttcgcccacctgcaaatctgtttttttggacagcaacatacccggattcaaacaacggtatctactaaaatataactccgaattgagcgcataagtactcgttggaaaggtatgacaaaactctacatgattctctcactgattctaactaattacccacgaaaaattcccagaatctgctagaactactgctgttcgcccacccacaaaatttctggacaacacctctaccaattcgcatacgtaaacatctaatcgattgaattgcagcacaaataaacaagagttaatcacaaaatcaccttgacttctccccctttcctccctccttcttccttccaccaaattccaattggagatttgcacccacgcgacgtagatcaagcgggagggctgcacctaggagaggaggagatgggggggggggcagctagggtttgtgggatggtggctgcaagagtttgagggaggaggag

SEQ ID NO: 47180 - DNA, 446 bp, Zea Mays
aaagagccgggtctctttcaaccctaatcctcccttcaccgaccacaaaggtcaagtcgtgtccgtggtcgagtcgtgttgctggtttaggttgtatcttcgtcatagttcaactgcaccttcgccgctatcccatccaccattacccagatcacaagtcaatccaccccattaatcgacttgccctcgctagacgccttgtgtgacttctcgccacgccagacctagataggttgcgagccgctttgagtcttctgcctgcaccgcagcccttccttattcatctggcacaacctattttttccacgaaagatttgtgttctgctgtgattgcagatagggaagttttgccctaaccgccgctttctagtcgtgcctcccaaaaacataacttgaggtaccttccttaaaccgggcataacttttcgctcgggtgtccaaaaaat

SEQ ID NO: 47181 - DNA, 605 bp, Zea Mays
tgatgaagtgctaactggcagggggtatttttgtgcctgtgtaggcgctcgggggggctgtgtcgcactggaaaagctggttgtgaacatgcgaaggttgtaattcatccagaattctcagtttcagcagatgaaatcaaagaaccttcagccgaagctaccgcccttggtgggaaattttattctgaagtgtggatgaacggcgaccgagagatagcagacgaagctatcaggcaaagcgaagaagaatcacatcttgcttcagaggaagcaagaaaagctgaggaagccacagagcacgaaaggcgtataggtacgtttgttatattttagcttcgtaagtactttagcttcgtatctgacaaaaacttatattttggtgtagctgaactttctccttctttggagccatatgatcctgacaccgatctagccctgaaaggtaccttcgacgaaatcaaaatagtgaatgcagcaatagatgaagttgtagacaaacttctaaacgaagctattgagggagtcctgaaggaggatgattaaactgtgtgtaaaaacatttgcaaaatttgtatgctgcccttatgtaagaaacaatttcaaac

SEQ ID NO: 47182 - DNA, 583 bp, Zea Mays
ctccgatggctctactctagctggtgcttagccctctcctctctggtaagaagcctcagtgagcacccctctcccctcttctctcttctctctctgttcaaagcctagtgagcacacctcttccccacctttgattccctatatcaaatctgtgaattttctgtgaatcaaagtgttggatgtggttacattatatcccattgaaccccctgcaggttcctagctccttcgggagggtttccctacctccaatagccatttcattcaaaacctaaatccccgcacatcacatgttcgatgaaatgcccaaactaaccaaaaatgctccaatagatcccaaatttttcaggcaccttcacaacaccttcagtaacatattcacgcaatttcacgccaatccgatattctaggcttcaatttcacacatttccctgtttcaagcgatcgttttcgagccgagtgcccaaattccattttcttcgcctcaaatcaaaccaagtgcacacttcactcatatttacctatataaacctattcgtgaagtatcggctcaattccccgtcatttcatgcctcaattcgaa

SEQ ID NO: 47183 - DNA, 540 bp, Zea Mays
atggattcatcttgccctaattagcgtatttatcccactctagaataacaaccatgagctaacccaaccaatagagtcttgatggattgtataatctattaacccacacctgaccaaccagattttgacctacatcatgtagtccatctcacccataactattctaaccatacttccccaactccgataatatacactaacctcgaatcaatgagctcaagaccagagaagaaaagatcaacctcatcgaggaaggagagaagtcaaacttgatctttagatgcattaccatccaacacagagttctttctcaccataaactttcttaccccaggctattcttgccctaacctaacctacccatcttttatcctacataataaaatgactatacaaatagatacccatgctctcctaatcactcactaggaaaaaaagctcttgatttttgaaataattagaaactaaaagctaaattacaaaccactcttcctatatcctttttcttacaaatctcgaggacgagattatttttaaggg

SEQ ID NO: 47184 - DNA, 682 bp, Zea Mays
atttttcatgaccatttttcctgatgatgcttctaacacctgccatggcaaggtttaatggcgagttatatgcagaaaacattttgcttactgctcgtctggtagctgctaaatcagacgtacactacgtatttgagatctccgtacttgtcggtattgctgattagctgaggatgtctgagtggcctggcctgactagtgatggcccacggacgatcgtgggaaagcttggttggggtcgcatggattcagatatggtttctccacgtggcggcgcatggatggctggtttcagatgagggaatgacgggtggctgggggcgagacctgggaggatgttgctgatgatcgccaacgccaagtaacatgctgcgctacgcacgttcttggtaaagcagcatccgctctgtaggcgtgcgccaggtaagcatccgcgtcagccaggagcccaggactttggcagcgtccacatcacctgatgtcctagacctttgagagaatttcccttttctttttttcctttttcttttttcttctttggaatatgccaacccaaagcatgtgtgtcgtatatgcatcgagcgaattgcattaaccctctgttaaactttagtcgcgggactagtcgtttggttttcaggattaaaagttatcgcgggtcattaaataatattaaaaagag

SEQ ID NO: 47185 - DNA, 594 bp, Zea Mays
agtcattaatttaggttaagatatgtttgtagaagcagtgtctaatccatatcaccagattaaccagtctgctaagtaattcactttagactggatcatattagattagatcatatcagattagattggatataactagattagactagtttaagttagatagatctgccaaggtatgatatatattattaatatatgttagaatcttttgagactggatggattacatggtgtaggtaggtcagaatctatgttaggttaaaacagaggggttatgcaaccatcgaatggttaaggcagttgaatgaggtcaagttagtctatcgttcttaatttagtgcagagtaaattaagttaaaagcatattttacaagagtagagtctcatttatttcatcagtattctctaacatgtttagtaagtcactttagattagattagattaaccatattagtttggatcacattagattgcattaatttagatgcgatctagattggattggtatgactatcttagataggatctagttagttttggattagatcatggttgttacactataatgagataagcaaagtggttgggataag

SEQ ID NO: 47186 - DNA, 342 bp, Zea Mays
gttcaggaccgggggccaggccggctgctaccaatcggctgtgtgtcaggcgtctaacaccagaagaattagcagtgaaacgggcaagtggagattgttaccactgcaatgagaagtacttgactgatcataagtgcaccgccagggggtattcttgctggaaatggacaacgacatggaggaagatgcaaaagcagaggacctgggcattgacatcagcagcaccatgaagctccaagtcagggtcaaggatcggacattggtggcgctggtggacacaggctctacccacacattcatccgggaagctgtggccacccagctgggcctccaagtcacacc

SEQ ID NO: 47187 - DNA, 808 bp, Zea Mays
accctttaaaagaaaaaaggggttccccttcaggtaggcaatcatgtttgctcttcacatctcgtgtgcttctttactagccagcgcctccctccgactgccctctatccatggatcgagacagacttcctaggagaggtcgccctgggagatggtatgattgttctgccttctctcaaggtttctgttgtccctcttaccttctttggttgtttctcattttcccttagggtggcggttcaccctctcgagggttcaccggggcgcagcagtgcctcttaccattgcacaactacactttcttggtaacctccatgacgccattggctagcctgaatgattgacgatggtagttctagaccttttaacaggtaatttcgatgttgccatgaacattgtactcagggttatcttagtagaggaaataatccatgatctcccatagctaacgttttatggtctaatcgtcttgacatgcaacattcatgggtttagggtcctctagattctagctggtctcaggatttttctttgtttgggggcgcttttcatgcggctttcacccgtccgccatagtcatgcggggcgagcccctgagcctctgctcaatgcaaagatccatctgggggtcatcctgcctttttatcttactctcccccgcacatcccttcgcgtgaatgaggggaggtgagtcataccacgctttcctcaatgggttacaaatggcacttggtgagttacaaacgagtaattcgagtggggctctaattcctttcgtaggctccaagcgtggggttcgctaaggatt

SEQ ID NO: 47188 - DNA, 393 bp, Zea Mays
tcattacataaattaaaggtgctgccaagatgagaatccttctccccctttttggcaactagcaccaaaaaggagagagccaccagccataaatcaccactgaggaggatgatgcggaccaaagaattgatgcgccaggtgagttgcaaagtgtttttccccagactgagctgggggaggatagctgcccgaaggatcctagggcggaggatgagaagaggattgacccagatacccctggtggggaggcggggcaaactgctcacgatcatcaaagtattcttcatcttcttcttcatcttctggagacatgaaaggcaccccatatgcctgttggtgccactcattgatttctggtggaggaggatggagaggcacatcaggccaacgggg

SEQ ID NO: 47189 - DNA, 657 bp, Zea Mays
gacagtaaacccattggggtcaacttcagcaggatcacacccattggggtcagcaacggtcagatcacgaccatcggtttcagcttcagtaaaggcaggcactggcacttcctcagcaacaggaacagaaggaccggcatcctgatccaagctagacacttgacgaagacatctcttcttctttttctgcccctcagcaggagaagtgggctgattggcttggcgagggcgtttcgggtgaaaactgtcagacctctgaatatccaaagcttcgctagcttctgggaggggcgctaccaccggtgtttcagcacgggccgcatcagaggaatcttcagctaacatatccagcatggcacttatctctacatcactgggattcaaaggcacctcaaaatgaacctgcctctcgtcgtcaggaatttcttccagtgaggcaaccaaagcattaacttcttcgggagagggtcgcactctaaggcccaaaccgctatcaccggcaggaggattcgacacaaaactggtaaaggccttggaaggaggcagattccaggctgagtacgcaacaggagcaccaatgttcgacaccttgcctctgagtatcatttcgagccggctcaccaagtccacagcaggaattcttctgttggttacccg

SEQ ID NO: 47190 - DNA, 433 bp, Zea Mays
aaccaactctggttcggatattctgtaagctctcttaaagatgggggcggttctaggaagaagctctatagcaaactcaaccttccgttctagtggcatacctggtaagtcatttggaaacacgtctgggaactcggacacaaccttgaaactcgcaattgggtctgcttcactgctatcaacagccatctgataacaactttctttcttcggctcaggcaagactaattcggtcaccacttcctctcctagtggggacaccaacttgattgtcctcttatcacaactgataattgcctgatacttatctagccaattcatccctaggatgacatctattccctgagtacccattactatgaggttagcgggaaatgttatcccccttatttccacacttacattcaaacaaatgctatcggctcgaattcta

SEQ ID NO: 47191 - DNA, 392 bp, Zea Mays
cacgatacatggtcattgttcaccaccttaacctacaatttgccctcgagtcaaagctagagcgaggtgctggaggttgcctcctcagtgacaaagtttgagtggagttagagtcgaggagggcgaggatggagacatcgccaagttggatgcacacttgcattgtctcactagtgcggatgttagtgatcacgtggaccaagatctacggctcgtcggtggctgactcgtctacctcggagtcccccttgttgtcctcgagcgccaagttgaggaggaagattcgttgccagacaaggttgtggccatgcttgaacttctcattgcaattgaagcagaagcccaggcgacatcgctcctccatctccgcctgggataggcggttgacctag

SEQ ID NO: 47192 - DNA, 554 bp, Zea Mays
aactaggatccaccattggtctattttcattcaagtgtcatcccctatgcatcatcaaggggaaggcctttacgtagctcgatggcgagacgaaccacgatgacagtgtctggtaccttgatattgggaccaccaaccacatgccatgctatgaggacgtctttatcgtcattggccatgaggacaaggtgttgcacctagataagacgttttacgaacttcgtcatgcaccttgtgcatggaatgccatgttcaacaagatgttggtggcgctcggctttagacacaacacattagaacaagttgtctatgctcgtggaaaaggcgcttcttgacaactggtggggtctatgttgacgacctcatcatcaccaagaacgacacaccgcgatcccaaagtttaagcagaagacaaatgacatgttaaagatgagcggtttaatcagctggttattgaggtgcatgaggaggacgatagtatcatttgatcaattatgtgaactacatataaagctagccattatcaagatcggcaatgagttcaggccttagag

SEQ ID NO: 47193 - DNA, 273 bp, Zea Mays
gttaccgccatcacagcagcaggtggaaacaccactgtgatggcaacatactttcatgtggccttgtctggacctgcccggacctggctcatgaacctcaccccgggatcagtctattcctgggaagaactctattcgcggttcgttgcgaacttcgccagtgcttaccaatagcacggtgtggaagcccacctccatgcagtgaggcaggagcccggggagaccctccggaagttcatctcccgcttcaccaaggtacgaggtacgatacct

SEQ ID NO: 47194 - DNA, 734 bp, Zea Mays
ctggcagtcggaaggctcactcgcccacgcctagtgttcgtccaaattacacagcggatgagttgtgacatctcgcgcttatgagtacgttctgataagcggtctcattttgccaatcccttgttcatctaattgtgtgtttagtcatggtaaaggtgattgatttcttagcttgttcgggatgtttccttgaacaaatatatgtcagtcaaattttccacttttgggcttcttttatcttcttgtgtttgcttttgcttgtagatgctatgagtgatcggatcgtgatcgctcagacaggaggcatttctgcctttgatatagtttttcaaactatggtatcactttaccagtgaaagctataggcggataggcctagtctattagctttttcagataaaaaattcatatggtgaaacatggaagggcataggcattctaagtttgctttcacagtgaagttactatttcttcctctccgttttagatcgatggctaagcacttagttccgctcgtgcgtaatttcgtaggcagtatagtatagacatatattctgttccttgagtggagtctatttattttctatttttttatcgcaccatagctggctttgggagcagggaagttttcagtgagttacccagcgagcatatttatttgtctttgaaacatctttattttcatctggacagaattgttagtccatttggctgacatgttagcgattttatca

SEQ ID NO: 47195 - DNA, 697 bp, Zea Mays
ctcaatttctgggaagtgaaggggtctcggtgaaaaagagtccaagacacagggaacaactggttggactgcgggtttatttatacaaaggacgaggactcttctgtaaaacgcgcacagcgaaagggtacgctacaatctcagtcgttggatgcaacactgagggccacgattagatcaaaccagacaactcacctgagccactgcatcaataactgacgctttggattttaaaatgcctagatcgatctgcaagcgtccgatcatgatcaaacgatccggaacggatcaggccgaaccggtgcatctcccttctaatctcaaccatccatcaagatctgacggcgcacgcgattctccccaatccccaccgttagacggcggcgccgccaacggccagtggcggaacatcgccggtgatcaacaattcggcgccctaggtcactatctcaaagtccgagagtttctacgcgatacagaattgatggcgagcacgctggagtaggtcttaccggttgtctcggcgtggagagcatccggccacggcgaaggcggatctgcggctaagcgcaggtcgacggcgagaaattgcagcgccgcagagaactcccacacacttcctccactacgaaacgccttcgcttgatcacgtgaagccccgatcttgccttgagggctgccgacggctgtgaatcgc

SEQ ID NO: 47196 - DNA, 919 bp, Zea Mays
accaaatgagccctaagtcaaccactattgtaaaaccaagacattagaggttaacttaagtgaacatggatgtaaatacactatttacatgagtcaataataataacaattctactattggtttacttattgagtcactaatataaatgtgttatttacatggacgattttactgagtaaaccgttagtggatatccatttattgtggtggttttcagctcgtgcccatatatttaattttgtagcgtccgctcctcatgaatcgacagtaaagaaaatcactggtacaagaaaacaaacgtttttttaaatgggattattactctgcttataagaaagcatataaaaggttcatacaccctgaccacacacactctattggggaaaccactgtaacagaggaagcaagtcacacagaccaacgaagcaacttgaaacgagaaggactagccccaggcccaaacaaaattgtcgagccgaccagacccactcaaaccaccaacaggctaacaaagagcgaacaagccatgaacactccgctacagccggaccaaattcaaacccaaaaaaggagacggggtatctgactactctcacatgcaacgagccttccaaaagaccccatagacgctcagatcaccccttcagaggcatctccgacacccatcatggaattatgcaaccacctctaacctcttcatggagtccagagtcctctccaacctcctctgatcctttggctttagcagcaatctctacctctgcatagatagaagaaatagaaccatacaggatcatttttgtactgttaaggaaattcttttctatcaccattttgtttcttttgcaccataaggaccaaatcaatcctgcagtcaagaacatgcgtaaagaatgagacataagaggaatggtatcc

SEQ ID NO: 47197 - DNA, 584 bp, Zea Mays
tagagttacgacatacaattattgagcacatccataacatgttacctattaaactaaacttagctcattcaataggaaaacaccaaatgctatcagtttatatctttcttaatgagggaatgacaccaaaaactaacaaaagttaggcacaccattttaggacacctaaacttagactatgggtagaagtagtttaactagctctctaaaccactttactaatttaacttgcttaacacataaactaaacaaacatcactacttttaatttagcaaatagagaattatcaaaggagatatagctccacggaaccgcattcttaacaaccaatacaataaaatcaacaaaagcacaagtgactccaatggaacctattacactctttattcgcatcgcccattcagccacacaaatccacaactccaaacttaatcctcacatcaaacagtatgtttgctctccaatcgtgaatgagaccctatcattgcatacaatcgaaatatttttcacacatttaacttgctcctaacaataatctggaacataagaaacattcgctctcgtttctatttcacttactctt

SEQ ID NO: 47198 - DNA, 1088 bp, Zea Mays
ctaactataaaagtatatgacatggtataattaatattgttactgcgtagagaatgtttttatgaagctaacgcaactgaaatgaattaatttggagttaaaatgaagcaaatatgaattaaataggattctagctttatttctatactagaaaacatgtttaaatactaatttcctatttccccatgacccctaaactacgaccatcaatatctacaagcacagggacttggctgaaaattttaggacctaatagcatggttcttgtatagttatggatggctggttaaataagggaaagagcaggggctcctaaggaagaatgccacgacgaaggggtatcgttgaattgtggccgttagatctaaacctcacggcctagattagagggttataaatctgaaccggtattcaacaagggccacaagattcgggatccacgacccatagtacgactgcacgctgatcacatctgagcccttggatcatcgatcagcgcacacgatttaattacccgaagccacctaatcctatccacccgttttaagaccagcagttgtcgtgcctcctcccacctctagccagggacggtggcggcgcccgcccatggcgaggatttcatcgtcgcagcgcccaaacgagctccatagatcagttttcccacttcgaacgatgctacacgaagtacaggaaaaatataattctaggagaagcaatctcaccgtgaatctcgtgacggtaagccctaccaaaggcgaagcgtggattgaccaaggcccctgatctccagcgagaaattggcgtgctcatagtgacccattatgcccggaacgacttgagccacacgcgggtaaccccgatgagcctccccgaccaacgctgagggaagccaatagtccaccgcgatgttgacgtccagctccgtgatccctcccttgcggtggtgtcacaacggtagaatccaaggtttgctggcctatgggttgacgaagccatgggcgctggccggggacttatatagggcgagtctgtgactagatccatgacatccgtggattttgcgccgatttcgccagaaacggcgcgcg

SEQ ID NO: 47199 - DNA, 729 bp, Zea Mays
gcaaagtattgtgttttcgttgaaatggtggagtcaaaattgtgaagtgtgttgaactcaaatcccatgtgtggctttttgggtttatgtcgtaccttcacaaaactatttttagttaagtgaactcgcgttatccacatgttgtgttgtaccatctaattgattcggtgcctttgttccttcctgcgcagatagcttttgacagaatttgcagaaggctactcgtcgctgattccttttgggaggttagttccttgtcgtgcttttacacttctcctcacgattcgtagacgacgatgactgctttcttgctacacacagtgcgctcagattatgtcagtgatatacttcttttcagtggcatagtattttgtttatgttattctacacggtgcacatagggtgtgttggtgttgtgcttctgtcgttccggtgcaggattgtgttttcgttgaaatggtggagtcaaaactgtgaagtgtattgtactcaaatcccatgtgtggctgttttgggtttatgtcgtaccttcatagaactattttttaattaagtgaactatgttatccacatgttgatcacatttccttggcttcctactcagatatttcaggaacttcagttttttatgcttatgtgcagttaggtgctcggtggtaccctctgatttaggttcgctgcctgttgcccagcctgcttagagctttgtagtttttggtacgatctaaa

SEQ ID NO: 47200 - DNA, 831 bp, Zea Mays
ggtacgtggtgcatcgtgcatgtatgcaggtatcatcgatcgcaacacctagccagctctctgcatgcagctcacctgccggtgctaccgatccaagtacattagacagcacacgtacacacgtaacgtaacgtggattgaccagcagccagtaggagtggagtggcactggcatcacacacctacgtatctagctaactggctaaccgaaacggcgtacccggatgacgccacatgacataaactaagcacagctactacctctaatatgtgtatcacgtactactacttgttagtgacaccgtttatgactcttaattgtatgcatgctgaataatggacgagagaaagatagtgtgaatgacctctttgaagggtagcgagctaagctggtccttagcttttgggccagtgctggtgcaattaagcaaacatacagtagatcgagctcttaagaactagccacactccaacagtccaactgacaaaacggaacaaatatgcatggctctatgcatctgttaaatcatgttgtgtgtgcatgtttgtgatagatgtgcacacgggcgtggcgagttagacgacgttagtcaacttaaacacacggccggggcatggcatggcagctccgttctatactagcttcattgatagcagcgcagtgcagctatgtcgacgcagagctatatagctgagcaattgagcgtcgatcgatgacctctccctctctctctcccttcacatcacgtgccgcgtcgcaggtctccatgaacagcggtcacctgctgcttcccggcctctccatcatccatggccagatctggcgcaggc

SEQ ID NO: 47201 - DNA, 590 bp, Zea Mays
acgatatataacatcagaaatgtctctgtcctgcatgtcaccggttgttcggtacccaaacgcattagtcatggaagactgccatcgaccatacataaagaagcaaactcctgccccagctccatgaatgcgtttttctcgagaaaaaaacggatcccatacgttgctcgacaaggtaaacgtttcgtatgcatagtcgaagaagcgataatccatttcgaaaacaagctctatgggcctgtttggttgccggcatggcaaagcctgtctcgtatctagtgagcctggttttgattggtctgactagacacatgcaacttcttatgtttggttgtctgcatgcgatcaggctggtttatgagagatgttgtttggttgcccgtatggatatttgttgtatgagttaaaaatgttattaaataaatgaaaattgtattagtagacattaattatatgttaaaattatttaatacacgctaactacatgttaataaacactaattatatactaatcttaatcacataattttttttatttaaaatatacatagcatgtgtggtctagtttcgttcgtaaaaatatcagaaac

SEQ ID NO: 47202 - DNA, 553 bp, Zea Mays
tactctaatagactctagtgtgaatacaatgccctcaatatcatagaaacgtcattagctagcccactaatgtcttcatccactagttgtactctaacaccctctagtgtgaatacaatgcccacaatatcatagaaacgtcatttgaggtttaaaaggtgatctattgttttgaattctttatattccaacttttctcaatatcatagaaacactatttttgtgtggtgttttacttgagtggaaataaacaccatctaaggatgccatgaatagacgggattattggaaaccaggtatcacaaaaggtcattagctagcccaataacgtcttcatccactagttgtactctaataccctctagtgtgaatacaatgcccacaatatcatagaaacgtcatttgaggtttaaaaggtgatctattgttttgaattctttatattccaactttttagcaactgtatggtggaaacctgttatcacaaaaggtcattagctagcccactaatgtcttcatccactagttgtactctaataccctctcgtgcgaa

SEQ ID NO: 47203 - DNA, 610 bp, Zea Mays
cacggggctgggtgctccatggccggtggcttctgctacttcaccacgggtcgaacagagagaaaatgaagaagagagagaactagagagttggccgccaacatggatctcgtgcgtagacaactacccggcccgacgagtgttctaggcgtgtcgtgggatgccgccgcgcgtgcatgtgacctcggcaagcgaggaccgccgccatggggtcgatgattcctcgccggtgaatgggctgcggcgacctgcgtgttggtcacctattgccaccgtggggaagaagaggttgcctgcgccgttgattccctcttgcacggctatgatcaggtgagtgcttcccctttcgtcttattgaatccgtatcgtcgatccagtgatgaacggtcctgtgcgctcgactcttgatctgatctggatcactggttcatgatccaatggccattgatgtaccggttcgattattaaacatgatctaatcgtggccgttgaagtctaatcttgcggccaagataaacgtgtacctcttcggccctggctttctttctaaagagcccctctgttttcctagattcaacccgcagtccactcgggtgttcccctgagtctg

SEQ ID NO: 47204 - DNA, 1018 bp, Zea Mays
caggcgctctgaagaaaggtttcaatggtacaatactgaaaaagatcagtagatacaccacacctcgcacccggtgacctccatgcctggattcgcgtcggcgcttcgatttgtgcgctctggggtgcggattatgaccgacagtgaaaagatcttaccgcagatgaggtcgtgtgctggctgtcgtacccacttgctctgcggccgaccgaaatgatcctcgtcggtgttggccgcttgccgctcgtgcgccacgtaatctgtggtgttaccacatcgtagtagaccaccgtaggtagcctatccatcctgcgatagtgccctggtgaatgccacgatagataactccggtgactcctcccctttctcattgccctcccttcctcgcctaaattcgtcgtattcgcaaccgctctctataaattgagcgctcagcatgttccgttaggttgttacgcgcatagtgcaccagccctcgcctccgattagccatcttagctcgcgaatttcaaatttcccccaaatcggtcggaacgccgccgtgagacatctcatcgtggttagccctctacaggttagttcaagcttctctgcttgatgttctagcctcccttaagtctcctgttgctcgtagacccatttgattgagctagacctcagtgaatcaccaagaacacctcagattatctccggttcacaccgtcgtagtgagcagatgaattctgggccagatttgtgcaattaatggagggcttagggtcgccaggggtaggaataggtgtcaaccaagttagggcgtcagtcgttgcacatcctggccggtacaagctcaccgtagagcgcgctcactgccgttcgccatcggggacctaagtctgtgaagaaatagaagtctgagggcctttgtgcagatgccagagacacggaggaatggtactaaggattctttacaagtttttcaaatagtcggggtcctttgtgcaaaaccgccagtggggagcgcgcgcgagcgcgtttc

SEQ ID NO: 47205 - DNA, 454 bp, Zea Mays
ggagtacactatctagtcgcttggggaaaagtttatcggtcgcttgagcttggtgggttggggattcaaatctcaatgattttgcttgggcacttcgtatgtgttggctctggttagccaaaactgatctaggacgaccatgggcgtcccttgctatagaagttcccatcaaggctaaagatttcttctcagtggctatgcaaacttaaattggtaatggggcctctactctctttttggtctggttgttggttgatgggacatagggtcatggacattgccccaagattattctagaatattcctaaaaggagggttaataagaggactatctcggatgctctctctaatcagacatgtatttgtacatacaaggagctcttactgtgaggttatatctaaatatctcgctctataggatattgtcacctcagttcagtttagacctgaagtg

SEQ ID NO: 47206 - DNA, 510 bp, Zea Mays
tggacggcggagcagtgactccggtgagcctgtaccggccaagatacgcaatgcccggtgctccggtgtggatgacacttaattctacccctaatggccatttcccctccatcaattgcactaatcggggaatctctctgtccacgatgacggcggaaaccgagaacaattcgatatgttcttggtgatccagggcagtttagctcaattaaacaggtctacgagtagcaggggacttaatggaggctagaacattaagcaaggatgcttgaacaaacatgtaggcgtttggccagatgaggtgttcacgggtgcgaaaaactgatttggggagagaaagaaattggagctctctggtggctaatcagaggcagtagcggatgcttttgcttcgtgatgacttaacggagctaggggtgtgctcaatttatagtatccctgagcggtggctcctaatttggtcatggcgtgctggcggccggagagagggaagagcactagcgcaagagc

SEQ ID NO: 47207 - DNA, 583 bp, Zea Mays
gttcaatgatactctggctgactcccactaggtcagatgacgaccaggcgaagacgtctttgttcctacataggtagttgagcaagctggcctcttccagcggagctaggcctttgccaatcaatactgcatgattgggagagcagttttgagttgtactttcttggccccctcatcactttggatagggttctgatgcttgtcagtcttagctggtagctctataccatgtgtctgcatactggcacccaagtagtgaacatttcgttgtccgagaatgaagccctttctaagttgtgggccacctgctgatctccaaagactgtggtgaatccgctcgggcaagggattttcatgcacaagtataaatcatgaattgctgcttcaaaagcattgatgatcccctgcctaagattgcattgtatggatacaccatgttaatgatgtcgaaggtgacatgttctgcttgtgtttggccggtgcaaaaggacaagggtaggataatttttctaaggggtaatgtaacaccccaggtgttactcagggtttctactatggagccacaccctgacctattatcaca

SEQ ID NO: 47208 - DNA, 374 bp, Zea Mays
gtttgcgtgtgtttggccttctgcaaatggtcggaacggtctgtcatatattgtgtgctgtctttcatgaatgtgtgtgatgactctgcttaccattttgcatctaacagggtcacatattaagtgtgttatgtatggacgtgaggcatcaggattacttgtggaagaattacaattcttgaaggtaatatcgcatcagtccagctagtggagacaaatttagaataagcagatttagacaatgggagtagtaggccctattggtgatttcctccatttgtattcgccatcaagagggtcaggacctatcttcaccttttccatatccttatatccaaagacaaaacctctagccacatttgaaataagatatt

SEQ ID NO: 47209 - DNA, 474 bp, Zea Mays
ggcagcttggctcatcacttgcaattgctagaatctatgataggagtacaccatatattctatgtctttatgattgagaaagtatttgcggaatccggatcatcaaatcgacctagagccgatccccgtgtagcaagacctgactctagagtgtcgtctgttgcgtatcttagaatcctcagagcgtgtcataaggagaagagcaattaagtatgttagggtcctgtggactaatcagtttgagagcgaggctacctaggagcttgaggagcagatgcgaaagaagtacaccgaacttttcgttattggtgagtttttgtcttggctcatctttcatgtgtcgtttcgttagaagcggtggaattcgaggtcgaattcttttttaagggggtagagtgtgatacccaattttatgcaaaagaagttaaatctttttctctcttctttcatgctctgtgccattggaggtttgga

SEQ ID NO: 47210 - DNA, 274 bp, Zea Mays
gtcgacgacagaacaggaggcactgatgtggatgaccgtcctgcaggtgatggtgcatagttcttcttctcgtcggcggcaggggacgtggaagggggcaagggcttcactttcttgaggatgtcgtggaggactggaagctcctcatccatccggagctgcagtgccgacgacgacgcagcgtcgacgtcgtggccacgcgacacaacaggagcccctgatgtggatgaccgtcctgcaggtgatggtgcatagttcttcttctcgtcggcgg

SEQ ID NO: 47211 - DNA, 610 bp, Zea Mays
accggcctcgtcgatcgcggagtgcgccctagccacatcgccgccaccctcgccctcaacaggtacctgcctacctgcacgcatggatttaattagtcggagctgcataaacgtctgaaggctgagccattgttgtacttacgcacatgtaggtgttgctctctacctacgaggaggaagtggagcagatgggtggtgggtcaggatctcaaggtggcggtagcaacaacgacagggggagcaaatcgatttctgacagaaaaaacagaacgagtgggtaaaccttgcgatttttcattgccgcaagttcttggatctaaacaagcctggaaaaaataaaggaaaataacaaggcgttgttgggatggattgatgaggacaattctcacgaacgattgaactgccgctcagctcacctgacagatctgtctgtgcgtaagtgccggtaaatctcttctcttccttgctcctccctccgtcacatggattagttgtcgatctcgattcttgttattgcccccttccttgctcctcctccctcctccctcagtcacatttttatagagaggttccaactttcttttttatttcaatcaagattcaattttcc

SEQ ID NO: 47212 - DNA, 844 bp, Zea Mays
aacataaaaggtagcacactaaattttctacaaagattagtcagcaaaacagcacaaaaaatgttggctaaagttcccaaacaagctacaaaagaataagaagtaaaggcaaaattcagaacactctattctaaatttttagcctctaatcagaacatccccttgttcattaagatctagaccttaaatctagtaactccaattgacaaaatcatgccaaattaactaaactagcatgccccaaaagatggcattgggactcctcatctggacaagacaaaacgatgaaaatgtctttgttctgcccccatccgacataccaaacttaagccaagggtaactcagtgtctctgacacaaaacccttggggttctgcaccaagtgacagagtgaagaaaggagaggaaatcatatgaggggatttcacccaaattcacccggattcgcgacctatgggcatttgaatgtgactaaatgccataaaccaaccgttcgcccgcaggactgaaccacagagcacgccattggctgctctgtgcgcacaccaacccgtacccgagttcatgctctgcaacgtggccagggaaccgcaacgtcgtgtgtgccctcgcctataagtagcggcccgccatcggcctctccctccccaaccactgccaagccattcctcgtcggaattcaccgcaaccgagcactccatcgctcgcattaccaccagagcgccgaccaccatggtccgaccggtgcagccaccctacaatcgcacaaatgccactagaagcttctctgagtcgcagtgaagctcctcggctagccatttaccctctactcccctccagcgaca

SEQ ID NO: 47213 - DNA, 531 bp, Zea Mays
gttcattgggcctgactctttcaagaggcagaagaacaagtctgtataatttgggagaacttgagggtagctcaaaccaggcagaagagctatgctgataacagaagaagaccactggagtttgaggaaggtgattatgtgtatctcaaggtgtcaccacttcgtggaatgaggatatttaaagttaagggcaaattgtaccatcgccttattggaccattcagaatctttaggcgatatggggagatggcataccaactcgagctacctgataatctatctgatgtggataatgtgttccacgtgtctcaacttaagaagtgtctccgtgtccctgaggaacaattaccaatggaggagcttagtgttcagggtgatttgacttatacagaataccctaccaagattcttgataccctagctcgagttacaagaaataaggtgataaagatgtgcaaagtgcaatggaaccatcatggagaagatgaagctacttgggagagagaagaagagcttcgcataagttttccc

SEQ ID NO: 47214 - DNA, 1022 bp, Zea Mays
cggcgctccctggtccctcggtccctccgccggcggtggcttccctgctccctcggtccctcctcccggcgctccctgctccctcggtccctcctccagcggtggcttccctgctgaaccggccaaggtaacctttccgaccccatggtaggcttgcatagttgaattcatggtgggctagttgttgctctgcggcagggaaactggaggctagtttttttgttcctctgcggcttgcatagttgaatccatgtgcttctgtgattctgtctagtttagatcgttaatgtgtctgcggctctgcaagtagctggcaagttcgccgctagcagcgaaaaagtacacaaatcaaattcacaagtgaaggccgattcagacacggctagttcagtgtcacaaatgaatattcagcacaccatgcataccctttctgctgtcagtttcatcatcagcttgttagttctactgccgttttcaaaaccaaacaacaggtaatgctgctgctgcttccagtcactgctttcaaaaccaaacaatgctgctttcagacaccaccatccatattcagaattcacccaggcatattcagaattataactacgtgacaaggaaattcagtaatagtctagaactacaataggcacatccatattacagtgccagaaatacaattaggtcttcctttttttggtgtgagctttttttagtttagcaacgcttgtgggtatagatgtccagaaagcacgcggacggcagttgaatcgttaatgtgcttctccgttaagttgatgctgtcttgataatctgtttatatgaactgaatatatatcttgatcctgttgtgatattgtttaggtaatctgtttatatgaactgaataagttcatgttgtctttataatctgtttatataatctgtttagataatctattttgtttagataatctgtttacaatctgttgacaatctgtttacaatctgtttataccagtttctatctgtttagacaatctgttttgttt

SEQ ID NO: 47215 - DNA, 1477 bp, Zea Mays
ctctgcaccacatagcaactccacccaagaagaaattctcctcaggagcaccaaagggagctgcagtgaaaccgcgagccatgcccccgctaacaaggcgatagggcgtggtcccgcgcaagtctggtctcagaagtccccggagggtagaaggccagtcaaccacgacctctccaacccgacgaactccattgtccacctcacccactaaggagtggacacagatcacccggcgaaggaagatgaacattccgaacggggatggaaaagcgtagcgggcgatcaccccgataccatcgccctcaaaggaggacgagaagaagcacactgctacacctactcctttcttccctgacatcctcttcattcaagggagactggagtcgttgcccatctctgacgatgaacccatcgtgatgggggaagagcctccccagcgcgacacacgacgacggaggaactgacgccgaaacgtgcgacgacaccataaagccggagaatgggacccggctcaacctgtctcttgggacgaagcctcacagatgggggagacccctgatgaaagagcacatcgagaatggtgcaactcccgccgccgagaccgtcgtcaagctcaggaacgcgagcgggagctagctgaacaagatgttagactccgacgagagaatccactcctcgcccgaaacctgtatcccgactttgcctaagcattgaacacgctaagcaaagttggaggggtcctagcgcagatagccgatggcctcccgcgaaccctagacgcggagggctatcgacgagcacttactcaggcgaccaatcatcttctacctctcgcccacccacctaacaatctgcgtcatgccatcaacagccggcgggacacacgaagcaacatcagtgctcgcgcgatcgtcgacacaagaatgaaataagacgccgggaggaatacgattgagatcatggtgtatcggcacacagtcacgcgaccaggatcgagtcagcagcagcctctagtaacagtccggtccggggacggtcaaggcgacccaacactcgctcccctccccgggaccaacgacatgatcatcgacatgaggatacatgtggagtctccacgctcacccctcgtctgtgtttatcgcaaagttctagtccctctccgataaaccggcgcagccgtgggacctcaaatccatcaggtggcagaatgatgaaactcttcgttcattcctctgaagatttcaaacaatgaggaaccgtatccccgaggttgctgaggtggctgtgatcgaagatttctatcggggatccaatgatccagttttagttcgagtcatacttcaaaaagcacctgccacctctaaacaactgttcagggaggcggacgtctacatcaccgcggatgagcgggttcaagacctcattggaagtgcaaatcccgtaccaccaacaccgcgaagggacacggaccagcaac

SEQ ID NO: 47216 - DNA, 783 bp, Zea Mays
cttttgtcggcacaatctttgtcagtggagaatccattttacacagtagatggtaaagaaatttcgaaggccaaacatccacttttactccctataagtaggccatcacttcttgctctactaaacaaaattgcacaaaagcctttcggttcaactaattttctcaggtctcatcagtaagtaacacaatttttatttgtattaagagtttcgtttttttttgttttgagagaaatatttacctttcttatgagacccaattaccatctatgtttcatgataaattggtgtcacaacagtgaagcttcgcgtgttcatcgttgctgtcctgattgtgatcaacttgggcacctgcatggcaaaggttggatcttacggcacaactgtgtcagcgtcaccgaggcaaatccgagtacttaccgccgcaactgatggaagaaatggacctcccagcaatgatcaccagtgcccgctcgggacctaccccaattgttaagcaatggatgtatcaaaacactgaggaacagctcaaatacgttcacgaaaattacacccgtctgtgctgttaggggagcatgaatatcatgaacatggatagctgtattgccatcccacacagtacttgtttttattcttgtgtacacgtcactctcttatatatacttaagaaagatgtattaaatacattgaattcactactgtaatccggctttttgccgagtatcaaacaaaaaatgataggagaaaacactcgataaaagctttgttgccaagtgtgttttt

SEQ ID NO: 47217 - DNA, 473 bp, Zea Mays
ggccccgcttgtcgggtcaacccttcttccccatcccaatcgcgatctcgttttctggcggcaggatatgcgtgaccgaccacaccggtcctccgtgatctgcgcagctctcaggaatgggtcaaccagcgcacccacagctcaccatccctgcgtggagtcgtcttcatggaacaccgcagctctggagcactaaccaccttggctgtcacgtggatctctgcccgtatcatcttcatcgcgaagccatgtgcaactgattccgcggtgtccgggcaccttcatctaaacggatcaacggatcgcgccgggatcgccttcgtcataccgaagaccatgcagaacctccgtaccggccgccgcgttcatgcaggtggttcgttgctgatctgatttctcggggcatggactccttccttctgctgaggccgagttaccgcaagcacctattcaccataaaagccttggcgtcc

SEQ ID NO: 47218 - DNA, 429 bp, Zea Mays
ctagggaagagatggtgaaattctatttgtagctctcctctcccccaagtagcttcatcttcaccatgatgactccattgcaccttgcacatttttatcactttgcttcttgtaacacgagtcaaagtattgaggatcttgatggggtactcagtataggctagatcatcctgaacactcagatcctcaataagcagttgctcttcgggtaccctaaggcactttttcagttgggatacatggaagacatcatgtacaaccgctagatggtttggtaattctagttgataggcaacttcccccactcgctttaggatcaagaagggtccaataaagcgagggggataacttccctttaaccttaaacctcctcatacaccggatcggtgacaccttcatatacacgtgatcaccctccttaaactctaa

SEQ ID NO: 47219 - DNA, 658 bp, Zea Mays
tggagaaaggcagcgccctctcaaccaacctcgaaatgaagcggctaagggctgctagcgacccggtaagcttctggaagtccttaacacgggcgggaggcctcattacctcaatagccttgattttctctgggttagcttcaatgccccggtatgaaaccaggaaccccagcaacttccctgcggagacaccaaagatgcatttctccggttcagcttggtgcaggttgcccgcagcttgccgaaaaccagggctaggtcttctactatagtcgacccttccctactcttgaccacgatgttatcgacataaatttccacattatccaggatcaggtccccgaaggtcttgctcattgcccgaacaaaagttggcaaggcattcctcagaccatagggcattacaacataatagtatagtccatctactatcacaaaagcggtatgcttcctatcctccttagccatccggatttggtggaaaccagagtaagcgtccaagaaggataagagggcgcaccccgaagtagagtccacaatctgatctatacgcggcagtggatacgggtccttgagcatgccttattcaggctggtgtagtcgatgcacatccaaagcttcccgttggccttcggcacgacgactgggttggccagcc

SEQ ID NO: 47220 - DNA, 597 bp, Zea Mays
actatcgcggcatgaaccatggggtcggacaaatcaaggctaaattaacgcagacactagacgacaaattctcatcaggagttcagaaaacgcgtcgcctctagccctgtatctgtatgcaccagcacgaaggaaggccaagcaggaaagagcttctctctcatcagggaatccagaatcagaagatgaagaagtggctgcacagatcacacacggtagctaaggcagccctaaaactagccaaaagcagtagtgctagtaactatgattgcagaagatggcggtgccagcaggcttgcagtatacatgatacatctgtgggcagctgcccaacctaattaatcggacgcaggataaagagggagcaggctccatgcagtgatgcaccggtacgtgtcacaactcacaaccaataatcctgacgccaaagctaatcgcagatacacaaccactaatcctgagaccgagatcttgcttacagagttacagggaaaggttaccttggccggttgagcagggaagccaccgccggaggagggaccgagggagcagggagcgcagggaggagggaccgagggagcagggagcgccgggagg

SEQ ID NO: 47221 - DNA, 287 bp, Zea Mays
ggctacgtagatcgtagccgctgcccgtgatggccggtcgggttataccccttgccgtcggcttaggtagaagaagagagacgattatatggtaatatctttcttgcctccaagtatttgattacagcatatttatagcccccggctcaaccaaaaggagtaacaaactccactaattaaggactaactaaaatagctaaaagatctcctactttctctcctaacaaactccactaattaaggactaaccaaaatagctaaaagatctcctactttccctcctaacc

SEQ ID NO: 47222 - DNA, 763 bp, Zea Mays
cttaggattagatgggtatactgcacgaagtttacctgcgatggtggatttgcactccctaaaaacaatgtctttgtccctccatcgagcactcaaaagcaaccaaatagaccagtagacatgagaacgcccaaatcaagagaaccaaaagtgtaggctgtccggcgcccgcatgggttctaccatgttaaaaagggtgggcgtagcctagctaaaggctaagcctgagcccactccaatccacgctcgacatgttttcaggccttgccaattaaagcacagcacagctacaggtgactaaataggacgagctatatggactgccacgaaaacgataattttagtacggcacggtcacgacaccgcactacatgatagtaaccgtgctgggtcggcgcgaggtccatcatgtaccatatttgggcttaggtacaaacccatcgaacaacacgagcatgatctattcatcaaaccgagcatgattcagcacgactcgtttgtgggtcaaccttacttgtcctaatctagcccactatatatctaaatatgaccaactcgacccacactttcaaattatttttgagttctgttacaaaaaatagagaaaaacaaaaatagacaaaattagttatttttttagttctgttacaaggtaagttttaggtcgttcggcatagtagtatgacacaacacggaacgatagctcagcatagaccgtttaaaactagtcgggtcatgcttgagtttaaattttacgccacgg

SEQ ID NO: 47223 - DNA, 404 bp, Zea Mays
cacatgtcaaacaatactacatcgtggaccaagtatgtcgtgttgctagatgagtgcgatgagttacaacctagatctaacttgttgggggacacctcctcgtccaacatccagattgagtcacctcaaaatgtgccctgactcttagtccaacattcagatcatccaacatctagatcgtgtgacaagttgcgatctagatttatatctagcttgttgggtggcacctcctttggctcttagtccacaacactacaatagatccttcggctagctctattgtcgagccagaggcctgcaatggctcggacaccggtgccaaatcccaaaggggctcctccactattcccgcaaagaaaacctttaaaaatctataaggcacgattgttgaatagccattgttt

SEQ ID NO: 47224 - DNA, 540 bp, Zea Mays
gtctttgtcccgatggttaattcaacggacgacatcctttgcctcgatcggactgttactcccaccactgttaagtgtcatgttggtcctgatcagctcgctatcctgcttacctagctttcggtaaaaatagtaagacattaaatttatggtcgctcctccatcaatcagcaccctagaaatcgtgcccatcaatgtggtcgcgcacatagagcagcttcagatgaatgaccaattctttgggtttggtgaagtcatgtccttaggaccaaaatcaaacgtagtgaccacatgttcatcatcaccaataatattataatcagccaaaatgtaattacattaacttccatacctgcatattgtggtgagacttcgtaatccaccatatcttctcctaataggttgtcgtcgtcaccactctggtccatagggaccggagagtcttcaggagcttactggtagggcacaaatggttcggaccctagggccaaatggtccaccgtctttgcatgaacctacacgattgtatttgtattttgc

SEQ ID NO: 47225 - DNA, 434 bp, Zea Mays
ctcagctagagaccctttcgtattgggtgctacttagacttgtgagttatggtttataattacattttacatgtgtgcctgagcacatgttcaaatggtttggtaaccagaaaatgagatgcagatattatgtcgatggtcagtattgtaactcagtttttttgttatggaatgacatgtagagatgcaccaatatctaggattctaggttagatgtttcatgtttgatgagaaatatgcaccggtatctaggtttggtctttcatttttcatgcaaaaaagtgtccggtctggtatagctatattgtaaaattagtgaagtattaaatctattacaatattacattagtttcctcgattgtaatactcatagtgcatttatatttttagcatttatctcatggaagctatcagtttagaatttaatctataat

SEQ ID NO: 47226 - DNA, 357 bp, Zea Mays
gaatctacaataaatgctcattccaattgtagggcatacgagaataatcaaaagaatagttttgattaacagttttctttttcgacgacaagtcttcgtcactgtcatcgcttggtgaagaggaggaggtgtcgctgtcatagtagatgatcttcttgatgcacatcttcttcttcccatctttcttcttattgtttgagcctgagtgagtgggcttgtcaccaattttcttccctaataaatcagcaagcataaatgcatcatgaacttcacttgatgcatccacagactctaagaagtatgtcccctctagactattcacaaggaatttgatcaaatgtctccccctcctatcag

SEQ ID NO: 47227 - DNA, 623 bp, Zea Mays
gtcgaatggaactgaagccgaccaagttctgcaaggcgtgaatctcggacaggtggcccgaactgcagatggcatagctccttgaagcgctcccacgtcagcatcctgacatcttgctcgagggtgtagtaccatgtttgagccgtgccctaaaggtgataggatgctagacacgtccggttggaggccaacatcttctggccacagaaaaattgctcacagtgattgagctagttcaagggatccaccgagccgtcgtacgtcgtgaacttgagcttgtagaacttcggcgacatcaaatcgcgattcattgcagatcccagctgttcctaggattggctggaggaggcacccctggagggggagaaaagggtcccatccaccccctcgtatcgggcgcccggtggctacgcgccgccacaaggccctagggcagtagtaggcgccgacgactgcagtattgccgtggtgattggcgttgttgacaagtagatcggtggcggattggatcccaacgcccatgctggaatttgagacggcgatcgcggaaagtgcagctggtggattggtacgctcggcgactaggaggacgccgagtggctgttagggccggctgtgacaat

SEQ ID NO: 47228 - DNA, 910 bp, Zea Mays
agaaattcgcgcacctggcggctcgattcatgtataaaacgagggtgtagccggcgggggaccaaaggcttcaaaaccctagccgcccggaggttctctggtcgcagataccggccgtagtggagagaagcggagagagagagagagggagaaaagtaccaccaccacaattcaccaacacagttggcgttcggggctcgatttcaggccctaggtgctcatcggtgctggtggggctgatgctcggaattatcctagtcggtgtgggggagcacgatggccagattgttcatgcccgattatcatccgccacgaaagtcgtgcctcgacgaaattggacaattcggtggaaaatctctggtatggcgacccctgtccagttcgcttttgctccctccgtgcgtagcggttatctgtagggtaggaaactcaccggggcggcgttggggcgtactccgacggcaccaccatcacgcagagagctcttctcgccgtggctcgccgtcgggaggatgatgacagcgggtggccgttggattaaaatgaacggctgtgatcaattgctacgtcacgattcagctggatcgtttgggaccatggatcataggatagagggacgagattagaccggggatgtaactcttcagtcattggatctgggccgtcgatcttgcatcggacggatcaagtttcttaccggttcgtagtggccggaattctaatctgggcccttgggtctggatcggtcggctcttgtgacccgataccccttcgtggcctcaactttactaaagaaccccaggcttttgcactactcaacccgtggtccccatatgtgtaaagattatcacgaatcagccctgttatttgcaaattaaaccccaggcttctggaaaatagtgtccccagt

SEQ ID NO: 47229 - DNA, 697 bp, Zea Mays
ggaaaataggtgtaagcctaattccctttcaagttttctgagttttctatcttgatggccacatcataaacataagcctccactcgcttgccccagtggtcagctaagtatgtctggatggccctttggtaagtcgctccagcgttcttgaggccgaacgacatggaggtgtagcaaaaggctccgatcggtgtgatgaatgcagtcttctcctcgttttccttcgctagactgatctgatgatatccggagtagcaatctaggaaggagagcatagagcagctagcagtcgagtcaactacctgatttatcctagggagtctgagggatccttcgggcagtgcttattgagaccggtatagtcgacgcacatgcgccaatcaattatattctttttgagtacaagaacggggtttgccagccactctggatgcagtacttctctaatgaaccttgccgacactaggagagctaactctacacgaatggcttctctcttgtaaggcgtgaaacgacatagcttctgtcagattggtcttgcctgaggatatactttgagtttgtgcttggccaattctctcgggactccctacatgtccgcaggttgccatgcgaatacatcctgattgtcttgcaggaactggacgagcacgctttcctatttgtcgttgaggctggagctgataattgcagtctt

SEQ ID NO: 47230 - DNA, 1113 bp, Zea Mays
caacaatgtttttatccgtcccatgcaatggtgttgtaggggtatttataggtaaccgagggacagctctaccctatcaaagacgattgtgccctcggttacctacgttatccctagaatattccccttgggggttatggcgggccattacagcgtgattagttacaagcatagacaggcacattaacaactctgccctcatagtggcttacaagtgggaccctataacatgggcaggttatacgtgggccccttattacaataacaagcgggtaacaacacaaggtcttcgtgttccacgtgctcagccttcggaattctcggccttcgttctgacccgcctagacggagggagcacccaagccttcgcccgctctgtgcgttccctccgtagtggagctctcactcctcagtcttcgctctctttagtcttcgcttgaatcccttccaacatgttccgcttttgccgtgtagtcgatcgagcgagggggcgttgcgcatttgccccaacatttgccctccgagggaccagcttgactaagttacttggtgccaaagtctatcgagagatggctgaaacactaccctcgcttgaagtggtcccgggggggttttgaaatgtgactgttgatgagacgttttactgtgggactgttgagtttctgaggcactgcccctggcctataaaaggctatgcgtgggctgcaaccttttacccgtctgcgtgcgcgttgaaaaaaccatagctttcttctctgcttgcttgccctcttttgctctcactctatcggagatctagcccgcgtcaagcaaactgctcgccgccgccgatggtatgtgaccatgtcatcttcttccttgtcattgtctgttgcgaccgcgtcctcgactgtgccgtcatcggagaagacgattggcgatccgacggcagttgtggaactctagcatgggcatacggtcgaatttggtacctcaagaatttactcgggccgagtgctagagatacagcgtcttggctattttgggaatggagtcgggcgggcgcctaggactgaagatgtccctgagccagaaggggagttggttgtgttcgaggcgttttttgctgccggc

SEQ ID NO: 47231 - DNA, 1007 bp, Zea Mays
gttattttcaatggaaagcatcaaattaacaaaagacaattgcatgaagaaacgtcaaagacatcagattatagccaatggggaacaagagcagcaaccattagttcatgtaagtaataaaatgacaataaataaaagtaaacttaaaaggtgtgcatgtacaaactaacgtgactatgtgagtatacaataaatcatcaacaactagatatggtagtgtcgggatctctaaatagtgtacatatttttcctaataatgataaactaactagttgtgcttcataacatatggatgttggtttagactaagattattattttgtaaaacaagtcacttatatattggtatcatgagctaactaaaaacaaaatagtcttcttttccattgatgcggtgggcctgacctgttctagtgctaatgttttatacatatttgcttgcaacttgacatatatggagtggttaataatggaaaacgaagatggaatcatgtacagaggagatcgatcgaatcgatggtgggtatatatcacaccttgttgtgcgagtgatagtcgtagagtagcgtcggcgtcaccgcctaaggactgagccctagggctaagggtgccgacgtgtcatcgaaaaccatcatcgcaagccccaggcctagcaataaggtcgtgccacacggtggggactactacgaggaggaagatgacgatagcgacttcaggtcccaactgctattggaaaacaactatacaatgttctcgtcaccgacgctactctacgactatcactcgcacaacagggtgtgatatatacccaccattgattcgatcgatctcctttatacatgattttatctttgtcttccattattaatcactcaatatatgccaagttgaaagcaaatatgtatagaacattagatttaggactggtcaggcctgtcgcatcaacgaaaaagaagatcgttttgtttcttagttagcttatggcacaactatataggtgatttatt

SEQ ID NO: 47232 - DNA, 279 bp, Zea Mays
cgatgtcaggatcgatggaaatcgcttttggactcttcaccacgtggatttctataattcagtcattcttcccaagaagcatcaacccatccttcatcaacgatatattaactgggaaggttgtgaagcgattggggacccagaaatgtcacaggcactgagggcctgtggaaggaagcaaatgaagaacatcatgacattccaatatgattggaatgatgaagtgattgctcaattctactccactctctggataaagcttgctggcgtggagagtca

SEQ ID NO: 47233 - DNA, 386 bp, Zea Mays
ctttttccttggcttcgaagagcccatatgtaaatactaagcctaacaatagcatttggggtcaactggtcaagatatatctcaaatctcttcaaaacttcccctattatatcatacaggggaaccgaagccctgccctgacgaagcttttgaacacaacaacctcattttcctttagctctggaattacttcttccccagcaaagtgaatcaatccatcttcattatctccaaagtaccctagcttcttcatcacaaccaagttctctgttgttacgatggatcttccaaattcaatgtgactaggtttggttgggctcagaatgctattgtcctcttcactttcattgtcactcccgacctcagcctcattctgttcagctttc

SEQ ID NO: 47234 - DNA, 375 bp, Zea Mays
attcaaccaaatgttcttgaacgagagccagttgaatgacaatgtcctcgataggatccacttgatccccatgcaacaacacctgagacccctgatagggaatgagcaaccatctctgcttccagtgaacttccatgggactgaaagtctctaaccaatcaatgcccagaataagatcaaaggattgaagaggcaaaactttcaaatcaaagacaaactccaccccttgcaccgtccagtgggcttgcgacagaatttgagagcactgcataatagaaccattagcaactctgactcgggcagtagcaggaagcagtgtagtacgtttcaggcgggcaactgtactttggctaatgaaggaatgagaacttccag

SEQ ID NO: 47235 - DNA, 392 bp, Zea Mays
aatcctagtaaactaactaataagtgttagtggctgaaatttggtacaaagtcatgttattacacctaaatgccagcaaaaataagccttagagaataacctactgttaaaggagagttgtagttcaaagcaccccctctgccctaaaactttataattttgtatagagagaacccttcactttttaagccccaatttttgagacagagagttatacaccaatgaggagctactgtaattgttacagaatttttggaaatttataaaactatcttgtagttcaaacccaccttaaaggcataaaagaaaaggaaaggaagaaataaattagaaagaataatgaatctcaccccaatgaattcaactaggaatcttattaaaatttcactaaa

SEQ ID NO: 47236 - DNA, 353 bp, Zea Mays
gttgagatagactacatgatgtaggtcaaaagtttgtgtgatgtggggataggcagatcatgcaatccatcaagactctattggttgggttggtctctcattctttatttagtgtagggtgaactaagttaaaacatgtggagagggtctaatctatttcacaagtattaactggtccattaagtaactcactttagatcagatcatattaggttagatgggatctagattagattggtatgactagatgagactagttaaagttagatagatctttctgggtaggatatattttatcaggatatgttagaaatctctgttaggttaaaatagaggggttatgcaactatctg

SEQ ID NO: 47237 - DNA, 781 bp, Zea Mays
gctatccgcaatatcgtccttcgtcatggcgcagaggccaacttcgagcttcggaaagcccatacttctggccatctcccggcagacggataattctttgttgtctgggaggcaatacaagaagtcatcttcatccgtaccattaaacactagggcccctttcgggtacttcagttctcgggcatagagtttagcttcagaaatttcttccttagataatctttttcccgaagcatgtcgaatgatataatcaggatattcagaaggtgcttcgggagcaggggattcggcttctttgcccatacttctctcaaaagctatatcagtatttggaggtacttcttcgaccccttgctcagttgtggcaagcttcgtttcaacaggcactgtgggttcggtttcggtcccagcctaaattgctgcagttttaccttttatctgcctagtatcagcttcagcctgtgcctcgacactttcggcaaccttctttatggaagaggggcgtttggagtctgttgtttccaaaatgtctaaaacatttaccatccttttccttctaagggttatcgcagaacttttttctgccttcagcactgttgctttctgctgaaggacttagattctcgggcatctttgctgcttcttcagttttttatctttcagccttaccttcgtcaaccctcgtttcaataagcttagtcgaaggcgccttcggcaatgcagccggctcttcagtcttctgtgtgggaggagcagcttcttttgcttcagtaactgaaga

SEQ ID NO: 47238 - DNA, 876 bp, Zea Mays
ccacgacccttctggctcggtgtgacagcctcgggcccctctacacacttcgcctccctgcttcctctacatcgacctctgtcccgcctgttctagcaccggcgcctcctctgtgacttagcatcgtcgtctcggccaccccgggcgtgatgtgatgtccaagctctcccgtagtacctccgtttctagttgtaggggatcttttgagcacctctttcatgcttgtcagttaggtcgccatgttcggctcccattccctacctcctcttctagggcagcaggcattttttttatctgatacactgtgatgtatggacatcccctgtaatcagcatttctggctataagtactatttactcatactcgagatttctctcattatttgcggacttttcctcttcatcagaaatcggacacttttcccaccctgtctcacttcttcgcttgggtctccactcagttcggtagcaccatccggagcatccagtgtgacaacggccgtgagttctatatcaatgtgtcccgtgatttcttcctctctcgcggcgtccacctctgtatgtcgtgtccctacacatctcctcagaatggtagggctgagcgcatgattcgcacagcgaacgatgtcacgcactccctgctctttcaggcttcccttcctcctcactactaggctaaggccctcaccactgccacctaccttctcaaccgcctgccaaccaaggcggtgcccaccccactccttacttcgctctttttggcatccacccctcatatgatcatcttcgtgtcttcgggtgcgcttgttaccctaatctcgcttccactgcccctcataaattagcgccccgctccactcgctgtgttttccttgg

SEQ ID NO: 47239 - DNA, 768 bp, Zea Mays
ttgcaataaagttgcacccaaatttatctttatagccctcaactctgcatgacctacagctaaactcagcctgagatactgcacattagagattcaacttatatccggacaatcacctctcccaatctatttaacagacaattacaagtaaatatccatttcaaaggtactgagaagaactaaaagttttgcttaaagagaattcccaaatttgggctctgaaactatcaaaacgcggtcgatttattagtggttataatgacacctaaagttcagacacaacggtgcgacaacttcagagcagcctaactccaattatatgcaatgaaaattacaaaccaatactctttggaaagatcatgaaattactaaaactttcataatccaacaaagaccaaattataccgtcttcaatgtctactcttccgtacaaaattaaagcctcattctgccagagacaccaacaaggatgttttaggaaacctataactctcaaatgtttagaccaaaccgggtgattaagaatcctatggaaagatgaagaaacatactacaaaacattctagataagtgaagcctaattcagcctccaactaagttaaaatgcctcccaaaaccaaacaacacattaacaacaataaaaaaacaatataaaatgaaatgcaaggcattggcaggtgcaatcaacactaggattttccactaccaaactgggatgcaactccacagtctttaaataacactctaccaaaataggttagaacacta

SEQ ID NO: 47240 - DNA, 460 bp, Zea Mays
atttgaacaggcggacggtccccgatttatagctggatggtccatacatggtgccggacaatacttgacttagccatagacggattgtagtatatctcctcgattcaacatagttcatgtatgaaactaatcaaggcatcacggatggtccacataggctatcaagaagatccactactatttttaggcttgatctttcgatgattatttttctgaatctgtgatcatatacttggcaaactagataatcctcatgattgtcatcaggcaccaaaattaatatagaaaaatggtttaagcccatttcccttttagagtgccacgtcatcgtgtgtaggctccatgcgggaatgacagttggaagaagactctgacatgtgggcccaaagatgtcagcaagggggtggggtcgggtgcagctccgagtgatccggtgcaccaatgggtcattgtgggctgc

SEQ ID NO: 47241 - DNA, 611 bp, Zea Mays
tgttaatcgaagtcttttattcaaaagacatcgcaataattacttaagggcgcagccggaataacgttaatcgaagtctatcattacaaagacactccgcacaaagccacccatgtacgcagccggaacaatacaagtgtacgaatacggccaacaggccacatcaccattacaataacatacacacggcgagggcatcacctatcacatcggctcaaccttcagaatgatacccatctccctataattaaacagcattatcctcaattcctcaccctcaaaaagctcccgaatatccccttcgcctatgcccgccccgttcggcgaagacaacaattctcgtttaccagccccgtctactcgaagtcagccacgctccatccccatgcgacggcgcctgctgctccgcaaaaattcaccaacacattgttttcccaccacccttcgccgcctacacccagtactcgtaccaggaagatcctcagcaccctccacacgcagcgaactctccgccgcggtcacatccaacgcaacaaaataatctaagccttcatccgaggactcctccgtccaaggaaacgaactcccagactcaccatcggactcaaaac

SEQ ID NO: 47242 - DNA, 370 bp, Zea Mays
gaggagtcaaacaaaaaatttgcggagattatcaatgttccaagaatgctccaagtcctcgccggatggcgttgtgagcctgtacgcgctgggggacgccttcgtcttgacgatgaaagggccctcccacttgggctccagcttgcccctggactctgtccgagctgtccggacgagtacaaggtctccttcgctgaattccctcgggatgactgtgtggtcgcgccatgcttttgtctgggcttggtatttgtttaaagcctgtagggcgaagacgcggtctccgtcgatgaggtccttcgaagtgggctcgtccatgtcggggacggctgacgggacagtccgtggtgacccatgtgtttatttcttg

SEQ ID NO: 47243 - DNA, 436 bp, Zea Mays
aatgctctatggcagtctacctgggagaaagccgaaactatccgaaccatccttctttccaagtcacttttaccggataccgcttcccagatacttgccaagatgttgcccgaaaagccctccgacaactatgccagagctacaacaaggtgatctttgcaaccccccttcgctacttcccacccagcaacaaaaatacacctacctggacgaaaagacttcaggccctgtcaggaggagaccctattgaggatgacaccaccatcgtctacatggctggataccttcacacccttgataaccaatagatgaccttgcctcccactgcactcacctaaactcccgggtggaaagcctggagcaaaaagtcagggaacttacaagggaaaaggcgtcccttcaagagagcctcgagatagcagaaggcgaggaaacc

SEQ ID NO: 47244 - DNA, 548 bp, Zea Mays
tcacataaatatcctcgccgtggataactccggccataaacaagtccggccaccgtacatgcgtcaccgcggcggagatcgataagaacgccggtgaccgccgcctcctagccttgcgccgcgtggctttaacttcccatcgcgtcgccgtggcttcatactgccgtcaaatcattgccggcgagctcgccacgactgtggacacgcactcacgcggccagtgccttcttctccatttccggccgccgcgcgtcctccccgaattcactggccaccgctttaccctcctataaattgatggccggggttgttgcgccaagttaccccgaagccaacgcacccacacttgccttcaattatccaccagcaaccgcgaattattcacttcccccaattcggtttccgccccgcgaagaacacctcactgcggccagccctttttccggtcagtccatgctctctgcttcttcgttggagcactctcatagctttgtgatgcttatggtgtcaccaatttgaactaggagcccaccaaccgctcggaacac

SEQ ID NO: 47245 - DNA, 346 bp, Zea Mays
taggtaggcgtactatttttgccagataaaaactctcagttacaaggctagaagcaaaaaaacgaacatttaaaaacatcaccaattaggggttctgtcgttacctccagtaaacaaaatgaacaaactactgataggcgacatcgtgcacaaaaaaacgaacatttaaaaactattgtggtcattgtgcgcaatataggcgacatccaccaagctcggccgaccagcttagttggttaggggacgaaggtaatcaggattataggagttcatttttaagtttgttagaagtgcaccaaagtatatggggcacttaccttgccgaaaacaagcatcgagaatattt

SEQ ID NO: 47246 - DNA, 547 bp, Zea Mays
gtgaaagcaggggtctggagtcgccatgtggccctagggcgcgtagcacaacccttcgtctcgaagtaaactctccacttgcaaccacattgtccgcatttattgcaaggcgcccgaagcgtgctctgtaggtcgcatagcgtgacaggccgtacaagccgacaaggctgcctcgcgtgtttccaaggcgcacaacggcatgcctacgctgcacgcatttaatgtccgttcaagataacgcgagttaccgatgcatttatctcgggcatatgagcaatgtcatcatgaggtgccgctcggccacatgatacgcccgctgttgcgcaggccggatgtgacaacacgaagatatcacattaattcatacatacatcaacacaccctatccttgcaacatcaacatgctggatggtttccaaagcagacataggacgatagacagggagaacatacctgatcgtggagtcatcatgatagtcgggaggtaagatctcatcccatcgttgtacttatagctttgggcagtatgtgtttaagacaagcacac

SEQ ID NO: 47247 - DNA, 398 bp, Zea Mays
cccagaccaccctatggaacgagcatccattctttagaaccggccccaggcctttccctgtttttgtaaacaaataaatattgtcttctaagcagcatttaacacttatctgtgtaacgcctgttcctactgtgtgtgatgttgttgactcctccctagtacctgcccccccgcctgggatgcatgcttgatgtgttgaggttggataccagcgtttttgaagaaggttgtcaacaatcctcgggaggcaaactcgccaggatctggatctgtacataacttttagctaggaagcattagtagtacacctcatagggttctccgtctgacattagtcaccctttgatacatgctcgggacctgcaggttttagcccgggtggccaagttgcgtgtccg

SEQ ID NO: 47248 - DNA, 381 bp, Zea Mays
ggtgtaggtacctaagcgagtaggtcgggagcttcatcgcgttcgcgggagtctgcgcgagatctttccgggcattttcgagggtcggctggtggcgaattgctcgccggagcaaaaacatcatggagaagccgctctcgcgtgtgaactgggatctgcattgtggccatataggtatgtgaccatcccccattttcactatgatccactctacgcacttcttggtccggatcgatgtttgacgcactggagagtagttttgggtgcgggcggcaatggcgccaccgtggggagcttcaccccaccaccggtgtccgtcccgtgggggcaagcagatctcgggtgctgatctgtcgttggacggttcagattaaaccagcg

SEQ ID NO: 47249 - DNA, 514 bp, Zea Mays
ccaaattggagttcatatgcattttctatgaattaaacaagtttctagatttatttttgtattaaaaatcgatttctaatattaatttcctattttcagctctctctggattgggcgccattttctgtaaaacacaggggcttcctggaaagtagcccgagactcagacaatagtgatactggatcgcgggttgattgcttagaaccccaggggctctttagcaaaaggtgcaagccgaaggggtatcggaaagctctggccgccagatcatgagtgcacggtcccgattcgatcaacgtggttatgaatcaaatacgctcaccgaccgttgacggccagatcgacggacgggatttaattatctaagatccgattgtgcccctcggattcagatcaacgcacgatacacccgcagccgaaccgttacggcgcgacttgatcctagccattcatcactaatctagtggacacgagttcgtcttcaacctcaggtcactccatggcggagcgagc

SEQ ID NO: 47250 - DNA, 468 bp, Zea Mays
caacaattctacagctacaaaacagttgtgattataagctgccttttcaattttaatggcttcgctagccttgccacgaatgagtggttgtttgcggaatttattcattgtcattacaaggacctcagtatcttccatttgtatgaacccggattcctggtcctggctatttcgtatttgcgtgcccaattcttttaggcattgccggtcctgtaaaaacaagacagatgacgaaagatgaacaagaacattgaatggatgattcaccataacaagaaatgaacactgctggtgatgaagtggctgtttaactcagcactgtcagactatgtgagagaaaaacttaaccactttcaaaggtaatgcaatggtggtgaatgaccaaccaggctgttggcgggcatcgtcaaggctaaggaaaggggcgaaaaaagtaaggacctgatgtcatttgctgtgtcgattgag

SEQ ID NO: 47251 - DNA, 420 bp, Zea Mays
ggctaaataaaatttgtaaagatacttacctggcatatacactgtttaaaaatactgagcaccgcagtatacaaaaataaaccaagaatgtccattaaaggttatttctgcccaaactttagaaacataagaaaggtaataggaaatgaaaaccagagaatgaccatatttttcctagcatgcctaagttacacagaacctaggaaaaatataaggaaccatagtctagtgctaatctaaggttataattttatttggcattaagaaatcaagaaaagccatgattaaaaatataaggacaaatacattaatggcaagaaaaattcaggaagcctctcaccactagtataccactacaaaaatggtaaacaccccaaaccatcatagtaagtgagttgaacaattaaaatttgaaattgg

SEQ ID NO: 47252 - DNA, 1160 bp, Zea Mays
ttagattagggttccaaacctcggttggaattttgggatgttacaaacctacccacttaaaggaatctcgccctcgagattcagacggggctcgagaaaaggtaagggtattccctcctcagagagtcctcgctttcccaggtagcttcctcttctccttctctgctccactgaactttacagagcctcacttctgagttgcgggtctttcggactgctgagtcaagaatctttattggcttttcccagtactggagatctttttgaatctggattgtctctgcctcgatgtggttctctggtacttgcaggcacttgcagagttgggacacatgaaacacgttgtggatatctgacatggattctggtaatttaaggcggtatgctgcgggtcccactctgccaatgatgggataggggtcgatgaatcgcggtgctagctttcctttcacttggaaccttttgacaccacgcatcggggagaccttgaggtatacgaagtctccttcctcaaatctgagttctctccgtttgttgtctgcataacttttctgccgactctaagcttcaagcaatcttttgcggatcaaggcaactttctcttcggcctctttaacaaaggcaggtccttccagtgtcctttcccctacgttggaccacattaggggggtctggcactttcgtccatacaatgcttcgaacggtgacatcttgatactggcctgatggctgttgttataagagaattcggcatacggcaaactggactcccagtctctgtcgaacgtcaacacataggctcttaatagatcctcgaggaccttgttgaaccttttcgtctgaccatctgactgagggtgataggcggtgctgaaatctaacttggtgcccatagcttgctgaaggctcttccagaattttgaagtaaactgtgtccctctgtctgacactatcttccgagggatactatggagtctgactatctctttgagatatatccgggcaagggtggctcctccaaaggtggtctttattggaatgaagtgggctaccttggtaagacggtctattattacccagatagagtcattccctttttgtgtcaggggcagtccggttacaaaatccatgcctatttcctcccacttccattcgggcac

SEQ ID NO: 47253 - DNA, 311 bp, Zea Mays
gaacaagaaggcaacttcgttggattgcagcctgtcacagaacattacacttcaatgttcgagacaggacactttccaaactagttgcaggatgtgttgcatgcactgggaacctacgtttaacctctatatgacacaaggcgagtgtctgagcctcctcagacatgttactacatcactcgcgtgcaaatcagagtgttggatgcaggagatagaggtttcaagactctatcatctcatgagtttctaaagccgctatccacctatgctgcttcggtcagcaatgctgcttagagagctctatggtctct

SEQ ID NO: 47254 - DNA, 447 bp, Zea Mays
aaaatttgagtcttttgttgtgaacttcaacatgaaatctaaaaagtggacaatatagaagttggttgccaagtgtgtacagaaagaggacaatgtcgggtacctaggaaagggttacccatgacgaggcccataaacctctctttggctcatttgtcgaccaagtccccccaccccgagcaagtctgcgaggtgggacaaacgaccaagtctctgtcgagcaagtctgtgacgcggggtgagtgaccaagtccccgtgcgagcaagtctgcgaggcgaagtgagcgaccaattccccaccgagtggatccgtaagtaaggaacctggtccgacgctgtcggcccacgatggccgtgacaagacacaacgtcaccaaaccactaccaagttgtacctacagtaccaaaaggcgttaatccgatacgatggaacacccccgcgtgccc

SEQ ID NO: 47255 - DNA, 502 bp, Zea Mays
aaaatacgccaaatccgaagaactccaccagcgcaaggttgagtctcagaggaaacccaaagatgctccacagtccagccgcacgtggacgagaactccgcagccagactccggtcgagacggccgcaatcagcagcaggtgcacaacatcgccaaccagcaccccgctggtgacgcccctcgccgccaggaatatcccccccagggccacggaaatggaactcgcggtaggggtcggggacgtgcgcagccgccgtgctgattctactgtcttttttacggcgaagactgcgcccaccaaaccagagactgcccagagacgaaggccaccaaagacaggatggcacgggcgcagccagctgacaaccctagagttgtcgcgcacacttatcagcaaccccctccaccatacatccacgcccccgccccgcatccaccgcaccacgcataccaacaccaccagaaagtacaaatcgtacctcccccacccccacctccacac

SEQ ID NO: 47256 - DNA, 1124 bp, Zea Mays
caccaaaacataatagaaattgcccaagggcacatttccctttcatccaccacagccgcgacattcttgggatcaaccgcaatgctctgctgactaatcacatgccccaggaaagccacttcggacagccaaaaggcacacttcttcaatttgccataaaattggttcttcctaagagcactcagaacgagacggagatgccgctcatgctcttcctcggtctttgaataaatcagaatatcatccatgaacacgaccacaaagtcatccaagaactcatgtaacatcctagtcattgcttacataaaagcagcaggggcattagttaagccaaaagacatgactatgaactcgtaatgcccatacctggtgcaaaaggtcgtcttctcaatatcctcctcacgaatcctcaattgatgataaccagagttcaaatcaatttgggagaacacctgggcacccctcaactgttcaaagagaacctcaatacggggtagcggatatttattcttgattgtcacttgattcaaagcccgataatccacacataacctcttgcttttatccttcttctcaacaaacagtactggggaagcccaaggcgacctgctaggcctaatgaaacccttagccagtagatcatccaattgtcgcttcaattcaacctgctcctttggagccatccgatacggggccttatgaataggctgcgtacccggaatcagtttgattttgaaagctgcatcgcgatccggtggaaggcctggaagctctactggaaatacgtcagcaaagtcacacaccacccgaatgtcctgcacccgcaaggcagcctcaccctccaccaccatggagaaaaagattcccgacttccgtgaccggcgatccggaagcaattgcgccaacaaggataacgtgaactttggggaacttcccaagaataccacctccttacccgacggcgcctgcaataacactgtcttccaaaaacaggatataactgcgtgatactgagataaccaatccatacccaagataacatcgaatgcccccaaggaaatcacaacaagattggccgaaaagacctcatcaacaagaatgaaggaacacccctgacaaactga

SEQ ID NO: 47257 - DNA, 689 bp, Zea Mays
cttatgtttgagttcaaatatgttggtaatgctctgtgagaatttgtttaatttatagtctttgtaagatctgtgataattatatgatatcttttgtttgtttggatagaatagtaaaaacaaataaaatgaggagctccgcgtatgtacagttgcagtccaatgactataaaatgggttgctttgcaatcgtatgcaggctgcgtctcccaaccagatagaagcacagtgcatacgtggttcaggacgaggtagtaaaacaacctcatgatgtgaagaaaaagtacgacagcagcaagcacatattgtcatataattttttttccaaacagtagcagccacacagggcaaagattcgcatagcagagaggtcgaatcgagagctagaggaagtggctggactggtcgacgtcccattttgttaactttgttcgtgctggagctccactgcacgcatgcttatcatctatgcgtaaaaggtttccaaagatcagctagaaaataaccccttgcgtgatatttcccttctggctggaaaggagattacgatgtctacaaaaaaagctatgactctttgtttccaatttccattgcttggttaattactctgagttgccgagctagccctcgcatgtaatgggcaacaataggatagtttgggaactctatttttccaatggatttttatt

SEQ ID NO: 47258 - DNA, 306 bp, Zea Mays
cattgacgatgcgatgcaaagctccactctgatcagcgatgcacgagatggatccaaaatggaacatctaacccagagcgaagttgacgatggtggcaaaggtagcagccatggagctatccattatcgatgttgcactccctacccggcacaccaactgttggtgattagcatcgccaacatattatgggatgtaccacatagtgtttttgtgttcagcgaagtcgacgatagctcaatggttcgtgtgaggcataatgggactcaaagatctaaacaagttttggacgctgagatgcataatac

SEQ ID NO: 47259 - DNA, 411 bp, Zea Mays
tggccgccgatggtgagtcgggacgtgaggagctgatgccgatttgccgctccgtggaggaagatcagcgaaggggacgaaccttgtttccgatttctgatttgttttcgatacctctcctaccgttgtggtcttgcctttaggctgctctgagttgggccatgggacacctaggcccatcgcgtggtgagccggtgccaggtgttacagagaagaacaaacggttgccattgatggcttggtggagagaaacaaagaaattgtagatggcggttgatgacagtggggagagaaaacggatgggtgggcacgacgttgctccacttgtaggcgagcggacgcggagaccgaattttttgtttttcagccctactttttaaaaatatttacgtttggacccccagaaatttt

SEQ ID NO: 47260 - DNA, 488 bp, Zea Mays
ctcaaataaaccaatgaagcctggacatataaaggtcgttttagatgcatcttcttcggccatgaaaatctgattaatccggcattaccatcaagaaagctaataattctatttcctgacgcattattgatcaacgtgtcagctatgggcatgggatattcatctttaggagttgctctattcaaattgcgaaaatcaatgcatactctaagcttacctgattctttcttctccaccggcacaatattggagacccactctgcgtatctgcaaggtctaataaaattagcttctagcagccggtgaatttcgtcttttattcatgggagtaggtctggacaaaatgttctagctttctgcttgaaaggtctgaaaccggacttaataggcagccaatgctctactatctctcggcttaatcctggcatctcagtgtaattccaagcaaagcaataagaatattctttcaatagaccgatcatttcatc

SEQ ID NO: 47261 - DNA, 372 bp, Zea Mays
gtggaggtttcccaagtgaaacgggtactagaggggcggtaatgtaggaaggagaacatttataactgaaagacatgcatgaatagttagaatgaaccttttttccttcgttggttggtgtagacacattcattctttttggttaagtttggtgtacaggtgtcgttgtcgtcgtagatcatgatcttctttttgtacttcttcgtcttgcgggacttctttgaatccgagtggatggattcattgtccttctccttattgtcctctggttggatggtcttgttcttctcaattttagatccttcccctgacatcatttcgagtttttatattcaaaaagaagtatcaggttctgatatcaattgatagtcg

SEQ ID NO: 47262 - DNA, 336 bp, Zea Mays
aaataatatgctttttattgtgttatagtatgactttagtagctttaatttagagaaacttcgttcgcagacatatgttaggattctgtatgatataagtgctgctttgttttgagttagattgcagaaaatttcagactaattaactagttgcctaaattgcaaatgaatcggtgaggtagtctctactacgtgttttctgtacatgacatggatgtatactattgactgtccactactgtctaatgtattgaccttggcctgcattatttcagaagcatacgcaaagagacaaacagaacgaattctatccactagtcagagaccacgttcttt

SEQ ID NO: 47263 - DNA, 557 bp, Zea Mays
cttcggcagttttgcctctgctggagggctcagaatttctggcattttcatcgtttcctccacctttggctcttcggccttatcatccttagcttcaatcggcccgactataggcatctttggcactacagttggctcttcaatgccatgcacaattggagcagcttgtcttgcttcggcagttgaagaggctcctttgccaaattcaggcaccacagccggttcaatataacgcggccggtgggtcggaaccttcacctttttgcccttcggcacaactgtggtggccgaagcggcaatatttctctttgttccttgccctcgcagagggtagcggtaatcagggtatacgaagccaatcgcatcaaatacattgttcagtcttttcttcccccagcccccaaaggctgcggaaagggcatcatcttcggcccgggagtatgtcccaagcagctcgtcactggtagcttcaatacatttcagccagtcatcatctggctcatcaaacttctccctaaatctgaaagtatactttaattgaaccaggccaccttcac

SEQ ID NO: 47264 - DNA, 694 bp, Zea Mays
ggagtttcttcccttggtggcttcccctaggtcaggcggagattgctccatccctctcggcgtatgagtctagagggtaggtaggatttgcgggacccgtcattgggccttcgggggctagtcaactgctataagtagaggatctacctgctctatccttaatcgactttgttcgacaccatttcgctctctaggaacgacatcttgttggaaagctaccccgcccgagtcctttgggggacttcttggctaatcatggattgtggcaagcgtccttcctcggagtgccctcactagggacgattcaaaagtcacctaatgcgggaagggtaggtggtttctggaagcttcctaaccctctctcccttcgttactcgctggggatggcttcgtttacaagatggttgaatcaagcgtccgaggagaggtcatatcccttttgtcttcccctactgcttctccagatgagaagtctagggctggtcctcggggcagtgggctcgggccctccctccggggtagcgcgtctaacgctctgaatgtgaatgatcaccctcttttggtcgtaaggctggttgggcttgggccccactcgggtcgtgtcatcctgtgcagaagagtcatggcttcttcctaccccgccagtcatacgcagtccgaagggtccggggcccatacccttccattgttcaaa

SEQ ID NO: 47265 - DNA, 324 bp, Zea Mays
ctttaatcaaagcttcgagagtaagttgatgacggtatatttcaaacgtcttcaatacttcaaccagcaccttgtgcattggaaaacaaagcccagccttcatgaagctttcaaaaaccaccacttcatctgcttcgagaagagaaacaatgctttctcctccaaccctgacaatggatatatcgtgaaaatattttttcttcatcccttcaatctgtccttgtttaacactggactttccaaaaacaacatggcttggcctccacggctgttcttcggcatcttcatttccactctccacatcaaagttatcactgtcgctgg

SEQ ID NO: 47266 - DNA, 637 bp, Zea Mays
atggcagcgtgcggctggcggtttgcgttgtctgttgtgtgagaaggtagtgacggtctcgctgggccattgaaacgcaatcctacggcgggatattaaagatctacgtggataccaccaagattaggaacgcaagcgttagcgacaatatttcttcctatttttttgttctctacagccatacctcatttttaccttgtgcccgccacttatccttagtgtggtaatgtgacgaggaaggtgaccatattcttttcatccttcattcatccctcaccatgaaaccaaataagagacagtgcagcttcaatccacttcaaccttgtaatcaaacaagaaattaggtttaacccgtcacttaaaccaaacaaggaacgagtctgacccaacttaaaaaatagatcggttttgacccaacccactttgttccgaaaccaaacgcactactagagagtgggaggatgcggcgacggcatgcgacgcccgcgccagcatcacaacagcgtgcgggaggaaggtgtaacaccctgattttgggggtataaaatttctttctaattatcacccaaaatcatgtgttactcttccttttctcactctaggccttctttctctctagattctctctcttcttttt

SEQ ID NO: 47267 - DNA, 289 bp, Zea Mays
gaaagtacaaaattagtgttgcaggcatgaaaacagtagcagattcattaggcattttcttaggcacatgatgaataacatttcccttcctaggcctacttctaccatgcacaaaagtagaacttgaagcaatcatagcatgtgaatcataagcaccataactcctgttataatgagtattcctagaaacttttctatcatatatgaacgcatgattcttttgaatgcaactagccataggggccttccctttttccttgttgaaaatcggagccctttggcttgttaa

SEQ ID NO: 47268 - DNA, 874 bp, Zea Mays
agcaaccaacagtgacatccacatacgtccggacagagttggatttgtacctagaagaaccattgttgcctaggacacaagagttggatataattcagtggtggcagcatgctgggctcaagtatccaactttgcgaaagattgcacgtgatgttcttgctattcctgtgtcaacagtggcatcagagtctgtctttagtactggagggaggattattagtccacatcgcagtaggcttgcaccatcgatgatagaagcacttatgtgtatgcaagcttggtctcgttccgacatgttaggtaatttatttaaattatgacaatgtgttttgtttactacatttattaccatgttttaactctaatttgcgattacatggaatcaatctacctttgttggtgcacggatgacttgtcttgaagaggaggatgaagacatggtgacattttttttatttatgagcaattcaatttgaattttgtccgttgctaattgattgattcaacacttgaactaaaatgtgatgtgttctctttatttctaggatgaagctggaccaaccgatttaaattaagcgtgagcagtttgctgtctgaggaagcattgaccgagctcttgtgactttgtgagctgagagtgagcagtttactttctgtgtgtatgtggatttatagtcaccgagctcttctcagttctcagtgaccgagtgtgtatgtggactgtctgtttgcctgctctctctctctgtctgctctcactctcagtgctctgtgtggagtctggactgtgagcagttctgcagtttgctcattgctgaaagtgtcaagtgtgaaagtgtgcggtctgctctctgacttgttgtgtatgtgtgtg

SEQ ID NO: 47269 - DNA, 637 bp, Zea Mays
gaactatatatttagaaacactcttaaaaatatgtaagttaaggtaatccttgataaagatcatactatactctctcctaaattaaataagtactatgaataaacctctaaactagccacacatttaaacccatccgtccacgctcctccacctatcttgccgggtgcagccacctcttgatgccaaaaacctagccgccatcgtcgggggaagtttggaggggggagaaggtagcgtcgccgcggtcatccaggttcggtcttgcgaggcctcttcaattcggacctaggtgtggcaaggggcttcgcgcaatcatgtgtgaccagttttgaggattggtggcgcacggagtacctcggggtggcggcaattacttgccgtcgaccatgcaccaccgcggtttcatctagcaccatggccagcatcacccgaacaccaattcttggtaaggagaagtcaattgaatttgccatgccccttcctctgtatgcccctagccacgttagggtagaaacgttagggcaccggattgcccaactccagccatccctcgccgtgatgggggggcagcgccaccgctgcttaggtcgaacgggtagagggcctcctggccgttcgatccaaaatagacgttgg

SEQ ID NO: 47270 - DNA, 529 bp, Zea Mays
ttttgtgcagcatgtttgcagtgtatgagtttagtcgattttttcacatgtactaatcattcccaatttgaccagctgagtttcaatcagtgtagcttgaggcaattttttatactgtttttgataaagttgcctagtttcatgtgagcagagtgctagtttgtgtctattgggcagactctgcagtctgtgttgttttagccctaggtgacccgccatacacaagtagaattgaatggaacatcaaataaacaagcagagtaaacgaaccataattttcattcctaacctggcacaaactaatgcacatagctcgactaaacaaatatgataagctttaccttgagaaagtatggtcgacgatggctgtgaggccagtgtagttggaagtgtgttgccaccatccatttatgcatttatagcattcacttggaaggaaacactgctataaataattgtgctttcggtgaagctaacattccactcgaaagacttttccagtaggtttgtaatttcgcttggaatgaaa

SEQ ID NO: 47271 - DNA, 384 bp, Zea Mays
caccactgtacatgccctaagccctgcctggcctgcctaatcaaaccctctcggtcaactatgctatgcctgcctgcctgctttcaacacgtactgttcctttttcaaaccttccctggaaacgaaaacagaagatgcatggtatttatgcttggggatttgccttcttttcagtgtactaataagcttggggtttgtttagtcgttcagcaatcaacttggacgagtgttgataaataaaactcgatctccaacctttcgttcataaatgggtcagctaactttgaggtcggtctcactctcacaccagtgtcgctttctgattgtattgtattggacgggaagagctgaggtcgacgcttttctgcccccagctgaactgat

SEQ ID NO: 47272 - DNA, 635 bp, Zea Mays
cgagcataatatggacagaggcagccctggtatgccttcggcatctttcaaggtcacataaaactagaaatcacaccaattcccccatttgttctttgcgcacgaaacaagttccacaaattcacccaaagtcttcccagtcctcagggtgaacgtgcacgagccaaattgcttaatctttctgccagcaaccttcttctgccaatggaggcaatattctttggcaaagatttcaaccaagggctctccaccatacgtagtcactacccacataaactttgccagctccaccatggtgttcggcgtgagatggtgaatctgaactttgaagtgttgcagcacttcgaagacaaaccgatgcataggaaagcgaaggccagcagtgaagaacgcctaaaaaacaagcaactccccctccaactctaggacctatttggctcctggagtgtgcccctcaccattcccaaaataccccaagcgctgcatctcgtgcacatggcctaagtaaatccttgacatcccaaactccacattgttccctggtaacaactccactacggccgctgaatcgctaaccgtcttctacgacgaggaagagaacgacataacataccgtctacgatggtggcggtttg

SEQ ID NO: 47273 - DNA, 497 bp, Zea Mays
gtttttttcaaagaatctgaaatgtattatgctaatcattcatctaatgtgcaacagttagttccacataaagtaagtccgcaggtggagaacttagatgagcatgacaatatgttttaggatgatgttattccaggtccataggttcatgatatttcacccataattgatgattctttatctactgagcattcttctcctgttgtgcggtaaccacaacaacatgttgcagttgggagggctaaaagagatattaggcccccgaagaattgattgaagaatgcaacattgcttttgctctgagttgtgcagaggatgttgactgcagtctagatccttccacttataatgaagcaatggtttccaatgatagtgacaaatggctgtttgctatgcaagaggagatgcagtcacttgagaaaaatggtacatgggacattattcgcttgcttaaagaaaagaagactattcgctgcaaatggatcttcaaaagaaag

SEQ ID NO: 47274 - DNA, 476 bp, Zea Mays
taacttccatcatagtcacaactagagtgtcgtagacagtgggacgggagaagaagctgacaagctaacatcctcccatggtcataacagttgatgtgtcacggatgtggtagccctttgtgtcaatgtctagataaccaagcatgagggcagaggagccatggtcaaggatgtcgtgggtcaatgtagcagtcgaggcaaatgatgttgacatgacgccacatgcgcaaagaggtgccatgtggtgatgacggagacacgtcaaattagtcattgcggaaagggggcaatgctgaggtcggcatagtcagggccattgaggaaataggtgaagacatcgatgcaatcgagggagagtctataattaagctaccatggacgaagtgtgcacttagggtttccatgatcatgaacacatcgtagacgaaggtacgcaacaatgttgccaataatgaatgtatgatgtagagggcccc

SEQ ID NO: 47275 - DNA, 876 bp, Zea Mays
cttttctctgattttccaaatctccggactgggcgccaaataccagagagaacaggggtctcggtgcaataaatcccaagacttagaataatccctgctgtggactgcgggttattacccctaaaacccaaggtctctttagtaaaaggggcacggcgatgggtataagcagcccctggctgttggatcgcaagcctagcgcctagattagatttattacccagcgaaccggtacgcgattccgaccctaagatccaacatcaacagtgcagatcatatttgccccgaaatcaccctgatccgcacgatctgacctgaacggtcctgattcccttgcctccaatcgttacgccaggatccaattacagccgtcgatgaacaatcctatggtacccacgacttcttccctcccccgcgctacggacagaggcgccatgcccgcatggcggcggatcacaccggcgacatggtacggccgcacccaccaagactatacctaggtctgatagcgtctactcgaagcggaggttaaagcggattcatggatgcactacataccgccactgatgccgatgaagtacccagtcacggaagaaggggatccgcggaggattccggtcgacggcgagaaattgacgttgctccacagcctcacgacccaattgcttggcacatacggcttccccaggcgaagacaatactccaaaagccaactccgagagcagagaccccccagcgacggctatccctggcggcggcgcgaatctctctctctctctcaccggcgaggctctcagtaggcgatggcggctaggttttcggtgatttggaacacggcgagcgcggccgagggcccttccccaagttttatatgca

SEQ ID NO: 47276 - DNA, 498 bp, Zea Mays
ggagttcgccgtcgggtcgaggtttatcgtggccagggtctcctactctgcgagtgtaggtaacgctcctcccattgacccaaattactaatagcaccgggtaatagtcattgatgccgggattgggtctcgacaagggttggattgcctcgtcgatgtgggctctcacggaatcaccgcccccgtgcccccgtcagcgccttgttgggattgattcatgaaattggttctgcaatcctgattgtccaatcgcgctcttcgtgtttgttccatgtgcgtcgaagttcgggcatcggggggggggggggattttcgtgaccatcggtcatggcatcgccgtcgacgctcaggcagtgcgcaagatgttcaggggagtgcgcgtgtgtcggggttccatgggtcgttgatctgtccacatgtgtccaggattaaaagatacacataccctttcgcttaatcgaatcagagtcgttgatcctaatcgaacgggtggaatag

SEQ ID NO: 47277 - DNA, 764 bp, Zea Mays
aaaacccgagcccgaagctcgaaacccgaaaaacccgagcccgaacccgtatagcccaatacccgatacccgaaacgtttatgcgggcaataaaccttaaaacccgatattatttcgggcttaatcgggtagtaacacccggtacccgaaatacccaaatacccgactgtataaaaatcaccacatgtgtctatgtgggcatacatacggatacgacccagcccaactagatttagaaagtagcagatcctagtcttagtctccactctccagtctatccagtatccacggcgtcaggaaggagtcgctggctcacagagctcactgccgcggtgtcgcctggccgtctggagtatccggcttccggccatcagcgattcaacagagtaagcgtgcagctgtggtgccgtactagctcttgctcttccgtcccatgtgccagcacgccgtggtgccatactgccaaccatcagtcaaccaaccggcttctggttcatcacccaactgtcttccggattgcaacagctagcagttcatcacccaaccggccaaccatcagtcgtgcttccggttccactttccagagtttgctatttccacaactaatcaaggtcagttgcatggtaaaatatttcctactttgttcattttactttgccaaatatttgatgtcacattgatctgcaacgaaatcgggtagaacgggctacccgtacccgaacccgaattttttgggtacccgaattttcgggttttgcttaaat

SEQ ID NO: 47278 - DNA, 927 bp, Zea Mays
tgcaactattcactgaatctgaattttgatcaggattcagtgttatcgcgccattttgcgcgctctggcctgatcgatccataagaatttttggcatagtcattacagcacaatgaaagaacattgatcatggtacaagtttgatacagattagtttgagagcaaccacacgaaattaggagcaatcgccggttgaaatcaggtggattagcgtactgttcaccggaagatcagaaaaatctcgctggggataagatcgccaacgcggttggggatgggtctgcggccacggtaaagatcatccgcgatgtggcgttaaaacgttgcggtggcactgcccggttaatcagcggtcgccggaccatcgccgtggctctgcccgcgcgggtgaactcgccagtgcgtttatagctccgcgagcctcatccaactccggccatctgcctataaattaaccccaggtcctgcttcttcaccacatcacacacacgagcacttgagcaatcgactcaatttcaccggagaactcacatagtccacaaatccattccgccctgttccgaacgccaccatggaggacctctccgtggccagccctcttcgggttagtactcactcaattgcctcatgttccagcatgtccttagcttcctgttgctctcagcgctaatcaatcaaagtttaccaaagtcccaccactggaacactccgttgctccgaagaacaccgccgtatgcaccctctctgtcgatcagcttctctatccccgttcggcctaaactcaatcatgtacctagttcctggtgaacctgtaaagccttcccaagcttcaattttagcttcgatcccattaatcaaccggaacgcggtctccagggttgttccgccgccgtgacatgaacaagcttcaaattaggtcaaatctct

SEQ ID NO: 47279 - DNA, 586 bp, Zea Mays
tcccagataacatgatctaggacatatactccaaaaatggtaacataataatctaagataaatcagcaaacaatttgttcctcaaacattctagagcagccacgtgctcagctctaatatcttcaggcattcctgaagtatcttgtttgagcaagcttgaataagtttccaacattttggcctcctcttccttagctacctgcaaagaaattttattggcctcaatcttgtcattgtcttgcatttctagagccttcatatgattggctgcgacattgttttgaattttctcaaatctatcaagttcttccacatttatccctcttgctttatattttatttttccttcatgtgcaactcttttagctgccttttgtccaattggtctaggtctctaggaaggtcaccatcttctaatcctccttctgtgctacccttctccatttccttcctcttgacatgactatgatcattatagctcatccagttcgcctcgttatgaaccatgtaccaaacaatcataagttgaagtcataatcctttattctcctcaaagaatttatgtgctttctctaaccatatttcg

SEQ ID NO: 47280 - DNA, 363 bp, Zea Mays
ggctgggtgatctacccgagcgggtaggttaggtggccgaggatgacgtcgtgaaacgacaatgagctaggtcgcaacgcggagcatgtgattcataggtcttcgaaggtctcaatatacatgatagtgagatcgctccctctatccatcaacaccttggagaggtgctttgagcccacgatgggctcgatgatgaaagggtaggccccttggttgtgggatcttgtctcggtgctcgcgatggttgagtacgatgggaaactctaaccatcgcagataacatggggcgacaggcttgtctacgtgcacatcacggtggaccaccttgaggcgacgcttaccgccatatgctttggccccacc

SEQ ID NO: 47281 - DNA, 377 bp, Zea Mays
ttgaggacctttgaaatatgaaggcccccaacaattatatattccttattccttataataaagcggggagtaaaacagcagcaccggcgcacccatgtccattgtccttattatcaaccaccagatctgctatcaacgaccatgaccacatgaagtaatagaaagaaagaaagaaaagggtccataggaatgtcttgttcaatgttgcccattgtgttctctaccagacattggactctgccaaaagaaatcaaagaggcattaagagggggggcaaagaactgcactcattctggtttcaccaatgaggcgacgatgttgatgtcaatgacaacaacgatgaaggcaatccttcctcggtgtcccctcctccctcg

SEQ ID NO: 47282 - DNA, 286 bp, Zea Mays
gtgagcttgaggcatatttggagccttgtatctcttaatccataaggaatttgcctagggtcaatacatcaaatttttagacctactaaaggagtataactttgtttaagacattaggcataagtgttgtacaaaagttggagttaaatggactcaaagtctggctgtcagtcagctcagagtctgaacttttactgacagtgacatggggtgaacttttggagctcttttgaagataatccagtgagtgtttgagcatggttactatagcaagattgtaaccaaa

SEQ ID NO: 47283 - DNA, 281 bp, Zea Mays
gtcagcttcatttgatagacgatagatggtggttgattgggtgcctatgtcttaaacagttgagctcaatttgattctcctgtttgggtgtgggaaggagacaagggatgaaaatactgagcaaagatagagtatagagggtagagaaaacccatctatctaaggttttacctagctaactgatgtcattgtggacaaaagtcacacaatacactaacaatcatttcaaagaagcaaatcaaacatgaacataacggacaatgaattcaagcataccagca

SEQ ID NO: 47284 - DNA, 488 bp, Zea Mays
gcggtgaacgtcggtggtcggtggctctgccatagggagcgagggcatcattgtgcctaacattggttggaggagaacgtggatgtgccgctgctgggtgatcgggcggccacgattaaatgccgcttactccccccttggcctatcgaatcgatgtcattgaatcatgagtcaacgggtatgattagattttttgagtgcatatcgtttcggtgagttgattcaagccgcggatccacgatcggacggctctggatacaacgaattttaagcagccgtggcataatttcaaaataatcctcgaggttgtggagaataaacctgtagtataaccaagttcaaaactaattacatacaagtccatttcttcacaaaagccaccctggactttaggcaagtgggactgcagtacacaagagcctcatgtcatagaaaaataaaataaattctgaaattaatttgtattataaaaacaatcctaaaaagct

SEQ ID NO: 47285 - DNA, 501 bp, Zea Mays
agcgagtgacgaccgccacagaaagggtctgcccctgaagctgcaaaaccaacctagtaaaccccccagcaatccacacgaattactcgggggctacatctaacatatgcgcttgcacgcacctagagaggtcatttcctagacaaaagcctctacgtaactctaaggagtttcacaaaggctcggggctgctgttgggcacccgagaatggggtgcctaaagaaacccaaagaaactccttaaaacgtcccaccgactaagtctctgccaagtaaccccacgaggtggagcgaacaaccaagtctcgcccaagcaaccccacgaggcggagcagacgaccaaggctccgccgagcaaccccgaggcagagcggacgaccaaccctctgccgagcaaccccacgaggcggagcgaacaatcaattctctgccgagaaacctcgtgaggcggagcggacgaccaaccctctaccgagtaaccccacgaggtggggcgaacga

SEQ ID NO: 47286 - DNA, 578 bp, Zea Mays
gtgaaacagatccctgcagttgagtcaatgacgtatgggatcatacccaggcagcgtcactgacgcatggggtcatacctaagttggaccctacatcagcgaccccaactgcagggtgcagaggatctcattgcggtccggttgctgatgtagcaggcatgagggcaacagggatcaacgtgctgagagttgactgtcctggaaggctggaacgaacctacattcgctcatgtattactactgccaattagcctgcacgttccgtcagcttccagtaaacatctttccgtagtgaaaccataacaaacaaggcggcagccaattacgcgttctgatagacaaccaatttaaccaaaccaaaaccagtcaactctcaactcacgacgtgccatcagagaatgtcagaacgggctaccatgtaatatatacggaaaagtaagaatatgtttggtttgagattaaagtaggatgagacgggaagcgataccatcctcgattttttaagatcataccaacactaaaaattgctccggtgtttatctcgcccccacgtaattctcatccaaacactaaaaatg

SEQ ID NO: 47287 - DNA, 330 bp, Zea Mays
aacgcaggcgccatccttgggtaccgagttctctgtagcagccacttgaaggattttcaaccacctccatgggaacggagcaatccagatcagcctcttggctcttaaaaccgtgctccaaggttgatgaggcacgagatgctgctcgggataactctaacccgacagcaggcacatcagcacagacttccatcgttccaccatctgtcgactccgacaacagatcttcagggaccatatcttcgagagtctgatcaaaatttgccagagacaattctttcagaccaacgagagcagacaaagctggagaaggaataccactactctccc

SEQ ID NO: 47288 - DNA, 658 bp, Zea Mays
agggccagaataatgtcaggttggcttatgctctggcggagccctccccataaattcgatcgagctgtgagcaaacggatttattagttccaaaaaactttagtttggtgttcaaatcaaggagtaccttttcttcgagaaaagatatatcatgcatgcattaccgccgtacccagatcaggcaggcaggcaggcaggcagacagtcttgaagtctccattgtgaaaaccacttagggccatgggcatgggccagaagggaacagtttgttgtctgaatcaagctagcgatgtgcgcaaggtgccaaggtcaggtcattcatgaacccagctggtgaccatgttgagtaggactgggccagtgctcagtagtcagtgcgactattagagcagtgctgctagcccgtaccggtgtttcacagagcgaagacgacgacgacacatgcatgcatgcattcatctgctgctccgtccatatgttcgatcggcgggcgtcaaccggagcatgcagtccaaacaaagtggacgaacgaatgaacagtggacggctgaatcaaataatctgtacgtatgcccgtgacggagggcgtgagtgtcatgcaatcatgcaggcgtgccagccggcgcggccgcgcagttacgttgtggctgggtcggcg

SEQ ID NO: 47289 - DNA, 628 bp, Zea Mays
caccgtcgcatataggagacccgagccaccgttgtatccgaccgtagttaccaatgttcggggatcagagaggggtcaaggaagttcgttggatagtgtggagcatgtacgaagagttgctgagattggagatcaacggagatgaccagaatttctcaccgaagttgagcagtaatgatggatctgcatcgcatcatggccgaggcatatgactacacaattcacggtgagttctctcccctctatttcgctatgacctgaacttctttccgcatgatagggatcgaggtctgtgctcgagggcatgtttcacgcggtctctggccatggcaccactgtggctagccctgctccaccatctaggtgtcgggggataagagtgcgggactgggaccgttgatccttgtgggaacggctccgatcaaaagattgagtaccccttcgtgagattcaaccatagcactagatctttgatccattggccgtgatcggaacggaatcggtggcgtggattgatccacgcctcattaaaataaagtcgtcaatcttagatcctttggctcagaccatcctataccccttcgatgatgcaagttagctagggtccctgagaaatcttctaaataac

SEQ ID NO: 47290 - DNA, 870 bp, Zea Mays
tggagctgaagcacttgcaaatcggcaaaggaggggaaacaaccaaggacgggataggtaaaacaacactctcaaactgcaatgggagtgaggaggctttaaaatgtaggtacaagataagcatcatggtaaagatcatgatatgacaaggtgataacaaacaaacacacaataaatgatggatttaagacaaaacttgcaacacgacaaagaaggggaagcaatcaccgatgtaataggtgaagcaccatcctcgagctgggatggaaaagaggaggatttaaaggtcaggttcaaagtaagcctcaaggtaaagatattgatattacaagggttaaagccgaaaaacaatggcataagagaagacgtaaaggtgcataagaaccaagggtatgagtaaaacaaagaatggagttgagacaagacttgcatgtggcaaagctgaggttacgaccaacggtgaaataagtagagcaccactctcggattgagataggagaggagagattttaaatagcatacatatgataaccgctaaggtgagatcaagggatgacaaaagtaaaagtgataactggcaaaagcatagcaaagggcagagtcaacacgagactcgcaaagtggtgaagtaaagagaacaataaaagggtaagataggtaaggttccaacaaaatagttgaagtgtgacaattaattactaagggaagttataaggaaacaacgagatcaccaaggttgtgcgaaataaaatgattgttaatggatcatcgagaaacaagggtgatcaagggcatgtaaactgaaatgtcttaaaccgacattgcgctataaaggtaaccatataaaaattataagagtatgcaagattc

SEQ ID NO: 47291 - DNA, 812 bp, Zea Mays
gagaatggaagggacgaaagggttgagtaaagacagattatagagagcagagaaaacccatctatctaaggttttacctagctaactgaggtcattgtggacaaaagtcacacaatacaccaacaatcatttcaaagaagcaaatcaatcatgaacacaagggacaatatcagcacaacacaatccaattctactcattcaaccaaaacaaaaggtgagacaaggtctagaataagaaagatattataaagtcaaggagttgggtaagaattatcaaggagttagacaagatatatttattggtgaccaagagtgaaataagataaccattaaagtgaggataaatgatacaaccaaggatatgaagtgagttagggagaaagcattatcaaggagacaaaatagagaggcattatcaagtaggaatagggagacaaagaattcagtatatcaaggtagatattgcccaagaatggcaattcaatggcaagaaaataagagtagaagaagtcaatggttatatagcatgattatgagttagaaaacaaccacaatataacgtcgtctttaccgatctagtcgaaaacttaacactatagaactatcctatcaacctaaccaagaataatggtaatagatccaagagatctataacgaaacttcttgcagcgcggggataagacagagaatggggcatcttccatagcttctaaagggttccttccggtaggcttcacttcaagttccacaatcctaacttgatcatcttgtagtgcttccgagtagagtcttctgatagaccaaaatcagac

SEQ ID NO: 47292 - DNA, 732 bp, Zea Mays
cagataatgaggcagaatcaatgaaaggtccggagattcgaatgataaagccacaacatgcttcgctgcggtagagatttactagatccaggtgaaaagagagatcatcaacccagatggcttctaggttgagccgaggagaatttaatgaggattttgggcaaggttccaagaagaatttgtgattggatgttgttttgcggacacaaacaccaatttttttgacataaacaagtgcacaaggaagctttggtccatcaagcgatggcggtctagaagctgtgcaggtgtatattaagtggtgcaacacacgagggctagaaaaataccaacataagcatgattttttaaagaggtttcacttgctaaactcaaggttgttcggagggggggggggtcttttcatgggcagaacagacaacatttttttttcaaaaagggttgaacgcttataataccacctagatagcaaggcaagagaagcacataacacaacctagcaaagttaccaatttgacacgaggtaaggcatttcttatagttcctaacatagcagtgcgtcaaattattcacaagttcttattattggaataaaggtgagagaagcatgttgatgcacaggagacaatgatgtgataatcatgatgcatgctcattctaggcgtcttctcagacctaactacttttcgggtgcttctacagcatccttatagtagtagtaatagcctttat

SEQ ID NO: 47293 - DNA, 569 bp, Zea Mays
ctctggtaaagtgttgttgactgtccgagcttcggactctttgcgtgtgtcgcactgtttattgaacttggcggtgccattttggttgttgattatgagacaaagttggagccatgagtggtggtggtggcagggcccattcagatggggagtgtcttgccgaagctactaatactgtgggtagttaattgccacatactcaggaatgtacggggaatagcacgaagcgatatgcaggacctgcttcggctgattctgtcgtgcttcggcttcagctatctccttttgcttctgtatcgtgacttggcatgtcctcgttgtatgtcccttatcttctccatagaataggcaaaacaaccttcttggttgtgagctgaatcttccattgaagcttctaccttctctgcctcttggggctggtggcctaaaggagctttgttgtgttcctaataattgagagttgtgctgatgcccttgagtatgaattccctgtcttcacttgatatgggattatggattgtcatgacatgccttgggtggagtcttcccccgaagcacctattccaaag

SEQ ID NO: 47294 - DNA, 402 bp, Zea Mays
gctgctgagctgcgaacaagggtttttgcgtctctgtgcatcgaattaaccaaaacttctgttccattactctcacccattcatcggcttctaagggttcctctgctttgacgaagagtgatggtcgagtctcaaggaattccaaacaggtagtatctcgtggtccctgagggggaactctgcctccgtgctgttggaattggttgcccgccatttcgcgcaagaagcgcgtattatcagcggtggcattgaccaaggcagagatagcctcggccaaagtcggtggtaccggtggcgggatgggagtgtcctccccaccatgagatgtccccgcaccatcatgtgcacgagtccgggatggcatctgaggcaaagaaacatttggaaaatataacatgccaa

SEQ ID NO: 47295 - DNA, 413 bp, Zea Mays
ctcgaagtggtcccgcagggttttttgaaatgtgaccgttggtggacgtgttaatgttggactgcgggtttcccaaggcgtcgcgtcgcgcctataaaatgccgacctcgaccgagtccgtttcctgcttgcatttgcgtggtagaaaccctagcttttttcaactgctcgtctgccctccttgctcactctgcttcgaaaatctggcccgtatcaagaagaccgtgcgcagccgccgacggtacgttgcaatgtcttcttctttgtctgttgcaagtgcatcgccggtcgcgccgtcgtccgaggagaccttgagtgatttggcggtgatggagttgcagcctgaccataccgtggagtttggtacctcgaggatttcctcggtccgtgtgctggagatgcagcggcttggt

SEQ ID NO: 47296 - DNA, 506 bp, Zea Mays
gtgaagaacaacaggtcgagtggtcgacgcctcagctgtcaacggtcgaccactccggatacagacaaaagccaacaagtcttggcatatactatacaatacaatacaaatggtcttcgaaacggatacgtcctccttcccttccttcctcgcaatgcaacacgcggcttgctgcgactgcgacgtacctacgctcaccgtcaccgaccgaggcttccgttggtcaatactgcatgcatctcaacagcatcgtttattgtatacgaccacacgagctagcagcatgggtcacttcccactgtctttctttcgaattgtttaataaggtgtcaagtgctcgatcgtcataatcacttgctaacagctactagtagatggctagcaacctcgtgggattaactaatcattcgctggctcaaaaaaaaaaccacgacgtctgggttatagttgcagtttgcaaattgcaattaggtggagtgttggggaccctctcctgttctctttcc

SEQ ID NO: 47297 - DNA, 770 bp, Zea Mays
cgtctatataaaaaattatttctactgacctctagcactcacgattctataaaacgccattgtaaatgggatccgatccacctctataaatcttctctgtactagtgagaaaatcatagtcattattaccgactgcatctgcatgaatccagagcacaaagtccatttcgtgaagttcctgtatcactaaaccaaccactgaatcatggtttggcgatgagagaccaacatcttgacgaacacctcgcttatgtacaaagtcgaatgaccaacataccttatctccagattggttctaaaatagggtcaaaggaacaaaaaaatcgctaattcatataaatccatcgagctagtcctgttaggtccaatatgaatcatgcaaatcaaccctaaacattggataccttagaaatggggcttgttcaatgccattagtacgatcaagtttaactcaaacatggtgaagtagagcgtcactgaccttcccttcatggtcatgtagagagtgtatgggagaggagggtattgcaaatattggttcgcatgctggttctcccctatttgtatatgcgtcatgaaaggggctacaaccacaaggttcttgcacccgtgatcagggcacgatcgagatagagtttgagttcaattcggtcctttgactaaatctgtgagatcaacataatattcctttcatgatctcatacttgtgtatacttaaacttattactttcttaactatttaattctttaactaacaattcccactcatc

SEQ ID NO: 47298 - DNA, 588 bp, Zea Mays
ctaacaatagaagtttggaaacagcaaaagatatcctaatacagaaacatacttcctgactcatttaggctaaatcaagatggaagtcccttggtgatagaactactatcagtttgagtcactactaaacataaagatgcagtcccttggcatctggctgtcaccagtttaaggtgccatggggtcccgccactgagcttaccactaactacaacatcaccatgacatgaaatctatcgtatttagaaacagtgctggtgatagttcaatccaaggaaaaatgtatttgtaacagtggctgacccacatcacggtgcatacatggataacttgacgatttggacaaatgacaaatggatccttgcaggatattcgagatagataatcccaacctatggtgtatggcagtgtcgaaggccttagcgacatgtgatcaaaataatcttgttgcttgtgttcattcaccattgtcaacaatctttgcagaaaaataagcatataactaaattatgcatctctatttaccactgtgatagacaacctatagaatccatctataaaaaacgagaataggggatccgatctgag

SEQ ID NO: 47299 - DNA, 341 bp, Zea Mays
gacccaaactgtacaggcaacagacaacacggtccagatggagtcggtgcacacgtacatgttgtctcctcctcagctcgtttagttataacacaccaccaccataataatcatcattatctggatcactttctgaattattcagtgcctacatatatgtttattcggttggttagtttgctgcggttgttgattagagaaagatggaggaactatgggagagacgacactgacagcatttgattatcgagatactactatagatgttaacatttggtctgcatgcccgtctgtgacccaatagcgcttcagattttcactgaagtaaccacaagtacaac

SEQ ID NO: 47300 - DNA, 594 bp, Zea Mays
aaaaaattgaaagtcctcaccgaccggccccgctatattgaaccgaccatagagcttgagtttagcggggaaacttcttcaactactgaagcgaaaggacctgctcctcctgcgcagaagattgaagagacgggtgcaatgccgaaggcaccctcagccaagctagctgatccgaagactgataaaactgaggagccaagaatcgaagggacaaaaactttagaagttttaagcccttcggcagaagtgacggtgccgaaggcacaaaaaggtcttgcaacgactcccaaaagaaaaaggatggcaagtgtactagatgtgctagagtcagtaaaggcttcaagttctattccttcagggaaaattgccgaggctttgaaaatgcaaatcgaagctgaaacaaaaccggccgaagttgaagctgcagtgagccaggccagcgccaaagctgggccttcagagcctgctgataaacatccttcggaatatgaagagaaggcagcggaggaagaggctatagaacagagtttgcctgagaaaactcccgcgtctggtcccgaagctttaaaagaaaatattgaaatgcgctgttgc

SEQ ID NO: 47301 - DNA, 469 bp, Zea Mays
taccttcgtagtggattgagggttctaattctaacttgttttgcagagcatgttattaagcaagaccttaaaatgcagcaggataatgaggatagaagaaacaaagttataattaaaggcttagaggataaaatcaaggaacttgaatcttctttgaaggaaaaatacaacccgctgcaatcagtcgaaggctccctcgcagaagcacgatctcagaataataagctaagcgagaaactaaatgaagctcgaacaatctggaacgaaagttcacagtgctttgaccatgagacaaaggagcttaaagcaaaggtcaaagtcgaagctgaaagaaatacgaagctgcatgaagctattgagaccctttggaacaattgctccgactttgccactcggtgcattaattggctgaagggaatatttaacttggttggagccgcttctgaggagattattccttcgatgaaag

SEQ ID NO: 47302 - DNA, 1057 bp, Zea Mays
gatttttgttgggaactttcaagacacgtatgtttgccctggcaacccgtgggacctgaagaactaccgacaaaaacctgacgagaccttgagggacaacatccgactcttctcatggcaaggcaaccaactaacaaaccttgccgacgacgacatcatcaatgcattctttttgggaaccatgagcgaaactctggtccataagctgggacgcaagagcccacaaaccacaaatgagctcttggacattgcaaccactcacacatcaggagaagacgcagtgggtgtgatctttcatcatcgcaggcagaaggccaagcgcgacaaggatcccaagggggacctggagggtggcccgataaaagaaagaaataaagacagaggcatgacgaaatgctagtggaagcggtgggacagaagggaaagagaccgccgaccaaggaagccactcaccttttcgagaagctactcaaagccccatatctgaactactgctacctggtctgacatgcctacaaggactgcgagctgttgagaaggttcttgggtggaggaacaccgcacgaggcaggagcgaaacccaggaagggaggcgagcgaaaggacgagatcagatgtctgctgatctttgggggttagattactatgcgccaagaagacatcggaagttagaacagagcaaaaactccaggctcgataagcgtctccggttttcctcaactagtccaaccaaaccatcacctatgatcgtgccgacaacatagagcatatcccccaacctagacgatacccgctcattgttagtcccatcgtagggtcggtacgacttacgaaggtgttgatggatggaggaagcgggctcaacatcctttactctgctacgctcaacgccatgggcttagaccgagatcacctccgactgacagaaggacccttccacggggtcatcccgggaaagcgggcgaccctgcttgggcgaatcgacctcacggtcacatttgggacaccgaccaacttcaggaccgagaccctcaccttcgaagttgtcaggtttcag

SEQ ID NO: 47303 - DNA, 347 bp, Zea Mays
attatatacatgacagtcaatcagcacatggtcaccctcgcaaaatttgcagcagagttcctcacggtgcttcttgcccttgtcgtcagccaacaagtaatcatccattacatctgccactctcttttttgtagcctcatcaaaattggattatgtgactctcttgctagattcaggcatatcttacatggcacttctatcagataagagaaccaaatgccctccaaaacgtccaccatggccacggcaagaatcgtgtcgataatcatgcctagagcctcgaccatgcacaacacgatgatcccctgcttggaaataatctagaccaccgttcggtgtagcctgac

SEQ ID NO: 47304 - DNA, 739 bp, Zea Mays
cgaccgccgtgtgtctcgtccaaaattcgtggccaccgctcgctccgcctataaattgagccctcccctagctgcgtaacatcatcacccacccagcaactaacaaccgtgcctccgagagcttgaattttggtttctccccaaattcagtttccgccacccgaaaccgacctcatcgcggccagctcccttcccggtcagtccaaccctccctctcccttgtttaagctttctcacatgtctacgatgcttgctgactcgtccaattggactaggggtccactgaccgtcgggaacgcgtggttctttggttcatccgcgcgctcaccgtggccagaccaaattagatcgccattcttgaaattaagttgggggaaaggctcgggatgggttcaatccggtgtatgtcgctcgagagcaccggttgtagcgtaaatccgccagtacaatctcaccggagttcgttcctcgcgctgccgccgtcgtggacttcaagccgagaatagatggaagtgcgggggtatttttgtaaacagtcagtgactctgttaaacagtagagagacggatccccagttagtaaaaaccccgagggcttttctacaaagtcgccagggcgcgggcgcgcgcgcgcgcttttcccctctgaactgggctggttgggctagaatcagcccaacactattcaccctttctccttttctttttcagaataactttagaaatccatggaaaaatgt

SEQ ID NO: 47305 - DNA, 413 bp, Zea Mays
gaagaatgcaagggctctgctttgataactttgccagttcattcagacattaaggaaagaaagaggatgtagattcctcatcgtacccacgggtaacccaccccaccaccacccaaaggaaagagcaataagaacgttccaaggtttaactatggtaaaccctagacccagttcaatttgaagagcaacagttccaagcaactcctatactaagcacaagcagaaaacaacgtgtgatggcccgtggccgccggcgagttgtggatcgccgcgacgtgagcgtggacgccgtcagaagcaggacacgagtctcaggtagtatttctttctcaattattttcttaacccctcctcaagtccgagacaacctatatagttcccttacatgggccggcccacaacgcaactcacgc

SEQ ID NO: 47306 - DNA, 2813 bp, Zea Mays
gtcctggtagctccagttatccccaagtgtcgtctccaagcaataaggattccacccctcgaaccattagaaggcagggccaaagaaccggtaaaatcagaccccaacatagagaggagaacacgcgaagaaggttgtgccatcttagtttcttgaagacagattatatccgctccataacaattgaggagctcacggacagaattctgtcgagatagagaattaagacctctaacattccaaacaattattttttccggatccatgtagaaacagtgagaggtaaatcgacaaacaatatcagcaacatcgccagctaaaataagcttgctgcggtaatatccccagtcccagttatatattctaaattatctgggacagaccacccaaaaagggcagcaagagcctgcacatgactacgagaaaaagtattcttgaagagcttggcgtagtcatctaaagcttgacggctgaatccttcattgtcctcaataatatttagagccaccatagcttgtttcttagatctttttccccaatcctgaattttaaattcaactccaacccctgccacacgtcggctgcgtcttggaactgccagggggatagaggactgacgtctgacagattttgggattggtaatatgcgtgtgatctggtttgacaatttgctgatgaattgctcttgagcacaaatctccacagaatcttgtgttgttgctgaagggtcctcagatggagcagccaacgcagcatttgttgttgctgaaatgtcctcctcagatggagcagccaacttagcatcaacgtctaaggcattagcctccgacggagccgcgtgtgctgctgccacatcagacagggaggaagttaatgttctagacagagttgccaacacagcgtcaacatctgaaacagaatactcagatggatctgtgtcagcagctgccacgtctgagggtgatggaggaagcacagtgacagaattgggagttccagcttcctcctggttcaggacattcttgagtctttgacgaaaataaactttcagctgcttcgccttcaccggtgaaacaataaccatgtcatcagtcatctctaccagcctaggagacaagttccccccatcagattccaaagttctcttcaaatctgaaactgccaccccggagctaatgctccgctgctgcatgctctcatctcttgggcccaaacgctcatgaactgagagacgtcccgaatgaccatgttccccccttctcccactcgaatggggaggtcttgaaaaaggaggggatccctgctgcacgtgaccagaaccatccccgcccgaagtaatagcatgaagcttaggatcggatccatccctccgtggtgcagacgagaatgtgatgcggattggatacatcagcgttctcctgccagaagacatcccatcaacggcaaagggaggttcgacgatccaaagctcccttgaagcaggcaccaaggacgggtctaaacaccaagcagaacatcggtaaacagccacatccttaagctccagggtgtcaggatgaacctgatgaacactagcaaagggattaagcaattgttccacagttatggtttcccatgcatggatggggataccctgaagctcgaagtccaacaagacaggtaacacagcacccctggagttcagaaaccgggaccatttcctgcaggtgattgtgaacgtggctgccctgagaaaaggccaattgcccaccagcatctccaccatgtcacagccaggtagaaagagaatgaaacttgactgggaataatgccgaattatcagtgtcccctcttccagctccagcctaggagcaattaactcagcaatctcttcaaccggtactttctcacgatcgctgataacagtaatcaccactgccttctgaagatcatcctcagctctggtcatctgctgactccatctcaagatgcagggtttatcatcttcagcaggcgacaccggtccagcggggcgcttatccaaatcagaaatcggtttggttctacgccgtctcttgcgagtccgctgtctttttgattggacaccgacagcatcaagtgaaatcaagcctccgccgtcgccctccattgttgatggttcctggtgtcgaacagcaatacctgaatctctaggaggatgctgattgtctttccttctccacaccagtctcttcttcttcaccttgatcacagaggttgctgaagacgaagagagcctcctccagaccgagagccgtgtctcaggtcgaggttgctcccttagtctgtctccactggtcgtacttggctccggaagattgatcctcctccaaaccgagatctcagtctcaggtcgagaggcagcactgttgttcaccgccaccttcacagcctcaagcctcaccggccttttaagtagattgcaatcaaaggagcgatgcccctgcttccggcaccgaaaacacctcgtcttctgcgtacactggaaggcaaagtgatcatgagagaggcagttaaagcacctgccagccaggtcctctgggacgggccgtctctgacgttgccgctccatcttcaatcggcgtcgctttgactgcttggattccaccaactgccatccatcgactagcggctctgttttctctgtgttccgaacaacctgagcaacgcccgtcgacgacacaaacctcttccggacgccggaatcgcatttctcccggttgcaggcaggtcgcaccaccggagcaggagccgtaaccatccggccagccgcaaccacttcacagaacgatttg

SEQ ID NO: 47307 - DNA, 672 bp, Zea Mays
cgaggataacatgactacattcatttccttgctcataaaagttttcattggttacaacattttaggcgagtttacccataaacctagtccaaaagctgataccaaactaagctcgcgtgggtttctatcctcctaatatgtcaaactaacccatcaaccctgagtggtagaggcaacgctggatgcgggtgaagggggcatcccggagagagtcgcattttgaccgggagctggctctagttcctcgggagcctcctcttccttgttttctacctcatctgcctccatgtcctggtggtgcatctccaggtggtcattggcttcctcaagttcctcctggacatcgtggagctagatttccaggatatcgatagtgttatctcggatttccacctgctgctctaagttcgcgatgcgctggcttaactgttccacctgtaggtccttgtccaccaattctgaagacaagttgaccacgaagtcctctcgactgtcgagggtgatctttgtggtctgagcaaggttagtgaggtgtgtcgtggcgtcgctctgcagggcctgtaggcggtacagtgcgctcatacactgaacggtgatcctcccaacttggtcgggatgcatagcccacacgtccttcacgtgggtcactcggttgcaccacatgggtcatcc

SEQ ID NO: 47308 - DNA, 617 bp, Zea Mays
gagaagccaaacaccaccgccaatgcagagagagatcgaaccgcaatagatcactatcatcgtcgaaccacgagtgaggagaaggaactcgtcgtcaagtacggttcgccacagacaaacaacgtcatcgtcgccacatctttagtgaaggtactcctggatgactcactgtgccctccgcatcatttagcaggttgccaggacgatagttgagtaaccgagggaggtttgggggaggccagtaatggctccgtcgtggcccgatagccatggccgacctgggtgtagctggaagaaagagagagaggtggaagaaataccctttggccattagattttaatcggacggtctaatttgatctaaagataatgtttcgtctgggtggttttagagccttagatcaaaatttgtcggtccaaatcacataccagatcaggttttatgaaggcctaatcacaaccgtacaatagggatccgatggctgaagtgtgaggatacccccttccgaccgtggactttttctagagagccaccaatttctatgaaaatcaacccgcagtccaccatgtgagtagcctgagtcttgggaaaaattgtgatttagcccctagacttt

SEQ ID NO: 47309 - DNA, 586 bp, Zea Mays
gtgcttcaaatggtgccatttgtagacttgcctggtaactattgttatatgagaattctgcataaggcaaacttttatcccagcttctaccatgctttagagcgcaatctcttagcatatcttccaacacttggtctgttctttccgtttgcccatccttttgcggatggtaagctgaactaaagtttagcttggtatccatggactcatgtagccttttccaaaagcgtgaggtaaattgagttccttggtccgatacaatcttcttcggtactccatgtagacaaataatactcgatatgtataactctgctaacttggctcccgagtaagttgtcttcacaggtataaagtgtgccactttagtcaacctgtccactataacccatattgaatcatagtcgtcacgagtacggggtagtccaactatgaaatccatactaatttcttcccatttccattccggtaccttgagaggttgtaataatcctgctggtctttggtgttcgactttaactcgttgacacacatcacatagtgcaacatgagtagccacatctcttttcaaaccgtaccaccaatactt

SEQ ID NO: 47310 - DNA, 395 bp, Zea Mays
ttaaaacgcaagaaattcaactttaaatggccagagtgctctcaacagctagggttgcacacgacggagaggaaaccgaaacaactgaaactgaaactgctccaatctccgaagttatgaggcggtcgggactagttgtgacggagggcgcttctgacgaaggcgcccctgttactgaagatgttgaagagggcgatgttggtgaagaagaaattgattataacaccgctatgccatcgaagcccagccatttggattttgggaagtcaactgtgtctgaagctgatatggctatgatgacgaagttaggctacttcagagaaaccgataaggggttgattcgttttggtggggaagagactatcccgaaaccagaaaatgaagtggtggttttt

SEQ ID NO: 47311 - DNA, 406 bp, Zea Mays
ctggttgggggaaatccaatttttaggacatgttttatctgctaaagggattgcggttgattccagcaaggttaaggatatcctagaatggaaatatcctaccttggtgcatcaagttagaagtttccttggactggctggttattaccgcaggtttatctcggattttctccaagatcgttaaacctattgtcgagctactgaagaatgatgttaagtttgactggtcttccaagtgcaatgaggccattgaataattgaaaatattactgaccactgcaccagttttggctcaaccggatatagagatgacatttgatgtatacagtgacgcatcaggcattgggcctagatgtgttctgatacaagaaggacgagtaatagcttatgcctcaaggcagctacg

SEQ ID NO: 47312 - DNA, 652 bp, Zea Mays
aatagattaggggtagcatcagttgaagaaaatttggctaatattggttgagatggtttggacatgtccaacagagacctctagaggtagtacgtagtgggattgtaaggcacaatagcaatggaaagagaggcaagggaagaccgaagttgacataagaagatacagtaaaagggtcttgaaaggatggaatatacctaaaaatttagtcttaagtaggagtgtatgaaaaacaactatttatgtgcttgaaccttaacttgtggtttttgttgagaatctgaagaagaataggattggtgtaattggatggttgtactgcgttgggcccttaggcgatttatatagagtacatggcttaggagataaggcagcacatatatacatatggcagtctacgaggcacaatatctaaactactatttgtactctaacatccccccatagttgtagtagcagcactgtagatggtcagactgaagaagttgatgaacgcatatccccctgcagtcgtgacgttgtcgcacagatgcaacaactagaaaagaaaacgatgagtagatcatgcatacggtagccatttgtgtcgatgtcgaggtagccaagtacgaggacaagcagtcgttattaatatgtcgtgcgaaggatagtc

SEQ ID NO: 47313 - DNA, 691 bp, Zea Mays
attaccactacccaccgcgggggcagaaaagaaagggtacaacttctgggaagactgctgcttcggctactccaagcgagcctgcgccaaagaggaaaaagctgatggtccttacccaccaaccacgctacattgaactggccactgtgcccgaatttggcggtgagacctcttcagctactgaagcgaaataacctgctccttccacacaaaagattgaagagccggctgcaatgccaaaggcatcctcagccaaattagctgagccaaaggccgataatattgaagagacaggagtcgaggggacaaaaatattagaagttctaagcccttcgacagaagtgacagtgccgaaggcacaaaaaggtcttacagcgacctccaagaggaaaaggatggccagtgtactagatgtgttggagacgataaaaacttcaagctctactccagggaaaactgtcgaggcttcaaaaccgcagactgatacaaagttgaccgaagccgaagctacaaagagccaggccgagaccaaagctgggtcttcagagcctgccaaggagaaatccttagaaaccggagaaaaggcagcggaaaaagaagctgtagaacaaattctgcctaaaaaagctgccactcctactcccgaagcgccttccgaagttcttgattatattatacgacacgctttagg

SEQ ID NO: 47314 - DNA, 350 bp, Zea Mays
ccattatgaggttgggagtttttatttgggttgtacgaagccagggtgttgagcccaatgaggaggcattttgtaatattcatgagttacattactagatgaaggcaactgaataccttcataataactttgggtgtaacaactgtgcttaccgaaaggaagctcaatttctggcccttgcgtatcgtagcaaatggtcgaacacatgggcgaagaaatggttttatatgaagaacaatttggataagatggaagatatcaaggatataatccaaaatcctatccatcctagctttgggtttaagaagccaacttggtacataaacttcaaagctcaggcctctcttatt

SEQ ID NO: 47315 - DNA, 713 bp, Zea Mays
cgtcccccacaggtacaattatgaaacccttacaagcctgtcatggtgggaacaattgaagtatgtggttgatgcaactaagccataatttggtttttttcgcttcgctgatgaggacaagaagggagcacttagtgaggtgcttctacaatataccttagtgaaatctcagcatgaaagtttgttccaaggtcatacgagcgagtacaaaaagtacgtgaaggtgatacaaatagaatggcggatcttacaaatcagacctacgtaaatggtggtaagtactatagttagcacaatttctttaaatgttcctatcatgaattagtactaactatatgtcacacaagtagtgctttgaaccctcggacacactatgcacatggcattagtgtttcagtgatgagtgatcttcagcatgcattcgaatatatgactaatctagatatagcagcccaagcacttgcggaggttgatttctacagaagaaagcaagtggagtttggtagacctttggctgaaaaatggcatatggtcaacaacactttgcctggtaagtaattatgcattgtcgcaagtacattaaggcttttgtacgccatgtgaatgtgctactttttgcggcatcatggtgagccatgtttggttcagacactctgacattacaaaagcttgctttgagattgatttcacagtgttgttcctccagtggttgc

SEQ ID NO: 47316 - DNA, 558 bp, Zea Mays
ctctgaatggagcttcccattgtacagtacgcaaaaagatcttcagattcatccccctcgcgctggtggccatgcgcccgaattcgtgctggtcatcgtgattcgtgctaggcgcgcagtggatatcaacggggaagtaaaaagatctcgcgggggagtggatttggtcgcggggtgaagcttatcaactgcgcctatagccgtgcgacgtggccggaccaccggtgacgccgtggtactccggtgacctcaattatgccacgttgtagctctttaccgcgtagtagtaactgtggcacgcctaggcttgccattttagaaccgttgcaccggcgggcgccacgactgagccgccagtgactcatctctctctccggccgccagccttctccttcaaaattcggagccaccgtcctcgggcactataaattgatggtgccgctagctccgcatgatcgtcacgaagccaaagcacccgcccttgcctccgattagccaccatagcctcccaatttctctcttcccccaaatcgggttttcacgctactatgaacgccg

SEQ ID NO: 47317 - DNA, 1095 bp, Zea Mays
tggctatggactcaaaaagtggatcgatcacgtccttgggatggttttcaagtggaggtcccatgaaatgtcaaagctctcttcaacatggctatgatttccatcattggtaatggtggaattttttttttattttggaaggacgggtggttagaagggaactccattgctgaactagcaccctatctgatcacagctattggcaaaagaaccgtaaacaagagaacagttgttgaggcactggagatggatataagatataaaaggggccttaactgtccaagtcttacaatagtatcttatgatatgggaccaggtggaaggagttattttacagcctgaaaaccctgacactttcaggtggaaactaacacaatcaggggattatagcaacaagtcagcctatttggccttcttcgtgggatcaattcgttatgcccccatggaaaaggatttggaaaagttgggcgcccctgcgttgcagattcttcatttggttggtgtttaaaaaacgatgttggactgcagacaatctggctaaaagatggctgctccatcccaatgtctgtctcctttgtgatcaagaggatgagaatattcagcacctgttagggggggttgtgttttctccaggcaactttggttttatattttccaggctataaagatgccaaagctggcacccaacattgctgaaactttctttcctaagtggtggaggaaggtggtcaagttagtaccaaaagaaaggaggcaaaggttgaattcccttatcattttaacaacctgggagatatggaagcacatgaattcttgtgtctttgagaattcagagcctaacacactcactttgatcacaagaattgttgaagaatgtcggctttggaggtgagctagggcctccaaactgcaagacttcctggtctgggcacgagctacgaatgtgtaggtcttgatggcctacccctctgtggtttttgtattcaaatggtttaggtgtcactgttgtaacaaccaaagctttcaattgcctagtccctagctgtaggggtaaaggtcttgtggttttggttgttttcggtcgtttgatgtatg

SEQ ID NO: 47318 - DNA, 461 bp, Zea Mays
caaaaagaatgcaaggaaataaattagaatactcagggtgttctaggttctgatccatgtactacagaaactaaactacaagttcaaaagatcatacatttgcagagacttgcaaatgaactgctagatgcattcacgaactataagggtgtcacaaaatctttcattcccgctaggaatgcaccataaagagtggaagtaccgaataaaaccactcaactcccgaagagaggtatggtgactaagcgctcttccgttgctaaaaagcaaagaaagctagtgaatgcaggtcaactttttgttgacagacaccaagaggatacacaatatcaagtggattgtgatgattcgtgacctagctcggatgtgtacattatcgagatgggacatcgaaaaaccctagacacgtcaatttgggaaatcttgacgagtttttaagcggagacgaaattgccatcaac

SEQ ID NO: 47319 - DNA, 593 bp, Zea Mays
cttgttttcatggggtttcctggactgttcagagcggcatagtgcagcagttcatgcttggtaacttgcctgaggatgaagaacctgtgcctccgtaccctcataatgggcatcaactttcggtggaatttttttggtttggggcaacttgtgcccaacttccaatttgacctcaacatccccccccaatggtgaaattgaattagaggctgccaatgccaacaatgctgatgatggttgggatccttggccggttgaacaggtccaacaagaacaaccacctgcacctgttccagtagtcaacaatgaagagaacaattcagttaccagttctccggtcttgaggacttaccttcagatgaatcggtgggccttttcaacgatatcgttatcccgcaagctgtcaacttccctcaggaggatgtccaagatcaagaagttgttgtgcttgctctaccagccctccccccagcggacccgtttttggagggaaataacgatcagaacgaccagggcgcgcaaaatttgaatctgaatgccgatgataacttcattgtgggcttcatgactcatctggattagccctctcggga

SEQ ID NO: 47320 - DNA, 425 bp, Zea Mays
actgaagcaaacaattcaatctctgaaatctgtacagaaattggacagattcagttactgaatttgtgaaaagcacaacttctaaacgatcagacttatggctgtcaaattttaacacaagtaagataataaagttatctacaacttttatatatggcttttctacagaaaacatgatttagtttattaaacaaacaacacgacgaaaacagcgcgtgcagcccaaaacagcaactaataaaattcagctcctaattacttcaagaattgccgcgttctagagacttgaaccattctaacactttaccatgtgttagagttaaaacaatcaaattatgaccaacaagtagacttacaaattttatacaagttacttcgtgctctagaattaccacataattaacaaacacattcaccaattaaag

SEQ ID NO: 47321 - DNA, 1190 bp, Zea Mays
gccattattactaggactataaaacatgatactctttggtataattagtaattgtaccatgtcaaggtaataaccccggggcccaaagcccatgggtcgagtaaaggaaaaggtgtgcccgaaccagcccagacaaaaaccgacctgctttggcatgcataggcaagccatgggtgctcgtcccccacttcggcataaagcatggatacctgggggcggtctaaccacaatggtatgagacacacctgaggccaatccctccgatcaaacaaaaacatccggctcgcaaggtaggtcggaccgcacccgtgttaagatggattgtcctacggatgaggctaatcctctgcatcgccttaaaagccctccaaactacacgacgccatccatcgatgagtcttgggggtgagtttaaccaaccccaagaagtggtcaccgtattgtatagccctacaacgcgtactccggtttaggcctccaattggggtttagggaaccccgacccccacaccaaggtctgaggcacgcatacgcacgctatgcaaccaccaaacttcacacaacctcgccaagcaagtcaataaagccacaaaccccagtgacagacgatagtaggagaaagaaagcatgaccgtctcacaggcgtgtcggctccttcgccactctagtgactacacgacaaaattgtaaccctcatctctcttggtctataaaagggggaggagggcccctttagatagggggaaacaagagaatgaaagacaactacacgcaatacaatagcaaaacacacatgacagtgacttaggaactctccctctcttgcccacctataacccactactacaagcaacgaggtgttagtagcgcaagccaccgaagactggagtagggatatttagcccaaccagtataacccttgcgttcactacgcacaccatccaggtctaaaacacgcatacataaatttactcgttggtgcttgttcgaaacatgacataccgtgtctaattgtggccagtactatatggcactagcaattaatagtactcgtgatagaccagacactatttcactttaagagcttaaaagatttagaacatctttaagattacaaatatgggttcaaaacatgaatatacataccattatagtttggaattatcatatttaaaaccataacaattcac

SEQ ID NO: 47322 - DNA, 706 bp, Zea Mays
gtcggttaggagtcccatcagagctaacagtcgataatggaaagcaatcctacaaccaagatttccaggaattttgcaactctatcggcacgaaggcagtgttcgcatctctctaccacccataatccaatggagtagtagaacatgccaacggcaaaattttcagtgccataaagaaaagactacttgaccacaagaaagacaaatgggcagaccagcttcccgaagtcatatgggtgatgaacacaacagaatccagagttaccgagttcactccttttcgcttgatctacgggtctgaagtaatgatgccgcaagaaatgaagcatggatctccatgagcaaactccatagctactctagatgtcgatgagtcaacctccaatggagaccgtgttcttgccctcgaagcattgaacaaatatcaagcgcaaacgaaggcatggcgcgacaacactatcgttcccaaagattttgaagaagggggcctagtcctcatcagaaccaccagaacagagtcccggggaaaactcgagcctaaatgggaagggccatccatcgtcaagacaaaaatgtccccaaacacctatagactcaaatcaccatccggcgaagacctagagcactcatggaatgtagacaacttacgaaatttttttgtctaagacactaagtcccaaggccttcgcgcctttgtaactttcac

SEQ ID NO: 47323 - DNA, 544 bp, Zea Mays
gccacgggggcagaaaagaaaggctgcagcttctggaaaagttgctgcttcagctactccaagcgaacctgtgccgaagaggaaacaattgaaggtccttacccatcgaccgtgctacattgaaacggccatagtgcctgagtttggtggggaaacctcttcggttagtgaagcgaaaaaacctgctcctcccacgcagaagattgaagagccggctgcaatgccgaaggcaccctcagccaaattagctgagccgaagaccgataatattgaagagacaagagtcgaatggacgaaaatattagaagttttaagcccttcggcagaagtgacagtgccgaaggcacaaaaagatcttacgacgacccccaagagaaaaaggatggccagtgtgctagatgtgctagagacggtaaaggcttcaagttctattctctcagggaaaattgtcgaggcttcaaaaatacaagtcgaagctgaaacaagaccggccgaagttgaaggtgcagtgagccaagctagtgccgaagccaggccttcagag

SEQ ID NO: 47324 - DNA, 518 bp, Zea Mays
cctattttaacatgtaactgtagatttatctattttagacttcgtgtgttcatcctgttttttacaacatttttgttttagactctggatggtcgggtgggggtttgtcttgcttgtggttaccccacttggttgtggattgggctgggttgcactgactgatggatcaaccacactgacgctgttcgtaccgtacaagtttatttatgtgataattgtgtcgatgtccctattttaacatgtaacaatagatttacttttcttagactttgtgtgttcgtccatgttttttacaacattttttagactttggatggtcgggtcatcgggtgggggtttgtcttgcttgtggttaccccacttggttgtgggctgggctgggttgcaccgactgatggatcaaccacactgacgttgttcgtatcgtacaagtttatttatgtgataattgtgtcggtgtccctattttaacatgtaactgtagatttaccttttttagactttgtgtgtttgtccct

SEQ ID NO: 47325 - DNA, 957 bp, Zea Mays
ctcaaacttgctgttgaatttgaatttgaaacattggaaaaaggaaaagaaaaaataagaaagaaaaacagaaaacaaaagaagaagacacgcatacgcctaggccgaaatccctctctctcgtcccaaatcccctccaccttcccccagcctagctggtcctctacacccgcgctctcctcgctcgctgtcttgcaagacccgctaccagcctcgcgcgcctcaacctttctcatttctctagaggatcgacaggcgaggccacattgccatcctctcacgcccccattctcggatcgctgaccggtgagacccgcaggccaaggagtcaccgcgcgctcggggattcagtggctggtacgtggggccggtactccagatttgtcctcttctctacacaccatagcaatctcaacagacctcgtaacaaacgcagccaccacaacaacctcaacgaaatccaaaattcattgcaacaaactctgccgggttctagggctctgggatataagtactggtgctgcaccccatggccaaggcatcagatagatagaagtaaccatcgtcgcgcatttgctagagccgtcgcgactgggttctcctctgcgccgattctctgccttggcagacaactgtggtgcttcactagggcgcataggtgacaactgaagcttctggatgaatggagaatcatcggtgccgcttcaattgctcaccgaggattatttgtggaccgtagatcggcaatccgagggttagataggatggttgatgtggaggagtcttagccgatctaatctaaaccgtaggttttagatccaaccactcagatgaatcaataccacttcggatgtggacacttgcaaaaagagtccctagaagactatagaaacaacccgccgtccaagtgttgtaataaaaggtttgactaaagtccgtgaaaacctgtgattttgc

SEQ ID NO: 47326 - DNA, 584 bp, Zea Mays
gccgaaagcagcccaaacggcccagcctgcataggaaaacgcgcgcccacgcccgcgcctgagagttttgcgaataagcccccgctgttttgaataacctgaactgggtgccctgtactattctaatgagtcactgacgatttccagggaacccccccccatgttctaactcttcgcagaccgaggtccacgatgaggaacagcactcgccaaactccggcgagcctattccggcccgatgccgccacgactggagctcccgtgcgacagagaccaaattagacccctaccgcacacttcccctcaatcaatttcatcatcgggactacgaatcaactagcccacgatgacagggcggatgatcggaggggtgaacacgttccgaccaactgacggcgtggatgaccaaattgaagcttggggaagcttcatgggtttaccagaggtgacgcacacaccaggatttggactgggcacgaacagaaacgtgggtcgacgaagagggtgtcaaggcggcgttctacagagcaggtgcgtgttccggtgaaaggcatcggccgaacttcaattggtcggtactgaga

SEQ ID NO: 47327 - DNA, 801 bp, Zea Mays
tattgcatctctatgtgcctctgcaacttatcgctatccatttcctttttcccaataaaaactgctcttacacgacggcatttgaggtcagcttttttggttgctcatttagcgatgctaggttccctatcgacttcctgtcttagttagtggctttggtcggctaagcgatttccctgaactaacgaggcaactgtgacgacacggttagatgtattgcctttgaattgcttcatcgctctgaatccagcttggctggaggagtgcaggtgcaattgtttggtggccacgggtggtgatgacatcaaggaatatcagctactcagtttttgcttgtagttgtatgtggatatgcaaaaggaagaggtgaaatcatatactttaaagatggagtatatgtgctctatgtatgaagtaaaccgaccttgttcaatcctgtagtaatgaggtccttataggcatttaaacctttcttctgaagttagagatcttttaaagtaagtcgaattcctaacacagtaagcacactgcatttatttcattcccctttgatgcattcaattaactgccccccaaaaatagataagacaaggcattgggtatcaataaagggcaatggatattcccccagacatctcggcttgctgtttatttttttcatcacatgtatttttgtagtccagaatgcaatgtaactaaattgagtaaaacataacacaaaacaagtaaatagattttaatgctgattatagatcaaaactatgcatccactttgctacattatgtgttctgtgatttttt

SEQ ID NO: 47328 - DNA, 369 bp, Zea Mays
ggcaaactggactcccagtttctgtcgaacgttaacacacaggctcttaataaatcttcgagtaccttgttgaccctttctgtctgaccatctgactgggggtgataggtggtgctgaagtctagcttggtgcccatagcctgctaaaggctcatccaaaatttggaggtgaactgggttcccctgtctgacactatctttcttggaatgccatagagtctgactatctctttaagataaatccgggcaagggtggctcctccaaaggtagttttcactgggatgaagtgggctaccttggtaagacggtctattattacccagatagagtcgttccctttttgcgtccggggtagtccagttacaaaa

SEQ ID NO: 47329 - DNA, 388 bp, Zea Mays
tagcggtcgagtcattacctcaagaatccgagtgcaacccagtatcgaggtactagtggtgcttcttttatcctgctctaggatagttgtagttttcatttatgccgaagccttttttgcgactgcatccttctgaacaaatgttttagctttcttcttcacatggctagaagatttctcttcagcctcattctttgcagccctcttccttttctatctagacccgacatggccgaaagatcttcataatctaggtattcaaaccctagggcatccataaccctattaaatcgaagcttccctcggcctccaaaggtagattacatatcttcgtgctctctagtatggtaattatcgcacatttcactgcatttctcttcaataaaat

SEQ ID NO: 47330 - DNA, 479 bp, Zea Mays
cgatcctgaatacatgaagtcaatgcaggaaagcagaatcccgcaacattgtattatggattatgttttagaaatgcacggtggtcctgagagcgtcgctgtaacagcacatgacatgtataacctgtaagttgtaattttttagcttctaattgtggattgaaatttgcatatatgttgatatcgcagaatgctgaaaattgacaataattacaggaaaaaggcaaggcaacaagagagaaatgccaatgatgtggctaagctactctctctttttgcattgtgcaaaaaggataatccataatttttctctgacatccagttggataaagagggaaagattttgagaatattttagtcacatgcaagccagcaatggggctacatggattttggtgatgcagttacatttgacacaacacataagactaatctgtatgaaaaaccactaggaatgtttgttggttcgaaccaccacc

SEQ ID NO: 47331 - DNA, 725 bp, Zea Mays
gtaagagactgaaatatcacagccagagtagggtcaatagcaggaggggcagcaggggcaacactggaacttcccgcctcatgatcatgtgagcgaggtggcacaggaggcagggatcccaaggtcatcatcatcatcatctgaagaggtgtcagcaactataccctgggtctcgaactgtctgaatgcctcatcctcagcctgaatatctggacctggatctggtactgggactgggtccttagggactggacgatatgaaccaaactggaggcgagaggcctcgagggtgccctggaactgaggcggcctgatcagctacgcgaagatgtgatagaggtaatgcgcatacggcacctgacggcgagcacgaataccatccaaaactgtgtcctcaatctcacagataagaaaatcaaccacgtcaaactctgaatctgtgatcaaggcaccaagaagccatagctgaatatgtgtagtggcctctctataacccgtcctaggtagcagtgaccgtctcatcagctcatatagatacttcgctacaggggtgaagttagcttggagagcgtagcgacctagctgtgaaaggaggtctgaacagggcagcgacgtgagctatggctggtgcaactccacgtgagggcaacgaggaggatctgaggtaccataacacaaattgtggagccgagtcgacgactctggaaatccaaagagctggcgta

SEQ ID NO: 47332 - DNA, 566 bp, Zea Mays
aaaatgtattccatgtgtcaatgctgagaaagtatctaaaagatcatggcaagatagaggctgtgctaatgaatattgaggaagaattgactatgaatgtcacccggaaagcataaagggataaaaatacactttttaagatggaacatgcatagtctcttgaagtggacctccataacccaagtcaacacccctcctctctctttttccccacctggctgccagcctttccctctcttttgtccacctatgctgctacccctcccttgcctgctattgtgtgcctatgggaaaaggagaagaaaggaggaatgaaggggattatggtcaatgttatcgtctcgtcatcacagttcttccagatcgctatcacattattcttgttgttatttatgtgaaaccctagttgatgcataccctacattaattaagttttaacctagtttttagatgttttggcttcaacgttcatcaccaattgaattaggcataaagtttgccctccatactattcttaacacgttgttaatttatgtagatgttgttcataacacttttgagtgtta

SEQ ID NO: 47333 - DNA, 342 bp, Zea Mays
gttgagccattgatctgcccgagtgaaggtgatcgggtgctccgaccatcggtacggagagggaggaccggtggtcgccaccaatatctggcgatcgttgagcttttgttgtcttgtgttctcctgcgatccgcgtccgccgaaaatgacgttgacctctctgtcaatgcgcgggaaggctccacctccttcctcctcctgctgctggggttgtcgcggttctcctggtcctccccgcggcggaggaggaggtagaggttggaagggccggccgtgtccgacggagtgcttgaagtctctgcagttccgaagggtgtggcgcatgtccttgtggtacgggca

SEQ ID NO: 47334 - DNA, 641 bp, Zea Mays
ttatttaaaacaattagaaacttgtatgtttcataattcctaaatactgatatgcatctcattcatagcaagtggcacaacaaacgaacatccagatgctagcccttgggatgctacctctagcttttggaccactgcctccacctcctccacactttacttggcctcctccataacaggtattatcatacacattcattcgtcctttttaaccctatttaatctacaaaacttgcgcaacaaacaaacatccagatgatagcccttgggatgctacctctagctttcggaccactgcctccacctcctccacactttacttggcctcctccatagcaggtattatcatacacattcattcgtcctttttagccctatttaatctacaaaacttggtgtatagtatatatagataacttaatctataatagcaaaaaatactttacaaaacttaatccattgtaccaaaccttagtataataattcagcaaaacttattatattagtgtagcaaaacttagtctacaatatctaaaaatttgttttctagaattttcaaacccctcctctgtagattgcaacaccaggagaacaatttggtcaagatgacatcgcgacttcgtgggcaaacaacctttcca

SEQ ID NO: 47335 - DNA, 286 bp, Zea Mays
gaccaatcacattctgcgtcctctcctttgaaggagcagcagtaggagtttgtagatgtgtcaagctctgagagatttgatatacatgcatttgattctccacctgctcggcgctctttgaggaaaagagcagccccatctccaccacagccttacacagatgaaaatcgaaggccagccaagcgccggcaggtatctaagaagggcaaggagaaggtggaggatgatgaggtgtgtatctaagtattttttacctatctggttttatgttcagtaacttcattac

SEQ ID NO: 47336 - DNA, 411 bp, Zea Mays
gggatttcggtcccaagcttgtaacggcggacgagagagaaccggccagcccctgagtccgcgcccgaggaatccggtcgatcccaacaacaacacggtagatgatttctgcggcagtgggttgaagatgagcctagcgaacggggcccacatggaagggaattgacttatacgcagcagggcgactcgcgtggagacggttagctcagctcgatttgcgggcggaggtcgttggggagatctggcatcaccggcagaggacccaattcgtgcggcatggtgaggtgaggaggatgaagcacgagttggcgctaaggctgacaaattggacccacggggcagtgtgagacgcgagggtgtaaacgggccggccagcgcgaagggaataaaaagaagatgggccgagcggtg

SEQ ID NO: 47337 - DNA, 622 bp, Zea Mays
gtttagtacactacttattatataaaaatacagcgatagggagtaatcatacatttatttgcggcgtcgcatcaaatatcggcgagcaagattccgtatgtggtatgttgattgtgcattctggtgttgcttgaggagtgacgtttatgttgctcggcatgttcttgccaacgtcaccgtgttgaccctgacaaaaatgtactgggttatatgctaattagaaaaacaataaatagaaaccttcgaggaaaatacaagtaattaaaaaaataccattaccactagggttgtaggtggtttgggctgttttgttatatttgtatgcaccagtggatcaatgtcaacttcatcagggcaactttgtaatagtacatgaatatgctgttgccttgacagtaattcatgtacctgtgtgtctgtcaaccgcgtctcaggctgcgatgctggagtagacatctccggtacagtttgggtggccggactcctacatccttctttacgtaacatttaagcaacagaaataaattatttaataatgatatcataaccatattgaaaaggtttgtataactgtttgcaatcacgtaaagaccaaaaaactgactaacctgccgaatggtga

SEQ ID NO: 47338 - DNA, 940 bp, Zea Mays
ctaatattagaaagtgcaggggtctttgtgtaaatgtttccaagacccaggcgcccactactgtaggaccgcgagtttattcttgataaacagagggactcttttgagatgttgccacgcgaaggggtatctacctactaaagccgtcagatcccatctgaacgaccaggattacatcttgctacaatagaattggcatggatcccaaaccatccaattccgatcctatgcttcggatttaatgaggccaagacccgactccgatcgccgattgacggacggacgatcacgatctacatccctcccacaaccatcaacctggatttgatccccatcgtgtatcgcaagatcgacggccaaccatacatcctggccgagccgtaccctaggccaaatcttcactgtcaccctagaatccgagggccacgagctcatcacctacctcccgacagacaacgaacggcgatctccattggagatcgttgagcggtccgctggcccagacgcaacccatcctatgtactatgacgtgatgcaatgcttgatgaaggcggatctacaggggatagtccataccatgaatctggtgacagcctgtcctgggcgcggtggagattggttcacagcggagttcatcgtcgatgggggtatttccgaggtcttcttcgcaaagcccgataccccgcacggcttcaatcactgggatcgcgagcaccctccaccgacgacccacccaatcaacagagagggcagtcaccagagaagctgacgacgatgtgcagcccgtactccggtccagtgagctaacgtttgcgaccgtcaatggctccagctggtgttacaaggcggtcgtgggggtgggttcagagggtaggcacgagagagtattcccccctcttatccagagatcctagggaatcgggcgtaggtaatccgcgca

SEQ ID NO: 47339 - DNA, 616 bp, Zea Mays
ctcgtgccctgccatgatactgggtcttacttaggtggctgttggagggtgctggggcactcttggggccattcaccgagtggagtaggtaggcacaaatgtcttcagctaaggacaattattcttgtagtgactggggtctccgcagtgctagcaagcattggctggaggttggttacttgcaacggagggggcctagagggaactttgaccctgctgactgaaacgtgacggagcaaacccagctggtttgttgaagcttggtccattgggtggaaacccaaaagatcaaactctctggcgcctgtcctgctgctgagctcgaaggacttgaaacttcctcttgaggtgacccttttcttcttctctagccctttccacttgtatggccttgtttgagaggtgcgagaagctgagaaaatcttggctggcaaggatagtcttgagttatagtcttagccctttcagaaaacaggccatcttcttggcttctatgatgacatcgtcaggcgcatagcgagccaactctatgaacttgtggacatattcactgacagatcttcctccttgagttagtttccgaaattcatcttctttgagctggacgatccctagg

SEQ ID NO: 47340 - DNA, 459 bp, Zea Mays
cacatagttcatattgttaaacaacaggtacaacatattccaacttcaagggcacatagttcagacagtaaacaacaagtacaacatagtccaccttcaagcctttctcttcttggtgtaatcttgcattcaacttttttaagaaatcttcgagccagtgcaccactccagtcaaattctttgcattgtcgaagtggtgctcaaatatagaagccctgtatgccctagcggcacgatacatgcgctcagaacccaagaaatgcttgacataagtctgcattagatgctgaaagcattctcttttctcagcattggggaaatttcaacaactgctccagtcgatctttacaaagcatccgagcatattgctagtagtgggaggtctccaatagccttatgcaattgcttcatgaaccaaatccaactctctttcgtcttagactcaaagaaaccaaacgc

SEQ ID NO: 47341 - DNA, 461 bp, Zea Mays
cgcaaggcctgccatcatttcaatcatttcgggttcccggctttgaaatgtacaaggtcgaagatgttgatatgcaaaggcctgctggcgtgctgtttgacatgatgtgggagccgcatggcattggaattgtacgtgaacgcgcgagccaggatgtggagaaggtgattgctgctatttttcccctgctttcgtactttccttatttttgtccgacacagatgttactcgcggagatcagagtagtggagctaacgcgacgaaggctactaacattgaaagtagtcaggttgtttatgtttttagtgtgacgacttgtgtaaaaacaaagcattttttcttgaccaatgcaatgattggtgtttgtgcaggttctgttgctagggcctatgcagcacattttgctggttattgatggtacgatggagacagaagttgatgcaatttttgtttctccgaac

SEQ ID NO: 47342 - DNA, 774 bp, Zea Mays
ccgagttagttcagaggtgcgaagcttgccagtacttgtcgaaacaacaacatctaccagcacagcaactgcagaccataccagtaacttggccttttgcatgctgggggctggatatgattggacctttcaagaaggctcaaggaggatacactcatgtattggtagcaatcgacaagttcactaaatggatagagttcaagcccattgcctctttaacctcagccaaggccgtggaattcatacaagacataatattcagattcggaataccaaacaacattataactgatctggggtccaatttcacaagttcggaattcttcgatttctgcgagcaaaaaggcattcagatcaagtacgcttcggtagcgcacccgagggccaacgggcaggttgagcgagccaacggaatgatactagaggcactcaggaaaagggtcttcgaaaaaaatgagaagttcgcagggaaatggataagggaattaccctacgtcgtttggagcctaagaactcagccaagccgggctctacatggaaatactcctttcttcatggtctatgggtcagaggcagtattacccgctgatctcaagttcggggctcccaggttggtcttcgagagcatagcagaagctgaagctactaggatggaggacatcgatgtactcgaagaagaacggatgaatgcagtaattcaatcggcgcagtatcagcagactttgagacgctatcatgaccaggccgtgcgacaacgatccttctcagtaggag

SEQ ID NO: 47343 - DNA, 410 bp, Zea Mays
gtagacctagggtaggaggagctggggcatggcttgtcgagggaaggtcaacaggaacaatctgaagggcactatccggggtgacctcagccccaccagcagacagcaggctccttgcatctagctcgccgacctctaaggcgacttgtccagttaaagttgtggaagcacgtgccaccgttgctcctcagaccgaggtggggacgacccgatgtagacatccatggaggcattagaaagagagcacacctaaacaccctcggggtctaggttgtagtttgcactacccacaagagatggatcgctaccagcaacaccctcgggggttgggtagctgccagcccactctcggaggctaggtcttttgtagtagccacctctaaggctgaaggcccctcagccacctccat

SEQ ID NO: 47344 - DNA, 495 bp, Zea Mays
gttgaaaatttacacatggatggagcgatgaatgctttgatgacttgttacgtgtagtgaggaaactgctcccagaccctaagatgacacacattatggcaatgccatcgcgcgttgctcaagctcgcaataggccttgttggtgagcagcttctgcaccgactactcgagcttgacgtagagagcggtagtggtgacagcaaggcggtcaagcttgcgcatgagcgaggcaatggaaaataatgcactcatgtcaaagcgactagcaaggaggtcggtgtagacatgattgaagtcattgtctcatcgatagagtcaagcagcaaggaggtcggtgtagacatgattgaagtcatcgatagaaccaattgtggccatgtacacagttgggcgctagctccacttatgggcttgagatttcccaagggcgagtggatgtgttacctactgatgggagtgacatggaagtggatatactttgttgttgtcttcccc

SEQ ID NO: 47345 - DNA, 514 bp, Zea Mays
gaaaaaggccagtcgagtgatgctcaacaacaacacccagtaaatgatggaggcctagatctttcatggtgaactgatgctgaagagttgtgatatttcaatgcagaagagttgaagaagagggagtgaggacaatgtcgtcaacttataggagtagacaatgtcactgtcacactagtagatgaacatgatagtatcagatttagcctcagtgaatcctaggaagagcaagtaggaagcaaatcggctgtacgaagtgttggttgttgctttagttcgtaaaaaggcttgttgagccttaggtccttgcttaagtccatacagagacttgttgagcttgcagacccagtcggggtgagcggagtcaacaaatccagcaggctggctgtaataagttgtctcagtaagggtgcgagaaaaaagcattttgacatctagctgatagactggctaagaatgggacaagcagactgcaccaatcaccattagactgaaggtctcatcataatcgacg

SEQ ID NO: 47346 - DNA, 281 bp, Zea Mays
aagattgaagagccggctgcaatgccgaaggcatccttagccaaattagctgagccgaaggccgataatattgaagagacatgagtcgaggggacgaaaatattagaagttctaagcccttcggcagaagtgacagtgtcgaaggcacaaaaaggtcttacaacgacccccaagaggaaaaggatggccagtgtactagatgtgctggagacgataaaaacttcaagctctactccagggaaaactgccgaggcttcaaaagcacggactgagacaaagct

SEQ ID NO: 47347 - DNA, 584 bp, Zea Mays
caacctattgaataataacaaaaagaagcatctaatggagaggtcatcgtcgtctccttttcttaaacggtcctgcagtgttgcaacaatgaactcatctttagacaaaccaagttcagccctcaggttattgcccgccactgcttcatcgatgcctagtggcttaccaccgccggcattcggtaggccaaggattaggtggacagtttcttttgtaatctttagttcatttccttgaccggggcgaattgtcatgtccttgtggtccaacttatccatcaaccaccaaagatgagatcggctgcccagtgcatcaagggtcatgtcgaggatattggaaaacccttttcttgcaacggcttgtcgttgcctctcattcaatatcttgatggttataataacatcctgggggttgcatctcacattgagcctctgagaaaatgtatgaaaaattgaaataaatggtgtatcagccatcaaattagcacacagaatgtatgagtttgaaactaatataacatgggaaatgaaaaaatggtggcaaaatgttgcaaactcaatatgatattgtaactgcagttcag

SEQ ID NO: 47348 - DNA, 553 bp, Zea Mays
aaattcccaaaacgcaaccaccgaaagagagaaaaaaacaaaaagaataccctccaacttctcttctttgcaaaccgggtgtcacactctaccccccttaaaagaattcgacctcgaattccgacgcttctatcggaacaacaaaagaaagattaatgaatcaacaaaactcacacataaagaaaagttcgagtacttctgctgcatcattcctcaagctcctaggattctaagatacacagtagacgacactctagagtctgctcttgctacacaggaatcggctctagctcgatttgatggtctggattccacaaatacttcctcaacataaagacatggactacttggtgtactctgatcatagattctgacaattacatgtgctaagcccagctgccgactcggccaagatagtagacggtcctatatacctcggaccaagctttcctgacaccaaatcaatcattgacatatgcaagtacttcaaggaatgtatatatgaatgcaaggcatataatgttcctatagcctaaaccaaacttagccaaac

SEQ ID NO: 47349 - DNA, 510 bp, Zea Mays
aaaatgtatgtgcagtgacatggagagttgtagagacacgaacagtcagatcataaaagtgctctaaaaattctgccatcttccttgcgttttcccaatctatctcatcaggatgaccaaaaccaccccttccttcagataggtccataacataactcatgtcttcatctgctagttttgtgaacaccttctcatacacaattgcagatttaagcataatatatgtggagttcccatctagttgggacatcagccttaagatatggattgttggttagcttctcttcctctataatttccttaaatttgagcattcttgaaccaccatttctaatgtacttcacagctgccctaacacgcttcactgataggtctacttcttttaggccatcgtgcacaattagattaacgatgtgagctgcacatctcaaggtttccctccactagctagattagttgtttcaattgcctcctcaaataactaataccggtatcaatggcactgcagac

SEQ ID NO: 47350 - DNA, 471 bp, Zea Mays
attaaggattatgatttagaaatccactatcacccaggaaaagccaatgtggtggcagatgcactaagtcgcaaggcttcctgccattgtcttacaatatgaactccggacaccacattatgtcaggaaatggagaaattaaacctgggaatgatacaacatgaaactttgacccaattgaagcttgagtcaagtcttctgcaaaagattattgatgcccaaagaaatgataagggtatgaaacatattcatgagaaaatagaagccgacaaagtgaattgaaaggatgatcaaggcatagtatggtttaataatcacattgttgtgcctaaaaatgatgaagtccgctagtaacttttggatgaagctcatcttagtcgatattccattcatccaggaagcactaagatgtatcaagatttaaagcaacattattggtggacaaaaatgaagattgaaattacacgctat

SEQ ID NO: 47351 - DNA, 619 bp, Zea Mays
gggcacctcggatctatggatatgaaaggagagagatagagacaaagttgagacagagagatagagatgggttagtttatcatcatcagtaactagtagctaacacgacttatagcaagtataatagggtgacgtagacgggctgcaagatatgccacattagatttatggtggtgtggagaaaagagaaatgaagataatagaagtgagctactcattagtagagcatgctgctcacggactccaagacagattgtgagagaaaaaaatgaactaattattaaatgcacttatgtacaagttgcgttatcgtatgactagacttttagttgactatatgtgacatggcaatattataaagctcattgtgaggtatattattaaacttgctattagcccataactgatggaacctgaacgtccacaactcccatccggatccccagctatgggaggttcaggactgccacgtctgtatgcactcaggggcggagggcccattatggcccattatggcccaagccataccaaaaaaaggtccgtcgagcgccggcccagcttccatatcgcacattcgcgctggcagcctggcgctaaccctaaccctcaccgcctggcg

SEQ ID NO: 47352 - DNA, 531 bp, Zea Mays
tgacaatactgcgactgcttatgaagctggtgaaggtgtgccacatgggaggtatgctaacttgtgttgcaattttatttcagtaattatgattctatttagggtgtatattataatgttgtacgtaggttttctatcggcgaccgggttgtggatcgtcgaagttatagtatgcatccattcataataaatatatattcatctacatcaaatacattcacaaacacatatatccacccacatcaaatacattagtaccaatacaacatcacacaaatcatctacatcgtatctatccattacataaatcatccacatcatatgagtcgtaaagtatcaatagttattcaaggaataaccattttaaacaatagaataagtacaaatatccatacatcaaattagtctgaacttggaatcatcagttggttagagttctcaccgctacctagagtgtagttgaacaactagttgacaaataagttagacccttggcattagcgtctccaggtgcgggtaattatggtgaag

SEQ ID NO: 47353 - DNA, 686 bp, Zea Mays
taaagtagccatatcaccacacgtgcatcatggccacgccattccacatgttgccaggccaccaaagttgaaccttgtcatgccttgttattgactcgccaaactgttgcattgtcaccatgcttgcttggagaagacaacatatggaacattggagggagtgggatgagaaaagagaatgatagaccaccggtctgggaagcgagatgcattcgagcaagatagttggaggcaatcaacagagccagagaatttgagagatggggaaggaggattggagagtgattgtcgtggtttttgtacttgtgacaaataaatttatacgttagaggggattttatggagttaccgaccaaaaggttttgctctaataagcttggagagagaggatttatactggtcaggaaagtcttctacatctagcatggtgctgaagtctttattgatatttgatcgtgttacaaggtgaagcttgagctatcatgcttgtgcatctactaggtgctaaatgcttgctggcttgttacgcttgtatggtaagttcactcttcacttggcttgtttagatatcgattgacttgggtttctataggaggccctattccccttatatagtcgagggaggaggtggtctttgttacatggagaaattggtggggtgtatcatttcccacctttaggttgta

SEQ ID NO: 47354 - DNA, 716 bp, Zea Mays
ctgtcgtccctcccccgttagaattcggcgaaggaccaagtctcccactgtaaaggatcggtgccgcatagctttgtcatggtagcgcctcaaggtctgctggtacctggccgactgaattattgtgttcaatcgttcttcctccagcacatcaatgtcttctagcctagtttcttctgcctcatctatgtttttgaaagtcaacctcggcgccccgaagatcagattagtaggcagcactgcttctgacccataaaccatgaagaatggggtatttccatgcagagcttgactgggatgagtttgtaggctccagaccacgtatggtagttctctgatccattttcctgcaagcttttcgctcttgtcaaatacctttttttgagtgcttccagtatcattctgttggctctttccacctagccattggctctaggatgtgccactgacgcgtacttgatctggatgctcctttgctcgccaaaatcaaagaattcaaggatggtgaagttggatcccaggtcagtgatgatgctattcgttatcccgaacctgaatattatatcctgaataaactccactgcttttgctgaggtcaaagaggcgatcggcttatactctatccattttgtgaatttgtcaatggcaaccagtatatgagtatagcctccctgagctttcttgaaaggtccgatcatgtcctgcccccagcatgc

SEQ ID NO: 47355 - DNA, 1040 bp, Zea Mays
gaccgacgttgtgatgatgacgagtgaggcgagggcaccaagaagggacgagatcggtaggatcacgcgttgagaaggaggtgacagatagttgtgaggactagaccaagtaggaggatgggagtcaggagaactaggccaatctgatgaggaggcctaagacatggatgttttagtccaccaaaattttaactttttctatatttaacagtaaatgaacatgaggtataaaaggttataaaaatcgagagggtccatggcccactttccccctttgggtccgcccttggtattcggacctcatatccattgcctagagtcgagtcccatggagagctgccacagtgcatgaagtgctcaaacccgaacaaagacttctcttgcccaccggcgttgcatatccccatcattgacttcatacgggaggccaaggcgacatgcatccataggacgacacacctattggactaggagtactaggtgaagtgcaaggaggtcgttcgatagatgtgaaatctagataagtcaaacccattcagttattgcaactagagatggtactgagtacctgtaacccaaactcgataggtttcactatattggagcatgagcataggtcaatttacttacctatgggtttattaggaccagtgtcaagtgtgacggtattgatcgctggtgtggtggcccaagcggtccgtattgacccctctggtcgtagtgtgagacgacatggtcgaccagtcggttaggctatgaactggtcgatctaggcaacatcactcatgttggataccacgtgattggtactaatcagcgtgttggagccacggtcacttccaacctagcacagtcgataccgatcatctaatgtctatgtggcggcatgcgatttgttcattcaattccaaccgtttgtacttggaaaaaaatctaaaaaatcctaaattcaccctataaatagggggtccttccattcattcacacatttcacctccagttctcaagtcttctccttcattcacacacttccatctttg

SEQ ID NO: 47356 - DNA, 674 bp, Zea Mays
tgtggatcataaatatgtaacagtccaagggtcttgtaggtcatcagtgctctatggcccgaggaattcgtaggtcatgagtgggaggtagacctatgcctccgttgtggctcggtgccagacgtagttaatgcgatcggtcatttatgataggtcagtctcgaactaggcgcgagatccagttgagtggtctccctttggcacgcccgtcccctgtctagttacgccacacccgaccctaggctcggtgttgtggggtttgtctggggccgggttcttctaggttaaacgttacctatctcctctgacttactagtgggcccaagttgttagaggccctttcctagtgtgctcgctgaccgatgggcccagggtctagggattgtatcccatcaactcataaccttatttatgttcgtcggtttatcgccgataattcttgttccatttagtttgacccttttggtttctctatgaaggatctagccaccaggatccctctcgcccctgtgatagctcggggggcctctacacgcttcggctttcctccaccgatgcgtcctagtctccaccacttgacatcgtcgtctaggccatccagcacccgatgtcatgaccaagctcaccagtagtctagacatttcatgtagtaggggacattttgagggtctttg

SEQ ID NO: 47357 - DNA, 628 bp, Zea Mays
cggaagccgcgtccgccattgctgccgccaaaccatgaccttgccgtgacgggagtaagttatccattgtctgtttcaccttcttgtccgcatcgcgtaggtagtcgcaatttgtggtttgggcactcgagatcgggtttggggcattgccggtgagcttcgtcgtcgtttggcggggcggcgccgccgggttggccgcctggttagaggagagtgctggggccgttgatctcgggctgtacggttacgattagatctgaagcataccgtttcgagatttcgatttgggccgtggatcagtgatcctgcggtcgtgggcgggtgagagatagtgcgccgtccgatcatgatccagtggtagtcagggtgcgccctttttaaataaccgtgatctaatctcggcctctggatcaggatcctacggctgaaattagagaataccccttcggttgcgcaattgcataagagcccctctagatttatagattagaacccgcagtccaactagtagtgtttcctgtgtcttggacatcttcccccgagacccctggactttccaggaaatgaggcccagtccaaaacctgtttaaaatgaataaatgaattagtaaatacattttaatacaaa

SEQ ID NO: 47358 - DNA, 373 bp, Zea Mays
atcagatcaggcgagatatgcctttttcgtaggtgttcatccaactaaatacaccaattctgttggggtcgcctaggaacgagtataaacctccccttatatatatgaatgactacgaccaattgtctatatcaccaaacgaaccaatcaatcaatctactttattttcttcattgcattaggagtaagcgtaatttagacctaacttagattttccctaacctcaaatctgcatccatctttgactatacgtcgtctagggacatccctggtgagacatgtcgatcctgagatgcctcagaactctactccctgatggggtccctctcgggggcgagttctagtgttcttcgaccctctgcgcacgcgcaaa

SEQ ID NO: 47359 - DNA, 301 bp, Zea Mays
gccaccatcgagtgaccctacagtggttttcttgaccctacacgcatgctctgcgaggtcaacagtcatgcctgctcttcctatggccataggtgacatcgacttaaaatgtatgaccaatgaacccctttctcttctttttttcgcttgggtggggacgtaaattatataaactagggctagaattttgggatttggggaatccaacttagggttaggggttatgccacattttcatctcttctctcccacatgttgcaataaagccaaaaacatgtcttgatgtgattgtgctcatgtt

SEQ ID NO: 47360 - DNA, 295 bp, Zea Mays
tttggcacaggcgtaatcatatcgttgcgcttagacgtgatcgttgtcttgtccaccactgtgctctactgccacagcgcgggttggcacacgcattaaatgcgcctgtcccctgcctgttttcgagcgcccttgtcctatttgctcgaggccggctcgggtgagacggactgggctgaggcgacctcgggcgaggcggagtgagtggtgtcgactccgggcgaggcggagctccgctcgaggtgagagaccctcggggggacatctcgtctttttataggtggctcggctgtca

SEQ ID NO: 47361 - DNA, 551 bp, Zea Mays
taaattcatatttcatgcaaagagctggtggaaggttgtatggaacagcaaagacgggccaacatgagtaggacgttgcagttagattgaatggcgagaaaccatctgttgccaaaccgaagcggacattccgcacttcatcagcaaagctggaatcaaaagcatctagtgccttccatgcatctgtatcagctaggtgcaccatgacatttggattctcacataccccttctttgtgccacctcatgtgtctggctgtattcttggagatgaacaaacgtttcaaccgaggtatgagaggcatgtaacgaagctgcttacgtgcaatcttcgtagtcacggtcaaacccatcgtcgttttcaacctcaacgaatctacgctcaccacatacaatacacttcttctcacccgcagtctccttccagaaaagcatacaattattttcacagatatcgattttttcgtagtccataccgaggccagataacaactttttagactgatacatgtcctttggcatcttgtgattctccggaagtacatcactgat

SEQ ID NO: 47362 - DNA, 758 bp, Zea Mays
tttcccagagttatatagtacatgcaatcacaacacactagttgcaattataccacaccagtagtttgcaatcatatttgtgtaacaaaatttcctagagttattcagtactttgcaatcacaccataacataagttgcaatcatttttatttaaaagaatttcccagagttatatagtacatgcaatcacaacacactagttgcaattataccacaccagtagtttgcaatcatatttgtgtaacagaatttcccagagttattcagtactttgcaatcacactagaacaacagttgcaatcatttttatttaaaagaatttcccagagttatatagtacatgcaatcacaacacactagttgcaattataccacaccagtagtttgcaatcatatttgtgtaatagaatttcccagagttattcagtactttgcaatcacactagaacaacagttgcaatcatagcacaccagcagttgcacatcctcctgttcttctcactaatccatatgttttttctttttttttgttgatgcaggagaattttgttggagtttggccttcttgttggactcactggcgaggaaattttaacatttttttctaatgacacccttggtgagtcaggaatcatagactttttcgtgcactgcatgcgacatgatgatattgtgcacaaggttgattcttgtggatacagagtgtttctgaccactggtttttatgtaagtttcttctccaaaaccatgtattttt

SEQ ID NO: 47363 - DNA, 1257 bp, Zea Mays
aagttagggctaggatgaccaagttgatgatgtctagtgttggatatagtggaagtagttagtgcatgcaattgtggtgatgatgagggcggtgatgtggcaaaagtagtaggtggagtaatggatgcaaatagccatagtgtgtacaaggcccaacattatcatatcatgtgagaaggctttggttggcaagatccttcatggacaagcccaaaggtcaaactcaatatagcaagtgttatatgtggtaaacttaggaacaaataaaatatttggaatgatattatgagcgataagaacattttagagatgaaaaggcctaggaaggaccgaatcaccaacagaggatggtggtagaagcaggagtggtagatgaggtgctagtggcttgaaaggggagtggactgagaggatacctcaaactaggcattgttagctaagccaacgaggtcgtggtgagcgtattgatgtagcagcaagggagatgtgacaaatccacatgttgtaaagagatggccaaggagtgtccctctagcagcccccaccctcacaaccaccccctccgatgatgatggccaccaccactagaccggtgcaccaccccttaggccagagcatgaggacacatggagccgaacatcgaagggacgggcatgacaacgagcccccaaagtaggagtggagaaagtcgtgcatgagcaatgtcccttaaaggtgggtctttagagtacggtggtgttgtcagagtgaggaggtgcgccttagtgatctcctctaggatgaggtcattgtagatcttgtgcaaggaggggaataggaccaatcatttgatttaggtccataagtgatcctggcgttccttgaggcctaggagaaagttgaggacaagtgtgcgattagggatgatctctctaaagtcatggacaaaagccaccatgcctttcatctagcaacattactgagtgacggggagatctcctagatgaaaggactaaaggcaacattaaggtggagagcacatgcctcacaattaccgaggaactactccttgatggcaacaaaggcatgtagcagttctactatgctcatgaatgatgtcatccggctcaatagtgaccaatctaaagatcttggagaggaccaaactatccattcgtctctaggaggggatagtgaggaatgttgtgtcggtgagaacgtggatcatcaagggtgtagcgctatagcatgaggaggacaaggtcttagtgtaggagg

SEQ ID NO: 47364 - DNA, 381 bp, Zea Mays
gttgagacagaaaagctatgctgataatagaagaagggagttgatattcgaagtaggagacttcgtataccttaaagtttcaccgatcagaggaatgaaaagatttaaggttaagggaaaattatctccttgctacattggcccattcaaaattttggaaaagaaaaaggtgaggtagcgtatcgttagagctacccaatagtttgtcggatgtgcatgacgtatttcatgtgtcacaactcaagaagtgcttaagagtaccagaggaagagttacctatggaagaactgaatgttaatgaggatttgacttattcggagtaccctgtcaattctagaaacatctcgcaaaattacacggggtaaagttattaacatgtgc

SEQ ID NO: 47365 - DNA, 691 bp, Zea Mays
cattacaataaacttgtagagctatgttaggggtacaagtttgattaagtgactaagcattggtgttgtacagaaattggagaaaaatagacatgaagttggaatgtcagtcaaccttaagactgaatcttgaccatcagtgaaattggatgaactttgagatcgatttgcagaggatttagtggatgtttgagcaaggtatttgtaacaaagttgtagctggtacatagggcaacaacttagatataggcaggtgagtgagttgccacaaaaaatttgagagcaaagccctacaagttgctcggtcagacagactgaaaggagcttgcgatgatggtacagtgactaaaccaaatgcaaggttcagtgaacctcgccgctggtgatctccgctccacgattcacaccggtgccgcgattcgtgccggtgtggagtggataaccgtggcgggtaaaagatcttgggtgaggagggcttggctagagctgagtcaccgtcgtacccacttgcccgcgcggtcagtgaaatatcggcgccggtgctcgccgtgatcacagcgagggacatgtagtcgcctgattcaccgcattgtcatggtcgtggcatcccctaaatagtgaccgtcactcggtgaacactgcgctccacggtgagcctcggtaatcgtctcgccgggaagataagccccgc

SEQ ID NO: 47366 - DNA, 598 bp, Zea Mays
gccctccccactccggctcttcctctccagctctccgctctggcgctctccccactcgattagctccacccactgcttcgtcaccgcctcgccgtcgccactgacggatcgttgtcaccggcgacatcggcggttctcctactctccagctctccctaggtgcctccccaatccaaatatccctaaccctaatctactcttctccggttctccctcccgcgtcgtcgtgcacttgaccggttgaccctcgtctctggctccgggctgcggcttggcagatacgtccctctccggactctccctccccagtcggcaatcccaatcccaatccctaaccctaactctaatatcctcttctctggctctccctcctgcgtcgtcgtgcacttgaccctcgtctccaactccaggctccggcttggcaggtatatccctctccggctctccctccctagtcggcaattcctaaccctaaccctaatctcttcttcgctgctttcttgtgggctttggtaggtcgtcggccgactacgtcgtagttgtgctagtgccacctggggccgttgaggtacggtgccgagaagaggaacggctggta

SEQ ID NO: 47367 - DNA, 345 bp, Zea Mays
caaggtggtgttttggacacttaatcgccaaaaaagtagaaatggctatctagcacatatatcttttattgattcatttgggttgccttgtttatgaaatcctttagatatcaaaaacaagtgaccaacattggcgcccacctccggtgaatacacgacatcaagaacaccttcgtcatgccttcgaagaagtctatagttattggttttgttctcgctcttatagactagaatcaagttgacgatgcacttcttcgagaagcacaaagccagaagagaaaggtagataactctccaccacggaatgaccaagacgatcttgatcaggagattcagaacctcgag

SEQ ID NO: 47368 - DNA, 404 bp, Zea Mays
caaggctgctgctaacgaacttgagtaatttgttaacagtggaggatgctgaaaagggtcatgctgattagagaagttaaattgcggaggggtcttagtacctttgaccggaggtggtgttagggtatggattaccctaaaaccagcaccccggtgatttgtatttacgccagattccccattcgcagcaatcggcatgaactctggtgatacccatggagctgttgttgacgatggttgtccttgagaccccagctcgaacatcttgtgggcctctgcgatttcgctctgcatggtcgtcaattccttcacctgagtggagaggttgctcaactccactctcagatcgcccacatccgcttcgatgtgcggcctccaacttgacagatctctcaccgctgctg

SEQ ID NO: 47369 - DNA, 568 bp, Zea Mays
aaattaagggcacagtaagctttagcgacgttccagagctcaagaacgacatctaggaaggcggttgaagggacaagacagtgggtcgacggaggggtgctcacggcggtgcggaaaacggaatttgggggaagtttgaaattcgcgagctacagtgactaatcggaggcaagagctagtgttctgagctcgtaataagttggcgaagcaggccgaggcatcaatttatagcagatcaaagcggtggctccgaatttggaaggagagcggagcacggctgtgacaagacattgtactggcgggtccgtcgtggcgctcaacggcatacaaacgcagggacagtaattctgagcgtgccacggttacgactacatggtaaaggatctcagcgtggcgcaattgagctcaccggcgacccacgatgacattggtcgttcggccacgtcgcacggtcatgagatgcatccgataagcccctgcccgcgaccgaatccatcccctgccagatcttttaccccccccccccaccccgcgcggttatccactttgcgatgagcatgaatcgcgc

SEQ ID NO: 47370 - DNA, 753 bp, Zea Mays
gaggaattaacacatgacataagactccataagactcacagttgcgactgaaggacctaaagcacttatgtgcatatgttatcggattgttcttcgattctaataaggactgacttacggacgctactcgcccccaataattattgggctgcgatcacgttcatattagacctctaatcgatcaacaagacatttatttatccgataggcatggaaggcaataattgataaagtgaagcatcacattgccatacaacaaaaatcatgacaacaccgatagatactatccactaactgtttgaaaaactaaacttacttctcgcttgccactacatcactcctcaatcacacaaccatcacgagcatccttcacacgattatataatagcaacctaaacgtcgtgttacacaatacatacatctttcctcgtcgtgagtataaccatattacggcatatacccatgcacctcaaataaatatctcacgccaccactactatatcacaccacggcacatacgcacatatgtgtccccactgccttctcatgcccaattttagcacaattatttatgacaacgtttatcgactagacaagtgaaacactaaccgatcattcgcacatctcgtctttaaaacacgaatcacatgtcacataatttagattttcaacccacgctatcctacaccatgatgaatacataagatatatttaacatagactaaccccttagccgactacggaagtcatcga

SEQ ID NO: 47371 - DNA, 996 bp, Zea Mays
ggaaattatagtttaatcctaggcagagattggattcacgccaatcaatgtataccttctacattacatcaaatgttaatacaatgggtaggcgatgacatagaacaagtacatgctgatgtatcggcctacatcgctgtggccgatgcccctgtactctggacttatgagactgctacatgtctcacaggagtagatttttctaattatcaggctgtctccagcaacgatcggtaaaacatgctgtccgctatatttaccgtttcatacgctctctatcctctccaacaacgaacgctataaggtccggtaaaatacaggcgtactccttcgaccgctaaagctggtggttcactgttgatccgctatatgtccttgtcgtgagagaagctgcacaacccgatgcagactacggtggtccggcagcgcggatgaccttggctgcggcagcgcggagtaggtcggtggcggcgatgaggaggacctcgatctgggaagtcctatgttgcggcggcgtagagttgcttggctgcggagatgtggagaaggtcggcaatggcggagctatggaagttggcgcggagtcgcttgcctgcaccgaaggcgatatcgtcgaagtcgatcgacgaaggaagcctccagttgcctgcacggaagacccccaccgaagaaccgcacgaacaagaaaaaagtcttatgtcctcatgtctacgaggtagtcaggaaacatatttagtaatataaataaatacaaaaacaatttctaatatataaataactcaaaatttatatacaaacaagaaaaattgttatgttactcacgcattatttcacaaaatagtaattacaaattaattaaatatactatgttgcgcattataaaaatgcaaacaaaacaaaaaaattaaatcaatgaaaaaaggaaatctagtaacactgtagctttagagaccgaatttaagggacgttgctggagaatgagaagatatagaggac

SEQ ID NO: 47372 - DNA, 406 bp, Zea Mays
cggccgtatgagtgggttggatcggtgctctctgatccgcaatcagccgccacgatcaattcccccggagagggaccctaagctctaatcccgaccattcagattgagatcgacgacatatgacaccttgccaccctacttgccgccctgaggcagcgacgcccactacacgccgtcaagctcaccagagcaagacaatacgatgccacaacactccacgccgatcaccaaaatctgaaaataacgcgaatagacgagggaatcgatggatgagtactcattgctccaaaaaaacgccgaccacagagatcagcgacatgacgacgatgaaggatctctagtgatgaatctccatgacactgaaacctcgtacacaaaatcacaccctcctacacgaccagtcaac

SEQ ID NO: 47373 - DNA, 438 bp, Zea Mays
tacgcagtacagtagcggattgtgggataagaacttaactttcatgctccatgcctcttcttaaatactagctagcctcttcttaaaaactacaggagccctgctcagcccagaacaagatgattgtgatctctctccagagtctagtaggcttgggacatgcatgcacggctcttggctccttgatttggcgtgcgtgaaaccaggcaacaagcatggtggatccgggtccagtagcgtcgccgtcgggcatggataaagatccagggccaggcaagcaaagcacagctgcacagaggtggtcgctgtgcgctgatggacacatggcgatgccaacgtcctgccagcaacacaaaagaccccgtttaatttaggatgacgaaatttggtcacttttagtccctagataacatataaggtgactaaaatagagtgact

SEQ ID NO: 47374 - DNA, 418 bp, Zea Mays
aagaaaggaactaaaacaaatccagtccaattaaccagataacaacacgaaaaaggaacacgttgtacaatcaaatacatacacccattcagttttaatcagccgattccatgtcatgccaaactactactcggcgcagtacagcagaacagaacttcaaagaacacctatcaaatcacctaaacgtttaagcttgttagcataatacctgtcccattacagcaccagcaggatgagttaggcttaggcaatagcatacactagcagcccaatcaaagggcgccacccagttttacagcaatcttaccctaattttagaatcaaaccacaagtcttatttacgcggtaagaaggtgatgatgatgatgatttactgttgaggcatggggtagttggcgagggggtcggtggccggtgc

SEQ ID NO: 47375 - DNA, 1053 bp, Zea Mays
atgtgcgctggtgcaggaagagaccaactggtcttcgctcaactgcaatcccaagaaagtgatggagaggcccaagatccttcattggaaaatctgtctgaagagccgcaatgacacgcagcaatagagctgaactggatgcagtgagaataatatcatcaacataaagaagcaagtaagttgtctcagtgccgttgtggaaaataaacaaggaggtgtctacttttggcttcaaagagacttcatgtgggaagcaaaacaactgtaccaggctcgtggggcttgcttcaggccataaagggacttgttaaggcgacaaacataagtgggatgagcagagtcaaaaaaaccagcaggttggctacaatagactgtctcagaaagagtaccgtgaagaaacacattattgacatcaagttggtggataagccagtctctcgactgagctagtgagaggactgtgcgaatcgtagttggtttgaccaccggactaaaagtctcatcataatcgaccctaggacgctgagtgaaccctcgacatacccagcgaacttgtgacggaaataccatttccctgtgatgacatgggcacctggaggacgaggaacaagttcccaagtattattggagatcagagcctggaactcttcttccattgcacgacgccagagggggtgagctaaaccttggcgaactaaagtcggcttgggggagatagttgcagcagtgaaagcagccagcacacgaaaaccagccttggcccgggtggtcattggatgatcgttgaccaccgcaggtgtaggaatggcaccaggaggaagagcagaggcctgtgaaggcgctgatgcagactctgcagccggtaatgaagaagtactagaggcgccaacctctggaagatctgcaggggaggtagtttgctggtgccgacgagtgtacacctatagagacaggggcgtcggtgtagctccatgtgctagtgctagaccaccaagcgcggatgggagtgtcggggaagtcggagcagcttcagggggcgtcagagcaacgcca

SEQ ID NO: 47376 - DNA, 601 bp, Zea Mays
gaggctggccgtcgtacccccttttgctttgcgaccggctcagataagttcaccggagttggccacccgtcgatcggatgccacgtgccttgaagcttcaccacgtcgtcgcaagccgctctatatcactggctcgtcgccggtgagtccgccacggtgaaatccactaatcgtttgcgccagtgccccttctcctcttcgcccgtcgcgcgtctgcatcaaattcactggccatcgctcaagcacgctataaattgagcacaccctcggctccgctaggtagtcaagcacctaatccaacaactcgttcctcaaatcatccaccagagctcgccaattcgagatttcccccaaatcggtcccgagcatcgcgcaaaagtgatctcatcatggttagcgtgctccaggtccactcatgacccttctcttttgtttcagtatccttatgtgtccctgatgcttctcgacccagccaatgaagctaggacctattagatcgccgggaacactcggtgttattcttgaattgcacggacaccgtgagcagagagtttgggaacccgaatggtggaattgaacaaggggaaatgtttgttaagaa

SEQ ID NO: 47377 - DNA, 654 bp, Zea Mays
atggggacaaaaatagagccaacaacgatctaaaccagctaccagacttgatctaagatacaaacccagaactgtaaactctaaaactgatttatgcaaaggctaagcaaagcttttaggacacaaaaacacaaatcgtgttgtgggattttctgtggactatgggatgaccacaaaaatcaatctataggcacacaaacatacctcacatgcaacctgatatctgataccacttaataaaagtattagtatcaatatgtcgaaaggtaagtaaattgaggtggagatctcaaggttgatgatctaaggtcctggatgaatgggctcctcgcaatcagtacaacacagctctattgattatcacccatgtcacatggatgaccatgccaagaaggcttattcctacaagcataatcgagaacataagcaaaaacagagaagttgaaatcaactgaatcaattatgatggtgggggttcaataaaccgataatagatggtattgttcttgatggattcaatctaaagcaaaacacacacttcaatatggtggtggatactaaatatataaggattgtaggcatgcaagacccctgaacatgttcttaatggactccaacacaatacacgatctaacaagccaaaatatggtaatg

SEQ ID NO: 47378 - DNA, 548 bp, Zea Mays
gcgacctagggaactagaaaaaaatatgagacatgagaattggagacatcaggaaagtggtatatgcggattggtggtgccatccactccaaatcatgcacatccagagcatgctccaacactgcagatagcttacacatgctgctagtgtttaaacaagcgcttggctgatctgtcgggtgtttctgaatcacaacaggactcagaagatggtagttatagacgtatgggaacaactaccaacattgtctattactgttgttgcagtgcactgagatatttccggctggactttaccgatagttggcctgcctccagttagccctcccgtgctgctcggcagcgtcgccttccaaaaggaagacccgttgccccggctaccaacagagggtctatgaacttttatcgtctattgccttggtaaatgccgactaggaagtcatatatatgatgatgtttcctaatttgagatcctgtttatgttttaccatttgagtgcaaacatttaaaacgacttctttggcccttttgagtttagaacacgggag

SEQ ID NO: 47379 - DNA, 772 bp, Zea Mays
tgcggattgatgcatgcagggagaaaacgagagggagctgcacgcgatgcaggaaaacaagagggagctgcgtgttcagcggaaattgcccgcctatactttctgctggaacgtgcctcactctgcagctcgtcaattgagagggaggaggagataagggaagagaaggtggcggtgctagcatctggaatgtgccccatctcatccaacagctcccaccccttctgctccacagatttgtggctcctgatgctgctccacagcctccagacctctgatctgtcagctcatcatgtcctcgccctctgatctgtgcctccaacctgtggttattccctgttgaggtgtgcctgcttctgcttttacatgggctcagcaactcctgcttgcttccctgccagtaggccaggcccagcacccttcacgtagtctcacaattacctattctcccttcgtctgctcttcctccccttcctctgttttcctctcctgttcttctgttcagaagtctggactatattgcttatttgcttatgctttggatcttggacttggatatggatatactcctgtgatgtggtatgctgctagtgcttggatagttgggtatggtactagggtataaactgctctgtctagtgagtggaggctgcatagactctaaaatggacagcataaaggtgcacatcaatgtatgtttgtcttactctaatgtaggtgagggtatgtgtatggtgttgcctcgcggttcaccttattcacttaggcgtct

SEQ ID NO: 47380 - DNA, 2129 bp, Zea Mays
cttgtttgcgtgatgtagtagctttcctgcaagaactgcttgcaagttgcaactattttcaagtttgacctctcactttttcccctttatcaaacagagagctgcaggtagttccattaataggtagaacatggaccttttgctttgatgttccttacttatgactagcttatgcgccataaaaaaaactcttattgcctcccatttatgactagcttatcagctttgtcctaagaaaacatgtgtgaattttggaactaagtagctagctatgtttgctgtttcatttgcagttgcctctatagggagccgttctcggctaagagctggtaaggaaagcatgaaatcaatcggtgaagaaactgagagcaccagcagagaaacagaaggaagcaagtttcacagattgaaatgcacagatgagggagaaccgtgccttgacaggatccctaatttccactgcaaaagtttgccttcaagatatcgagacacaaacccagaagatggcatcatgcacaagcgcggttctatgtaccagagttccagagaggttagcagactcaggaatctccaagggaggagcaaactaaattattcgagcaataaagacacatttatgtcctttgaggttgccaatttgtcctctcggcctagcacaagtggtgcttgctcctttccactgcggagcaattcatgcaacacaaggtcttctatggggacaaaccatagaattcatcaagcttccagggaggttatgaggttttcactccatgagattcctgaggatgatttgacactcgagagaccacgcagggactgcaatttgttgaaaattgatgcagtagacagtttcctggagaaagcgcttgaagaagataccaccaatggttcatgcacaaatgcaacccctcattggccagaagacagttgtagcaaagttggaggatcatattgccaacagccagttggtttttgtcctgatgaaagagatgtagttaatttgcccaagtccttgtcaacgaaggtgggtgtttttgatgctacctgcccatcagagtgtgttggcaacaaaaagattcgttctagtccattcaagaaaattcttgatcctatcatgaagtcgaagtctcaacggaacccttctctgctggaaacagaagattcaaaatctagtagtattccatttggaggaaaaggcagggtattacgcaaatctttattaagtgatatctcaagggctgagcaaagacttgcacctgattgccagacagatggggaagcccagaaattgaccgttacttcatcgccaactcatcttcatgctgttattaaattggacccaaataatggtgctttcggtttcgcgtttagtacaaaaggtccagaagagttaatatatgttaatacatggaaagctggggatgaactgaattggatttacacttttcatagcagtggcaagcaaacaagcactgtgggaagaacctcaaaggacaggcatgggtgtctacctccaattgtaggccagatgcatgtgtcttcctttttgtactctagcgttggagaagatggtattttaaagacctcagccaccactgaatttgttttgtatgacattgctcatgcaagacggagttctgctgttgagagaattcaatgtacagatgccattcgaccatcattctgcaatgctgtcaataattcaatgtctggacataccagaaatgatctggtgcaaagacaaaatactacaaggattgactcagatctatcaacatcttgtctctggtctcgagaagatcttcatcctcatttggaggttgctgccattgtaatccaggcaccacttcataaaacgaagtccaaagaattgaaagctggatcgtcacctggtactatcaaagcggttacagcaggtggtgcacatgggttaccaagggatgatgaggcaagcccatcaccattacttgaccgtctaaagtctggtggagcctgtgattgtggtggatgggacatgtcatgcccaattgttgttcttgacaatgcatatgatggttactgggctgattccgtaatgaatgaaagcaaagctcctatggagttatttgctcaggtacgcctgattatct

SEQ ID NO: 47381 - DNA, 698 bp, Zea Mays
ttcgtgccctctgtggtgtggatcacgatgggcagtgaaaagatcttcaccgtggatgaggtcgaggcactgtggctgcccggttgccataccaacttgcgccacaacgtggccgcgcggccgtcgcggtgaggatcgccgttaacccgagcatggcacgctcctaccttgttaccacatcacaataggtcactatagatggcctgtctatcagctgagtcgttgctccggtaaatgccacggtagcttgcgctagtgaactccctccctccttggctgccagcgcatcttctcaaaattgggtgccaccgctgatgatcactataaattgagtgtccagtgagctccgttagattgttacgtgcctagtgcaccagccctcgcctctgattagccaccgtagctcacgaatttcaaacttcccccaattcggttctccgcgccgccatgaaccatcgcgccgtggaccgctgcctccaggtccgttcacatcctccttaccctcgtttcagcacctttgcatgctaaggatgcttatcggcccaaccaattgaactagaccacgctagatcgccgggaacacctcgggttgaccttggttttcaccgtcgtcgtgtatagagagattttgagctagaatcgtgcaattgatagagggattagggtcaccaagggtagaatttggtgtcaaccaagta

SEQ ID NO: 47382 - DNA, 707 bp, Zea Mays
cgagtcagaagattccccagccaacatatcgagcatagcacttatctctgcatcacctggactcgttggcatttcaaaatgaacttgcctctcatcattggaagatcaccaagtggagcaaccaggacctcaatatcttcgggagagggtcgcactctaagacccagatcactatcaccagtaggaggattggacacaaaattgcaaaaggacttagaaggtggcagattctaaccagaatatgcgacaggagcaacaatatttgatactttgcctctcaagatcatctctagtcggctcaccaaatccgcagtaggaatcctcctattgataacccgagttgagtcggtgacaccactgtacaagtaagctgggtatgttgtccttcaggggttgaatattcttaaaaacaaagtcagcaaccacaacttcagtggtcagacctctttccttcagcaaacaaattttagcaagcagaaccttggcttctgttatctccaaggcagtaggagactcaatccaactcgaagtgcgcacatccggctgtctccctgaccgagggggagggacttgccatggttttccacaataaacactctaaacgccatcctttaatgttgtccttaagtgtgatatcaaggtattctgttttcctcccacggcgcatctccagacttgcatcgcccacgagctggtgctgcccccag

SEQ ID NO: 47383 - DNA, 320 bp, Zea Mays
agcttgtagggcgaagactcggtctccatcgatgaggtcctttgaagtgggctcgtccacgtcggggacggctgaaggaactgttcgcggggacccatgctttatttcttgtggggtcatggcctccgatccgtatagaaggcggaaaggagtgaacccggtcgccctgcactcagtcatgtttagtgcccagaccgcctcgggtaacaaatcggcccacttgccctttttttcgtcgaggagcatctttttgatagctgtgaagatttttccgttggcgcgttccacaactccgttggactgcgggtgatagactgagg

SEQ ID NO: 47384 - DNA, 452 bp, Zea Mays
aaaaaatcgtacagtttgtactcattaattggggactctccacttaaagcaacattgtgaaataattgatgtagcatgctgaccacatgatagaacggagcaggggcattgtctgacaagcagacccgaccccccagcaagccccaacacatcaacatttaagagcagaacaaaccacattacacaccaatccaccagactaacagcaacaggatacaacgacatagaagacattgggactaggtttcgctggccccttacaacaccacagcaatctaagacttccaacatgacttgactgacccccttactaacactagtgagagaaaatgcagacactaacatggtggttgagctccactatggctgtaacacttcccatcagatcctctgcatagttttgattgatggaaccttcacaggagccaccttgcatccacgccttggacctc

SEQ ID NO: 47385 - DNA, 515 bp, Zea Mays
atatgttcatcattcccatgacgaagaatccaattgtggaggatacaacatgctaggactagctttacttgtgtcttgtatggatggaaaggtttgttgtataatattttgaatctgttcttcaaagcaccaaaggccctctctattgtcacccttagtgatgaatgtataaggttgaagagctctttggggttctgtggatccctccccccatattcactcaagtggtaccgtgtggcacgataagggggtaaaaacccaggtctgacagcataaccagcatccacaaggtaaaatttacctaacatcatatatcatatattagggcattatagaccaatattaggggatacaaaggaaactagtttttaccttggggcactattagaccatcttctctctcaagggcatcatcaaggataagggcatcatgtgctgatccctcccagccagcaagaacatatgtaaaccttaggtcaaagtctacagcagctaagatgttctgtgttgttgtg

SEQ ID NO: 47386 - DNA, 513 bp, Zea Mays
cttagttagcctgtccacgatgacccaaatagaatcgtggtgcgggatgtgttgggtaaacccacaataaaatccatgctgagatcctcccatttccaagatggtatgggaaggggctgtaaggtacctgctaccttcaaatgactggcaagtgtcgcatttagatatatacttagcaatttccctcttcatcttggtccgccagtacaaagatctgagatcctaatacatcttgttactgccggggtgcatgcagaatttggaaaggtgagcttcatccaatattttctttctgagttcgggattcttaggaacaaccaattggtcttcaaaccatagaactcccttgttgtcctgatgaaagcatttgtacttatccaccttctgtttgagcatttccttaatgacttgaacacccttgtcacctatctgtgccataactatttgctcgggtagagtgggctctactgaaatataacccaaggtaccggaggaaacaacttccaggttcag

SEQ ID NO: 47387 - DNA, 273 bp, Zea Mays
aagggatgggaaaggtaaaggtaataacaaacacaagtaggcaagggatggagttaaaaactcgcaagtgacaaagaagaggatacgaccaagggaaaagtaggtacaatacaatactcagattgagatggaaaagaggtcattttaaaggctggtataagataaacatcaaggtgagatatagaggtgataaggataaaggtgataatgatgaaaagcataatccatggacagagttaaggcaagactcgcaaagtgatgaagtggagaaaa

SEQ ID NO: 47388 - DNA, 2044 bp, Zea Mays
cctctctcttgggtggattttttgtgggaggggctttctttttgggtggctgggcttttggagggggaacactagagatgtcaggaagggtgtcaattgtgttcctgagctggttaagttttggaacccacatttgtttctaaggaggggctctcacaggctcctcaatcacacactctctcacatgggtgataggcttaggtggggtgattttaatatgcttggggtggctataggtttctctgatggtttcaatccactccactgaccaaccttcccaaagcaagcaacactttcatctttagcatcaaagcctaatcccagtccactagttcccctcttgaactcgcagaccaccatgcccaactaaggctcaatgcacgacacccaactcaagtcccatcgaaggtatgtgttttcttctttgatccgagtcttatcgtgcctgtaggactcaagagtagtctgcaaaccttcacaaagtgcacactacataggtgcaggggcactcactgagctagccttctcaagtaagggcgtaaggctatcctagcgtttctctctgctagcttagtttgcaggccaggacaattggtacacgcacctaacaagctagatcttgatctcagctcatcgagctcatctagaaaagtggcgtacttggtctgcaaagttgtgatgttcgacatgtgaagagcgcactcatcacatttagtctcgtcaggcaccacaactgaagctctagcagactcaaactccctaagcgtgctctcatacttgaatttatctttcctctcatgaacagcaagcctaggtagcttatcctgactagccaaagtagtcgtcaactcctctacctcaacggcgagatcatctgtgcaatgtgataccttagaagcaaagtcgtcgtcgatgtcctggccatcgccgcccaccacatcatcactaagagctatggtgcaaaggccacctacggtgtcaacgaggaagcagagctcattgatcttgtcctcgactcgcctgttagtctcctcgtcgctcgaggaagtcactgcatcgtcggagtcgtggtcgaggttgctgagggaggcgaggaaggcacgctccttgatcttggccttctggaggtacttcttcttgagcacctccttgttaaatcctcccttggacttgttcttgcagaaggtgtagtcccacttgccgttgcatcgaccagagtggtggtcgcgtgggctagcctcctacttgcccttcttggggcaactggcgataaagtggttggggtcgttgcaattaaagcatccatccttcaacccgccacaccaccggttctagcagttgttgtggaaccgcgtgaacgggctggtcacaagcgatagctcttgatcctcaaggctctccacctgctcctctgtaattgtcaacaaagaagaaatagcaaacataccaggtgaggggttagaggtagaaccacctccagagactaggccatggtgggtgctctgaggttctcaatcttggcccgggtctggtggtcaatctcggtggacttgagcttgctgaaaagctcatccatggtgagagtcacgtagttgggcaactcaatgatcactgagaccttcacctcccaaaccctccaatctagagcatgtaacaattttagcgctctctcgtggtcgtcatagggaagttgtgccttgtttgcatgcatcttgttcacgatggactttaaccaagagaacatggtatcgatcgtctctctagccaactgaacaaagttctcgtactctcattggtatgtctcaaagtgtctggtcttcacatgatcattgccctcatgggatctcttgagggtggactagatcttgtgagtcatagccaagtgtccaactcgctcaaactcagcaagcgagaggcacgagaacaaagtgttgcgtgctttgttgttcgaatcatgaaactccacttgaattggagtgatttgttcacttgcagcatttaacgcaacatcgaggcaaatctctcaaactcaatacacaatact

SEQ ID NO: 47389 - DNA, 552 bp, Zea Mays
acgcccgcggacgagctcgatctgtcgatctactttcatctacttcgcaaggtaagcccctttcttggctgctcatctactttcatctgctttatcttctcatttgatttcatctgcttcgcaaggatcgctctcctacgacctcgatcggttctcagctgcgagcaaaccctagccgtgtggtctccctcttctcagattagatcgctctcctacgacctcgatcggttctcagctgcgagtgaaccctagctgtgtcgtctccctcttctcaggttagtacccatctagatcttctcttctcgtttgtcctcctagttccctcgattactgatctgtgatcttctcgtttgtcgtaaagttcttgtctttgtttatatatctgattagtatacttgccttgctgatctgttgtctagtaccaaactcttgtctttgtttatatatttgattagtatatctgattagtattcctcgttaaattcttgtctagatctgtttacagaataaataggaaacatacccttttgataatgtatgattcatcagtga

SEQ ID NO: 47390 - DNA, 272 bp, Zea Mays
gtgtgaggaggcatcgtctgtacagggaagaagaacacggatctaggtttttccttgggaagctaggagtcttaggggcatacactgcttagtgccttgggaagctaggggccttcgaggtttatactgttaggttataggacacaaggtataagaacgaccacatctaagctctagccttagatctgtgctttaatatgcgataggcgaaaagatttttcaatctcagtttaaaattcactctcataatggactaaactcagaacctaagc

SEQ ID NO: 47391 - DNA, 614 bp, Zea Mays
gtttttgttttcttcaaaaaaatttcatcttcctttactaaccatgcaacttgcctatttaggatgctgacaatcctttttcttttcacccatttggcccctttgtcaagtttctcgtaatccgggtattcgaagtttaatgtgtccatcacccgattcagccttcgtttcggccgggtgccaaaggaagcagttattaattggtcttccttcttggtatagttgccaagaattttgttacacatggtttcgatcatttctagccactctttgcatggcttctggaattgcttctcaaatttgaatcgataagggagccaaacaagttcatactttttgccccctcctttttcttaggcattccccaatcactagaggtcggaaatgttctatttgccaagtactcttgtactagatctttagtgctgatttcggcagctaccactctgaattccacttcggctagctggcatggggaaccgagttgcatgtggcacaagggccttgtcatcccgaagcttaatttcattggactcatgaccatagtcattaacttctcccttttcttctcgtccgcctttatgtaaaaccattcgcttgtccaaccggtcggc

SEQ ID NO: 47392 - DNA, 541 bp, Zea Mays
gtacgtataagattagagatcttaggaatcaagtaagcctctctatataaggagagatgtaaggatcaagtaaagaattgtcgcagctgccacctcttcttgattggcaagatcacactgcatggattaggacatctagatcaaggtttgtgacacggcctgtgaaggaaactaacatttcaccatacgacaaaagggcaagatagtaaatgacattggtcgcagttagaccttagtaaacaactctctagcgagcaacaaggctctccagccaagttgggagaaacaacatacaaaacataacgattataatgttcccaaatcatccagaatccaaggatgatgatgtagtaagcccatttttttgcctgaccataaaatcttgcttctactcttgccacccaattgtcaaaacagacatcctcttgctacagagaaagagcttgaagaccaaatttctgttgcaggttaaacaagaaatcctgagcaaagacacaagacgtaagcaagtgcttgatattctccattcctgatcacagtg

SEQ ID NO: 47393 - DNA, 1148 bp, Zea Mays
attttacagtaaattcgatgtataataacttgtcaaacagtgtattgggtcctaacttgaaacatatctggaaaggcaagattcccccgaaaattaaagtgcttttgtgactcctggaaaataaggctcttattactaaagacaatatgagcagaagacattggaagggtgacctttgttgtaacttttgtgctcaagatgaaactattaatcacattttcttcacttgcccagttgctaaagtaatatggggtgtagtttccaaatgccttaatactaagtacattccagggaataatgaccaatgttttttgtggcttagaaaatacttaaagactaataatgatacacaaatcgttcttgtatttgctatttgttgggcctgtctagaaaagcaagaaacaagatgtgctttgaatttttttgattaattccctaacgagattatatgtcatgctagtgctttgatctcatcttgcgcaggactgaacaagagagatctacaagaacttcttcaggagggagctaggcttctagagcgggcgatagacgctggtagacagatcaaaggctgatgatgatgtggagaaggacgattgacaactacttgctagattcacgtgatagttgttgtgtcttcctagtttgaagcttttcttatcggtgcaatctaaactttgatctatgttgtggatgttggcctcacatgtctatcgtcccctagatcttcccccgtcgtgggcttttatctatagaacttgttatatgtccccgccttttgggtgtgtggcctgttcgagtaacccgaatcaagttatcttgtcctgacatgttttctctatttctatggttgcacatgtgcgccaggaaatctggttagaaaattgtatccctgaactcgtgtatttctattatgataataatagaaatggagccagcctcgcatcaaagagaagttcttgctgaccgaaatgatgtcgtatgtatctatcgaatgtctatccttgaacagtagaggcacttagaaggggtggtgttaggcgtcgtgatgatgacaagtggggtgagtgtcgcgagggtttggggtcgggtggcatcgcacattaggaatgaggtagtggcaagcggcatcgaccggactggctcag

SEQ ID NO: 47394 - DNA, 862 bp, Zea Mays
aaataaactcagaaaaagatttaaattattaacataacgtaataatacaccacacaataaaatataacaaataaacagacgtgtggcgcatgactcgcatctacgactatacgagaaagaaaacataacgaccgaggctacggtcgagaggcaattgcgttaagccgatatggattaaaatatttgtctaaacataatcatattaatttaataatcacgctatgcataaaataaaattacgctacgtaccttaattattatacacaactctaggtaaatttaaaagatcgtcgtgtgacgaagcacgcgacacaacacactattcgaacaaaattaaaaagattgtcgtgtggcgaaacgcgcaacacaacgcataatttaaatgtaattaaaacgaattgttgcgcgacgaagcgtgcaacaacacacgatctaaactgaaattaaaatgaattgttgcgcgacgaagcacgcgacaacacacatagattaaattggaattaaaacgaatcgtcgcgcggcgaagcatgcgacactacacttaaactaaactgaatttaaaatgaatcgtcatgcgacgaagcgcgcgacggtacatgtgaattaaatctgaatttaacataaatcgttgcacgacgaagcgcgcgacagcacatgataattaaactgaatttaaaacgaaacgtcgcgcaacgaaacacgcaacgcaacacactacctaaattgaaattaaaacgaatcatcgtgcgacgcaacacactaattaaactgaatttaaaacgaatcgtcgcgcgacgaaacgcgcgacacaacacatgaattaaactgaatttaaaactgaatttaaatgttactacccgcg

SEQ ID NO: 47395 - DNA, 314 bp, Zea Mays
gggcacccgtggtccggtgcaaaaaaagatatgtgtagtccggtcctataactgttaacgggttgtcaccacgatctttgttgcaaagcaataaattcagtgttgacttgacgatatgtctacgtaacaccgaacgccactagctgtccctgcagtagcaccttgcctttagcattaacgaaaaacaaaatccgtaaataatgaaataaagacagttttggtgaccatagttacacagcagatatactcatatccatgtcctatttatagagctaacggacgtatcaggcaggactgctgttgtcgcagcaaaa

SEQ ID NO: 47396 - DNA, 396 bp, Zea Mays
ttgggttccatagaagggcccatgtgagtcattttacataaccttcctaataaaattctctgacggtctgacctcaaccttcatgggacgccttccttttgcttcacctagaacacatagctttgagctcactcatactctggtcatatcatttcttatcttaatatgattttatgtggtgttagctcgtagcctccacatatcctctagacagggtaaagtgattactttgtacgagattattttttgtttatctctctttattaatacaaaaatgaaactcttttgtgtgtttctagacttccagaacaaatacctttaagtttaggttgttcttctcccctttcacaactttcagtaaaatcaaaatccattatgtactcatctttgtcattc

SEQ ID NO: 47397 - DNA, 878 bp, Zea Mays
tgatgctgcaagcgagaggcttgtggatcgcagcgagcgaggggacggagaactacgccgacgaccggaacgcgttggaggtgatctcgaaggcggtgtcgcccgaactgatgggtgtcgtggcaggcaaagccacagcgaaggaggcctggagcatgctgtgactcaggaacgtcggtgtcgatcgtgtgaggaaggccaaggcgagctcccccaagcgcgacttcgacacactcaggtttgaagacagtgaatccgtggacgatttcagcgttcgaattggacggatcaccactgaactggccgggctcggcgaggaacacacggaggaggaaatcgtgagaaaatttctgcaggctcttccccccaggtttgatcagattgctgcctcaatcgaaacattacttgatttgagcgaggtgtcagtcgacgaattggtggggagactcaaggcggctgaggagcgcctcgtgaaggaacgtggcgttgtggcgccgcgactcaatcttacggaggacgagctgatctccaaaatcgcctcgtgcctcaaggttgctggcgagggtggatcgaacaacatcaagcatccatcgttgtcgggcaatgctcatggccgtgggcgcagccgtggtcgcggacgcggccaaaatgcaggaaggcgcggtggtggcaacaccggccgcggtggtcgctcgatcgccaacgatgagtgtcgctactgcgggattacgggccactgggctcgcgaatgcaggaaaaagaagcgcggtgaacaggtgcacgccatgcaggctgacgtgcaagttgaagaggcggctgcgttgctgctagcggatgcttccatcgatggcgatgtggtgacccagcccagggatgtc

SEQ ID NO: 47398 - DNA, 598 bp, Zea Mays
ccaatgccctatctggtctctcttcggcattaggagaccatccattgcccttgggaacgacatacaagcatgtcaggctgcctttaatacagtatgcacttacataggcaccagggacttagtccaggaacatattgcttatagagtgtggccgctcgcaagtgggtgggagatgtcgaaggaaactactgctgggtccagtgaaggtggtttggtttatccaaaatacacattcaagtacaggagccagtttgatgagccaaatgatgactggctagatgccatcgagacaaccaatgatgaattgcttggtgcttacttgagggctgaagatgatgccatgtcaacaacctttgggggtcgaggcaaaaagagactgaatagagtttttgatgtcatcagattcatgtatccggactattgttatcctgtgcggaaacaagggaagaagagaaagactactacttcggcgacttctagcacgccgaagtcaaaaaagtttaaagttctgactcagctgcccaggcgcattgaaacggccaaagtgccgaagctgattgaggggtcttcttctgtttttgagccaagtcactccacc

SEQ ID NO: 47399 - DNA, 693 bp, Zea Mays
gttgcgaaggctaagcaagaaataagtgaaatggaaagagccagggtgcagaagaatatggaagaacttcgggattctaaggaaaaatgctatgaagtatccatggaatgcgcggagaagctgaaagatagcttcgccaaggtgggagcatattcatcagagcaaaaatttatccgtggtgatcccaaaggggttatccagtggatcgactaagaggttgacgcctttgaagaaattctcagcgaccgtggactcttttgtgccttcgctggtgcgcgagggattgtagcgattttggaaaaaaccggctacgaacatgttaaggctacagcctaggcaggagccatcttctgagcagacgacacaaaggaaccttcgtccgatgcttctttgattggcagtaaattcttttccgatgtttggataaagggcggccgtgagatggccgatgaagccataaaaaagactgaaaaagaatctcacgaagcccaagaagaggcaaagctagctgaagaagctgctgaacgcgcaatgattataggtatcctttttaaagcttttttctcttgttgtttgtttctagcttcaaaattcaccattatgttttttattacagccagcctttcgccaccgctggagccatacaaccctgaggctgacccagctttgaaagaggctttggatgtgatgaag

SEQ ID NO: 47400 - DNA, 1655 bp, Zea Mays
gtaaatggtgccaaagctgacgacttcgaaggcatcatgtttcaagatttctttttttgctagtcttcgcatctcgtcaatgccttttgccaaggttctagatgtatttgaagtttagttgtatccaaatagcacagtgaatttatcaaagtttgtttaagcacgttgaggctttgttgttgagctttacttgcaaaggttttcctacatgatggtccacacaatcacgcaccaaaggaagtcattgttagggtacaataaggaggttaagcatgattattgtggttggtgcatgtttcattcgagacattccatcataggtcacgtgaaggtggatctatcatatgcctattgtaatcggtgggatgatgattagccttgtaatatatgtaaataccccaagctagaaactcagaggtgaagatggaaagggtccactaccctttttcttaggtcatgggggtttctaggctaaatcatcatgttatgtcaaacaaaacttcatcttcaaacgcatgtaaagaggccttcgagctagggtcccatttttaggttgagacctaattgtcaagtttctagatcattggggcacaatatttggaaggtattctccttcaagaaggtgcatcttacatattgtgacattggtgatggtgtgcccttcctaaggtttgggttgatcaaggattaggcataaagtaatgaagatgtcgtgcatcgggtgaatgaggtttcttgtaaaatgatcaatgattacttggatagggaacatgttgctcatgtcattgtactcaaaacattgttcctgagaagttgtagctttgggagcagttggataagggggctcaggtaaagtaaaagggaacttccaaaaagatacttagatcgaagaagatggtggaggcctcaaaggatgttgagaaaggtgcaagggtttcatctttaatgttgtctcctatcatcaaggaagtggaagaggaggtgctgagtctagtcttggaagtcataatatttcatcatatcaggttgttatagccaagcgatctttttgttgagtaaggggaatgctaattcaatgatggcagtgttcagttggatatgattaatgacgatatcctagatatttagggttttgctttgtaggtacatattattaacgaggagtatacctagatttttgaatatgaggtttcaatggaagtgcaagcgatatttgttgacttgaccattttggtgggtggcctaggatcaactgtgctagacacctctttgagtgtaggtagtagactacactcttttgatcatgatggggtgggtttgttagttgttttcatgactcctagaattttgattcagatgctctattcatgtagattctttggctattaggcctattcaggcgaaatgctacaatatcctcaagaggcatttgattgttacttaatgcttgggtttggggatgtttttttaaaaaattctagtgtgcttggctctagctttggtggtttagaaactttttggtagtcctaaatatgttggcaatgaggtggctctattgtttgagttgaggaaaggtgactattgggtgaattgaggaaagtcgagtgttcgttgaattatctattttcccttttgcaatgtttcagtgtcatttg

SEQ ID NO: 47401 - DNA, 1042 bp, Zea Mays
gcatcctagtgatggatcctggttctctatagcggatcctcttgcggggaagggacaacgccatggcaaggatttgagcttcacggggatctcttccttctagtcgagcttccagggctgcaatcctcgcgtgtgcatcctctagctccaagtgtaccctaaataggtctagggtagcactgtccaagtcggtgttaagacctgccaccacaccaactagggtgttgaggcgatcttcttcagctccacctggaatactgttggtttggctttctccacgaagacatagagggagatgcctgtacttcgtgttgtgcagctgctaccggtaggtgtggctaagggaccacagagtccgcctagcagcatcgctgaccgaagcagcgtaggtggatagcggcgtcagagactcatgagctgatagagtcctgaaccctttatcacctgcatccatcaccctgacatgaatgtgagtgatgtagtagaaagcccgagggggctcgtacactcgcctggtctcatacaagggtcgaacgtaggttctcaacgcatgcagaacatcttgcagcaggttagggaagtgccccgtctcgaatattgatgtataatgttcggtgataggccataaccccacgtagtggtcctgctgttcatcgttggcttcctcgttgatgttctcctcttcttcttcttgttcttctttgtcatcttcatcatcgtccccagagtcgtctgggtcgtcgcctctaggagcaggggttggactgctggtgctggcggtgctgaagatgacgatccagctgcgaaggctagtgattctgccaacggggtggacataggaaaaaactcctccgagctgtcctccagaataactccgttctccgcacgaatgcgagggagatccacagggatttcctcgactaccactgggtagacgggaacttgccgtggcggagggatgtagttggtgttggtctgggtggtttggattgtacgaaccatctacaagagaaaatgtcaatttagttgaattttaaagagg

SEQ ID NO: 47402 - DNA, 397 bp, Zea Mays
gtgcagaggccttcttagagcattactctatcactgagagggatactgccgaggcagccatgcaagatgcaacacgacatgcactttctcaatattgctcgttgttcagcggggtagctaatggcctcaacctgatgtactaccctagccgttcgaccggcattgctagaggtgtgattgtctcgccagttggtgagggcaattccaggctgaacaacatggtcaacctggccgccatgctcaacaccgagctggaccacacccttgatgagttgggcaaggttcgggcagaggttgcagaattgcgtgctgagtgcgcagcatgccactatctggatggtggttctcccgcccctgtcgggattcagcacccttatcgctcaccgccccgtggtcg

SEQ ID NO: 47403 - DNA, 319 bp, Zea Mays
cttgagaagactagaaggatgctgtcaccagtgaaccccgtccacgttgatgtaccgcgggtgcttgggcaccaccgtgttctggcgtcggggggaaaagagacgatctcccgtcgtccgatccggccatgcagataggattaggtccgggggtaaccaaatgtgaaccgttgatcggcagattgtgggctaggattaaatcgggcgtaatggtttgttggggttgatcccaaccgccgatctactaccgtgtggctaggattagtccgcccgtaccgattgggctgaacccatctggtccgtccgatctagatctagc

SEQ ID NO: 47404 - DNA, 435 bp, Zea Mays
cgcgcgcggcagcttcagccttcagctatagctgcccttttcgtctctcctccccacatcccagaaaccattctttactcccctccaagaaaacaagcaccacacaaaccctaaagaaattcagcgcacgcagcaagcgcgcctctcatcctctccttcctcgccgtctactattttcatcatcaccgccaccacttcctctctcgcgccgccaattattaatattatcggtactgttgtgtagccattatttttactttcgcttatttgctactatactccttactgacatataattagttcttctcctaccctagaaagatggcaggcctggatttgggcacaagctcctacctgcaccaccaccaccaccagtccctgcacctccaccacgaagacggcggcggccgcgcggggggctctgacgatggccag

SEQ ID NO: 47405 - DNA, 315 bp, Zea Mays
tgggtgcagaccaataggccgggtttatggggtcggaccccaccgggctggcatacacgtatgtgttacctagttacaaaagggaaacaaattcgacccctcagacttgctctatggatagaacttacagagatgttccgacaccgggggggaggcactccttcagtcgtagctagacggttgccctcgggtcggtgcattcccgttaccttgaagggtccttcccagctgggggagagttatggaaaccttcttggtttggtacttaccataagactaggtcccgaccctgggtccccatttgcgtttgacgag

SEQ ID NO: 47406 - DNA, 401 bp, Zea Mays
cgggccaatatatcggggtgccagtttcccttttaccccgaaacggttcacacccttcattggtgataccttcaagtatacataatcattaacttgaaagactaaaggttgatatcgcttatccgcataattcttttgctgagcttgtgcctctttcaagttgtgtatgatccgttggactttttcttccatcactttaaccatgtcgggcctgaaaaaccatctttctccaaactctgaccaatttaagggtgtccggcaccgtcgtccatacagtgcttcgaatggtgccatcttaatgctttcttggtagctattgttatatgaaaattcggccaatgacagacaatcatcccatttctatggaaactccaggacacctgcccacaacatatcttcaa

SEQ ID NO: 47407 - DNA, 548 bp, Zea Mays
ttctgatcaactagttgtaccgtttattgcttttccttgcaggctaacatttcgctaggccacgtcatgatggcgccctgtcaaaacaaagtacgtgacaatggtgacgtgcatcccatcgctgatcagtgattactctagatctcatatcttttttttaaatgaaacgaaggtgactgatttactctagaattgtcgtagctttctgcaatagtgggtgcaacaactctactcagctcattgggtcatgccttccctaataaaatgtcaaagtggtcgcaagcaagtgcgaggaagcgaccacggcacaaagaaacacccggtccggccgtgacacggagcgaaagtgtatcctataccccccctgatcccaggaagatttgaatcgtcacctaaccggtcgctctcattgtgcctgcgtgaaggagcgtgtccggacctccaagctcacctgaattggtccagaagatttcaaactccgacgaagtgataagctctagtgttcgcttcaggtaaagatgatctgccacctgatctggcatctggcc

SEQ ID NO: 47408 - DNA, 746 bp, Zea Mays
aaatgatgttcggtcgaagggaagaagtaaaagaattaagagggcaaaagaactaccaaagtctcgcaaaggaaagaatttgaagaaagacatgaaggatgcagctatatagattaatttgttgtcagttcaatgttattttgtctctgtaactggaacaagctcagtcctgcttgaaaaaaacatttctgtttgtgctccaattcagttagcttattgggcatttctgctcatttctgtttctgctccagtccagtttagttcaggtagctcattttttaaaatgcacagaaatgaacaattttagttagctgccagatttggtatggctgctagaaaccgagtaaaatttcagttagcttattgggcaatactgttaagctgtcggttagctgctagaaatgaacaatttcagttagctgccagatttggttcaggtagctcgtggaatgttgctctcaacggtttgaattcttgtgttgtactgggcctccgttagttaatcaatcaaatcaatatgactgactggccacacagctgagagtgaaatgtcagctgggctctcaatctcaagcatgataatcacatctcaactgttagatcttttggatgccgtcgatataaatataacctgtcttcgcctagcgccggttgaatgcaagctattttctacagttcacatagctgccagatttggtatggctgctagaaaccgagtagaatttctgttagcttattgggcaata

SEQ ID NO: 47409 - DNA, 430 bp, Zea Mays
gtttgtactagctagtttacagctttacagaggaaagaggcagggcggaaaaactaaaagtgctacttatcctagctagttttcatcatcacttattgacaaggccataccatcagcagtcttaaatccaaggtgaatacattcacacactaccgaaaaactccatgcatgcgcacgaagctaggttaatcaactgaacagtgtgtgaactccggttaaaattaaagtaaccagccttcaccgcgtaagtatgaacaggtaactgcatttaattactactgccctctattagtttgaaaccctctccagtagacctctctaggtttgacggtcaaagttttaggcgaggggagggggaggcccagctagcggtgcagttaccgagataaaaacacacaaggcccctatcttaacctccacttctcctccc

SEQ ID NO: 47410 - DNA, 556 bp, Zea Mays
atatcaggcgagatattttttcaatgcgtgtttatccaactaaatacgcggattttattgggaaacgcctagaaacaggtttagacctccccggatcctatatatatgaaggagtatatccgattgcgcatatcaacaatcgaatcaatcaatcaaatctactttatttccttcatcgcattaagagtaggcgtaatttagacttagcttagctttcctccaacctcaaatcagcatccttctttgactctacgtcacctaggaacgtcttgaatggtctgtcgatctcgatacaccatatagaactctcctccctgactaggtccctctcgggggcgaattattcgtttggtccaatgcgtggaccgtccggacagtgagtagaagagacccgctcctaccacggggttacggatcgttcgtgtcaataccatggaccgtctataccactgcaaagagtatctccagatagtacgctcgtagtgtttggcctcgaatctgaatcaacgttataaaaaaacggatccaagtaatgctagaggaattcgtttccact

SEQ ID NO: 47411 - DNA, 691 bp, Zea Mays
gttctgtgcttgcgctagagagccacggtgagtcactggtgaagcgtcgtcgccagtagaggggagattgtcaccgcgacgaccggaattcgtgctcggacaccaagatccgcggcactccatggataggatctccatgactttgatcaacagtgagcaccttcagtagtaataccctgtcattaccgctacctgttgctactgttgaattggagtttagacgtgagggtcagaggttaggtagttccggccatggcgccaccgtgatggctgtctgtcgctgtactcgggccggacggaggagagggaaggatctggggccattgatgcggatatgctcgactgagattagatctggggaggaacgcaatttagccgttggatggggtatgtacggctgggatcaaacgggtcatagcgattcgtggggagcaagttgagccgtctgatctgatcggacgaatcaggacaactgatgggtaaataaaatccccaccgttgatcgctcattggacgataaccagtggataccggttcgggtgcggatcaatctaatccgggtgctcgatttctaatccaacgacctggattcacctatacctcttcgtttggcttatttgctaaagagcccctgcgttttcctatatagaacccggcgtccaccataacagtgccctgagtcttaagaaat

SEQ ID NO: 47412 - DNA, 409 bp, Zea Mays
ggccatcttcttggcttccgtgctaacatcattaggcgcattgcgagccagctctgtgaatttgtggacgtattcactaacagatctccctccttgagttaactcccgaaattcttcttctttgagctagacgatccctaagggtacatgatgctctcggaaggcggcttcaaatcctgcccaggtagcatctctgacggcagcgctgaaagtatcccaccaggatagggccatcccggagagttgatgagcagctagatgaacatgatggttttcagggcgtctgatggcctctaacttcctctttactgtgtgcaaccagtcatcagcatcgagcagtttgctagatccggtgaatgtgggagacttgagccttaggaactctcccattctgttttgaggtcttcct

SEQ ID NO: 47413 - DNA, 294 bp, Zea Mays
cgactttaaaggaatgaggtccgaggtataaaggcatatgaactcagtttgtaatactcctcacacaagcacgagagccaagagctccaccctgtcacacacgaaaatcagtaacaaagactttagcaacatattggatgtaggagttctctcataacccatataaactccctttcttaggcatatcaagagcaaagccattgagacagcaacccgctaaccctatcctatcctacatattcacttgtcgtgtgttcaaaaccacaacacacgttgatagggcggcctaagcat

SEQ ID NO: 47414 - DNA, 1141 bp, Zea Mays
ccaatttatgaggattttgttctatgtcaccacatcaatattgtaaacctatcaaaggagaacaattttgcttaagagtgtaagcgaggttgttatgaagaatttggagataattaaacctaaagtcaggctgtcaagctgttaaagtctgaatttctgattgacagtgcaactgcagtgattttgggcatgaattcaagcaggattgagcaagaatttgcttagggattctataacaatattgtagctagatcttagagctaaaactttgctaaagggtgatgatcatgttactgcacaaaatcgggagtaaacagccctgcaaatcgctctttcaggtgactaaatgggctttcccatggtacagtaacctgaaacggatctggacgccagctcaactcgccgccgacgatccccgccgtgattcgtgtcgccgccgtcctgattcgtgcccagtgaggaacggataacgccggggatggataactcgtatgtggcgccatctcccaagtccagccggagttcttcactggcggccaccgtgactcggtaactttcgccgtggtgtcactcatgccgtgatctgcctcactgtgcctcctaccgacgtggtatgcatgcgctagcaatgctatccgtggccggagatcgtctgttgggttgccgtggctataaatagcacggtggtccacgacgaggtgtgactatcacacacacattcagttgaatcgaagccgaattcgcgctacctctgccccgtcctctcaaattaagtgtgcacagtaaaactagagttctttgtgaagctgaagcaccctctcccaccctcgattagccaccataaccggagaatcaccaatttcccccaaatcggtcagccgcgccaccgagaatagcccgatcgtggccagcccgctcttgtaagttcctatccaattcaagtgttatttccgtggctctgcatgctggtaaagctcaccatggcacccgtttactcaattcggccatgatttggcgggaacgtgtactcgtgaacccggtttccgccatgatcatgggcagacagttcccagtggggtttatgtcaaattaaaggatgttcctagattatccttgatcggttatgcctccccgatagtta

SEQ ID NO: 47415 - DNA, 405 bp, Zea Mays
cctgggcttcggatattaaagaaagcccaggtcagttacgtggtctggtccgctgagacaagggcgcctgtgttacgcggacagacggcatgcagggcagacgacgccgttacgcggttggttcaatggcaaggcggtaaatatttggaggtggtgcggaattatagggaataatttccacatgcaaacgtgattactctgttacgtgggcacgaaatttatggatcttgcatggcggcgggtaaatagaatgtagaataagatgttgaaggatatggcataaaatcggtaatgtacaaaaagtgcataaatagtatatacgttgtgacgtaaaatgttgagtcattgtgcgtaagtattgtgttagggaaattagttttatatgtacatcgctagaatatcggg

SEQ ID NO: 47416 - DNA, 962 bp, Zea Mays
gcgaagaggactaataccgatgaagatattttgaccaaagcgcagcgattggcagcaaagcgtaatctggaattaagtgagtcttccttcatctccctttccccggaagtaatcatttccaactgcgaaaagattgggatttctcttggtagttctgaaaaccaagtgttacaatcggtggttgctattaaaaatattgagatcgatagactctctgttgctccatcttcctatagcagaaatcttttaagtgatgctgaggaagcagagttcgatgctgcgttatctcacgctgctgataggtgggatgatgagtctgagttgaccactttagatagattttgtgagctttctgctgcgccgcgtagaaagaaatcgaacaaggctttctcaaatagaaaggttaatcgtccttctataaagccattttcaccctctaaaattagtttaaaatgaaaggaattttttggaattgtagaggtcttggggatttggctaaacacaattacttatctcacctttctagagaacatagactcgactttattgctctcatggagacaggtcgtagtgcattctcagagtctactttgagacatttttgtagtggcgtcgatttcctctggcaccttatgccacctagaggaagatcaggagggatgttgttaggggttaacccgggggtgtatgacattggagctattgatgaaggtaatttctattgtaagttccggctccgaaacaaagaggacggattcatttgggccctttttgctgtttatggccctgctcaagatgatttaaagaatgattttttagcggaaattgcaggtgcgtgtagttctgagacacatccgtttatcatagggggagacttcaatatcatgcgaagtgcggaagacaaaagtaatgataacttcagccttcgatggcctaatttgtttaatagtgtcatagcgaat

SEQ ID NO: 47417 - DNA, 785 bp, Zea Mays
cagacctagaagagagaaacgctaggatagccttgcttgaaaaggctatcttagtgagtccatctgcacctgcgtagtgtgcactctataggggtttacagtctgctcttgagtcctgcaacactacaagacaatgattgatgaataaaacacataccttcgatcaatcttgagttgggtatcatgcaatgagacccagttgggcatcatggttagctaattcaagagaggaacttgcagaccgagattaggttttggtaaagttggtgagtgcagtgcctgaaactcttagagaaaccttcagccacccaaaacttgtcaagctcactccacccaaaatttccaccccatatgtgaaaaatggagtgattgtggagcctgtgagagcccctccttagaaacaagtttggtgtccaaaaccaaaccacctcgggaacacacttcacacccttaccaacatctctagtgttccccctccagaagctcctcagccacccaaaagctcaaatcccacaaatagattccatctaagaaagatgtgagatttcattgtgattagtgtgtgtgagagagggtcatttggctgctttttgctttaggaggaagagagatgagcggcggggtcctgagtcgagtagaagaaacatgaactgtccctctcatggtgttcatgattttcttgctcaaagatgtcatgtgaggcctagaggtgctttacctcttgctgctaggcctcagacagagagaccacatggtggtcgtgctcggtagggtgcaggtcgtgt

SEQ ID NO: 47418 - DNA, 454 bp, Zea Mays
cctcgggcgcaagccctgcctcgcccgagcctggcctcggctacctggtcccccgcgaatcctgtggaaagccactccatcgaccgtggcacgcgtcatcaaatctcaagacaaggctcagtcgcaacctcgaatggacctctgcctcgctcgagctcggttcttcattcataactatgacagaggacgttcccaacgtcatcagaaatagtggagctgacacatcccgtaagaaccttttccccatgacgggcactgtgtcaaccactacggtatgggcaaccccacgccaggggggctcgggtacgtgaccaagccctcggcctcggctctcagcagaaaagatgcaagcgcaagtcaacaacaaagtacaaggtcatactatctacagggtatgaagacaccccttcacagtatgtagtcaactcccgtctacgaggcgactctccctggg

SEQ ID NO: 47419 - DNA, 778 bp, Zea Mays
cgcgcttcagctttgctactgccgctgcatgtgggcccatctagccgtccggtcttcttcccctcgagaatagcgcgggatgaacatatctcaccgtttcctgcggatcgttcctccaattgcgcgttgcggagtccttggcaccaaggtataaaccggtcgccgcctttcctcgttctatacccggaggatttacaccgtgctaggaatggccaccattaaaactgccggcaggagagagaaaagagataagggtgtggctagaggttggatagatcgagggcggagttaggtgggtgaagcgctccgcaaagtttcccgtgcgatggtggttggctaggcatcgccgtgttggggtgccaacgcatcgaccttgccgaccctaggagcaccgtcgcattaatcgtctgtggacggctctgcgcacgcgtctaacaccagtatggttgcaagcttgtaattagccatcgttcctgtaccgtgctggattagtgcatactccttaccgtggtcggggaccgcctactcgccgctcaccggatttgcactacgaccgtagcttggaacttagggcggaagacgaccctgtgtcattgatcactggataagccgccaggatcagagagagttttgaagtgttttgaaccatgggattgatgttgggcaggcgagatcatcggtagcataccccttcgatctgagaaatgtgtgccctagatctcagatcctacggttctgagcgcatacccattcgattaagatttagatctaatctgat

SEQ ID NO: 47420 - DNA, 544 bp, Zea Mays
cttagccacgacgagcaacactaggtacgcctgccctctggtgttccttttttaatgtgcgcaactgagcagccaaaccctagatggaaggaacgaacttgggcggcgcagacaagcttgtcgagcttggtggatggtggctggtgctccatccgctccttggggtggtcgtggctgaagcccctgagcccctgcaacaacgacttcatcccctactgtgagatcagagagttttagtctgttatttacataatataggcacctgctattacaaataatttcacagttcttgtcccattatgctataaaatatgatgtgctattcttagctcgatatgcggtaaggtcttcttaactattgatcatctacctatgcattaattcatatacttcaaattttcaaaataatcttcactgttagtcatgaaaagtttttttatcaaaacaatatcttcatatgcaagtgcatctaacatcaatttgttcaaacatttttgttaaagcaggaaatgaagtacaagtttcaaggaaatggggattctat

SEQ ID NO: 47421 - DNA, 1078 bp, Zea Mays
cttggtcacatgaaaaatttggagtaaaataggcccaaagttgggctgtcagtctgcctaaaacctgaattatgatattcagtggcataggatgaactttgggggccattttgaagatgatcccgtggatgtttgagcatggttaccacagtcggtttatagccaaatcatagggctataggtttgctacaaacggattagtaagttcttacgcgaaaattcaagattttggcgtcacaaatctgtgtgtcagactgactgaagaagatcgtgatggtacagtaacaaaaaaatcagcagattcagtgaactggccaccggtgacccttcgctgggattagtgctgctcatcgtgattcgtgcgtctggtctgtggattgagttcgccggtgaaaagatcatgtcgcggatgggtttcacgttactgtggcctcgctgttcctcaatcacttgcaccggcgacgtggctttacgcccgtcaccggagttggcgtctttctccgcggttgtgccatgcccaggcatttaaccacgttgcttctagccgcaccagctcgtcgataaccgccgtagcccctcagccggtgagtgccacggtttcacccacgccagtagccttctccctctccgtcgccagcgcgtcttcgcgaaattttacaccactgccttgcgctcctataaattgatggcctggtctattgtgccatactatcacgaagcccgagcacccaatctcgccttcaattagacaccatagccggagaatttccttctttccccaattcggttgactgcgccgccatgaaccgcctcatcgcggctagctgcttccaagtccaccctcgctcgttttgtccatgttttagcgcccacacgtgctcgtgatcgtcacctgctcagcccattgatcttgacttcacctaatcaaccggaacgtcttgatcggtgtttggtatccgctgtcaccatggtcaggcacatcctggctcggatcgatccaattaaagcttgttctggggttgcctcaggtcggtaatgcttacccaacagctggtttgggcagccgccgaagttcttg

SEQ ID NO: 47422 - DNA, 475 bp, Zea Mays
gacaatttcagcacacttgtggccatgggaatattgtaatccacatttatagtagagtcattttgccttctgataagcatacaatgtggccaacttatcttcagtgttataagacttggcaggtacctgaggtggtgtggtgttgggctgagaagaaggtttgttgttagcacccacatcaaggactaaggaagtatatttgttgaagcccctataagaaggcttgatgttgcgtgtttggctcccatctcggacctcctcctgcaaatgagcaagcacataggaagtatcaagatctctagggcattgaaccaaaacaacagaatgaacatcatctttcaacccatcaacgaatttagtggtataataaaggggatcaacatggggttggttggcgttcaattgacccactagttgggagaactgctccacatagtctacaacactagatacttgatgtatcttgataagttgt

SEQ ID NO: 47423 - DNA, 426 bp, Zea Mays
aaagattccttttatcctaaccactatatttatctgatcctaaaataaccaccaggacctaatccaaaataatgagatcttgactagttcaatctagtcataccaacctaatctagattctatctaatctattatgatctaatccatagtaagttacttaatgctggtacaaaggattaagccatactccaaatccacttaagcttaaactggtgacctagatcaactcggccatacccaacaacttgacctacataacagatctatcttagcctcttgttccaaacccagatggagacaccaaagagcaagactggaaaaggacaagatcaacctcgtcaaggaatgagagaagtcaaactcgaccttcggatacatcaccacccaacacgaagctctttctcatcataaactttcttaccccaa

SEQ ID NO: 47424 - DNA, 369 bp, Zea Mays
ccagagcactgcagtcttgggggcacaaaacagtgggcaactttaaataccaactgggcttagcaagagagattttacacagactggaaatggctcaagacagcagggtattatctccagatgaattatggctgctaagaaaactcaagcatcagtgcctggtccttgcttccctggaaagaacgattgcaagactcagatctagagttcagtatctaaaagagggagatgccaacacttctttctttcatttgcaggcctgctaccgcaagaagaaaaatcatattttcagcttactggatgaggaaagagtggtcacatctcatgagcaaaaacaagaggtgctgcataatttctactctaatttgt

SEQ ID NO: 47425 - DNA, 716 bp, Zea Mays
tgtaagcatagttattgagaagaaattagagataagtaagcccaaagatgggctgtcagactaaaacaatctgaagattatatgatcagtggcattggatcatttttggagacaaattgtggctaatccagtaagaatttgtcttggaatactataacaaagataaagatggtatattggactacaactttactgcagaactctaggtatgttggcacagaaaattaagaggaatttaaccctaaacttgagctgtcaggcacccggaatcggtttgcaatggtacagtgcctggggggataaggatctggacctcgctggcgataaggatgccatggcgattgggatgggtcggcggccgcggtaaatatcctcggcaacgtggcagagaatcactgaggtggcaggccccggttaatcggcgaccgccgtgccatcaccggaatctatcgcgcggtgagctcgccagcacgatcgggaatccgcactccttctccaactccggtcaacagcctataaattgagcccggactccgcttcttcatcacatcccgcacctcaacaacttagcactcgaatcgagtacgccaaagaactaacgcagtccacaaatcccctttctctctgttcttactccgccgcggggaactctaccgtgatcagcacccctcgggttagtaattcccccaattgctccctgttctagcgcatttata

SEQ ID NO: 47426 - DNA, 382 bp, Zea Mays
aggaggagcagtggaagcatgagtggtggaggtggtaggtatggctgaagtggtggatggctcaggagtgactagagcgggcgaagtgggaggtggagtggtagcagtggcgggtgtagagggagcggaggagcgaggccgagaggcgagtcgacgaactctgtaggcaatctgatcggatgaaatctgcagctgaccacctctctctgccttctcagctgctctatccaaacgccgtttcttgcagccttcctgctgctccaagtagacggtcttccccttgacctgcctgaaggggcgaggagggtcctcgtcgtctcctccccctggcgctgacacattcttcgtgtgcaccatcctgacctgaagactgcatatgaga

SEQ ID NO: 47427 - DNA, 475 bp, Zea Mays
tattatggaggggcaaccgaagtcaagatttctggtttcttcatgggactacaagatcagagccaaacctccctgcttcaaggtttatgctcgtaaaaaatcccggttcaactaacacagtctgaggagattggaacttctactcctctgcagaaatttaaagatggaattacaaaatagatcaatggaatcctgtcggcccctacccaaccagtcaaacgaaagagaaagctgattcctagcaatttcaacctaaggcgaagcaggagggtggccaagataccacctgaattaggctctccctctgctgcaaaggtgtgcaagcatctgagtttctgtgacgagagagagaatatctccttcacggatgcaagaaaatatgctaaactattcgattcacctctttctagagagcacattactgcgctggcagccctgttcggttgggaggtgcccccacctgggcagttttgag

SEQ ID NO: 47428 - DNA, 579 bp, Zea Mays
gtctcactgctgaactctgagagaaaatcctgggtttgacgtgtctagggcacgcatctcgatgccatcttcacacacattgcagaggggttagtatagaacaaatttgtcaatgggggcttaaggatttgagctagggattaaggtgaacgcgctcaagttctaggtgaaggctgaaattcagaattctgaatttcagattctccctagagagcttccacttggagggcctttttggagtttttaataaactattttggtcaaacttttataacaattattgtagtttagttagtgtatttcaactttcatatttggcctaagccatgattccatgattttcatggtcttcttacccatttcttcctttttacttaaatggcctaattagggttgttctagggtttcaacatttttctccttttgaatgcatgatatgatttaggcatgatccttaagataagagacttagttgagtttaagctcctaagtttttggtgtcttttgctcagttggattcacatgtgacaatgatcttgagttagcactgagaaggactttgagaattactgtggtgtt

SEQ ID NO: 47429 - DNA, 314 bp, Zea Mays
cggtttttaaaccatatcacaccttgatcgtcttccttgaaacacttggctactccagcccttatcttctctcgtatgtgcttcatacccagattatccttttgagcatcaattatcctttgcaaaatgattgactcaagctttagttgatttagagtcccttgttggattatccccaggtttagcttttccatctcttgacataaagtgttctcggaggtcttcgccataagacagtgacaggaagtcttacgactcagtgcatctgccaccacattggctttgcctgggtgataatggatctctagttcata

SEQ ID NO: 47430 - DNA, 565 bp, Zea Mays
cccaaacatcaaacaaacttttgacctacatcatgtagtctatctcatccatatctatattaaccatatttcccaaccccgataatatacactaacctcgaaacaatgagaccaagaccggaggagaaaagatcaacatcgacaaggaagggtataacagtcaaaatgaatctcgagatgaatcaggacttaaacattttggataaagtcttttccttgccataatctttcttatctcaacctgttcagtttatattccacataaatagtagctggatacctatgctctcccaatcttccactacctccaccaccaccaccagctccaccaagctacatatatgtatattactactatccataagatctaagtgttagtttagttagtagtcggtgtgatactattgtagggggaataataaggtttcattgaacctatgtgttgctaataaattatgcatcatgctgaaatttttgtttgtacatatgtgttgagacaatatgagtatacaccctttccttacaaatctcgaggacgagatttctgttaagggggtaggatttg

SEQ ID NO: 47431 - DNA, 1153 bp, Zea Mays
cacagagcaaaaattgaattttgaactttaaatttcaaactcaaagaaaaagaaaaacagaaaatataacataaaagaaaaaggaaaggagaccttacctgggccgcagacctagcattcagcccatttctgattttctccccacgcgcgcacggcccaacttcatcccgcgtgcgctgacagcacgggcccgcgagtcagcctctccttctctcgacgctagcggactcctccggtcgccgccctacgggccccgtctgtctgccgttgtgctatcctccccactcgcgctcgctgtttcccgtctctggcgtgtggggcccggggcacagaatgtcgtctcctccacgcccgccattaccgcgtggctcaagcgcaacaacccgcgcgacttctctcggcgtcacgcgctcggtaccgaaccacccggcctatatgacgtggtgcggaccgccatccctggtctacctggcgacccgcaagaagtttcagctccgttgagtgttagtcgtcgctgcgagagagtagcgaggagaggagtgccgccgccggctaaatccgtcctgcggaaaagtccggccgtggcaaagcgtccagagtggtcgggggcaactcccgaagctgtccgtgggcgtatcagggagagctggtcgaggaagcggcctgaattgctcatcggacttcattcctccgccgctatccgcctcacgttgcggccggcgtcaccgaggcatcgatcaccggtaatcagcccatccttgtcttcgttatgcaatgcgcattgtgtagctgcgatgaattggaaaacgggggggaatgcgtgattggtgtccgtcggtcataggtccgccgtcgtccgctcgggcggcgccgccgcgggctagttggttctggcacgcgaaggcgtgggggtgctcgcgaccgtcgatccggtcagtgacgactctgattagatcttcgcgtaccgcttcgcggagttactggtggccgtcggatggtgatcgggcgggtgtcgagcgcctcggtcatttggtgatccagtccgttgatcgggcatccgagggttaaaaaccgtgcgcgggtgtataatagcggagatctaatcttaaccgtagatgtaggatcgtgcggctcacaacgcatgatacccctt

SEQ ID NO: 47432 - DNA, 276 bp, Zea Mays
acatcagctggcctctagacatgaaggaagcagcagtggaagcaacgatcccatagaggatttgtaggccagagtggagcgactcaggtatgaactacgccactggtgtagagagcgtgcacgcaatagccgccgcattgctaaactattagcagaagttaatcacctgcagcaggaaattacagaacgcaatatggccattgactaggccgtaaactcgcactctttcgcctaggattgtggagccaaagctctagctcaattagtagaacttag

SEQ ID NO: 47433 - DNA, 456 bp, Zea Mays
ctcacggtcgtgacactgtctaggcgagggctgatcgagcactggcgcaggtatttttgtctctatctctttttttgttgaaaatttttgttgtctttgtagatgatgaatgaagaagaagtcgaggacttcgccaatcttgacagctcgatgacccagacagatgacgcggaggcgggagatgaagggcactcagcgcctcaagctggccctagtgaagaccatgcagcagcgtctgctccggcgcaggtagaagggacacattagggttgttggatttctttttgtgatactggaggtcagtttctgtgcaggctccgacatccgggcctgcgcgagcaacccctgatgatgttgacactaatattttaatgactgcgaatgcaacgccttttaatggaaatgtgtctgagggttctgaacctaggtcatggtcctcggacggggatgattttg

SEQ ID NO: 47434 - DNA, 840 bp, Zea Mays
gtcttggaccattgctgaccaaagtctgtatgcccaaggttcgaccggaattggtgtggcgtgaggtctcctctcatggcgcgacgttcgaaaggtcggggccaccgggcggtcgcaaggcagtgccaaaaagcgtcgccactgcacgcggggcataaggcctaaggttccctccgcaccggcagcgggtgcacctgtccaaagtcctctttcaccgaagtcggttgaggtgtaagccacccccagctcctggaagaggttgctacggattttcctcatggttgtgttctcgagcggtctgaggcgcttgtcagagaggaattcagactccaacactgtgctttgttcgttgtggtcactggttcgcgacctcagtgaatgctcttgcagcggtggcagcagctgggttcggtttgctggagaactcctcattacatcgttctttccaggaggacatcgtgttgatctttgactcggagcgcatatcaaacatggttaacggtgttgtgctcaactcgccttcaggttcgttcaagttcatcaggtggtctaggcttgctcatgcagatatagttacgttcccctcccttgtcatggttgagttcagaggggtctcggttcatgcttagggtctgattactgctcagaacctgctgcgagatcactttgttgaggtggagcttcatcctgactctatcaaccgcctcgattttttctgctaggggtggttcccgccggggctcttgccgatcaaccggacgcagagacgggagtaggaacacctccatgaacgaccgctgcggaacccgacaaacgacctctccaggactcgccgctgaa

SEQ ID NO: 47435 - DNA, 444 bp, Zea Mays
gctcaatatgctacttgatggaatacatatatgttacaaaactgcaaataaagaaaaggcagagaatgcaaagaaaagacaaaaagaaaaccctcaactaaaagggaaacacacaccaaactcccctcgcaaatgtgcaaaagtggtctgatcaaggtgttttgtgaggatatctacaagcttcatgtgggtatcaacatggcaaagatcgatgtctgctttctcataatgatctctgagaaaataaaagtggacattgatgtgattggtcttagaatgcaacacaggatttttggcaacactaatggcactagtgctatcacaaagcaaaggcacatgcgaaaactcgaatccaaaatcccgcaaagtggccatcatccaaagcaactaagagcaacatatagtagcagcaacatgctcagcctatgtggtaaactgagcaac

SEQ ID NO: 47436 - DNA, 306 bp, Zea Mays
ttacaaagttcaacacaaagagtagagtgtgatattctgtataagccgaggtgaatatggattatgggtatcataggtgaagatagtgaagaatggacattgactaagtgggacttaatgtgtttggcttggagacagctgatcgaactgagggcgaaggccagaaggacttcaaggtaccaaaagcaagggagaaggtcaagaggactgaggtacctaaagccaaggtgaagaagaggttctgcaagaggtcaaggttgatcaagctggaagaggcatagtgcattgaagaccacgacatatgga

SEQ ID NO: 47437 - DNA, 427 bp, Zea Mays
cagaaagggaggaagagaagggaaaacttactaggtcactcaaccacacttggttgaacgacagagggccgctctcatctagagaatccgacgtaacccccatcataatagcaaggacgcgggccacgagctcctccttctccaggttcacggtggagtggcggtcataatcgttatcatcagtgaactgtcacatcgtcctctggtgggccgcgagcggctgaaggcaccgctgcatgaaggtgcgaatcaccctctcaccagaaaggccccatccacgctgcttggtgatggcatctagcatatagtcaatcttcaactttaacctcttctccacgttgtaagtccactcgggcttagccaccaagatccgaccggtgaacactggcgcactcccctcgaggttccaaacatagaaccacttgcg

SEQ ID NO: 47438 - DNA, 810 bp, Zea Mays
ggtggacgtggtgagggttgcgatggatggcgaccggattatgcaccgacggctcgtcatgagactgggtcgggacacggggtggctcattggaagaggggaccgatgaaccaggctgcacacgtcgctggtagatacgagcaggatcgacaaaggtggtcgaagaggtggggtcgaaggcgatggggccgcgcttggcgtggaagagggcgtcaggaccgagggtagggaaagagaggggacgtcgacaggaccagcatcaaggaggaaatcaaggtcggtaggtggggtggagctaggaaggggaaacaccctcgtcgaacaccacgtgatgtgagatgatgacatggtgggtggtgagattgaggcactggtaccccttgtgatcggtggagtacccgaggaaaagacaatgagtggagcacgacactagcttatggagcgcggtggcagagatgttgggatagcaggcacacctgaagacgcaaagatgctcgtatgagggggaggccccgaaaaggacggagtgcggagtgggggcacagatggccttcatagggagacgattcaagaggtgggtggcagtgtggagaccctcaacccagtagcaagcaagaagggaggctgaaaaagtatggtgaggatgatgttggtaatggtgcgaatcatacgctcggccttgacgggaggtgtaaggccacaacgtccacagttgcacgccaagcgagagaaagaaggcacaagatgtggagttatcaaagtaccgctcgttgtcgcactgaagacctcggatggtgcaaccaaactgag

SEQ ID NO: 47439 - DNA, 408 bp, Zea Mays
caaagggcctgctgccttcaaatgactagctttgatcctctggcaggtgtcacactcggatatgtacttggcaatctcccttttcattctggtccaccaatataaggatctaagatcatgatacattttgttgctaccagggtgcatggagaatttggaaaggtgagcttcatccaatatcttctttctaagctcagggtcattgggaacaaccaatcgatctccaaaccataaaattcccttgctgtcctgacggaagcacttgtatttctctgccttctgctcgatcatttccttgataacctgaacacccttgtcatcaatctgggccctgaatatctgctcttgtaatgtgggctccaccgagatatagtttaagtcaccagaggatacaacctccaggttcaa

SEQ ID NO: 47440 - DNA, 621 bp, Zea Mays
cttcttcccatcatgccatgatgtgtgggtggtaaggaggtccgcgcgtgccaggacctcgggctagagttgccctttgactttgcgtcaaggaggtggtgcacatggctatcgatgactagtggttggagctcgtcgctacagatggcgagcacgcggatgagatcaaacctagcctcgtttttagatgtaaacatagggttcaaagttaattacccagtaatatcgctcgtcataaagaaataacaattcattttcctcctattgccctccttgtcttgcagacgtcttcttcccatcaggccatgccacacaggcggtagagaggcttgcacgtgccaggacctctagctagagctgccatccgactatgcgtcgaggaggtggtgcacatggctatcgatgactagcggttggagctcgtcgctagagatggcgagcacgaggacacgatcaaacctagcctcgtttttagatgtaaacgtatggttcgaagttaattacccaacaatatcactcgtcataaagaaataacaattcattttcctcccgttgccctcgttgtcttgcagacgtcttcttcccattaggccatgccacacgggcggcaaagaggctcgc

SEQ ID NO: 47441 - DNA, 1158 bp, Zea Mays
gcacaactcctaaaggtcccgcttcaataagaacagaagaagcacttgcagtgaccaattctcttgcatcctcaattttctcgcaagaagcttcgatagaagtaggagttggcattttcacggattccaaaacaacatccaaaacactagccatcctcctcctcctcagagtcgttgttgcagtagttgatagcttcggcaaccctgtcacagttggcggactcagcagtttcggctgttcttctgctgttctctttggtcctagctcttttaccggatcgacactagcttcgactagcatagcaggaactgtttccgtagctaaggggatggcttcggcactttcaataaacttcaccttctctatcgtaggcacttcagtagtcttttctaaggaatgtagcttcggcctacgagtcaggaccttagctctcttcggcttctgtgcaccgaaagaggtcgaagctactatttttctctttaacccttgttttcgggcagggaagcaatagtcaggataaacaaacccaattacatcaaaaactctattcagtctctttttccctcgagcgctgaaggaaatgatcatggcttcgtcctctgccttcgtgtaggctcccagcaactcatcactggttgtctcaacagcctctgccaatcatcatttggctcgtcaaattggcttctataccggaaggtgtatcttagataactagaccacattggctggagcgagcagcagtttctttcagcatctcccaggcattcacaagaggccataccttgtaagcaatgtgttcctataccaaatccctagtaccgatgtaagtgcacatggtgttgaaagccattaaacacgcttgcacttcattcccaattgcaatggacatccctctaatgtcgaagtgtgaccacatgggacgctgaataatgcccctcatatcttccctttcactcagatcattcttcacataaaaccatttcactcagatcattcttcacataaaaccattgcttcatccaagagcccggccatttctttcgagatgttggcacgggataacttgcatcagagcggggcacgaagttgtaacacccgaagttgttatggtactgttccttcccagtagcctttgtcaggtaaaataattcatggat

SEQ ID NO: 47442 - DNA, 568 bp, Zea Mays
tgacaacaatggtggcagcgtcttagagtacgttgttgcctcctccatgtccatctcctccaccttgctattgtggtggaggatctcctctttgaagtggtggaggtggtgggttgatggagtcatctccttcgacactgtcttgtgtcccttgcaagggtggcgggtgggaactgtctttcgccgccgttagggttagcagctcttccagtcactagcaacaactaggcgatggggcctgtttaattagggttaggcaaaggctaataatgttggcttaatacaccagccccttaatcctttttatatagcgcttgtgtgatcggtggctacaaccatggttagggtggccccccgaacagggcgcatatttaagatcgaggaatcaggattcaccatccggaatagaagcttttcttaccctaatctttcttaccccaacctacccacccaatatggggttggacaaaaaatcttttggtattaaaaccaattagaaatctctactacttcttaagaatagagtgtaggcgtgcaccgttctgcctctgccctctccccccgtccc

SEQ ID NO: 47443 - DNA, 324 bp, Zea Mays
gttctgcctctgccccgccccgattgagtcctcgtccgagctccgtgtgcgggcgccagcgccatgcggttaaggatagagaaaaacccgcccacggcatgccatgtctgcccgtggagaagaaccaccctgtggtcctatgcacgacgtgctccacattcccatgcatggcggcatgcggcagtctagggaaacggtttcctaaacgtgtagccatgtggcatttttcttattgcgtgggatcttgtgtggctgggaccatgtggctccttgtgtggctccgagatcagccaataaaattgcgtcacatcatttacatccgag

SEQ ID NO: 47444 - DNA, 556 bp, Zea Mays
ctgggacacatgaaacacattgtgaatatcggacatggactctggtaattcaagacggtatgctgcgggtcccactctaccaatgatgggataggggccgacgaatcgcggtgctagctttcctttcacttggaaccttctgacaccacgcatcggggagaccttgaggtagacaaagtctccttcctcaaatctgagttctctccgcctgttgtccgcataacttttctgccgactttgagcttcaagtaatcttttgcggatcagggtaactttctcttcagcctctttaacaaaggcaggcccttccagtgtcttttcccctacgttagaccacatgagaggggtctggcattttcgtctatataatgcttcgaacggtgacatcttgatactgacctgatggctattgttatacgagaactccgcataaggcaaactggattcccagtttctatcgaatgttaacacacaggctcttaataaatcttcgaggacctttttgaccctttctgtctgaccatctatctgagggtgataggcggtgctgaagtct

SEQ ID NO: 47445 - DNA, 1462 bp, Zea Mays
aggaagggaggaggaattgatctacctgccaatccacacaaccagagggtacttagacaacaacaacaagcagatatgaatcctccaaatcctccaccagccggaactgatccagtggttgcagatgcaaatgctgcaacaaattgctgatactatggcaaatatacatgcgcaaatgcggtaggaacgccaagagatgcgccaggaaaggcaagatatgcaggaggagatgcgtcaagaaagaatggggcgatagcagcaacctccattgccaccaccgccaccaccacttccaccctgggacaagcactgggaatttatgagccacaagccgcctacctttgccagctctccagatcctctacacgccgatgactggttgatgtcagtagagaagatgctaaacattgcccaatgctccgaccgggagaaggttctctatgcttctggtcgtctgactggtcctgctgctgattggtgggattcttatactgctgcccatgacgctgctgatactatcacttgggttgaattcaccacacagttcagaaattaccacatacctgctggactgatgaagattaaaaagaaggaatttctatcaataaattagggcagcatttcagttagtgagtaccgtgacaaattcattcagctatcatggtatgctcctgatgaggtggctgatgatgagagaaagcaagagcacttcattgaaggactcaatgggccagtacaatatgcactggttgctcataccttcccatcatttcagaggctgcttaacaaagctctagctattgaacacaagtgtgttcaactgggtgacatgaagaggaaggccgttacccaggggcagggtagcagcagtattcgtcctcgctacgttccgccctagggtacaccagctcgtccaagaggaggaccgtgcccagctcagtacgctccacaggggactccatagacacccacactcgtcaggctgcccccactggcaccccggcgaggcctataggacagaggataggccctacatgcttcaagtgcagtcagattgggcaatatgcaaatgcttgtccggtggggatttccagcacactagctccaaacaagcaaccgactcctggcaagggattcaacattggcagagttaatcaagtcagtgctaaggccactgttgacggagaggacatcgctatcggtatgttttatattaatgcaattccagcagcattattatttgattctggagctacgcatttgtttatttctgctcgatttgccaccaccaatgaattaccacttcaaaatatgaaaacaccaatggtagtaagtacacctaaaggacctgttgaagcaaactatatgacatagattaacactgacaattatgggaagggaattccggtctacacctatagtattagaaggaagcagtatagatctgatacttgggatgtcc

SEQ ID NO: 47446 - DNA, 383 bp, Zea Mays
caatcttccaaaggagcatcaggtacgtcgtacgcatcaggccagcagtcggccgatgttgatcaaatcaatgctcaccgtacgcactcttttccgtttgattcgccgtcgactgattggtggagctgacgaggcaggtgccaccatcgttggagctgaccaggcaggtgctgccatccctggaccttcaccatcgcacagaagctgcacacaaaatttgagttcctgcacaggtaccgaaaagcaggtgtcggagttgctcccttgcttttatgtattagcaaattatctttttttaccatctgaccattagacaaaatggtgtgccatgatgctaatgagaaaatatggtcgttgtattgtatttatttacaacctttaca

SEQ ID NO: 47447 - DNA, 623 bp, Zea Mays
tgcggtatccaatcataggggccttcgtatcctttcggtatgcaaaattgtagcatccgaagttcttgtggagaccatctgctctcgccttggtcttgtaatggagttcatggaccctgcaaaatccttcatcattagcacttcttccctggcttcgaagagcccatatgtacacgctaagcctgactatagcgtttggagtcagttgatgaagatagattttaaatttcttcgaaacttcaccgatcatttcatatagagggaaccgaagccctgctctaaagaagctcttaaaaacaacaacttcatcatcccttggctctagaaccacttcgtcgctagcgaaccttaactactcatcatcatttttccaaaatatccaagcttcttcattaaaactaaatcttctgtctacatagtggattttccaaattcaatatggctatggctgctcggactcaagatgccatcatcctcttcgtcatcactagcagcttcggcaatagtatgttcagcttcggcaataacgtcatccttctcgggaatagactcttctccctcttgaacaaccaaccaagagcgcctcattatttctgagattggggatgtctcagttgcctcag

SEQ ID NO: 47448 - DNA, 682 bp, Zea Mays
caacaaatcatcagtagtcacctcaatgacctcaagcctttcgtcatctagctccccaaactggcttctatagcggtatgtatacttcaaataaactagaccaccttcgcttgaactgtcagtggtctccttcaacatttcccactcattgacaagggtcataccttaaaagctctgttctcttggaccaagtctctggtgctaatgtaactgcacacagtgttaaacgccactaggcaggcttgtgccttatcactattcacaatcgagagcctttgaatgccaaatcgtgattgtatcatatgctgaattatatctttcatatcctccctctcaatcaaataattcttaacataaaaccattgcctcatccaagatcatggccattacttccgaaacgttggcacatggcgtctggcatcagagcggtatacgaaggaataacaaccaaagttgttgtggtactgttccttccccattgccttcgtctggtaagataattcgtgtatattgcagaagcagtcgcgtctagttccaacccttgactcctcattgcccaaataaaaaccccaattttaatcaaggcttcgggggtaagctgatgaaggtatatctcgaaccttttaagcacttcgactagcaccttatgcagaggaaaccgaagaccagccttcataaagcc

SEQ ID NO: 47449 - DNA, 475 bp, Zea Mays
ctcaaccatactattgtccaagtggttaatctttctctctggcgttgatggtgtagttgctatgacctcaactttctccttagtgattgtggttagtgacattgtccttttggcactagatcactccatgccattaggcaaacaagctcattccaaggatcacgtcaattccttttgactccagtatgatgggattagcaggaaagtataccccttatttttgtgctaacttttggacacataacatccatattcatctttacacaaggtgactttactagcatggtatttttcatagtgcaagtggtgatgctatgttttgttacaaggcaaacattgataaaagaatgagatgcactagtatcgaacaaaactatagtatagtgtgagttgatgaggaacatattaagcatgacaacctaagccaactcagtagtctccatcttcacttggttctctcttctcaggtttatgg

SEQ ID NO: 47450 - DNA, 359 bp, Zea Mays
ggcgtctataattaaaatttcatccaagttgctattgttcgctcgtacgtcgtcacatccttgcattgcaaccggtggtgtgtacatgaattaacttgcggtatcgttgcacgacgcttttggtgcctgtgccttgtattgtaccgtgtttctctgtcctactactattcggctactctctcagtctctcttgccagcttcaaagtgtctgaaacgaaacgatcggcctgcgaccgtccacgatgacggcagcgagatcttctttcccatccgcgccctaggccaaccgatcatcctcctcgacgtcaggcgcgtatgtatgatcatccatggctgcaggcagccacagccaaagcgaa

SEQ ID NO: 47451 - DNA, 620 bp, Zea Mays
atcggctgcccattaagtccgatttcagacctttcaagcacaaagctagaacatttcgtccagacctactcccacgaataaaggacaaaattcaccgactgttagaagctaattttattagaccttgcaaatacgtagagtgggtctccaatattgtgccggtggagaagaaagaatcaggtaagctcagagtatgcattgattttcgcaatttgaatagagcaactcctaaagatgaatatcccatgcccatagccaacacgttgatcaataatgcatcaggaaatagaattattagctttcttgatagtaatgtcggatataatcagattttcatggccgaagaagatgcgtctaaaacggcctttatatgtccaggcttcattggtttatttgagtgggttgtcatgacatttggtctaaaaaatgttggtactacttatcagaggactatgaatttgatctttcacgaactgttgggaaatactatggtagtctacattgatgatattgtagtgaaatcggctgagtttagttctcatatagccgatttgtgcaaagcctttgataaaatgtgtcggtatggtctgaaaataaacccacgtaaatgtgcttttgca

SEQ ID NO: 47452 - DNA, 448 bp, Zea Mays
acgaatgtatcccttatcaagcaacgtctgtacctggcgctaaatctctttcgtctcatccggatttgtacggtacggtgcgcggttcggaagctgtgcgccggggatgaggtcgatctagtgctcaatgccacgaagcggtgggagacccggtggtaagtctttgggaaagacatcagcatactcctacaaaaggttagcaaccacagggggaatacccaaagatggtgcatcatcaagtgaaatgaggacactagagcatacaagtgcatagcatggcaaatgagcaccgtgtagatcatcaaaatcagcacgtgtagcaagtaaaacaggagccttcaacttgatttcagaaggaacagagggtgatggatcaagttgtttagcagttatagtagctcgggcaagatcatctttaacaatttgttcaggtgtcattggatgtata

SEQ ID NO: 47453 - DNA, 293 bp, Zea Mays
atgatttacactaaaattcatacccatttacgatgttttggttcacgttttacgctgaaatccgcctgagctcccacgcacgattagctctatatcttctgttctgatatatgcggtaacttccagcttcgtgggcgcgctaatcacggtgatacgtggacccacatgaacgaaccaatgaaaagtttgttgccgctttcctggtatgcaagtttggaccattaaatatgctagcataaacacgagtaggaaccaactacccgaccagcgaacacgacgttggcccaccttcg

SEQ ID NO: 47454 - DNA, 779 bp, Zea Mays
ggaatcgacctagaatccatcaaacataggcctagaaagttcaattcgatcatgtcgtggtagttgcaattagggcgaggctagctctccactgcacttgtgtacaagagtaggtttggagttcatggtgctagtgtgtgtaaaattgtagatctattgcatgccataatctattgtcggtaagagggtgtggggtattatgcacactatagcccaaacctctataaaaatttgtgtgttaagctcttgatgtcatgatcgcatagacgtactctatgaggctaatacatgctccatgctcgccaagatattatttatttagtattcttgataccctagtgtctccattgacatttggcatttttcatggggagcttggatactttagtagggttctgctcgcatgacatctcaattttctctccttgtggaccaaagctctcaaactctagctccaataactctaactgtgacccccgatactgacaccatcaatttctagttgtcttgtcccccactacctcatgtagagggcacattttagttggtgcacaaaacgcttcactgatagagtctgtctcttcttatgcctcttcaaggacacactgcccataaagagtgttgcatcatgaatctctactagcacacaaagatcatgatcatgcatgacaccacacatcgctagcttcaggctcatagggaggaagtctctaaactttaggggtcctccctataacatcaaccaagttgccaccacctacgccatgttagagacaaac

SEQ ID NO: 47455 - DNA, 770 bp, Zea Mays
ttgctcaatctttattcggcgttgcgcttgcgcatggagatcgatacacacgcctaatgcgttaatcataataattaggagtcccaaagagcgcgagcacattctaattcagataagaagatgccttatgcagaaacactcccaataggagtcttgtcaaatactgggccagagttatgtcaactatgccacctggcaatgtctgaccttgctgcacaaaaaaggtggagtatacgttaatcataatatgtaaacatgaaatgcacgctatcaagacagaaaatatatataagtcaagcttaaatactaacagtattaggtgtaagagattcatcagcccgaagaacctcatcaatcaactctccaaatgtagaagctagattggactgctttgtaccaatattattcaaacattgcttgatagtggcaaatattttgccaacctctaagtcataataaatcaacttagcttggaacttctggcgttgatgtacaggaagcatctgaatcttatttgccatcaggtcttgcataagaggcagttggatgtttatatttggaagtcgaccatgttgatttgggtcttcatcaactgtttctggcctcattagagactgaagtaaaaaaatataataacgatagaataagtatggtaaagaaacagacaaacaaagaacatagtgagtatgtgatctaacctcaagctggccagtagatggcgattttgagacataacatgtctcactgctcctccgaaactgatgaaaccg

SEQ ID NO: 47456 - DNA, 395 bp, Zea Mays
aagccatctgccatgggaagagagtcatgattatgcacatgccctttttttaactggttattttattcattacatcaagccattacatgacacaacaccctgctaccacaagctcatcacaaacgagtgctatctagggtactcccgaactccttctctaaggtgtccccaaattccttgagaaggtcatcaaggctggccagggacatctcttcggtgtctgatgggttccttggagggttttcttccttctgctcagtctgacatccttgacttttggtcttcttgcggattttccttgcgggggcgagcttcttcagtttcttgtcatagtccatttttagggtgcggtaagcttcacgggtattggtctcttccccttcagccattgagag

SEQ ID NO: 47457 - DNA, 581 bp, Zea Mays
gggcaccaagtaccctatagacgatattgttgaggacaagccttggtttcttcatattccaatcaatcgatctgggacaaaaacaaaacaagctgctactggtttggtaaaaccaggacttgttaactacaaggataatcctgtcccgccacactatgctgtggtccaagttttagagatcacagacagtggttgtgaagattgggagatagactttctagttgaggggatcataactttgtaggaggcaatgaacgagttggtcctttggcatcgacgcgacatcaagttgggtgatgagccgatcttaagtcgtctatcacgtcataagtcaccaacgccgaattcaacaccaatgcaacagaaagatagttcgatcattccataccccatggtgcaggaaaatatagcaccgatctccaaaaaatcgttgaaacaatcatatcatctcttgcgaaggaactcgacgagggggacgtagacaaaattgttcctcagaatgtcgacgctaacatcaaaaaggaagcaaaggttgacaccaatgttgaagggccaactacttcaaagaaaattcataagca

SEQ ID NO: 47458 - DNA, 273 bp, Zea Mays
aacttcagctaaggcagtggaattcatacaagacataatattcaggtttggaataccgaatagcatcataaccgacctgggatccaacttcacaagctcagagttcttcgatttctgcgagcaaaagagcatttagatcaaatatgcctcggtggcacacccaagagccaacgggcaggtagaaagagccaacgggatgatattggaggcgctcagaaagaaagtcttcgacaagaatgaaaagttcgcaggaaagtggatcagagagctgtc

SEQ ID NO: 47459 - DNA, 1098 bp, Zea Mays
cgggtagtgcttgctcctcgtcggcgattggcccttcgagccctcggtacgccgtccagatccgaactccgttgtggtttctattaggttttagttgcttcatttgttcgatctgtgtggttctagggtttgtggtgtgcgaatattgggcatagaacctgaacgacggtttcgatctgtgtggttctagggttatgttgcgcgaatattggttctagggtatgtagatgctagcggttctaatttgtggcaggtctggtcatgttgtgctttttgttgttcaattgattcatctggaaactaaaaaaagaacacttcattacatatcatattggcacgaaaatgaaacaatggtaaccagggtagtaccgtcgtctgaaaatgtcgtcattgtacacagggatgtctgcaaagtagcattgcacaagcctagcataacctgaagacctatcccgatgaataatacgtctacctggaactgatcctctatgcacatgtagcttttcttcctcgtctgcaacgttagatgcatgaagcatgtgtaccacttgttcatcctcgtacatgcgtttcaaacgttggtgccacagattagatgaagaagccatcttgtcagtaggatagctgcaacctaaaaaccaataatgtgatggtgcaataaacgtcaggctcccatgtatcaatagacgtgttatgctttgttaatttgtattgaacacgtacacaagcgattgtattttggatgatgcaaactgcaagaacaataacctacatattaggccgaattgtaatgattaccctaaacctcacctctgcaaaccgcttgtgttcaattaccaaatccgcgaaatttcttgtccacggttgttggaagagttgacccacaaatcgaagctagttgggcaaccctgcatttggacttgggatcaatttgattgaagtgtagttgcaaacagtaatttgtgggagaccagtgtgcggccagcgccagatccggcgagctaccgacatggcgcatgacgagaccggctacagcaagaacgagtcgtacctcgatggcgatgatggagaatacggggagcacgtcggagctcggcc

SEQ ID NO: 47460 - DNA, 380 bp, Zea Mays
ccgagatggccgggaggcagcaccagctcgtgggtggtgcgagtttggagatgcgccgtgggaggaagacataataccttgacatcccactcaaggatagcatcaaaggatggcgcttggagtggtttattgtagaaaatcatggcaagtccctccccctcggtcagggagacagccggatgttcgcgatccaagttggattgaatcccccacagacttggagataacagaggccaggattctgcttgctgaggtttgtttgctaaaggagagaggtctgactgcagaagctgtggttgtagattttgttttcaagaatattcagccactgaaggacagagcgtacccggcttatttgtatagtggtgtcactgattcca

SEQ ID NO: 47461 - DNA, 585 bp, Zea Mays
cgccttccactcatgatttacgagtattaggtctgaaccttactcatgatctacgggccctaggtctaagccccactcataacctacgggctctaggtccaagtcctcttacgtcatacgaagcacgcaaggcgacaaagggaagacacaaggttaggctacaaaaaccgagggtcgacgtaggcagagacagacagacggagtaatgatgacgctcggactcccgtcgtcggcacacttcaccaacggtcttgaagaggcacgatgatagaattatacgggacggataacgacacacgaggagacatttaccgagggataactattttgttttgcaacgcaacaatcacttccaagagaagcgattcgtaaccgatcccccagtctatcaaaggaggagggtcgacccgacgagaatgggagaccaacccgagaaccaacactcgatacgtagatcctctagtagagcaacccttaaagacccaaaatcttttcctctttcgcccgcgtgtaaccctactacgagcaatcaagtgctggtagcgcatgccaccaaggactgaaagtagagacgttcaaccttaa

SEQ ID NO: 47462 - DNA, 821 bp, Zea Mays
cggagaaccgagctccgacgagctcataccggctggatcactcgatgactggtgccctactttggttgagacctaattcaagccctaacaagagttttccctcaattaatttcactaacggagctctaactcgctctgtccacggtgacagcgggcacaacggacaacacgacgtggtcccggcgatctaagaggtgctagcctaattggcggggtcagggagcatctgggacacataagaacactgaaacgaaagagcagagggcatgagaggacctgagacgagctagccacggcgaggcctctttcacggtggcggaaagcagatttgagggaaatcagaaattgacgagctctagtgagcaattggaggcacgacttggtggcttggtgcttgactaccctacggacccattggtgtgctcaatttatagtgtgcttgagcagtggcctccaattttggattggcgcgctggcggtcggagaggaagaggggtactggcgcacacgattggtggccacacccgtggcaacctcaccggcgatcactagataagctattacgagtcacggcggcgtggttaaagtgctgaggcacgtggcacaagaccgcaaggtgtctaactccggcgagggtagatttcaagcaatcggggcagagcggacacgacggcgggacgaacagtgccttaagctcatccggagggggaagatcttttcaccgtgacacgttatctgggcaccgatgagcatgaatcacctcgctggtgtgaatccagacgcaggagtcgccggcggcaaggtgcactgcaccatcgatc

SEQ ID NO: 47463 - DNA, 620 bp, Zea Mays
caatgttgtgtggaaggagcaggtcatcataataggggatctgagtcatgcccaacttatgtgtccacatatggtgctcaccatatccaataaaaccaccttctggattggccacgagaccatctatctgttgacgaactttggcaccagtcatcattgcaggtgggcagtctgtcactacgacacctttcgtgaagttcttgatgtctagtcagaatggatggtcaggagggagaaattgttgatgtttatcgaacgatgaatatttgccaaccttcttcaaccaaatgaacctaagagcttccttgcaaactgggcatgggaacttactgtgaacacaccaggcacaaaatagcccatacgtcggtaagtcatgtatggagtactggtaccaaacatgcattttgaagtttgtcttcctagctcggtcatacgtccatacctcttcctcccaagcacggaccaattcatcaatcaaaggctccatgtacacgcccattttattccctagatgtccaggaattatcaacgacacgaatatgttttatctttgaaagcatacgccggggggagattgatgggaataacaaacatgggccaacatgtgtacggggcagcag

SEQ ID NO: 47464 - DNA, 1435 bp, Zea Mays
ttacctgttttccatttcaaattctaatattacctgttttccatttcgaatattagtttgtgtgaagctatcaaatattagtaatgacgatcatttttttgccaagtctaaaattacatattttccatttgaatatgtgtgcatctgcaggtggaccgtgtgcatcagttggttaccctcataacttcagtttttgataaagtgctgcactgccttggttatcctccatccagctagggtgcttattggttggtgatggacgcacctggcctacaagatcttgctgattccaggaataagacatgtctcatcttcatgcttagttgtcgcaagttcatttgtacgctcccttaccataaaaaatattttagaaatccattacattgtaatgtagattctatgattaaaacaacactatatgtctgctctgattattttgacaggactgtgtgtttagagttttgcagaatggtcttgctatcgatgtggagtcacataatcagattaaggagaggaagaacaaggctaataagatctgtggtgtgaacaaggtatgcacagttccactcattagaacacaatcaaattaaggagggaagaacagagctaataagatctgtggtgtgaacaaggtatgcacatttccactcattagactttgttggaataaaagttgttactatttcttgcatgcacatgtcttcacgatgcacattttttcagattcgtcatgctattatattatatttgtagagtgaactaccctgttactgcaagcaattatatattcagatatttctatctcttctacgtgtgtgtatatatacatgtataaatcaacaatcttctatatctgtgtaaacatatcagacaactggctcgaattgcaacaaggtgaatcgtgcagtctgcaagttctattcgaaagaggtatgttctatccaacaaacaccatgtccaaaaccacatatgatgttgtatatccacttgcgaaaccaaagaaagaggccccatggtttatcagtctattgacattttcattttcaattcaaatgcttctcctatgatcgtttgttatgatgttcaactaggtgctaaatacactgattcatataaatacaatgattcatataaatacaatgattcgtatggtggtgcatacaaagagtttgttttacaaattatctgacttattggacgataatacacgcatgctatgatttttattttatgttttttatctatagattacaaggtggagactggagagcaagaataataactctttcgaatcatgtaaatgttaccgtaaatctaatatttatgctcttttcccctcatgcttatggacaataattcacacattttaatttattctgttttacctactttttgtagagcttaccggattgtttagttctctttaggggtaccc

SEQ ID NO: 47465 - DNA, 408 bp, Zea Mays
attgtttaaactttttaagaggtacaattttttttagtgttatatctggccctacccttagaaagatcctagccccgccactgagttcagaggtagagttgcagttgcagatattccaagtactagcaactaatcttatttagaactgagttaattaagacagacctcaaaacagataattgcagatattccaagtactatcgttgcaatttcgtgcctacaaatcaaacgaattccctatctaatgctactacaaaggatcacactgtcacaaaaatcatgtaatacaggaacatttcaagcagtccaatttataagtcctggaggctaaatgcacaaatcattccgtataatcaaaatactgaaatatgtactatcagattaaatttctagaaaggtacgatagtg

SEQ ID NO: 47466 - DNA, 774 bp, Zea Mays
caagaatcttgttggtaatggcaattcctcagagggtttgtgaaacttgacgaatggttgaattgtatatggcaatgttataagctatcttttagcaactttgtccttggttttctctttgtttttgggcttcaacaatgcccacccagctttcacttggaacactcgttatgctttgtgctcttgtatcaggtcccaaatgtccatattctcacaaaacaatattgtaagcaatcatcgttgtctgagcaatacctctagagttgcatagtagtcgtttaagaccgaaggaaggtctcagggggctcataatcagtactttcatttataggcattttgccaagtagtcatttgcttcaataggccaacatcgacgttgttgtatctcggtgctactaaaagttatgacatccaacattattatacatgtcttctgtggaccttggtttgatagtgaagttcgtgtgccttgtagaagcactctgaactggctttgactaattggctttggacaacccaaatgaaaatgtcaagccttattatggcgctaggggtcaattgatgaaagtatatatcatattttgccaaacataggctgcactaagaactggagtcccgcttggaagaatcttttgtacaccacaatttcacatcacaaggcttagtgtctcctcatcgccgcctaggtgtgaaagttgaatattatcaatatagccaagctttgcataaaccttaagttcatcatctttggatttagactcgtcgtccttagga

SEQ ID NO: 47467 - DNA, 751 bp, Zea Mays
gtgggtgtagggtattacgctcggggggcccaaaccactctaccctagcgttcttgtgttctttcagctcatcacgcaaatccctaggctcccctagttcacaggattaggcgggtgcaccccgccactcggccggagttttctctgcgacaacacgggttactgacgcgtccaggccttgcagactacacacgtcatctgcattcaatgaggggcgtacgtcaccagtcactagtgtgaacaagcaggcatgttgtccgtatttaatgtaggtggtttcagtgttagaggcctgcgctaagcgacgcctagcaactttcgtgatacgccttgggacatgtggtcagcgtcgcacccgacatgtgcggagagcggcaactaggagcgtatgcgaacgtggcagccccggacatccctagttggggttatggaaaagacttaaggaagtctggatccttctattaatggcttggacatgtggcgggccggacatccctagttaggatctcactcagctagggagcaggcgttgaaccgatcttttcttggttatgaggcttcagacttgagtgacttagaaacccccttttctgaggatgaaataaacaaagttattcgggcaataccttcccaaaaagctccaggacctgatggctacattggattgttctataaaaaatgctggagtattgttaagacagatttggtcaatgctctcattggattctataatcaccgcacttctaagctc

SEQ ID NO: 47468 - DNA, 395 bp, Zea Mays
cgaaagggcctcgcacggggcctcgggtcagttaccccgcaaggccatccctttgtgggccgagaaaaagctactggcgtaatggactgacctgagaaggcgacagactgaagcccaggcatcccgtcaaatcatgcgctatccaaagaaaccgtccgaatttcccgcgtgtggcgccctcaaatgttggggcggattagggatgggtcggcgatgttttcgggaaatcagtttagtcgattcactattatttaggaaacatgtgatcatgatatgtacgtatgaagtgcccaacaatcgtgtatataaggcccagggggtaccccatcattttcattcccatctacctatctcattagcttctctccatccaggagacatcgcttgtaacccac

SEQ ID NO: 47469 - DNA, 441 bp, Zea Mays
gacaagtttgtggtggtcttcattgatgatatctttgtttattccaaaaatgaagctgagcatgctgagcatctacacatcgtacttcagcgactgcgcgatcatcgtctatatgctaagctgtccaaatgtgacttctggctgaaggagataaaatttttgggccacaccatctctcaggatggggtatcagttgatcctgaaaagcacaagaagtgatggattggaaacctcctaccacagtacgacagatccgtagttttctgggattggtagggtattatcgatgatttattccggatttctccaggattgccaagccaatgactgaattattgaagaaaggagtcaagtatgattggagccagaagtgtgaggatgcctttcatacactaaggcagcatttgacaacagcacctgtgctagctcagcttgacaaca

SEQ ID NO: 47470 - DNA, 359 bp, Zea Mays
atcacatgtcctgcaaaaacaggttagacaaacacgtttctatacgttcgccactacagcagaaacctcacaggattccatgcatcatatgtatggaaattccactggaaatctcatgcggttgatcaaatcaacccaaatccgagactttcgacccgaagaagattacactcatgacgttgatctgttacgtcaatctactacttgtgtacgctgttagcctcgaaggtgattccagccggtaggggcaagtcacgcatacaacagagaaggacgaactgatctctccagtcatatccgatgtaatctacttcaaccctatcttaccaattgatctaatcaaaccgtgcatcaagtag

SEQ ID NO: 47471 - DNA, 1619 bp, Zea Mays
gatacaatgaatgacccttcccatagtggcgacaacttgtgtcgtccttcccccgttagaattcagcgaaggaccaagtctcccactgcaaaggatcagtgtcgtatggctttatcatgatagcgcctcaaggtctgctggtatctggctgactgaattactgtgttcaatcgctcttcctccagcacatcaatatcctctagtttggtagtttttgcttgagctatgctttcgaagaccagcctcggtgccccaaacatgaggtcggcgggtagcaccgcttccaaaccatagaccacgaagaacggggtatttccatgtagagctcgactaggttgagttctcaagctccaaaccacatatggcagctctctgatccactttcctgcaagcttttcatttttgttgaacactttcttcctgagtgcttccagtatcattccattggctcttttcaccttaccattggctcttggatgcgctactgatgcatacttgatctggatacttcattgttcgcagaaatcgaagaattcagagctggtgaagttggatcccaggtcggttatgatgctatttgttatcccaaacctgaatattgtgtcttgtatgaactccactgccttggttgaggttaaagaagcaataggcttgtactctatccatttggtgaacttgtcaatggcaaccagcacgtgagtatagcctccctgagctttcttgaagggtccaatcatgtccagccctcagcatgcaaatggccatgttatagggatggtctacagctgttgtgccggtaaatgttgttgctttgacaagaattggcaagcttcacacctctggactaactcggcggcatcactcttcgtcgttggccaatagaaaccagacctgaaaactttcccaaccagagttctggatgctgcgtgtactccgcactgtccggcgtggatttcatccaatagctgcttcccagtagtcgaggaaatgcacttcatgaggactcccgtcgcaccccttctgtacagcgcgtcccctatgagggtgtagtgggccgactgtcttgcgatgcgttctaccgcagccttgtcatccggttcttcttcattctttatgtacctgatgataggctctctccagtcattggggtccaactctggctgactcaagtgttgcattcttctgcctgatttgagagaatactcgggtgtgacacttcttggacgaagatcctgggtgggacctgggcccgactggatcccaccttcgacagcgtgtctgctgctgcgttgcggtctctttccacgtggtggaattccaacccttcaaatttgtcttctaattttcggatgactgcacagtacttgcccatagaatcagtcgaacaatcccaatctttatttatctggcttatgaccactagtgaatctccgtataccatcaacctcttaacacctagtacacggagatgttcaacccgtggatcagtgcttcgtattatgctgcattattttatgctgggaataatagctgaagtgcatacttgagttgttcacctccaggagcaatgaagagtatccctgcgcctcctccctgcagtttcaacgagccatcaaaat

SEQ ID NO: 47472 - DNA, 314 bp, Zea Mays
aatgcacaaataacatcacgaagtacgaggcaatcattctaggactccacaagctaagagccctcagagttcaaacctgcatcatcaagatatactcgagaatagttgcgggcaggattgagaaatattgtgcggcaagggattcagacctgctacagtatctatcaagaatgcaaagtcttgaaaggcaatttcgaggactcacagtccaccacattaatcgctccaaaaatgaagatgcagatgcgctggggaaggccacggccagaggagaccccctaccttctgatgtgctctactaggtcatcgagaca

SEQ ID NO: 47473 - DNA, 387 bp, Zea Mays
gtgggcagggctggcaggcaggaattgttgtcctcgccggctggggcgagtgtaggtgagggggagttgcgaagtctttttgagggtgaggagcttaggataatgttatttaactatagggagaagggaatcattccgaaggttgaaccgatgtaaggtgtgatgccctcgctgtaagtgtgttactatggtttgtatgaagaggctgcgcctgttgttggtctgtgcgtggatagtttcttggtgtagacttgtgcatggatgtaatgtgcttgcgtcttggcgcgcttgcacggatagtcttttgggagaagacttcgcttttgcgcacttgttgtgctagtccggctgcacccttaggcgacttttgcacggatagtcttttgg

SEQ ID NO: 47474 - DNA, 552 bp, Zea Mays
atcaagcatagcgcttatctctgcatcactagggttcaggggcacctcaaaatggacatgccgttcatcatcaggaatctccccgagcgaggcaaccaagacactaacttcttcagcagagggtcgcactctaaggcccaaactgccataagtgacaggtggattcgacacaaaaagggtgaaggctttgggaggaggcaggttccaggccgaatatgccactggggcaccaacatttgacaccttgcctctaaggatcatctcaagttggttcaccaagtctgcagagggaattcttctgttggtaacccgagttgagtcggctaggcctcgatacagataagccgggtacgccctgtctttcaacggctgaatattcttgaagacaaaatcagcaactacagcttcagcagtcagacccctctccttcagcaatccaacttcagccagcaaagcacctgcctcggctacctcctggtctgtgggggactcggtctagcttggggtgcgaacatccggctgtcttcctgaccgaggggggagagagtttcc

SEQ ID NO: 47475 - DNA, 428 bp, Zea Mays
tgaagagccaaaggttgaagaaataatgaaaatgccagaaattatgagccctccaacagaggcaaaactgccgaaggtgcaaaaggcttctgccacgactcccaagaggaggaggatggccaacatgttggatgctgtgctggagactacaaaggccttgagccctgctcctacaaagaaaattgctgaagctgccaaagcgcaagccgaagccgaagctaggcaagcagaagccgaagctgggccctcaatgcccagtgagacgaaggctgtcatgcctgaagtcgaagttgatcagcaaacttcggatgctgtcatggcaggagggcaagacacaacagaaaaggcaaaatctcctgcccctgaagccgctgccgaagatgctaattatatttatcgtcatgcttcggggaaaaagttgtccgaag

SEQ ID NO: 47476 - DNA, 292 bp, Zea Mays
ccttcacctaacagagtggtactatgtagaagcgctgcgctgcattagctttatgtcatggtatcatattaggcttgagtggtttcctacgatccatatatgtagtaatgacccactggtaagcatgaagcgggagaggaacagatctacgcactatgtgggggtgttgtgttacgtgcggctttctctcatgttaggtttgggtgatttatcatggttcatctatacacgtaatgtccccgttggtaggcaagaagtggagaaaaactgacatacgtacttcacacatgac

SEQ ID NO: 47477 - DNA, 451 bp, Zea Mays
ttcggaaagaaatgtttaatggtatagtttcaaaaacattagctaccgtatcactctttttgcatactaaattataaagggaagggtattggactttaaagggttgattttctatccaaacatcttcccagaatctaatttgttttccctctttgagaataaaagacccaagacctagaaaggtatcctttaccttcataagtcctgaccagaaatgagagtcacctggcttcctggacacttgagatatggtcttatttcttagatatttctttgtcaaaagactttgccagagtcccgtcttcattaaacaacttaaaaagccatttgctaagcaggcacttattttggatctcaatgttttgaatacctaacccaccttgttctttaggttggcaaatgatatcccatttagctaacctgtattttttcctatgttcttccccttgcc

SEQ ID NO: 47478 - DNA, 870 bp, Zea Mays
ccctcagcatcaacagcagtaccgccagaatagtcaaccgaggaagtcaattctagaggcagaataatcaggcacctcgtcttcctatcctagcaaccaaacagagcagtcaagcagccccagcgcaaggaggaggcagaggatgcttccattctggagagcaaggccattgggcaatgcattgtccaaagaaggaagctcaatagcaaacaacccctaatgccccagcaatgcagaatgtacctcagcaaggagaagacaatcgtgttcagatgcactacaaccatgggaggctaaaccatctagaggctgaagcaatccaggaaataccaggcatgatagtaggtacgtttccagtcaaatcccatcttgcagaagtgttatttgatactggagcaacacattcattcattactgcatcatgagtagaagcgcataatctcccaataacctccatgacaacactaattcaaattgattcagtcggtggaaaagtccgagctaatagtgtatgattgaatgtaagtgtggaaataagggggatagagttccccgctaacctgatagtgatgggtactcatggaatagatgttatactagggataaattggctagataagtaccaagatgttatcagctgtgataagaggacggtaaagtttgtatccccactaggagaagaagtggtgactgagctagtctcacccgagccaaagaaaggaggttgtcaccaaatggctattaatagcaacgaggccgatccactcgaggctatcaaggttgtgtcagaattttcggatgtgttccctaatgatctaccaggtatgccacctgagcggaaagttgagtttgccatagagcttattcctg

SEQ ID NO: 47479 - DNA, 419 bp, Zea Mays
atgttatatcttgattttaaacctattttataaatagtttcctaacattcttatctaaaaatggattcaaatcttggctttttagggcaccatgctggcatctatgggttggcgtgctgttaactgaggctggcctcttgctacgttagcggagatactattcgtattcgtagtagctactttggcattgggacctatgaacctcgacatcgtattagttaacaccaattcttactcatcggcgttattcgatccaacaccaagtcttgaagagtcaatgccacgcgtcagctctcttctccctatgtttccattatctcctgatttgttgttctcctcccttctccccacgaaccctaaattgcaaataaacctctatggaggccaaattgaggtcgttgatgcttgcccaaggcaac

SEQ ID NO: 47480 - DNA, 526 bp, Zea Mays
tgttgtgtagtccttatgtatgtgactgaattgtatccttggttatgtgtgttgtgagaacttgcttatgtatccctggttatgtgtgatgaatttatatccctgttgtttctattgcacttcattatgtttggttgatcatgatcctacagtttgaggtcatattcgtgattttgtatccttgcccatttttgttttcatgaacctgcactttgaggtcgcataaaaacctagagtttgaggtcacttaactagctccaccgccttcattttgaggtcaccttgcaataacaacagcagttttggtttcacaattatttccacacatgttcaaacacacaatgacatgaatctaaactgaaaacacaagcaagtgcaggttctgacaagtgcagacatattctcacacattcacttgctgaaacttaaaaacacacatgttctcacattaaactgaaaacacacatttgctacaacacataggctattgtgcgagaacacacatctactactacacattcacttg

SEQ ID NO: 47481 - DNA, 377 bp, Zea Mays
gggccgccactcggcccacctctgccacaactgctgccatgatcccacccgtcgcgtgcacaacttcagcacttcgcactgccgtgtggggcccttcgccagtgcatgcgtgggtgtttgctcctgggcactggatgacaagtggggccttggtcctgttgatcttctccccaccgtcgccaaccagggtgagcttcaacagatgcgggtgagaatcgcgccagtcgtgcggtagttagcctcctttcccctctttgccatggcatataaagtataatcggccacccttcctctcggtccacagaatcatcgcgtgagagagaggaatcgaaggagagagagaacacggggtagaaggtaatcctgtgcactgccat

SEQ ID NO: 47482 - DNA, 1149 bp, Zea Mays
atcactgccgcgtggaccccgcgtttcagtgacccgaccaatcagcgtcgttcgctgcattggctgacgggtggacctttgtgtcggactcgccccttccccgagtttgttccaatgacgcattagactcgctcgcatttgctggcattcagccaagctgactcctcctgcctaggtcccatgccctgcccctatataaatcggtcaagacatccccttcatcatcagaggtgaactagaccgagaccataccatcctgtgtggagccaagcttcgccgggagagctgaggaaggagaaatgaccgccgccgtcattgtgcacatacacccacgacgaagtccccaagtcaggcctcagcttcacctagtccttgggatggcgtgcatggacttgccgggcgcaacaggtgtgcggagcgttcggaatttcttgccgacgtgctcagatcaccgcaaagccgctcctcaacatcgacggcctcactgatgccctgaaccgaggtgagatattctccatgtagttctcctccatcttctttatgtgtagcacctcccagatcggtgttcgagtgcgggatttgaagtttgggaaaacttcagcgagggcaccgctgtctgctgtcgtcgtagagggaggaagggccgatggttgtccatctcaagcgagtgactgagattagacttgccacactcgtcagacgtggatttgatggcccagatgcatccgcaggttataacagccatagtctttttcatgagtccataggattttctcaaaatatcccaccacccgcatctattaggaatgtattaaatataagtcctagaattttgaaattagaccctagaatcttttaaaactgaacccaaggtctaggatgaactcgggttttcataaattaactccaaaaatgattttaagtataaaaataattcgataatcttataaaattcacatctttctcgtttaacaccgaattgagttgttattgaacctacgatctcgtctcgacacgcataatattattatttagtttgattccatgtttggtgtaattttatttgtattcgttatttgtttatttgtatgtattgctatgagtagaagccaggttacgaggaatttgaagcccaactttgggaagcac

SEQ ID NO: 47483 - DNA, 380 bp, Zea Mays
ctttgaacttgcatggaccgcaggttgaataggtaaaagaatagaggctcatatgcaatagtgttgggctgaagggatattgagtttctaggacaatccgatccgatttaatggtctggattaaatcgtgcgaaggggtatgcacgacctaatccacgtcgtccattactcgatcaacgaatcagattaggtcgaccgcttaccaaagcggtacgcgatacgggccgcacatcatctgagcgacggtgtagattttaaacactcgtggtacaatgtcgaccacccgatttaatttcaacgtcgtggatgctattaagcgaacagacacgcgatcttttaatcctatccgcccaattagatccaacggtcaccgattcatc

SEQ ID NO: 47484 - DNA, 363 bp, Zea Mays
cttagatccaggaggtcgtcctctcttacgtccagcaaggctagtcaaccgtaatctattctcctccaatgacaaacatgtcctactgttgtgaccatcagcaattctacacttctggcatttcctgttcattttctttgtaccttttgctcccaatttaataaccttttgttcactcccctttattgttcttcctttgggttttgagttatttggtcttgccaagcttatctcatcgactgcaaaatccagtttctgcaattcaaaagtatatattttttcagcacataatattatgcagtcccacattcagtctaataccattattacctttctggcatgatcattttgttcatggtcacc

SEQ ID NO: 47485 - DNA, 654 bp, Zea Mays
gagaaagttgccctgatccgcaaaagattacttgaagctcagagtcggcagaaaagttatgcagacaacaggcggagagaactcagatttgaggaaggagacttcgtatacctcaaggtctccccgatgcgtggtgtcaaaaggttccaaatgaaaggaaagctagcaccgcgattcgtcggcccctatcccatcattggcagagtgggacccgcaacataccgccttaaattaccagaatccatgtcagatatccacaacgtgtttcatgtatcccagctccgcaagtgcctgcaagtaccagagaaccacatcgaggcagagacaatccagattcaaaaagatctccagtaccgggaaaagccaataaagattcttgactgagcggtccgaaagacccgcaactcagaagtgagactctgtaaagttcagtggagtagagaagaagaggaagctacctgggaaagcgaggactctttgaggagggaatacccttaccttttctcgaaccccgtctgaatctcgagggcgagattcctttaagtggggtaggtttgtaacatcccaaaaattcaacccgaggtttggaaccctaatccctcccccctatttatctctccctaaactccaccccataggtcttctcatcacatg

SEQ ID NO: 47486 - DNA, 353 bp, Zea Mays
ggcggcagcatggcggactcggacgcggtggtagcctctccacgacgtgggatcgcgagggggcaggaggaagtggaggctgagaacgagcgtgatggagcttgggtttcgtgatttatacggacaaggaaagaggaagagttgctggaaggaagaggaaattatggctggagatttgatggccattgaagctgaaaaactgaagaatttagaacgccattaatcgccgggagaaatagccggcacacagtatgcgagtagcacgggcgcgagcaagcagcagggaaaggagtggctcgacggtgcgcaactttgatttatagaccgagagggagttaccggtagtaaagagg

SEQ ID NO: 47487 - DNA, 462 bp, Zea Mays
caaaaaggtcactcaagtagggagctcaaagaaaaatcaggatttccctaattcgaattttaacccctttgcaaagatcacccgcgttcatggaaattttgaattcaaaaccgtgggctcccattgacaaagttgtaataaacaaacccctctacaacatacctaaagatggcatcgaaacttgaagatttgacatgacaacatctaagatttgtcttggagttgggctgttagatagaccccacttgagtgtgccatatctttggttccattaggcaaaatcccttgaccaccacacaaaatcaatagcttgaagggaggtaaagaggttttgtgccctagacaaggcaagagcaagctcaaacaagtgactacacgcacgagaacaagggcagacacaacgccaccatgtgttcgaccatggtcggcaggccagagctcgcccaacccacgcgcgctcac

SEQ ID NO: 47488 - DNA, 403 bp, Zea Mays
aaaactttgtgaatgagatttaccccaaacgacctttgggcctcatctgagctacctaaagctaaaacaactggtgtgcaccacacctaattcattagaatcacctaggtaaatctactagttcataccccctttatattacagttcaaggaaacaatgaaatcctaaaatactccaattgtattttagctcaagttgataattagaactagtccatgcttaatcttgtcatccatccttcaaaaaccaaaacaaaatctatacttggtgccatgaaaaccattgatttcccaaacaatcaacattattgtaacctaactcaagtttcctctacaaaacacatgttagtcacactaggcttgtgtcatcatcaatcatcaaaaccactgaggcctagttgctc

SEQ ID NO: 47489 - DNA, 1184 bp, Zea Mays
ccatgggcaagttctaggttttttcgggagaagaaaaccctctccgccaccgcatatcattcgaaagcgtacagaggaggataggctcttgcgcccaggtcgcggactgtccagccctatgccgcggaccgcccgcgcctccatagagagcaccgccaggcgatacaccccctagtgtttggcacacagatcagtggcatcatactttttggtgactccactggggacaaaggtgtttagatctacaaaaattgcccccagatggtcggttccaaagatcacaacgacgtctccatcaccaacgtcatcaagccaaccatggaggcactcccggctgatgacacattccttctatgacctcataaggcgcgaggaggaggaggtgctgcaacaactcaccgaacgacgcgacaaagaggaggaggatgtgcggcgacaactcaaggaacgacttgaaaaagtgacggaaaagtacctatcatacttcatggtggattgccaccagaaaatcatcggtcaagggaagatcgatatgacatctctcctacctccacctcaggatcccattgtaagtagcccagatccatcttttgaggctttcgtggaacaacgagaggaactattaaaaaatacgtagatgaatctattaaaaatgtgtgttttcatataagaaacctactgcccctagttttccctcgcatgaatctaatatggaaccacccgtgccaaacacatcggctacaaatgggtctcccttggccctgacatcatatggtatgtcgatgcacacatttgtgtcaccatcacaaccaccgccgccaggcacgcgaccggctctagacacaatcggaccatccacgagtcatctcgaacagtccgaatatatcgcggaccgtctagcgtatttcaccggacagtcggaccctacacaagcctgcgcgtagatcacttaggtagcgccatacatagccggaccaactgagtgtaccctaggatcgttcggcccggtcgcggaccatccggccccttacgtcgtaccgtctggatacgtcacgaatcgttcgacgtgtttcgctggaacgtttgaccccgcacgtagaccacccaggtcacaccgcacaaggccagaatatccgagtacaaccctagataatttggctaggttgcggaccatccggtccctc

SEQ ID NO: 47490 - DNA, 758 bp, Zea Mays
tcgccggagttgtccattgccgttacgccgccatccgtcgtcgattgggctcggcacatcacaatttgaaatctcctgccgccggtgattcgcgcctgcggcaacgcgctaccctcgggcaggtcatggggaatcctcggggtggctctgcgtgtgctcaaggtgttgcaggggctcatacagcggctgggtcaacgcagcgcaacatccatggtaacgagcttaccttcgtattcttcgtcttctccacatcatgtggctatatcgaattggggaatactcttcagggcagacggattggaatcgccggccatggcaccaccgtggccctgaccgcgccacctgtgctgaccgggaaggaagaagggtccctcaccctcgatccagggatggacggatatcgttgatcctgggcataccgcttctagaccgttgatccagcgataaacgcttacgattagatcctgagtatccctcgcttgagtcgatctggtccattgatatcaggatgagcggatgctgttagatcgcgcgttaataaaaccccgaccgtggatctcggatcctacggtggacagaacgtaccgattcgtgttatagtcgatctaatctgggcccttggttcttgatcaagcggccccgggcacaccataccccttcgctgtgtccgagttataaaagaacccctgggatctccacgaattaacccgcagtcccaagcagttgaaagaaccttacactgaggccctggaattttt

SEQ ID NO: 47491 - DNA, 447 bp, Zea Mays
caagaaggccattctacgcaatcgaccagcaaagaaaccccgaacaaaacgatcgaataagacaacccgaaaggtgacgcagcatgcatcgcctattcatccagtaatgccagcatactttccacccacctattcatcgtctatgcattatgctgttcagatatggaatggtacgacgatgaacccatggtacatgcatactccctttgtctattcaggcggggggcacccctattttattccttttgatccattgatcaaatggtcacgggcgagaaagatgcaatccgaaacggccttcatgcattagggctctattgaatgatcaccatattggattgaaaaagccgatgacttgcatcaggcttagttcatatgcttttggttcgtcaacctccaccaaaaggcagggggcatatgttgaggacagaaattgaccgtgcggac

SEQ ID NO: 47492 - DNA, 415 bp, Zea Mays
cacgtattcaaaagtatgctaaggactaaagaaatttgaaacgtcgctttattctgtaaaaaaaacgaggattcaaaagtgatattgcaactatattttctccatccataccccaccattatgtacacgtgatggacagttgtatccattatctgatgtgacaaatagccggtcaatatataggtctttggctcttggccgtgctttgtgcgtaaatttgacaagtctgtttgtggtcacgaggacagttgtatccattatctgatgtgacaaatagccggtcaatatgtaggtctttggctcttggccgtgctttgtgcgtaaatttgacaagtctgtttgtggtcaagagtcaaactccgcctaaccggaaaaatatgtagtgcgtgcattcaaagttgacacttacagctcc

SEQ ID NO: 47493 - DNA, 570 bp, Zea Mays
tagttttccacatgatatatggaccatgacaggtagaacaagaaagcgacatgcaacaaggttcgatgaccacaaaagatatctaaagactgtatttagataaaaaaaatagacacttcacaaccgccagcattctgaaacgaagcatacacaaagcgcgtcagtcctccatcgcatcaccaggacccatgatctgtctccccactctagagcttgcagcttgcaccagaagtctcgctccctcttgaagaagatcctgcagttcttttttgctaagtcctgcccaagacgagatcaaagcaccaatgtgataaataatcccattaggggatttaatcagaatctcatcaaagcacattttatttctggctttccatatcgcccagcagatagcagatattagcacaacgtgcgtaattttatcgatcttaagatggtaatgaagccatacaaaacattgatcaatatttctacgaatataatttgtgttaaggcatttcgcaaccacaccccagataaccttagcaaccgagcatctaaagaaaaggtgatcaatagtttcatcctgtg

SEQ ID NO: 47494 - DNA, 348 bp, Zea Mays
aaattaaggaccacccatgcccatgcggatgcaggcacgagggcttgctgcttcggtggtttgtttcaggagaattgaagaaggacttggagtcatttctctgcttgtttgttggatcgtcgtcctcgtttcgcaaagagggacgcgtgctcctccttcgctgtgtgggttgtgtgcagggagtagaaagaaccggcgagcgagcgagcgctggtccctcccagtagtcccaggccatccatccatccatctggtggtgttgggacaggcgtgcgggcgcatgggcgcaccacagcacaagcacagcagcctgctctaccgcatgcgttgcccccaagctgatgccac

SEQ ID NO: 47495 - DNA, 367 bp, Zea Mays
acagccaggttatcagtggctaccatttttccctacagaaatatcacatgaacaatttaaagcctgtcagaccaatatttcctaccatttcccctctaaaggcttggttagctagagtaactagcaggtcatccctggttccagttatttctggcggtatgcaacaagttactggcaagacccaggtagataatgttgtctgcaggatgctagtcaggggactcttagtaccctcagagagagaaaaaagagcacttgtgaagaaacaatcatttcatggagtttcttgctctcccaaagaagtgggtttatctgccaagcttttacagaatcccacccaattcaactcaaaaacactagaatactc

SEQ ID NO: 47496 - DNA, 277 bp, Zea Mays
aaagctaacctgctttggaatgttttcaaatgtcgtttaggatcttcagattttttggaaaatgtctttgatctccctagcttgatgttcttccacagtgacttgcattggttagatgagccattttcaaagcaagaaattgatagtattgttgcggctcttccttctgacaaatctccgggacctgatgggtttaataccaattttatcaaaaaatgttggccgattatttctcaggacttctatgacttatgtgaccaattttaccgcggggatg

SEQ ID NO: 47497 - DNA, 769 bp, Zea Mays
ggcggatcgatgcattgtcgtcgtagtctcggggaattgtcggaaatgttctggtgctttaccgatgggtttgaatgtacttgtgacgtattacaatagttgtgtgtcgcgcaagtacccaaaaatggtaaaatgtggtgtatgttggtaattacaaaaaagtcacgtcattaaccaactcgtgttcagcaggagtcgatcgcgttaagtgattgcgatatacatattgtgtctcggagtgctataataatgagttagcagacttgttagatggttttgggttaagttcgaggtcacgatgaattgcttgttgtagtctaaatgcgtgtggttatggtagcaggtaaaaatttagtagtgctcatgtggtgtctaagttaaaaggcgaactagtgggtgaaaagcacttcgatatacatatatgtcggatgatgattgtggtgaatgcattgattaattgtgtatggtagttctagagcgcgaaataacttgtataaaaattagtaagtctacttgttaattctcacttggttattttaactctaacaattgtcaaagtgttagaataattcaagtatttagaacgcgacaattcttgaattgtataggagctgcaatttattaattgctgttttggactgcacgcagtgatttccccgtgttgtatgtttgatgaactaaattgtgttttctgtagatatgtgctatagaaaagtggtatataactttattatcttgctggttttaaaatttgacaaccataagtctg

SEQ ID NO: 47498 - DNA, 395 bp, Zea Mays
aaatagacttcttttttaatatagcccctagagctggtttggaatccttccttgttttcccgtattttgtcttctttcgaaaacaaagttgctattcctaactatttcaaaaactctatgacctctattgttacccaatggaggagtagaatgtagttcaccattattgtcgaagtacttatccatctttcgcgtgtggtacctgtgtccttccaataaaaagtgtttgtgcctcatgtacactatcttcttagatgcagtaagggacacataagaagttccatcaatacatactatgcaaccaacctttcccttaaactggcctgataatgtgaagagaccagggtaatcgttgatcgtaacaaaaacaattgctcttagtgtgaacaaatctt

SEQ ID NO: 47499 - DNA, 748 bp, Zea Mays
atatatgtaagcagtatgcaaggagaaatcaagaaagaagtattatctaaacctctcacctgttcaagccttcaatctcatcccccttgcttcggtgaccaggtaacaagccctggcaccacctctacccatctacgaactatgtagtcagggacctcccagcttaggggccgaggcccttgacaacttggtatctagatctcggcgatcctcttccacctctgaccaccactccacttctagcactccatctccaagttcatcatcagcgacacccatggctaatcccaccaacgccgacctagccaatctcatcatgtagctaaccaccagcctgaccaccctccaggctgaagtgggggagctgcgccgtgagcatggtaccattccgtcgggctcgaggttcactgaacatcaaggtgaacgacctccgtgttctcagaagttggatttcccgaaatttgatggcaagtctgatccgctggccttcctcaactggtgtgaatcctattttcatcaacagcggattgccgccgaggaacaggcctggatggcttcatacaatctagaaggcggcgcccagatgtggtacatccagatccagaacgaggaaggaacgtcgtcctggcgccaattttcagaactcctcaaccttcgttttgggctgcccatccgctccaaccctctcggcgagctcatggcctgcaaacggaccgggactgtcgctgagtaccaggatcgttttgag

SEQ ID NO: 47500 - DNA, 431 bp, Zea Mays
ataaaatattatcttatagggcttccaggagtaagtatcatcggtccaagagtggacagatgttacactgctagtatcaagtactcaaacgtcccaggacgtgttcattcactctcacgcaatatatcatcctgtttctgtcacatttctatttttttcccacaaatatgtaaacaatccggataaaaacaaaatacgataccggacaaagcatgatttttttctcatccattttcatccctacttaagattctttgtgacaccaggctacaattttattggaacttaccatactaccccttggaatggatcatcagcgagggatggtattcaatacattatgttgcatgaaaacatctaccgcaacatgcatgttattctagtcatctgcgctatcatagagcaacccatcgccctcatctcaatccttt

SEQ ID NO: 47501 - DNA, 505 bp, Zea Mays
aattaccaggtatgccacctgatcgtgatatagagttttctattgaactattacccggaactgcaccaatttcgaaaagagcttaccgaatggatgtcaaagatctatttgaattgaagaaacaaatagaagagttattagaaaaaggttttattcgcccagttcatcaccatggggaaccccagttctatttgtgaacaagaaagatggttcaagaagaatgtgtgtggactatagaagtttgaacgaagtaacgatcaagaataagtacccgttacctcggattgaagatctatttgatcagatgagaggagctacaatattctcaaagatagatctaagatcatgctatcatcagttaaaaaatcggactgaagatatacctaaaacaactttcactgcaagatatggactatatgagtttttagtcatgtattttggactgactaatgcaccaacatactttatgaacttgatgaataaagtatttatggaatacctcgac

SEQ ID NO: 47502 - DNA, 1000 bp, Zea Mays
ccgatatctaaacggagcacttgactcaattcctaactcaaactcattgttaatcgcgtattgcctcatagcaagtctgaactctttcatatccttgtacaaactgccaaccttcataataggatttgacctgtcacaaactaaaattctctcttctggtatagaatccccacaatgtaccacaactatttcatcatcaacatcatcggatctgccacgaacattaaatgctctagatctacaagcatcttgccttgcacttgtttcgcgattatcttcatccaataatcccaacctgtcatacaacactagctctgaagcaacctcctgtgctccttctttttcccaattttcctcaacttgtatggtgccccaatcaattgctacatcctacaacaaatgaaaggaacaactacaggcagttagaaaacatgttcaaatacatctgaaatctacaaaaacactgaagccacaactgaaatctacaaaacactgaagccacaaacttacatctgaaataacatcaattgatgaattagcaaagaaatgatctgctggtggaggaagcagcctgagcatagaagcatcggctcggatctcatggtgctcggctgcgctaccgagtgctcctgctggaccagagtgaatggatgtcgacgaggggggtgcgaatgagtcttcatccatggaggcacggcaactactaagcctcttcctcctctcgcgaccggcgagtctagcccctcatccgctcctcaatgtcggtcaccgaacggtgaggaggaaactggagcggggcgcgaggcgcagagtcacgggcgagaagaggacgaagacaggggtaaattagtccgacggagcacagttcaaatgggcccgcactgttaagagtcggcgtacgctgttaatggagtcttcaccggcaacggtaccaatgcggcgagtgctggcacacaggcatcccaaactggcgatagagcgctgcgggataccaagagag

SEQ ID NO: 47503 - DNA, 568 bp, Zea Mays
atctctaccgtatatggcgtcaatgcgtgtgcgaccatcagggcaacgataacacatcaaaccttcgtaaccagcgcaatagatgcagttgtggcttggtagttggggtacatgacaagtccatgaaacatgcgcaacagatgcaattatggcttgataatcacgacagacaaacaatgcctacagggcgtgcgaaaaatgtgtgactcgatgatggcggtctgactcaacgagagtggtccgattaagcgagagtgcgacatagcaatcaaataacgcagccaagttcgtacgatacaaatactgcgtcgtgttgccagggcgcagccagtgctcagccaatgccataactcggtcgattaataacgttgtctgatcggtgtgtccgagtacccattatacaatttaatcgctcgacgtgagtccaaaagctcaacacaatataaatatttagagcgatttgagtatgccctatatagactttacatgcattttaataattttctgctacgataaataaaagcagaaaaataaacactaaaattattgcatgagcataacacatcag

SEQ ID NO: 47504 - DNA, 661 bp, Zea Mays
ctctaaaaagcaaaatttcgttgctctctctaccgccgaggcggaatatatatcggcccggtaattgttgtgctcaattattatggatgaaacaaactctattggattatggaatcatttttaagaatgtgccactcatgtgtgataatgaaagtgcggtaaaattggctacaaatccggtccaacactcaagaactaagcatattgatataaggcatcacttcttgagggatcatgttggaaagggagacatttctctatattcaattggcacggatgatcaattggccgatatttttacaaagccattggatgaaactagattttgctcattgagaagtgaaatgaatgtgattgatctctcaaatgtggcttgaggttgaacgcacatgtgtagtattgcatttcgcttctaaatatgctctctaggctatttattgggtatttttgatgaatttttcattctagtttgatctaagtagtttgatatgaaaaaagtacatttcttaaatacataatgtgtatgtgcatacatactaacccttggattggtcgaaatgtccatatatgagcattaaatcagatttgaaattcaaaatcagaaagtggacagagtttgaagaattgagtatcaggccgcggactgtccgcctatggacca

SEQ ID NO: 47505 - DNA, 435 bp, Zea Mays
gataaatggtggattttattagagttctcacaaaacatgctagacactgttttattttatgtagcgtcacctctggcttaattcatactccctgtaccgagtactgtgagcgacagcatcagcccagccatcaggtgtgccagtgcagtggtctgggccggaggagagcagcagcccactggattgcaggaagccgaatgcattgggccgggcctccatcacaacgtctcatctctaagcgcgcttgtctgtgctccaaatacacacacaaaaaagggaagtatcagtttctctgttcaaaaaagaagaaaaagaaaataaaaggaagaaaactcgagttgccgccgtcaaccaaacaagtcggagaagcagccctcgcaaaaccctcccctcgatggccggtgtgccaccgccgccgcggcagctcgatgtgcg

SEQ ID NO: 47506 - DNA, 942 bp, Zea Mays
aagaaggtagaggtctcctagagattctgcattgactaccatgcactaaacgactagatgttcaaggacaaattccccatctccatcgtcaaggaccatgactctgtcttcactagtcacatgtggcatgacctcttcatgatggttagcgtcatgcttcacttgagcacaacgttccacccttagatggcaggtcgaaggtagtcaacaaggtgatcaccatgtacctttattgtgccatgggggaccattcgtgtgcctgggttgattttcttctttggaccgagtattgctataataatttgttccacatggtgctccacataacatgccctttcaggtattgtatggctaacccatgtcacttgttcttccgcacaccacagaggcagctcaaatagagatgttggatgacatcatggtgaccgcgatgccttcctcatggaggtttgcaagcgtcttctcctggtccaacagtatgccaagtgctattatgataactgccatcgtgagactaggcgtgactccatctccaccgaccgacacactcgttggagtcttggcccaagggtaagtataggccatgctatatcgtctccttccaagtgctacaatgtgtcagacaagtgccctattgccttcaacttctagagggcccttgtctttctgacgtgttctacctgggctgctcaagccgttccgaggacccagacgactgaaccacccgtgctgcttgtataggatatccaacactgcttggtctgaagcatgttttgtgtgcccacctacgtcgggacgactgacacgtcctcgttcagtggcatggcctgcccaatgatgacaccacttgagagttgcttcaacaattcaaggaccccttgtgacgtccagcttaaggacgagttgtttgaagaggcgaggggtcatattttgaccaacgtc

SEQ ID NO: 47507 - DNA, 402 bp, Zea Mays
gtggagttctcttacaataatagttaccaggccagttttaagatgtccccgtttgaggctttgtatggcggaaagtgcaggactccattgtattgggatcaaactagtgaaaggcagttctttggaccagagattatacaagaggcagaagaacaagtccgtcaaataagggagaatttgagaacatcacagtcaaggcagaaaagctatgcggatatccggagaagagtattagagtttaaggagggtgatcacgtgtatcttaaggtgtcaccaatccggggtatgcgaagattaaaattaaaggaaagttgtcccctcgctttattggacccttcttgatcctgaagcgagtgggagaagttgcatatcaactagaattacccgatcatcttgcggatg

SEQ ID NO: 47508 - DNA, 413 bp, Zea Mays
ccgtattgacttaaggcgttcccgacttaagctgattgtttcgttagtagggtatagtaatcaccctatgcaagcgtgagcatgtcgcaccgacttaaggcgtttctaacttaagccgattgctctgttagtagggtatagtagtcaccctaagtcatgtaagcgtgagcatgtcgcaccgacttaaggtgtttccgacttaagccgattgctctgttagtagggtatagtagtcaccctgagtcatgtaagcgtgagtatgtcgcactgacttaaggcgtttccgacttaagccgattgctccgtttagtagggtatagtagtcaccctgagtcatgtaagcgtgagcatgtcgcaccgacttaaggcttttccgacttaagccgattgctccgttagtagggtatgtgtcg

SEQ ID NO: 47509 - DNA, 453 bp, Zea Mays
atactttcgcatacgaaagttcccagagaaaagaaatatgagtccagttgtgatcttgaccatagccttcaaactcatgaccttctgcagccctttgaagggcacgatgttgtatcatgatatcttcacccattaaacgttttgatggaccctctttaacttttttgcctcttctaaatgacttcatatcatttcaaaacaggtgattggatggaagaaaccatcgatgacaatcaaagaatgagacctttttaccatgctccaatcgatatgcttgtgtgtcccccatgcatatgggacaacacagtcgaccgtggacacaccagccagaccaaataccatatgcaagcaaatcatgaattgaccacaaatatacaacacgtaaggtaaattcatgttttagatgaccatcataagcctgtacccctacccatagctctttgaactcttcaa

SEQ ID NO: 47510 - DNA, 511 bp, Zea Mays
cttatcgctacaaaagtcagtttgacgagccgaatgatgactggtttgaggctgttgagactaccagtgatgagctattgggagcttatacgaaggcagaggatgaggccatgaccactgccttcggcgctcgtgacaaaaggagactgaacagagtttttgatgtgattggatttatttatcctgactacttttttcccgcccaaaaacaagggttgaaaagaaaaatggcaacttcgtcttcttccaccgcgcctaagccatagagagctaaggttttgagtcgtaggccaaagacacactctttagggagaacagctgcagttcttgctactgagaagatggagattgctgaacatgctgaagccacccccttggcttcggagacaattcctgttgtgacggtcaaaactagtgtcagtccggtagaagagacgaaagcaaaggactcaaaggtagaagagcatccgaaactgttgagtccccccaaccatgatggggttgccgaagt

SEQ ID NO: 47511 - DNA, 406 bp, Zea Mays
gtaagtggaagcttgctaacagagaggcccaatgggctattgaggtagcacaggtagctgagcagccaagagaggaggctagagttgatccatctatatcatagatatcatagaggagtaacttcaaatagagtaggcacgatagaccattgtctattaatcatctcgagagagagtgcctgttacaccatgagccaaaggaccaagatgaggaggatgtataccaccaccttacaccaaggcagaggtccatactaccctttaacttggactcgaagactgctagcaccttgatggttcataagtcgaggtttgtgccattgaagcagtgcttcctgatagagtgggagcaccatgcttcagatggattctatacattgatgcatgaggatttccatacatcgat

SEQ ID NO: 47512 - DNA, 691 bp, Zea Mays
gaaattcgcgcaagtgatggtaaatactctgcaagaaccgtagttggcagtgagagttggtccactacctgcagccagggcacatttggacgtgaccaggggcagctctagtcgcaaagtggcatcgacgccgggagctggtgcagccgacgcagtactctgaaattgaagcagttaaagacttgcagcggccgcagcttgaaggagaacatgctttttctttctcctcctcagtaaaaagaccacccacagccctttttaacaccccgtaactttcgaacgagtagacgcgctagctacttaattatattttgaagaaacaaaaaggtggtgttgtactggtacaaatgatttgttggatgatcagtcacattagtggagtaaatcctatgtccaggcacatcaatcctaaatgcatggttaagaggagtaacgctcattccatttactgttctggacactggatctccatcggatggaaacacgcgcgcgatctttttaaagccatgatcactgttactcggttagtgtgcatctgcgtattaaaagccgggaccgctgcacatttactactaactttgctgtagcaatagaatgcaataagagctcattatggacgccaattaatgggaattaaaggagaaagtacgagcaagggttagggatcggcctggtaaccgggatagcatcg

SEQ ID NO: 47513 - DNA, 732 bp, Zea Mays
caaacatgatgaaagaggtgtattgtggtttgacgatcgtcttgtcgtaccaaaggatcatgagcttagaaccaagattctagatgaagctcaccagtccaaactatcgattcatcccggtagtagcaaaatgcactgtgatatgacatcaaaattttggtggactaagatcaaaaaggagattgcagcgatgttgcgagatgtgataactgttgcagagtcaaggctattcatatgaagtcagctggcctattgcaatcgttatccatgcctaaatggaaatgggaagagattagtatggattttattactggacttcccattactccgaaaggcaatgactcaatatgggtgattgtggatcgactcaccaaattagctgactttctacctatcaagactacatgtcgaccaccaaagtaagcggacatttatatcgcggaaattgttcgtttgcatcgaattccaagaaccattgtgtcggaccgtgagacacaattcaccgctcacttttgggaacaattgcaaaaaggattgggaactaagcttgtgcatagctcagcttaccaccctcaaacatcgaggtaaactgaaaggctaaaccagattctcgaacacatgctaagagcttgcgtgctatcatcaaaaggatcgtgggaatcgtggctaccattggccgagttttcctacaataacagctaccaaagcagcatcaagatggctccattcgaa

SEQ ID NO: 47514 - DNA, 423 bp, Zea Mays
gtgggtttgcctcctagttgagggtgtgatgactctatacccttaattcaaggagcacaaccatttactattcgcccctatcgatacccccctatcttgaatgacgacattgagaaacaggtctcagagatgctcactcaaggggtcattcagaagagccatagtccttttgcctctcatatccttcttgtcaaaaagaaagacaatacttggcgtttttgtgtggattacagatacctcaacaccttgacactcaaaagcaaatatccagtcctagtatttgatcaattgatggatgagttagcccatgctcactggttcagcaaactagacctgaaagctggctaccaccagatcttattgcatcaaggtgaggaatacaagactgcctttccaaacacatatgggacactttgaattcag

SEQ ID NO: 47515 - DNA, 1001 bp, Zea Mays
gcttcggccaaggactgtcaattcatggccgaagctcaaggaaatgcttctaaccagtttccagggttttcagtccaagcccatcactgcccaagctctgtttcagttcaccgatgagcgagatgagtaccttcagtcgtttgtccgaaggtttctcaggctttgggctcaggctccggcagtccatgatgacatcgtcatcaaggatgtggtgaaggggctcaggccaagataagttgctcagtattttgtatggaagcctcctcacttcgttgaaaaattgctgcaaaaaatggacacgcacataaggactgacaatgatgttcgctaaaaaagggaggaattcctcagatacactgaagtcgccaggggcttcagagaaaggtttcatccaaggcatgtctgaagtatccataacccgatgtagggtaaggaaaagatgggccaattttagggtcagttggggcagcacaggcaagctctcagtagcaaccttcacacaacacgtttcgtccacctgctccgagaggagaaaggagaggccgaagctttggttgtagattcaatgcaccccaaggaaaccattctgcttgttttgtggcgtggacaaaggctacaccacaagaacatgccatcataccatcgacaagcagaggagcttgcttcatcaactgtgcaaccctcatagtcaaaagaggtgttcagtacatccttatactattcaccatacatcccacaatatgtccagcctcagtcacaggagccatggcaaagtttgccttcggcctcaaatgcctcaagtaacctagcgatgagtgcgcggtcaccatctacttccttcgtcctaggaccacctccttatgaccaagtgtctgcttgtcaacccaagttcccaaggcatgacatgcagcaaagggacagaaggggggatctaaaacccgtactgtcaacagtatggtcctagagacgaagcacatatattaaagaccccaaggggctgg

SEQ ID NO: 47516 - DNA, 745 bp, Zea Mays
cgcagtctgcgctgacagctgcgcagtctgcgctgtcagttttgcagtctgtgctgtcagactgccaggattttcgcgcagtcaacaccgttttctgcgcagtttgacccgaaaccggttgaaccggttttggaaccggttgaaccggttttcggttttctggcggccgactactcccctttttatctccctctctcctcttcccttctcagactcattttctagccgccgccgccctctcattcttctctctctcaccttcacactccactccaaaaactctctcgtgccctcacaccttttggaagagtggttggagatccgttcttcccggcgtgtttccaccatcttcctccatctcgttgggagttcttgacccaatcttcggatcgaggtattaccctatgttatttccttgtactcgatcctacgcgttcttgattatctaatgtatcattcgttgggtacattttagtttaagtgattgctcaattctactccactctctggataaagcttgccgacgaggagagtcattacaactacccctatctgaacttcttcattgaaggtagttggtacaaggtgagctatcgtcgatttgctcacattcttggcttttctgacgatgatatatctggagacaagatcaagattcatgatttccgtcagcccacaagagatgaagccaaggatcttcatctttctgagtctggaaagtattgggagtcgaccaacattcata

SEQ ID NO: 47517 - DNA, 588 bp, Zea Mays
cactagactggaggatgttgatatactagaagaagaacgattgaatacggtaattcagtcagcccggtatcagcaaactctgaggcgctatcatgacaaggccatacagcatcgatccttcgcagtgggagacctcgtcctccgccgaattctaacgggggagggacaacacaaactgtcgccactataggaagggccattcatagtagcggaagtcactcggcctggatcgtatcgtcttactcaaatgaacggcacgaaaattgggaactcatgaaatatagaacatctcaggaaattttacccctagctatatttcaaaagctattgggacggccttgtattctgtaaactgggaaacatatcatcaataaaaagacttcattctcaaaggcgctcaaattgtattgtttactgtcaacctgcatgcttacttaactcagggtgaccactataccctactaacggagcaatcgacttaagtcggtaacaacttaaggtggtgtgacatgctcacgcttacttaactcagggtgaccactataccctactaacggagcaatcgacttaagtcggcaacgacttaag

SEQ ID NO: 47518 - DNA, 1325 bp, Zea Mays
cccaagactcggaacaacatccgcaaggacggcgggttgaattctatatcactcggggtctcttatgcaaaagatctaggttgaatgggtatggagaaattcgggccgcacgatctgatccggacggctcggattacaacatggttataaccgaaccggtacgcagcgtggggcatcagattaagatcctacggctagggtgttatgaagatgtgatctaatcccggtcatcgaactaccatcctacggctcagatccgtttgatgaaggggtatgctgattctaatccggaccgcccacgcagagatcaacgtcccgaaacaatcagctgcacaatttaatccccaccgttggatgaggatccaacgccaagaacgtcatctgccaccccaagcgcttggacacggcgaagcataccccgcgcggcgggcttcacgccgacgagcagcgcatccagggttacagagcccaaatcctagaatagattggcacaaaacgtagaggggcagctagcggagttatacggtggacacttaccggcgattgaagaggtcgcgagcctgcccacggaggagagcggatccgcggtggagatcgaaccacggcgagcaattccagacgccccaaggccacacagttcaaattgaaggcgcggacagcttcacgggtccccggcgaacgcccccacccacacgcgcggacccgtgcgcgagcacagaggagaatcaccggcggcggctgttggcgagatggtctgcgcggcgcgttgccgtgcatgatcgggggaggatgatggctcgactagggaaccagagaggcgaggcaagaggtcgtggcgggttttatgccccccgcaggcggagtccacctccccccaagcacacggcagaaaggatgaggatctgggcgagcttttcgccatttctgttgaaactaaccccgaggagacggcgcggatgtcgcaacagaccgggtcgaagaccaccctgaccgtgggccccacacggcagagattctccccgggataatcgacttcgggtgcgcgggactggagctcagccatggactcgatctacccgcacgatcccgagcgacccgtgtggagtgaagaagaccgatccgacaggatggtcccacgatgcagtgacactgcgaggacaggccggaggactaggtactggcgagtgggcccggttcccagtgcccaaacatgtaggcgcggctacagggaagaaggtgggccggcaggggttaattcggcccaagcgccatccccctcctttttatttttttctatattcttttctttctattttctttttttc

SEQ ID NO: 47519 - DNA, 792 bp, Zea Mays
agatgatattgttgaggacaagccttgctgtcttcatattccaatcaatcgatctgggacaaaaacaaaacaggctgctactggtttggtaaaactaggacttgttaactactaggataatcctgtcccaccacactatgttgtggtccaagttctagagatcacagacagtggttgtgaagattgggagatagactttctagttgaggggatcataactttgcaggaggcaatgaacgagttggtcctttggcatcgatgcaacattaagttgggtgatgagccgatcttaagccgtctatcgcgtcataagtcaccaatgccgaattcaacaccaatgcaacagaaaaatagttcgatcattccataccccatggtgcaggaaaatatagaatcggcctccacaaaaaccgttgaaacaatcatatcacctcttgcgaaggaactcgatgaggggacgtagacaaaattgttcctcagaatgtcgatgcggacatcagaaaggaagcaaaggttgacaccaatgttgaagggccaactacttcaaagaaatttcatcagtgaatcgccactgacaatgtcaagaaaccgtcagaagctgtgacacgctacctggaaaaattgaagagagttatgatagatcaatcaaaagcggaatcagcatctcatggagtacgcacacggtcccaaatagacagtttcgaagtatgggaagaagatggaatgatttatactcgagaatcattacgtcttaaaatcaatatcctgatatacaagaaggatgatgttcct

SEQ ID NO: 47520 - DNA, 990 bp, Zea Mays
gcccgttctcgtggattgaggagtcttctgaggaagatttagactacttcgttgtgttggatttggccgcatcggagtccttgctgcaatctgatgcgcgcgaggggtctattccccagtcagggcgatagccgaagaccaccacaggtgaaaggtggtgtcgaagcagagtgttggtgggatgtcacaaagtgggagacgtcgccagatgggtatggagcgatcccatcttcgattagatcggggtacccaacgcgatctactgtcttcgacggctaggacgtgtattggggagggggacttgcggaatttatttgagggcaaagagttgagaatgatgttgtttaatttccgggaggcgggtcttattccgaaggtggagctgatgtagcatttttgctggcctcgctcgtgtgttgcgatagtgagtgaaaatgtggccctcccccgtttcacagtagagagggagggcggcaaaatatgatttgtattacttgtacgatgtggccaacgagccctttgttttatgtatgtaaattacgatggcatactgtgtgctgtgtttattgtaagattgtctcgatttgtaatcgtgttggcgcggcactcaggatgaggactttgcttcccgcggttgatgtcatgcgcttttggcgcatgcccggctgcacccttaggtttttttgctcggacgtgtcttatagtaacgacttcgcaccctgtgggcgatgttgcgcacttattgtgcgtgcccggctgcacccttaggtggctttcggtcggatgtgtcttatagaaaagacttcgcaccctgtgggtgatgtcgcacacttatcgtgcatgcctggctgcacccttaggcggattttgatcggacatgtcttataggaaagacttcgcaccctgtgggtgatgtcgcgcacttatcgcgcatgcccgactgcacccttaggcggctttttctcggacgtgtcttatagaaaagacttc

SEQ ID NO: 47521 - DNA, 922 bp, Zea Mays
cttctccgaaaatttaaggtacatgatcatttaaaggacctgttgaagatagtctaagcgggatttgaattggatgtgttgaagtttttgacgactctgtgcatgttcctattagggtataactattctgttgaagttctctgcgcatgttcctattaggccattactattatgctatgagtgttaagacctcacaggtgttttactgaaacgtaatgaccagagggaaaagttggtagttagggttgtaaacgagccaagctggttcgactcggtggcggatcaaatttgacttggctcggctcgtccattccaacttttttgctttttggtcctttttgcgaaagattttcacaacgacacccttctaggtttgaattcagaaaatagacccttaacttggcgcaatcattattggcgccgaggttacacgtcttgacgccaatataaatggcgccgaagtacctgctcaccgtgcagatgtggcgcttacatggccagagctcggcgccatgagcattggcgccgacctcgtttttatgccaacacaacgaccgacatgcatacaagcaataaaaaggatcaagcaaggctccacatttttcggtgtgccaagaccctgttactgtacaggtcgttctttatggtgtagctgcagtactcacccggcgcctacgcctcctttttccttgtttggtcacgcactgcctatccaatccggccaactagctacccagtaccagtacaactgtactgtacacatgtatgcatgctctgcttgcagccccaatggtggcatatgctgatatgcgtgcaagcatatgcatctataggctatggcgggctcgaattataaaggttcagtagattgtgtaaaatagataatttgtattgttaataataatgtttgtaaagtggagtt

SEQ ID NO: 47522 - DNA, 763 bp, Zea Mays
taaagatggagtttagggagaaaatagaaataagggggggtttggagattagggttccaaaccttgggttgagattttgggatgttacatagggctaagggtgtcgcgcgcgggcgaaggccatgccacccaacggtggggcccaggccacgttccgccatcatttgggcccatttgtaagccctcggggtaggatccatagtacatttaaccagattgaacttaacatcgttgtaatggccctgtaagggggaacattctggagctatagcaagtaactgggggcataacagtacttacaggggcacatccacgtactcggttacctataaatacccccacactatacatggatgggagacgcttaacaagacactacaattccctgcttactgttttgatgagcatatgtgtccccttcttcttgagtgtttgggtgcacctggccacgtgtcagtcggtcccaacatttggcgcccacagttcatgctatgacaaagcaaacctgcaatggcccccatgaaagcgacttccaaggccaccacctctctggacgacaatgcgaaggtggccctcgccaataaaaaaggcaaggtagtcctcatcgacgatgccctccaagatgcacccgaaaactatgacagagcaatcaataacaagtgtccttgaaccgagaacccacccacccccgaaggcatcgttcgcacgtgcagttctgagggcctccctccgaaccccctgccatgtttcacccccctccccg

SEQ ID NO: 47523 - DNA, 373 bp, Zea Mays
ctccaatactgttgggtacccggtataatggatgcctaaactcatagtaccttttagatagcgcataactctctcaagagcacaacagtgatcatttttcgaatttgaaacaaaccggctcaatttgctcacatcaaacaagatgtcaggcctcgtagcgctagctaagtacatgagtgaaccaattatttgggaatatctcaattgatccctagctatcctttgatttttcttcaaaaacttactaggatcataaggtgttggagcaggttcacattcgctataaccatagcgactcaaaaccttttccacatagtgggattgcacaagtgtgaccccaccattgccttctctcagtagctgtcagtgtttg

SEQ ID NO: 47524 - DNA, 295 bp, Zea Mays
agacccgatgtactctctgcatcataatgtcacatgccacaccccattcttgatcagggcaggaatttaatggcaaagcaaatcgttcgactacctcttccgttcaggtgtactagtcttggcattgctgccaccactattgttgacgtcgtggtctttgatgtggaggatggtgaaggtatggattgaggatggtgagttggcaaccatgatgcgaatatccactagattggaaaagcagagggaaggggagatatggagacggtgctagaagagatcggaggagtatgtagat

SEQ ID NO: 47525 - DNA, 610 bp, Zea Mays
agtgctccgacgaggaaaattcacagacagcagggcgtcgacggtgaaggagcacagcagcacgccacaacaatgacgccgagtaggagtggcaatcgatgaacgagcagagaactcggatggcagcctgcagcgcacggcacgacaataaggaactcagagcacgaagggagagaagcgaggcgagtgacttagcagctggagcaagtgtcgagcagggagaaaagggatgaagctcagcaccatttataggctggtagaaggaaatcatggcctcgaatttgattgtcgtagagaaacgtcctcacgaaatgccattaatggcaaggagaaactgtcatcgcagagaagaggagtggtggcggcagtggtggagagtacgactgggttggggagatgaatcggacgagcggtggtgagtgctccataacgccgggaggtgaagcggtgacggcataaggagcagggcgcgctagacggcggcgagatttatagagcacgaaagggagccagggcgtcgacagccattaatggaggtggagctatgtagaagaaacggttagcagtagtgaaagggagaggagcggacgacactcgggggaggagaatg

SEQ ID NO: 47526 - DNA, 641 bp, Zea Mays
ggcctcttaactgttgagcgacaaataggggcttctgtatctcggtgcatcggataagcccgaatttttgttccatcacccgcacccattcatcagcttccaagggttcttccgccttgacaaagagcggtggacgggtctcagagaactccagataggtggtgtcgcgtggtccttgaggtggaccccttccttcgtgctgttgaaattggtttcctgccatttcgcgcagaaagcgcgtgttgtcgatggtggcattgaccaaggcagcgatagcctcggccagggtaggaggtacaggtggcggattgggagtgtcctcccgaccatgagatgtacacgccccatcatgagcacgggttcgcgatggcatctgaggaagaaaacatcctgaattattacatgccaacacaccatctttattacattgcgaaatagtaataattacacatactcagtattacaactcaaccttcttatttattttacatgagtacattacgtaaactatactactctaatcctcttcgtccttagttgttccgctgcctgctttaggagaccgttcatctccaagattcatggaaggaggggctccaaaaaggtcaatcccccatcagatcctccatttgttgttccag

SEQ ID NO: 47527 - DNA, 369 bp, Zea Mays
gcagtgcatcgcatgtagttattgcatcttgtgccactagctgactggattgggctagttctggttttgttactcttggtggatgtcaatttgtcattgcatgtacgactattggaggttgtcaccaactttgatcacacattatgaggggatcttgtggtcattccccgcaggagatttgcaaagagcaaatcttgtaaaatcatgggttgttaaagcaattatctagtgtggttcttatgatgccccaatcctaggttcatagtgtgatgacaattgaacataacaaggacgtaggttgttagtgagcagccaaatctcaagaatatatcttatgtcatttgttgcccccatatgattcgcgctata

SEQ ID NO: 47528 - DNA, 906 bp, Zea Mays
catgaataatacgactgcaacacacacaactagcatgagtgggttacctctgattgtgcattacttattgcccaacatacattttctagatctaagggacctagtccctgttcatatatgctttgcacaacacaaaggttatatagactttacattcccaaattaaaagatcatggccatctactcacgaaaccacatgaaacaccaccacaccaggtgaattgcttgactaacttgcctactctcaaagcaaagtcattaccagcataacacatcacattcatacaattcagtaacaatgagttattcttctcacttgaaaacatgtgcggctgagagcacaccttccgtaaactttagggcagagctcctccaatcttctgacctgcctggagcttaccagcgatcattttcccaacaaattgatggcaaacgatatgtaattcaataaattcatacatttttataagttgttaattcgaacctcccctcctatatgatgaagaacataaaatgcaataaagtatgatgaagaacttaagataaccttctatttttataagctgtacttttctatttttagctgttcttttctatttttacttgtccctatgtactaaagcttaaagcatgtatggtccatattcttcgccttctgacccttccatttagtatcttgaacacataagatatttacatgtcttctggtcactgtctcaactaactctcttaagttacatgtaagtgacactacattccaactacccaaataaatcctagttggttcgactaacttctttactcttcatacccatcgatgatgtggtgactcttacagtgatttgaagttgagcgacttgctaattgacacacctggggaaccaggcgactaatcgcgattaagac

SEQ ID NO: 47529 - DNA, 422 bp, Zea Mays
tgcagctaagcttttgatctagcaatgcggtgttgggtgtaggacacactaggaaataatgcttcactgatcatcaccagcaccagacacttctactaccgcactgcgcactgtcaatattctattgcctgcctgacatgctttcgagacgacatggcgtcgaacgcaagcatttggacggttcaacaccgcaccccacggggctacagtatgcagtgtctcggtctacaagctcggtgttgcctagtagatctatagttgttgttagcatgattgggtgtgtggctgcgtgagtgagtgatcgagtggccacctcatcccggacctgttgggtagggcctggcgtccggagaatgattttgcctgaacatgcatgcctccactacccccctctgcgcacttcgattgcctgagcatttggc

SEQ ID NO: 47530 - DNA, 447 bp, Zea Mays
ctccggttgccgcagttgtgccttggggccaggacgcctgtggcaagcacccatgccagtagggcggtgatagtggcacatgtcctatccattccacaagctcacaacatacctcattcatgtgagggagctagagaaggactttgacgccttggaactgcaacatgttcctcatggcaactcagtggcagatgagatccctacaagggtatcaacttgggtatccattcctaaggacttcttcaaaagacagatgctgagaccattcgcccagcctgccgaactgggtgaaggcggtgagactagcacctcgaagctagcggtctcagtggcgttccatccgtggagcccgccaaggattgtgtgtgctattgaggatcctgccaacctcctagtgccacttctagttgctcagggtagtcctaatgcatggatctccgagatccg

SEQ ID NO: 47531 - DNA, 487 bp, Zea Mays
caaaattcatgagtccttggtcacggacaattcagcttctaaggccggatggtctcgtctttcacaaaacagtttggactttaagaccgaacatctaccacagcataaagacagtattaggataaaccggcccccgagaccggagagtccgccatcacacaaagatcatctgattcctctgtgggggacatgatagaggaattcagagatcttgataaactaggacaggtgtttacatcggccgatcttttggaggagattgacaaaggagatggtaaaactccaaggccgacttttgtaaacaagaccctagagaccgatcctagaaatgagatgatcggtctattgaaggaatattcggattgctttgcttggaattacactgagatgtcgggattaagccgagagatcgtagagcatcggctgcccatcaagtccagtttcagacctttcaagcagagagctagaacatttcatctagatcttc

SEQ ID NO: 47532 - DNA, 448 bp, Zea Mays
aaggtgtaccttatttcagcatccaccaatctccaactcaagtatgtcatgacatgctcctttccttcaccctcctgagttagaacaactccaataactctatcttcgatagcgatatataatttaagaggtatcccaatcttcggtgctttaaatattggagcagaagacaaatagtttttaacaggatcgaaagcttcttgttgctctacccccaagagaaatcggcattatttttaagccgaagaataggagtgaaagcatcaactttcctagttggtaatgaaccttcgcaaatagtttactttgccgagaaacttctgcatttcaagtttacaagtcggagcccccacacagtcaagatctatctctatgtcgtgctcatgaataatgaatcctaagaacatgacagatgacactctaaaagcgcacttgcgtgggttcattt

SEQ ID NO: 47533 - DNA, 572 bp, Zea Mays
ctgagttcctcgatctgatatgatcttcttcggtactccatgcagacaaacaagcctcgacatgtataactctgctaactaggctcctgagtaagttgtcttcacatgtataaagtgtgccactttagtcaacctgtctactatgacccatattgaatcatagccatcccgagtacggggtagtccaactatgaaatccatactgatttcttcccatttccattaaggtaccttgagaggttgtagtaatcctggtggtgtttggtgttcggctttaacccgctgacgcacgtcacacaatgcaacatgagtagcaacatctcttttcaaaccataccaccaatacttttccttcaaatcctggtacatcttggtacttccagggtgaataaagtaagtcaaatcatgagcttctctcaaaaaaagttggcgtatgtgttcaatttccggtacacagattctcttcataaaccatattgtgccttgatcatcttaagtgaaatctggggcttttcccaaaccaatcaaagttttaatttccttaattttctcatcggactcttgtcctttac

SEQ ID NO: 47534 - DNA, 933 bp, Zea Mays
agagaggaagttgtgggaagagggcggttgctgagcgtcgtaggaggcggcgtcgggaggcaggatcaagggagcgggcgcgaggttgaggatgggaaatgagaaaggtacaatgggcagaatcgagaatgatagaacagactattctttactgttttaataaagtaacagatatttgtataggtgtagccagagccggtcctgaacaggtgccgacggtgcggccgcaccgggcctctaagaaccaggcccctttccacagtagtttatgtagattacaacacaaagatcgataaaggctaaagcccatcaacgtacagtatgcaggtctgtttaagctcgattatttggcttctcgtggacgcttgagctgcaatcctcttgccttctcgtggaagccttcgctcacattgtccaggctatagcaatcgcccggcaccagcagcagctagagcgacaggtaggagggatcgccctgtccgctgctctgccgtccgcccagaccacggcttgtcacgcgccgtgcctagcggtagcgacagggaacgctgagtgtgccctgcctcgaccctccgtaacttcgtctaggtctgctactctactttcgcgaatcagttttcgcctcaaaccaatctttactagttaaatagttaaatgttcttttatatttctgagtataggttattgtgttctagtcaccacattccacatgtcgtccactaaaaaacatgcatctagtagtgaaaaaggaaaaccaagaaacatatagaggagttcaatgcatcgtagtattcataaattttggtatttatggtcaatggggcctcaatttttatcttgcaccgagccaccaaattctcagggccgaccctgtgtgtagctttctattttcagttctatactttcaacctgtagatggtatgcatgttaaat

SEQ ID NO: 47535 - DNA, 584 bp, Zea Mays
tcctctcctcagcaagcacggctggatgactcgttcggcgcaatcgtttgcgacaaacacttctaggactctgaactccttcatcctcgccaaggccatgtctagttgcaactgtcaccgattcagtacaggcagagtcaaacgattcacccgccagcatactaagaacaacgttcacctcagcctcctcagcggttgttggcatctagaaatgggtctgtttctcctcttcagagagatttcggaatggagcaatgaaagcctcaatatcctctagggagggtcgcactctatgacccggactaccatcttgaacaggagtgttggagacgaactcagaaaaggggctctgtggaggaagattccaggcagaataagataagggagcaccagcattcgaaattttgcctctcagcatcaaatcaatttggctcaacatgtcttcttcaggaatctgtctgttggtaattcgggtagtgtcattgaccccagtgtgcagataggccgggtaaactctatcttttagaggttgaatatttttgaagacaaaatcagcaacaacagctttagcagtcaagcctcta

SEQ ID NO: 47536 - DNA, 311 bp, Zea Mays
agaaagatcagtcagaattatgtgaatgtggaatatcacaagcaagatgagaaagcaaacaagatttacagtatcaaaatgagacttaagatgaggatgaattagagaagtctcatgcaaagaaaaattgtgcatgaacaaaaaaatgatggacctttattatgctgatcttcaatataatgtgacttggagatagtttgataaactgaggacaaggcaagaaaagggcatcaaaggacctagctaggtgaaggtgaaaagcaagagggcttttgggactgaaggatcgtgagtaaggtgaagaagtaaag

SEQ ID NO: 47537 - DNA, 365 bp, Zea Mays
ctgaatagtctgtttctttgtgtcaataatggcttcatgttgagttagccaattcataccccggatcacatctatgtcctggcccttcaacactatcatatttgtggggtaggtatgcctacccaattctactggcacatgaaatgctacttcctttgtgcctaacttaccccaggagattttacaataactcccatgtttgtttcttgaattggaacatcatgatccacagcaaaagttctactaatgaatgtatgagatgcactagtatcaaaaagtactttagcaaattgatgtgcaacaaggaacgtacccatcactcgattcccttttggagtcacatccacttgagtatagaatactcg

SEQ ID NO: 47538 - DNA, 566 bp, Zea Mays
cctacgccagtcgagcgcagcgatgccgagctccatgcggtggcgagttcaccggcgcaaggcattctggtgacggatgccctgaacttagagtcttaacacgcagacgatgtagggcctatggcgaacatgataggattatacttatcggcaatagtacggtgatgcgcgccacccgcgatgcagtggattgacaggggaaattctaaccccgacgagcaattcgtggataaccgatgcactactcggcacccgcatgacactaactgaggagagggataaggcgatgctaaggaagaggctctcaccgagggcggaggcggggatggcgctggccacgacgggaggcagaccgtttcccagaacgcaccgatgaggaatcgagcagctctaggtcagtcgcgcgcgaggcaacccacatcgacacgatcctcagccccaagcgaaccctcacgaccacctgccgaaacccgagcggtgaaggctagggataatcgcagaggcgacgtcgacaatccaactcggccctccctagctcactactcctcactaatggtggatggctt

SEQ ID NO: 47539 - DNA, 685 bp, Zea Mays
gggattattaatcattcatcagtgatatgcatgcgacgatggccctcttaaaatgccgtcggtttcaggaaccggccgggcgggcgggggcatcgagtgggagaccggaaaacggccccctcgtggtcgtcagataaaaacgtccgagatcgatggctttaattggggattcacctctcagtaaccccgtgtcttcttcaaacccacacatgaaactgatctctctgccgtttccgaccgcttcgatcgcaggtagggagcaagcgaggcagtcgtagtcccccgcgcgccgccaccaccaccgtctactactagtctactagtatactcgtgccttgacgaccccgccaggcgtcttctcttctcttctctcctatccgtcgtccatagctagcgatcgaccgacccatcttcctcttcatcgcgcgcccggtggtgttgggctaggctagctactggtagctaggtgcggcgtgcagtagtgtctcagctcttgtgctccatgtataccactactcgtgccatggagaaagaagaggggttcgggaagtcatggcttggcctggggatcggcggcggtggccgcgatctgaatctgatgaagcggagccgaccactacgaccggtgcggctggacctgctgttcccgccgagtgtggagggaggagaagctgccgcgaggagc

SEQ ID NO: 47540 - DNA, 332 bp, Zea Mays
gttttcgaccttacacgagcacaaattttatatcttacagggtgcccaactgagataaataagcacaaattttatctgattaaacatcaggaggtgtaccacgggaggaaaaaattgttagacgtcgttggtatatttattatatcttttgcctgctattgggtttccgtttagtgcagcaaaaggagaaatgacctagaagctgacctcctgacgactgaagaaatacccgaaaattttctcaggcaaagatcctagcagactcggcggatgaagagagacggacctattctcgctgaccgtgctaaccgtcgaggcagtggcgttccggc

SEQ ID NO: 47541 - DNA, 599 bp, Zea Mays
cgatggcaaaaaagtcctgattaggtccagtgcagccgataagggcaaaggcaaggaggtcatcatcggcgacacatgaaaggccggtgaaaataataaaaactcttataggaaggtagtagtggagaggactcccgatggaggtgagactttgatggttaacattactacctccaacgctgggggcaggcgcaagaaggtaactaagcgcgggtccctattctgcgcatcacggatggtctgatgcatagagcggacggttcgggtcaccgccagacagtccggatcattacagtggacagtccggcaacgctcaggagccatgacgaccatgtacattcaaaccacgacgaccataaagaggtacgtggaaaactaacatagtaaaggcagctggtcgacttgtcagatctggcccgacctttgatcaattattgcctaaatatgtaaaaaaggagaccgacccgagtgaccagccaacaaagagacctcgctcacccactcaggagcgacagcaggtaagaccgattggaccaccaccaatcggaaaagacggaaggtcatattgtccatttaagacctaacgtgcctgcatggac

SEQ ID NO: 47542 - DNA, 656 bp, Zea Mays
attgaggtggtgattggtgaatgtttatttgagctgcagtttcgggttgaagaaaacatggatagtgacagtccagttcatgtggatatggatgacttaagccgtggggaggacaaaaataagtcggatcaattagaggatgtggctcgtgggggtaatagtgctccagatagtggcaaatatgtttcaaagggtgctggtaatgatggtaatactggtaaaaagggagcggtgcatatgtaattagctcggttgtccagcatgctgaattgggtttgggtaagcaaagtgttgaacatgttggtaatcccactcaagctgttgtgccagcaacctcgctgcaaatgggtgtttcggtgccatgtactcgggatgtggcagctatggctactgttccagaagcaactatggggttaaccgagttaggcaagagcaaaagaagaaacaagagcgggaatggggacaacatgcaaagagcttcaaagttgaaggctgctcgcaatttagatgcggacctctctacaggtaattccatacgtagcctaccttatgttcttattcctaatgaagtagttaagtggttaacttctttaggttttgtttgtgggaataatgataaatcttgggacaaattcctagagttgttaaccaataag

SEQ ID NO: 47543 - DNA, 391 bp, Zea Mays
aggcggctaaacggacttgagctaaggtgagatccacatggagctgacggttgcgcttctctacatcttctgctcgggcaatcatctgacggtggtgccaagccaagaaatcatactaggcatctagggtgagcaggtatgcagtgaggtacacgaccatggggtcatcctcaagcaactgctgcctttccaatgcacgcatcctggccatccaaattggacagtctctctaaaagggcagaaagaatctaggcggggtgtcggccacttcttcttcataaatctgacacagggccctcaatgccttgcgagtgacgacttgacaggtgtctttgaatatgtgccctacagcagtgacactccattccacatggtgtggactggatccaat

SEQ ID NO: 47544 - DNA, 277 bp, Zea Mays
ttggtatcggctagggtttcctcgatctggcgtactacacacgcagcaagcagatggcggccgcctctgagtccagcatctcggcggcattggaagctcagtccaaatccatggcgacccaatcgcgtctcctccaacagatcgctgagcggctcgacgcacaggacagccattgggcgacgttagagcgccgagtcaccaccaacacccgcgcgattggtgtgctggaggccagggtgggcacagtggatctcgcccaggtccaatcggacctcac

SEQ ID NO: 47545 - DNA, 331 bp, Zea Mays
ctttcatgaagccataacttcacttggccttgtagagctcccatttcataacaaaaaaaacacacttggtcaaataacttcatccacctctattagaacgacatgattggttctttacctcaagtgcttggactctctcttatccaaacacccaactttggactttgggaatggaacctacctttcagatcacacctcatgcttaattgacatttcaacagatatccccaaaagcggctaggtttttgaaaactttttgtatgtgtcatgatgatttttcccctgtggtagcacatggttggtcggtcccctctcaccattcagatccagc

SEQ ID NO: 47546 - DNA, 569 bp, Zea Mays
caaaatagctctaacatttggacatcgctttcatccagcccgtacgtaacgtcgtcttcgttcacttttcctttggtggtagctagagagcactctcgtactgtacgtcactaccgggtaccggccggctatcgttctcgatatggcccacatgcagtactacgtatggaatagaataagtttggggttatcgcattaattaacttgctagtaataattaacacacttcagttaaagcagtagatgcatctccagttttagatactatcagaagcagaagctatcagtgcgtgacaaatacacggggaatgattagatctacactacaagtggtgcatgtatggcaaatagccacatcggtcatactcccaagggtcaccctaaaatatagttctttctaaccttttttattccacattcattcaaatgatattaaatatagacataaatgtaacatacatttacttaataaatatataattagtctaaaaagaattatattttgggggcggagagaggattatagttcaaacacctagtctaaaaccatcctaaatgttataaaagcc

SEQ ID NO: 47547 - DNA, 335 bp, Zea Mays
catgaatagatttgtaagatcgtacaaagcatgccaacagacaaggctccaggctacaggtcctgatggttcaaagcatgcatactagcattgcagtaagaatttttgatggacctgggagagctgcatcacttttttgggaatatctgtttggcgtcaatctagaggtctgctattgtctcaatgttcctatgcccaggacattattagacacgcgggcatggttgattgtaagttggtctccattctaattgatgctcaggtcaagatttctgcttggaatagatgctgacgtcactgcatatcgcagcctagtcggtgctctacagtatccc

SEQ ID NO: 47548 - DNA, 708 bp, Zea Mays
cacccttatcgtttgccacccgtggtcgctttgattatggtacccctgactgcaggacccagatagatttagatccatagattgatggagtcggagtctgtaataaggctaaattcagtgtcttagtcttagttagagttagattgcttatcatatatttggatgcttgtcgtgatgaacttgtaatgaagttggatctttgtaatgattgtcaccaaggtgtgggtatcccctaccacttggtgtagttattaataaagtcagttatttagttgggcaatccctttatttccattttcctctttatctgagaagctgtgttgggagtcagtgaagatgatcaattgttcagtgttataaagatttccatatatcttttctcatgctgaaagactgcagagttagatctgatgtgtgtcctttctacagatgtctgagaaaaggcgtcgaggtgcaaggtgtgctcagcaggagcaacaggcaccccaggaggaggcacctcaacagcagttgccaccgccacccctgatgactattgagcagatgttcctgatgcagacccaagcagtccaagcaattggttagactttagcagcaatgcagcaagtgcagcagcacccacccccacctcaaccccaagtgcaagttcagatgccacaagtgcccagagacaagcgggcagagttcatgaggggccatccccctgtt

SEQ ID NO: 47549 - DNA, 483 bp, Zea Mays
gaaaggcagtgcaggtgtcgaggatgataatggggagaatgatgacttggattttgaagatcaagatgacatggagaagatcagcaggactttgacactgaggctaccaagaataactccatggatgacaatttgactgctagacaggggggtcaggagtcatgaaaaacaatgtagtagaagctggttggtctatggaaaaagtgcaagcattaacagatagggagagggaagaattctacaagtttaaggccaatgagatacaagatcaggtagtgacaaaagagctagagactgagtgatcaggtggtagcagaagcggatggtttatgtgtccagccggctaacccagttgcggatactgacgcagaaatcatgtttcatcccaaggaagcctccctgcctccctgggcactgaccatatgaacatgacgtcgtctataggactgatctgagaagaagtgttagaaggcaaggcactac

SEQ ID NO: 47550 - DNA, 1368 bp, Zea Mays
agttaatggagggttacatttgtagtcatttgttttgcttcataatatatcctaaaattgcaagaatacaatatattataagtaatgttgaaatccagaaacttgaaaaaataggatcaacgttgagggggtgctaaaatctatgaatctcataaaaaatacataaacaaaattcatttttggtttgatatgtggaacaccattcaatgcatagaaccaattggtcattgaagcctatgcactcaacgtgtgagacacatcgccgccgtcgccgagggacccaacccatcgacacgacccagtgaaccgatgccttcgacgccacccttgatcccgcatgtagcaccagcatcggggaaggtgcaaaggctagcggcacggaaggggcgctatcccttgatgccacacaagatgcagcaccaacggtaaggtgtcagcgctatccccagtctcacatgctctccatcatcacgggagtgggcaagcccgagtctcgcttctcctcctcctcctcattccaccgaagtcgacgctcactggagcccggacacgagcctgggcatgccgggcactagcttcacccttaaaaccattggcaagttttcttttttaggtcgaccctccaaagagaattatctcggcatcatggcgcctagggggcttataatcttgctcggctttggaaggaaaactactaaagtagaatgagcaacatattttcaattactgagattatacttttcaaggactttctcaatataacttttctgagatagaaaaggagtaccagcgacgatcatgttgaatttccatcccaagaatcttgtttgttgacccaagatctttcatatcaaattcatgactaagttgagccttcaattcaacaatcagtgacttttcatgataagcgatcaacatgtcatcaacataaagtagtagatacacaaaagatccattagggaactgtttcaaataaatacaatgatcataattgcttcgagaataaccatgtgcgagcataaacgagtcaaacatcttataccactgcctaggagcttgtttcaaaccataaagagatttttgtaaatgacaaactaaatgctcttgaccaggtgctaaaaaccctaaggttatgtcataaatctctatgaagaaatgcagttttacaatcaagttgctctaactccaaatccaataaagcaacaatagcaagcataactcgaattgaagtgtgacttacaacatgagagaacaccccattgaaataaataccttccctttgttcaaaacctttcacaactaatcgagctttaaatcttctaggttcaactccagatataccttccttcttcttataaatccacttgc

SEQ ID NO: 47551 - DNA, 553 bp, Zea Mays
ccaaacatatctcgctttctgtttccgttgtcatgtaaccaatagcagtgggattcattcatgttatgttaaccgctccctaccgccttatagttagagaaaggtgagcgagatctgagtcgttggatcttatgttagcgatttaattaaacaagggggtacactaacttgtaattgtgatgctcatctctagctagatcatcagccacacgtcttccttccacctcccaacacccagcagcttcgacgaacaacaactcactatgcccagagcacggtgaaacaatcaagggtggtcttaccgaggatcaaggcggcaatggcgtgaccctcgatgaacaacgactcagcggcgaggccgacactctattgagcaattacgataacttcaatcctcctctcgcttgactgggttgcggcacccttttgtgtactctctcgaacacctcggtttctcttgaggttcaagctataatacaaataggtcctggattttataaaacataccctaaacttttaaataagtacttgttcgcttcatattaaagtcgac

SEQ ID NO: 47552 - DNA, 280 bp, Zea Mays
ctgggtgtggctgtcagccgcctggttgctagcccgctgagatgaccactgtcggcatgtggcccaggcttggagctagaggtaaatctgtcaaaatgcggttaactctcccgaccatccatttcgtcggtatggtgaggggaggacatcaggctcagcgctgaggcagtttgtcgctccatattctccctactgtaatttaccaaatggaagcctattggaacaacatttaaaagcatggtccaatctaatatatgtatagttctatagtgccaatgtc

SEQ ID NO: 47553 - DNA, 567 bp, Zea Mays
ggacggcaacggtaagaatatcatgtctgtttgaaacttgtatccagacaacaaccattcagcttgacgcagtcgttgggaacaagagataattgcccattagcaacacgtacctgataacatcgatccaatggttgaattcccttgagtagtggcaccaatcgatccgtaatgaaagtatgggatgatctgaaatccaccaagaccattagatgttgctgttgaatagaacctgccaaacgcaatgtggaagatgtatctgatctagtccacgctgctgcagataatgccatcatcacttgttcagttggttcctccactgtcaccccggcctccgattcattcagcatgtcccaaacttcctcggtagcttgtaactgaactgtgttcggacacttgtggccaggcatccatttctccgcgcagcgatcgcaaagatcgtgcgcacgccggtaactccgcagggaagccaatcgatcggaagaacccaatcttctgttttcagtagatgtcctgtcagctcctgagagtaccccatcaatccttccatgattaggtccagccgcc

SEQ ID NO: 47554 - DNA, 488 bp, Zea Mays
aggttgtgataagtgattgtcaacaagtgtagcttctttggttcagtcgggtgtactaaccgggcatgaggttgttggtgtaacatgtctcttagcttgtggtgcgtaggtgaaggtcatgtaggtttataccgatggaccatgagaggtgaaggatgagcattgagtcttgactaagggacatgagaagcttgacgattagccatggtggctgacaacaggggacgctaataggcgcaaggacatggcggagcggatcgtgatgccaacatggttgcggactggtgtgacacatgtctaggacatgagggcatgtatggagtacgctacccgtggaggttttggtggttgagcctaaaaatcacccagtgcgctagttcgcaagtttcgtcgggtttgggcctcaaaacctagtggcgtgattttagagggaattgaaggtggcaatgtggcatcatcacgaagggtgcgtcaaagcgaagcaactt

SEQ ID NO: 47555 - DNA, 309 bp, Zea Mays
ttaagtctctttgaaatccttcaaggaaaatgcttaaaatatttgtaacatgctttctgtagtgcataaactgtcatgagcatcacacttatcctatgacacaatgcacttcacattctatatgatttagatatgttctcattaacctaattatgtgcaactggcattttaggccaaactatgtgttctctccatgcacatatttagggggagcaatctatgttgtatagaactatgatcatacttaattgacatatctcttgatcatgtctctttcattttggtgcaaatgcatatatcctattattc

SEQ ID NO: 47556 - DNA, 648 bp, Zea Mays
caccagcaaatgcatgttggcactgcggagaccccagtcacttcaagaataactgcccctagttgaaagcaccaggacctacctactccaactcggtgaatggccccaagaatacctcggcacctgcctccaaggcactctcctccaacagtcagcagagcaagacccagtatcagggcagagcacgagttaaccacgtcgatgctcaggaggctcagcaagcttcggaagtagtgctcggtgagttccttgtcgaatttactcccgctactgtactttttgattcaggagcatcccattcatttatagccactagttttgtggaaaagcatggcatcccctctacgcacctagaaatcccattggtcacccgaaacccaaggtcagaccttctatgccagctcaaatgctcccaagtcagaattcttttaagtggggtagtgtttttggcagacttaaccgtcttgccatcccaagggattgatgtgatcctaggaatggattggctaactaagcacaagggcatcataagttgtgcaagcaagaccgtccttctcactgaccgccaaggaaaatcagtttcttgtcaggctcaaccacccgccaacgatccaatgatgtttaatctagcagcaaaaagtatatccg

SEQ ID NO: 47557 - DNA, 604 bp, Zea Mays
ttcgaccgtacacttggtggtaccctcgtggtgcttttgggtaggacggtgtcgttgattgtaactcgatggttcgtgccgggggcacgaggaagagagagtcgggcgattttctgcaggtttgggccgcttgaggagcgtaataccctacttcctggggtggctttgtatgcgtggggtgttcaaatgtggtgtctcccgaatggagatgtgctaatgagatcaaaatgatggggatccccttgggccttatatacacggctgtagggcactccctgcgtacatggtgatcacactcttccatcttatctcctagctaatagcgaacagactttgcttatcccgatgaaaactcgacacctccgttctgagctatccccgacatttgaggatgtcaggcgtgggaaaagcgagcagcttcaacaggatcacgcccaagccgcgaataatctagacgtgagcccatcgccttcctgggttggcccatttccaccgatgtctttggctggcccacgacgcgacggccttgcggggcgactagcttatggccccaagcagggttttcgccttctagtggacccaggggatatctgtcccccacaag

SEQ ID NO: 47558 - DNA, 674 bp, Zea Mays
caattttcttcggtactccatgcagacaaacaatccttgacatgtacagctttgctaactgagatcctgaataagttgtcttcacaggtataaaatgtgtaaccttagtcaatctgtctacaataacccatatggaatcatacccatcactggtatggggtaatccaactatgaaatccatatcaatttctttccatttccattcaggtactttaagaggttgtagcaaacatgctggtctttgatgttctgccttaactcgttgacatacgtcacatagtgcaacataagtagcaacatctcttttcaaaccgtaccaccaatatttttcctttagatcttggtacatcttagtacgtccagggtgtatagaataagccgaatcgtgagcttctctcaaaataagttggcgttgatattcatttttcggtacacagattctcttcttaaaccaaattgtgccttgttcatcttctgcaaaatcataggcttttctcaatttaatctatgttttaatttccttattttctcatcggattcctgtcctttacgaatctcttgttccaaagtagattccatttccataacgattgcttccgtattattgaccataccaagattaacttgctccatttcccaacataattcttgcggcatcaaataggtagtaacat

SEQ ID NO: 47559 - DNA, 653 bp, Zea Mays
tcgggacaggagggagctactacacatgaggttagtttaacaaaccattcatttgaaaagtggtcaacttaacattgtagttattaatgtattcttctttcttttagattccaaaccagatagacgacttcgtaaacaacttcttcgcttctggaggtagtggtcacaactctcctatatgcgatgatttgactcttgtagtgaatttggcatgttgcgatggatttgttatgaactatgatggattcttatgtatgtagtatattgtgatggatttgtgagtttgtggtggatttgtgaggtattgtggtggattgtgatgtatttgtaaggaattgtggtggatagtgatatttgtggtgaatgtgtgtaattctgagaatttgtgttgctgtgatagtgttgtgatatatattattgttgaaattgttgttaattttaccttttcatgtttttctctaaaaatgcttattttcggcggacaagaccagaccgtcgaaaataagcctatatagtttttggtggcctatttttggcggtctacacctggtcgcctaaaataacggagttattttcgtcggtttctggccaccggaaatggtttttcggaccctctcgacaatgactacgtctacctgcagtgcttcatcggc

SEQ ID NO: 47560 - DNA, 979 bp, Zea Mays
gcgagacttcttatagatcgatctctataaatagggctatttataagacatttctaaatagtcttatttctattaaagcatatagcctcaacctttcatcagctttatctatcatttcaatgtcgcatgtcactttgatccccttcaactcaatcccacacttgcccctctatctctgcattagcggctagagacggcctctacgctgacgcctcacccgcgagctactgcccgcacggggcgctcatctggtgcgaaagctagaagatgaaggagcatcaacatgggggagctcacgacgaccttgccctacaacctgtggttgcaaccaccataagctggtggtcttcgttgacggtgagcatagtgtatgcctaggcgtggtggccaattatgtgcgcattgcgccgcactagatcccagtgtccctcgtgtggccctaatgcatgcaccatgtgccccacaacgttgccaccaggagagttccaggtgatacaccactccaccgctcctaccacgactgttggggaggccagtcccttcagggcatcgaggtgagccacatcactgtttcttctactattgtgaccctttgtgccttctctatctcacactcttctcgcaggccaagtgagatcaccatgcccttctcgtatttggcgagcggaacaactagcccctagttttccacaccatacacatctagatagatatcttgcctatattttgataagaaggttttgaggccattggtattttactctttaggaaccctatttcaacatccctcctattagacctcatgcccccttcagattttaatgtcaaaaaccctatgagtgttagagatcatagcatatggtggagatgaagctaacaacttcttttgggtcatagatatttttggatgatggggagtaggtggtgaaagaaggaaaagctaggattatatctaaggtccacgtctagtataataaag

SEQ ID NO: 47561 - DNA, 486 bp, Zea Mays
gcgtagggtaaccggcggagtttagcacttcccataagatggaaggaaagccatcgcgagaaaggaagtcagtactgaaacgagagtctcctccactggcgggggtgggtgaattcatctgcggaagggaatcaaagataaagattatggtggaaggaaaaagaaaaagagagcccagatggttttaaagaaagggggttagctcaaaattttaattcctctttgtgttttataatgcatgcatgctggaagaaacgttgcctctcaaaagaaaatagggtgcctttctagggcatccttaaaatataagtactggcccacgaggcctaattagttagccacctatttctccctctatgcctaaggcctttcgttctaggtctagcggtctagtcctgatgatgcgtagcagtttctaggcaagttttaggttttgaaaattggtattcatggtttattgtccttctctgtggtggaatttgctcc

SEQ ID NO: 47562 - DNA, 1149 bp, Zea Mays
gctaaaaggactcaagtcattacttataataacagcagtagcaaagctagtaatgatcattacaaaaacttctagagtgaggaacatgaagaactcccatttgttcttctgcagttagagtacacaaatagatcaggggaaaacacacagaccgtcgcctcctcccgtctccagcagcccatctaatcatcttttggccaaaaataataccggagaggaaaccttgttctaggaaaaaacacagaagataacgaaggaatcagacagcacgcgactcgcctcctccaccctcctattcagcctcctcgcccgtgatggatccaggtgccgacacgacagaatgtagttgctatgttcgttgatgttgtgaagaaagaaaataaccagttccatctggagtgtaatgaccatacctgaaagatttatttcacgtttacaatattcattgttaatcacatccaaaacaacatttttcataataataataattttgccatatacccttttttgatggaaaataacattttgaaatgagacagaagatatctcaccacttaaattatcagtcccacaatgaggatatttcatactatatatactaaaaaggatgccaaccggcatcatatcgccacttttttactatatctgaatcgctcaaatttactttttagtttagttatgcttacccttgtgagatttacaaagtcaatatagccaatgtacgcttatatgggaattaaaatactgtctgaatgcaacaatagcctaacagagttgaggaaaggaaacatcatctaaccaggggatagaagcttcctttgctaggcaatagcttactcagatcgactttggtagggtcaagaaaacaagaagtgaagtaacaaaagatcagggaatcaggaatgctacaagcaagaacccaccactttggcaaggactgtgtcacataatcaatgtagcaaaaaaaacatgtgcagtgcggtagtagcaagggcctagccaccgctggccacccctagctctgtcattgaagtcgtttctttcctaattaattccatatccataacaatataaaaacgaagagcaataaatgttgtaggaggtcgttgtagtatcattgttgaagttggtttgaatactttgtttcag

SEQ ID NO: 47563 - DNA, 605 bp, Zea Mays
gccgaacttttaacggcgacgacgacatctgacgtctgtgagaaaataaacacagtgcaatcgagtgagtagcagaaggcaggtggccaggtcctgattcctgaacgggtgccgcagctcgcaggcacaatcatgaatccataatgacacaggggaggggtcatcatatcatgcggggaaagaatattattacactgctgctgctgccgccgctatactctactatactaggtttttttgaaaaagggagtacaagtagctagtatgaccttagccagcccatcatgcgaggctgggagagggaactgtagcgtgtaaagcagagctgtgagtagtcaattcaattccatgggcgatggatggatcgagtatatatgcatggtattggtagggcagcggccggagcgtataggagggaggcatgcatgccgccaccgcaagaggggtgtgtgtgtgtgtggtgggggagggccggcgggcgggacgacgctggcagtgtgggcaacagtgtgtgcggcgctgatcgatacgacgaacaacctgtgcacatctggagctggtggcctggacctggagcaggcagacgacaggcggtaccagatccc

SEQ ID NO: 47564 - DNA, 669 bp, Zea Mays
gtggcttgcacctcccttttccgccagtttttcgtgctcgtgagatctgggaagggcaaggatcacctcgaggcctactacttccagtcaaggttagacccaacagtgacctatattgcctcccttggcggtgcggggtgggagaactggcgaagcgactgggtgatcgccagcgctgaggccagcgatcgccttgctcttctgagtgacgggcccagcctcgagcggaaacaatagagggtgaaaccatgcctcgtgccggagttcaggcccatcttggacaggattagggaactggtggttggaggcttgacctcaatgcacgtactcggggatttcttgaagcgccgagtcatgccgctgcaggggaggccgcgtctgagttgctagttcaccagccccagcgacattggtaggatccaccgtgggcctaggaccgatctgacttgggaggagttggaaattttggtgaggggggtcactggtgaggcttttatccctgaatccttgatgcttccccaggggatttcgccgctctgcgacaatcctgggttgcggtcctggcccgcctgccgaccctcaatgagagtggtgtggcggtccgccaaactggtggtcgggatccccatcgggggatccatattcccggtgccccgggctgcggccccc

SEQ ID NO: 47565 - DNA, 687 bp, Zea Mays
attttcagaaaaactgtgtaatcctcttgaccttggaaccatttaattcttcattcttgggcttttgggggataatcattatataaaacttgaagatccattgtaggaggacatttcttctgaagaaggatatcccagtctctattttaaattcagagaaaaggttaccccaagtcgcttggttagatagaggtgtgctgaatttaatttagattagatgcagtggatagtttggattgggtctgtgcatatctgaagaagttcttttttccattttccctacctacatgtttttaggctatagtggataagaagggcagatgtttggagatggggttgctggagaaaaatgtgctgccaaggaaaaatggacgcactgcatctgaagccaggtggagtccaaggaagccggtagaaacctatgattcagctatgggtgcgctcccctgtccaaacactgaaacaccagcaaacctttaccctttgcctcactgtagactggtcttacgtggacatgggggtcgaggccgcgtgctagctcatgcaaacctcagctgaaacatatcggcgcccagataaatgcaagtccggccgagtgctctttgttttactataactgtgaccaccagtgcagtaaaccatctctccctgtttgtgtttcttatctaaaaccgagcagggttccac

SEQ ID NO: 47566 - DNA, 711 bp, Zea Mays
actttgggagctcttttaaagataatccagtgagtatttgagtagggttactatagcaagattgtagctagattatagggctagaactttgttataggtggattaacaagttctcacgcaaaaaatggagatctgggcactgcaaacctctatgtcaggtgttctgaatggtgttctgatgatagagtaaactgaagaagatccctggtgcagtgcaccttgccgctgacaaccccgcgcctggattcacgccgccgcggtgattcatgctcactgatgcccggataacgcttcagggtgaaaagatcttcgccatggatgagactcggggctggccgccgtacccccttgccttgcgaccggtctagataagttcgccagagatgggcgcctgccgatcgggcgccacatgccttgaagcttcaccacgtcgcagtaagccgctctagatagctggttcgtcgtcggtaagcctgtcaccgtgaaagccacggagctcttgcgccagtgctctcccctctctccggccgccagcgtgccattccaaattcaagagccaccgccctcgggccctataaatggagtgtgccatcagctccgctaggtaatcatacacccaacgcaccagcccatgcctcagattatccaccagagtgctccagttttgaatttcccccaaatctgtcaagaacaccgcgtgtgtgagctcac

SEQ ID NO: 47567 - DNA, 846 bp, Zea Mays
ggcccttaacaggaaggaggtcaccaccatgaccccgtgtgcctgaaaatagtggcgcaacttcctggtcgcaacaagtataaaatagataagcttgtgcatctcaaggtacctggcctttgcttcatggaggacttcgctgtcgtagtagactggcttctggatggttcggaccccttaggttggttccgagccctcaaactcttgaccctccatcaccatcgtggtggtcgaaccaccaccttctcctaggggaacttttttgactcccctagggatgttgtgccgtcctttttgacgaccagcaccatgctcaccacctctgtagctgctgcaatgtataagtacaacggctcccctggctctggatctaccagtattggtagggacacaaggtgctgcttcaactcttgaaaggcttgttctacctcctcggtccaagagaatgggccggacttccgtaatagcttgaagaagggtagtgccctctcggcccagtcttgatatgaagcggctaagggcggccagtgacccgtaagcttctggacgtccttgattcgggccggaggcctcattgtctcaattgctttgatcttctctgggtttgcttcaatgccccggtgcgaaaccagaaatcccagcaacttccctgcggagacaccaaagacacacttttccgggttcagcctcgtgcatgttgcccgcagcttgtcaaagactagggttaagtcttccactagggtcgaccctctcttagtcttgaccacgatgtcatcaatgtatacctctatcctatccctaatcaagtcaccaaaggtcttactcatcgcccgtacaaatgtcggc

SEQ ID NO: 47568 - DNA, 487 bp, Zea Mays
tatcgtactgttgatggtgcgagtttcagatgcctcccttctatccctttggtgcaaatcttgcattgggaacttgggatgactagcaggaacttggtcatagggaagtggtcctgggataaaggaagtagatggtgacgatgtgctcatcacttgattgctgaagcattttgaggccaaaggtaagtgcagcctggctcctgtggctgaagttgaacatactgcagaacatacgatgaacagtacgaagatgtactaaacacctcctttgactgggaaggttaagcagctaacgaagcaagttctttttgcttgttgattgtgtggtgacaggttcttgttgtgtggcccttgtcttcaccaaaaaacaagaaaaatggcttccttggaggcccattaagccttccaccaaagcttcgacctccccttccccctcttcgattaggcagacgaaatgtgatgtgggaagactgctgctgagagcttg

SEQ ID NO: 47569 - DNA, 701 bp, Zea Mays
ccaggtgtgacaaggtgggagcatggatgctcctggtcagaggcgactccaagttggtggttgaccaagtcatgaaggaagtgcaacctcgcgatccaaagatgctcgcatactacaacaaggtacaaaggttagaagaatggttcaaaggcttcaaactacatcacagttacagacaattcaatggcgaggctgatgagctctcaaccatagcctcagggcaaaaacccgtcctagacaggatctttgactttgacctccacgaaccctccgtgaagatcaagcaggtacatgaagggcacacagaggaggcaaacgcctaggacgcctcgccaaccaaaattggtgaattggtcgcaacgactaaccaaaaagataagcatcggccttttgtcgaccggttgacggacggagctctccttgatgacgcaatcgaggccaagcagatctctcgcaaggcaaaaatcctttgtgatcatcaacggaatgctctacaaaaagggtgcctccgagatcaagcagaagtgcatcacgatcgaggaaagacaacgactgctcgctaagatccatggagggacatgcaggcaccacgcggccccacggtcgctggtcggaaaggcattcaggcaaggattctactggcccaccgccatgacgaacgctaagaggatcgtccgtacctgtgaatgtttctagtacta

SEQ ID NO: 47570 - DNA, 327 bp, Zea Mays
gtttaggtggatgctggagtgcgaattcagttttgacagatccaaactctggaaaagattttcccctccctgctgtattccaccgtgctatacaagttcggatgaggttggacgtggctagaagtgagttagagagggcctaggagtttctaatgctgagccggaaaggggggcttcaccttgtaaatatttgaagcctggtacagtcaaaagaaattggtagaagctagtgactcagctggggtacgctcctctgtcaaaacactagcaagcgctggcctttgcctcactgtagttggagcttgcatggacatggggtcgaagccg

SEQ ID NO: 47571 - DNA, 796 bp, Zea Mays
gtcaaataaaattattgctggttgattgaaaactgagaaagtaccagtcatgtcgggtgctccctcgggtagatcttttagggtggtgaagttcaaccttccctgcttgacttgcaccttctacttcttgcccttgcctggagctacaattggcccttgtcttggttgattgcatgagcaatccttggtgtagtgtattgtgttactgcaagcgtcacatttgtttctggttccgtgacagaacaactttggctgttgttgaggctgattgttccttagagcaggtgttggaaagcgaattggtgcttgctgctgctggggcggcctgatcacccatcttctcgactgctgctgaaatcctctactctgattgctcaaaacaatccggaattgttgggattgcgatgaagatccagtcattggtgccttcctcttcttttcggcccgatgagccatgatgcaatcctcttgagagatggtcaggttgactagctcattataactgtttgcccggacagtgttgagacgttttcggagcttcatgctaagccctctccggaatctatcccttttctcctcataaatgtcggtgtggtacctggcatactgacacaggtcgttgaaagtttgtgcatactgcaacaccgtgcaggttccttgggtcaaggccaggaactcgttcaacttgggggccatgatgcctgctgggatatgatgtcccctgaatgctacattgaattcgtcccaagtcaccatatggtcagctagaagcatggcaaggaagtggtcccaccac

SEQ ID NO: 47572 - DNA, 361 bp, Zea Mays
gccgacgatatgttgccatcggtaaccactactatcagattctagcttcaggaaaccaacactctttgacggagtgctgattatttttgccccggcgcggtcgcggatacatcctaggatttcctcgtcaactccgccgaagagcatgaatcctggctggtagccacatgattttccatattcttctagctcctctttctctgcctcggacaattcctgacctcccaagtgccgaaggtcaaattctttttcttttgacgaagcatcaacaacttctttccccttgtctggcactgtggccatgttttcctctacggtcgcaactgtctcctctgcgaccatatctgatatgagcttgtca

SEQ ID NO: 47573 - DNA, 478 bp, Zea Mays
ggagcagggtttttgaggaatcccaagattgaaatgattgaagcatgctggtgttgccagccttgcgccatgtggtatgtgcggttcgctcgttcaaactggtccacatatgagttgtcttgggtacaaggctgaaggctggtcccgactggtctagcggttggtagcggtaaaatagattgggtgtttggacttcgctgtctaaatcatttctttacttcatttgtaacattccactctataattcgttgcggatacaaggtggagttcgaactacgatacattgaccaacttacttaatgatcaacctctacaatgtcccggtaccttggttggtgcaagacacatatttttctatggtcttaatctttctcccatccatcaatgacgaagttatttgacattataataccgccaacatcgtcattcgccagtctggtatttcaaagccgatacttgctaaaatgggactccaaac

SEQ ID NO: 47574 - DNA, 695 bp, Zea Mays
ttacaaccacagaagaaaaatgctgaaagaactgccgaagcagaggtaaataaggacccttcggcatccggcggagggaacgctcagaagaagcgccagatgatgaatgtgatgagggctatccttgacacccatcctctagtgatttgaaaagagattacccccgctataactgacgaaggtcctcaacaagcaaagctcgagcttcatctccagcaatctctcggtcacccttagcccagatttgagtaataaatatgttacccacacttatggcttcggctgggatattaactaggtctgacggcgagaggctgaaggttggtttgttaacagtccttagctgccgaaggcagcggtcattagctggtcctcctttttagtataattcccaaggatctcattgcacattgtctctattagttccaaccattcgacacatggcttgccgaagcttttctaaaatttgaagcggtagggaagtcatacaagttcatatttattcccttcttcttttttcttcggcattccccacccaccaacgttggaaaagttttattcgccaggtattcttgcaccaaatcctgagtactaatatgctctgcaacaaccctaaattccactttggctaactggcagggggagccgagctgcatattgcacaatggtcgtgtcatgccgaagctcagtctcaa

SEQ ID NO: 47575 - DNA, 403 bp, Zea Mays
gttcccttcatcacccaactctaatccatcccaaacctccacgcacacatgcataagtgaaaggagcctgaacagcaccggccatggcgaggttgaccggcgcatggaagaacaagggcgacggctcgccaaaggtgtaggtccaagcggtttaatggctaccaaatccgagcagggcgagtgcgtagctcggacctgggcgcgcgaggggtagggataggacgtggacgcagagaagcggccggcgtgacgtgagaaacttgcggcgatgccataggaaagcaaggactgcaaagggaggtgtagccatgggagaagaagagctccccactgctctgagttttggatcgagaggaggaagagaggagatggcgtgagggagaagggatagggcagggggctg

SEQ ID NO: 47576 - DNA, 437 bp, Zea Mays
gaaaaatatgtgatctagtggcagtgataggaagtagtgctccatttcccataatgatatatgaaggagtagatgaagagggtggggagatggtggagagtttaccagtgtctacggtcatgtgtgaatcgccacctgaatcagcgtaccactcagacaatggagttagcggggtgagcatcatggtattgaagttatgcgccaggtagtcctgatgccatgagctcccatgggtaggattctagggcaccactaggaaggcttggtagggtggtgattatacctgaagagctaacagagccggtggtggaggcgatgggccatactaaggaggcgatgggatgtaggtgctgccataggtgccaatgcgagggatgccattggagtcactatattgtggaatggtggtgaatactgggggaggtagtgtagggcgc

SEQ ID NO: 47577 - DNA, 654 bp, Zea Mays
gaggaggtcatcgccgctatgctcgaggacgatgcatatggtgcgggcgtgcggcgtgggagtagcgcggagtagaccattgattggtagtgcagagggtcgaggaggtgtcgatcgtcgatggtacagatgtggatggcatggaggaggtcatcgccgctatgctcgaggatgatgcatatggtgcgggcgtgcggcgtgtgagtagcgcggagtagaccattgattagtagtgcagagggtcgaggaggtgtcgatcgtcgatggtacagatgtggatggcatggaggaggcgagttcgcctcgtgagtcatgattgcaaagtgtgtccgtgctagtcgagtgcggcacgtatgagggagggatgggatgaaagttggggttatagtgaaatagggtgcaacgctttaggcctctaataggctatgatgctatgtattgggcctaatactgagttgcggggtcaggccgcatgatgtgcctagcagtggcccatgcttggctctacgcgttgggtcgaattggtccaagtttgtgaaacatcgtgccatgtcatgctcgcaccatgctaaaacgacggggcttcatgttaggtcaacagactgcatatgcgtgtgtagtgacaatgtaggaactacgagcgcggatggatca

SEQ ID NO: 47578 - DNA, 431 bp, Zea Mays
ggggttgttaccaatgagacaatctttgcattggtgtcccttctttcagcatatgtagcataggcgatcttcaggcctcgaagatttcttccttccttgtttcttgcttgctacatggttagtgaatgttttcttttctaaccctatgcctctttgttttaaatggggacaagatctaagtaagtgtcccttcttggagcatttaaaacaaagtctatcatccttgttaataatcaagccatttttaatgtagggacatgacctaatcaagtgccccttttcaaagcattcactacacctcttaatgtgaagtgtggcttgaccattaccttggaagttaccttttgtggaggcgtggttaaggcttttggaggaggtattgaatttcatctttcgtttctccctcttgacaatcctcaagtccttgacat

SEQ ID NO: 47579 - DNA, 1506 bp, Zea Mays
gccagggccctcgcgtgccgcctggtcagctcacctggcgcgcgtttctttcccgtgtgtcactggcatggcgaccccactgcatcagtctcctaggccgagcaggcaacggacggatctcaccggtgcactgggaccacctggcagtcactcgctcacacctcacactgaaatgcgggacccgcatgacagcttcatccccgtcaacgaacttccgcgcatggcggagcgcgtggtcctcgcggggattgcggaatggcgggactgagctcgccgcgtcgtgggggaataaaaccctaagcgcctccgcaactcttctggctcgcccgtactgctcggcgccgccttgtccaccaaaggcagacgccgccattagagggaagtttcgccatcgtagcgcaatcagcgccgttgtcgctgtgaccaatatttcgcgcttgagagtctcgccgtgcttcggggattaatctggtggcctcactgcggtgggtgtgcggccggtgaccaccgaattcgtcgccatagaacagagtcgggagccgccatggtggtcgagtgctttcgccatcgtcgcgggctctctgtcgggtcaaggagactcgcctaaaccttgtggatgctcccatggcgtcggcgggcggttggggccactggctcagacggaatcgctcgccggaatcaatcctcgacgtcagaaccgcagctcgtcgtgacccgcggtaccggcatcttcattcctggtacggttatccccatgagcttcccctcggtccccacaccgtgatgcaccactaggataggcactttgacgcggaggcattggcttgcatccccggccatgggcgccgccgcgtactctctgtgcgccgccctcgctcgtgaccgggggggggaagacgtcgctcgggccgtagatcagaagacggagggctgtgattagaagctcgcgtaccgcttcgggaataaaatcatcgccgcaaatttttgatccgagggctaggctaagtcataggcgtggtactccctcgaccgtcgatctccgatctgagggtcatcgttgcataccgactcagcacgggttggatctaatctcagccgttagatgttgatcgggcggccagtgtaagacgatacctcttcgcagtgcgattttgttaaaaagaccctgtcaaacattgtaatcaacccgcggttcgtctctggcgagctctgggtctcgagaattttagtgtttagcccctgctctttttggaatttgaggccccgtccagagaattataaaatcagggaaatgaatcagaaaatgagtttttaatataaaaacaattcatataagttgtataattcatagaaaatgcatatgaactccaaaattaatgattccagttcctataattttgtaatagtattctatattaaatagtaccactgtttttacatgaaatacacatttaattttatttcccacttaatcctatattaaatgcataaaaccttagaaaatcc

SEQ ID NO: 47580 - DNA, 1027 bp, Zea Mays
ttttttcagagatcttgtgataaagtgagaggtaacattaaaaggatttggagttcagagtgcaatggctatacccatcacttagttctggagggcctccagctttttgacttccagaagaaggaaaatgaaccacttggaccagaatatcttggtgtcatgcaggacacaatcagcaaattgacctatgaaacacttcagtcagtggcttgtgttgtcagtcatgacaaggttacttttgataagactaggtctgtaatggaaaaaattgtaaattctcaccttccaagttacttggccagcttggatcagaatgatattgcatgccagctattcaatatttttagaaatccatgcagctatcgatctggttctgtgaggcttgtcacacctgtgtcaccacaacttttgtcttctattaagcatgcgttggatgagcttgatggaatgccaatgcagggtcttgttgcaatgaataggaagattaaaggaaaatcatgtgccccaaaatttggattaactgctagcttttccaaaagaatgcatataatcaaaatgataagaaaaaggtgcaacaagattttaacagaacttgaggaaggtaattacctgccaaaggaattagcaaaggcaatgtcagtggtgaacttatatcagaagcagaagctgaaaaatgtgagtatttcacaatcagagtttttcccctttgcaaaagaaactatttctttgcagaatgatatcctgaatgccctttggtcacttccaaatctcaagcatgcgaagctgaaattgctgcacaccatactggatcatgattctaaatttgaaaggaagcacttagcaactttgaggaactacttgacagaatgtttgtttggatgtgatgatggtctaccagatgtggccctccaagccatagcctctataaatcagatttctagatgtcagcatgttgtgttaacggaagagagggaggatgctgaggtagatgctgtactgaacttgagcagtcatctcaaagctttag

SEQ ID NO: 47581 - DNA, 1392 bp, Zea Mays
aaaacgacattcattacgccttttgaggccttctgttgtacgtctatgtcgtttggccacaaaaacactagagcgatttacgggctatccaaacgtgcttagccaaccattggggcaagcgggtggaagcctatgttgatgatatagtgatcagaagcacagacccggataacttcattgacagcctctagcaggtcttcatcagcctgaggcgctaccactagaaacttaacccagataagtgtgtgtttgggggtaccagcagggaagctactcgggttcatcgttagtcaccgaggaatcgaggccaaccaggagaaaattaaagccatcttaaggatggaaccaccacgattgcagaagaaggtccaaaagcttactaactgcatggtagcgctatgtcgcttcatctcacggcttggcaagagaggcatgccattctacaaattgctcaagaaggtggatagattccagtggactctcgaggctcaagaagcattagaagcactaaaaaattcctgactgtgccaccgtcctgaaaccacccaaccgagctagcctaccgaccagctgaagatttgttgctatacatctcgtgcacgacacacgttgtaagcaccgcattagtagtcgagcggatagaataagggcacgcacatctagtccagcactctgtatacttcatcagtgaagtcctcgggccctccaagatcagataccctcaagtgtagaagttgctatacgtagtactcctcaccgcgcaaaagttgtgccactatttcgatgatcacaaagtcatagtggttacaggcttctcgataggagacatactctgcaacacagaagtagtgggaaggacggccaagtggtcatgcgaacttggagctcacgacgtagaattccaatcctaggcggcgatcaagaccctggctctagtggatttcatatcagaatggaccgaacaatagatccccaaaaaccccgagtcaatggaggtatggaagatgtactttgatgggtcgttgaagttacaaggagcaggagtcggcttccttttcatcgcccctggaggagatcagctcaaatacgcactacaactcttatttcgtgcctctaacaacattgtagaatatgaagccttgatacacgggcttaatattgttgtatcgctcgggatcaaaagattgatggtttatagagattccctgctcatcatcagccaagtccataaggattgggaatgcttcatggaatcaatgagcaaatactgctccgtaatcaagaaatttgaggacaaatttgaagggctagagttccaccatatagagagacaccacaacatggtagctgatgctttatccaagctaagatcgagccaagcgcaggctccac

SEQ ID NO: 47582 - DNA, 816 bp, Zea Mays
cgccgtggccactggaccctatatgcaatcaactttgaacgtcgtcgaatagacattttagattcaaatccttatggtacattgcttggaggcactacctggaaacaaatccataatgatcaaatgatgataaatggaacgaagataccttggtccagattaataatgagaagacttagcattgccttacatgaagctcgacctgagtcaactgtaccaaagtttggcaactacaagattgggcttcttcccaattgtccaaccatgacaccagggtcaaatgattgtggttttttgtcgcaaacttcctccgctactacgattttgatgatggcgacttatcagaattttatactccggtatgttactagattagtgttctgatcttgcatatattactccttcagatttaatactagcattaatttgatattatgactatttcaggatgaaccattggaccaacgtgcctttgttctgcattatctgacctttcatcgcaacaacagggttgtcccccttcatgcagaactgctgcctttcaagtatgctccaaggaaacgccgctgttcgaaatccaagacttagatatcatagttgaacatgattccctatgggatccagaaaactgtttatgttacttgttaagtcacttatgtcaggcctctgatcatgtgtttgatactccatgtgccacttatgttcgttgtgtccaatgtctatgctacttcgtatcagtttttatttgaagtgtgttaaacataagtgttaccagaatgtctacttatgttatctgttaagaaattctatattgtt

SEQ ID NO: 47583 - DNA, 521 bp, Zea Mays
agagctgatcaaggactatgacctggaggtacattatcacccaggaaaagccaatgtggtagcagatgccttgtcggaagttgcaatgcaactgtgttatgatggattcttgcattgacaccttgtgtgatgagttgagcaagatgaagattgaagtaattccttctggtgctttgtctcatatttctgttgagccagctttgcaagaccagatcatcatggcccagctaagtgacaagggagtgcaaattattaaggagaatctccatcagtatactgagaagtataaatgtttccgccaagatggaaagggtatattgtggtttgagaacagattggtggttcctaaaaacaaggatctcaagaagaaaatcttggacgaggcccatctctccaaattctctatgcatccagggagcaccaaaatgtaccatgatctgaagcccttgtattggtggaccagaataaagagggagatagcccaatatgtatcagaatgtgacacctatcaaaggacaaag

SEQ ID NO: 47584 - DNA, 636 bp, Zea Mays
acaatgtacgattgacgataattcccccgggcacacctcgagagactggagaggtaatacatcttcaaccccttcgtgatggtgcggataaattttctgatatcattgttttttctctctatggcttctagctctagctcaagcacctccccacctccaactccgtcctctgtcatgactagtgtccttaatggacaggtagcttacgtcacgcttacgtgagacttattactagcacaactagtcatcatttcaatcccgacaattatcagaactcaacttgaccctgtagcattcttcctttgcaatgttgcggtgatgttaaccccatcgtactagttcagtctgtgacacagctcgatcaccgtattccctagccttatttgggaccacttaaaatctaattctacaccaaattaatagaaaatctcaccccgacgacttggttatttattgattgctttcatcacagctttcaactacaattcacgacctttgtgccacgagtgatccctaaagtttcagtcgtagatgaagatgatttaaggaagaagattcgtatgataattaaaattacttgataagtggattctctgtgcttatttttttgggcaatcacattattagtcaattttt

SEQ ID NO: 47585 - DNA, 595 bp, Zea Mays
tcgatatctaggcctacacataacataggggtatattagtcttttcccgcatcaactaacatcagttttggactacaataacattaaaggtattaaaatttaaaactgatggtatttaagagaacacatatttttggatggtattgaaagtattgttatagttttgaatgacatggaagggatttcctccggtttttatgggacgaaacgtgcatttggggttgcgcggtgcgcgcccacgtccagcccaaactgaccaggcccagctcaagtcgatccagctcggtaaccaaccacgcacacgtgggtccactagctgttgccgtcgcccttcctccttccgtcgcaagcatcggggtggcgttctcatcacccttcacctaaggccaacttgactatacgcagtagtagataaatactactactgaatttgtcccccatttgttatagtctcaccacctctccacccttcgaaattgaaatcaaatcaaagcagcccaccaccctcgattcattcaccaccacctctccacactttgaaatcaactcaatcaaagcagcccctcctccagtcctccccaacaatcgaattccg

SEQ ID NO: 47586 - DNA, 338 bp, Zea Mays
gaaaagttttgagaaaattgggcccaaagatgggttgtcatactgccttaagtctgaattcagactgacagtgtgattgagccatctttgagctaggattcgagcctaatctagtaagaatttaggagtgattgctatagcaggattgtagctggatcatcaggcaacaattttgttactggtggattagtaagttgccacatgaaaatttgagatccgagccctgcaaaatggtctgtcagacactctgatggtaaccaccatggtacagtaactgaaacagattacaagtttagccccccctcaccgtcgatgacctttgcaccgtgatttgcgtc

SEQ ID NO: 47587 - DNA, 628 bp, Zea Mays
accccctaaccaggcgacccctacggtggcgccgccctagattcgcgacgacgccatagacgggcctcgccgcaacacacccccgtgccccaacctttattctaacgggttgtacaggactatgggacgcgcgcaagttcgatggggagttttattcactgaagatggggtcgaaggaggccggccacgacacttggcggtctggtgctattgaagatactccgacgagcaattatcggagtcgtggtgccctcctgctccctcggtgaccacccgcacttccgcgatgaccaaccgaacaccccgaagccacacgccgtgaccaatcggtggcgcatgcatgattcctccggtggtcgtgcgtgacccacatccaccaagcacagcgctactagggttctggcggcggaagagggcttgggagctgggttctacgaagaacagttacgacacggagtttatgttgcgcacatcagggtctaggtgtggttcgatggccggagatcgcggcatggttgaacggcccacgaccggtagtggtctgaggaagacggacctgtccaggcggacccacctgtcaatggcttgcttcaacggaatgaagccgtataggaagtgagaggctggg

SEQ ID NO: 47588 - DNA, 627 bp, Zea Mays
tctgaaaatgtcaccatttgaagctttatatggtaggaagtgcaggactcctctctaatgggactagactggagaaagacaattctttgggcatgaaattattcaagaggcagaaaaacaagttcgcataatctgggagaacttgaggatagcacaaactcgacagaagagctatgttgataatcggagaagagcactggaattcgaagagggtgaccacgtgtacctcaagttgtcaccacttcgtggaatgaggagattcaaagtcaaaggcaaattatcccctcgctttattggacccttcagaatctttaggcgagttggggagatggcctaccaactcgagttaccagctcatctatgtgatgtacatgatgtattccacgtgtctcaactcaagaagtgtctccacattcccgaggaacagctactaatgaaagagctcagtgtccagggtgatctaacgtacacagagtatcctatcaagattattgacagtttcactcgagttaccaggaatgaagtgataaaaatgtgcaaagtgcaatggagtcaccatggggaagatgaagctacttgggagagagaagaagagcttcgaatagaatttccccacctcttccctag

SEQ ID NO: 47589 - DNA, 2107 bp, Zea Mays
atcaccaatgaagtcttgccaccctagaaaaaactgccccctccattgtcaatgaactagaaggtgacaccaatcatttccactgcaaagagcaactcactccataggtaagtgtccacacctgtagcttagagaccccaagtcatgcccctttcaacccataaagccacccttaccatgccaaacttgcctgacctaacaagaaacatgccttctaccccttggcttcgcactcctagagcacaaccaacacccctcgatgaatatacccccaaatgaggaagacaaagacatttttcgagacaatgaagcctcgatgtcaacaccaaagaccaactactcctcaagagtctctgcatgtgcaacaaaaacctgcaaacacaagaagagaccttagcagccaagagaaagcatagcaaaatccaagccaagatacaccacctcataggaggaaagagaacgatccagagcccttgaacaagaaattgcacacctgcaaagtcaacaatttgcccccatccttctcatcatacagttatattgaatgcctttgacaccaatatcgagcacacctcacatcagggcacgtttcaaggtttcaacttcacagacaacaaatgcccctgtcggcaagactttaggacaccccatgaccttgcaactatagagcgggcaactggcctagatacaatggtaaaaccaacccttcacaattcattatgagctatcaagttgttgtagcttcatctggggacgatgataatgctatggtgaagtcattcatcatagcacttgaaggcctagccctcacctggcacacaaggcttccacccctaaccattaactcatgcaaggtgttgtgcaaaaatttctactcaatttccaagtgtgcatgccagatatcgttgccctcactgagttatccctccgcagacagcaagagaaagaaagcctccaacattaccacaataggtttctgcttatgaagtctccgctcccattagtcaaagaccgcattgcattccattacacaatcaacggacttcgcataggccacatgtacagtcattgcagtagagaccctccaaacacactacaagagttatattagctcttctaaaagtatgtgagatcggaggagttgcattacagcaatcttgaaacacaatggaagcctaaagagcacacaccacaaccagcaaaacatggcctaggggccaacaacagcagcacaaccacgaccatcatcaagtccataacatcaccaatcaacaacatcaacaagctgaagaccccccttcatacccataatcttcctcaacggacatgatgaggaggaagaaccaataagtgtcgaggatataacaagggcccatgcaagaccgcgagtcatatcgtgtttttatggcgaagacattaggcatgtcaccaaagattgccccatcataaaggatgccaaagaaagaatggcgagaacaaccctaaaacaaataatgaagcccatagtccacacctaccaccaacaataccctccccactacacagacaaatagtcttcataccctcaatacacacaaaattactatccacaacccatccaccaagaaatattacccccaccccaccacaaaaaataatacccctagcctgctaactacccaccaccaccaaaatatgaagatgtcttctcccaaccacctgttcacaaaatcatcaacatgatcacatgaggttacaacatggactttgcaaacaaaaaaaaagaagaaagactactattggagggtaaaccaagtcacagtgaccaggctagttgtccaaaaaatggtcccacatcccccaaatgttcgacgtgaaggatgtggacctatgaagttcccatcaagcaaacaccatggtcatacttgcaacatagcagactgggaactacataaagccctcatggacaatggcagtcaggcaaacatcatcttcctacacgcctttgatagaatgggcatcaaccataatctgtttcaactagccgacaaccccctatacggcttcggtggcaaagccaccctccccattggaaaaataatcctatcattgtccttcggtgcattcc

SEQ ID NO: 47590 - DNA, 331 bp, Zea Mays
tcatatgtatcggggttagctggatcataagtctcatcatcactaccaaccatttcatagtcaacaccatctgaaggcgcaagttcgtcattaatgtcattgccttcaagtatttctaggtcactctcattttgtacctcatcctcctcctcatcaacaaccatttcaatatctactttcatttcaatagcttcagtcaagtctatctcaaatcgccccttctagcccatcttcttggaagaactctctgtcatatgtgtccgggtctaagttattaatcttcattgtttggagcaggtaatttactgtgcggtgataccttatacacaac

SEQ ID NO: 47591 - DNA, 571 bp, Zea Mays
ctgaatgaacatcgccatggtacagtgaactaaagaagatccttggtgctgggcgcctcgccacctatgatcgggcacggtgattcgagctcgccgtgaagatttttgcacggctcgacgcggatattaccgggcaagtgaaaatatcatgaccgcggatgagattgtgagctgtccaccgtaccgacttgcttcacgacctgccgaaatgacatcgtcggcgaccgccgctcgccatgaggattccacgtgcttgggggtgttaccacgtcgcaacaggtcacagttgatagcccatttaccaccagggtccttacctcaccgagcgccacggcagttgcactccggccgtgagatcatctcatcccaaattcgcgaagcactcacgtagtcactataaattggaggccctccctgctccaccatctttttgcatgcctagtgcaccactcctcccctcaatccctccatcgtagcccgaggaattggatttttgcccaaatcagtcactcgcgccgctatgtgacgtctcgccgtggccaggcatccacaggtccgttcacgttcgtct

SEQ ID NO: 47592 - DNA, 278 bp, Zea Mays
gagatttgggcactcggcgcggaaacgatcgctcgaaacggggaatttggtgaaattgaagcctggaatatcggattggcatgaaatttggcaaatatgttactggaggtggtgtgaaggttcctgaaaaatttgggttcaatcggggcatttttggctggtttgggcatttcatcgaacacgtgacatgcggtgaattaggttttcggggaaatggccatttgaggtatgaaaaccctcccgaaggagctaagaacctgcaggggattcaatgtagc

SEQ ID NO: 47593 - DNA, 451 bp, Zea Mays
gtgttgttcaccttcgattctttggtccaaacacaagtggatggtctggggtaaatgagggtgtgacgagcttagttgctcgctcatttggtttcttctcctaccaacgatgcctagggggaaagcaagagttgagcatgaagatgtgatgggggagaagcaaagctggggggagtacatgtaaagaagattttttgcgttgtatttttatatgctgctgcagtgcacccaaggttaagagaggtataaagagcatttgttcttcaatcatgacgaatcctgtgtcttatttttagcttagaaaagaaggcgcgctcggactgggagtccgtgcggcgtcgggggacctccccgtcagctgagtgagtgtagtcgggcggcgtcgggtgccaatgcgtcgtcatacacgctacctggattcctggttccgatcgttttgtgtgatggtcca

SEQ ID NO: 47594 - DNA, 352 bp, Zea Mays
ggtgaatccgctgggactaggtgtctagatccactaaaatcaggcccctaaatggtcggttctaaagatcacatcgatatctccccagacaatatccttaggccagctaccgaaagcctatcggctgatgagcaacagctatatgaagacttgatgagtcaaatgagggaggatgcacgtcgccaaatcaccatggctgaggaggaggtgacggggaaattattatcatactttacggtggatcgccaccagaagattaccaagcacggagagatcgatattgcatccctcctacctttgcttcaaatctcaaatgtaagtaaatctgacaacatctgatctattaagaaac

SEQ ID NO: 47595 - DNA, 306 bp, Zea Mays
catccttcttaaaacaagtagcttttccagcttccattttctcatggatatgcttcatacctttatcaaccttctgagcatcaataatcctttgttgaataactaactcaagcttcaaatgcatcaagactccatgttgcactattcccagatttagtttttccatttcctgacataaggtggtatcaggcaaccccatagtgaggcaatgacaaaatgcttcatgacttaaagcatcagccaccacattagcctttcctggatgatagtgaatctctagaccatagtccttgattagcttgagcc

SEQ ID NO: 47596 - DNA, 796 bp, Zea Mays
ggatccccagggaggtgattgagcactttctgaagatccaccctgactccaaaccggtgagtcagaagcctcggagacagtccattgagcggcaggacttcatccgtgaggaggtccggaagctgctacacgctggtttcattgaagaggttcatcacccagtgtggctggccaacccagtcatcgtaccaaaggcaaacgggaagcttcggatgtgcatcgactacaccagccttaataaagcttgtcccaaggacccgtatccacttccacatatagatcaaatcatggattctacctccgagtgcgacctcttgtccttcttagatgcttactctggtttccatcagatccagatgtctagggaagataggaagcataccgcttttgtaacagtggatgggctttactgttatgttgtaatgccttacggtctgaagaacgccttgctgacatttgtacgggcgatgagtaagaccttttggggacctgattagggacatgatagagatatacatcgatgacatcgtggtcaagactaagacagggtcgacgttagtggaagacttgacccctggtctttgacaagctgcgggcaacgcacacgaagctgaacccgaagaagtgcgtctttggtgtctccgcagggaagttgctgggattcctggttttgcaccggggcattgaagcaaacccggagaagatcagggcaattaaggcaatgaggcctctagcccggatcatggacatccagaagcttacggggtccctggccacccttagccgcttcatctca

SEQ ID NO: 47597 - DNA, 429 bp, Zea Mays
ctcatttgaaaaataaagatcggtaatgccatgtatagaacaccgtatactttgcaagcacaaatttacgttcttctaaatacaaaaagtattgtgtattaaatgggtacatcatctttttcggccttggaatcacctttactatccggatcccaggtgtccaaggtctttgctacagaatcattttcctatgggagaaaagtaaacaatcccgtcacctagcaagggcacaagcagcaaaaataaactaaaaacaaggcggcacagagcaacaaagtcgatgtcatcggtacagtcatggctgcaagaaccctggtggctagggcggtagcattcgctgtggcccccatggtttcgctggctggttcccagatctcctccgtagcgctgccaaggacacgcaccatctgcatcgacttccacctcctt

SEQ ID NO: 47598 - DNA, 581 bp, Zea Mays
tcggcgcccatgcaaatatgcaatgcatcatgcagctcagtcaccaaccaggaggcctgtatcatgcaagggtggagtgccatcaggtttctagtagtatatacgtactatggctcttgaatttccattcagattcccttttttcctaccagtaaattgcccatggaaaataaaatctacctaaattagaccaccacaatctgaatgcctaagacgagaatcatacaaataatttcaccaaaataatagtacataaacagccgacaaggtcccatggtgggtagtagcacagtaataaatgctttgctagggacgctctcaccctccattttattatagcacagttatgtatggttctcttgtaccggacgagattatttcgagactcttgttgggcgggccgcgggaaggcgctggaagccctggacatcttgcagatacatgacacgctgaagacgggctggcgcaagtgtaaaatatgggccgagaaggacgtctctttttcccttctcaggtctagctttagcccagctagcccagtcgatattatattttaaaacgaacgggaaatgatttctcat

SEQ ID NO: 47599 - DNA, 545 bp, Zea Mays
ggtggcagtgccaaaaatggaaaatagggaagtaagagggtttctagaatggaatgaacaactagggtatgtactttcttaaattcggatgacaccaaagggaacatatttgtttttttgacagaaaagtgggcaactcaaaaggtttaattggaagcatgttgtgtcaagatacaagatcatcaccagaggcctgattagaggcacatcgatttagttttcagcattttatacaatgaacaacaaaattcgatgattagatagcacacacaatcaaatggacgtcaaaattgtgcttcattgatatgcagtttgggactacaaaagttattcctagagggaaccaaaagctagaccactatcttactactactatcctaatactattctacatatacctaaggtggtgacacttcaccggtggcaaggtggcggccttgtcgccatcactttgatgtggcccccatcaacgttgttgtcatcgttgtcgtcatccttgtactcctactcgttctcctcctcctttaagccctcaagccccgcat

SEQ ID NO: 47600 - DNA, 1186 bp, Zea Mays
aaaataatctttccttgtttgtcagtttacctcaaattttatttttaaaaaagtagtttgtgaaggtaatggcagatgtccactgtggccctttgtgctggtgattttcaataaatcacgttattgttgttgatgtacaaaagaaaggaacaaatctaagttcctttgtgctggtgggtttcaataaattacgcactagattttcgacttccaaatagtagtgcatgtacatcattgttcatttcccctaatacttgatgtgcagtcaagctttcggtgcaaccaaactaccaaaagtcataaaaaatttctcaagaatttagatgcatgtcattatttactctactaatatattagttttcaagttctaattcattctatgttaagagatataaaaaatagaaaaaattatcattttgaccgaaaggcatatatcattttagtgaatctacaaccctcaaagtcattccttcctttggattaaccaacaatgtgcatgatcctgcctgcctctttggctcctacactgcaaaatggcccaaatcaccgaacaacatgaatcatgaatgcacctgaattgctcctgagctccctccacgatgctactaaatacgcaacattgcactcagaaccatcaattaaacaaaaagttagatccaacatataacaaggtggcatcaaagactgcacctcttgtgcagtttaacaggatgatatcatcttaaatgcctaatactgcaacagccaacagtgtactcgcaatccacatttcccggaacaaattagatggaaatacaagacaacatagcataaaaggatgcatcttttcacaccttttggggtcttgaaggcagcagcagtctcgcccacccaacccaaaccttgagcttgggcgatgccgccaaagaaaggcagaagctgtgagccgttgacggcaccaagctggtaagcttcctgaaagactgaagggcgccttgctcggatcagatcttgggagtaccgccgtgcgcaatgcggcaagttggaggggcgtcttcttcgctgtagcttccctatccgatcgtcccgcggcatcgcctgagtttttaatgctccagtccttcctcgagggaggcgtggccggcgaagatgctagctgtcacgaaattcactaattgactcattacaaaaattcgcggtcaacccc

SEQ ID NO: 47601 - DNA, 538 bp, Zea Mays
cagaaactagacatcatccataacaactacgagcaacagctagcgacaacgacatacttagcctccatggtagattaagaaacgctagactatttgcgcaaagaccaagaaaccaacaaagtccccaaaaaccgataagtcctagaagtagacttgtgctccaagcgacatcccacaaaattagcatcaaaataaccgtacaaagactgaacggaagaagaagagtaccataaaccaaacttaggagtaaagcgcaggtacctcataatctgtttcacagcctatctgtgagaagtgcgtggggaggccttgaaacgagcgcacagacacactgcaaagtctatatctagcctcgtcgcagtcaagtacatgagggaaccaatcattctcctatacttcttctggtccacaggctcgctgtcctcatcagcatcaagcgccgctatggtggacatgggcgtcgaaagagtcttggcctcgcccatgttgaacttattcaagacatcctttgtatacttgccttgatgcacaaaggtcc

SEQ ID NO: 47602 - DNA, 405 bp, Zea Mays
taagactcgacgtgagaacatcgatctccaaagcatcttgccaaatagtaggaatagtaacacctctagcctaaacacactaggtattgtacccacaaaggaggctgataggtgggcctatgaggcccaccccctgggggcagttcgtcgcagctccaagtcttccacgcctgtgtcctaggagtcttcatcttgggggtcttcgctccgtctgccgctaggtcttcgggaacagtgggctaggccatccaattttcgccgtgaaggggttgttggccttcacgcttctttggtgccctttagtacgagtatgcctctacgccgagtcaaagccttcaagctgatgcagccccccttttgcctctgttgactgtgtcgtctctagggatgaggacaccattcgat

SEQ ID NO: 47603 - DNA, 788 bp, Zea Mays
ctaccttacgaacccgacgacacactcaatttataggctccgggggcggtggccagtgaatttggagttggcgcggtggcggcggagagaagagttgcactggcgcaaggattggcggctttcaacgtggcgggctcactggggatcaccggacatgcataatgcgagtgactgcgacgtggtgaatgccgaggcacgtggcgcaagaccgcgaggtggctaactccggcgaacctatccaaagcggccgtgacacgctcgggtacggtggccggagtaaaatagtggccggagttcatccacgacgcgatatttacttaccccacgacgttatctaactgagctgagcacgaatcaccacggcgagcacgaatccaggcgcacggtcgccggcggcaaaggggggtgaacctgcgatcttattcagtcattgttcaattagaataccattcagtctatctgacagggccatttacagggcattaatctccgttttttgtgtggcaactggttaatctctctgtaacaaagttctagccctataatccagctacaaatcgactatggcaactatcctcaatcgagcaacagatcttactcaaaatcaagccctaagttcatccaacttcactgtcattgaaagttcagacttaaggttgcctgacagcccgactttggatccaattttctcaaaaaatttcatggcaccaaggcttaatccctatagcaaagttgttctcctatagtagctctacaacttttctatattgactttgagcaaaaacttc

SEQ ID NO: 47604 - DNA, 539 bp, Zea Mays
tagagattcatacctgcacgtcggagcaccagacccactaacgaggcaacaagaggagaggagacacgaagaccagagcgactagatcgaggattagggttacagagagggttgtcggagggataggagaggaggattagagcaccagtcaccagatcgacggatccgtcaacgatcggcataggcttgtcggagtatgcctcggattggaggcgaagtcgtcaagcagaggggagcgaacgagggagaggcggaggccgagaccgaagagcaccagtcactagatcgtcggatccgtcgacgagggagaggcacaggctcaccggcaaccggtgtatgccttggattgggggaagacgaccggaggggagcagacgagggagaggcggaggccgagacggtgagatccgagagtggcaacatgggagagatgcaagagtcgagagcgagaggagaggtcgagaagggaatggattaggtttaggtttcggggagggatggcggccgcggtgcgcgacttatgcgggctgttaccgggc

SEQ ID NO: 47605 - DNA, 290 bp, Zea Mays
tgacactagggctaaagcaatggtgtctactgttgaggtgtatgagccaaggatgccatcgtgggtgatggttgaacccatgaactacaccagaggatatcattcttcagctgtgctcggtggctcaatattcacctttggtggggtgaaaggtgaagcagacacaatcttggatgtggtaagtagcaacgccgattgtcaaatttctaagcatgtccatttggctgtcagtaactcaaataagctggaagcaagaatcatacatccaaagtcttgcatttagctgccag

SEQ ID NO: 47606 - DNA, 595 bp, Zea Mays
aaaaaactctagtgataagcaataatggtgtgagcattgttgtggtaaaagacaaaaccacatatatattgaagaatatttgaaataatggaatcttttgtggttgattgcggtgaatatttgaaatgatcatgtgaatggctattgacgtgtgttcatgtttcagttgtatggagaagaaaagtctaaatgcttggaataagtaccgagttagccaaaaggaaccacacattatttagcatgtagatgccagcaggtgtatcttattttgtcgcaaggtcgcataaacgtcacagaaactggtgcagatattagcatgctctaaagatatggttactaatcttggcagatgatgtggtggctcgcaagcactctacaaatcagcccgcttacattcgtagttttgttttagctgatgaatcgcgcacctcgacgctgcacccagcgatggggttgtcgctcttcatgatcttatctctagctcggtcacttcctaccctccttggggtcataagctcatagttgtgctcagtcggtggtcttcatacacaatgctaaagatctattttaatagggcttagtttctccaaaaata

SEQ ID NO: 47607 - DNA, 640 bp, Zea Mays
cccagtatagcatcctgtttatttcatcagtgaagttctgggtccctcgaagaagaaataccctcaagttcagaagctattatatgcagtacttctaactgcacgcaagctccgtcactacttcgacgaccacaaagtcatagtagtcactggatttccgatagtagatattcttcacaacaaagaagccatcgggagaatagccaagtgggcctgcgagctgggatctcatgacatcgaatttcgacctcgcactgccatcaaaactcaagcactggttgatttcgtatcagagtggactgaacaacaggtaccagataacccagaaaccgcagaagtatggcgaatgtatttcgatggctcattaaagctgcagggagcaggcacagggatcctctttattgcacctggaggtgaacacctcagatatgcccttcagttgttatttccagcctctaacaatgcagcagaatacgaagctctgattcatgggctgaacattgccatatcactgggcatcaagagactgatggtatatggagattctctggtggtcataagtcagataaataaagaatgggattgttcgaacgattccatgggaaaatattgcactgctgtctggaaactaaaagacaaa

SEQ ID NO: 47608 - DNA, 618 bp, Zea Mays
gttgaatcctgcatgagatgagtaatttttggtgtcttgtccaatgggaaaaccatgggattgtatatttgtttgtttttttggtgcatggaagcaaaccttgtgcaaggttataaaaagtatgtcatatttgcatcaagtgaaggtgcattgttctaaatgaaatattattctatctgttagcaatttcattattcctagaatgtatagtgttctgggtctttcctgcttgatcttctacatggacgatttgccctaggcctgctattttcatgcctatattttcactttttaatatttatcattcttgcgctttgtatcatcaaggttcaccacttgtctttttatgtattatcacctagttatttgttcttgtaaatgctttgatgctccataatttgagtttagtcactgaaccctcacagttctggggctgtgagtatcagagtatgtctatcaccttgattttgtttttacatcttggcagctgtcagtaaaatcattctttgtttgttgttatctaaacttggtagtgttgaacacttgatgatgctatgtttgcactttgcagtacaagtttggccctgttttataccttcaaaattaactgtcatggcc

SEQ ID NO: 47609 - DNA, 582 bp, Zea Mays
agccctgcaaaatggtctgtcagacactctgatggtaaccaccatggtacagtaactgaaacagattacaagttcagcccccctcgccgccggtgacctttgcgccgtcgccgcgattcgctctctctggtaagtggataaccacggcggagtaaagatcttggcaccagatcagctcgggctcggtcgcggatgagtttcaccgtacccacttgctcgtcgtgcgaccgggatagacctcgccgccgttggccgctcaccgctatgcaccacatgctaaagcgctagaccacgtcgcagtgaagcaagtcatgcatgcccggtgattgccggagagctgctacggtgaaagccactaaccccaagtgccagtaacattcttcctctccgaccgccagcgcatcgtcgtgaaaatggacgccaccgctcaatcctgctataaattgccgaccccgcctgctccgctaggtagttgtgcaaccagtgaagcaacccgtgcctcgaatcatcccctagaactccccaatttgggatttcccccaaatcactcaagaacaccgagcggtttgacctcgccctggc

SEQ ID NO: 47610 - DNA, 1083 bp, Zea Mays
gcgtcgtgccagaaggacccgcccactgaaatctcggaaggaatggctttccatcgtgttgttcccgacccttttctccctcatggcttcacgacacaacctattgatcatcgggagatcatggtacgtaccgtcactcgcccgcaaccatctgctcatgatgattggggtattgtcctggttcaaccgccccctgaacatgaggtcaatttccactttttcgatgacattgtctgtgagtatctattggagattagacatgtctagattaggagtgttcagcgctcccacttgggtaaggctttggtgaggttccggtttatttttgatagggacaatctcgtggctatgggtccgcaacaagcttagggctttactttcactgtgattaggcacaatgcggcttggaaccaacgagtgttatattttaatcatgaatgttggttgatgcttcttgggtttcccctagatttctggacacacgagcacattcataatgctattgggtcatttggtcgggtgctcatgtgggatcctgatatttctaatgctactagattgcttgttaaagcaagggtgacatctctgcaggaagtcccccattttattgtattttcagtggctgaaggttttcatggggtttcctggactgttcagtgcgacatagttcaacagttcatgcttggtgccttgcctcaggacgaagagcctgtgcctccatatcctcataatggtcatcaacttctggtggaattttttggattggggcagcttgtgcccaacttccaatttgacctcaacatccctcccattggtgaaattgaagatgttgtaaatgacatcattgctgatgatggttgggacccatggccggctgaacaggtccagcaagagcaaccacatgcaccagtgccaattgccaacaatgaggaggaacaatttagttatcagctttccggtcttgaggacttgccttcagatgaatcagtgggtcttttcaacggtatcgttatcccgcaagcagtccacttccctcaggaggaagtccaagatcaaggagtcgttgtgcttgctctaccagcc

SEQ ID NO: 47611 - DNA, 524 bp, Zea Mays
ctgacatcagctctatagcttctggtgacgttggggtccttttgttgatattatcaaggccgaagccacgctcgggcgagagggaattcttcccgaggccatggtcgagtctgctctgggcatgcaattgtgcgaggaacagttgcaggagtggcctcctatgggatttgcagggggcagttggccgaggccgagctcaggcatggcagagttttttccgaggctgaggccgacttcagacgaggtggtgttccctcccgagggtgagatcgtcctctgccatacacacgtcccatccggagttgtttgaactcagcagacgatgtgggggagcagtagccattattcccgggcatgcgtcatcgtagtcggtgaaagtggatgggaccacggtcctgtctttcctatttgattgcaccatcacgttgggtaggtattcgcattgaatgatcatgtctctgtggttccagagacctttgactgaggccggcctcggggttatcctcctgtccgagacgggctcg

SEQ ID NO: 47612 - DNA, 300 bp, Zea Mays
atgtctctttattcatctataacaaaaatggcatacaattgtacatgcttatttatgttgatgacattattattattggctcttcaagctcagcggtttctcatcttattgctcagcttcgggatgattttgctgtcaaggatttagggtctctcagttatttcttggggattcaagtatgtcatacctccaaaggtctgctattatctcaacagaaatatattactgatctgttgactcgtaccaacatgatccattccaagggcgttcctactcctatgctccccaaggagaagttat

SEQ ID NO: 47613 - DNA, 442 bp, Zea Mays
caccgtgatcctcgccgccgttgcgattcatgcccggtggagtgcagataactacacagggtgaaaaatatcgcacaagagatgaacttggggcactatttcgccctatcgctgtacccacttgcaccggcgacgtggctacgcgaccgtcaccgttgtgccgccgtctagctcggttgtgacacgctttaagtcatctcaccactcgtcgcaagccgtgaagactcggcagtgaccgccgtagaccgtaaaccagtgaacgccacgctagcaaactctggtgactcctcccccttttcaccgcgcgcacttccccatccaaattcgccctcctcgtggccgtcctatataaattgatgccttggcttgttctgactacttgttacgaacccagtgaaccagtccttgcctccaatcgttcaccatagcctctcaatttttc

SEQ ID NO: 47614 - DNA, 756 bp, Zea Mays
ggttggggcaggcagtaaaacagtaaatcgatcgcgggcaattagagcgaggctggatggaatagtggtagcgccgggcatgccgcgtactgcgtacgttactctagtagtaaccggtgaatggtgatggatggcagccacctgctgtcctctcgtttcaggtaatcatcaggtgctcctgtaatcacctaccacctcaagtaggatggaactgtttcgaacctactcttctgcaagtaattttttttgtgtgcgtgttctgtggttcagatgatgagtttggtgggcgcaatatttatacggattcgagtctaacgtctctacatacaatatacggcggctcgtgctactgacatctttgttgctcaataatcgtaatataggtcacaagtgggcgagagagaggagctcccaagtctcttatgcgtcggttgacctacaaattacgggactagagttctaagctaagtcttagacgtctcgccttggctccaccctccgggtcttcaggtctcatcgagcgtgagtggtcgtcttccgtcaaatgtcctcctcgtggtttttcttgtggtcctctccttattttccatacccatacccgcatacccaatggtgcgaggattttgttctatatttatacctatgggatattttttgtcctatatcctaatagtataatttcccacgagttagcaggtataagtttccattgacatctctacgtgggaatgatacatgataccgcttgtcaatttc

SEQ ID NO: 47615 - DNA, 806 bp, Zea Mays
gtgctaccgacgatgctccaggcgtgatgctaacgttggtcagatccctcgcaagggagtttgcgtcagcagccagcccaggagcttcaacggggcatgaggcgccacccgtaacgtggttgtgattgctctgtctccgcttcctgtgacaagaaggacggggacggacgtctggttctccctgagtgcaaccaggggaccaagtgggaggagcaccatatcatactcaatgctgagtgacatgaactctaaactcccaaacctgatcaccgtaccgagcctcaggggtggtggaagctagccatatagagttttgatgggaacttgatgctttgcacgcagcgtgcccctacctggtgcaccaactatcggtgtctcgacccgaggacctaaccaactagtgaaatatagctgtgtgcccctaacctggatggtgatgcaagatgacataagtcttttgtcctagtttaggcaagagaaggccctacttccaggagaggggggataagacttatattacttccacctaagtgtttgcagtagggaatacaagctgagtaggagagggaaggatcccaagtttgtggggttgattgaggctggtgctaatatcacggtggaggagaaaactgtgaagtgtttgcgtgccttcctgatgccataggctatcctatttatagccacaggaggggctgcccggagtactagagttggccgcacattgtgagggtgtcaccgtgcccctatagacggtatggtcttgtacttattgttaacttgtgcccgcttgatttctgctgagagcc

SEQ ID NO: 47616 - DNA, 841 bp, Zea Mays
aaagggcacgaaataggttaagccttagattctgtgatgcaaacaccaaattatttcactaaaaagctaactccgggaggcaaaaaaatttgattcaacgactaagggtcgacaatggttgggccttctctcatgaagacaaggctcaggaaatccaaaacttcttctagaatgcgatgaaacatccaccacctaggaatttgacctaaactgggagattctctgatctgtgacataacctctctagcttagacacgcctttttcagaggatgaaattaaagcaagcatcgatcttctgcttggcgataaggcaccaagaccagacagcttcatatgttctttcttcaaatcttgttgggccactataaaatatgatttcatggcggcggtgaatgctttctacaaacttcgttgttgcaaccttcatctaataaattcgtccatcatcatcctaattcctaaaaaagatggagcggaaacagtcggggacttcaggccgataagcctaattcattctataaggaaaatggaccccgagccataagcctaattcataataacttgcatgcttaatccaaaacgagaccattttaattataggtacaatgccaatgtctttgatatatagtccaaaatgagagcttttcagtttgcaagtagaagtagacattatgcctcttggatccttatacataaacaatgcatgccaacaccactatcgttataaagcaaagcaagcgagctaatctctgaacaatgatgagatcgacgtcagcacaagggtagaagaagacaatgacgaagatgttgttgtagtgcagtcgatgggggcgtaaggat

SEQ ID NO: 47617 - DNA, 622 bp, Zea Mays
attttttctggcaaactctcctttacttgctcagttgacctaatttccgaaggtccaggagtagcacctacatcgatagtttttttcaactctccagtttcatctttggccgtcttagccggagcaggagtagccatcttcgaaggactcagaatagtgtctagaatgctgtcctttcttctccctttcctaggcattgctaccaaggctgaagtggttgttactcttgacaacccttgcaccgctggagaactcaccaccttcggctgctgatcagtattgaaactctctgattttgatttctcccgctcaatggtgggaccttcggctactacggcgggtattacctccaaagctgagagggtatcttcggcagattcaacaacctctatctttgaaccctctacagcaggcagtacaacaaccctctccaaaaagtatgacttcggccggtgagttacaattttcatcctctttggtttcgacgcagtagaaggggtcattgatccaattctcttttttgttccttgctttcgagttggaaagcagtaatcaggatagacaaaaccaatgacatcaaaaaatctgttcagccttttctttccacgggccccgaaggcaa

SEQ ID NO: 47618 - DNA, 375 bp, Zea Mays
cagcaattatgagtgggcatattcaagtgtcgaagaatacacactatataggtgatgttgatttggtctgacttgggggtgaagacaccataaccctaccgagggaggatgaggtagtgattttctgaagctttctaaaggttgtgctttgattgccgctacacaaaatgatactgggagccttcaaaaggtttgacatatatttgcaccagcttactcctaatgcaataatgaggctcaaggtttttatcttggcttatgaagctaggacatagagccaagcgtggaatgcttttgccaaatccatgagctagattaccaaacaaacgctattggtaaagagcgtcttcataacaacttcatatgttataattt

SEQ ID NO: 47619 - DNA, 809 bp, Zea Mays
gaaagcccatgacttggattattctattcatcctggtagtaccaagatgtatcaggatttaaagcagaagtgctggtgatatggactagagagaaatatggctgcacatgtgggtatgtgcgatgtgtgccaaagagttaagaccgattaccaaagactagctggactgttacacccaccaaagatgtccgaatggaagtgggaagagattgggttcattctggattgcctcgcacctcgaaaggatatgattcgatatgagttattatggatagattgaccaaagtggctcatttcatcctcgtcaagactacttataagggatctcaattggtagagtatggctcggattgtgtctctacatggtataccgaagaagatcgtttcggataaaggatcacagtttacctctaggttttggaaaagttttcatgagaatacggatgcgaagttgaattttagtttggcctacctcagactgatggactgaccgaaaggactaaccaagtactggaagatatgttgagagcatgtgcccttcagcatggaggatagttcagaccagaccaaagagatatgttgataatagaagaagaccatttgaggttgaggaaagaaatcatgtgtacctcaaggtgtcaccgcttcgtggaatgaggagatttaaagtcaagggtaaattgtcccctcgctatattggaccattcagagtttttaggcgagttggagagatggccttatcatcttgagctagctgataatctatctgatgtgcataatgtatttcatgtgtctcaacttaagaagtg

SEQ ID NO: 47620 - DNA, 653 bp, Zea Mays
gaaaagctgttttatgctggtctttaggtgccatgcggatctggtgaaaccccgctcgcaggtcaagcgtggaaaaccacgttgccccgtgtagctcatctaggaactcatcaatgattggaacaggaaacttggtcttcacggtgagagcattgagatgtctataatccacacaaaaacggtatgtgttgtcctttttcttgaccaaaatgacagaagatgaaaactcactcttgctgggttggatgatgcctgactgcaacatctctgtgacttgtttttcaatttctgtcttcaatgctggggcataacgatatggtcacatctgaacagggcgagcaccagcgattaatggaatgtgatggtcacaatctcgggacggaggtaaactctgtggaacctcaaaaatatcagcaaaggatgctaacaaatgttgcaattcaagaggcaactgaagtacaatggactgatccttagcaggaagaatgtccagtggacagacttctaaaacggcgcattgggcctcttgagcgccgagaccccacaacttaagagatgaaccaccatatggaataaccaaccacttggctgcccaatgaacccacatgggactgaatgtacctaaccagtccattccgagaataagatcataa

SEQ ID NO: 47621 - DNA, 447 bp, Zea Mays
ttcacctctgaggtgcgggtctttctgactgcttaatcaagaatcttcactggcttctcacggtactgaaggtctttctgaatctgcactgcctcttcttcgatgtgactttctggtgtttgcaggcatttgcgtagctgggatacgtgaaacacattgtggatgtaggacatggattccggtaattctagacggtatgctgcgggtcctaccctgccaatgatgggatagggaccgacgaatcgcggtgctagttttccttttacttggaacctcctaacaccacgcattggagaaaccttaaggtagacgaagtctccttcctgaaatatgagttccctccgcctgttgtccgcataactcttctgccgactctgagcttcaagtaaccttccgcggatcagagcaactttctcttccgcctctttgacaaaggcaggtccttct

SEQ ID NO: 47622 - DNA, 549 bp, Zea Mays
ataccagagaaatgaaaaggatctagatagcaacatacgtctttgttatgatgaatctagaatagatggttcacatcatcaaatgttacttagtatcatatgctaagtctataatcaggacgtcgaaagaaaccacactagagacagccacttcagtaaacaacaattctactaaagttgctatccactaatctttctatggataatgagcataaaaggctctcacgatactcattgtcctgtgaggcaggaactcctcaccaaagcgccggtcctttacacccctcccggctctccactccacttagctagctatagccacgacgagggaggtgagaccggacaagcaaccaatcgaggaacccgacccgtgcgcatgctaagtgtgcaagccaagcaagcaacctctttccgccattccttgctttggattaaaaggcacggacggggggcctcttgatctttcgcgcgctgatgaaacgaaagacacctccgccttgtcctgtgagctccgtgctccgtacagactacagaggcatatggatttag

SEQ ID NO: 47623 - DNA, 376 bp, Zea Mays
catgcatgccatcgatttcaagagcctggtggcgctggtcgtcgtgcagttggctaccatcttctgctatcgctgtcgaggcggccatatgtgaccatcagggttccatgcctagcggggaggcctcttcaactagtgttggccatgcccaccagatagtgcagccatgcttggcagtgtagcctacttgtgcctgcacgcgctgctaggagactggaggaagagatgaggtagaggcaaagaaactagatagaatgtgtggattggaataagaaataacagataatgttgttgaattatttgtgctagtggcatgttataacatcagagagaatatgtggattggtatgatatatcaacaaatgacttaaatcat

SEQ ID NO: 47624 - DNA, 1056 bp, Zea Mays
tggcccatgttttagttgattaggtactgagcctgttctgtcatgtgcagctcatgtgtactttgcaggagtcatgacctcatgggacccaaccctgagatgagatgttggggatgactatgaatctatgatgggctgatgactgaccacatttgaccaattctttgcaaacatgagttctctgttagaactatatattacttatgatcaggtataaaaatagaatcctagagatatagttggtttagacctactacaacttaagtaacaaagtcctacaaggacatgtaacaattgtgttgactatatataatgaacatgggcagcaacctaagggcttaagatcttaagccgttccaactatttccacactatcaatcaagcattgctgcatgatgagatttgttgcacagttcggaatagttgaagtggctaaaacttgatataattaaaactgatttagagtcctagtactattcaatgtggcaccatctctttgccactcaaaaaggcgagcatattagcggtctttatattgggataccatttgctatataagacttataagtgttccagtggacagtagagtttgggtgttttttaccaaagaaatggaatggagtgccatttgtgacatgcagaaaaggtagcattagggaacatttggaccatgtaaggtgtattcagggggtttgaggcttagtgatgttagtagtaggtatgatgaatatatgacagatgactggtttatgttagtcttgtgtggctgctcactcagagtctacgccggaactgtttgttgcatttgcatctatgtcctgcacactcctgcacactcataggtcttgtcaccaagggctgtcttactatagcttgctcttaaggccatcattgtgaactaccgcatgcactgcacttgtcaactattggtacatccaactgttctgatataactatcttcattaatactgaatatgaaactggaatttaccacttgtttcttagtgtttgtagcatatgaatctgatcatttcctccatgtcacttttacaaggc

SEQ ID NO: 47625 - DNA, 307 bp, Zea Mays
gtgtttggttccttggctaggcagagcctggttcataagctcatgcaggccaagccaagcctgtattagtggatgcaagtaataatttgtgtggttgtttggttgactgaatgtaaccaaccaggatttggtgagcacgtgtttggtgtgcacatgtataactggatgcaagtaatataggaccgtgtaaaaagctactaataacacaaattaatatcagtatgacacttgtatgtctaatatcattagctgataattttgtacagaattttatattaacacaagttggctactatatagagttttg

SEQ ID NO: 47626 - DNA, 567 bp, Zea Mays
aaaggtttttgtttggattcttctacaagacaagctcctcactgcgaactgttccctctgcaatgggcccctagagactggccttcacctctatttacattgccctctcacccgtgctgtgtgggatcagattttggcttgggaaggtatgaccctccctgccctagcggaccctgctcacttctccaacattaaggaccggtgggaagcagcgttctccctgctcccaaaaacccaaaaacgcgacttatggaaggagagaaataggaggatcttcaaaatcagctccctgacccctatccaggttgccttgaggatcaaagatgatgttttaagttttaggagggctatgtctatagtgtaaatgagttgttgttgggtctttgtagctagatgctctgtgtgggtctgctgggattgtttctcctgccgtgtgtgctacgatatgttgtatccggtcctcgaactttgtctcttgttctctctttctcctttaattggtaggcacagcttctgccattttatttaaaaaaatgacaaaaacgatccccaggtcagcagaaggtg

SEQ ID NO: 47627 - DNA, 473 bp, Zea Mays
ggcaagctcaccggcgatgaatggatgggttatggtgactcactgcgacatggtaaggctttgaggcacgcagctgggtcggataacagagaacttcggtgatgccagcgcgatcaaccgcggcgggacacgacggccggtgagaacagtggctggaggttatctacagcgcgatatttcttaccccttcttcgttatccaccagcgccggacccgaatcaccgcggcggcacgaatccggacgcacgatcaccggcggtgagcttctctgcgctagcgttctgatccggtcactgtaccattggaaacgttcaacagagcgcctgacagagcaacttgcaatgcccagatctcggatttttgtgccagaacatgccaatccatctgtagcaaacttgtagccctatgatccagctacaaatcgactatggcaactatcctcaatcgagcaacaaatcttactcaaaatcaag

SEQ ID NO: 47628 - DNA, 304 bp, Zea Mays
cataaatgccacaaaatcaaatcccataatcaactcacctaattaaatcccttaatcaacacttctaatcaaatcccttgatttatggggggcacatggacgtgggggactattggttgggagcgaatcaacatctacgccatatatgccattattttcgctcaaacatgaagctttttacgctcaaacctattgtgcgtccaccagtgtcccacatgcatatatttccgcatgcacaacaaaagggattcacgtgatttatggtatccaaaactgtcataaaaatcatcttgttgaccattta

SEQ ID NO: 47629 - DNA, 535 bp, Zea Mays
gttcaaaaccttttagttaatatgcccttgatcacccttgcttcttgatggtccatgagcgaccattctattttgcacatccttgatgatctcaccgtttcctcataacttccctcagtaataatttctgttacttcaaccattctgtggggaccttacctatctcaccttgattgtcttatccacttcgccacttcgagagtcttgcctcaactctatccttggttatgctttcacaatcatcatctttacccttgtcgcctctatatcttaatgtgatgcttatattatacctatcctctaaaaccttctctcctccatctcaattttagagttttattttacctattttctcttggtagtatccccttccgcgttgcttgcgagttttcaactccatacttggtttttcttctgtttagtgttgcctttacctttcccatctctcgaccataccttgtgattacgttctgtttgttatctaaaatcaccaatttcttatcccaacttgagagcggtattttacttatctcac

SEQ ID NO: 47630 - DNA, 284 bp, Zea Mays
gagcccactgatgtagaagtggatgctgctgatttagaacccatgattggagcagcagcgttctttccactataattgctttgaatgtgggatcacaagtcttcagttgaaccttttgacgaagggtaaaactcctaagcctaccatgtcaattcattcatattcggttaggagacacaaaaatgacacttgtgctagaaaggtaattagttcacctaaaactagcacaaaggccatttgggtgccaaagtacttgtcggtgggaaaatcctccggccgggtgg

SEQ ID NO: 47631 - DNA, 615 bp, Zea Mays
ctcctatggtctctccttcgtccccgcatcgcgtaggatcagtatattgtagatttggggtcatggggcgctggagatttctcatcggatctcacctctgttgcggctccgctagccaccgtgggtaggcctggcggcccgatggtacaccaattttgtgccaccactgggttcgccttggcttactcttcgcatagcattagtctgggattggttggtgcgctaatgggtgacgaagctcgtcgccggcgcaatcgctgtagtggttcgtactcgagccaccgtctcgcacggtggggggaagaagacagctcttgtgctgtctgattccattcggatggtgtagattagatcaccgaataaccctccgcttgaacaaatcgtaaccattgattctgggtgtgcggtcaggattagaaggtcgcgataccccttcgcaaatgaaattcgagccacaggttttagatctgacggcagtcgtagcttaccgattcatacgcatcgggatctaatctaaaccacagaatgtagatccaacggccctgtgatcacgataccccttcgcgggtacgttttataaaagagaccctgtcttttacatatatcaacccgccg

SEQ ID NO: 47632 - DNA, 867 bp, Zea Mays
gcctaattcatccacacattttctatatactttggattcggccttttagcccgagtgctcctctttgcttcctgaacctcagcgtccgcctcttccatcgcagcatccttcccggtgttcaggtgccctgtgctgctaacatccccttccccttgacagacagcttgtccccaagctggagcccgtgggaactgctgcttgatggcgtgttcatcttcccaggtagacaatgaagccggccagttagaccatcggattaggagttgaggtattaccttgttacctttgcgaagcagcctagactccagcacctctgtgggtattttcagctcctgcagcaggtctggcatggttgcatcggttgtgatacgagtttcttcggctgatttaagttgggacacatgaaagaccggatgaatcgcacttccttctggtaatgccagtttataagccacgggattcacctgttttgtgatcagaaacgatccaaaatagcgaaatgacaatttagtgttcaatctgctccccatcgaactctgacaaattggctgcagtttcaaaaatacacgttgtcccacttgaaacaccctttcagatcttcctttgtcagcttgttttttcatccgatcttgagccctttgaagatgtaacttggcccgttggagcataagttgtcttgttgccagatatgtttgcagatcagcactttgacattgttcaatagttgacagtcctaactgggatggagtgtggccatacaaaacctcaaacggggactgacccagtgcagtgtgaaaacaagtattataccaaaactctgcaagagatagccaattggaccactgtttagggcagccatggacaaag

SEQ ID NO: 47633 - DNA, 841 bp, Zea Mays
tgcaaggctaacacgaggcaacgatcatctgcaacggtgaatccaatggctagtggagcaccggatagagagggaactctgccttgcttgaggtcggcctcgaccttagagaaaactacacctcgctcgacctcggctttgaccaactgcctcggcaacaactccccacgaatcctataggaagccactccgacaactgtactaacccctccctgtatgactgcatgccccgaggcaggcttgaccagggccttgggaggaaccttcgtctcgcccgagcctggcctcggcctacataacatcgaccaaatgatgccaccaactcctccgcgaaggctgcgaacaacaagatggctataggaccgacatcaagtctgctttacaccatacggggagaattaccaagcgcttttcgccacacttatcaccatgtaaacaactatgacttgaaaagcacctccatcagacaggctcgggtacgcatccaagccctagatcctggcctcggctctttgctcgatcaagatgcaaatacagggaccagacatcctcctcctggttcaagtcaatagatagtacgaaggccatactgtcgaccatatagactacagaggctcagactcgtctcctctcccatacacgacaaaccggggtgctcctaggaaccctccttgaggctataaaagggggagtccagggcttcattcggtgaggggaacacttcaccagtttccaccctccacagtgatattggcactcgcctcaatcacctgggacttgggagcctctccctctcctgaccagcttgtacccactactaaaagcacttaagtgcaagata

SEQ ID NO: 47634 - DNA, 1229 bp, Zea Mays
cctgatcttatttggctggcattgatccagggcccaatgttagctgtcatagtctgtcttcttgcactgaggggtctgtttggttccaatgttggggaaggcttgcattgtagccttgaagcaaaaagtaggatgcacaacatggagtttcccataagggtgaacggctgctgtactcaaaattgtcagtctagagaaaagggtgaagggagcataccaaaggtctccagaagtccagctacgtcaggtgagaagaagtttttacagtacatgtcaagctttcagcagtaacacagagggaaacagagagagcagagcatagctattctatttgttttgcaatatgaaatgtcaaacaaatcatatttatcagtgaaaactgtagttacgaaggttatgatgtgaaggaggttagcttatcagttaaaacatcttttcctattgtagagccatcatctccgatatcaatgcctgaactatcttctatttcaaggcacactcgacataattttcatgaagtcttccatctgagacaaggaatttactctgacatgcctatttctaaagttttggagataatgaaatccaccaacttggatgtaagtggaatatagtgattctttctgaaatgtgcgtgagataatgtcagcccaaattctgatctttttattctttgcatcatgtggaaccaattttacagaatgcccctactcagtcacttttgagttttgtgaatgccatccttgatcggatcattgaaaatgagaatggagaaattccttatgtaggctactcaaaagcaatacagttagttgtttcttttcatacatgagaactttggtacatttttgttttatacttctttcatccccttggataaaaagatagcattctttgcacagaatatcgcttgcttgttgagaaaggtaataatggagattgaacgccgcatttctactcaagcagaacacataagaaatgtaaggaatgctattttatacttatttttcaaattattcttgttgtaactcttacttgtatggcagcaaaatagccttatcagagcacgtgaagagaaatataaatcaaggataagagtactagaggcacttgcaagtgggacaggtggacaaatgcaaataaattcaagtgcggcaaatggaaaaataaatgtaagttctagttttcatttgaaacctattatgatgagttttgttagactcttttat

SEQ ID NO: 47635 - DNA, 957 bp, Zea Mays
tggagagccaactccatgacctgaagcttgagctcgatgatgccatgagcacattgatatgcatcatcagaagcagcaagctgctatgaaggtggaagaagaagacccataagagatggaggaagtcattagcctagattctaagattgtgtaccactctagaggaccacctactcttgagtctaatgctgcctcaattaaccattgagtagttagcagatgtgacaagacaagtgtactcttcattgtagcctagctttttggaaccattctacagtaggctagtgagtagagctcttcttttgcattgtaacaccctgtgtggtgcagatcctctatgagaacaatgacataatgcatcggctaatttgctactattctgaatctcacacccttattgtcttgctcgtgatattttctgattactttgtgctgcaaagttttgtttttcatgactcgtctgattattccctaaaagtccctacacataccacttgactcaacgttcatcacatacgttggctcataaaactgatgagagaaacctcgcattcatagatggcaggaaggcaacatcacagacaggaccagcaggctccgccaccaccaccactgtccctaccatgcaggaactcatggctcagcagaacgagattctatggcagatggttcaatgtcaatcctaaacacagccgatgggtggccataaccaccagcacctaccgacaatggctagctatcaagactttttgagcagccaaccaccgctctttagcaagactgaagaaccccttgatacggatgtctggctctatgtcatcgagtcaaagtttactctactcattggggcatgtctagatgccaacaaggctagggttgcagcccagcaacttcaagaatcaactcagatgtggtgggacaactaccacgccatgttgccctcggaccacgtgatga

SEQ ID NO: 47636 - DNA, 473 bp, Zea Mays
tacacgacatagagttttggaaatgggtaaggtgtagcgaaaagaaatgggaaaagagaggtaacgcccgaatttggcgagtgaaagagaaagaagaaaaaatcaactccaaaattcggggcattacatgtccaaatgaggagagattttggggagttcttctcatatacacattttgtggaggatgtctgcctttctgtgagattttgagctgtgcttcagggggagatgtttttgtcgggggagctgttgagcttttcagagcttttgctagttgtgttgagcctttgcctctttcttgaggaactagctttggtttcagcatttttctgttccttatgctctgatttggctttgattgttgactagtggtgttgagccccttttatgcctcttcttgatgactagccttttttgcttggtcgtgttgagtcgttgcccatttctttagggaccaagctttgctcactctg

SEQ ID NO: 47637 - DNA, 289 bp, Zea Mays
tggtagcgctcgtcgcaagcggacgcgccgggtaaactcctcggccatgtccaccgaaacaaagaggagaaaaagaaagcttcgacgtttgtccaacttggactggaggttgactccgctgctccagaccttggtgatgacgcagcgaatgtcgatcttgaagatgacgttgagagttgcgatggcaccagagttagtaggtatgtttcggaggataaggaggatgaagagaatgtgccctccttggttcatagaaatcatcgcagcaaggccaacaacaatgtcccag

SEQ ID NO: 47638 - DNA, 438 bp, Zea Mays
ggccccagccaggaccctaggatttgcagctgcctgaacgccgcatggctgatgacattgaggccagcccctccatcgatcagcacgtgatgcagtcgcatattggcaacaatgggggcggtgatgagcggtagtacgccgggcctcgccatgttggcagggaagtcgagtgccccgaaagagatggtggtgctcctccattgttggtgcggagcagctttggggactcctgggactgccgacaggacctcccatcgcagggtcttgacactcctgcgggagacaagctcccagcttatgccatacatgacatacaacttcttgtgacggtcgtcgtcgttgccggagtcagtttctttggtgaaaatgcccttaaggtttttctcgggcgactggtagccgaggtcctgtcccccacagccgcagccttttcgtcgg

SEQ ID NO: 47639 - DNA, 640 bp, Zea Mays
gatatgccacatacagagcctatgaattgtttctatcataatctcgctgatagcaactttcatacttgcacattcatcagttacaatcaaatgaggtgctgctccacccatggcttcaagaaaagacttaaagcaccatacaaatgactcaatcttctcattagcgatgaatgcagctcctaggaaaacactctgcaagtgatggttgaatccggtaaatggcacaaatttcatgttatattggtttgtagcatatgttgcatcaactgaaacggcatcacaaaaaatactatagttttttctgcttatagcatcagcccaaaaaacatgcattagccttccttgttcatccacctcaaacttataaaaaaaggctgaattcacttctttctttcgctcaagttgagccacaaacatctgtgcatccgcatccttgatttttgacctaaggtcacggtaatagttttgaaggtccctcagtgtgcaaccaacattctcaaaacccccatcactgacatgaagtaatctatatgcaagggacgtgccaatgctagctttatggcaattgaataaagtattctttgccctctcggaaacatgacggtttgatctaagaaaatgccgatgagggggtgataca

SEQ ID NO: 47640 - DNA, 597 bp, Zea Mays
attattttttagcagccttttggatgaccggaatagataaggccccgtcagagtcaaggtcgtgtaataacaacttcagttagtaaaagccagtcaaacggtagagcagaaacgtgccaggcgctggtgaaagctgaaagaaacactctcaaagccaaggtcgtctacataaattaaaaagcagacggcagtagaagccagtatagcagaaacgagccatgagtggatgatgaaggctgaaagcaagacaaaattagaaaaaaaatgacttagagtcacaaccatctgttcggtagagtattttctgtcaccttccgagttgataaaggtcatgatcgtggacggtaaggacgagacactgtatctggcaagtagctccatcgaaagttctctgaagtctcaacaatgtaatattagaaaaaaggcaacagttaaagagattgagattctttgactcggctaagccagtgatttggaagcttccgcaacatgtttgtttcctcttagatttctgatagactcttagttttatgataggactcttgacttgatgagagactatactctattttttttatgttcttacttctcaggatt

SEQ ID NO: 47641 - DNA, 522 bp, Zea Mays
atcgagcccatgtgagagacgttgataactccgatgtgttttattcattatcgtaaaaatctttaagtttgagcataaataatgttagatatagcgtaaatgttgattcattcccagccagaagcccccacatacttgtgaccactatatatcaaaagatttaattagggagttgattagaagatttgattaggggagttgattaggaaatagatttttatggttgtcggacaccataaatcaagggattcccttttcattgtgcacacggaaaatatggcatgcggtacactagtggacgcactctaggttcaagattaaaatcttcaattttgagcataaaatcctcagttttgattataaataccaagtcaacatgatagacgttgataactctgatgcattgtaatcatgatcgtaacaatcctcaagtttgagcttaaatagtgttagagatagtgtaaattttgcacgagtattataagtccatgaaaatatgttgaaacatgtaagaaaatgctt

SEQ ID NO: 47642 - DNA, 447 bp, Zea Mays
ggtcccacaaagataaggtaccctcaagttcagaacccattataggtagtacttctaactgctcgcaagctccggcactactttgacgaccacaaagtcatagtaccaataggcgttatacttcacaataaggaagccgttgggagaacaaccaagtggacatgcgaactcggagctcaggatatagagttccaacctcgcacgacgataaagactcaggcactggttgatttcatatcagagtggactgagtactaggtcctagaaagcccagaagttgctgaaatctagagaatgtacttcgatggctcgctgagactgcaaggagcaggggtagggattttcttcatcgctcctagaggtgaacaactcaagtatgcacttcaactcctgtttccagcatccaacaacgccacagagtacgaggcactagtcgatggactaagc

SEQ ID NO: 47643 - DNA, 339 bp, Zea Mays
aaacgatgatacatatcaaaagctcaaagaagaaaatgagaggctaaaaatgagcctgactcaactaaaagggaaatgcattgctcaaccttctcaagataactgtaatcacatggtgaagaagcttgagacgggaacaaccgaggcatgcactaaatcccttgaagaaaatgtcaaggacttgaggattgccaagaggaggaagcaaaagaagaaaatcaatacctcttccaaaagcctcaaccatgcctccataaaaggtaacatccaaggtaataatcaagttacacctcatataaataaaatcaagaagtgtagtgaatgctttgaagaggggca

SEQ ID NO: 47644 - DNA, 710 bp, Zea Mays
ccaaaacctgcgcagcagccgatcttcagtatcatacataaactaagactatcaatctatcccccattacatccttttaacctacaccgaagtgtctgccgccgcgggaccctcagcagcaccgtctagaagcgtcatttgctcttcggctcccgcatcggctgaagcactctccgggacactgagctttcaaggccggcgaggtcctccatgtcttcctcgttcatcacctgcgaagacagcacaacatgtcaaaaaatgaacacacacaacacctcgccaaaccaacaacatacatgcgccagcgctcggtccgccctttcccggacgatgccaaggtcgtggggggcccacatcctatcataaagcacccctgccacgtcatcttcaatctggaatactccatgatcgaagtcctcattctcccggtcgaagacttcaaaatgcatgcatccctctcgaaacaaagcatttgcagccccctcgcaagtaacgagagacgcgtaggacatgagacctgtcacaatggacgggagcaactccagctcgtcttgcagccacaccagaaagcggagccccacctccttccccaattcgtcaaagggagcggtctgcgcaccaagttcatggtacgcatccacaaaaagcatgtgcgcccgttcgaccccagcacaggtggaggactccgtcctttcacgatggtcatggat

SEQ ID NO: 47645 - DNA, 855 bp, Zea Mays
tgatgtcctcttctttcaaggctgcctatacttgcaagcaagccaacaatgatatcgcctcaacgctggccgcgacaagagaaccgacagagctttagaaggttatcccctagggtgccatggacactcccctcaggcgatcaactgaaggttggtcaaaaagtgacaagcaaaagaaagcgacccaaaagccatactcacctggtcgtaggggattaagtcccacgtcatcgatgcacgggcaatcgaaactgcctcgtcaaagctaccgagcatgcgcacgatggtctccaggctcccgtcgacctaggatgaagccgcctcgataagtcaccactccttcggctccatctcctgtccttcctagcctttgaggttgaagggggaaggtcctcacggcattctctaggagtaggtagtgcagacagcatagaccctagggaggaggaagggacatcgaccagtgatggctggacctagaactttgtggcctccataagcaacgacaccgcccagatggatcacccgccattgcaacgcccaaacatgaaggggccagcgtggcagcaacagatcaatgaccaccacattcgctaacggagccccgcctaagaaaactgccacgatcgccgctcttggcatctcctggatgactgatgaggtcgtcacatccaccataggaggacagttgtcgtgccagcaagcgcagcagttggaatgaccaaaggagctgccctaactagcgttggtagtatgagggctagagaggttggctcccccctttcgtcgcaagggatgcttccttcaccgtcttacgtggcacatacgcactaacaaaggaaatcatataaaaat

SEQ ID NO: 47646 - DNA, 425 bp, Zea Mays
tttaaggttaggctagttccaagtgttgagtgaagttgatggacacttaaattggtgatatgatctttaggttttctttggtcatactataaaggggtatggatgggtaaatctaggtatgttcaatgatgagtggtgatccacacttgtgaaatctaatactatgtagctctataaaagcccgagagaagttttaatgcaaaccaaccaaagggtgtttgaaatatacaaatcgatgacgttgtaggtacatcgaacgattttagtgtgcatggggcatcggtaaggaaaatgcctaattatagagcagaagcaccaatatgtgtgatgtgtacactggtcatgtgcactgatcacgtcattcatagaaggttgtaacaagtatggggagccagtgcgctcatcggatgcattcgatgggctcc

SEQ ID NO: 47647 - DNA, 513 bp, Zea Mays
atcaactcctcaccctcaaaaagatttcgtagatccccctcacctatgctcaccccaatcggtgaggacaacaattctcgtttaccaacccggtctacccgaagacggccacgctccatccccatacgacggcgcctacgacttcgcgaaaactcacccacactatgttttggcaccacccttcgccgcctatacccagtactcgcactaggaagatccccggcaccctccacacgcggcggagactccgctgtagccacatctaacgcagcaaaataatccaagccttcatccgagaactcttctgtccaggaaaacgaactcccagattcaccatcagactcaaaacactcagaaacagagccaaataaattatcctcggcaggcactacggttgaggtcgccacaaaatcagtattgccagcagtgattgcttgcgcatgcccaaacgtcgaaacctgtgtagcaatcgaggttcagtatcacaaaagaaaatgtttacacttaaatccc

SEQ ID NO: 47648 - DNA, 364 bp, Zea Mays
gtgaatgacttgggctgggtgacggatagctgaccatctcagctctctcgaagaacaagatcgtaggagaacctcctagtcctttgcccctgtcgacactttatatgctggtgtggtgtccatcctgtcgctgctgggggtgccaattgccatgcccattgtttgttcggtcccgttcaccggggatcggatcggatcgtctgtccagcagcactaccagttcggttcagatgcaatggaatggaatggaatgcaccaccgcgcgttgacgctggtcgaataaggaggctaatgctgcctcgtctaattcagcggttacggcagaaggtaccagttgccaaaggtcggtagaataagtacccac

SEQ ID NO: 47649 - DNA, 1265 bp, Zea Mays
cgatctaattgaattgggtgggtcggtgagcatcacaaacgaatgagactgcttaaacgagggagcagaaggtttgcactgacctgaatcgagctagccacgatgagatgttcttcgcagtgtattcgaaccggtttggggaaaatgcaaaattcgagctcgctggtgatcggctgggggcaatactgggtgtcggggtacttgagtaccttacggagcttgcggtggcttcaatttatagagctagtgggcggtggccgcaaatttgaagaaggacgcgcgacggtcggaggaagggaagagcactggcgcagtagcttggtgtcctacgccgtggcgattactccagtgatcaacggagagtgagagtaggctacggtgatgcggtggaaaggtagagacacgtggcggacgccggtgatggcttaacggcggtgagaaccttatccacgggttcggtgagcaaggggggaggcacggcggtgagttaccggagttatccttaggcgaagagctgctatctggcaggcttatctggtcaccggtggcgtaaatcacaacggcggtggcgcggatcgcagcggagatcggtcgtcggcggtgagagctctgcgctggcagtctgatccacttcagttattgtaccatggcgagctccattcagatgaactgacagtcacagtttagggccaaattcctctcagatttctatagcaacgtgaccaacactctacaacaaaattatagcttaatagaccagctccaactctgatacatcgtgcatccacaaacagtcataggatcatgctcagaattgagcttgaagttcatgcaattccactgttagtctgatttcagactttaagtagtctgacagtccaactttgggcttaattatctccaaattcttctcaacaactatgcttacactcttaagcaaagttgttctcctttgataggtctatacatttgatgtggtgacctagggtaaattctcaataatttgaaagatacaagggctcaaagttgagtcaaccacactgaaattcagacctaaccaaaagggtcaagtgtggctcttttgcacttaagtccaaatctcaagttttggattgcaaaccctcatgattgggaaccatagtacttaagatgctttattaacatggtttttgcactttagtccaaaagtggactaattttgcacttaaccccctagggtttggatttagggttttctagggtctcaattagggtttctggtatct

SEQ ID NO: 47650 - DNA, 424 bp, Zea Mays
cccgcctgtggtctcgtgagagatttgcgcgaggaaggccgcgacctcgcgtttgcgggtgctgaggtcgccagtggcggcgaacgtggggaacgtcctggcggcctggatgaaggaggcataggtgtagaagcccttggcggggcaggcgtcgtcgtccttgtgcaggaacagggagccgtacagctgctcgctgacgagggccgccacagggacaacaggggcaggggcaggcctcctccactgcccagggccgccgtacctcgcctctgctacgccgatgacaaggaaagcgaccacggaagcagcagtccacaaggcgcaagaatacgccgccattgtcgatgatgatggttgtgattgcgatcaagtcacggccgggtgcctgccacaagtgatctgtgcgtcgggttccccttggatt

SEQ ID NO: 47651 - DNA, 425 bp, Zea Mays
tggttggagctgaacaaccattatgcgtttgttgcttacctggagactttggaatttttttccccacactttagatatttatcttagcaattaaggaacggagataccgtaccttcctctcctgtatgtatttatcgaccaagcaccccagcgcgagaccgtatacgatactggagctggcgaagaaggccacatctcggatcacttttttgctttagcttatgcatgattaatcggagatttaatcttatagtatgatatgatggggctctccgttgctttgctcctcgctcggatgcttggtatggcgggcatattcccactgcttttgaattggactgaaggtacctcagctccttttttttacgtgtgcagagcagagcgggtgggtgccaaagctgctgccgaccaagatttgctctcgc

SEQ ID NO: 47652 - DNA, 512 bp, Zea Mays
gctaaactgtagcaagccaacaaagcaacagggtacaaaggcctccagttccgcgcgcctctccacaaaagcccatctaggccctacccagcgacgttatcaattttgaggccacatatgtgctagggcttttgccagcgtagtagctgccctgccgtctgtgcccttcgacggcgagtagaatcacaggagatccgcctgcttgccatggttcaagccaaacaaaatatgtgaagacaatggcacgttgatagttgttttttatactatccaaataatcttttaatggactattgtatctggaaataatcttttaaagaatagattaaaattttcatttaaaattttaaggtggcattgttggggccttctcaaaaagagaaaacaccctccaaaaataagcgtatgctgctttgtatggcgcacacacggtattctttagtaaaaggcgaaagaatagttcgctttgtgcgcaccacgcagctgcgtgcttgtttgcggtggccacccgt

SEQ ID NO: 47653 - DNA, 495 bp, Zea Mays
tgctggcggtgtgtttgaaaaggttgaagaggaggaagaagaagaaattccgttgatccacaagaacagccgtcactacagaggaagcgacgggggcagcgatattccctcctaagccttgtcggcactcgtcagcctacaagggctttcaatatcaggctttgatcaggcactggaagaggtcatttccgaagatattgtatcagagcctcttaaggctgacattccgaccatatgttcagcggtcccggatggtggtctttcactgcatgattcttctgggcaagaggtatcccgggtggtatctcgtgcatcgtcgaccttagaaggcagtctttgatgcaaaagtgctgatccgagtcaaccagctcctatggatgtggctgaggggccttcagccctagatgtggctgctacaaaaaacccagcccccgagggtggtggagcgggctccctctctgctgcttccatggatgtccatgttgcatcaccgca

SEQ ID NO: 47654 - DNA, 404 bp, Zea Mays
catagaatgaattcacttccatgacaacgcggctttcgtcacagaatgtatacacatcgatgacgaaactgggtagtccgtcacaacacaacaaatgtgacgcgacccctatgaccaaatcgaactcgtcacaaattcgtcacaaacctttatctgtgacgatatatacacatgcagtgacgcactacgaacgtcatcgatgataagatctctactagtgcaagtagtagaaatcaacaactttgttcccaatttaaaccacaaggttctccaaaaatggcttaaaaacttagcatccctatcagataaaatagtatttgccacaccatgcaaacacacaatctcagtgaagaacaaatcagcaacatgtgaagcattatcagttttgtgacagggtataaaat

SEQ ID NO: 47655 - DNA, 526 bp, Zea Mays
attgatttctgaatggcaatgtcgcactctagcatcaaaccggtatagtttgcagcttatgtaccacagttgactgtcaagaaacgttaatacttatgatcacaaggggcactgtatgtgcaaactgttgaagggcttgcactgagtctgctcaagcctgtagaaatcctatttgcataccaattgatgtgcgtatgtggtaatttcgtttgaccggaatggctggcaccaaggagttgtatgtgcggtttaaatgtatcttctactaattcgttaattccttggtaacttcatttcacgtttagagcaaactgtggacatgattgatatggtcttttgtcagcgtgccattctttgattagaaactgttggtgctgtagagtgcaaattaacgaaccatataaaagcagataggttacatattacctcatgaagtcatgaaactggctgtttgcaatgacgtttatcatattatgttcagaagcgttgaactgtccatgcagcttgtagctgcttttgtcctgga

SEQ ID NO: 47656 - DNA, 358 bp, Zea Mays
attcatagagggaaaagggttagcaaagggaatagaagtttctaaccgagaaagattggcatagagatttcgtccccagcagatgcgacactgcgacatgaggggatgaccggcgagcaattgccgcccgagcacgaaccggttttcccccaccgaagacccacatacgatttgggcactcgcgagaccctgcttggtctccccgacggatgatcggcccgcaacatgagattcagctacaacgagttggttctcctcctcacgacgatggacaggtctcggcagcgcagcttggctcacgcctacggttggggaagaaagaagtgtgcgggcgattggcttgtatagcccatggagc

SEQ ID NO: 47657 - DNA, 770 bp, Zea Mays
cacaaatgttacatttcttagctacacaaaaatctagtcttccttgaaaatcttctcagcagcttcgttaagaagtttgttgacagcttcgtcaacagcttcttcagcaattcttatagtttctaccgtcgccttcatggctggatcagcttcgagatcatatggctcaggtggcggtgaaagttcagctacagtaaaagtaataagtttttaatctaaagccagaaaaatactaaagctacgaaacagttaaaatacctatgcacctagcgcgctcggcagcctcttcgactcgcttggcttcttctcaggcttcataagtttctttctcattcttcattatagcttcatgggctagttctcggtcgcctttcatccaaatgttggagtaaaaatttccgcccatcagagtcgcctcagccgaaggatccttcgtgttctccacagtgaagacaacctccgtctgggttgtagctttaacgtgttcgcagccagatttttccaaaattgctgcaacccctctagcaccggcaaaagcgcagaaatcaccgcgatcattaaggatctcttcaaaagctttggcttcttcaccgatccattcgatgattccttcgagatcgcctctaataaatttctactcggatgagtaagcacccacctttgcagaactgtcttttagcttcttggcacaatccaaggatttttcgtaatatctctccttcgattctcgaagctcaactacattcttttgcaatcttgcgctagtccac

SEQ ID NO: 47658 - DNA, 854 bp, Zea Mays
cacggttatcctgaatgatcatgttacatataatgatatatgtatgcatggtcacaccaagtatttggtgggaaaatgatatggcctagcaagaatatggaagggagtcttaagggtctcaaatgctctttgtacatccttctaagcatcctcctagcatgtagcaaacgttcgatgtttcgaagtctgtgggaggggaatagtcttcacaaacactaaccactagaggtagatgccatcgatgagatagtacccttggttgcccatatccattcaccgtaaagttcatatttggtgcttctctcttaagaacgtcggtgaacaacgacgagtggttgagcacgacacgtttagcacattaaagtcattgttcaaccttgctaccccaaaaaacataccaaatccaaatcatagaaggcaaccacatcgagcatgatcattagggatcgaacatccgactttgtaaattgtcttttccatccaatggaacgatatcttcacttctaatacacacaatctatacttgctgccacacaaaaaatctcctctgatcttgcttagcaaaaagtcacctaagatcatcaaatgtgcgatgatgactatagtcctcaccaaagtatgaaataacacccctacaaaaatgtttgagacattccgagtccaagtttttctacactttgatatactaatcaataaagtcagcaacactactgttgtcgagcaagccgagggcagcgatgcatttttgcttgggggagaaatcgttgtggttcattgcatcggttctaagagtgaagtggcaaaagggtatctagcagagttggttagatggtctgagcagcactccttaggtc

SEQ ID NO: 47659 - DNA, 613 bp, Zea Mays
gtcattctcatatgggctacggtaccatggtgtatatgtggagcatgagtttgagggttttctcaacctgcgtgaaaatgtcttcttaatataataccgtgggacggtcttaccccgtaggtcgagtttgtttaatactaaatataaactctatttttatacaataaatatataacctttttgtcttttgtctctctatgtttgtgccgatgaagaaataaaacacggagtgactcttctacatattttcatgtctgcatcgatgacggaaggatctaaggttcggagctaagatctacgatgacgctatactctacacgtcattcatcatcgctgtaccctaactttgttgtagatatgacctacaccaactctccatcaaattagtaagtaactaggcctcgccaaattatcttatgttacaggtttcgtctccatccacttattcaagaagcaccatatgtcgttcttgatccactctaaacccatgatttagcagatctattctagattaagccttgctgttagatacatgttgtctttttaatttcatggtcaaacattgttgtacaactgctagtagagcgtgccactgcaccaccgtcaatcacac

SEQ ID NO: 47660 - DNA, 484 bp, Zea Mays
tagctgcttcacgaaacctggtagggatcttctcaattgattcgtctccctcggtagaccgtgtaggaccaatcggattggggggggcatggctctggggtggtggcttggccgacaccggcaggttctccaccgcgaggatagaagcgccgccgcctgctaaccatcgtgagaagaagacaggggggagatcgtcgatctcggtttgaacggctgagatctgatctcagtcctggcagctcgatcatgggaatcctcaccgtagatccttaatcctacggctcaggtacctgcgggagcttcggcctaatctcgaccgtagaatcctaatcgcgtggagctcgttggtcgataccccttcggcctgtgtattttgcagataagcccctcgccttattagaattgaacccgccgtccactcacgtgggaatttaattaaatctaggtcctgagtttcatagtttagaccctgacctttcgcaga

SEQ ID NO: 47661 - DNA, 415 bp, Zea Mays
ccctaaacggttaaagaacgcttaaactgctaattaaacagaataaatgatcgattaatcaaacgaaaacgacggctattaagacgatcatatttggtcatagtactgtcatggggtggtctgcaggcaacagaagaaggttacgggattttgtggaagttgaggatggatagaaagttaattaaatttacctgcagcaccacgtactggtcctgatgattctgaatcctgatcctggtcctgggccgtcataatggaggaactgaaacccgattgacgactgagactgagagaaagggctgcatgcgctcctggtttctgagcgccttccagccccccccccccccccccccctgcctgcaacatcacctacaaagtggctgcgtcattaactgctgcacatgtaaagaaaaaa

SEQ ID NO: 47662 - DNA, 863 bp, Zea Mays
gtgtgtgtcagtgtgttactctgttacccataactatggccttgtatggttacctagagattcttataatcagataaaatctatccgttagagatccaaacattttgctttccatgtcttggttaatgtgttgtgtgaaagaatctcaattattatccttacgttgcattttcttgggtattgtgcaatgtcatcttattatacatcatgcatcacgtctaagatgaataatattcaatttatttataaaggaaaacaatcaatattatgttacatcaaatcttcatatatatcattccttttttatatgtacattctaataagaccgtaaaaaatcgcgcgcaagtcgcgcgttatacactagtataatagtaatgcctggacgcgcgggacgccggactctgcagcctgcagcagcattttttttcagtttaatggacagctatgcttgctaagctagttgctgatgagagggagtgtgattcggcaggagtgtttcagattatatggtctggtagttgatgaaggtgagcggtcacttggaaagcatttgggtacgtaggccgcgccgactgccgaggcaacaagcatgcatgtgggtcgtgtggacctcaggtgccgcaatctccatgatggcatgcctcgtatcgtagcaatgtcgcattccccaatcaggtcgtagctagcatcaatgctggaacaatcatggcgccatgcatatgaggtcccggccggcgaacagttgccggtcccttttctctcgtagtaccatcgtcgccgacaaacgtgggtcgacgttgtatatttggacgctaaagcaggtaaacaaaaatacggcatgcatatttttatatgtgaattat

SEQ ID NO: 47663 - DNA, 355 bp, Zea Mays
gcacaatattggagacccattctgcgtatctgcaaggtctaataaaatcagcttctagcagtcggtggatttcgtccttgattcgtgggagaagatctggacgaaatgttctagctctctacttgaaaggtctgaaaccggacttaatgggcaaccgatgctctactatctctcggcttaatcccggcatctcagtgtaattccaagcaaagcaatccgaatattcctttaatagaccgatcatctcatttctaggatcggtctccagggtcttgtttacaaaagtcggccttggagttttaccatctcctatgtcgatctcctccaaaggatcggtcgatgtaaacccctgtcc

SEQ ID NO: 47664 - DNA, 554 bp, Zea Mays
aagaactcaaattacactaagtaacaagctcatgacaatagagtacattcatacatacaccaaaaggggaggagcattcaccacacaagtaacaagtgttctgcagaatttttcaagttcacaatacatcacatgttcaaacatgggcatccttgggagcagaaccagccttaggctcactaggcatgggagtcttggctacagtccctaacgctgaaagaacatccacaagaatatcttcaagaaccacaacaccaggcctcttcatcagaaggcgacccgcgcgaaccgccttgtccatcgccttgtcataggtagcctgcagcaccacaagattgctctccaggaccccaatattatgcttggcaacatccagctcttgggacaaaattttcctcgaggcacagatatccttaatggtggactctttggaggataatgaattgctaagtgtcaacacctcatcttgggattccttcggcttatctctcttcctctgaagctcttccatggtaaactagtgacttctctcaagagtcgagagggagttggca

SEQ ID NO: 47665 - DNA, 351 bp, Zea Mays
aagccgacgactcagttgaaggagtacagggggagaacagtcttaccttggcgacgggcggacgatggtggagctagagcgtccgaagtgacggcggagacaccagaacggtgggttagcgttggggacgggccgtgttgaatgcgagaagtcacccgaaagcggacttagtgggctgtggtaacccagctgcagatggaagcgcttccaccaaattattttcacaggcggttccaatagccagccgcccgtagaaatgatttacacagctggttcctaaagccagccgccagtgttaattcactattttcacagccggttcctaaagccagccgccagtgaaactttttc

SEQ ID NO: 47666 - DNA, 537 bp, Zea Mays
ggagatgcagtcaacgacggccgctgtaacttcagcagaaacgcaatcgcaggctgctgcggcggcggcggggagtaacttcacatacgaggacccgcacgctatcacggagggtttctccgaagaaatcggccgtggtggtttcggagttgtttatcgggtaatatgaaccgctcatcatattcatatatatgcatgtgtatgtttcaaactaattaacgaccctcggtagcggtagctcgatacggatagcagggaaaactgccaaatggggaagaggtcgccgtgaagatgctgacggcgacgggccgggacgacgatgagcagcagttcgagaaggagcttggagcggtcaggagtatccagcacgagaacgtcgtagagttcgtcggctactgcaacgcgcatgtactgtcgtccactgttttgtctgatggacgaagccctgtttacgagaagataagagccctctgcatcaagtacatggagaagagaagcctcaagaaccatgtcgctggtcttgactggcactcccgc

SEQ ID NO: 47667 - DNA, 315 bp, Zea Mays
ccttaaggtcctggtacatcttggtacttccagggtgaatagagtaagctgaatcatgagcttctctcaaaataagttggcgtaagtgttcaatttccggtacgtagattctcttcttaaaccatactgtgccttgttcatcttccgtgaaatctggggctttacccaaactaatcaaagctttaatttccttgattttctcatcggactcttgtcctttacgaatctcttcttccaaagtagattcgacttccatcaccgttgcttctacattattgagcaatccaaggttgagttgttccatttcccagcaca

SEQ ID NO: 47668 - DNA, 642 bp, Zea Mays
tcaattgaaagtaaagaccaactaaaaagatctgtgataactaacatatggcataacaattgaaaaccaaagcaattgaaagcaagactaggcatgaaaaggtaaaactagatacataaagtagattaattggactcacacacgagagatgtgtagttaccgcagaatgggagctggctgttaagatcgaggggaggaatgacagtcaccgagggcccttgcttcttcttcttgggtgccatggagcttctcgcaaagacggaatcaggcatgacgtccaaccaacgggcgatttttgaggtggagattgcagcgaaagcaatgctatagggtttcgagcacaagcacggagacaaagcagatataacacccgcccaattgggaacctattatagtgtcgtgactcaaattttcagtcggtcgagtaaaaccaccgggcacgatcttaggaacagaagattggaacgcaaaaacaagggtaaaagaaagcaacctgatgagtttttcaaacccagacatatgaaagagtcccatgcatgcataaccggtcttctttttacataaacagccagttcaatatgaactagcccaaaatacaggccaacactacaactacaacaagccacctaacctaagctggtg

SEQ ID NO: 47669 - DNA, 417 bp, Zea Mays
acatagagtagcaacctgcaacccaaaataaagcatatgtaagatttttttgttcgagcctacttacatatttcacaatgcatctagcacttcctccaatcccagcatcactcttcatgtcgccaacacaccgccaccttgccaccctagtcaccaatactaccacctcgccccctccctcgccccggttgtgccacctcttccccagccccagttgagctgccctacctccttgccaccaaaatcgtgtcatcacaacgcaactccccctcctatcagccatcccatgtgccctcttattgttgtttgcttgccaactgccacacggtgcacacccatagagctgatcgttgccgctcgtcgcactgtgctcgcccctacaccatgccatgctccagcgctcgccctcaactgccc

SEQ ID NO: 47670 - DNA, 511 bp, Zea Mays
gatgaccacaatgcatgaacattttcatttcgtatacatttgcttcttttgttgccccttgcctgcacacaacttgccccaacattccttatagtgtaagagctaaaatagttcgttggcacattgtctttcttattgtttgtgtctggggtatgaacattgtttgcactacagggtgtaggtgcaggaggatcagctgggatgagttcagaagtttcagttgggattactaaaggaggatccactggagtgatgctttctcggttggcctgcattaaacaattgatcaaatagtttatgttgaagaagtttctaacaacaatggtggtaaaaagatacaaatatcaaattttatacctgttgtgctccaaaaaggacaacaaccatttctttcctcatttcttctctaagtacttgtatttttctttcttcttcttcttgtagtgcttgcattttttcttacaatattatttcctgttctgcaacctcactcgcaagtgtttcatttaac

SEQ ID NO: 47671 - DNA, 707 bp, Zea Mays
agacagtgatagcctctgcctatgttggaggtacaggcggcaggttcagagtttcttccccaccgagggaagttccagccccatcctgagcaccagttctggacgacatctgaagaagaaaacatacttgattattacatgccacgattacacaacctctgttacattattccaaacttgttctaattatgcatactcaacttatacaactcacttttccttatttagattacataaggaaacaacctactactatactaatctagtcattcgtgtccttggctacccgctccactgctagctttgggagaacgatcatccacgatgttcatggaaggaggggcaccaaagagatccaactccccataaggtcctccgccagctgctcccgatgcaccagctcccattgccgcaatctctggtggcacgttcagatgcaactagacatacaacacatgcacttcctcgtgcagagtgttattatatgcttgcagattttccagggctatgcttagctcttccacctgggctcgggcagtcgcctcgtaatcctaggctatagattgtgaatttacagcctagtcaattgccctatcccgctccacattctcccgctgcaaacggtcaacctctgctgacaactcagcgatgcggcgactatcacgcgcacgctccctgcttccatggcacagttccatcgttaggcg

SEQ ID NO: 47672 - DNA, 899 bp, Zea Mays
cgcataattatcagaaactacaggggctaactagcaatgtttccccagactcaggattccccacagtgtggactgcaggttgtttatagggttctatggggtcttttcagtaaacttgccacgacgaaaagggtacgggataaccagatccggccgatccagaaccgagggcccatatcaaaagccatcacataattgaaccggtacgcaatattaaccatcagatagagattcgatggccaggaaccaatgtaaccgaacagttattctatgatctattctcgaccgttcgatacacaactagcggctgcgatcacaccgaatgacgggctatgttgtaatcgaatcctaaccgtccacatcagtttgatggcccagattgaatgaggtcgcaatctaatcctgatcgtcgcttacgaatccaacggccctagggctttcttccaccacccgaccgaggccgagcagtggcatcccagcccaagccagggagctcaccggagcaccccaatatagcattcccgggcatgattaaccctatggcaggtcaaaaattaaagcgggcatcaatagcgaagcaaccgggaaggagctcaccgtggatgacgtgcacaggagcatcgtccatgacacagggcggcccgcggcggcgttatgtcgacgacgagcaattgcgccaaatccgaagcttccccatggatgccgatgctttgtatatcttctactcaacctagtgattccccagagccacaaatccagccccgaagacgcccctttcaacgagattatgcgcggcgcggtcaggggatcctccttgagcgagttcccagctcgtggtgctttccgtgatgaagatgacgaggggaaaggggcagggcgcttcaggatttatatctgct

SEQ ID NO: 47673 - DNA, 366 bp, Zea Mays
ccagcccagctatcccttccgccacgagacgctagctggtggaccccaccggtcagttactcacgcatacacacggccacgaatgactgacactctgggcctacatgtcgggcggtactgtgtttcttcctgaggcgctggcgcaaccaccctccccgcagtccgcgcgagcacctccgctcctctcgccagctacgcctgtacgacccgtccgcccatataatccgcctgcagcctcgccacctcaaccccacgaagtcaaagccgccacgggatcgggtagaaaccactagtgcgctgtgaatttgagggtcagtggagaggggtcgcaccgtgagctttcaccgccgtgcgcccggattgagc

SEQ ID NO: 47674 - DNA, 880 bp, Zea Mays
tccgactggagaaggatggtgggttcatttttctatttcatcaaggactcttttgcaaactaaccacagcgaaagggtatggatgcgtcttgttcgtcgtattggcccatgacggtcgtagatcgggtctgaattggtacgcagccctggacaccggattaccgttcaacggcccggattttaaatcgctcggccgatccaagacctcccaatcctagatcaacgcaccggattgatctcactgaatctgtacgaagactctaatcctagccgcagatcacaagatggagtatggacacctcacatccgtcttcaacctctggccgagctaggcggtggtcctcccgccacgacccggcagtcccgcggccaatccatgccccgacgcgctacacaccaatcgatatactattcgtgatgcaaggaacaacacgatcatggtggtggccaaagtacccctgggggtggcacaaccagcacatccctcggcaaaacatagagctgcggcgacattcaacaacgacgagaaattctcgaccctatatgacctaatccttcctacccgtcgattcaatacttagcttgcatgaaaacgaggtactagaagggctctcaccggtggagggggatgcaaggatctggttggcgtaaggggcagcttggcgctgagacaactccgtcgaggaattccacccgacccggtcccgctttccaccacaatcggtgacgtccacgctcagggcactccggggattacccaatgcacacaccgcgcagagagggtggtccttctcacttgtagacgacagtgtctcgctgttcctctcgcggcgctcgtcgtatggccctctgcggtcgcccggtatctcggtggttgcag

SEQ ID NO: 47675 - DNA, 606 bp, Zea Mays
cgatggtgagatgaacgctgttcttagcatgctggctggggaatcatctgactctgcccacaccgagccgatggtagttgcgattgggcaggaccttggtgaagacgaggaaattcggaaaccagaaggtgctcatcgcaagcgatcacacagagtgaaccatccagctgcacctgtcgaggagaagaagaagaaaagatgactccggcggttatcttgcttggagcaagatgctggcccctccacattattcctcggcgatggcccagcgagcaccatcctccaggacaatgctagaggttgtgatgattctcgggttgccgacagtgtgcttgatgaggatgaggaggaggaagaataagaagttccgttaatctgtaagaacagtcgtcgccacatgggcagtgatattccgatgcaggccttaacaacgcttgtcagccttcaggggttgtccatatctgattttgaccaggccttggaagagatcatccctgagaaccttctattagagcctcctgaaactgacaatcccatcatctgttcagaggcccaagatgatggccttctgccgtgtgatcctaccgggcaagaggcaacctggac

SEQ ID NO: 47676 - DNA, 649 bp, Zea Mays
atcatggtacatgaagtatcgcagtataaggaagaattgccctcattacaagtgcatttaccaacaacaagatctcttagtacgacaacattcttctatcatcccatcaaccaaaacctagaataccattaactcgtgtacaacttggattgacaactgatgtatccaaaaaaaacttagacatacagggtaagacaatatctactacacaacatttagattttttaccacatcaaaatggaaggatggatgaaaaaaatatggcactaaaagtgcatagtatcatatgttgaaatttgacatccaactatgaactttatcagataagtatccattaccatccaccacaaacatgggaagaaacatccaaatgcaaaaaagaactgatagaagtatggaaaagtagagagtttttaccatccaacatttagattcttctatcatatgtttttctttttggttgtagcagtatagtccttcccacagaactgaagactagaaactggttaaagaacgtgatcaagatatggaacacgcaactataagagcacttatacagatttagagtcaccttttcgaacagttgcccacaaatactggttaaagaacttgacaacctgcaatgtcctaacaaatgtaagagcactta

SEQ ID NO: 47677 - DNA, 411 bp, Zea Mays
tttgatttgtctttgtaatatgagcagactagcatacaacacgcgtgctaacgttggtgatggaggactcacaaaaaatctcatgttgttattaaacaccaaaacatttgagatcctagatgcttttaggctttagggccacatttgcacgaggctaggaggcaacgacatgctccttctctttctcctttggctctagaatgacatttctaatatttatactacaaatgaggacatattattaaatttaagcaagaaaatacaatgatcaagaggtataaaaatgcagtcttgttaccacactcaaactctagatatccacaatcacataaaaaagagttctcaagtcgttcattggcagctctgttcttctccttgcctatcatcggcgaagggttgggagagacggaa

SEQ ID NO: 47678 - DNA, 486 bp, Zea Mays
tacaaacccccctaagtgttgcagaagaatttaatgttttgaattatatagtgttctggccaaaagctaaataaaagagggaaaaatagttacactgttagactggggttaagaaaaatcagagaagtacttaatccctccctaatctgtttaaaaatagtaaacccctcagtacaccaaagtaaggaagggtttaccatttaaaatcattttagcccaaagttgaagaaaatagaaaaggtagtttaaaataagaaccaggggaaaccacatttttgctagctcacttagttagtataattcactggaaaattttgttagaccctctgttagtgcaaaagaaatgtattttcttttatttcatgaaaacaagaagaacttagaaaaatcctagaaaaatagtcctgaagggaaaacacccaaaccttgggataactaatattttgttattatgaatgtagaaaaatatgagttctgttgtttgat

SEQ ID NO: 47679 - DNA, 434 bp, Zea Mays
aaatagacaaaagaccctctaaataagtcaatgactctttcaaaggctcaatggctagactcatcgagttcgctcatatgtcctaagtagaaacaaagcacatcgtaaaatgataacaaacctccaaaggaacgttaagctcctctagatgcttgggggctactattaggggagaaaatcataggtatgacttaatgtgggatgaaccaagatgataagtattcaaggaatttggatgccattacgacttcatgaggttggccacatttgaattgaccaccgacccacacgattctataaaaaggacgacactgtctcacaattctatctcgcacaatatcgacccttaagggctagagggaacaagcaacttatccccaaagtcctcgcttcgcctgacctctggcccttgattgacagaaccaagaaaccat

SEQ ID NO: 47680 - DNA, 307 bp, Zea Mays
gatacttaattgttatgattttgctcccactaattttgatgttctttaagaacataatcccttgtacttattacggtgtaatgtagataactcatttacttagaatccaaattcctatcgttagctagattgtacttttgtcttgataaggttatagtcaaatattcatcaatcggtattagccagaatgataaaaaaatgaggcatacgagtttctaataacaagctttgttaaactaatttaataaaatatgcgttggccaaaataaaatgtacaacaactttcgctaaaattagtgaaaacaag

SEQ ID NO: 47681 - DNA, 434 bp, Zea Mays
tcccgaacgaatccctccaactaatccccatactccgagcgctgatgaaggttcgcgtccatggcggcggctgggcgtggtccgaggagaaaagggagcggcgggccctccatcacgcaacgatgctgcacagttcgtccacggagtcgccatccaagctctctccccaatttctctctcccttccgccgaattacccagcctggtggaggcatagacgccaacgcaggctacggcaagatggccaagggttgagtcgtgatggcttcctacttataccctgaagtccggtttgttcatgggatcgcagcaaacccgatcttggcgggattgagcagtgttcggggtttgttaggcgatgagggaagtccgagcaggaggaagaagctgacgaggcgggcccacgcgacagcagcacacgggtgacgactaggg

SEQ ID NO: 47682 - DNA, 345 bp, Zea Mays
gattgatgagcaagtttgttgaagtgtgtctggcctggtgctgcacgaaaattggaataaactatgccaaaactctctgtcaggcgtgttatgttcaggtctgattcagttcattaaatttttcagaaacaacttgctacccttagctttggacccctgtaacttctaatctgtggactcgtggtcgatcgtcattatagaaaattttgagagattttgtaggggagcaactcttattaagtgatataccactgaaattgtctggagctatgagaaatttgtgcctaattacgcgatgtcaggtcataaagagtgctttgaatgccattcaagtctgaactccag

SEQ ID NO: 47683 - DNA, 545 bp, Zea Mays
ttcctcttgatgtgccctttttcttcctcttttgctctttccacttgaatagctttattggagaggtgagagaagctatggaagtcttggctgacaaggatggtcttaagctcgggtcttaatcctctcaggaaacgggccatctttctggactcggtgctgacatcctcaggcgcgtaacgggccaactctgtgaacttgtgcacatactcactgactgttctccctccttgagttagctcccggaactcatcttccttgagttgaactatcccctggggtacgtggtgctcacggaaggctgcttcgaaatctgcccatgtagcatctctgactgcttcactgaaggtgtcccaccatgctaaagccattcctgaaagctgatgagctgccagctgaacacgctgattctcaggacaagcgatggcttccaacttcctcttgatcgtgcgaagccagtcatctacatcgaggggattgctggaccccgcgaacgtgggaggcttgagtgtcagaaattctcccatcctgtcctggggccttcc

SEQ ID NO: 47684 - DNA, 338 bp, Zea Mays
aactgaaggcacaagttcatcattaatgtcattgccttcaagtatttctatgtcattctcattttgcacctcatcattctcctcatcaacaaccatttcaatatctacttctatttcgatcgcttcggttaagcccatcttcttggaagaactctccatcatacatgtccaggtctaagttataatcttcatcgtttggaacaggtaatttaccgtgcggtgataccttatacacaacatctcaacccttaagatgttccttcatttggcacgcatatgggagataatacacttgtgtggccgattgggccacgatatagacatcgtctccttgtaag

SEQ ID NO: 47685 - DNA, 597 bp, Zea Mays
cagggtgcagaagaatgttgaagaagtttgggactccaaagaaagatgctacgaaacatccatagaatgcgcgaagaaactgaaagatagctttgcaaaagatgggagcatactcttcgaagcaaaaatttatttgtggtgatcccgaaggggttatcagtggatcgtcaaagaggccgaagcttttgaagaaatactcagcgatcgtggggacttctgtgccttcgccggtgcaggaagggttgcagcaattttagagaaggctggatgtgcatatgttaagacagtagcccaaccagagtttgttttctcagtatatgacaccaaggatccctcagctgaagcctctttgctaagcggaatattttactatgatgtttggatgaagggcggtcgtgaagtagctgatgaaatcattaaaaagagtgaaaaggaatctcatgacgcccgagaggaggataagcgagctgaagaagctgctgaacgcgccacgattataggtactttttatttaaagctttttttcattgttcatttctagcttcgaaattcatcatcaaatactttattacagtcaacctttctccaccaccggag

SEQ ID NO: 47686 - DNA, 342 bp, Zea Mays
cgcggcggccagaactccaccgtggcggcgccatcgccggtgttgggcgaaattgaggtatagtgggtaatccacaactccaattgaagttatgcacagaggggaccgaggggaacccaacggagggcttaccttgagcagacatcaacgcagggagctcgaccacgtcgccatgcggcttggtgatgaccagcaaagtccgccgagctatcccgggcgtccccggtgtcgatcccattcgataagggcatggtcgtcatccagccgacccgcagagcacccccagccggacgtagatgccacaatgtcgatgcccgcatggattaacgaaggcggccacag

SEQ ID NO: 47687 - DNA, 867 bp, Zea Mays
gcggcggcgtagggaagaggcgaacgcgaggagcttttatccagaattggcttcgtgtggggaattggaacggactggccgagggaagcagtcttgggtagtagacgcctcggctccgttagcgtcaaacgctggtggaattgttagctgggccaaaacgtccaacgttcgtggacggagggagtatattataataaagtctctacagaagcatgcgacgtatcgacaaacgaaaggggatatagggatacgtgattgatatatacactgtgtctctctgtttgtgtatttatctatctatcaatctattttgttttgttttggactggaactaacagcgtgtatatatctaccacaccgccgtcttgcgtatctatctatctgtctgtctgactgaagctgacacatcgcatctctgttgtgattatgaaaatactactcgtgcgttgttgcagctgtcttcttgaatgtatccatccatccagtggattccaatgactcagtcacgccctcgcctggaacgacgtgcgtttaattgctcataaactaatcacagacgccgccatgacgggcaaccgtaccacaggaaagtaggaaacctgcccgtgtcaccggtcagaacgatcgcgcaggggcagagaataccttgcgatggcctcgattgtaccatacgctgacgcctcggttttcgaatatttgtttactaatttatttttatactaaaacgcgataaaataaaataaaacggagatgatgacatttatttttttaagcatgtgggaagaagtcgtcgacaataatcaaggctagcgcctggcacaaccacatatatgcccttctagattacagaaaacagtagccatgctt

SEQ ID NO: 47688 - DNA, 823 bp, Zea Mays
aaaaccagcaacttcttgaatatatacagtacaatgagaacataattgataacataaaaaatagagttgaatacttggcaatcgacacccttttgaatactaaaggtagaaaatttatccatgtaacactattttggggggctacatttcaatcaaacatacaatacggtccatacacagaagggatggtgttgtccccttttactgttgggactacactggggagaggatggatgggcaggcatcgcccgattgttaagacctacaaaaaatccacagaaaaggtgaggaaggcgccagcgacgaccaccacgagcaagaaccagtgtagaagaccttacctgacttgtgggcgacgacggcatcccatcccagtgggtcaccttcgggcatcggtgtccctctccacgtggtggctgtcgtcaccgtcagccgcctctgcctgtgcagcggtaaaaatcatcgtcacggcgagcagagcgtcgtgcacccggaccgcagcttcctcacccgccatcgtctccaccttctgcctcggcttccacgtccgccacatcattgccgcggggcacaaggttgagttggtgcgccagaccgagaccgctgccatgaagcccacagtcggggccacgagaggcgccccattcacaccacaatcgaggtcgccgcatgcgagctggagggtggttgtgcagccacgcccgaggaggggaagcaactaccacatctgtgtcatggataagggaggtggaggcatcggggagggaggggctccaagtgaaggttgggagatttcaggtaggaagaagagtgtgccttatgt

SEQ ID NO: 47689 - DNA, 534 bp, Zea Mays
tccaagttttgtggtgaaacttggagtcaattgcaaaaaggatccatgggtgtccttgttcttaaactctgaaaatagtgtcaacaatttaactttggacttctgtatctcttgatccatgaagggtttgctataaatcattatagcaaagttgtagagctactatagtagtctaagtttgattaagtgacttagcccaagaactgtatagaaattggggtaaattgccctagaagtcgggctgtcagtcgggtcttgcacttaaaccagactgtctgtggtttctaaacgactttagagccgagttgtgcttaatgtagggagtaactgtacaagatctttatgacaaagttggagctggtatataggggaacaactttggtatagtcgagttggtagttcgctgtatgaaaatcgacgagaaatgcccctgaagttgctctatcagacgtgctgaatggaaatcggcatggtacagtaacctgcaaaagatctcaggttcagggaaccttgccaccgacaatctccgcacgg

SEQ ID NO: 47690 - DNA, 636 bp, Zea Mays
catactttgggatgctgcctctgcacttgcaccaccgcctccaccgtcaccacatttcccttcggttcgtccagatcaagtattcgtttatatgtatatgtgtatatgttacaaatgaataactttgtgtttaatatccaaatatgtgttatagggcttacagacacctcccctttgattgtagcacctaaacatggatttggccaagacgccaccacaacttcatgggcgaacaacctcttcgccagccatagtccagccgaagaaagtgtccacaactcaaaccaaccaggtgacagacggtaagcttagttagttagcatttcattgcactttagaactttagtagttctatgatgacatttgaatgactccaactatgtgaatgtggattgaccttaaactatatcagtgtgatctatatgtgatgttgaactatatgtgaatgcgatttgtggctgtaaatgtgttttgtttaatggaattgggtgttcaaaatgtgaatatgtgaattgatgtatgtgtgaatgcggatgtaactatgtattgatattcaggatgaatatggtgtgtatgaaatttgttattttgtgaaccatgtgaattaacaaaaaacaggtagagattcgacctccc

SEQ ID NO: 47691 - DNA, 474 bp, Zea Mays
ctaaacttgatttaattgagtggcacataaaccctagaacactcaaaaccctaattgaaaccctagaatccctaattagtgtcctacaaggtgatttcaatttctatgcacttttggaccaaggtgcttatgtcaaagtggtagagcttaagaaactaagcaacttttacattggaagatttttcaagtgttgtggaacaaattagagtaatttgcaaaaagccccaataacaccatatggcttaaactctgaaatcagtgacatcaggccaagtttggccctaatatctcttaatccatggagattgtgctataagtcaaaacaaaaaatttgtagagctactataggggtacaaatttgattaagtggttaagccctaaagctacctagaaattggagaaaagtagacctgatgttggactgtcagttaaatcagagactgaaactcgactgacagtgtgcttggatgaact

SEQ ID NO: 47692 - DNA, 448 bp, Zea Mays
tcaatttccgaaactggaggtctgagatgaatacaaagttagcgaagaaaggcctagacccgacaaaaatttaaaatctcagtaggtcagtgggaagtatttctagagcagaggagcagccctgatttcatatctctaagcgaggcaaattcagaactctctaagaagaacaagtaccaccaccacctaggcagaggtggttacaagcgtcaggtttctaaatggacacaagaagacaccgagaagaaggccgcagggttgccaacgctatctgagcaacttggtgaaatgatggctaattggatccatgctagaaaaccaagggaaccgaggctggtgtatcttttgatgatccaacagttgaaggagcgacaaaaaacatatatgcaatggcatctaagcagagccaaggaacatttaagccacaaagggagagacatcctaatgg

SEQ ID NO: 47693 - DNA, 1066 bp, Zea Mays
gttgggcagatacaccaccaggaacatcctatgattatgaaaagataagcaaaaagctagtttgccagcgggaacagtaaaaagaaaaagtcgactcacctaaagattggagaggaatagagaaagacccaaagctggaagaattgatacattacttgatgaggggagatcagcagcaacgatgtcaaaggcacggctcagaggaacctcaacctcgtcagcatgcggtagactcccagcgtttggatcactagcctctaaagtgactagaccagcgagagtcatagagagatgtgtcaccacagcctcctcgggctagactggtggcgatccaacgtggacgtccatagaagcagcagagggggagcctgccccaacaccctcgggggctgggtcgctaccatcaccacccttgggggctagatcctccacggcagccacctctaagactgaagatccctcatccacatccataggagtcaggtgactcggatcagcgtcttcgcggggaagaccgccctctaaggtcgacgaagtgcgagaaactacccgggtaatctcttgcccggcagaatcatgcggcagaagaccatcatctgggacctctgaacagatggtgggattgttagcttcaggaggctctgatagaaggtcttcagggatgatctcttccagcgcttggtcaaagtcagatatggacaacccctagaggctgacaagcgccgacaaggcttgtatgggaatgtcgctaaccctgtggtgacgactattcttatggatcagtggaatttcttcttcctcctcctcttcctcatcaggcacactatcagcagcctgagtatcatcacaacctccagcattgtcctcgtggatggtgctcgccgggccatcgccaaggaataatgtggaggggccagcgtcttgttctaggcatgacaaccgtcagagtcgccttttcttcttcttttcctcgacaggtgtagctggacggttcactcagcgtgaacgtttctgacgagcaccttctagtttctgaatttcctcatcttcgccaaactctcgcccg

SEQ ID NO: 47694 - DNA, 590 bp, Zea Mays
agcccaatataattcagctgctatttctaaaaacgctgacgttatcagacctcactcggccgccgtttccaaagcggctgacgtggtttgttgtaactcggttgttacttctaaaacgccgacattgctagtagtcactcggctgttatttctaaagcggtgacgtggctctaaaggactcggtcgttacttctaaaacgccgacatcgccagtaaccgcttggtcgttatttctaaaacaccgacgtggcccgttatcactcggctgttacttctaaaaatgccggcatcgccagtaagtcactcggtcgttattcctgaaagcgccgacatagcaaagaaggcaatctgaaacgcgactcgacgattctaagtcgttactcaagcgttacatccaagaacaacatctgcagtaagcataaatatgaccgacgatcgacgaaaaagcagaaggatgcacatagaatggggcgaaattctttttcattatagaagggaagcattaccaaacttaaaaatcaactcattatgagctgattttctccccattgttcaataccctacactactacattacatttcgctacact

SEQ ID NO: 47695 - DNA, 717 bp, Zea Mays
aaattattttagcacataaatatggccctcttatcttttatgttgtggaaaaatgtgttgtggcatgatttctacattactacataaagacaagtaatataacaatattcaacccatctaaacgcgaatcctctaaaagcaggcagagcaactgaagatgtacgcattcaaattcaaggtttccttacatagaccatgaggcaaccatgtaatttttattggagaccatttcgcaacatttagatcaaacaatcagtgccatcttttgcatagatcaaacaaccgtgttagtttgttcaagcaatctgttaactaatatgaatctacatgtgaggttctcaactacatagttttgtggactggggacatgctcagttgggcgaaccatcgtgctaatattgatgtcgatagaattcaccatagctcagttgacagaagagacaaagtacaatcctagtcgagtacacgagtcaactcgttagagaacattttgctgccagtgagtccattttgaggagcgactggtacactaaggctactggcacctccggtgcaacgctgctggtaaaacttatttcaccctcctataggaaagggaagagacaacattctttcgcataagtagacgtcgagccaacattctttcgtataaagttctgaaccgatggctatgaactattctaaaaattgactcgctaatttgcatacggatatata

SEQ ID NO: 47696 - DNA, 524 bp, Zea Mays
ccgggcccaagaatgtgtattttaaagataatttcttattttgacgttagtaaaatttctggtttatttatttactctcaaaatataagagatgaagtttatctctaccacatcaaatgataatttctacttctatactactctattaaaaactcaaagtaggtgtgtacatagtgtacttgcctccgcctcccgaagcccgcgaggttgtgatcgctgccccctttcaacatcgatgtgtcctttcatcggtggcgtccaccttcgatcctcgcacatcgtcggtgatccacatgtggagcttccatcatcggctctccccttccataatcggcgactaggtgtgaccctgcggtcgagggatctggtggcacgatggccgtgccgaaccatgagttcaaccagttcatacatctcatctcatcgaccctaccaactccaccacctatctaatcggtggcgcgagcaagaggactctgcccggccgtggcatcggcgggaacttgggcttcgctacatctcct

SEQ ID NO: 47697 - DNA, 711 bp, Zea Mays
cgagcaacttccctgctggcactccaaagacacatttttctggattgagcttccatcggtactgcctcaggttgttgaagaccagctgtagatcctcaatgaagtttcggagtttcctgtcttaatcaccacatcatcaacataagcttctacccgcttgccccagtggtcggctaagcatgtttgaatagctctctggtaagtcgctccagcgttcttgaggccaaacgacatggaggtataacagaaagctccaaacggggtaatgaatgcagttttttccttgtcttcttttgccaagctgatttgatggtatctagagtagcagtccaggaataacagcatagagcatccggcggttgaatctaccacctgatctattctaggaagttcgaagggatcctacggacagtgtttgttgagatctatatagtcgacgcacatgcgtcaatccactttattcttttttagtacaagaatagaatttgctaaccactcgggatgcagtacttctctaatgaatcctgctgcgactaatcgagctagcttggcacgaatagcttctctcttgtcgggcatgaaacgacgcaacttttgtcggatcggcctcgcctggggatagacctttagtttgtgttcggctagttctctcgggactcctggcatatccgcaggctgccatgcgaatacatctcggttatcttgcagaaa

SEQ ID NO: 47698 - DNA, 314 bp, Zea Mays
cttttctagaaggggcacgagaaataaaataggtgctttaaatgtggcaaaacaaggtacgtctaggtcgtaaacgatgacggtgaaacgatgacaaggatgttgctcacaggcaatttctttacatgcccatttcacctagactgaattgactgtttcactctaacagaatggccatgcacatgcggtggcacaaggaagttgagagggaggacaaagaagtgatggcacacccttaagatggagacgcatagatggctctatacaactttgatttagagtttgcaaaggatgcgagaaatgttcgtattggg

SEQ ID NO: 47699 - DNA, 361 bp, Zea Mays
tttcataattaaactcatcacctacaagatttgtgcgatctctaggttcggggaatccttgtgtggcgaatttatagacaccaatgtctatagcctctaaatatgcttccatacgaattttccaataaggaaaatcgtcaccatcaaaaatgggaggaggtccatccccaccggacatcgtaactcttagcggttaagctaatctaagagcaacaaggctttgataccaattgaaaggatcacaatgcccaagagggggggtgaattgggcttttctaaaaatcaacactaattaaaagctaagcaagagctaagcaagagcccaacttcaccccaacaactagcactaagataataatac

SEQ ID NO: 47700 - DNA, 1188 bp, Zea Mays
aaaggagttgatggtaataaaaaaacacaataaactaacctcgccatcaatgctggcagagtgctgtggagaatccatcatttgcaagatatcatcaacacttcggaatgccccacgtaaatcaggaggtgctgccagggggaagaataaaaaatataaatgaaaaaatggaaataatcaagatgagagaaaacattttttaagcatggaagacataggtaggcttacttctattcaaatttccctcttgcagatcaatgtcatgaccacacaatggggttctcataaaatctctgctgtcatcaagatctccaccactgagatccaactggatttcttcactatcacctcctccaaattggtcttccggtacatttgaagtagttcctgatcctgcatacaaatttaaaaaagtgattgaaagcacagagtgatgtgtatgggcaaaattgcaacttgtatggtgggtggttgcaacaataatattatactgtatgcaataaaaaatacctgctcctgctctagtgttaattgcaacgggaccccgtataatttatttcactatcacctcctccagattggtcctccggtgcaattgaagtagttcctgatactgcatacaaatttaaaaaatgattgaaaacacagattgatgtgtgtgggcaattgcacttgtatgggggtgcttgcaaacataatattatgctatatgcaacaaaaaatacctgctcctgctctagtgtcattgttcaccttcgtcctgcactctttggcagctcgcttctcagcgatagcgtcgtcgataagcttctgaatgccaatgtagcactcgtggtgagcttttgccataaggtcgcgggatattgttgaatacttcgcagccttctgtgcgtacgactgggcttcactagtgctttcatcaaaagccttcaagatgttcagtgcatctgacttcctactccttccaactaaattgataatgctctgaccaaaagaagatctgaagctagggtactagtaaaagactaggggttggatattgaaggaagcaagaccagcgggatcatgggatgtgccaagcacatcagcagatgtgccagtagcagtgggtgctgctgctactggggcagatgctgctactcctgggttaggtgctgctgttgggttagggtctgctactggggcagg

SEQ ID NO: 47701 - DNA, 905 bp, Zea Mays
gtagttgacattccaaggtctgacatctgtatgggtatggaagaatggaagagatgaaagggttgagcaaagatagattatagagagcagagaaaacccatctatctaaggttttacctagctaactgatgccattatggacaaaagtcacacaatacaccaacaatcatttcaaagaagcaaatcaatcatgaacacaagggacaatgaattcaaacataccagcacaacacaatccaattccactcattcaaccaaaacaaaaggtgagacaaggtttggaataagaaagatattataaagtcaaggagtcaggtaagaaatagcgaggagttagacaagacatatttgttggtggccaatagtgaaataagataaccatgaactattaaagtgaggataaatgatacaaccaaggatatgaagtgagttaggaagaaagcattatcaaggagaaaagtagagaggcaaaggtttaatatatcaaggtagatattgcgcaagggtggcaatacaatggcaagaaagcaaaagtataataagtcatgggttatatagcaatattatggattagagaaccactataatataatatcgcccttaccgatctagtcgaaaatcttaatactaaagaacaatcctatcaacctaaccaagaagtctggtaatagatccaaaggatccatagcaaaacttcttgctgagtggggataagacagagaatagggcatcgtcgatagcctcgaaaagggtttcttctggcaaacttctcttcaacttccgcaatcctagcttgatcatcttgcaatgcttctcattagaaccttctgatagacaaagaatcagacaagaagagttgaaaataaaagagacgagttttgatataaagtaagtttttatggagg

SEQ ID NO: 47702 - DNA, 708 bp, Zea Mays
cgggttgcaacactcatgcaggtttctgatgctctactttggttcactgacatgtgtcgcattgtgctacatgctgagctatgtccttcttcatccctttccaccagtgtctggttttgaggtctaggtacgtcttggtggattctggctggatagaataagtcgaaccgtgggcttcatctagcagaatttctcatgcttctcccttaggtacacacaaatggtcttgaaaccaaagagttccttttgcatctgttctgaggtctgagggctattctttgctggccctttctgcaatcctctttgtttctgcatctaggagttgagctttgcgaattcagtcttctagtagaggttgaacttcttgactaccactttctccaaaccaagcatttaactgagctaactcttgcttccaatcttcttggaaactgatcgccttatttccgaaagtttttctgctgagggcatcagccactacatttgtttttccttggtggcaatgcacttcaaggttatattctttgattagctctagccatctttgctgacagaggttgaggtctggcatgcactatggctgctagttccaaatcatgtgttgggtaattctactcatgtggcttgactagccgggatgcgtatgcgatgactttctcattttgtataagcacacatcccaagccttgccttgatgcatcatagaaa

SEQ ID NO: 47703 - DNA, 303 bp, Zea Mays
gtttaagtaacagctaatgatcaacattaagtacgtgtaagcaaacaagtggaagtaaacaaactacgtactcgtgtcattgagtcaacataagcaactaataactgaccaaatatttaactacttctttcaatggtcaataacaacgctgttaggcatgtcatgacaactatttgaataccaccgtacgttgtggcgagtgtaaacctagctaatctattactctagcccagttgactgtcgtatgaagccccatttcaaaactttacgtcgcaagctctaataagctagcccccacatttc

SEQ ID NO: 47704 - DNA, 646 bp, Zea Mays
gctcagctgaaggagatcggaatctcagaccaatggtacgacgttggtgggtcggtcatagctaccaggacttagcggtcagacaactcctgctaccttttgttctctctggagtcgtggtctctaaaaattaagttgaccactctatcaatcttagggaacaataagatattgtcttgccatagtggtggttgtggttgtgggttatggttctgccttgaggtggtggtggtagctctgggaatagtcgaccatggccaattgagttcttgaactccttacagttacataggttatggcacatctccttgtggtaggtacacgagcaatcgaggatctcatctagtgatctcatgttgttgttgttgccatgagggggaccatgctaccttgcgggtggcagtcccatggcattgacttcttccctcaacctcttgtcatgcatcggtcttgccgtagggcatcttatttattcatggacatgtcgttttcgctagtcgatgaggtcgtgggctcgtttgttggcagtggtgtatatgtcggtgtcattgatgacgagctcatcacggaagtagagggtggttctggcaccgtagccatggtgaccacattagtagacttggtgatcacgatagcttcagaaagc

SEQ ID NO: 47705 - DNA, 418 bp, Zea Mays
attgaaagttacccctcctgacggaagatccataacccatgtccgcatcaccaaacctaagaaaaagaagaagatgaagaggtcgaggtccctagagccagcggaggcggtgtgcactaacgaagaaacaaatctagctaccacgttaggtggcatcgtcgaagacttggccatgacatgcctggacgtcgatgataccatgtcgcccgccagtatttagatggcaaaagtgagggccttcgcggttaccgagggtgggtggcctatgggtggaaaattcctagggtgctggtgaagactttgaattgagtatgctagtttggacccttaaatattttccctatggttgtctcattgaggatattttaccagtgctcatgcagaaagaccaaagggaggcctcgaagaaaagaaaggc

SEQ ID NO: 47706 - DNA, 747 bp, Zea Mays
aaaaaaacaaagaaaagaataacctccaacttctcttctttgcaaaccgggtatcacactctaccccccttaaaaagaattcgacctcgaattctgacgcttctatcggaacgacaaaaggaaagattaacgaatcaacaacacttacccacgacgaaaagttccggatacttctgccgcatcagctcctcaagttcccacgtagcctcgcgctcagactgattagtacataagaccttgacatacttaattgatctcttcctcaatacacgctccgagaattccaatatacgcaccggacgacactctaaagtcaagtcctgctgcacagcaattggttccatctcaatctgatggtccggatcccgcaagaacttcctcaacatagagacatgaaaaaccgggtgtacccctaccatggaatccgacagtagcaagcgataagctaggctgcccactcgggccaagatagtgaacggtccaatgtatctcgggctgagctttctagagacaccgaaccgaacaactcctttagtaggtgataccctgagaaggacttggtcacccactgcaaattccagatcccgcctcctcacatcagcataactcttctgacggctgtaagctgccaaaatattctgacgaatttcccgaaccttttcagaagtctgatgaacccaatcaggaccaaccagggatctctatcccaaagtctcctagcatagaggggagatacactgcctgcca

SEQ ID NO: 47707 - DNA, 533 bp, Zea Mays
gaggaggtaggtaataaacattttgcatccatctgctatgtggctagtcaggacaaactaggtttgacaaatatgggcataaggctttgttgtttgctttggctcatttctgcatccactcctataaggccatccccgcaattgtagtttagctcctgggcttttggctcgtacagacctctgtacgtgatgtttctgtaaccgaagattcctctgaggcatacgtgtctcacaaacaaattgtcaattcccagatgacttcggagctcatttgccattgcgatacagtacaagtagaacttgagatgcaattcacaaattttttcccccagcgacaagctccgtcattcttcattgcttatttacttcatctattctgaacagtatgtgttgcccaagttcattatgcactggaatttacgggtgatactgcttcgagctgaaatgggccctcacagtcgggtgttatgtcagtcgccattcagtagcatgtgcagatgaactgtcgtcaaagcatggcaagcctataacca

SEQ ID NO: 47708 - DNA, 1162 bp, Zea Mays
acatttcagaaatgtttcgaggaattaaaggaaaggctaaccactacactagtattaattatgcctgatattcataaaggatttgatgtgtattgcgatgcatcacatctaggacttggatgtgtgttaatgcaagaaggaaaagtgattgcctatgcttcaaggcagttatggaagcatgaaaagaattatcctacgcatgatttggaattagctgccgtagtgcacgctttgaagatttgggggcactacatgattggaaacaagtgtaaaatcttcatggatcacaaaagcttgaaatacatcttcacgctgaaagaactcaacctaagatagagaagatggcttgagttaatcaaagactatgatttagaaatacaatatcacctagggaaatcaaatgtagtggctgatgctttgagccacaaaggtcaagtgaacaacatcactactcatttgatgtcaaaggaattgtgctgggaaatggaacaactcaaccttggaatgctcaataatatggaagcaacaattatggaagttgaatctactttggaagaagagattcgtaaaggaccagagtctgatgagaaaatcaaagaaattaagacacaaattagtttgggaaaagccccagatttcacagaagatgaacaaggcacaatatggtttaaaaagagaatccgtgtaccagaaattgagcacctacgccaacttatcttaagggaagcccatgattcagcatattctattcaccctggaagtactaagatgtaccaggatctaaaggaaaagtattggtggtacggtttgaaaagagatgtggctactcatgttgcactatgtgacgtgtgtcaacgagttaaagccgaacaccaaagaccagcaggattgctacaacctctcaaggtaccagaatggaaatgggaagaaatcagtatggatttcattgttggactaccccgtacttgggatgtctatgattcaatatgggttatagtggataagttgactaaagtggcacactttatacatgtgaagacaacttactcaggagcccatttagcagagttatacatgtcaagaattgtttgtctgcatggggtaccaaagaagattgtatcggatcgaggaacccaatttacctcgcgcttttggaaaagac

SEQ ID NO: 47709 - DNA, 336 bp, Zea Mays
cttgctcccctggacaccaatcaagatgggatccttctaagggaggctcgaagccagaagagaaaagctactagcccaacaccacaagacgaggagctagaccaagaaatcagcaacctggaagttaatcatcaacaggtggaaaaaggaagggaaaagatgcttcagctggtcgagctccaaaataagattgacgaagcagccgaggaaatgtgacatattgcgcaggatactaagcaagggcacaaaccatagtaaagagacattcgtcaagaaggccccagccatgatgacatgtggtatgatgattttcatcatgataacattgcttttgat

SEQ ID NO: 47710 - DNA, 681 bp, Zea Mays
gcccacttgtcggggacccaatcaccatgtacttgcctccctttgggctataaaaaggagagcgcacacacacatggtaacaaggggtcggagttgatccaagttcaggaggactcgagttcacccaagttcatcttgaccctcagcaatacgactcatagttgattcgaatcactctaaacccttgtgtgttcttgtgttcatccgtctcatcaggcaaacccatggctgccccctgttcttaggattaggcgggtgcactccgccacctgactggagttttctctctgaccaggtactcaacctctcacacttattttgcagcctctctggttgccatgtttagtgttatatatgatgctacaccaaacatgtttggttagtgtatggcttcaaataatcatctacatagttctttgggtgcactatatgatgcaccataccaggtgcatgcacatcacacatgtagatatacactcaattttgaacagggctatcccctgtccggaggcacatatgcagtgtccaccatacacgttcggtgcctatgttgcaccaccaactcttttttgagttgaatttgatcttgaacgtttattggacttctagatggttacctagcactagattctacaagtattcatcaccactcactcctagatttatctaggccaagctatc

SEQ ID NO: 47711 - DNA, 473 bp, Zea Mays
atttgattataccttaagcacgattgcactgacacattggctgtgggagatgggttctgctattttggtacgttctcattcatctctgctagagcagattcggaatggtgagtttggcggtggttcattgtttcagtttgttagaatttttcaaatgaaagttgtctcaatttttggatcattcttggtttcatgacgacttgatgaatgataaaagtctgctaaatatataactgaatgcccaaactacagattatctaatggtcaaactgaatatttgttttatggcaaaacaactatatagaaaattacatctttcatgtcttgttcggcggcggtccaagcggctaccaatagggatgatacaggttttgctgttcttttatttattaattggttcaattggagaattacctcaacttgttgggattaatgtgctttgttctttgatgaccccttgctgagtgagaaat

SEQ ID NO: 47712 - DNA, 544 bp, Zea Mays
cacaccatactcggaaccaaacactacctaactagagctggcgcaccgagcacccgagatctcaatccagttgagcgagcgagtgatcgagtgcaataatagcgatgtggtgggatggatagatacacttctcttgcatcagcctaaggccacaaccggaaacgacttctttgtcgagtgccacaggcacttggcaaaacaccaaatacactcggcgaactatttgtcgagtgtcacacttggcaaagatccttaggtgaagctggtgtcagaaaagaccttaagcttctcaagcacagcaagaaaaactggtgagactgcacgacagacgaagtccaacatcaaatgagctttcgaagaccacaacctcgcccatttggttgtggggttgtatccgctcccacagcctgaccataaccagcagagaagtatccaaatgtctccatctccttgaccatccgtgaagaggtcttcgatcagcctagttcatagttctaggggcccagcccaccagaacggccaaccctagcgacagatgaaccaa

SEQ ID NO: 47713 - DNA, 558 bp, Zea Mays
caagagtgctaaaacaagagcttggagggcgtgatcggacatgtggagagctggccacggcgagctcacacactgcggtggtcttgactgatttgggggaaatcccaaattggggagctataggggacgattggaggtgagggctggttcactgggtgcacaactacttagcggagctcactagtgcgaaaatttataggttccatcggcggtggcggctaattttgcgaagacgcacggcggcaggagagaagggaggtcactagcgtaagtgattcgtggcttaaaccgtggcctgaccaccggtgatgaccggacatgctaaggcgagtcactgcgacgtggtagagcacctaggcacgtggcacccgagcggcaggtggctaactccagcgaggttatctggaccggctgtaaggcaagagggtacggcggccagggcgaaacagtgtcccgagctcatccctagagccagatttttcatccaaggatcgttatctgcgtttaactgggcgtgaatcacgacgccggcatgaatccaggcgcgagatcaccggc

SEQ ID NO: 47714 - DNA, 1297 bp, Zea Mays
gttttagtgacagtaacaccaggggtgttacagcagatgcttgggatcccctgggaggtgatcgagcaccatctgaagatccaccctgatgccaaaccggtgagtcagaagcctcggagatagtccattgaacgacaggatttcatccgtgaggaggtctagaagctgctgcgcgctggcttcatcgaagaggtccatcacccagtatggctggccaatccagtcttcgttcccaaggctaacgggaagcttcggatgtgcatcgactacaccaacctcaataaggcctgtcccaaggacccatatccacttccacgaatagatcaaatcatggattctacctctgggtgcgacctcttgtacttcctagattcttactctggtttccaacagatccagatgtctaggcaaaataggaagcataccgcttttgtaactgtggatgggctttactgttatgttgtaatgccttacggtctaaaaaacgccttgccgacatttatatgggcaatgagtaagacctttggtgacctgattagggacaggatagagatttacgttgatgacatcgtggtcaagactaagagagggtcgaccctagtggaagacttaaccctggtctttgacaagctgcgggcaacacgcacgaagctgaacccagaaaagtgcgtctttggtgtctccgcagggaagttgctgggattcctggtttcacaccggggcattgaagcaaacctagagaagatcaaagcaattgagacaatgaggcctccagctcgaatcgaggacgtccagaagcttacagggtcactggccgcccttagccgcttcatctcaagaatggccgagagggcgctacccttcttcaagctattacggaagtccgactcattctcttggaccgaggaggcagaacgagcttttcaagagttgaagcagcaccttgtgtccgtaccaatactggtagctccagagccaggggagccgttgtacttatacattgcagcggctacagaggtggtgagcatggtgcttgtcatcgaaaggatggcacaacacccccaggggagacaaaaagttcccctaggagaaggtagtggtccgaccaccacaatggtgatggaaggtcaagagtttgagggctcgggaccaaccgcaggggtccgaaccatccagaatccagtctactacgtcagcgaagtcctccatgaggcaaaggccaggtaccttgagacgcacaagcttatctatgctatacttgttgcgtccaggaagttgcaccagtattttcaagcac

SEQ ID NO: 47715 - DNA, 308 bp, Zea Mays
aaaccaacaggcaaccggagcaggacgagaggaacggcggaaggcaaaataaagttctcaaaggtcatgccgatcaacaccagaggcgcatgcgatccgaacgaaccgctcccagcagaagacggagcgataccagatcccctgcattaccaatcccaatcccagtgagctccgactcaactcaaatccgacgatccctcgtctcaccccccagacaagaaaacactgtagatgtgaagggaatttagccaacgacggcgataagatgagataaccacccttgtgtcttcacagcggcgagaagctcg

SEQ ID NO: 47716 - DNA, 438 bp, Zea Mays
gttgatctggttcgggcggtagatcgacgaccgacgatgtatctggatctcatagaaacctagccgtcgatctcagatcctgcgatcctggttgtgtaccgatttacagcagcgctgggttaatctggttcgcccgcgtctaatccaacgacccgcagtgcacggtaccccttcaccgagccattcttgcataagaggccctgtagaatcaagaaaccaacccgccgtccatgcggctgtagctctgagtctaggaaatttttatatcccagcccctgtattttccagaattcatgcgcgcagttcagggatcagaagaagttgataattaataacagaaattgacttagagtggaaaaataaatgttggaacttgtataattcatagaaatttcatactaactcctttttaacccattccagttcctataattttgt

SEQ ID NO: 47717 - DNA, 774 bp, Zea Mays
cgcagcgcaacagctacttaagggcgtagccggaataacgttaagcgaagtctatcattacaaaaatacttcgcacaaagtcgccacatcaccatacaaattacaattgcacacacggcgaaggcattgcccattacatacacatgacgagggcaccgcctatcacatcggctcaaccttcggaataatacccatcttcctataattaaacaacattatcctcaattcctcaccctcaaaaagctcccaaagatccccctcgcctatgcccgccccaatcggtgaggacaacaattctcgcttaccaatcccgcctactcgaagtcggccacgctccatccccatgcgacggcgcctgccgctccgcgaaaattcacccacacactgttttcccaacacccttcgccgcctacacccagtactcataccaggaagatcctcagcaccctcaacacgcggcgaaatctccaccgcagccacatctaacgcaacaaaataatccaagccttcatccgaggactcctccgtccaaggaaacaaactcccagactcaccgttggactcaaaacattcagacatagagccaagcacactatcatcggcgggcactacaattgaagtctccaccgcaaaatcagtattgtcagtagtggttgcttgcgcaggcccaaacgccggaacctgtgcagcaaccgaggttcagtatcacacaaacaaaagttcacacatgcaatccctaacccctattccgccacctgcgaaggctcgtccgcc

SEQ ID NO: 47718 - DNA, 455 bp, Zea Mays
cgggcagcagctaccatgtgtgccgtcgctcacggctgttttttccccttccttccacgttggccatggccacttggcacttgccgccgcccgaagcaggtaaaagggctgtgggacggaaggcacagacgcgcaagaaacccagtttgaccactgcaaggtgcaaaccctaggtatactgctagctctagtacattattgcaggtaaaacgttatgttaacgacgcacagcaaacaaacaagatctacaaaccgagacatgttcaggggtcatgagagatttggatatcatatcgaccccacaacgtcgttatacattattacaggccgcactcacaagctgccccgacgattaaacaacatgatgatatatgccctaaaaaactggatctacgagaccaagcggccgcctcgagctagcatttcggcgcacgtacggtagcggaagcatcgaa

SEQ ID NO: 47719 - DNA, 702 bp, Zea Mays
gctcgccacgactgtggacacgcactcacgcggccagtgccttcttcttcatctccggccgccagcgcaatctgcccaaattgctcgtcaccgctcgctccttctataaattgagcccgtggccagctccaccacattatcccacaccaccccgaccagtattgctcccagtcaatcaccagtgagctcgaatttctaattttcccgcaaatcgggtttgaactcaccgcaagaacacttcaccgcggccagcctattccaggtcagtcccagtgtcttgatcaattgttctagcgtccttaggtcctcctcaagcttcacgacccctctgattgaactagaccgccctgggttgccgtgaacgcccgtgttcatccattgcccatacggtcatcgtggccagggcgttttagtgcgctattggtgaaattaatttaggggaaacatcgattgaggtgtgaattaggtgtcagtcgacggagagcgccggtcattgcgtaaatcggccagtacgggtacgccggtgatcggtgtgtcgccgtccaccatcgtggactggactctgtgaagacataggagttcgagggtttatttgaaaaacgtcagtggcacagaggaacagtaaacaaacctacttcgatttagttaataaaccgagggcctatgtgcatagttgccgcgagcgcgtgcgcgaggacgtgt

SEQ ID NO: 47720 - DNA, 428 bp, Zea Mays
cactatgccctgctaacggagcaatcggcttaagtcgacaacgacttaagacagtgcaacatgctcacgcttacttaactcggggtgaccactatgccctgctaatggagcaatcggcttaagtcggcaacgacttaagacggtgcaacatgctcacgcttacttaactcggggtgaccactatgccctgctaacggagcaatcggcttaagtcggcaacgacttaaggcagtgcacatgctcacgctcacttaactcggggtgaccactatgccctgctaacggagcaatcggctaaagtcaacagcgacttaagccggtgcaacatgctcacgcctacgcaattcagggtgaccactatgccctattaacaaaagcaatcgacttaagtcagcagcgacttaaggcgatctgacatgattacaatt

SEQ ID NO: 47721 - DNA, 438 bp, Zea Mays
acttgaacgagtgagtacttctcgtggcttcctcaataacatacttggtgtcaatatcctcactcgtataaaaacatcttcaattctataaacctcataatgatctagaatcattggtttcatgttttttgagatcttctaagattttcttgatcaggtttattgctttctatatgaggatattttggttcctcatctacagggttggtgatatgggacactatgattggagactcaaggacactaacatctatatctggacgaccaataacaggtgttgtgactacactaggtaccaagaagaacaattcaaaaatcataggagttgaataaaaacatgcttctcatcaaggacaatttcttgtcatatgatgctcctcttaatcatatcatcctctaaaaatatgatgtgtcacattttcacaaacttagtatgtt

SEQ ID NO: 47722 - DNA, 1209 bp, Zea Mays
gttggcgaaaggaaaggaggattcgtcaaaaacaacatgtctagaggtgagaatgcgattggactctagctcgagacaccgataacctttgtgctcggaggagtagccgaggaagacgcatagagatgaacgaggagcgagtttatgggctgcagtggaggacatgtttgggtaacaagcacaaccaaaaactttgaggtgtgcataggaaggtgtagtggtgtgaaggtggaagaagggggtggaggaggcgagggttttggtggggagccggttgacaaggtatgtggcagtgtggagtgcctcaacccagtagaccggaggaagactcgcctgaaataagagtgagcgcaagatgttattaatggtacgaagagagcgctcagctttgccattttgctgggatgtgtaagggcacgacatgcgtagggcaacaccgttggaaagaaagaacgtgcgggccgaggaattatcaaattcacggccattgtcgcactggacgcttttgatggtggtgccaaactgcgtgcggacataagcaaaaaaaatgagagagagtagcaaacgtgtcggattttaggcgaagcggaaaagtccaaatgtagtgagagcaatcatctaaaatgacaagataatatttgtagcccgacacactcacaataggagatgtccaaagatcacaatgtattaaatcgaaattatttgtagttcgagaatttgaggaaccaaaagggagtctagtgtgtcgaccgagctgacacgcatgacataaatggtgactatcatctttattacatgagatggctttggagcgaatgagtttggacaaaacttcatgcccaagatgcccaagacgacggtgccatagcgaggtgggtgcagcaaggaatgcggaggtgctggtggctggaggaaaaaacgggtagaggtcgccagagctattgcacctggcgatcacgttcctggtttccaaatccttcacagaaagaccaaacggatcaaattcgatggcgcaattattgtcggttgtaaaacgacgaatggaaatcaagttcttaattatgtgaggtgagactaagacattgttaaggacgagattgcgatgcggaaaagaaaaggtatgtgatccgatggcagtgacaggaagtaaagcaccattgcccacaatgatagaggaaggtgtggagtatgtgggcgaggatagggtgg

SEQ ID NO: 47723 - DNA, 644 bp, Zea Mays
gcgggtgatgactcataaaatcccggtgtttgtctctagccggtggtgtgttctattgttgctgctgatgctattgattcagctggttctgttgaatctgttgaatagttgcagtgagtccttgcagaagctgcatctaggcggtgatgaactgttccatgttggggttcggtgctggtggtggtatctgttgactacgttggttccggttgttgttgggttcttggcgagcgttcaccatctgattggttagaaagtgaacttcttagaagagtgaggagtaatacagattctaaaggggaatagattaagtttatgttttttatatgctcttatagccatcattccataagaccattgcactcaaacaaaaatccaactcaagcatatcaaccaacaccatcacatggttgttattataatagagataacttaaaaagactactcatcgtctgacgcgagaactaacttattacaacataaacttaaaatttctagagcaacctggtgacggatccgggctccccatagcgaagcctcttgcggggaggagacaacgccatggcggggacctgggcttcaggcggatcccgtccttgaagttgggcttccagggctgcaatcatggcatgggcatcctccag

SEQ ID NO: 47724 - DNA, 504 bp, Zea Mays
cagaaggcggaaaaatacaaatgcttccgtcaggacagcaaagggatcctatggtttggagaccgattggttgttcccaggaaccgcgaacttagaaagaaaatattggatgaagctcacctttcaaaattttccatgcaccccggcagtaacaagatgtatcatgacctcagatctttgtactggtggaccagaatgaagagggaaattgctaagtatatatctgaatgcgacacctgccagagagtcaaggctagccatctgaaggtagcaggcaccttacagccccttcccataccatcttggaaatgggaggatgtttgcatggattttatcgtgggattgcccaataccgcccggcaccatgattccatctgggtcattgtggataggttgaccaaaacagcgcatttcttgccagtgcataccacccacaagacagagaagtatgcagaaatctatattgatcaaatagtgcgtttgcatggaattccgaagaccatt

SEQ ID NO: 47725 - DNA, 484 bp, Zea Mays
gtaattacgacagcgagcgcacagaagcagcgagccaatcgccaatcaaactttggccccacctgcaggctcgttccctcccctgaggcaggcccaggggccactgtcggtaccctgaatcaggggtaccccttactacagtatgaagacacggtgcatggtgaacagcacctgactcctcctcatgaccggtcccaaggacaccacgtgaccagaaaaggtgatatactccaagacgccgtcagtgggtccgtacctccacgagagagcactggacccctatacactcaacccggacctccgagtacgacacgggactcccaagtaagcaagtcggaccccttgggtgggatctgaacccctttgagtgaggtccggaccacctacagcaaggccccggaacaggggataccctggcctatgtcatggacaggcaagggttcggtactaacgcgtgtccggacttcgacctgtgcgcttccgc

SEQ ID NO: 47726 - DNA, 1023 bp, Zea Mays
agaattaggagatgctgaaggaaactgtcaccgagtctagcgaaggtgacctggttcgactaaaatacaccttcagacatggagataaatttgatgaaccaaatgacgactggctaaaatgtatcgaatctataagtgatcatattccaaagcagaagatgatgcattgtccacatccttcgggggccgaggaaaaaagagattgaatagagtttttgatgccattggttttgtttacctcgattactgctacccgctgcggggacgaggaaggaagaggaaaaccgctgcttcgaccaagactgctactttggccactccagatgagcccgcgccgaagagcagaaggttgaaagttctcacccaccggccacgctatattgagccggccgtggtacccgagtttggcagggaaacttcttcagctactgaaccaaaggagcctattccttctacacaaaaagctgatgatccggctacgatgccgaaggtaccttcatccgtgctagatgagtcaaaagccaatgaaaataaggtggaagaaccaaaaattgaaggaacaaaagtgttaggaattttaagcccttcgacagaagtaaccatgccgaaggttggaaaaagttttgcagcaactcccaaaagaagaaggatggcaaatgtactagatgtgtcagaatcagtaaaggctttaagctctactccttcagggaaaatcgtcgagattttgaaactacaaaccgaatctgaaacaaaaccggctgaaattgaagctgcagcaagccaagctagtgctgaagctaggccttcagaacttgccgagaaaaaaccttcggaaggcgaagaaaaggcagcagaagaaaaaacctcagagcaaacttcgcctaaaaaggttgctactcctgctcctgaagctttggaagaaaacattgattacatcatccgtcatgcttcgggaaagacacttacttcggaagaaaaaacgagaagcccaacattatgcccaaaggctgaaatacccgaaag

SEQ ID NO: 47727 - DNA, 466 bp, Zea Mays
tgtagaacccctctgtattgggatcagactggtgaaagacagttctttgggcctgaaatgattcaagaggcagaagaacaagtctgtatgatccaggagaacttgaggatagaacagactcgacaaaagagttatgctgacaacagaagaagaccactggaattcgaagagggtgatcacgtatacttaaaggtgtcaccaattcgtggaatgaggaggtttaaagttaaaggcaagttatcccctcgttttattggacccttcaaaatccttaagcgagttggggagatggcctactagcttgagctaccagatcatctatctgatgtacatgatgtgttccacgtatctcaactcaagaagtgtctctgtgtcccagaagaacaactgccaatggaagaacttagtgtgcaaggagacctaacctacactgagcatcctatcaagatcctagacactttgactc

SEQ ID NO: 47728 - DNA, 519 bp, Zea Mays
attctcctagtttctagaaaccagatttttaaaacttggtgtatccaaacacaaccttagtttgtcgtttaaattgtttagatttaatttaatttcagtttagtttgttagtgtatgctacgtttagtgatggtggatcaatggaggggctactaaaccagtcaactgtaacattgatagcgtagcagcaggtaccttgcaacggcaacctagccgatcagccactatcctctgccgtcctagagcctgggccatggagaagaccaaaaccatcaatgaatgacacttgagagtcctcctatttgtgacagcgggctgcacttgcacctcacactatctcaagtaacttgtccatacatatccccatgctcaaactccaatatacaaactatgcagtttacagtataaatcaggcaaaaactgtttttagtgaccatataaataaatacggaacacggtcgagtttgagtgtgctgacaagaacaaagtaagtgcatctttgttactcttggacatttt

SEQ ID NO: 47729 - DNA, 594 bp, Zea Mays
gcctgatcttaggcgccggggaggtggaacccatgccgcgctttctacgagctcggggggttgctgcgacgtagtgtcgttcgccgttggcgtagatgtagtgcactcatttgtccccgacttgtggcatcatgacatggagatctcagcctgctgtcgcgcagtgaggccgagaaggtcctggatctcttgatgagtcattcgcttgctcacagtatctaccttggggagtttgcctataagtgcagtgaggttttggcttgttcaagggaaatgaggtggcctgcctccgccgtagtccaggcggtggcggacgttaaccgtcgtggcatgcctccaccctgtaacccgacgtggccgccccatctaccaccatggtactccctatcgcgggttgcttactagtccacgaagggcttgggatcaatggcaatttctagggaggtggattgagctgaggcatggtggatgccgctatgcgcattatgacactggtggaattcccatccgggctttccgtgagaggcaagtagtcccccgttgtattggctgcatgacactactagctagggctgcaacttgcctcactacgca

SEQ ID NO: 47730 - DNA, 983 bp, Zea Mays
atctttgttaggcccctcgacgtcatggaggctcttctccacgacccttcgatgcttgagcttgatgtcggggaggcagttgtagaatactgtcgacaatatgtccccaagttcatagatgtaggcatgtaacctagtatggccttgggtcgtctcaaaccatgcgaacacatttagtgagggctgcaattaggcgtgaagtgtcatccacacgctcttatgcaccatccatggttcgacatggttcagttcctggagtcatgtcctaagatctagagccaccgcacgtggctccacctcctcagcctacatagccatatccccaagaccttcatcaccatttacactagtaatgtggcctataggacgcgtgggttgctatcaagccctcccatcgcaatgaggcggacggttttctgccgctcccttaagaacaaccttcgcttgcaggttaggttgctcaattggtctgccccgttgaggctaggtgcatggcgcttactcccacactccgctaggtggacatgtcatgtccacgaaagttctatccctaccttctagagaagtatgattagacctaaaaggattaagatgtgcatgaggcaggatgaattgtgctatctaaaacttcttgaaaaaaataaatcctatgagatagctcacttcaccccatgtgtctatgatagtcccctagagggggtgaatagacgaaacctgaattttaacactttaaaacaaacttgatccactagatagcggttagaacaagatgaacaataatcaaagtattgggctaagttctttttcttgcaaaagtgttgcttctaaagaatgctgaataaacttgaagcaacacaaaggaatataaataaagatcaatgcaagggaacttagaggctccacaaagaacatatgtccccgttgaggagtacacttaggacagatcgttttaaccttttccctctcttaaggtatcacttaga

SEQ ID NO: 47731 - DNA, 360 bp, Zea Mays
cctgaattgagtggagaattctgcctaggtgatggtgttggcagcagcgtgagcagcgcaatatgcatcccaccaatccacagctagaccggtgaggcgacctgatgcatatagcaccttctctctatcagtacattgggctatgttgagcatcttgtccatgaactttagccagtcattagcttgtagtggatctgcggagttagagaatgtaggtggcttgtgagtcataaactcctggtgcttatccctgggcggagctggtggtggtggaggtggtagttgttgttgttcctgccatacttggcgcatttcttggcgttcttgcctcatttcctgtcgtatttcctaccgttcctg

SEQ ID NO: 47732 - DNA, 403 bp, Zea Mays
ttcgtcagcaaggttcatggaaggagggggcctaaaaaggtccagctccccatcaggtccttcgtttgctgttcccgatggtccggctcccattgcagcaacatctggaggcacgtccgggtgcagtcgagcgtacaatacatgcacttctttatgtaaagtattacagtacacttgcaagcttttgaggaatgcattaagctctaccacgagctagagctttcgcttcgcagtcccaagcgaaagaacgcgagttaacggcccaatcaatagttgtatcccattccgagattttgtactgtaagcggctgacttcggctgacaattccgctatacggcgactgtcctgctcacgtgccctattcctgtggcgtagttctgaccggagttgctccaccatggc

SEQ ID NO: 47733 - DNA, 909 bp, Zea Mays
ggagtctttactcggacggtccgcgacctggggaattggccctgcaccggttattagattttcagtgttgtgaaatctccctcgctttatccgataacctgatgcatcttgtgccaaattgtaagctctatgattctcaactctagagatatgccgaatactgaattcgtcaaaagaatgaattatgccccaacatttttcaaggtaactatttagagtaccatcaaaactttgatattcttctaacacctgttggacgaccagctgagaatcaccaaatgccttcacatgttttactcccatacaatttaaaagttctaagccgaacaaaagggcttcatattcggcttgattgttagtgcaataagttttcaatcggctagagaagtcgaaggagacattacttggcgaaacaagcacaatgccaattccttgcccttcattgcaaaccgatccatcaaaatataaagtccaatgagaaacagtgaggtatgatatgtctaatttatgagtatcattaatccgatgttctacaataaaatctgctacgacctggcctctcatggatttcaatggttcataggccaagtcatattctatgagtgcataagcccatttaccaattctaccactcataattgggttatgcaacatgtatttgatcacatcggtttgaccagaaatagtgcaacaattagacagtaaataacatctacacttggtgcatgcataaaacaagcataagcataacttctcaatgaaagtgtacctcatttcagcatccaccaacctttgacttagataagtcaccacatgctcctttcctccggtttcttgtgtcagaacagccccaataaccctgtcttcagctgcaatgtataatcggaatggtactcctacttgcggtgc

SEQ ID NO: 47734 - DNA, 288 bp, Zea Mays
ccatggccgacaataagaagttaagaacactacaggataaactggaacacttcaggttcagccttgagtgggtttggttttatactcctatggagtttgacaccgtctgcaaccattttcaattgattccgagctttggtaaaggttatggtgagtaaaggagtgatatgggaattgggaaaggccagagtgcataagaagccgacaggtccctgctcacgtgcttgtcgctggaggagcccgcggacgaggatccccttgtttatagacctcgccttgggatctcta

SEQ ID NO: 47735 - DNA, 444 bp, Zea Mays
cttgctcaatcgcttccctaccaaggcgattagtgctcccacaccccactttgccctcttcagcaccactccattctgcaaccatctacgcatctttggttgtgcgtgctatcccaatctatctaccacaactccccataagcctgcccctcgctgctcctgttgtgtcttccttgggtactcccttgatcataaggggtatcagtgtcttgacctcactacccactgtttgttgatctcccaccatgtcttcgacgagatgaacatccctttctcctcatccccctccagctccaccaccgagttgaacttccttcttgagaccccatggctccctctagacaaccacctttgtttcccccctgcaggttcatctccgctgctcccacatgcggccctagtgccacatgtggaccttgcgtccctagacacgcctcgggctgc

SEQ ID NO: 47736 - DNA, 618 bp, Zea Mays
atcatcttttataccaaacacctttactttagtaataattatgttttattgaatatttttataggctatttaccccgtctagccatctagatcctaacaatttcttgtgtgtgtgtgaataccttcttaggttctttctctccaactataatttgttgatcactggagatgtcagacacttcttcttcatcatccttgaggttcatgtatcttttcgaaagaaagatcttctcccaatgatcatagttgcccattctattgggtgtgtagggcttgataatcgagatagctaagatggtcactatgggttggtatggcaactgatccatcaagacggctacgtgggaagaagcataggtattctcaagtagccagactggctagtgtataatctttccgtctgatgcggcattaaagactaggctttgttgggcaccaatcagtgcgacttctacctcttatctctcaagagtggatgtgataagtcttatgatcgctttctggtagattgaagtggtattgagtcgaagagggagtccgactagacttaacctgtagttatatgatggctggatgcctactcaaaaagcttggccatgttcaagtaggacttaagca

SEQ ID NO: 47737 - DNA, 348 bp, Zea Mays
gcctagcaacatgcaaggcaatgagacgtgaagacttgccgaagaattaataccatttccatgggggacaagagagagtcgatcctagtgaatcgagatgaaacctattcacggttggatatcggtgtacgtagctacatatgttggggactcgttacgacactcgcatcgcatcgacttcaaacttcagaatttgaacacaaatggactgcgccgatcaacagtttgaaaactaataaaccgtgtaaataggcttaggccgcttgaccatagaacaaaatttagacgtctcgcgaaaatagtactgctagtaattaatttcgtcccttggtcagacatatatttagg

SEQ ID NO: 47738 - DNA, 1032 bp, Zea Mays
catgtcggatgatagtgctcgatttacgatttcaaagggggggaagagtgagaaaatgaccaatggaagtgagggggaggttgtcgaacagaagggcgtgtgcgaggtaggtgggggttgctatagcgtgggtgagtgacacgacgctattggaagaagattgtatggagagagagagaatggtatgcacagactatgtaatcactcttgtggcgtcaggcgggttgtcacaacaaggtgtcgcgacgaagtcgatgaagcaacagttaccgtatagatgttcaaacgggtcggaccgcccataacccggtaagattttggtccggctcgaacacgacccacacggtggttacggggctgtgcctaggcctaggcatggtgaggcggtcacgctcaaaccaatcgtgggcccaactaaccacccaccggcccaatccacttttccttgcgcgtcccacgcaagcattcatatccacacacgaaggtcgactcattatcgtgtgggggctcgcagcccaggacgtcactgcacgaacccccatcttgctcacgctgtcagctaggacctaatcaccagtcatttttcctgttcgcgcgccttacctctgcatactgcgggtgggacccgcgcgtcgaattgcaagtccgtcccacggtctctcaccatatgcactgcaggtgggaccgcttcataggttacctcctctccatgtggacgcaccacattcaaacaaaattccatcacaatcaccaaacacatttatcggatgtgatcctcatcacgtgtcctcgcccctatttaaccggccgagccccgggctcctcatcgaccacaactttgggtaggagctccaccaatcactaatgaacaccgagtgttgacggagcgaagcacgcagagaaggcggaagaagaccactgccatggagttgcgcttgcgtccgaaatcggagaatatgttgtggctttggggcatcgccattcctctacggagacgctcgtggcggcaagagacatggaggaccaccggag

SEQ ID NO: 47739 - DNA, 604 bp, Zea Mays
actgggttgagttctcaaactccaaaccacatatggcagttctctgatccactttcctgcaagcttctcatttttgtcaaatacttttttcctgagcacttccagtatcatcttgttggctctttatacttggccattggctcttggatgcgctactgatgcatacttaatctggatgctgcgttgctcgcagaagttgaagaattcagagctggtgaagttggatcctaggtcggtaatgatgctatttggtatctcaaacctgaatattatatcttgtatgaattctactgccttggctgaggttaaagaggcaatgggcttatactctatccattttgtgaacttgtcaatggcaaccaacacgtgagtatagccttcctgagctttcttgaaaggtccgatcatatccagcccccagcatgcaaatggccatgttacaggaatagtctgcagctgctgtgcaggtaaatgttgttgctttgataagaattggcaagcttcacatctctgaactaacttggcagtgtcactcttcgctgttggtcaatagaaactagatctgaaagccttcccgaccagagttctagatgctgcatgtgct

SEQ ID NO: 47740 - DNA, 290 bp, Zea Mays
cgggtgaccagggcaaaagcacccatgagcacataggctagttcctagcacaattatgggaattggccgatagggtggctttccacgttggcttattttcattatccctaaatagtatcgtgtctgcatggtataccaccctgtcacctaattccatctactcttaggggagatttagagcacaaattacatgaccattttttcttcagagggtatgagttagatctagtagatttagcagccctacgacaaggacaacatgagttggttaatgattatatacgaagatt

SEQ ID NO: 47741 - DNA, 524 bp, Zea Mays
ccgacggctgggggggagtacggcatgcttagccgcaactgagctcgagtggatcagacgccgagatctttactgagttgtgcttatccatggccacgacgcacgaatcacggcaagcaatcgatcaacggcgacgggccaccggcgacgagatctttttttggcgctggcggtctgatcttcaacagagcactgtaccatggctaaaacttgattcagttgcctgacagcccaacttggagcgagattttctcttaatttccttgtgacaacacaagtcaagcattgcagcaaacttggagagcattataccaactacatctttgctatatggtgttgtcgcaaaaggccagtagatcaggcataaacttgggcttgatgttgatgtcagtccaccgtcaccctgattttcagacttaatcatcctgacagccaaacttcaggcttaattatctctaaattcttcttaacaactgagctcacattcttaagcaaagttgttctcctttgatagatcttcaaat

SEQ ID NO: 47742 - DNA, 1408 bp, Zea Mays
aaacagtaatttggtgttgactttagacctctgtatcttttgatctatggagattttgtcatgggtcattgcaacaaatttgtagagctattgtacgtagttcaagtttgataaagtgattaagccctagagctgtacataaattggagtaaaatagcctagaagttgggctgtcaatcggatgttggcctgaaggttagactgacagtggcattagataaactttagagctgaattgtgcttgatcgagtggaggtatgaataagagctctataacaaagttaaagctgatatgatggacaacaactttgctatagtcggcttgataagttgttgaacaaaaaccgaagagaaatgatcctcaaatcgctctatcaggcgcgcggaatggacatcgctatggtacagtacactgaagaagatcctaagtgccgtgtgctcgccaccaatgtcccgccgccgtgattcgaggtcgtgcctcgattggtgccgccgagacgtggatcaatgcgtggtaaaaagatctccagctcggattcgatgatcgaattaccgctctagccacggacaccacgtgtcctcaccgtgaatcatccaccgccgtcgtagtaagccaccggacgctctgaccatccacgcatctggttgggagctcgcgtaatgaaccgccgcaaagggttcgtggtaagtccgccacgttactggcctatggacaccgttgaggctaacgtggagcttctcgggctgtcaccgctgccgtgagtcagcgaccaaattgcccaccgtcgtggtgacttcctttaaattgagcctgtgctcagtctcgcctctccgttacgcactcaagccaccctttgtttccgtcgttccaccatcgatagccaagaacaccggttttccccatcggtggtcaccagcgccatcgagcagtgtaaccgcgtggtcagcctttcctaaggtcagtcattgttgttttactcgtgttttgcagtctatagatcatggtgaagctcatgcgcttgcccgcttgaactctacggcacaggattaacgggaacactgtcgtgtcgttcggtgatcgtcgccgaaggcagtgtccacgtcgaccgaccaacccatagctcctctagacaaacctaggtgaggattgtatgccttatgcattactgatactcgtagtgaccttggattgaaccctaccgcgcttgaaaccctggtacatctcaccggagctcgtcgatccaccgtcagcatggctagtgaagccatttgaggatgataggccgaactaaaactcaaccttgtatccatattctcatgaaagcttttccaaaatctagaggtaaactatgatcctctatccgaaacgatcttctttggtactccatgtaaacacacaatctgagcc

SEQ ID NO: 47743 - DNA, 715 bp, Zea Mays
gagggattgctcagaaggctctggacaagaagactaacaagtccggaggcgccaggggcaggcccaattgagcaaccgagcacgaatctctgactcgaacattgcgaacaatccggcatctacgcatggatggtccggtgctcatgcatacggttcgggtgactcagcaggacagtccacccatggccagaggcaatagcctccacacaaagtagaaaaggagacgctagaacaaagcacatataacgcacatagtcgtctagtcaaagtcggccctacttttgataaattgttctccaaatatgctagcaagaaggccgttctacgagatcggtcaataagaaaaccctggtcacccactagaacaaacgaccaaataaaacgacctaaaaggtgatgtagcaagcatcgcctattcatcctgtgattccaggatactttccgcccgtctacttatcatcgatatgttgtcatgttcaaatatggaatggtacgacgatgaacccatggtacatgcatagtccctttgtctattcaggctgggggcacctccattctataccttttgatccattgatcagatagtcatggccgagaaagatgcaatccaaaacggcctttatgtattagagctctatagaatgatcactctattggtttgaaaagccggtgacttgcatcaggcttagttcttacttcgggaacaaaataactt

SEQ ID NO: 47744 - DNA, 334 bp, Zea Mays
aaggtaatcatatgtctagccctgattctagcttaccaaaactgactaacaatttgaaataggagatgtgatgagagataggacgggtaccaaaactgactaacaatttgaaataggagatgtgatgagagataggacgggtaagctgctagagacaaccttatggggtggagggagtagtaattattcatgtggtactgttcactcattgttattgatttaattaataaagccattttctgttcatctgatatctgtttgatatttgttcttgatttgccagttaacttgttttcattatttgataatactagttattatcattagatctgat

SEQ ID NO: 47745 - DNA, 523 bp, Zea Mays
atcgacaacaccatcatcttcatcttcttcgactatgctgcatcgtgccctgcgacgtacctgaaacgcacgtgtgtgccatacctcaaggcctgcacgacgacctacaccaactcatcctcaccaccaccgatcgagaggctccaccttcgacattgccttcaccatcatcgtctctgcctcgcacgctctcgacctaatcaatcaattatgtgcgaccatcctcccatgacgtatgttgtctactgcatgcctctccaagtacaagggttgtcgttgtgtcacctcctcaagaagcaacgtcgttactgcttgttgccatcctagtcgttgcccctacattgtcgtcaactacttcgttgtgtgcctctcacacatggactaccccaactgttcgtgctcttcaccttcttcgagtacaactatctcaacactctagcaccatcgcgtctctccttgtgtggtgcggctctctcacagctgcaactccagaatcctagatgtgtcacccatcacttcttcg

SEQ ID NO: 47746 - DNA, 534 bp, Zea Mays
attaaaccatggtcacatgaaaaatttggagaaaaatgtgcccaaagtcgagctgtcagactgccttaagtctgaattcagactgacattggaattgcatgaacttagggcttaattctaagctagatcctgtgactttttgtgggtgcacgatgtagcaaagttgtagctggtttattaggctataactttgatacagagagttgattcagtcattacataaaatctggagcaaatcgatgctaaacatgctcttacaggtcgactgaatgagcttcgcgatggtacagtgaccggattggatcaccagctcagagacctcgccgccggtgatcttgcgctcagatccacgccggcgtcgcgattcacgcccgaccgaactcagataagcactcctcggtaagaaatatcacgcgggagataaactccgaccactattctcaccgccgtcgtgtcccgccgtggtcaatcgcgttggcatcaccggcgttcgccgttaaccggtcgggttacgtgcctcaacgctttactacg

SEQ ID NO: 47747 - DNA, 357 bp, Zea Mays
tttcctctgttctcataccagtaatgaacttttataatttgtttcctctgttctttgtaaactgctctcatattctgttactttgttctaaactattcattgtaaactgctctcatattctgttactttgttctgagttgtgtactattgttgcaacgtgttgttgtcgtacttgtttaagtctctgagctgtcgatcaatggtatgtgatgcttatgcctctgggtggcacatctcttgtatgttgcagccgtggctcatgtaacaatatgttttcatatatttgcaactagcacatcaattatattttctgagctatagatcaatgttctatgatgctagtgtgcctctgagcta

SEQ ID NO: 47748 - DNA, 277 bp, Zea Mays
ggcttctcaagttgtttcagtggtgttggatgtgattagtggagtcatcgaacttgatgaggaactgattcgagcaatttgcttcgttgaggcaatccaaatattcattgatatcatttggcacctgcatcttctatttatacgtatgtacgtccatttatacgtaacgtccagatgtgcaggtcaggtcacttgacctaacattttttctctcctgcacaatgctgcaaggaacttaaaacgcaagcaaggggaaacacacttcattttcgctttt

SEQ ID NO: 47749 - DNA, 470 bp, Zea Mays
tctgactgagggtgataggctgtagataaagccaactgagttcccaatgtctgaaataaagctttccagaattggctagtgaagaccttatccctgtcagacactaatgtcttaggaactccatgaagcttaaccacattatctagaaaaacctgggcaacaatagcagcagaaaatggatgttttagtggtaagaaatgagcatacttcgaaaaacgatccaccaccactaaaatagtgtcatagccctcagatttaggtaatccttcaataaaatccatggttagatcttgccaagccccactaggaattggtaatggttggagcaacccaggtggatgaatcctttctgacttgcatgttgacacaccaagcattgctacacaaaagaaatcacctcagctttcaaccctttccaccaaaaaagtcttttaactctgtgataagttgcaggtcctccagaatggccc

SEQ ID NO: 47750 - DNA, 308 bp, Zea Mays
cctgtgtgaagtggataaccgcaggaggtaaaaagatcggagggggaatggatcgagtcgacctcaccgtacccacttgaccggcaacgtggccgcgcgaccaccaccatcatgccgccgttaacttcagtcacgacacgccttaagtcgtttcaccacgtcatcacgggttgtggaggataaccagtgacggtcgtaaacctttgcccagtgaatgccacgttagcgaactccggtgactcacctttgctccggccgccagcttgtcttccccaaattcggagccaccgcttctggacactataaat

SEQ ID NO: 47751 - DNA, 673 bp, Zea Mays
cgacgaggagcccaccgccacccccacggaaaccaacatgcacggaagtggggatcgcccagagcaaagatgataaagcagctagatgagggagagccaaactcccgactaggtcatccgaactcactctcacaggcacagtcgatccaaccaaaggagacgtggcacaatctaccaccttcaaaccctcgacatgggccaactgtgtaccaggattcaaaggcccgatccatggcgaccccaactccaccccagaaacccaaccgtgccaaggacccatagtgaaaactgaaaccctacatctgcctgaaagccaaatagcccacccagaacggcccactgcataagagaaagggaggggagaggggaagggaggagtgaggaggaggagatgagggcccacaaggagcgaaaaacctgcaggagcaacgacgcggcccaataaagacgacgaccgctccgtgccgtgagtgttagaacagtgtcgtactgtcggaccccatttgggatggaagaaaagtatggatatggtcgaaaaaatacatatcttaattaatagagtttatcgtgatcgtcgatgaccggccacagtccattagttgaatacaagttttcttctttaagtttttgttattttccattcgatttaaattaaggttgtgttgtgttcatc

SEQ ID NO: 47752 - DNA, 728 bp, Zea Mays
ggcgagtctaggcttgggactctgctccgggggatcatcgcacctcgtggaaggtgtgctcctcattgattcgggtgaagttcaccggagcactatgtaatttctcgccgtagagcctaatctgctgcagatccgctcttccacgtggattgcccgcctgcgtgcatcatcctcgggaaggttccctcacccgcattcgctttcattttcgcatcgtgtagagttatttgggttagaggttggggcactaggactgtggactcgcctcgccagtgaagtcctccgccatggtagtcgtaccgtgccgccctcggggagctaggtggtgggcgatgtcgaagatgattcctgggccgtagatttcgtgtgtaacggccacgattagatggggataccccttcggttgtatggcactcagaccattgagatcgaatcgaagggtcaaatgtgggtcacgtttcataaaaccatagctgtcaatctcgcattgggcgtttccgattagcgcatgaacagacccccatcgcggcagtatgatttggccatcgatcggttagctggcggttaggatgtcatgagggccttgcaccgtagatcctccatccgaggactcgtatagcatactggtcttctaactgtgccaatctaatctaaaccatccgtgttcaatctggtggcccatatgcgacggtaccccttcagtcagccacctttacaaaatagccctg

SEQ ID NO: 47753 - DNA, 402 bp, Zea Mays
aaaaaagctcttgaaaaccactacttcatcattcttcagtgttggggtggtctcttctccggcaaattggacaagtttcctttcagcttccccaaagtagcccagcttcatcatcatgggcatgtcagcttcagacacagtagatttgtcaaaatctagatggttgggttttgttgggatcaaaatactataatcttcctcatcctcttcaatattttgttcttcagcaacggtctgttcagcttcggcaacaggagtaccttcatcagtagttcctctgtcacaactagacctgattgtttcatgacttcggaaattggtgttgtctcggtgacctcggtctcttctccctcacgagtcacccttgcagtcgaacgcactctggccatttgacggatgttt

SEQ ID NO: 47754 - DNA, 420 bp, Zea Mays
ccgtcgtagccggcggcgttgccgccgtgctctgggtggggagaagggggtagattatggagcgtcgatctcataacggacgatcgggatcaatactctgtgtaccgattcgcgccgcgtaatctgtggcgtcgatccggtattggacagttaggatctagtcgcgtgtacgttgaacctggacccttgatcacggatccgaaggccccgtttgcgtaccgattcgggataaaaccgatctaatccgcaccgtcagcttgtgatccaacggccgagatctgactgtaccccttcgcgggtcaacattgctaaagagcccctacgcttatcagaaaacaacccgccatccactcatactgtgctctgtgtcttagaaaacttacactgagaaccctgtgcttaccagaaattgacgcccag

SEQ ID NO: 47755 - DNA, 1152 bp, Zea Mays
ctgcgcgatcgtgcccttgctctcactgaacactagggcctgggtgctagccctcccccgcttgccttgcgccgtgtcacccaatgtgggcaccgacagatggatccgggtgggtagtcgcccttgcgctcgcgagcgcgactacgttcgccgacacttgggcccggatcgtcatggcatcttcttcccccctccacgcgtaacaaacaacaccgggttgttgagcttttcccggcaccgaatcagcacaagtctgttatggttcggttttcgagggactatgtgaactaagccttatcttcccttgggccatccacgtcagtgccgtcgaaagccaccaccaccgaggggagtgcaccatgacggagtcaagggatgcagggtgggtggaggcaagccgccgccatcatacctccactttggggtcgtttgagggccagggaagggctctggatctgtgcctaggcgtgtggcatgggcgcgtgggatagccgggactagaactcgatccgagcgatggcaatggctcaccggatcagtaccgtcgtcgcggacccaccacctcgcaacaacaacctcacctccgctctgatccaaggtgagagacttcccatatagtctgtcatgtccttcactacgtgtaccattatttggttgcgagtttggtcgttgggtcccctgatgggcgagtcacagcaatggcgccaccgcgacatgtttccgccgccttgtttgaccactggggggagggccatgcgcagttgggcgttagatcatggggcacaacggggattagatctgtacgaatccccttcacctgattgatcctagtcgttggatgataatcggaccgttccgtatcaattgtagcctaggtgggttgtggggcatcgattttcgatcgggcgacccaagtaacgtaccagttcgctttatgttatctttgatttgtgcgctcggatggtgatccaacggacctaattacagcataccccttcacgctgcaaacattataaagagcccctcaattttgtgataatcaacctgtagtcccctttaacataaagaatgtcacaattaggtccttggttcttacaaatccaaccctgagctttaagataatatgagccgcagtccaaataagcaccaaat

SEQ ID NO: 47756 - DNA, 661 bp, Zea Mays
cccgggtaaggccaatgttgtggcagatgccttgagcagaaaggcacagtgcaattgtatgagcatggatgtgggagttaccaccctgtgcgatgagttgtgcaagctgaacctggaagttgtttcttcgggtgacctaagctatatctcggtggagcccacattgcaagagcagatagtcagggcacaggttgaggataagggtgttcagattatcaaagatatgatcaagcaaaaggcagaaaaatacaagtgcttccgacaggacagcaagggaattctatggtttggagatcgattggttgttcccaaggaccctgagctcagaaagcagatactagatgaagctcacctttccaaattctctatgcacctgggcagcaacaagatgtaccatgatctcagatctctatattggtggactagaatgaaaagggaaattgccaagtacatatccgagtgtgacacctgccagagaattaaagctagtcacttgaaggcagcaggccctttgcaaccccttcccataccatcctggaaatgggaggacatttgcatggacttcatagtgggattacccaatacctccagacaccatgattctatttgggttatcgtggacagattgaccaagactgctcatttcttgccagtgcacacc

SEQ ID NO: 47757 - DNA, 599 bp, Zea Mays
tggataattgccaaagctagattcttgtgatactgaaacgggtcgaccctggatgttgataaggcttagggatcttactcagcctatcctattcgagactagtcacgagacagaggatgagataccgaggaggagagagataatcagctgatgatattgtagtcatgcagagagtacatagtctcagatatacgatttgggtgaaccgtccgcagaacatgcaacaaaatagtagtaataattacagctactagaataagatatataatttggaaacaccgaaacaagttgccacaatattctctgctgtaatcaagctgaaatagtctagacactggctctatagagggtgtaacatttcaaagcacctatgattttttatatactatccagagtagctaattaggctcaagaagtcaaataactttaatgttatctccttctccataaactttttctacccaaccatatcatttgtcgagaagctcaacgatacaaaccataggttatgcaaggcataggttcttgctgtggtacgaggagcacacctagaaggccacctcaccgccgcaaagccacgataaaagtacaacccaata

SEQ ID NO: 47758 - DNA, 448 bp, Zea Mays
ggaccgtcgccgtagatactcgtcgacagtgggattcgggctccaacgaggctactcgaaggttggtctggtcgcatagaagctatgtgagggattaattggagcgaaactagctgaagccataggaattctccgtcggtcgaacaacaccaccgtagggccgcaactcgccgcattcggatgcgtaggcaataactcggttgtcttgcatcaaaacacaacctagtccagtgcccgaagcatcgcaatatacatcaaatgatttggtgttgtcaggctgtgctagcacgggtgctgtagtcatgttgcctcaatgcatgaaatgcaccttcacacttctaactccaatcaaatttcactcctttcttcaacaattcagtcattggtttagcaatcctagagaaatccggaatgaatcgccgatagtatcctgccaatcccagaaaac

SEQ ID NO: 47759 - DNA, 1404 bp, Zea Mays
gagatgagcctactccccaaatatgcgggtatgtgcacaacttatgcagtaaaccatcaaattgtacccatacatctcttaggacagtcttaactcgccccccgcactgttggccttgaactcaagggttgctttctgagattttgctttcaccggcccccattctatcattctcatcaactccgcagctgaaggaaaaacggtcttgaatgttttcggatcaatttgctcaatagcccatggagttccacccggtagaagcctttccaactccattgtaacattagcactgccaatttccccttcaatgacctgaattaaagccaccctggaatcactcttgctcttgatcagtttcttgttcgtcgggatatgaaaaaaaccaccattgtttattccaaatcccgccggaatagcatgtgtcttaggagcgttaaccaccggacatctagccttgatgtgggtgtttgtgccacaaacctcgcagaagagctccgtagtgcacccactgatcacatgcccttttgcaaaacatcggtggcaatgcgctttggcattagcctttgctcccagaccctgatcatcctgcccttccttcttcttggtaatttcaatcaacgacactggtttggatttgtcaccccctgacgatgcacctccggcctgaacctgctgaccggaaacgccaacccccttctcagcgttgaggttctggatgacattcaacgcctgttggagaagggcctccgccttggctgccttatcatccagtccggtgccactcaccgtcgcacctacaacatcattgctagaaggcctcggcaagtagttacctgtacctcttcctgctggaggtggcaaaagatctcctcttcctctgaactaacctcgacctcctcggccatagcctggtctcgcccacgagctgccccgatgcatatagttgttaccaccatagtcaggtcggaaattattcggaccgtcgtactggaagccactccttaccaccgctctaccaactccagaggaaccccccctgagccggctgcggctgttgtggaggaggtctcctatccatggcggccgctgcgtatgaggcgtgacctgggtgtttgtgtctggttactagagccctacgaagttgttgcgacgagtgagcgttttcaaagagagccacaaggcctagcggcatcttgtagggcacaatttgattcgtaactcgccggaaccctgcttcactattaattactgggcctccagactgttgcactacccgaggaagcgtctcatcacctcccgcctccctcacaacatcaaagctcctaggtcccaaaagcgttgggcccaccggtatcggatgactcatcgtcttcctagggctgtccgtcggcggcgagctcccca

SEQ ID NO: 47760 - DNA, 359 bp, Zea Mays
gtttgggtaaaaagcagtggggcaagaaaagactccatccaagattgtggctcttgattcttttgaagatctggcttgactcttattactcctcaacgagtttgatctccttctcgagttttgatgtcttcatcccatgcacctactctcccactcacactgcatgcaagcatgcaactatgcaagttatgagtgctccatcatccactcatgctgcatgcaagcatgcaactagcctccgaagctagaccctgtggctcccttcgctcacgctgcatgtgttcttgtcgaggcaaatttttgcatgtgttcttaattaaaatgaaaatttgaagaagttaagtgtagctcagttggtc

SEQ ID NO: 47761 - DNA, 354 bp, Zea Mays
aatacatcactcaaagatgcttgcaacatgtttggaaagatccaaaaggcaccacatgtgtttgatgtgtcaccagataccccaccgaatagagcaattaaggaggatgcacaagaacccaagaaggtctataatgcacaaaatgtgtttggtgtaacaccagccaaaggatcagatgctcatattcaaacaattcgtaatggctagtactaatggatacctaatgtttacgtattggacatgtctgttgactgcattggacgtatctagtgagtatgcaaattttttgtgtcatttccatttgctattttaggacttgggggctatatataccatcccaactgacaaattaaa

SEQ ID NO: 47762 - DNA, 643 bp, Zea Mays
gaaagatatcacaatcctcgagagtgactaagaatcctcgagagtgactaagaaaatggacagaaaattgtgtataagagtgactaataacagtaattacagaagaatgcagggcgtggcggaaattcccataccagaggagtagcgggaaggagaggaactccagtctgggcgtcacttgttgcgccgaccagtgccttgttgcgccgaccagtacccaccaacagctcgcgatccttgttgcgcttgattcactcccagaacttacaaacacgaggaggatttggcacaaggagaggaactccagttcacctcgcgtttataagcgtgtatggaggatgggtagggggtttctcgatggtaggggatcccgttcacctcgcggcgtaaggaagggagacgccgaagattgaatggcggatttggcgcggactccatcttcggcaccgtgtatggaagggaggcggcgatggatgagattgaagagcgttcccctctcggtgccgaagattctcccccacgaatttggcgcggatttggctcggatttggcggctgcgggatgcacgctcggcctcgcgaggatggaaggagcgcctgtgggatccgcgaggatggaaggagcacggcgggtgccatcgacg

SEQ ID NO: 47763 - DNA, 517 bp, Zea Mays
gtaaggccaacgtggtagcagacggccttagccgaaaacctttcaggataaagggaaccaactttttcgaagattggaagaaggaatcagctcaactgaatgcatgtttgggaaacaacgacagcctcaaagtcaaaccaatgctagaagacctcatatgcaaagctcaacgcctagactcagagacaacaagacttgtggaaaaagctcgcaaagaacaacttccggacctcaggacagatgaacaaggagccctttggttcaagaatcgtgtgtaccaaaagaggtggcacgggaagtcctgctcgaggaagctcacaactcagcctactccatccacccagggactaccaagatgtacatagacctcaaaaccagatattggtggagagggatgaacaaagagatagcacagtatgtgggcccggtgtgacacctgccaacgaacgaaggccgagcaccagaagcctgcaggcctattgcaacccctcctagtgcctgaatggaaatgggaaga

SEQ ID NO: 47764 - DNA, 590 bp, Zea Mays
tacctgatatagatgtggatatactagggattaatatcatatccacatttgacttattggcatttgatctattccgcagggacgcctacgaatatgatccatcaaccttagtcaaagcatatgttctaattgcagattcacgtggtctgtaataactctcctccgatgaactcgccctgctggtgatttgcctcacgaagaggttcatcttgatgatgaaattcctagcaatgtgcgcaatatcattgtgctaggaatacagaacaatgaatcttttatttttgggaaataacgaagatcattatttaatgtgggagacaaatgtgtcgacacctatcttgcctctaaatattggaaagggatccaaaacaaagtcctaggcatgagtgctttaagctctcttatcgggccaatgataaatgcaatcgaggttgaaccaataatcacaaaatgaaagtcgcgagcctgaagtttgaacatttatgggcactattgaaataatgtgtggtgaatgcgatggttcaagtggtcttctaagagacccatcccacatgtgtgttgaataaacactttttcgccatgtaatatat

SEQ ID NO: 47765 - DNA, 1121 bp, Zea Mays
cgacatcataagcattagcatatcatgtgtttgtcacacctagagtgcattcactaggcaaaaatttcaaacaaggttgtattgatgggacatgttttaagtgaaaccctagggtacagtgcttaaccctagattgggcttaatagagcaaacaaggcctaataagagaaaacttcaaaactcaattgaaatagtcataaaatgtcaccatgaataaacttaaatggcatccaaaccctagaagtactaaaaacactaaatggacccctgagaaaccctggactgaaaccctagggttgtatgcaaaatgtgcccatttttggacctaagtgcaaaaaccatgaaattagggtatcttaactcatatgattcacatgtatgtggatttgcaacttaaaccctaagttttgcattgggcctatttgcaaaaagccacatttgagctctaatgagttaagtctaaaattcagtcgaattggctcaactttggggccctatatcttccaaattatgaagattttgccctaggtcaacacatcaaaattttagagctatgtaaggagaataactttgctatagagatcatgccttggtaccatgaagtattttgagataaatgtgcccaaagttgggttgtcagactacccttattccgaattcagaaaagcagtgagattgggcaatctttggactataattcgaccatgatctagtgggaatttgactagagatgctatagcaaaagtgaacatggattatagatctataactttgatgcagatgaattatgaggttgtcacataaaatttggagaaaagcttccttgaatctactctgtcaggcgtctcaaaggagtctaatggtatagtagctgaaacagattacaagttcagccccctcgccgccggtgatctttgcgccgcgatttgcaccgtcgctgcgattcgtgctctccggtaagtgaataaccacggcggagtaaagatcttggcaccagattagctcgggctcggtctcggatgagtttcaccgtacccacttgctcatcgtgcggccgggatagacctcgccaccgttggccgctcaccgctctgcgccacgtgctaaagcgctagaccacg

SEQ ID NO: 47766 - DNA, 672 bp, Zea Mays
gggtttcaccctgcagcatgtcgaccgcaacaagaacgaagaggccgacgcgttggccaaagcagcggccaagggcaaggccttgccctccaacatgttctaccatgtcatcggcacgccaactgtcggcaaccctgaaggtctgcaaataactcaggacaccgaaggccaccgcatcgtcaatctcatcatggccgaagactggcgggccccaataacactatacctgcaaggccactaccatccaaccgatcgcaatgaggccaagcgactaaagcacaggagcagggacttcacattagtcgagggtcagctgtacaaaaaggggatcagtcagcccatgctgaaatgcataaccgaaaccgaaggcatagaaatcctccgcgaagtccacagcggaacctacggctcccactcaggacctagggccctcgctgccaaggtgattcatcagggattttattggcccacaataatttgcactgccaatcgagtcacaaggtcatgcgaagcatgccagaagttctctcctcgctcaggccacccttcgcaattcaccaagctcatcgcccatacatggccacttcaacgctgggggttggacatcgttggaccactgcccatagctcaagggaatctcaagttcaccttcgtcgccgttgaatatttcac

SEQ ID NO: 47767 - DNA, 649 bp, Zea Mays
gtcgggaagagaatctgagcaatggactactgcacctggagtagcacagggtgatcattgagcttatcatcaatatcatcgtcctctgagcaggtgtgagacgtaagagagtgtcaacacattagggacatggtgctggccctccttgctgctattgggcttttggagaaggttagggaagttaggtggggatggtggtgactactctgtgagacccttgctaaagaattccccaggagtggtggccatggtgatcaacgatagtgatgacttccaagttggtcaatgattctaacaatccgaatgcaaaagatgatggctacccataactacaatgttgcttggacagtggagatatgactaccaatttttctaatgttgtttggctaatggtaccatcgaaacaatccccatgtgtttacatattgaaaataacaaagcatgaagatgctgttgtgcaactcgaatctaacaaagcactaagatgttgtgcaacacgatgcatatttaaataagctttacaggccaatgtaaagtactaataatgataagccaaaaaagtaaaggagctaagtttgggcgcaaccaataaacaacttcaagaagaacgcacccagggaaatctgctccaggcgcttgctttctacca

SEQ ID NO: 47768 - DNA, 696 bp, Zea Mays
caacaacccttgggtgcatggcgatgaatctctccgtcgcggtttccgcggggattgttgcagccgcctggatcgctcacctcgcaaccatataagtcgcgcccgacctccttgatgtccatcgagcgccaacaccaagctgcatcacggagtgagtcagcagcgtgcgatcgaaggggagcgaaccaaaagggagagagatcagggcattgctgatgcctttcggctgcctcgccggtcgggccaaattgggaggacagggagcttcaccgacacccacctcgtgtttgcgtgacctttcggggtggggaatggcgggactcgttgggaattcgtcgccaaacctggtggcgccgccgcggagccacctataccgtgggcggggtacgtaggcgtcctatatccatgtaaaagtcccctggcactttcgattcgtactccatgcgatgttgcagcattcggatttgagcttggggccctggcgcgcaatgtggacaacatcggccatggcgccaccgtccctgctcgagggccaccatgcgtggccgggttacgtggggaaggaacccccggcgccgttggtcgattgatggacggctcggatttcctcaggggtaccgctttggtagaattgaaatcgcgaccgttcgattctgatcctgcgtgggtgaaacattggcgctgttttgaaatagt

SEQ ID NO: 47769 - DNA, 899 bp, Zea Mays
gcacttgggaatgaagtgcaagtgtgcctaatggccttcaacaccatatgcacctatattgacactagagatttagttcaagagcatatcgctttcaaagtgtggcctcttgcaaatgaatgggaaatgccgaaggaagctgccgctggctccagccagggtggcttggtttatctcaagtacaccttccggtacataagtcattttcaacgagctaaatgatgattggctagacgctatagaggcaacaagtgatgagctacttggagcctactcgaggacagaagatgaagctatgacagttgccttcggtgctcgagggaaaaggaggccgaacagggttttcgatgttattgggtttgtctaccctaattactgctttcctgtccgaaggcaagggggaaagaggaaagttgctgcttcaacctcttccagtgcgccgaaggcaaagagggccaaggtcttaacacgtagaccgaagcctattgagacggccaaagtgtcgaagcttattgaaagtgtagaggctgtcccgtcagccacagaaatagctcctgcaatgccgatcaaaactagtgtaggcccagtcaaagagccgaaatcagagaaggtagcagaacagccaagggtgctgagcccaacagctgtatcagggctgccgaagccatcaagtactacaacagcgactccaaggaaaaggagaatggctagcatcttagatgctgttttagaatccataaaggtgccagtttctgcttctaccgaagcatctggtgaatcaaaagaaacaactactgcaagcatggctaatgttcttgccaaaaccggaccttcgaaagtcgcgccaatagggctggtggaagaaagtgctcctgaaaaatctaaatctcctactcccg

SEQ ID NO: 47770 - DNA, 617 bp, Zea Mays
ttcacatcttccctctcaactgcgtcattcttaacataaaaccactgcttcatccaggatcctggtcatttttcggaatgttggaatagggtgtctcacatcagagcgatatatgaaggagtaacaaccaaatttgtatgatattgttccttcccaactgtctttgtctggtaggataactcatgtatattgcagaagcagtcgacatctaggtctagcccttggctctcatcgcccaaatgaaaactccaactttaatcaaagcttcgggagtaagctgatgaaggtacatttcaaatcttttcagcacttcgactagcatttgttgcaagggaaagcgaaggtcatccttcatgaaactttggaatacaaccaatttgtctgcctcaggaagaggaacagtgctctctcctctagctctcactacggatatatcatgaaaatatttgccctttattgcctcaatctgcccttttttaacagtggatttttcgaagacaacatggcttggcctccatggtcgatcttcgacgtcttctgcaccactatcaaaaatcaaagtcatcgctaccctcagaatctttggataatccagccagaatttcactggttatctt

SEQ ID NO: 47771 - DNA, 1420 bp, Zea Mays
ccctagcctgctggtcagcccgcgctcgcgtttgcacgcgcgcatccgctcggccagatctgatctcgaccgtcgattttagatctaatggctgagcaggcctaataccccttcgcaggtgtcgagggtagagcatagctggtggccaacgatgacaacctcgtacaccatgggtcttgactgatgataatcatagtggaccatgcagatcatggtgctgcccttacaacccctggcgcgccagatgttggcgagtcgccagatatgctgtccgagtggacgaggcgggtttcgctggtgacagtggtgaggaagttgagagagctgaatgtgaagctgccccaggggcaaaggtttctcccccagtagaagctgatgaactagccatcggagtgaaaaaacatcgcttggcatgcttgctgtcccctacgtggcacgccaattatcgtggtttcagaaactgggggacaatagattggtgttcggtggggatgcaagcatggtctctctccgaatggtggatcatgaggatttgagcaaagaactgagacactaggttatactggtttaggtcggagccctagtctagtgcagtgctgattgtagtattatagtagagcgtgttacaactattgtgcttgtgtgctcatgtgcccctcttttctaaggaggagggggcttgcccttttatatctcaagggtaggaccttaaagtgggattggtattctactggatagcgaaagagagagagtgaggggagagagatctgctcccctggtagtcgtggtgggtcctccgtagggtcatgtgtagtcgtactcccgatatggcgtcgtctattactctagctcctgtagcgagtccatcgctgacgtctttatagtggtgcacgacgggtcccacggatcagtctcatggtgcagtcgtacgtggcgtggcttctcatgttgtcatgagcccttcgtcacctatcagcgtgtgcaggcgtacattcgatatgccgcgctgtcccatacttccgatgtacgggtcattgtagagaccctagtgcccattcagcatgctatgcatatgttcagacgtggcttgatggtgacgtgtcccattgtagctgacgtggcctcatcgggttgctcgatggtgagttggtcggccaaagctgattggtggagagttggtcggccagttcgcctcgtagatttggtcggtgaagttgggcaccttctagagcatcacccaagacacgctcgggcgagttggaaaatgcgctggtcatccggggttggcctcgggtgagccgtgactgtgtctcccgcctgaggttggcatcgggcgagccgtgtcttcatcttccactggaggttggcctcgagcgagtcgttactatgtctctagcccggggttggcctcgggcgagcc

SEQ ID NO: 47772 - DNA, 584 bp, Zea Mays
tgagggaggcgggcgaacgcttcacaattttctcctccaccatgatattggcacttgcatgaatcaaccccacgaacttgggatccttttctctcctgctcagcttgtattccctactgcaagcacttaggtgcaagtaatataagtctcatccccctatattggaagtagggccttctcttgcccgaacgaggataaagaattgtgtcatcttgcatcacccatctgggttagggcacacaacattatttcactagttggtaagaccctcgggtctagacaccaacagttggcgcgccaggcagaggatcgatgcgtgcaaaacatcaagttcccatcaagactctagatggctaacttccagcacactttaaggctcgacacgatgatcaggtttggaggtttggagttcatgtcgctcgacatcgagtacgacatggtgctcctcccacctggtcccctggctaacactcaggggcaactagatgtccatcctcgtccttccagtcacaggaggcggagacggagcaaccgcaccacgtgcagcaccccatgtcctatcgacgctcttgaactggctaacg

SEQ ID NO: 47773 - DNA, 839 bp, Zea Mays
ctagtaaatttgtgctgcgtgctcttatcccggatggttgatgaaagaagacacacaaggtttatcctggttcgggcaagagaaggccctacatccagcggggggaggagacttatattatcttgcatctaagtgctcgtagtaggggatacaagcaagtcgagagagggagtgagtcctaagtctctgagtatgattgaggcgagtgccaatatcaggagtggagtgaggagtgaacggtgaagtgttgtccttgacctccttatagaaggccccgggctcttccttttatagctgcaaggaggaggcccaggggtacaggtgttgctatgctattgctgtggtaggaggaggtgtgtccgagccctgtagcggtatggccggcgggatggccctcgtccttgatgtcgtctttggtcaggagaaggacgcccgatccctgtagcctgtcctttgactaggtagagagccgaggccgggtttgggagcatgggcgtctgcccgagctcgtcctgtacaggggtgcgaatgagacgtttccgagggtgtcgagtcggagtggttgaaacagagctcggcatggtgaaaaagtgtgtggtaatctggtccggatgtcattctggatggtggaaagtggattggacactggtcttgttgtttctgtagccttcctgtcttcagcgggagagcaggtggcatttaatgcgcgtgcttccctgttggggcagttggccgaggtcaagctcgggcgaggcgaagatttcttccgaggccgaggccgtgattagacgttgcatgtagtcacgctctgggtggttgaaacagtggtcggagtgggg

SEQ ID NO: 47774 - DNA, 326 bp, Zea Mays
gagaaatctgcatgataatatttttccactagagagcataccttttctatgtcaaaagagctaagtattggattcaaggaagcacaaagtgataaaaggtctattgcttggccaccaaatcgagcttctatctcatttagttgttgatcaattgcaacattaaacacatcaaatttataatgatgaaaaacggtggtgttatcattcttatttcgagatttggtcacatcaacaaacctacaaatgtgataaaatacaaataagatcaattcatatgatatgaataataattgtgcaataatttagccaaaggaaacatacttgtg

SEQ ID NO: 47775 - DNA, 1152 bp, Zea Mays
gagctatgtaaagggtacaaatttgattaagtgagtaagccctagtactacatgaaaatgggagaaaaagagacttgaaactggcatgtcagacagccttaactctcaaaacctaagttcagtgacatttggttaactttaggagtagttcatggttaattcaatggagataaggtcagggtcactgtggcaaagttgaagctctaacattagtaaacaactttgtcataccaagcttgaccaggtgctgaacgatttttggagtaaaacgctctcaaacttgctctgtcaggcgccctgaagggagttcacggtggtacagtaacctgaataagatcgcgggttcagtgtatctcgtcgtcgatgactccacgccgtgatccttgccagcgctgtgattcatgcccagtggcgcgcggataacgactcagggtaaaagatctcgcgtggggatgagtttggatcactgtattgccctatcgccgtacccacttgcccgacgacgtggcctcacggtcatcgccgaggctactgttgttttccccagttgagccacgccttagctagtttaccatgtcgctgtgcgccgtggaggttaaccagcgatagccatacgcctatgtccaatgaatgccacggtagaacgtcacggtgactcagtccctcttctcggccgccagcgcatcttctcaaaattggacgccaccgctgatggactctataaattgatgccccagtgagctccattacgttgttatgcgtccagtgcaccagccctcgcctccgattagccaccgtagctcgcgaatttcaaacttcccccaatttggttctccgcgacgccatgaaccaccgcgtcgtgaaccgtcgtttctaggttcgttcacatcctccttaccctcgtttcagcacccttatgtgctaaggatgcttatcggcccagccaattaaactagaccacgctagatcaccgggaacacctcgggttgtcctcggttttcgccgtcatcgtggacagagagattttgagctagaattttgcaattggtagagggattagggtcgctaggggtagaatttggtgtataccaagtaagaagcttagccttcacgtgttccggccggtacaagctcgccggagggcgtgttcgc

SEQ ID NO: 47776 - DNA, 560 bp, Zea Mays
tgcatttgttttctagcttcggttgtttgtttagtctgagctgagatggccgaaggtaagaggagtgaggatctcgcattggctgggttttatgaagctatggaaaggaccaatgctgaaaaaataacttatgagattctagctgggttgtctaatgattctaacgatagcgaggattttgttgttaacagcggtgctgatgatgccaaagatcgaccgtggaggtcaagccacgttagcttcggaaaatctactgtgaagaagggacatattgaggccatgaagggtaagtaatttcttgatgtgtctatagtgagggccggaggagaaagatgaagtggtggttttccaaagcttcatgaaggctgggttgcgcttttcccttcataagatgttggttgaggtcctcaaaagttttgaaatgtaccttcatcaacttacccccaaagctttaattaaggttggggtgtttatttgggtgatgaggagtcaaggcttagaaccagatgtagactacttttgcaatattcacgagctcctgtatctgacgaaggctactg

SEQ ID NO: 47777 - DNA, 516 bp, Zea Mays
atatgatgtagatattcatttaaagctattttgccaaaaacttagaaaaaaccagaagggcattagaaattaatgaacaatgattaaaattagttttcctagtttgcttatgtaacagagaacctaggaaaaataaagaaaccattagtccagatcagttttaaattagaatgctttatttagccttatttgaactgaaaatcaattattagagttacaaaactatacccaaaatggataataaaaatccagtgaacttacaaccaccagagccccactacaaaaataaagaacacctcagcccaacattttaagtaaggaaaataaatataaagtgataataaggcattttccaaataaatcatgaacaacccctaatgatgtgataatgggcaaccaaaattttgctaagtccataatgggataaaccaccagagaaaaatacaaacccatgaaaaaggagcaaactcatacctattgctaaagatttatgagaaaggccacttaattcaaata

SEQ ID NO: 47778 - DNA, 395 bp, Zea Mays
ccgggtcgtaggaatttaatccaatgcgctagacaatgtaccagttcaccgggttccgatctaatccgggccgctcgccgttgatccaacgaccgggaacacgtaccttttcgcggagggctcgatctaatatgatccgttggggcggatcgaacgactgagatctattgataacgcttcggccgtgcgcttttgcgtatgagtccttgaacttcataagtatcaacccgccatccttgctctattgtaagaaattaaaaccaggcccggaattttagcgccgtagcccctgtagaactccagatttatgcgcgctgtccagaaaaccagtaaaaggaataaaaaacatagaaaatgatttttagcattaaaataattctagaaacttgtttaat

SEQ ID NO: 47779 - DNA, 760 bp, Zea Mays
aaggtccttcccatggcggtgacagtttgtgccgtccttctcctgtcaaaacgcgacggaataccaggtctcctactacaaaggatcggtgctgcactgctttgtcatggtagcgccttagagtctactggtacctagccgattggatgacgatattcaaatgctcttcttctaacatgtcaacatcctctagtctggttgcttctgcttctgctatgctttagaatgtcaacctgggtgctccaaaaatcagatatgctggcaacactgcctctgatccatacaccatgaagaatggagtgttccatgcagggctcggctgggttgggtccgcagactccagactacatacggtagttccttaatccatttgcctgcgagcttttcactcttgtcaaatactttcttcctaagcgcatcaaatatcattctgttagctctttctacctgtccgttagctcttgggtgcgccactgaggcatacttgacctggatgctcctctgctcgcaaaaatcaaagaactctgagctagtgaagttagatcccaggactgtgatgatgctgttgggtatcccaaatctgaacattatttctttaatgaactcaactgcttttgttgaggtcaaagaggcaattggtttgtactctatccattttgtgaatttgttgatggcaatgagcacatgagtatatcctccctgagctttcttgaatggctcaatcatatccagcccccagcatgcaaaaggccaggttaca

SEQ ID NO: 47780 - DNA, 342 bp, Zea Mays
ctgggcttgacaggaaactgcctttccttggtgatctatgagaagaacagtcttgcttgcgcagctgatgatacctttgtgcttagctagccaatccattcctaggatcacatcaatcccttgggatggcaagatggttaagtctgccaggaacactaccccacttaaaagaattctgacttgggagcacctgagtttgcacaggaggtctgatcccggggttcaggtgaccaaagggacatctaggggtgtagaggggatcccatgtttttccacaaacttagcggctataaaagaatgggatgctcccgaatcaaaaagcacagtagctggagtaaattc

SEQ ID NO: 47781 - DNA, 940 bp, Zea Mays
gcgaacagtggatgtggacggcgggttggtttctatatttcgcagggactcttatacaaagtgtgcacggcgaaaaggtatcgagaagatctaaccgtccgatcaccactgatcggcccagattagatcccaggcgaagtgaaccgatatgcagtcgcgaactttggatcaaagatcaacgaccatggttttagcgcgcgggactctattggctgggccgaatcatgtccgctgatcagacacggaacgaccccgatatcatccacatgaatcggtatacattgatctaatcccaaccgtcggatcagtgatcaaaggcgtcgtaagtccctcactctaatcccatccgatcagatcggacgacccgagttcgctccctctgaatcgttaagctagcaccgatccacaccgcacagtcatcatctaacggcctaggcgcactcgatcgaagatctaatctcatcacttggttccccgatccatggctaagacacggcggcgcgcactgacccgcggcagacacaatgccggagtactacgaatcgacgacatactatcccaaccatagtgaaactatgccgagagaaagagaagagagaggcgaattcgccaacaaagtcataccagcctatcgtcacgagaacgggtcggacgacgtgatggtgcagctccctggtccggcccgagtccggcgagcaattgccttcgccccgcggtccgcaccacccaatggctggcgcagacagtttccacagacgagtacgatcctccctgacccaactctaagagtggagaccccccaatgacgactatcaccggcgacggcgtgaatcgcccgcaatccgccccacttctcacagttgcggtgtcctcgagtgaaatgcgcatggtgggttatggcggtccaacccggtagctaggattcttaagtagggcgcgc

SEQ ID NO: 47782 - DNA, 834 bp, Zea Mays
aaccaaaaagtccaaaagaaaaagcctatgtaggccttagaaactagaattcatttctatgtttatctaccattcccttttatatcttaagtggggtgagagtgatacatgtctactaggaagttggtcgtgtcagtagaggctcaactactcgtatcttgtctcactcatggagttgtacatattgtatgtcttagctatgccacaatattgagcttgtcgtgttatatgggtaaatacgtcctatcatagcggcaaatattgggtgtcacatcgttgagtatgatgtagttagtataaaatggagtttcatatactttataatgcttataggtatgctagtatgtttggttgtggctacaaggaaagtggcttgtaccatagagtagactcagatacatctattgccctttatcgtgattttagggccgatgacaactgctgcatagtagcctacacctattgcctccatcatggccacaatgcacctccataacaataatatcgtccatcacattttatgcaatggatagtcactttatagtggttgcccagtatcaagttaccatcctaagtacgggcgcacatggcatcggggccatactgcctaggatcatcctgtcccaaggggcatcaaaccctaggctcgcttgctctactaacttctacttctgggaccgctttgcctcgagagaatgttaaaggacgcccaggagttctagttatggtccctagcctctaggcaccccccgtcttaatcgagaaattccttagttcttaacctagtgggccatggaagatcgggagggacctagtcaccttgaggtccgaaag

SEQ ID NO: 47783 - DNA, 635 bp, Zea Mays
gatgcccttctcccccaaatgttggaggaagaagcgggtcaccggcccacacgggaggcaaaacccggctcagctcgccctccatctcagcctgcacgatgaaaatccttgaagccgagcgatggctgaagggcgccgatctccacgaggtcgcgctcctccaacgacagcaagagcaaggcaacactggtgcaccccatcctggggctcaaaaggtggaggggcgcaatgcatgaggggagaacgaaggcatgaccactgcccaggagatcgatccccttttataggcagacctcctcacttgcaccccttagcgtcacgggcgaagtctccactgacatactccagggttctccccctatgacccgagggctggaacccccccccccccacgtcacacgagctaatccgaagcgcgaagaaggcgaaccgccgcacacgaggtatgtaaccgtcccgcggttacaagcgctctcccatcttcgtagaaaccggtggcagaaagggtggactgccacgcgacaggcatccaaccgcaccgcaactgtacgccctttcggctccgaccacatccggcggaccagcgcaaaggaagcgggtccgcatgtcatgtaaccggcgcgccggttacgacg

SEQ ID NO: 47784 - DNA, 306 bp, Zea Mays
tgagaaggtttaaagttaaagggaagttgtcctctcgctttattggacccttcattatcctaaagcgagtgggagaggttgcctaccaactagaattacccgaccatcttgctgatgtacatgatgtctttcatgtatcccagttgaagaagagtctcagagtaccagaagagcaactgcctatggaggaattgagtgttcaagatgatctgacttatactgagtatcctatcaagatccttgatactttgactcgtgtcacgatgagtaaagtaatcaaaatttgcaaagtgcaatggagtcatc

SEQ ID NO: 47785 - DNA, 547 bp, Zea Mays
caaggctggaggaccatctagagcttttggtcatgtggcgcgaacaaccataatccataagccatgtgttctccaggcctctgtcctacattaatagaagacacatggtgagcaaatggcaaaacaatatgattagtaaattgtaaaaaaactgtgatgcggtatttgcccctaaaaagtgttaggaaaaacaacaaacattctggtcccaaagggggttagcgatcaccatgagaagggaattgtggtccactagagaagtgggaaccaaagccaattgcacgaggtccttggccatatggcacatgaccaacatctcgccaggcgcaaccaacctatggtctcactgcttgaggcctagcaacatgaggcaaagcacctctaggcctagcaggatgtctctgaataggaagatcatgaacaccatgggaggggtggtcatgttcttccagctcaactctaaacctcgctgctcatctctcttcctcctgaagaaaaaaccagccaaatgaccatttctatcacaataatcaccatggaacctcac

SEQ ID NO: 47786 - DNA, 532 bp, Zea Mays
cgcgagttagtggcttaacacataacctccttaacttttgaaacaatttaatctatgatccatagatagccgaaacagtatccgcgggggaagaagcggtggggcatctcaccggcggcagtagagttccagcgtggtggttgggcatgtcagggacatcgcggggatcacgtcgaggtatgactcgtcgttggagatggcctgagctactcggttcacatgcgtatgaggcagtggtcaacagtggctctgaattccaatcaacaacgatggtagagttcgatccgactaggtggggagcttcacgacatagtggcggtgctgtgtaccagaggaatcagatggaggtgggctagggaagccagcccacattcaccggtgaagccttcttctccgatgaggtcgactccactattccagtgaggtatagtttgggctcgatcttggggaggcttcacgggactctggtggagctaatagtgaagctagattgggtggaacacgactggagcaggcagaccgtagcgggcag

SEQ ID NO: 47787 - DNA, 487 bp, Zea Mays
gcaacatgcacgctacaagtacaacaattcaacaaattccaaaaatccattagcagcatatcagcaacatgcagcatagcaacaccaatccagggcctaggggtcgcatgaagcacaggcacaacaatcgccggtccgcagcagcaatccaagtccaggggactaggggtgcatacacatacaacatgcaccacatctacacatgcacaacaacagcaatatagatgaaacagttatagtgagtagcccaccactagtgactagaagtagaccatgtccgccacttcatcaaaagcaaaccggcagcaatgcagcatgcacctggacaagaaaacaagtaatcaaaccaaccacacataagtattgaataaaagtaataatttgcaatgtatattactagttgctttccacaaagctttttggaaatgtgagtctccatgtcgtcctcatcttgtacctgttgaaaaaatacaaacttcaataaaaa

SEQ ID NO: 47788 - DNA, 316 bp, Zea Mays
caagcttgtgttgggtttgtcgttttagctttctgattctgcaaccgtgattgctttggagcttctgctttttgtttcaatcaacactgagatggccgaagagaagaaaagtgtggacactgagctagctggtttttacgaagctatggaaaggaccaatgttgaaaatattactgatgaaattttagctaggttatctagagattatagtgacaacgaagattttgatctagagagtgacaacgatgatgccgaagatcggccatggaggccaagccatgttgtatttggaaaatccactattaagagaggacta

SEQ ID NO: 47789 - DNA, 1182 bp, Zea Mays
ggtgtagccatgaagtaggcccttgccaccatttttgttccatggcgatgtagccacgaagtaagcccttcccaccattttcgttatgtggctcgactcgtcctcgagcaggttgaggacggacattggctgatggctgatgatgtccatgaatgttgagggtgaggctccctccgccttctgctctatagcggcgataagccggttaaggcgccgcttcaaggtggcgacgcgtctcttgaggcgtcattttcttccttgctcctggtggagcgtgcgggtcctatgcctgtaatgacaggtgtgtcggggttggcaaggcggagcttgccggtggcggtggcaaggaagttgagggagtcgaacatgatgcagcttccaggtgcgaatgtctcgccactagtaaatgctgaagactgagccatcagagtggagggtgtcacttggcacgctaatggtcccctacctagcgcgctaattgtcgtggtttcggaaaccagggggacagtagaatttgtgttcggcggggatgttagcacgaactcactccaaatggtgaaccacctgggattcaagcagacgatggagacagagagttatactggttcagggttttgccctagtctagtgtagtgctgattgtagtattcttaagaggcatgttacaactggtgcgagtgtgggaagaaagaggggggtcctgtccttttatagctcaagggtagggccttacagaggagacttgtttcctactggtgggggcggtaaggacatgatctattacccctgactgatgtagtacctttgtcgtcgttcatacgatcatgcatagccatactcgtagcatggcataccgctctatccatccggcatacgggtccctgtagcgagtctgatgctgatgtcctcgtagtggcgctcgatgggtcccacggggcagtctcatggtgtggtcatgtctggcacaacctctcctttcgacatgaaccctgcatcaccctcttgcatgcgtaggcatacacccggtatggcatgttgtcccatccttcccggtatgtgggtcactgtagagactctggtgcttaggtccccatgaatggggttgactggccccacaagacagatgggatacaccagagaccacacacagtagtgtgtcttcatgttgacaagggcctctcg

SEQ ID NO: 47790 - DNA, 512 bp, Zea Mays
cacattaatcaataatgcatcaggaaatagaattattagctttcttgatggtaatgccggatataatcagatttttatggccgaagaggatgcatctaaaacggtcttcatatgtctaggcttcattggtttatttgaatgggttgtcgtgacatttggtcttaaaaatgctggtgctacttatcagagggctatgaatttgattttccatgagttgttaggaaacactgtggaagtctacattgatgatattgtagtaaaatcggctgtgcttttggggtgtcggctggtaagtttttaggatttattatccatgaacatggcatagagatagaccctggccaaattaagtctattcggaatgtgggacctccgacctgtaaggtcaaagtgcagaagtttctcggcaaggtaaattatttacgaaggtttatttctaacctagccgggaagattgatgccttcacccctatccttcggcttaaaatgatgccgaattcgcttgggggcag

SEQ ID NO: 47791 - DNA, 897 bp, Zea Mays
gagggaatttggacagtcaataaggttgtacttgtgcataatcattatcttgctagtccaaataagaagaaaaaactcagaatgagatataaagctaataggccagatacgggaagctagaatgaggcctgtccaagtgtatgagttcatggaagagttctatggaggagccgacaaagtgccatactcgaagatggattgcaataatgagattggtcgtgaacgcaagaagtacttagaatccaatgacgcacaaacactatgcaactacttgaagaataagcagcatgaggatccaacatttttctatgcagttgatatagatcaggaagatggacccgatagaggtcgaatagctaatttcttttaggcaaatggccagtctattatggattatgcatgcttttggtgatgctgtatcattcgacaccacgtttcaaactaatatttgaaatgccttttgctccaatccttggtaccaatcattacaagcaaaccatattttttgggttgcgtcgctatttgatgaaacaattccattgtttgtatggctctttgaaagttttttaacagcaatgtccggtaagcacccaagcacaattttcactgatcaaatgcagccatggcaggtgctattgtttatgcatttccaaacacaagccatcgtctttgtatatggcatatttatcttaatgctgctaaacatctcggacatgtaattagtaagcataaggagtttctgcctgcttttaagagttgtgtctatgaggatagatcagaatattacttcaataaaaagtggcatgatttgttgcgggagtgcgaccttgaggacaatgactggatggcgaacctttataacttgagggcaaaatgggctattatctaccgtgactc

SEQ ID NO: 47792 - DNA, 337 bp, Zea Mays
cagatatgtatctccctcggttagccaacaatggtatacaaatatgttttgcatacaatcattattagtttcaccgatctatatctaaattataattattagaataaattttaattctaagaatttaaacaaggcttaaatgttatcacacctgttttagagatagggacaacatgagctactcaatattcaaatgatgctgttaaatagcattatcaccctagaacaatcatatcaatgtcacaaataaaaccttgttgccccgcccattgtaaggatcagatagtttgcatgtcgataacaaaacaggggaaccgtttttagatcagttaccggt

SEQ ID NO: 47793 - DNA, 601 bp, Zea Mays
ggcgagcttatccaaagcgaccgtggcaacctgtatggtggccggagttgtttactggccggacctatcaacgacggcgatatttacgtgaccccaagcgttatccaaacactggtgagcacgaatcacctcaccggcgagaatcgtggcgcgagggtcgtcgacggcgaggggagcgatcgatctaatcttcatcagatactgtaccatgggagccatcatcagagtgcctgaccgagcgatttgaaacccaatttccaccggattttcaatggcaaccagctgattggcctgtaacaaagttgttgtctgaggatccaacaacaatcttgttatagcaaccatggccaaattcttattagatcagggttgatttctagttcaaagttggctcagtatcactgttagtctggatttcagactgcaaacagcctgacagcccaactttgggtttaattatctctaatttctttatgtaaccatggcttagtacctataacaaagttgttcccttattatagctttacaaaattgatgtggtgacctagggcaaaatcctttttgtttgaaagttacaaggtcacaaagatgagcacatcac

SEQ ID NO: 47794 - DNA, 1226 bp, Zea Mays
tccagagtgactggcctgagcggagagatggacggaccaaaaaagtggagctggggtccggactaaatggctggcacaactgcagcctgaagagctggaggaggagcagactacactggagagatcggaacaccagtgtgctggagaatatgagtcatgaacactcggtgctctaccctgtctgctagaagttgttgctgtagagtgtccaggtggtcctgaatagtctggaacatcgatagcatccgctcagacaactactactgaatagctgcctgcctggcctgctctgcggccaaatgaacctgctgctgagtgagtgactagagaatggcagctagagcggggtcaatcgctggagttgcagcactggagctactagcctcgtgatcacgggaacgaggtggcataggaggtggcgatggaatccctagatcctcatcatcatcggaagaagtatgagcaaccgcaccctgatcctcaaactgtctgatggcctcatcctcaaccctgatatctgatgctggagctagagctaaagttgtgacctcaggagctaggcgatagaagccgaactgcagtctagagacctcgagtgtgtcctggaaccgaggaggccgaatcagttgagcaaatatgggtcagagatagcgagcgtaaggcagctgacgctgagcctgaagaccatccaaaattgtgtcctcaatctcataaatcagaaaatcgaccacgtcaaactcagagtgtgagatcaaggcaccgagtagccaaagcttgatgagtggtggaatctctgtatcccatcctaggtagcaaggtacgcctcatgagctcatataggaactttgttgctggagtgaaatctgctagagaacgtcgcgacccatctatgaatggaggtcgacacagggtggcgacgtgagcagtggtaggggcaacttcgccgtgagggcgacgaggaggatctgatgtgccttagcacaagttgtggagccttgttgatgacttaggaaatccaaacagctctcaaatctgagtagaatgaaaggtctcatcctctcactcaaacctaaacctcatccactgattatctgggtctatccatactgtggcatagaagactctgacccactcctcaatatatctaccgctgaaggtcagaagagagtgtaaacctggcagatatgtgatgtgaccctctgacactacaccggctactgaaagta

SEQ ID NO: 47795 - DNA, 528 bp, Zea Mays
atacaaacgggggcacttttttaacctcaaactgaaaattcactcaacgggaagtcaaaatcaggacttgaggaatgctactcaagccatccaaccactcagctagatgccctactctgactaatcactgctaccagattaaaaggatatgaattagcttcaaaaagtttctgcaactgcaaggccactgctacagagcttccttcagaaagaaaaccacaaattatgttttctttacatgcgcagaagccagaatattagaacatgaaacagatacgcacagttcagaacaataactgcaataccagccaggcacgaagcggcttgccaattcctctacaactggccttagaggcagctctataaagtatgagaaaactattaagtgctgtccaaaaagttcatttggtgtacttggcaatatgtaatgagcaaatggtattatgagtcatctagtttcctaattgaataaatattaccctgaactttcgggactacaggtgatattgaaccttgaactcatttgaa

SEQ ID NO: 47796 - DNA, 636 bp, Zea Mays
aaaatcttgtaagcataggtgattccactcatgttgtgctttaggacatataatttccttttgttgttcataacgttcttgtagtgagacccgtaggtttcgaggattttcttccaaaagatattcttttttgagatctttgtggatggaagtccttaacaagagtaatgcagtgtacttcacaatatcggttatatttggacggtttgcgttaggtgcattaatgatatgcaaaattcctctagatgcaaaaccaattttgatatctgatgcccatgcaagctaattgctaccatcgatagaaagtccctcaaattcctttattccttgcatttttccttgttctccttttcctcgctggagttcttactgtcttctcctttttccggtgaccatggtcggtgtcgagttcttcactatgtgacttggtttcaacgatggtggtcttcttcctcagcggttggagatgagcgtgataacatggttgagtctgtgtgattatgggaacgaaaatgagagaatgaatcacttatgtgtgtttccattaacaatgaacatgtttatacacaccgaatggacgacatcacgtctgtttggtctaagcggcattgttcctatttgaccttttaagcacat

SEQ ID NO: 47797 - DNA, 1091 bp, Zea Mays
gtgatggatccgggctccccatagcgaagcctcttgcggggaggagacaacgccatggcggggacctgggcttcaggcgggtcccgtccttgaagttgggcttccaggactacaatcctggcatgggcatcctccaactccaagtgcaccctagagagatccagggtggcactgtccaggtcggtgttgagacgatcttcaccagctccacctggaacgatgctggtctggcttcctccactcagacgcagaggaagatgcctgaacctcgtgtcatgcagctgctaccggtaggtgtggctaagagaccacaaagttggtctggcagcatcgctgaccgaagcagcgtaggtggatagcggtgtcagggactcatgggcagacagagtcctgaatcccctatcccctgcatccatcaccctgacgtggatgcgagtgatgtagtagcaagcccggggaggctcgctcactcgccttgtttcgtacaaggggcagacataggttcctagcacgtgcagcacatcttgcagcaggttggggaagtgccctgtctcgaacattgatgtgtaatgtttgacgacaggcccaaaccccatgaagtagtcctgctgggcgtagttggcttcttcgttgacatgttcctcttcgtcagcgtcatcgccatcctcgtcatcatcgtccccagagtcatctaggttgtcgcctccgggtgcaggagcttgaacggctggtgcaggcggtgctgatgtcgatgacctagttgcgaagggcagtgattctgccaacggggtgggcgtcggcagctgttcctccgagctgtcctccaggatgactccattctctactcgaatgtgagggagatccaccggaacttcctcgactaccactgggtagacagggatttgtcggggcggaggggcatagttggtgttgacccgggtagtttggagagtacgaaccatctacaagagaaatgtcaacttagttgaaattttatataggtaaggctgataaaataattttataagaatgaaattagcaagttttgaacaaactaggctttccatttctaactaatctaacgacctagg

SEQ ID NO: 47798 - DNA, 805 bp, Zea Mays
ccctttaggggaagttgtgggaaagacggctaaggcacacgtcgaaagtgctccgcagaataaacgtcgaattaaggtattgatgaaagctatctacaaaactcactagtaggggtcataaagaagactttgattagtgataaaaacactgaaggacccgttaatgttgaagcacctcaagaaaccaaaggtagcggtggcatcgatggaactactatgtctgaaatcgaaagagttattgccgagggagataaagaaacagttgaaaaatcaagtgcagtgactgaggttacgaaaaaaagaaagctttagcaaaagttttaagctcaagaatggataaggctagtgcttctcctagtgacgacgatgtctttgatttaaggcacttggttggtggagaattgagtatcgaagacgtttctgaactaaaggagtttattgttgcgggtagctacgaacctggcgctattttttggaggtgtggacgaagaggtgttggaatgtgttcctgaccgagacggagctagggtggttaacactctaacaaagtctaacggttttctgaagctagaaagcgagttgagcaactacaggaagcagcatataactggtagcttagtttattctaattttaaggtatgattctatttatgtaatttatttatatgaaatattaaaggcatattgcctaggttcttattactcttcgttattactgcaaagtttcttgatgagcaaagccttgaagctttaacaggaagcgaaggatcgtaaaaatgaatttatcattactaaattagaaaag

SEQ ID NO: 47799 - DNA, 576 bp, Zea Mays
cttacgcaaagttacaaggccgaaggggtacgttttgatttgcactgttggatccccaccggacggtcgggattagatcctacactgatgtgaatcggtacacgccacgaccgtgggatcaaggatgtacgactcatattttatgaccacccgatcaatccacgcccttaaccgcatgatcgacggccgagagaagccttagccgaatcggtacctcttgtctaatcctgaccactcgtctgcaaatctacggtctacgagcgatgctggcaatctcccccaaccaacaccatctggacggcggcgccgtgccccaacacggcggttcatcgccggaaactcctaaaacttgcttccccgatacccaaaactcggcctaggtggcgctacatgatgaattgaacatgccgaacacagaacctgctctattacttccgattgtgcaacaccaagctccaccgacgaggaatggcggatccacggtagagacgccacactggtgagcaattctgtcagctccgtttacccacgaagttcgattcggcgatgaagacgtgcatcagggtccaaggctcc

SEQ ID NO: 47800 - DNA, 626 bp, Zea Mays
cgggcgcgctgcgtgtgcacgtgggatagctgagccggggcgtcgtccctagcctaggcaattgctcaccggcgccgtggcgccgccgcggaaccgctgtgcggcgtgggtggctgcgactgcacccggaatcgtggaggtaagttccttggtgcatgttctatcccttccgcttggtttatcatcgatctagtgcgaaagttagcaaccgggggagctccgccacctaaatctgaccaaggcgccaccgcagatactctgcttcgttggtctgtggctggggatggaagacgaagtattagccgttgatcatccaacatatggccgagattagatcttggttaccggtatgacctaggggagccatgatccgttggatctgttgagaacggataggattagaccatggtatgatgttgcgcgtgatgtcgatcttgttgtttacggctaggattagttgatatcataccccttcgccgcattaaaccggagccgcagattcccagacgagcggtcccgatttgtacgcaaatacctcttcgcgtgatccgatctgggcccttgttttctgatcggacgactttaactacccgtacccctttggtcgtggcttttcagtaaagaga

SEQ ID NO: 47801 - DNA, 1049 bp, Zea Mays
cgacaatgttgatgcagacaagtgactgagttgtacaagaaaaatagggaatgaagctctccaaatcgcgctgtcagagtgtctgatgaagattgccatggtacagtgaccataaagatctccgatgatgtgagctcgacgccaatgatctgccgccacaattcgcgcctacctgggagattcgtgccgcgggaagagtagataatgtcggggtggggcgaaaatatccagtgtggggtgaatctggttgctggcggaaccggccgtcgtgtcccaccacagtcaatcgcgttggcatcaccggagttcaccgttatccgaccaggctacgtgcctcaaagccttaccacgtcgcagtagaccgccttaggtagcttgttcatcgcctgagacagtgccctggtaaaagccacgatagtgcttgctccagtaatttctcctctctccggtcgccagcgcgccttctcaaaattagacgccaccgccgtaggactctataaattgctacccccgtgagttccgctaggtaattacgcatccaacgaaccagcccttgcctccgatcatccaccagtgcctcccaatttcgtgtttcccccaaatacgttttccgggccaccgtgaacacttcgccgtggccagccctctataggtcagttcaaacttctttgattggtgtcctagcctccctcaagccccctgttgctcatagacccattcgattaagctagatcacaccaaatcgtcgtgaacacctcggattgtctcagattttcgccgtcgtcgtgggcagagagattttggccaggattcatgtaattagttgagggattagggtcgacaggggtagaatttggtgtgtatcgagtaaggagcttagcctttgcgtttttcggccagtacaggctcgccggagagtgtgttcaccgttgttggtgggtcggggaccctgaccttgcaaagaaacaaaaagggaggggcctcggtgcaaatgtcagagacacatgtgaatagtgcataaggattcttaattagttattcaaaaggcc

SEQ ID NO: 47802 - DNA, 520 bp, Zea Mays
ccgcgccgagaattttccttttttggttttgttttgttttgaaaacaaagaacgaaaccgacgccaccaccagtccagtgtaaagcgtgccatctccatttggcaacagcagtcctgacgctacgtgctcagcatggcattggcatcgatgccggccagcagacgacctgtgccattcaaagccaggccggcagacagggcaacagagcacaggctctgccgctctggcacgaagaatagattgtttgtcgcaggcctgcaggttgcagcgtcaagaatgtactcatccgaacgggcaagacgatgcaaaccatactttaaccccccaccaacgtgcaacgggtggccaccagcttcacaataagcaggccatcagcaattaacaaggcaaaaaatcaccacaagatcacgctctaagcctaaattgcaggcgtcagctcacaccaaacgcacgagcacatgggactataaaattaacggtgctacaactactactgcacaacagagtacgtgactctac

SEQ ID NO: 47803 - DNA, 545 bp, Zea Mays
gtcgcggggcatggccggtgctcaacggatctcccctaggggtctgtgcgcgcggtagagggcagaatcacgctagattgctcgctggacctcaagcaacatcgtggtgccacgcacgtcatggaccactctctggtcgccatccctgcttacggtaagtccctagtcaactttgccaggtccgcgggattttgtagcactatttggtttggggttcggtcagccggacatggatctcgccgggctcctccaccgtgggggaggcttggtggcgtagccaggtttggccggtggctggaggaagaagatggtcctcggaccgtggatctgtgaatagacgaccgcgattagatccttcacatacctctttgcgctttaaatcgtgaccaccgatctggaaatcaagggctccggttgtataatggtgtgggtcgctgcggtccgttgatcatcgatcgggtggctatcactagataccgtttcaggtgaggttcgatctaatatgggcctctgacctaggatcggacggctaacaataaaaggta

SEQ ID NO: 47804 - DNA, 989 bp, Zea Mays
ttccagggggctctttagtaaaatgctcgggacaaaaggtatgaagcgatcgcagccatcaaatccgaagttcatggcgccgattagattggatttcccactcaaacctttatgccaaggggctgttggatcagagttgacggcctagattttatgacctctgctctaactgatgccgtccgatcatgcacgaggggctaggattaaatcctgcccacacagtgcgcacgctcaatccaagccaccgatcacggaatctacgatctacccctcgtcttccccagcgagacgcccacgtaatatctacggcgtgcccgacggcggacccgccatagccctaccttccccctcctattgcaacggttgatcgggcgccacggactctaacccgcgcccaatccccttccacacaccaaaacccactcgtgcctcctccaatcgcacatgttagcacggccggaagaggttgcaagacggcgtgacaacgatgacgcgcaacagccggcaacagagttttcacaaacatgggatggcggcgagcgtggagtattacttaccgagatcttgggtgaggctagagccacgcacgacacgcttacgggttgcgcccatgcaccaccagggacttggtgccggcgagctcagggttctccacaaagtcccccacgacgtcggtggtgaaaggaacaaactagagggatggtcgacttcttatatcgcagtcgaggcacgtagcgaggggatctcgcccaagtggttcgtcaactgagcgagcagaggtggttacggcggcgacgcgattctagtagcacgaactggtgcgggtcccaccatgcagccatggaattggccacaaccgcgcgcgcgatgcaggtgcgatgagggtcccacatgttagcggaaaacatgagacgagcacgagcgcatggaaatgacgagtgggggctaggtgtcggcactcccccccggccaagtgttgtacttagttg

SEQ ID NO: 47805 - DNA, 688 bp, Zea Mays
cgtgtttgtaagtgtaggtaccttatatacatcatattgaatgtcttcaaacatatctacaagtttaaattgagtttgtttcgtaggcattgtgcttgttgttgagctctttgtgttataaagcggttctataggattacatgttaagtgttgtggtctgtgtcggtgtttggtaccagtagtacattacggggtgtgttacgtagtgctttttgtggttggcgagatcgactgtagttcgatggttcatgcttaacacgacataacataagtatttatacaagtttaggtcaccagaattcttaataccctacgtcatgtgtgctatggagatgatattgctctagattcgaggttacaaagtatctgagaggtgaaaaatgctctctcaggctaccgagggatccaatcgtgttgtagggtaccgaactcgccttatataagacgacgagattagagttacatattgtcattcttcctatcgctaatcctacatgttcgggaatctgctccgacttgtgtgtgatgcagagtttcatgcaggcttgatcggaaacggccatcacgatgccttggacttaaactcttacgccgtctctagtctaacttagccggccagcccacgaaaccaactgtccggcccactcaggccttctaacagcccatgattccaatctgtgttatgata

SEQ ID NO: 47806 - DNA, 706 bp, Zea Mays
gtgcccttgcatagaccacctgcaccacgctttccaagttcgacgtcgttcattgctatctcgtttacaacacaccgccggcaggcatccaggtcatccctcctattgcgtgtcgttttgccctgcccagtaaagcccgcagtcgtgcgttcgcctccctgagcgagcaggagtgcgtctgtgtccgaaccaccatgtcgtcttagtcgcccccacacacgcgtttgacccagatgtgatcgcgttcgcaaccacccctgcataaagccccatcccactatccatccccgtacaacaaccccactcctccagccgctcacacaacctcattctcatctacctcatcgcgtgcatgctccattaggcgtgcctttccctctcctttccctggccacaccatgccacaagaaccgacaccaagcaacagcgccgccagcgagcaccccatgccccgaaccaccccacaccatatctgcagtacaggtacaacagtccctgtcgccggggacgttagacccacccttgtcgcgcgtgcagtctgatggctaattcgccacgtcgtcggtcctgcttcggtgagctgtcgacgctgtctcctgaccggcgaagccagtgacgcacccgtcgtgcccttgctcctgcgccgttctcatgcacagcatcacaggtgagaatcctctgcccttccctctctctgtctccattt

SEQ ID NO: 47807 - DNA, 329 bp, Zea Mays
aatgcttcttccatttgtaccttcatgattcagtattgtgcttttagtaaatcatagtttagttaaatatgtacagctcagatgatggcttttcttgtctttcttgttaagttagtgtatttataatcatcatttttcttggtagatatgtctttggtgttggcatcgtataattgatgaatctggcgggaggtgccctggatgccgttctgtatataacaaggataagatcttggagacaagcgccaggaaccaaatgcatgtgctttatctctaagattcaatgtttttatcagtaaaaaatccactgcactatatgcacattttca

SEQ ID NO: 47808 - DNA, 670 bp, Zea Mays
cgaggttgctgactactctggggcttgcgacgataagagtctatcctaggagacgtggctagctggaccatggccacatatggtggatcttagccctaggtcgggctggccatctagcattcttatggctatgggtgtccatagtggtctcacattgacctagtaggagtgggtaccccatataccgatagaggccccctggcccaccacgggtgaggtggcaaacccgcatgtggggccatacctgcttcttgttccagaaatgctagtcctgtgcagctgctctatgcctgtggtttttatgccaagcagttttgcttggtgttatattgttgttactgaaaagacaaaaacagtgtgcccctcgtgtacactttattcggctcgaaggcaagaatctcttcctactgccccctggcatacaaggctccctagaggtagtctcagatgttcaagtctaccttttagaccagagaaattgttcctgagtatagtttaggaatagagcttagcagcgcgcccacatgatcctcattttgttgtacttcaatctatcgagttatgcaactgagattttgccgagcaaagttttgggatctagcccttgaatttggttgaggtgcatacctttgagcacttggtcagaaagatactaagtcagctattctag

SEQ ID NO: 47809 - DNA, 378 bp, Zea Mays
ccagaattaacttttccatttcttgacatagtgtggtgttagatatctttactgtaagacaatggcaggaagccttgcgacttagtgcatctgccaccacattggcttttcctgggtgatagtggatttctaaatcataatctttaatcagctcaagccatctcctctgcgtcatattcagttctgactgggtaaaaatatatttcagacttttatgatctgtatacaagtggcaggtatttcccagcagataatgacgccatattttaagggcatgaaccacaacagctaattccacatcatgagttggatagtgctcctcatgtcggcgtaactgtcttgaagcatatgctatgactcgacctttctgcattaaga

SEQ ID NO: 47810 - DNA, 473 bp, Zea Mays
tgagggagaaggttttggaggcatccgtgaggaacctatcctgccggagcagggttttggctccgtcacgacctacgttccaaccagcaacaagggtatgcatcactttgtgcctcctcctgtccagtccagtacccattgtcctggtcttgcgtttgatgccggtggatctcgtcacaggaattttgagtccggttttcattcgttgggtaaattaccacaactatcatttccaacgtttgagggtgataatccccgtctctggatttcacgatgtgaaaattattttgatatgtactttgttgatcctaattcctggattcgggtagcttccatgtatttgtcgccttctgtggcttgttggttccaagatgttcagcgtcaacacccagatttgcaatggcctttgttttgtcagtcactgcttgatcgctatggcaagaaccagcatcaggcgttgctacgccaactgt

SEQ ID NO: 47811 - DNA, 1321 bp, Zea Mays
gtctggtgtccagcaggcagcagaaacgacatcctttcagacgacgtaaaagctactgtatgtggttttcttgaaacaaaagggaatatatagaattgcaggtgagaatatatgtgaaaaaggaagaaagcaaagcagagatgagagatgaggcgctacgagagctagctagctagctacatgtgcatgtatagcacgagcacagtgtaccactctacatgtagccggacagtagtgtaggccgtctgatctatcaattttcacagagtggtggtgaaggctctagctaggacaagagatcgatgagataccaaggtgcatgtcctttttgtttatcttgtaaaagtagctcttaactgagaagaagaataatgagaagtgtgtgtcaagtgaagaaggtaatgttctggcatatgtaggcttaattggatgatccctacatctttttttaagagaaactaaacacatgcatgtactgtgtattgtttctttttagacgacaagccatgtatgtatacatccttccatcattccatgtgactggtattggttggtatataagcaggtggatttccctttctcattgttaaataataattgcaacattgatctacgtcacctcaccagaagaatattgaaaatagtgtcgccaggaaaagaggaacagtgctgtgacaaggcacctaggtaggtagctagctagctagctcgcattgtcgagattagccaaaggggactaatccaagagccacatcatcaatccctgcaaacaagagagagagatgcatagaaacactgctgtactttcccatgttctgctggttgttcatccatcccaaggcagaacagcaagctgcttcaaaagcaccaaactggggaacacctagaacagcatatgcatgcatcggtagaaagcccaaaacatgcaacaaatcatataaaacaagacaaatccagctgagagtaatataagaagcttccccatgcatataatgtaaataaacaaaaggagattagtgtgcaagcagcaaccacactctgtgtgatgaactgatgacgatctagctaggcagtacaagctacttattatatatacatacattacacgctactcaaggtaggattatactccgtatgcatgtagtattactgtagcttactagctagacaagatgatacagtggctatctagcactaactaataatcacgtgctgggctactactgcgtgtcaaatgcagctcccgtcatttgtggaatggggagaatataatggattcaagaacaaggaatctacacttgattgaaactcttgtctttgc

SEQ ID NO: 47812 - DNA, 520 bp, Zea Mays
atagaaaaaccttttgatgtgtattgtgacgcatcaggtagtggactcggatgtgtcctaatgcaagagggccgagtcatagcttatgcttcaagacaactacgccggcatgaggagcactatccaactcatgatatggaactagatgcagttgttcatgccctcaagatatggcgtcattatctactaggaaatacttgccatttatatacagatcataaaagtctaaaatatatctttacctagtcagaactgaacatgaggtagagaagatggcttgagctgattaaagattatgatttagaaatccattatcaaccaggaaaagccaatgtggtggcagatgcactgagtcgcagagcttcatgtcattgtcttgtagtaagaacccctgacaccacactatgtcaagaaatggagaagttaaacttgagtatgatacaacacagaactttgacacaattaaagcttgagtcagttcttctacagagaattattgatgcccaaagaactgacaggg

SEQ ID NO: 47813 - DNA, 635 bp, Zea Mays
taccaagtaggcctccatcaacttctggacgtgctcatccttggcttgcttcagggcttcaacaacaatgacttcacgactttccaaggcagctacacgggcttgagctgtggtgagatccacatggagctggcagttgagcttctctgcatcttctgctcgggcaatcatctgacggtggtgccgagccaagaaatcatactgcgcatccagggtgagcaggtatgcagtgaggtacacgactgtggggtcgtcctcaagaagctgctgcccttccaatgcacgcatcctagccatccaaattggacggtctctctgaaagggcggaaagaatctgagcggggtgttggccacttcttcttcataaatttgacacagggccctcaatgccttgcgagcgacgacttgacaggtgtctttgaatctgtgcccagtagcagtgacactccattccacatggtgcagactggatccaatgtatacagtcacgacacacttctctgtgccatgctcgacgaattcacgaccatcatactctggctggctcctaattccgagacgaactgtgcatgctctcagcaacttggggaaaccatcttcattctggcaaaagctggtttggcagcgaacctcca

SEQ ID NO: 47814 - DNA, 974 bp, Zea Mays
gtcgcatccgcctccgctgaccatgtgaagccctctttcttcaagagcgcggtcaacggggcggcgatggtgtcgtagtcgtggacgaacttacggtagtagccagagccccaggaaaccccgaactacgcgcgccgagcatgattgaggccactcgcgaaccgcttgcaccttggcggggtccatggccaccccggatgcggagatcacatgcccgaggtaagcgacggaggggaccccaaaggcacacttggactgcttgacaaacaattggtgctaccggagtagcgctagcatggtgcgaaggtggcgcagatggtccgcccgggtggaactgtatatcaggatgtcatcgaaaaacacaaggacaaaccgacgaaggaagggcctcaagatgtcgttcatgagagcttggaaggtcgccggagcattgcagaggctgaacgacatcaccaggaactcgtacaagccgtcgtgggtgcggaaagccgtcttgtggacgtcgtcggacctcatgcgcacttgatgataacccgaacataggtccaacttggtgaagaaccgggcgccattgagctcgtccagcaactcgtcggcgattgggatggggaacgcgtccttgacggtgagcgccacgacccatcgggcttcttgatgaggaggaccggcgaggagaatgccgagtcgctacgtcgcacgatgccttgggcgatcatggctatgcactgctgctcaagctcatccatgtgagccgcggggtaccggtatggtcgaactgcgaccggagccacgccgggaacgaggatgatgtggtggtcgcggccccgttggggaggtagacccgtgggctcgacaaagatgtcggtgaagtgagccagcagcgcgtcgaggagctggtcgctggtggtggtgacgccgagggccgacgtcgcggtcgacgtggttccggaccaaggaatcgtgtgtccttggag

SEQ ID NO: 47815 - DNA, 360 bp, Zea Mays
ccagctaaccctaggtccaatgctcaatgccccgtatgagacgcacgccataatttgaggttctatttttttgtgtaaatagcataaatagttcatagaaataccataaatagttcgtagagatagcataaaaccccgcccatacactggaccacgtcccacgagaatgcgcatgcatacatattctatttctagaaccaatgtatgatatatactaatactaattatgctacacggtgaagatatttatgtactgcggtatagttcgtaaaaaaatctagcatgcggttcgaatcaacatcccccacgtctgtgcgtccaccataaatcaacaaattttattagaggagttaattaggg

SEQ ID NO: 47816 - DNA, 595 bp, Zea Mays
caatgatgcgcgagtcgatgaatacaataggatctggtgagatggatacaccaaatatattacaatcgcacgcaagttcaatgcttataagtatgtttatgatttgaattcactgacgatgatattgtgttcaggagaaatgaagatttgatgttaatgtaaagattttttatgttgtacacagctagattcgattgatcctagtttaattcctaggattggaatggtgttccgagatgttgatgatgcttatgttttctataaatgatatgcatatgaggtcgaatttcctttgaaaaggtataaggaaaagacaaactgcaaatggttgaattgctccagagaggggagatgtgcagaaagaaaacatggtaaccctagagtctggaacaaatacacaggtcgaacacagtgcaaagcaggaataaagcttaggagaatttatgatgatgaaaaaaagtgtcatatctgttaggattgatctagttaaccttgagcataatcatgattttgtaacccaaaaaactgaaaaacaacacctctgctgtaacaagatgcgtgatccggaatttatggaatttgtttgatcaatgca

SEQ ID NO: 47817 - DNA, 339 bp, Zea Mays
tgacgagagagtgtggggggttgaagatgcgctatgcgccgtttgatcataatggatgattgtgattagctcacgtagaattgattccaggccgtcaatctcagggcttgcagtcgggattaaatgtggggttaggactgatttgagccatccgatcggatcggacgggatcagattgtgagtatcgcagggtcattgatcttcaatccaatggctgagttcgcgtgccggtttgggtgggcaagatctaatcccagcccttgttttctaatccagtggcttagaggccgtcatacccctccgcgctgagcattttacataagagaccttgcccttttg

SEQ ID NO: 47818 - DNA, 543 bp, Zea Mays
ttgccatgcaccttgaggaaccggaagtggttgcaataaaccagccgggtggactcgctctcctttggccttttgacaaatttgacactgtttgacaaaatcctccacatcagtcttcatacctttccaaaaaacaacttcttcagtcgatgataagtggcgtgcacccctaagtgaccacccgtggcactatcatgcaatgttgccaccaacttcatcctgagagcagaattttggccaacccaaatcaaacttcccttcctaatgactccttgagagagtagccctgttcatccgggctgtggacacacaaccgagccagaagtgactgcgcagccgagtcagtcacataggaattcataacttcctggacccagagaggttgaacctcacttactgctgtcaatgccatcacacaacccacacgagatagagcatcagctactttgttctctttaccctgcttgtaaacgactttgaactgcagccccataagctttgccatggctttacgttgcaactccgagtgaagctcctgactac

SEQ ID NO: 47819 - DNA, 720 bp, Zea Mays
catttatgcagataaggaaaggttccctttggagaacatgaaaagcagatatatagatctatacaagttattgtaaatttcctagaaaaacttgtacataagtgcacgacactgtttattcatcacaaaatctcctagcacattctttattatttgtagagcacagcaagctagagtttgcaactttgttcacctatggctgggtaatcctccatgtcttgaatattcagtggagggccgaggtcgagacaggatcacaggagatcggcgacgagtcgaggagatgcaggcctcgaggcagaagggttgagaagagccgaagtcagcataccgaggcatgccaccacaccgacagctgagtgtgcctgaggtggcagactggcaggggggcgccatgatccgattcgcgtctggacaggaaggaggacaccggtcgccgttcagacagaccctccgccccatgcgccggcgccgctgaaacattgcatctgcctcctcataggtttttttttggacgaagcctctcgcagtttttttctaggtataggattgactgtaaaaaatagcttctcgccgaaacacctccctctgcacccacccagcactagcccgaccacctccctctccccgacccaccgacgtcttgacccgacggcttttcgcactccctaatcgatggcttgtcgcgctccgcatcctgacccgcgcgccatatgttcc

SEQ ID NO: 47820 - DNA, 711 bp, Zea Mays
catacaagagcacgatgaatacatttaggcttatgttcaaaggtttctttgcctaagggcttaggcaccaactatgcagaacgacattgtcacagaggcaatgatcagggggcttcgtccaggcctagcagctcggtacttcgctaggaaaccaccccactccctagagaagctgctgtagaaaatggatgaatacataaggacaaataacgacttccgccagagaaaggaggaggtctaaaggtatgcagagactgacaggggcttctggggaagatttcacccgaggtatgtccgaagtatacacaacccagctcaaagtgaggagaaaacaactgagtctctaggcagtcaagtcaacatcaacaaccaagtaatcagcagcagccctcccaaagcaccttccacctgcctgctttgagaggggatgagggcgaagcttcggtggtaggttcaacacacaaccaagaaagatactttgtgtgttttgtggcgaagataaaggccacacaacaaggacatgccagataaccatccagaagcaaaaagagcttgttgttgcggatgctcagacatcccaactgaaggagatgtttagtactactcaccatatatcccacaatatgtccaacccaagaccccaagccacgacagttgtaacaccctaaattttggggtataaaaatttctttgctctatactcaaaattca

SEQ ID NO: 47821 - DNA, 507 bp, Zea Mays
atgcattattgtatcctgattccactcataccctcctaagttttagagatatccggcaaaatagattttatattgaaaaccatgataaaaatcaagaagagtttctctttctcttcttgaccaagccgaacaaatatggcaaacacatatgcgagaaaattccatcactcacgtctgggttgtactatacatacattaagaccattgcacatgttgcatataaggtgattttccaaaatgttgatccattctaggtttggcatgatcgacttggtcatccagccatacggatgatgagaaaaatcacagggaattctatggtcgtaatttccctacaaattttcccaaatctaaagattttatttgcactgcatgtgcaactcggaaactgattttgagaccatcacatctcaaaattaaagctgaaccgcttaaattctttgaaagaattcaaggagatatttgtgggccaattacaccaacttctggcccgttcagatacttcat

SEQ ID NO: 47822 - DNA, 541 bp, Zea Mays
gtaaaaaaaaaaaccgatggtcctgagcagatgcggcgatgcgacaaacttctggggacggtaagcagtaaaaaagactgatcgaggtccgcctgcgtgcttctaaaagcttctgatgcgcgcggcacgctgtttctgtgaatgaagtattcacaactaatgcttgtgttgcggaggtcgcattactgtctcacaatgctacaagcctactacagaggtttccgctttccagtacgcgtggtctgcttggcgtcggtcggacgaggcgaggtctagtacacctttggttcaagctacatgcccagcgcagcgcttacacatgacacggctctgttctgtggcacccgggcatgcaatgcagtgcaggtcagtcagctggtccatggctccatgcatcccaaaaggcaagctcttctgatagcaacgtctttaattcatccattcatcagacacatgccgccagggcagtcgattcatcatcggcggtctcgtactctcgtccatgtgcatgtgctcggtcgtctccgttcaaaaaatcgcc

SEQ ID NO: 47823 - DNA, 692 bp, Zea Mays
gacttcgcgcacaaaacagaaaagcttggggtctaattcataaaagtcttaagactcagagctatcccgtaggacggcgggttgattggtgaattccccggggactcttttgtaagatagccgtagcgaaggggtatctctcgatattaaccgtccgattagaaatcaacgtcgaggatcacttaatatttttaaacgaaccggtacgctatttgaaccgttggatcagggatccatggttcagatgtttaaaacaccagatcaacccggggtcgctcatcccacgatcaacggccgagacgagtcctggccgaaccggtatctacttctaatcggctccgttcacttctcatccaacggcaaccagcgcttctccctcctcagctatcctaccacggcaccgaggcggcgccacacaggtacacacggcagagcctaccggtggccaccgtcccggcacgtcgacgccctattcctgaaacccgagagacctacgcgttcctgagctaacgcatgcaagatgggagggcataccgggagaaggaacgacgccagggaggctgcccacggcacacggcggcgatgcggtgaagctcccacaccggcgaggaatcttggtgggctggagctcaattccgctcagacgaggccgcgaagagaatacatgtgctctgcgcttcctcccggatcga

SEQ ID NO: 47824 - DNA, 567 bp, Zea Mays
gagtgctaggggcgtggggcagggcagaaccatggtgcacgatgtggatgtgtgttggtctgagctagaggccgagagacaggacctaggagaatggatgccattttttggcgcatggaagaggggggcctaggacgtagagagggagatgcgcgtggggagcgctaggggcatggggtagggtagaaccatggtgcacgatgtggatggcgtggggcagggtagaaccatggtgcacgatgtggatgtgtgttggtctgagctggaggccaagagacaggacctaggagaggggcctaggagttagagagggagatgcgcgtcgggaacgctaggggcatggggcagggtagaaccatggtgcacgatgtggatggcatggggtagggcagaactatggtgcacgatgtggatgtgtgttggtttgagctggaggccgagagacaggaactaggagagcggatgccattttttggcgcatggaagagggggcctaggaggtagagagggagatgcgcgtggggagcactaggggtgtggggcagggcagaaccatggtgcatgatg

SEQ ID NO: 47825 - DNA, 360 bp, Zea Mays
ctcaagagttcaggaaacagagaagcggtggaggaaaaaagcaagaattagggttcggaactcaagaggacacgtcggcataaatatgagttggctcgataagttgggcgcacagtgccagatcataactcgaaaaagaggaaatcacaagcatcactcgggcattacctctaaaatgccagcgagccttcaaacgaacaaaaaaacacgcaacagtagactagcaaaaaagctgcattttttattcataaggggagttcgccacaaacatgaaaccgactcattatgagtcggcctcttacacccctggtcatcacattacattacactactctactacttacactacgatatactaat

SEQ ID NO: 47826 - DNA, 1211 bp, Zea Mays
cacaatgccgccttccttccccgcggcgcccaaaatcacgccatggccgagggcttcctattacggcgccttcccatcaccgcgtggcctcgacagcgccaacagcgtgtggcctccaaatcgccgtcatcgccccgacatcgccccaaacctcgccccaaaccgacgcaaaccttccatcgatgccgatttgggtcctgcttaaagaccatgccgaccaacaactcattagccaaccgcctcccgcaccgtcttctcctctggctccgtctgtcgaggtcatgatgagttgtcgaggggcgctcactcctccacgcgctccttcggatcctactagggcgcgatgatagagaagaagccagatcgacctaccctcagcgctcatgaaaggcgagctgccgatctaggcaccctggcctgcggcgtcgctctgtccgtagaggccatgacgagtctccgaggacgtcatctcttcgagttacaccttccaggtgggcgatccttgcttcctcgaattgatcagcaggcttttctcaaagtccagttgggaatagcagtccttttaatgttgtatttgatttatatcattgtgctctgaaggtttctaagtcgattgggccgtgtatttctggggagctgctggtatgaatctatctcatttttctcaaagatgttaaatgtaagctgcgaagaaaaactgtcacatttttctcaaagatcattacaaaacaaagtgctcgtagatggtccttgatgattaaagttcatatttgatattttataggcagtcagaagtcagttgaattacttgggaatttttttccttatctggagcccctattgtttggagactcttttcacagaattcctcaagagacttactggcagggtagttcagtattgatctatttgaagagatgtataatatcaaatcattcccgagctgaagcttctgaaatcatcagtaaggaggttatccctatagttgttcatttgatttgtctaatcaataaattctgcatgtactgatgattgtcttcctggcagaggcactttgtgacagattgttggattatgaacaaaatgtgcggatgggagtggtggctgcactttgtgatgtagctacccattctcttgacgctattccaattgttacattagttagagtagtagcagagcgtgtctgtgataaattgattggtttttccttt

SEQ ID NO: 47827 - DNA, 608 bp, Zea Mays
tgataatagaaaagccaaaagtttagacctaaattcatgtgttacaaagccagaagaagtattagatactttggctagtagtgcccaaataatagagaaatcagctagtgatagtccaggtattgaatctgaacttaaaaggcctaatgtgccggaggttaaggaagatgtattgttgtccaacactaattcacaaccgagaagcccactcggactatcaatttggcacaacaagaggctagaaaaacatggtgcacaagagttgaagaagagaggcgtgacatggattcctaatgggagttctcaagatcaaggtaaggatgatgctttaggaagaggtggagtgaaggcaaacaaaatgaagaaaacaagtacaggacgtttgggtgaaaggtttgccccaactcatcaaagctattgatcattgcatcgtccatatttttcatctatgccatatacgtcatcccaaggtatgttcggttatccttgatggcatcattttgctccatatgcgtctttattttatggaggagtgcaaccgaattattttgcttatggatagttgcgatatattgttgcttatatgaagttgaagtatttcagtcatt

SEQ ID NO: 47828 - DNA, 488 bp, Zea Mays
caaggcactaaattcctcatccatagcatgttcccaatttttattaccaagagctttagataaatcatgtggttcattaccaactgctaggcatccatagccataccttatagtgccatctgtgtatgcttttggttttctgatccggttggtccagcgtggaagatttgttgttgcggcattatctgatatagaatacccagttgatgatgggctagtgggctcctgacccatgtccgctgtcggcccaccatcggacgaagtcgatgggccgccatcatcacgcaatgacgcgcttcgggcacctaggatcgtgcttgatcttggctccaagatttccctgcgcacaagcaccactattttcttccaagaaagtatcattaggtgcagaattttgggtattttgaatatcaggcaacaatgaatcagctacattggtatcccccggatgattcatggtgggactagaaggaaacaagtgaggaagg

SEQ ID NO: 47829 - DNA, 1153 bp, Zea Mays
gcagattgacctccaccacgactactagtgcctctccccctaactccacagcaacctggaattgcacctcgggcatgagaaataggagccaaaatggatctggtggattgaaatagtgtgcgcgctgatctacaacgaccaagaggaggcaaacctaggtcggatccaccatcacctgactggagaacatcttggtaggaagagagatatggaaaatcggtaccctgggactgggagttcagatcaagagcttcaatgcggctgcgaggtgctgggacgttgatgcgtggtggcagagcaaacggcgactacgagaaggtgccaaagtcatcatcgtcgggagcttcatgaccggtgcagttcctggacgtcgatgaatagcaaccttgggataagaagtccctgaagttgtggtggttctccatcttgtgaccggcgatagagaagaaggggcgagcggctggtggttggatggggagcaagcggctggggagaagctcccgagcgtgatgtccacgaaacccgacggctggggtgcggctggtggacggaaaagaaggggcgatcggctggtggtctgatggggagcaagatggtggtggtcagatgggtagaagatcccgagcgtgatgttcgaacccgacgtcaccgaaaaggttatacgacggcacctccaccatggggacacgtgcctctaccgcggggacgaccacgccgagcgcctccgccgccttctctgtcgtgaagaggggagcgcgcgtggtgatggcctatggcggcgtgaaggggagcgtgcgcggcatgaagggagcgcgcgcgtgctgcggtggctagggtttttttgccgttgcagctcgagggcagggaggaaattttgctgtttagtcccgtttacgagcccttggagggactagagactaaactggtttagtccctctagtagttcttgtgtttggggaattagggactaaaagggactaaaaggtagggactaaacattagtcctatggaaccaaacagggccttagtttcaaccgatcccttatctcgctcccattcagtattttcagagctacactttcatctcattccttagccacaatgtcacatctgacacataggcccctgaagcatcgcattcaacaaaggcaag

SEQ ID NO: 47830 - DNA, 880 bp, Zea Mays
agacagcctctttgaatcctctcttaaggtataaaaccttagtacttttactgaatatattaaagtcctatcgaattttaattgatcaaataaagtccttgctcttaagccaatgctaacaccggtcatgcggactggactgatgatgcgtgatcgtgctgacagcgaaacagaacgccacagaggaagcttgactggggcacaactgccctgcaagttgacttggaaatgttaaaggacttgaaggcttgtgcctttctcgactgggtctccactcaagatcgtcgacgcagacttcacgtttgaaattgtctccgggtatttcttctagttaaaagccgctaggctttgaagcgttctccgcgtttctcgcatgcctgggtgatggtatcgcgacacgtccacaggaaaactatctggagaaaccaacacacaataacacaaatcaaccgtgtaggccaccctctgtctcttgtccaatccactccatttttctatctcgcacgaccgtgcttcacggacatacgaattctgtttcgtgccctcgcccatccctacctcttcgaataggcccacactcatcatgtttttctcctccacgcaccgagcaggcgagcaccgaccagagtggcagagtaccagactattcgtccccgcattgccttcactattgccgccatcttcgtccgtgcgcactcgttgccgatatcgctagccccaaccgtcccgtgtcatcgctggcagagcccccttctcacctccggtcgcacgccgacctggtccgctcaccacaccaccgtgttcctccctaccatgccgcctccgacatcccgcgcttgcttgtgctcctactggccccaccgcctgcgacgagcctctc

SEQ ID NO: 47831 - DNA, 897 bp, Zea Mays
ggaaagtggagtgtctttacatccctctcaaggatagcattaaaggatggcgccttgagtgatttaccatggagaatcacaacaagtccctccccctcggtcagggaggcagcccgacgtttgcacgcccaactggatagagtcccccactagctcagaggtagccgaatccagggtgttgcttgctgagattttgtaacaccccagtaattctcaaagtccttctcagtgctaagtcaagaaccattatttcatgtgaaccaatttgggcaaaagacaccaatcaacttgagaataaaagttccactaagccttttatcttaaggatcatgcctaaatcatatggtgcattcaaaaaaagggaaagaatttgctaaaaccctagaacaaacctaattgagccacttaagtagaaaggaagaaatgggtaaataggaccatgaaaacatggaatcatggcttaggccaattgttaaagttgaaatacactaactaaactacaataattgttataaaagtttggccaaaatagtttattaaaaacccaaaaaaggccctccaagtggaagctctctagggggaatctgaaattcagatttctgaatttcagccttcacctagaacttgagcgttcaccttaatccctagctcaaatccttaagtccccattgacaaatttgttcttaactaacccctttgcaacgtgtgtgaagatggcatcgagatgcgtgccctagacacatcaaacctgggattgtctcttggagttcagcagtgagacaaacccaacttcatccctccatatctctttgatccagtcagcgaaacccataagcctccacacacaaacgacaaaggaatgtcagggaaagagatctctcaacggggtcatggcta

SEQ ID NO: 47832 - DNA, 393 bp, Zea Mays
cttccctgcacctagggctacctagttcatgtgagttccaatggaagatcgggtctggtttgggagatatggtggcgccaagtcaggggtgtcggtactgttcaacccgcgacaaaactggtgtcaaaccgtgtcaaacggttctggtttggtttcaaatttttcaggggtgtgtcttgggtaatttggctccttttgtcatttgaaccttatggatttggcgccagcaactaagtgaacatctctgatctttagaagagggctgatttttgacttagagaaaatttgggttgctctatagtgctctccacttggggctgaatttgggggttttgtgggacctttttggaataattcccttactctttcttgtagatatagaaatgtacttca

SEQ ID NO: 47833 - DNA, 653 bp, Zea Mays
cgtgttttaaaaaatcgcctccagcccgaagccgagccagaggctttctgtttcaatctctgctctttgtctctcttctctccagcgatctcacccctctcctgcgatccttctcaccggcggctgccctccggcgacctcaccccggtgctcaccccttccccccttaggtgagcagctctggctccctctccctctccctcctctctatttctattgagcagtgcactcctcttccaccactttgacccaaactcaaattcttgtgaattcctgtgaatccttctggttggaagtgttcctttgtgctccatttgatcccctgcaggttcttagctccctttgggagggtttcaatcctcaaatggccatatctccaaaaacctaattcaccgcacgccatgtgttcggtgaaatgtccaaaccagccaaaaatgctccaattgaacccaaatttttcaggcaccttcacaacacctccagttacatattcgccaaatttcacgccaatccgagattccaggcttaaatttcaccaaaattcccgtttcgagcgatcgtttccgagccgagtgcccaaatctttttttcttcgcctaaattcaaaccaagcacacacttcactcatattcacctatataaacctattcgtg

SEQ ID NO: 47834 - DNA, 797 bp, Zea Mays
atatcctaaaactgcatgattaggcaaggtgttagccggattcaaggtgttaacctgaaactgaactagaaattaatgttgtgacagcattttggaaacttcactaaatagtttatatcctttttttccacttcggatccgtgttgtcccactaatctgatgaagcttacaatgttgctacactaagttcactgaatctgatagattcatgattctgtatgtgcctgctgaattaagttcatgctatatagtaggtcatcctgttgctacactaagttaactgaatctgatatattcatgattctgtttgtgtcttgaatgtcttgcaaacgggtgtcagtcatactggaactacaactgaaactatagctgaaggcatctgcaactgcaagacacaagccgtcgtcttcttcttcttcatgaaagcctttcaaatcctgacctgaagcattgctcaatcatactggataaagctcacgaacgcagtttaaacatatatggtgatttgtatctgaattacgtctacatacatgctcagcttgactcatgtggctttgtttgggaattatgtctgtaacaatatggttcctgtgttcatcaatagtggcttcattcatgtgcctttgtttgggaatttgtaaggtccatacaggaacaaatagttgggcgagttgcagtgaaatttgtctgccgagaagctaaaagcagatgtactaagccagccgccggccttattcaacggtatttgaatcttgaaccatgaattagatacatctgttgtacagttaggttagctg

SEQ ID NO: 47835 - DNA, 699 bp, Zea Mays
gcagcttttgcccgtgagaaccacctgaggggttgtttccaggatttggtcctagcttacaatgatctggaggactactctagctgtactaccaactgcaccccgattacgcaccaggagcctgatgtagatctagaggcagagggtggtgttgtgttagctgatgggggtgagcctgatgtagatctagaggaagaagcagctcctatggttgcatcaggtggtggttctccagggggtagtagtgtgtcagagatagacactgacacagaggaataaaatgggcactaggtctatgagtgcatcctctgttgtaatattagtaccagcagtagtctggaaattttggtattttagccactaaggatcatgtactctgcttttgtaatatattattggttgtggacacgtatttatgagttctattttatttcagatgcctaagcgtgttcgattgtctgatgtggctggtacctctcagagtggtgtggaagacgatcctaatcctccaccgccaccaattcctccaacactagctgctgcaattgccgcgctggtaaatgcgacggctgataatgcacgtgtgctgagtgaagtgctccagaatcagaatcaacatgggactcgggtacctcccaataatgccagaaatgcttcttatatggaattcatggagactcgacctcccacttttataaa

SEQ ID NO: 47836 - DNA, 1847 bp, Zea Mays
ctcgatgtggttctcaggtacttgcaggcacttgcggagctgggatacatgaaacacgttgtggatatctgacatggattctggtaatttaaggtggtatgccgcgggtcccactctgccaatgatgggataggggccgacgaatcgcggtgctagctttcctttcatttggaaccttttgacaccacgcatcggggagaccttgaggtatacgaagtctccttcctcaaatctgagttctctccgcctgttgtctgcataacttttctgtcgactctgagcttccagtaatcttttgcggattagggcaactttctctttgtcctctttaacaaaggaaggtccttccagtgtcttttcccctacgttggaccacattaggggggtctggcactttcgtccatacaatgctttgaacggtgacatcttgatactggcctgatggctgttgttatacgagaattcggcatacggcaaattggactcctagtttctgtcgaacgtcaacacgcaggctcttaataaatcctcaagaaccttgttgaccctttctgtctgaccatttgactgggggtgataggcggtgctgaaatctaacttggtgcccatagcttgctgaaggcccttccaaaattttgaagtgaactatgtccccctgtctcacactatcttccgagggataccatggagtctgactatctctttaaggtatatccgggcaagggtggctcctccaaaggtggttttcactaggatgaagtgggctaccttggtaagacggtctattattacccagatagagtcattccctttttgcgttcggggtagtccggttacaaaatccatgcctatttcctcccacttccattcgggcactaggaggggttgcaataggcctacaggtttctggtgctcggcttttgttcgttggcaagtgtcacaccgggccacatactgtgctatctctttcttcatccctctccaccagtatctggttttgaggtctaggtacatcttggtggttcctgggtggttggagtaggctgagttgtgagcttcattgagcaggacttcccgtgcctctccttttggtacacagagacgattcttgaaccaaaggactccttgttcatctgtcctgaggtccggaagttgttctttgagagcttttgccataagtcttgctgtctccgtgtccaagcgttgagctttgcgtatgaggtcttctagcattggcttgacttctaggctgtcgttgttccctagacatgcattcagctaagctgattccttcttccaatcttctaaaaagttggttccctttatcccgaaaggttttcggctgagggtgtctgctaccacgttggcctttccggggtggtaatggacctcaaggtcataatctttgatcagttccagtcatcttctctgacggaggttgagatctggccgagtgaagatatacttcagactcttgtgatcggtgaagatgtggcatttgttcccaattaggtagtgcctccatattttcagggcatgcactatggctgccaattccaaatcgtgggtgggataattctgctcatgcggcttgagtaagcatgatgcataagcaataactttctcattttgcatcaggacacaccctaagccttgccttgaagcatcacagaagacaacgaaatcctggtgtatatccggtagtgtcaaaacgggcgcggtcgtgagcttttcctttatgatctggaaactttcctcacacttcggggtccacacaaacttattgtctttcttgaggagtttggtcataggtcttgctatgctggagaatcccttgataaagcggc

SEQ ID NO: 47837 - DNA, 648 bp, Zea Mays
ccaactagtaaatgtgtcgcgtgaccgactctagatggtgtgcgagaagacacaagtagttatcctggttcgggcaacacaaggtcctacttccaacagagggggatgaagcttatattactcacaccgtggtgcctgtagtaggggtttataagcacaacgggagaggggaagtccccaagcccctaaagatgattgaggcaaatgccaatatctaagacaatgtggaggagtgagtgttcattggcgtgtgtgtcgatgtccctccctagagggatcactgcctatttatacacgaaggggagtgtccgtagtgatgtcgagtgctgtattcgaaggagggacgccctgacgtatacaagccgacgtgacgacgaactgtgttgttgattcgcgcctgttgatttctcgtagagagccgaggcaaagaccgaggggttgcccgtacgcccaagcccccgagggagaggccgcccatgccgttgttgtaacagcgccaggatatcagccaaaggctgcttacggggtgcatcattgtcctggcgcgtgatgacctcgagattctctgaatgcgtttgttagggggttaattcgggtgtccctaattattgctcccgacacatatgcttcttccattcttgtataaat

SEQ ID NO: 47838 - DNA, 561 bp, Zea Mays
aaagaatgttgaagaagccgaaggatttatccagtgaattggcaaagaagtcgaagctttcgatgaaatactcggcgatcgcggggatttctgcgcattcgccggtgcacgaggggtcgcaacaattttagaaaaggccggttgtgaacatgttaaggccgtagtccagctagaatatattttctcatctggcgacaccaaggacccctcggccgaagcttctttactaggcggaaggttttactctgatatttggatgaagggcgttcgtgaaatgcctgatgaagtcattaaaaagagtgagaaagaatctcacgatgcccgagaggaggctaaacgagctcaagaagctgctaaacgcaccatgattataggtacttttatttaaagttttttgcttcattgttcgtttctggcttcgaaattgaccatcatattctttattgcagccggcctttcaccaccaccggagccgtacaaccccgaagcagacgcagttatggaagaggctttggatgtaatgaagattgctaacaaagtcattgacaaagtggttgacag

SEQ ID NO: 47839 - DNA, 875 bp, Zea Mays
tgcgaggcagaacgggtgaccaagtccttgtcgagcaaccttgcgacacagagtgggcgaccaggtccctgccgagcaagcttatgaggcagaacgggcgaccaagtccttgtcgagcaacctcgtgaggcaaagcggacaaccaagccccgtgtcaatcaaaccagtgtaagggaagggctgactcaatgcggttgcccccacgtcagcgggactagatgcatcatcaccaaaccacgtacgggcctcgagtacggtgacaaaaagtccttgtcaaacgatgacggtacgtcatcatgtcctatctcagccgaacccccacagacgtatggggacagtagagcccgttcatagggacctcagcgtcagagtctctacagtgacccgtataccagaaaggatgcaacagatacaccataccgggtgtctgccgccgcacgccggcgagtgacgcgggcccatgacgacaggcgaagctgcgctatgcactactgctccatgggactgaaccatgagacccaccacacattactacggagaagtcaatagtggactcgctacaggagtctgtatgacgaatgagcaagatggtacgcatactaggagtatggctacacacgatcctacgacggaggaccaaccacaatgatccagaggagccgatctctctctatctctctaaggtctagcccttgagttataaaagggcaggccctctttcttctcaggacacaagcacacctgttgtaacacgtccaaggcaatactacgatctaacgatcatcactacacaggagtagggtgcgaacatgaaccagtataaaccacatgcctcagatttctcatcgagtccctatgattcaccattcaaagcg

SEQ ID NO: 47840 - DNA, 917 bp, Zea Mays
ctattgcaaaagttgagtgaatacatcaaggcaaacaatgacttttgacagcatcaagaagaggcatagagatatgcggaggcgtctaggggctttgaaggaagatttcactcaaggcatatctgaaacatccagaatctaggtcttcacgaagataagtcaaactagcctcaaggatagcattctcaaccccatgatttgcctcaatcatcaagtgggcaacaccaagcttcgtatcgcaattcttgccctctggttccaagaggtagaagaggaggtcgaagcttcggagctcggttcaatcagaacacgctgccacaaagattgtattgtgttttttgtggagagaacaaaggccccattacaaagtcatgccatatcacaatacaaaaacaaaaagaacttatagccgttgcacaaacaagccagtcccaagagatctatcaagcatcatcctactactcactctacatcccttagcatgtaaagccaaaatctcaacctttggtatccattatttcacccagcccatagtccatccactggggggtttctcaatcttacatcctaggatctccaccatatgagcaattgccctcaagtcaccctcaatatcgaatacaggactcgcaacaatatgacaaaagggagccctctaaacccacacagtaaacggtgtggttctagcttcaaagcacatatattggggctagaggggatgaagcaagcagaagaaaatccaaatattggactgctttgatctaattttgtttttaggttagcaccctttttcctcacatgcgaccttcgtctgatcaaacgaagtgttaggttttttaatggggctacctttgtaactcatgtagcttcacccatcaaatataagggtgtatatttccctagacacgttgtaaaat

SEQ ID NO: 47841 - DNA, 444 bp, Zea Mays
ccattaaacaccagggatcctaggggatacttcagatacttagcatattgcctagcttcggcaacctgctcctctgatagctttttccctgccgcgtggcgcaatataaattccaattccttagtagaagcttcagcggcagggaattcagattctttgctggttctctctttttctaacggtaacagagcttttgcagcatccgaatgtcctggttcagtatccttttgaacaagctctgcatgccctattttctacgggaactgagggcccagtttcagcttcaacccgagttatgacagcttcggcagtttcctttgtatttttatcacccatgctaggtacttctgtagaggcaggagttagtacctttgtcgattccatgacagcatccagtacactagccattctcctccttttcggagttatcaaagtagttttttg

SEQ ID NO: 47842 - DNA, 844 bp, Zea Mays
gttgcaccgccttaagtcgctgccgacttaagtcgattgctccgttagtagggcatagtggtcaccccgagttaagtaagcgtgagcatgttacaccgccttaagtcgttgccgacttaagccgattgctccgttagtagggcatagtggtcaccccgagttaagtaagaatgcaagtcaatcgtaaacgaactgagtatctttgaaacctcttttttattgacaacatatttccactttacagagtacatcgtcgtcccagcagtttttgaaatacagctagggataaaactttctgaggtgttctatgtttcaggagttcccgacttttgtgccatccatctgagtgagacaatacgatccgggccgagtgacttctgctaccatgaagggtccttcccataagggcgataacttgtgccgtcccacccccgttagaattcggcggaggacgagatctcctattgagaaggatcgttgtcgcacagccttgtcgtgatagcgccttagagtctgctgataccgtgctaattggattaccgcatttagccgttcttcttcaagtacatcaatgtcctccagcctggtggcttcagcttctgctatgttttcgaagatcaaccttggcaccccgaacttgagatcggcgggtagcactgcctctgacccatagaccatgaagaaaggagtgtttccatgcaaagctcggctgggttgggttcttagactccaaacgacatagggcaattcccttatccactttcctgcgaacttttcattcttgtcgaagacctttttcctgagtgcctccagtatcatcccgttggctcgctcaacctgcccg

SEQ ID NO: 47843 - DNA, 517 bp, Zea Mays
attttctgcatactcaggcgaggctccgtagtcgaccagatcgtctcctagtaggtcgtcctccttgatgttaccttcattcataggtgttggtatatcgtcggaggtttcctagcgaggtgcagacggtctagactcaaggttggacggtccgctctatgctcggacggtccgacttctagagccggacggtccaccttatctggagagagctgcgtagttgttgttttgtcttttgccttcgtggccgcttgactgctacggcggcttttggtctccacctcttttgtggtgatgggtattgtggatgtgtatcattcaacatttcctctacatctttttctctgctctcctttgttctcaggtgctgtaatttgcacttttgagaccgtgttagactcgatgaacaccatcggggcatggagtatttcaagttaactactttgcgggttgctcgtgtgtctttctcctcatttgtcttgatcgaattatcaaaaatcatcgaccctttattttt

SEQ ID NO: 47844 - DNA, 390 bp, Zea Mays
ttcgccatggctgagttatggacacgaacgtgaggttggcgtgggtacaaggatgaacaaatacaattgaatttgaatcaacatcaagccagatagacacggttttatttttataaaacttgggtgcagcaattagcaagctgtcctctaatcaatgctcgctttatcaagtcattttcaatgctgtgcatgcgtcgggtcgctagaatctctgtactttcatatctatcatgtttgctctcaaattcacaagcacaaataggtgctctgttcacaaggaggagcttcaatctggatgaattatgttgttttctggggaaatgaattgtgtttagttgatttgattcttcatctttgccgtatataattgtactaatggaaacacaaagc

SEQ ID NO: 47845 - DNA, 481 bp, Zea Mays
acttaaataggtagtgaaaagatcaagggatggctcggttcttggaatcacagcaaggataactccgagcatgccagtgagtgcatgggtgtgtaggcgtggctcaacactaaagacccacgcagattcccagagcactgcaaggcaagggtgaaattatcctcgacaaggggggtagagataagatggcactgtagtagatatttccaactggtgatatttcagtgatgatcatagttctgaacatccctgccctcttctcatctctataatctctctattccaaagtaagacacggcaagggaagaaaagatcagggatagatatttctgcacttttgaatctacagctcttgactgatcctcccttcttcggtcatccttttttccttattttgagtaagaacaggtcaatcaccattaatagaacttgttcactaatcaagggtctgcaaagttactataggtttcttggacccaaa

SEQ ID NO: 47846 - DNA, 374 bp, Zea Mays
cttgaaagtcatccctaccgttggcactatagttggatcaatgttttttgcctgctatttcattgtcattgttgtttgtaccatggaatatgttcgcaacaatatattcaatcaataatcaaattcagcgattggacttacatgtgaatgcagtatttgtggcgtatccatctccctggagctaatattggacataggaggtcgaaccctttgttctccttcttcccctatgctcatctcggcgatctcaggacccagtagagcaggaggtggtgtcaccagtgagttaccaccaactcctccctctgtctctggatcaagacgaacgccatctccttccatcgccggcgactctccagagccggccatctcca

SEQ ID NO: 47847 - DNA, 756 bp, Zea Mays
tttttcggggtctctttagtaaaagccagagtcgaaggggtacaggtgactgcgagccgctcaagttagatccaatggcccgaatttaatgtactgaaagggtaagtcacgttctaatccccaccatttatttcatgatctacgcctcacaccactccctctctcgacctctcgactttggatctacggtttggatttaaaaatcttgaaaaggtacaatccgatcacatcccgatcaataatctcccgatcaactgctacggaccattcttctccaccaggtgcccggagacggtggcgctggtcacacccacggtggcgcacgccgacgcgcaggccaaatgacaaacgaacgatctattcccctccccgatgatgctacgcatggaatgggagctagctaacacaatcaacagcttcttagcgtgaaatttgggtgccactcgagctatgtgtgcagagcagcggcacgacgacggtgtttttgctccagcgagaaattgcatggtcactggtgattttctcatcgcaccggggcaatgaccactgttgttgttccctggcgaagcattctagaagcacactgaggccagaccgacggttgaggtgggcatcaactgcggcgccacacttttctcccctcagcggaaatagcgttaggatccgccatcgattcacgccgagattgttgaggtgatggccagggccggcatgacctttatacacccaataagcgtaagattctcgggatacggg

SEQ ID NO: 47848 - DNA, 1125 bp, Zea Mays
ctcaggttagctacatacccatcagggaacatcaacatcttgatccactgaagtacttccttcctctgggccctgcttaggacgaaatcggcattaggccttctccacgtattttcgccacttggcggcttcatctctaggtttggtctatcacataacactgccagatccactcttgcctttacgttatcctttgacttatcaggaatgtccataattgttgcccacagtgcctcatcaacattcttttcattgtgcatcacgtcaatgttgtgtggaaggagcaggtcatcataataggggagccgagttaagccagacttatgtgtccacatatgctactcaccatatcccacaaaaccaccttctgtattggccacgagcccatctatttgttgacgaatttcggcaccagtcatcattgcaggtgggcggtctatcactacgacacctttcataaagttcttgatgtataggcggaatgggtggtcaggagggagaaattgtcgatgtttatcgaaggacgaatatttgccatcctttttcaaccaaatgaacctgagagcttccttgcaaagttggcatgggaatttaccgtgaacacaccaggcgtagaatagcccatacgccggtaagtcatgcatggagtactggtaccaaacatacattctgaagtttgtcttcgtacctcggtcatacgtccataccccttcctcccaggcacgtaccaattcatcgatcaaaggctccatgtacatgcccattttattccccaggtgtccgggaattatgctaaggttagattcattgtcgccatcattgtaacgaggggtggattatgcacgctcgacaatttttcaccataataagttgttgtgaagtttgacacctcctctagaatgtatgcctctgcaatggaagcctcgattttgcatttatttctacatttctttcgaatagtctttagacatctcttgattggatagcaccaacgtccctgcacgccccccatttgtgcctcataggggagatgaagaatcaaatgttgcattggattgaagaagccgggtggaaatatcttctcaagcttacatagtaacacgggtgccaatctttccaagtctg

SEQ ID NO: 47849 - DNA, 861 bp, Zea Mays
gtcggataaacatgttgtcacataaaaatttgagaaatgagctcctcaaatcgctctgtcaggcgcactaaagaagatcacatggtatagtaactgaagaagatcccaggtgcagtgcacccgccgcctgtgaactcgcgccgcgatccacaccggcattgtgattcatgctccgtggcgcgtggataactgcttgaggtaaaagatcttggcgtcgggatgagctcgggtcctgttcagttcaccatacccacttgcacggcgacgtggacaggcgatcatcgcagtggtggccgctgtccttcgcggttgtgccatgccgtgacccttttaccacgtagctataaccgtggcaagcctggagttactgcccttgagccgttctaccggcgggcgccacgacgaactcgtccagtggaatatcccaccgccgtcgtgatcgtcttcgacccaaattggcgaagaacgtagccggttcctttaaattgagcactaccctcgctccgcctctctattacatgctcatcccaccctctgttagactctttcgtgcaccgtagcctccagtcatcggatttccccaaattgggtcactcacgccaccgtgaggcacccagccgtgattagctgttcccaggtccattcattcccctctgtgtcatattttagcatccttgaatgttaacatagctcgttggctcaaccaattgaacactaccgcaatcaggcatcgagaacatcacctcgccgccatagaacacgtctgagagcgtgctcacatcaacgcactctcccacaaccgctccgtccaaattcacgcgtgtaccccacctcaggtgaatcagtgaaactcgccctggc

SEQ ID NO: 47850 - DNA, 365 bp, Zea Mays
gaagtgtctgccaccccggccaaggcgatggccgaagacccgctcaggcgaaaagtggtgttgaaacagagcattggcatgacatcacgaagtgggagacgtcgctggatgggtatggagcggtcccgtcttcgactagatctgggtagtcaacgcgatctactgtcctcgacgtccggaacgtgtattggggagggggacttgcagaatctgtttaagggcgaagagttaaggatgatgttgtttaatttccgggaggttggtcttattccgaaggcggagcctatgtagcaattttgctggcctcgctcttgtgttgcgatagtgagtgaaaacgctaccctccccctcttcgcaatagagaa

SEQ ID NO: 47851 - DNA, 350 bp, Zea Mays
gcataattcattcttttgacgaattcaacattcggcacatctctagagttgagaatcacagagctaacaatttggcacaagatgcatcaggttatcggataaagcgagggaaatttcacaacaccgaaaatctgataaccgatacaaggccaattccccaggtcgtgaaccgtccgggagagggctctagatcgtccggggttgctagggaagttctcctaattgatttggctagtaatgaagccgatgcaagcgattggaggacacccataattaattatctacgaaatcccagtgttaggacgtataggaacgttcggcgtataactttcaagcatgttttaatgagt

SEQ ID NO: 47852 - DNA, 424 bp, Zea Mays
gtacattaataaatctacaaaatatagtaagggaggtattacaaaaaggtcctacaaaaaccccaaatcaagcccccaagtggagagcacactagagcaatccatttttctctaagtcccaaaatcagccctaacctaaagatcagaagtgttcacccttttgctggcaccaaaaccacatggtacaaataacaaaaagtagccaaactacccaaggcacacccctgaaaaatttgaaaccaaaccagggtcgtttgacacggtttggcatctgttttgtcgcggggtgaacagtgcagacagacaagacttggcgccaccatatcttccaagctagacccgatctctccttggaactcacatgaactagatagctctaggcacaggaaacaaatcttgcacaagtcatatggcaagattcgta

SEQ ID NO: 47853 - DNA, 724 bp, Zea Mays
ggcaactagccataagtgctggggagcggtagtgctacgcactgtctgcagaaaatcaaaggcaaaagcacaaagcaacacaagcgatagtgtcgggcaactagccataagtgctggggagcggtagtgctacgcagaggagcggtagtgccacataggaaaaatgcttagaatgtgctcaaacatcaaaggggtttgcgcagagagaaataagatgattcctaaattttcacccaaagcaaatcaaaaacccatgtgcaaattagatttcccgagatggttgaaattgtgttggtgttttctcaaacgaactcaaatggagatcaacttagatcatgaccaagaactgcaccaacatggcatatgtagtgatccaaagtctcaccactaatcaatctccaatagtacccacaacacaagaactcgatggtttttccacaaatccaaagagataacaaagaaagaatgcaagaaccaaatcaactcaagattttagtggagacaacactgagcacaagagtcaaactaagcctgtggatggatccgaccacccttccttcagatatagagttgacgattacaggacatagatgaaagcaaaacacctatggatctcccactagactactacaacctagaggagtaaaactaggagtctctaagtgaaagccaaataaaatagcaaaagagatattgctgaaacaaccaacccactcttctattt

SEQ ID NO: 47854 - DNA, 1551 bp, Zea Mays
atattagaatgtgttcttggcgctgaaaactataacgttttgtttctgttgttagaattcaacagttgtcatgaatgattgtagaagtaagtgtggtgtgctggttttggaatcttttcctaatttatgctaattgatcagctggtaaggcatagatatcgccctaagatgagtaaacgcaagcatgttacactaagtcgagtaagcgtgagcatgttgcaccgtcttaagtcattgccgacttaagtcgattgctccgttagtagggtatagtggtcaccctatgccgagtaagcgcgagcatgttgcaccgtcttaagtcattgccgacttaagtcgattgctccgttagtagggtatagtggtcaccctatgccgagtaagcgcgagcatgttgcaccgtcttaagtcattactgacataagccgattgctctattagtagggtatagtagtcaccctatgctaagtaagtgcgagcatgttgcaccgtcttaagtcattgccgacttaagtcgattgctccgttagtagggtatagtggtcaccctatgccgagtaagcgcgagcatgttgcaccgtcttaagtcattgccgacttaagtcaattgctccgttagtagggtatagtggtcaccctatgccgagtaagcgcgagcatgttgcaccgtcttaagtcattgccgacataagccgattgctccgttagtagggtatagtggtcaccctatgccgagtaagcacgagcatgttgcaccgtcttaagtcattgccgacataagtcgattgctctgttagtagggtatagtggtcaccctatgccgagtaagcgcgagcatgttgcaccgtcttaagtcattgtcgacttaagctgattgctccgttagttgggtatagtggtcactctatgccgagtaagcgtgttgattggtaataaacagtttgagtgcccttgagaatgaaatctttttattgatgatgtattttccaattacagaatacaatgctgccccgatagcttttgaaatcttgctaagggtaaaacttcctgagatgctctatattccatgaattccctatttccgtgccatccatttgagtaagctgatatgatcctggtcgagttacctccgctactacaaatggcccttcccatagtggtgacaatttgtgttgtccttcccctgttagaattcggtgaaggaccaagtctcccactacaaaggattgatgtcgtatagccttatcatgatagcgcatcagggtttgctggtatctagctgactaaattactgtattcaatcgctcttcttccaatacatcaatatcctctagtctggtagtctctgcctcagctatgttttcgaagaccagccttggtgccccaaacttgaggttggcaggtagcactgcctccaaaccatagaccatgaagaaaggggtatttccatgcagagctcgactaggttgagttcttaggctccaaactacatacggcaactctctgatccattttctcgcgaacttttcattcttgtcaaagactttcttc

SEQ ID NO: 47855 - DNA, 327 bp, Zea Mays
cttggggtgctataaagccagttcagcatcttctctgtcaaatgttcttgccttttttcctttcagcagtggacgccatttctgaaaaaaccctacacctgttaagaacttaagattacattacatcacttggtttgttggcgattttctattgccatcttgtttctgttagtccaaagcacccatgctaaacctgaaaacaaaaacaaacttaactgttaagggactctgaatctgtaattgggtcacctctcccataagtcagcttgtcatgtcaggaagccattccaatcaaacacatccagcatgcaacaccataccgtctgt

SEQ ID NO: 47856 - DNA, 544 bp, Zea Mays
gaaatgtggcaagcactccggcaggtaaaaatgcaaggaaaactgggcgagtctactatacacaagtggctaccatcccggaaggagagccgatgatgatgggtacgtttttcgttgccaatcatctcgctgtcattctcttcgattctggtgcatcacatactttcatgagcaagatttttgctgataagcattgcatacctactgttgaatcaatgaagggttttgttattcaatcacctaggggtcaaatttttactaaggaagtagtcttccacgtacccgtgaaattagctagatatgaattccctaccaatatgactgttataaaggggctagacctgtgattctaggcatgaattggttagctcagaataaggctattattaatgctgaccaaaggactattcagctaagtcatgggcaagaagaggtcaggttatctatccctgaatctgtcccagtcaaagtatctggacaagtttttgaagccgtagtgcaagagatacaagacattcctgttgtgtgtgaatttctggatgta

SEQ ID NO: 47857 - DNA, 801 bp, Zea Mays
ctgagatccacaaatgttttgaattcacatctatgcttcgtaatcttcaccaaaatattcaaaggaagggtggtgggatctatccacatgggcggttcaaatcttttactcagttttgtctccactgaggttttgagtcgattttgttctcgcgttcttctatttcttcttccttcgcatttgtggaagaaccctcgagttcttgagttgtggttaggttctaggattcttgtggggtgagaatcactgcatacgccctgttggtgcaattttttgtcatgatccgagttgatctcattttgagttcgtttgagaaaaccccaacaaaaccccaaccttctcgggaaatctgatctatgcatggagttttatttttctttggttgacatttcacgaataatattctttccctctccgcaaattcctttgaagtttgggcggattctaagcaactttgtttgcccggcactaccgctcttcaacgtgacattgtgggacctctgtgctgcactgccgccaaacttgctttgtgttttgtgctctaagattttgcagatagttgggcagtcccctgagtagcagtttggtatattcaatcaacactggatcgaatatttctatgttacatagttttaatcatcccgtgggttttgtgttagttttgggatcaaagtcacggtgttgttctcaagagagaatttttagtggctcccattcaaccccctctcgacacctcaccggcccttcaccttccacatatggtggtcttgctccttctcatccttcctcaaacatagtagt

SEQ ID NO: 47858 - DNA, 768 bp, Zea Mays
aattagtgaaatatatcctcgattgtagagatgggtccccaggagctcgggtattcgcgggtcggccatggcgccaccgcggcggaccgccgcgccacccaacggaggccgcagggggaagagcggttgttagccatcgatcagaaaatagacggttgagattatatcgtgggggtgagggcatctcgtccgtagatctaaaattgaacggcatcgacccgatctgcgggacattaagtgtagatttgatcgggaccgttcgtggtgaatcaggcgagcgagatttgactttagcgttttaaaacatggctgttagatcgagatcggccggtctggggtgcgtaccggtttgaatttggggcgatctaatcggcgccgtctgcgcataatccaatggtcagcgtagcacgatacctcttcgcctcggcacttattcaaaagagaccttatatttttagataatagaacccgctgtcctctagtgcatgagagctgagtctgtggaaatttagcaagaaaacccctgcgctttctggaatttgaggcccgatccagagacttgggaaaataggaaacaatcacagaaaatgatttttaatgcataaataaatgttaaaacttgtttaatttgtagaaaatccatataaactccaaattggtccatttctgttcctaaatttttgtaatattattgtctagccattagttcctctgttttggcatgaaagacacattaaaatttatctatcacttaatcttgtattaaat

SEQ ID NO: 47859 - DNA, 442 bp, Zea Mays
cagggtgtgtcaatagatccggcaaaggttgaagcagttcaaattaagttggccagttcctactaatagtaaggaactttgaggattccttggtctagtggggtattatagaaagttcatcataaattttggcatggttgctaagccactgaccagtcttttgaagaagggtattttgtttgtatggactggtgaacatgaggtggcattcacatctggtacaagaattggtgttgtcttgtcacagaatcgacatcccttggcatttgtgagtaaagctttgggtcctcgcaacaaaggattggctgcgtatgagaaggagtatttagctcttattcttgctatggatcaatggagacagtacctgcaaaattctgagtttgttatttactcgcagtctatctcacttgaccaagcaaaagctgcatactccatggcaaca

SEQ ID NO: 47860 - DNA, 387 bp, Zea Mays
acaccccctgctctcctcaaactgagtcatcccaaaccctaaagtccctatgctgagcttgagtcactgtcgtctttcatcgtcgccatagcttcgctgtcgttgctcattctctatgaccaaggtccaccccacgagctttagtataaggtataggttctacaacgcccatccttgatcataataatgccctatggttcaagtatttgctcatcgacgctactttgttggccctgcaagtcctcaccactatgcatcgtcatcccattgccacaatttacccccatggagttagccattgtgcgcttaggctccccatgtaaaccccatcactagaagtactcgagatcatgattttcgtgttgctgcagcgagtgctaccgcgag

SEQ ID NO: 47861 - DNA, 634 bp, Zea Mays
gcatcgcaaggcagtcagtccactacaccatcacaggaggattactgtacaggagaggtgcaggaggagtcctcatgaaatgcattcactcagccactgggagacaattgttagatgaaatccatgccaagcattatggggtgcatgctgcatcaaggactctggtcggaaaggctttcagatcgggtttctactggccaactacgaagagcgatgctgtcaagttagtccagaagtgtgaagcatgccaattcatgtcaaagcaacaacacatgcctgcatagtagctgcagatcattcttgtaacatggtcgtttgcatgctaggggctagacatgatcggacctttcaagaaagcttagggaggctatactcatatactggttgccattaacaaattcacaaaatggatagagtacaagccaattgcctctttgacctcagccaaagcagtcgagtttatccaggatataatatttaggttcgggataccgaatagcatcatcactgacctgggatccaacttcactgacctagcatcatcactaatttctgcgagcaaaggagcattcagatcaagtatgcatcagtggcgcacccaagagccaatggctaggtagaatgagccaacgaa

SEQ ID NO: 47862 - DNA, 718 bp, Zea Mays
cgagacgtcttcctctgctctgcacgtctagtggtaattccatgacctataactgcagtagttcttggtattatggggttgaaaattttgttttgcgctagcgtagcctccccgtaatcctacatgaacaaccccaatgaccttatcttcagctgcaatgtataatcggaatggtactcctgtttgtggtgcttttaatacgggagctgaagacaagtattttttaatgcgatcaaatgcttcctgctgctctgcccccaagtgaattcggcatcattcttaagccgaaggataggggtgaaggcatcagtcttcccggctaggttagaaataaaccttcgtaaattattcaccttgccgagaaacttctgcacttcgaccttacaggtcggaggtcccacattccgaatagacttgattcggttagggtttatctctataccatgttcaaggatgacaaatcctaaaaacttaccagccgacactccaaaagcacatttacgtgggttcattttcaaaccataccgacgcatcttatcaaaggctttgcgcaaatcagctaaatgagaactaaactcagtcgattttactacaatatcatcaatgtagacttccacaatgtttcccaacagctcatgaaagatcaaattcatagccctctgataagtagtaccggcatttttcaaaccaaatgtcatgacaacccactcaaataaaa

SEQ ID NO: 47863 - DNA, 272 bp, Zea Mays
gtcagattgagtgcgagatgtgagtatacatatgtgggtgtaggaggtggttgtccacacccatacatgactggtggtggtattggatcgggtggtggtgcccatgcaccgtataagtgttggtcacatcgaggcggatagttgtaactcaagctgactgagttgtggctacgtgtattatgattgactggtacatgaaaggtagattaattatgacttcattgagatccgtacaaccaaaacatacatgtattatgaatttattatcttga

SEQ ID NO: 47864 - DNA, 783 bp, Zea Mays
ctccaactttagaaaagctattctttagatttttagcacattccatagctatttcatagcatttttccttagcagcacgaagctcatcaacattttttcatgcccttgatcgttcaatttcacatatttcgtgttttaccacttcaacattaaagttctcggttgcttcgacaactttcttctttagctcttgcatctcggcttcatgagtttcagcttgagtagaaagcctagcttcgctagattttaatctttccactaaagagtgtaggatcttatctttctcaagagcttcctttctcaatgttatgacctccgaatgaaggtttccaagtgctattcgactgctctcatcctctgcatctttttgggccttcagagccttgcttagaatcaagccctggcaaacgaagagtgaacacataacgacgataagaactaccacaaaaatagttcaccgtaacgtaaattacaaaatgacaagacaaagtatacgaacttttaggttgttgtaggcaaggctatctgcaagttgatccttagtcatcgcagacaaaccaagttcaagcttcggataccccatgttatccattatttcacggcaaacattgatctccttaccgtctggtagacagtagaggaagtcatcatcattatctcctttgtatactaaggacccctgggggtacttcagctccttagcataatgttcaattttggcaacttgctctgccgatagctattttccataagcatgtcgaacaataaaattcgaatcactct

SEQ ID NO: 47865 - DNA, 309 bp, Zea Mays
gaaacactgtggaagtctacattgatgatattgtagtaaaatcggctgagtttagttctcatttagctgatttgcgcaaagcctttgataatatgtgtcggtatggtttgaaaatgaacccacgtaaatatgcttttggaatgtcggctggtaagtttttaggatttttcatccatgaacatggtatagagatagaccttgaccgaatcaagtctattcggaatgtgggacctccgacctgtaaggtcgaagtgcagaagtttctcggcaaggtgaattatttacgaaggtttatttctgtcgataccc

SEQ ID NO: 47866 - DNA, 1602 bp, Zea Mays
aatggttccttgctatcattgacattggcagctactgaaggaatttttctaaccttcttgttgcctttgtctccttggtatagtgcaattctcagaaacctctcattgttctctaccttccccaggatacgggaaaccttatttgtgtgcaaattcacaatctacacatgtatgacaaagttaataagtcttacagaaaagattcaataacaatatgacccaaaaaacagtcagcaaaaagcagggaattgtctatcatctatttacacaaccaatcaagaggagaaacatgaaagaaccctatcttcagtcttgacacacaaggaatcaagacacagcatgagttattttgtatttttgtatttgttttgactttggagttcagcactaactactatgccctcaatgccagaatcttccagtaaaaccataaagtttgagcaaggtcttagagcattgaagaatctctaatacaaacattgctcatcacatgtttacaaaaacaaaaggaatacaagatacactaaaaatatttaagtatatgaagaccaacctcatataaaaggaagtatgggaaagaaagaaagtgcagcgtacctttacacccaaaagggtagcataaataagaaaattgcaactctcatcaaagacagcattaggttgtggaacattttctgttttctctatttccttctccacagccattcgtcgtccaaaatcaatagcatcaaggtgatacaatggaacatcacttctttgaagatcttgcgccacctagaaaaatgacaacattcatcaattaaaaataatgcaataacataacttgtgctttccaaatgttttccaggggagagttccttacatctagggactcgtcatatacacgtcttaattttccagttttgaaccaaaatacacgtatcctgcgatcaggggatgtgacagcaaattgagtgccatcattgcttacctgaacagcacaaggaccagttagcagattcattaaatgcataatctgaaggatactattgaccattagcccataattttgaagtgtcatatttgacaatgcattaggcatggtttattgtgtccaactatttactttaatgacatttctcaggtaatcatatacatcagtcagaatgaagtacccaaatcgacaattcagataccaccatctaactgctgtgccaataaaaagaaaaggagaagcatattgcatagcagtacaatgtcaatgattatacccttatggttctgcaaagcattcaaacatgttcccattcaatagtacgcctacttactctattactaaatatacaagatatgtaaatcattctaggatgaagaaagtacctcaatagcagacacagtagtcttgcatttcgcaatttcaaatagatttgtatctgatttcaggcgaaacctcaccctgcacaaaacaagcagcaatgtcgattgagttgatgaattattcaagagaaatatttgtagaagacacaaaggaaatcacaggaatatgctgacagagtaataggataaagctctaacacagaaacaactaaataagttattatcaagcaagaaagtgaccaaggc

SEQ ID NO: 47867 - DNA, 415 bp, Zea Mays
ggctaatcggcggtgaggagcggtgcactggcttcgtaacaagatagcggagcaggccgaacactcaatttatactgaccgcttgagtgtttcacgaatttgcgatgggatatgcttgcgaccggaggggaggtgagtcaccggagcgcagctaccgtggcgctcaacaaggtaaagactcaggcgatagatggttatctattgtgatttattgcgacgtggtaacatttcgaagcacgtggcatccttgtggcaagcggcgaactccggcgatggcatttcgagcggtcgcagggcaagtgggtacgacggccagctcacaatctcattcgcgatcttgatcttttcactggtccggtaatatccacgccgcgccatgcacgaatcactgcggccggcgcgaatccacgcgcgg

SEQ ID NO: 47868 - DNA, 1003 bp, Zea Mays
gcaagaacgttggtttcgcagtttatcggttacgctcatactcctgctccatgttcaaagcgtatctgcacctttggaattctagcagaccaaactagatcattgaatggcagtgttattcagaggaagaattaaagtcttggaaactggtttctcatcaccgttctgcaccggtctcgttcgctaatattgttcgaaagccagctctgacaggtgcaaacttggttcctttgggtcggctggtaaggcccggacgttcttccttaagattgaagcagcggcactcagtttccgatcggatttcattcccacctcgccccgccattgatcagggatatgttgtttgtccgcaatttcaaaataattcaaatttcagaatcggccgcactactagctccggattttgtccatctttgaggacctctcgcgttttcccttggaccccgcggaagttgatttggcggcccaagaagattttggaacagtgcccggggaattttgggcaggattctgtccccagtcttaatggctctgcagacccagcgacgacgggcccccgtcatttttgggatctttctctctcaggaaaaaataacaaatatttggtctctcggggcagaagtgcaaacagccttttggctctttccccaataagttcgcgaatgcatcctgggagtatcccccgtgtttatggttcaggccccctctgctgtcgcttactggtgggcccccttccccgccctcttttaacaattttggtgagttctttcaggcggttctttcgagtagcaacgcttcgccttccacggaacttgcactgttcacaaaaccccattccgctccactgtcgtggaagaatttgtcgccttcaagttctccgttgagtgtagtgcttcctccgccctcgcgattcgctactctcagaaccgctgaagaaatggcttttcgcagagttgatcctgcgccgttcctcccccatggctttgtggcgcagcaggtcgat

SEQ ID NO: 47869 - DNA, 467 bp, Zea Mays
aaaaactaggcgagaggcctcaagggtgccctgaaaccgaggaggctgaatcagctgcgcaaagatgtgacacaagtagtgagcatagggcaactgccgacgagcatgaatcccatccaaaacggtgtcctcgatctcacaaatcaggaagtccacaacgtcaaactcagagtgggagaccagggcaccaaggagccagagctgtatatgagtggtagcctccctgtatcccatcctcggcagaagagtccgtctgatgagctcatataagtactttgctattgtagtaaaatctgccggtgaacgtcgcgacccatctgtgaagggcgggcggaacagagccgcgacgtgagctgtacccggagccacaccgccgtgagggcgacgaggagggtcaaaagtgtcgtagcagaggatgtgaagacgagtcgtcgactcgggaaatccaaaaagctggcggatctgac

SEQ ID NO: 47870 - DNA, 1122 bp, Zea Mays
gtcccaagagaatttaacgaaggggacctcgtactcgtccgaacaacccggacagagtcacggggtaagctggaaccaaagtgggaagggccatttatcatcaagatgaagttgtctcccagcgcgtacagattaacaacacaatctggcgaagacctggaacattcctggactatagatagtcttcgcaaattttttgtttgaaccctcagggccatcacgcccttgtaattcgccaaacattattattccggcccgcactcttttcctcccagggggtgaggtttttaatgaggcggagccatgtaatatacaagcaaaaatcccctgcaaaaaactaagccaatgtcgaaaaagactgcatcaacggtcttcggcattcgactataccaaagtcaccgcgagggacagcgctggctacccttgcgtgcgacactccacgcaaaagtcgcctacgggtgcagccggactagcacaataagtgcgcaaaatcgaagtcctctccaaaggactctccgtgcaaaagtcgcctaagggtgcagccggattctccgtgcaaaagtcgcctacgggtgcagccagaccagcacaataagtgcccaaaatcgaagtcctctccaaaagactctctgcgcaaaaggcgcccacaggtgcagccggactagcacagtaagcgcgcaaaaccgaaagtatttcccaaaaggttccccgcgcacaagtcgtctacgggcacgatcggatcaggaagacacacagcctcatacaaatcacgggtacatacatacagcgagggcatcacacgttacattggctcaaccttagggatgatgcccatctccctgtagttgaacagcattatcctcagctcctcaccctcaaaaagattccgcaactccccctcacctacactcgtcccagtcggcaaggacaacaattctcgtttgccagccccgtccacacgaagatgacttccctccacctcactaaccctccgcttcgcgaccgcccttcgccgcctacgcccagcactcgcactaggaataacttcaacacccacaacgcgcggagaagcttccaccgcagccacatccagtgccacaaaataatccaagtcttcatccg

SEQ ID NO: 47871 - DNA, 602 bp, Zea Mays
atttggttgagcactattgctgattttgagctatgacttggtttttacgtctaggtagtggtgttgagcccttcttcttcctattcttaaggactagcttctcttgctttgctatgttgagccgttgcccatttctttggagaccaagctttgcttgctctaaatgatatatttttggtttttgtctgactttggtcattcgagtgagttctctttcctcattctctttctgctaatctttgagtccatatgatggtggtgttgacaatacattcatcaagggggagattgcaaacataaggttgacttgtcctttgtggttcgggttgatgatgagtgattctttgttaccaacaaccacacaacgtacaccgtcttgctaggaaggaacggtatccatgccaactactacatcccatcaacaatgcacctgattcagtgggacaaagacaaagtggaagtagtccctgcggatgactcatgcaaaattttactcgccgatatgaacgtgtgggatgcagatgaacaagagccaatatcaagaattgacttggaaggttgtgactgtgtagaagcatcagaaactaggcttaggctggtct

SEQ ID NO: 47872 - DNA, 472 bp, Zea Mays
ctgcatagtacacaccatgtcatgaaaaatgttagaataaaatgattgttctaatatcatattgtcaaagcattaagattcacatcattataagaaaaaaatgggaattactatgtagcctagaactggaactaagccaatacctaaattaccttgagccttaatcccaattaagacgtcttccaggagtcagatcatatgaacatcacataggctatagatattgcaataaacaaattcacggaactaaaaactgcagcagagtccacctagaggatattcatactcctgaagaacatgagaacaaattcgatgtgcaaaccttgtgacttcttctttgccaagtggaaggggcactggattgctctcgccgttgaactgtttcacacacctatgcacggattaattgttttcacggtggcagacgtaattgcaggcccctccccctccacgatgtcttcagatcaagaag

SEQ ID NO: 47873 - DNA, 425 bp, Zea Mays
aaaattctcgtgcaacccatcttctctagccttcgtctgatagtgaagctcgtgcacccgacagaaagcttcggcaagcgggttcactccttggcttcggagggtccatataaagacgctgagcctaacgatggtgttaggagtcagctgatgaagataaatttcaaaatctttcaaaacatccccaatcatttcatgcaaaggaaacctcaattctgctttaaagaaacttctgtaaactaccacctcatcattttctggcttcggagtaatttcttccccgccaaacgaatcagcttcttctcggcttccccgaagtagcctagctttattatcatgggcatatcagcttcggagacagtcgactttccaaagtccaagtggctgggtttggatggcataatggtgttataatctatttcttc

SEQ ID NO: 47874 - DNA, 795 bp, Zea Mays
ctttaaagccttgctcagaattaagccctacaaaaataaacgatgagcacatactgaaaaggaaataaactacaaaaataatctgctttttaacaagttaaaagtgttcccaccttcagattattataggcaaggctatctgcgagttggtccttcgtcattgcagacaaacctaactcaagcttcggatatcctatattgtctgccatctcccgacagacatgaatctctttattgtcaggtagataataaaggaagtcatcttcatcatccccaccatacaccaatgaccctcgagggtactacagatccctgacataatgttgcgcttcggcaatttgttctttcgataattttttccctgaagcatgacgcactataaattccaattccttagtagatgctccaggggcaggggattcagattcttcggtagccctctctttttctaacagtaatggcgctttcgcggcatccgaaggtcttgtttcagcaccctatccaacagcctccgaaggtcttgcttcggcgggagccgagggcccagcctcagctgcaacctgcgtcatgccagctttggcagatttctttgtattcttgccttccaagctaggtgcttcggcagaagcagtagttaacgcctttgtgaattccataacagcgtctaatatgctagccattcttcttgtcttcgaagttactgaagcaatttttgctatttttggtacctccgtctcttgaaacggactcgaaacatttaattgtttcgctgctatcttcagttttggctctttg

SEQ ID NO: 47875 - DNA, 359 bp, Zea Mays
cgcggatgagtcctatacatgtagaaggataagccgaactggttggggtgccttaccagggatttctacgacgataggttgaccggccacagtgcacggtagatccgcgacagaggttgaagtgcggtgagcaattgatgtcgccccgccagcggatccaccctgtcgcgcccatgaatgtctccttcacgctccgatgttgtccctcgccctgtccacgtgccccgagcggcgacacaggcgaattttctcccctggcagcgataccttatcctcctcacagcgtcggctctcgattcgtgcatgctagtgctctgatcacgtcgacggtggtgtgtgatggatgaggaaggtctccc

SEQ ID NO: 47876 - DNA, 811 bp, Zea Mays
aaacgaacaaggcctaatagtacggtgagttggtgatacttgacactttgactacagagacacgtagcattggtagcaacataagactatttccatcattttatacatccctatcccccatatttcagacttaactctacaagcattacagtctaacatactctttatttaacgatgattgttttaatggaaagtttagttcacatcatgatgtgatagagacaagtagcgacacaatcaattatcgtcgtgcaagggtaccattgtgaaatggtcaaaatatttgatacatgagtgagttaggctttcttgcacaaattaaattctaaacacaaggccaaactccactcaagtgattaatgacgtgataaagagttttgcactctagctaattttcaattccaaatgaaaaggcttcaattgaaccgcttcaatgtaaatatgtatagtaaacaaaggattatcggactcctctggagacttggcactctctgctaatccttgtttgatcgatccctcttggtccacgcaagaaccaaatattttctacgagctgctacttcaccgctccgacacgatgaaccgctcacaaccatatacaataccgagttgggtcacctacaaactcttcatgtgatcatcacacttttgatcgccatctagccaccattttaggtattaatgactaccaaagagtaacaagcattaaattctcatatgacctaactaattccaatgagggtggtggatgcaaatagttcactctatgtctaatgagatcgctagcggtgaaactaaatgttacacccca

SEQ ID NO: 47877 - DNA, 878 bp, Zea Mays
cctttcctttttgcatattcaattaatggaatcaaatgggtcaagtgaccaataaataaataaagaagtgtgcatctcatgctgatatttatgagggatgcatttaatctaaaagaaaaacctagttagaatttgaatccaagttatgaatttaaattctatttgaatccttgaaatatgaatttgaatggaaaaatagaagaaaagaaaagaaaaaggaaatgagagctaggcggatctgcaatttcagcccattgcgcctttctctccgcgcgacccatcttccctatacgctcgcgcctgctgacggatgggcctcactgatctgtgtgacatggcgtgcctgcgtgggagaactgagacactgtcgcgcggacccagcggaatagccaccgtgtgacgcatttgcttccacgtggggccgaggctctggggcacttcccatttacttgagacactaatttgtggacccatggctccagtaccgtcttctcatcgttgcgcaatgatctcaactgaaccaccgacattgccgacttgaccgggaccagttgggacccaccgtggccatcttgggtcggactcccttgctccttataaaggttgcccgaatcactgccacgtccttcaaccatctcggccaatctcgccatcaccgagctcacgctgagggtgaagagggccgccgctggcaaactccgtcggtcccgtcgatctggccctagtaactggtcggggaggatccgcggggcatatcaaaggtgtccggtgacaggcgtgggctcgtgctggtctgagtcgatgacaattgctcgatggagccaccctcggttgcgattccgccgcacggcatgggctagaatctccgtgacaggatt

SEQ ID NO: 47878 - DNA, 413 bp, Zea Mays
ttccggtagtgaaggggtgtgtaccatgtgcacagtacagtagggcgtaggctctatcaggcaaatctgctatacttgtaaagtatatggtgcgtttcatgttgttgcatagttaggataaccagagataggaactttgtactaatctgtgatcacgacaacaatttgaatggagcctttcttgcatgtgttggcccttctatgtaagccacatgagtggctattcctgatcctatattaacatgtatgttgcacgagacaaagtgcacgcttcaagtcctctgatattttttcatggtatcagaagtctacacttagatccaatccaatcagaccctcaccatgtcaacatcctattccaccgtagtcgtcaatcccctagtcggtcaaggggtctctgataagctgatgaa

SEQ ID NO: 47879 - DNA, 447 bp, Zea Mays
aaagctactgctttggccaccccggctgaacctgtgccgaaggctgcaggcaaaaagatgaaggtacttacccaccggccacgttatattgaaccggtcatggtgcctgagtttggcgggaagtcatcttcggctgctgaatcaagagaatctgctccgatgcagaaggctgaagaaccggctacaatgccgaaggcaccttcggttgagccagttgaaacgaaggttgacaaagataaggctaacaggtcaacaaccgaagaggtgaaaaagatgccagggattttaagtccttcgacagaagccacaacgctgaaggcacaaaagagttctgtcataactcctaggagaaggaagatggtaaatgtattagatgttttggaaacaaccgattccataggccctgctcccactgaaagggaattaggcttacacctagtccctaat

SEQ ID NO: 47880 - DNA, 380 bp, Zea Mays
gtggcacattaccaagacgcactggggctgaaccaagacaaagacacaccggtaccgaccgatacaaccaccgagaggtcaaggaaaaggacacagagcgaccggaaaagaggtgataggggactgaacaagtttcctgacaaaacatataaaatctcagatgtgagcccgaaaggtcagcccctagttccagaagaggcactccctaagttccggaatgcacttgggttcttagttagggataatcttgacatcacaatccgacattggaaagatgtttcagaagatgtcaagaatcaaatatggaataagctattaacgaggtttgttctacctcggggttcagaagaactcgtgaaggaatacacgatgaagcagct

SEQ ID NO: 47881 - DNA, 842 bp, Zea Mays
caaattcgaagcctcttgttagctctttacaagtgtgagaatgaaaatagaggcgagaaagaaaactcaaataaaaaatccaagcaataaagagcacaacaaaatcaatacacactcttcaatgttactctcaaggcacgaatcactagttcctcactttgcaaatgtggcacttggaggctattgattgttttttgtgtgacttggaatgaatgatcttgatcttgtaattattaagaattattgaagtgcttggaatgcttagatgcaattgaatgagatggttgaggggtatttatagccttcaaccacccttatagtcgttactgccttctgccacgagtggacagtccgtgctccctgaccgaatggtccgcccctgcaagatcaactacaagatcacaatggtcagttacaatggctatatcaacgactataagagcattaaatgtgtcaccagatgtcagataaaatgcattacaaacggtccacgctttgcgttaaaattcatttttctaaacttggcaccttcgatagatcaaactttgaataggcgaacggtccgtgaattatagccagacggtttgcacatggtgtcagacggtacttgactcggctccgaacaagtcgtagtacatcttttcaaattgacatagttcctgtccgaatttagtttttagtgccccggacggttcgtaccttctgaattttggagatgaccttcttgaagtatttttctgatggacctgtgatcatatgctcatcaaactagttagttcacatggtcgtggtggtcatcaagcaccaaaacaaatatagaaatggctttaaagacaatttcc

SEQ ID NO: 47882 - DNA, 642 bp, Zea Mays
ccgatcacatcaaaaattctattcagcctcctcttgtcgcgagcactaaaggcagttgtcatagcttcgtcttctgccttcaaaaaagctcccaacagctcgtcgctggtggcatcaacagcctcatgccaatcatcgttcagctcgtcaaattgacttctatagcgataggtgtatcttaggtaaaccagaccaacttcgctggagccggtaacagtttccttcgacatttcccagtcattcaccagtggccacactttgtaagcaatatgctcttgtaccaaatccctggtaccaatataggtgcacatagtgttaaaagccatcaaacatgcttgcacttcgtttccaattgcattggacggccttttgatgccgaagcatgactgtacgggacgttggataataccttccacatcttccctctcactcaggtcattcttcaaatagaaccattgtttcatccgagaacccgaccacttcttttggaatgttggcacgaggaatcttgcatccgaacggggcacaaagctatagcacccgaagttgttgtggtattattccttcccaaatgcttttgtcttgtaagataattcatgaatattgcagaagcatttggcatctggctccagccctgacttc

SEQ ID NO: 47883 - DNA, 582 bp, Zea Mays
tgagaatatggatgcgaagttgaattttagtccggcctaccatcctcagactgatggacagaatgaagggactaattaggtgttggaagacatgttgagagcttgtgccctttagcatggtagtagtgggacaagagtctaccttatgctgagttctcatataataatagttaccaggccagtctgaagatgtcactgttcgagactctatatggcaggaaatgtaggattcctctacattggatcagactggaggaagacatttttttggatctgaacttattcaagaggtagaataacaagtctgtataattagggagaacttgagggtagctcagaccaggcaaaagagctacgctgataatagaagaagaccactggagtttgaggagggtgatcatgtgcacctcaaggtgacaccacttcgtggaatgaggagattcaaagttaagggcaaattgttccctcactttattggaccatccagagtttttaggcgagttggagagatggcctatcaactcgagctacctgataatctatttgatgtgtataacgtattccatgtgtcttaacttaaga

SEQ ID NO: 47884 - DNA, 291 bp, Zea Mays
accatttaggcttcctatatatagtaattaatagcataaaaccgtacgtatgttttcgaaaatcgtatttgacatgtctcacgattcgtctagccatataatatatccatcgccctcaaagtatgctttccacccttgttcatagaacttctcttctttattaacttctcctaaaaatttttagaagcccataaatgacaaagggtccgataagcaaacgaacaatcttccaaccacagaagttggacatacacatatgttaatgtatcaaaaaataagagtaatatattt

SEQ ID NO: 47885 - DNA, 388 bp, Zea Mays
ggacaatcgattcctcttcatctccctctcgttgcgtcgtctcctgttgcgatgtggatcgtcgatgcgaatggaatgcggtgtgtggtgtaattctggtggtttttgtgacctacgagtcatctccttaattccaatctggtatttattagtatgggtgaattgtcatggatttgtgatactccactgttctggggaatgcatatgtttttcagattgttaatataactctgcttcctgtgagaatacaggatatgtttttcatgtcatggcccatgggctctgaaaacttatgttagactttgccccggtttctaattgcaggcagtgagtggtatgagtggttgctttcaaattgcctgatgcacaatccctgcatgaggggcct

SEQ ID NO: 47886 - DNA, 720 bp, Zea Mays
aaagttttccttatgctgagttctcatataataatagttatcaggccagtctgaagatgtcaccttttgaagctttatacgggagaaagtgcagaactcctttgtattgggatcagactagagaaagatagttctttggggcctgaactgattcaagaagcagaagaacaagttcgtctaattcgagagaatttgatggtagctcaaaccaggcaaaagagctatgctgataatagaagaagaccgctggaatttgaggaaggagattatgtgtacctcaaggtgtcaccacttcgtggaatgaggagattcaaagttaagggcaaattgttctctcgctacattggattattctgagtttttaggcaagttggagagatggcctattaactcgagctacctgataatctatctgatgtgcataatgtatttcatgtgtctcaacttaagaagtgtccccgtgtccctcaggaacagttaccaatggaagaccttagtgttcaagatgatctaacttatgctgagtaccctatcaagattttggacactttgactcgagttacaagaaataaggtgataaagatgtgtaaggtacaatggagtcaccacggagaagatgaagcaacttgggaaagagaagaagagcttcgcatagattttccccaccttttctctagttcttcttaaatctcgaggacgagattatttttaaggggggta

SEQ ID NO: 47887 - DNA, 366 bp, Zea Mays
ccaaacgaaagaacatcttaagggttgggatgttgtgtataaggtatcaccgcatggtaaattacctgttccaaacgatgaagattataacttagacccggacacatatgacagagagttcttccaagaagatgggctagaagggcgatttgagatagacttaaccgaagcaatcggaatggaagtagatattgaaatggttgttgatgaggaggatgatgaggtgcaaaatgagaatgacttagaaatgcttgaaggcaatggcaatgacgaacttgcgccttcatatggtgttaactatgaaatggttgatagtgttgatgacacttatgatccggctatcccggacacatatgaagattattt

SEQ ID NO: 47888 - DNA, 340 bp, Zea Mays
acaatattcatcaattctagcatttttgaatttcgatccattatcacttctaactttcttgatatcaaaatcaaattggttttgagccaatatagcaaatgacttgaatgtttgaaacacattagatttatcccgtagaaaataaacccaagtgaatctagaataatcatccatgatcacaaggcaataggaattaccgccaatactcacaaaagatgttggtccaaataaatccatgtgaagtaattccaaaggccgatgagtagacatttgactcttatttggatgagtatttgccacttgcttgccggcttgacaagagctacacaatttgttcttc

SEQ ID NO: 47889 - DNA, 607 bp, Zea Mays
gaaaaatgagcactcgttgcttgtcgagataatctagacatgctatatcgtgatgccagcacctccttgaccattctggagaggaccatcgctttaccatgtctgatttggaccatcatcgcgacgagctcgggcatctcaggatgaagtctcccgactcggcaaactgttgtccaccaaagattccgccatcaaggagctgcgcgcctccaagaagcttgtcatgctggagttggaggctgcccgcctcactatcaacgccttagaggatgaccacatcatcatgaaggcaatgtgcgacaaggccatggataaggctgttcgcgctgggcgaatcctgatgaggagacccggcgtcatggtgcatgaagacattgtcgccgatgtcgtggccgctcctgatgccgcaagccgtccatcttcttctgttgctcctgcaaacgatgcttcctgcaagaatactccagcgcaatgatttgcctgaaaaacacttgtttattgagttagcatcttttagagaaaaagtgtaatgtgagttctgtatgtgtgcaacagttatgtttgaactgattgtccagtcggcagcatgctgaaaaacatccttgac

SEQ ID NO: 47890 - DNA, 758 bp, Zea Mays
gaaagccctagccacccaacctccgaccagtcgtccaggtcaagtgggcgacccagtcagattacacattgcgttgacggttatttacataggtagttatgcatattgaatttatcgtaaacaaataggaaaggaacacgaatcggcccacctagtcagatagtccccaccccatgtctcgctccccagcaaccgactgcacgattgagccaaccctaatttaatccccacgaccgtcgccgcctgctcccactatcaccgtcgtctgctcccataatgttcgtcaccagtgagtgcccccctccccacgcgccagtctacgtaacttaccttcaccttcgccaaactccgagcgcggctacattgcatccacgacgctagatccgtctttgtaactggttcgtccaactacctcgttttctgttcaagttatcttcaatcttgtgcataatccagcaatggttttgtaactattccccgttttgaccgtatagcatccccaactccgggctcatatcctcgcccccatatggttagtaacaccatcaatttatttggtctcgtttttttacaatctcgcataattcaacatcctttcgtttaaatcaatatccacatactatactagtttctggggtaccgcctcatcggcaataagaagcatcgatttgccaattgtacttattcgtattctgaaaatagaggtaatttgtaccttttttgtgccatggttgtttaatagttgatttatgaattgc

SEQ ID NO: 47891 - DNA, 319 bp, Zea Mays
ctgctccggtattggctcaaccggacattgaaaagtcgtttgatgtgtattgtgacgcatcaggtagtggcctcggatgtgtcttaatgcaagagggccgagttatagcctatgcttcaagacagttgcgtcggcatgaggaacattatccaactcatgacttagaattagctgctgtggttcatgcccttaaaatatggcgtcattatatgctggaaaatatctgccatatatatacagatcataaaagcttaaagtacttttttacctagttagaattaaatatgaggcagaggagatggcttgagctgattaagga

SEQ ID NO: 47892 - DNA, 621 bp, Zea Mays
gtgagcgtctgggtcgcctggtcatctcgtatactttatggtggatggtgcgggcagcgtggggcctaggcgccattatttgagctgcgccaacccctggccttcatagcctgggtctccgcacaacttgtatcattgtgccctgcaggtggtctacgcaatcatgcctagccttgatagatcatgaatgcaccgcaggccgaggggcacgtgggccataaatgcaccacaatcctaggggattgtaggtcatgagtgcgctgcagtccgaggggttcataagtaatgagtacgctgcagcccaaggggcttgtaggtcatgagtgggaggtggactgatgcctctaccacggctcggcgccaagcatagttaatgcggccagtcacttacaatgggtcagtatcgggccaggcgagggatccactcgagtggtttcccttcaattcgcctgccacctgtctagctccgccatgcccgaccctaggctcggtgcctcgaggtttgttcgggggcaggtgcttctagggcagacgtttccttcctcctcgtactgaccgatgagctttggttgccaaaggtatcttcccagctcccttgttgaccgatgccccccagaacag

SEQ ID NO: 47893 - DNA, 321 bp, Zea Mays
cagaatagtgtccttaagaccttatcggcttaacctgagacaataactaccttttcatatcttacatcatatacttagcattcaagtaagtcttagattcctattgtgatgttaatgatcttgtgtgagcatgcttttgatgtccagaaatccaatagcaaagatggcagatgttgacggaagatcattcagtctttgccagtacgagtattaaatttgcttgtttcagtatcgcaagcaagaaaacagcttaattattttatctccttaactatctgtcactgtgcagctagttctacaattgaagctatcgactttgtc

SEQ ID NO: 47894 - DNA, 607 bp, Zea Mays
gatttggggataaggctgagagaggaggcggcgttgcgctatagaaggaaacaataggagaacatacgaaggagataagagagcagagaacaacggtgagatacttccagagaaaacacgtgtattctagataaggaagagtaaaaaatagacacgtaaaagataaaagttaactttccctctccatatttttatcaaattagtataaacatatatctaacttaggcccgggttttggacgagaaacaatcagaacaaactggaacgatgtcaacaacggtattttagactgcgttcgattcgatatgaaatcaaataatttcatatgtgggctgaacacctgattccatggctatagacaatttactggagaaacagatctcatttataaatcctcggacgtgacgtttcgattaacgagaggtgactaaattattttacacctaaaaacttgagtcatcgagttctatttaatttagttgagcctagacaatttcaccgctatccgaacatctatctagaaaacagctcaatttataactctatgcctgatttttcttggatacggattgtgatcgaatttataaaatcgaattctcatattcgc

SEQ ID NO: 47895 - DNA, 452 bp, Zea Mays
atttaggtttttatagccatttgaaagcaggagatggattgggtcacttcccatcatatgtttgtaaggtttctgggagaggaactatcggtttaaggagtacacgtccacccgtcatggcgatcagtacgtgatttgttgcctctgcaaagcagcatcaaggagttgatactgctggaacgcctccgtgtagataatggtacatatagaaggtgtactcaagcattttcgccccggatgctaattttctgtaatgttaattttctgtcacaattaatcataacccgaagttgttacatacagtacctctttttcttttagttgacaattaatcattgtggatctcccttcaccaactagcgcgttctatggaacatgcatggagctagccatggaggcttcttttgagtcccggcctgcgtgaaactcattattcaagtgaccattgcaac

SEQ ID NO: 47896 - DNA, 330 bp, Zea Mays
tgtcttctttaagcacttcttcagagcggggcttcggttcccgctaaatgacatgatatgggacgttctaaagaactttgaaatataccttcatcagctgacccccaatgctattgttagacttagtgtctacatatgggctctccgaagcctgggaatggatgcgaatgccgaagctttctgccgggtgcacgaacttcactaccagacaaaggctagagcagatggccttcataggaactttggctgctacaattttgcgtatcggaaggatacgaaggcctcggttattggctatcgtaccaagtggacgaatggatggactaatga

SEQ ID NO: 47897 - DNA, 749 bp, Zea Mays
cgtgcgctcagattcacgccggtcgccgtgattcgtgccgcatggaagtagattgcgctcggccgtgaaaagatcacgtcgcggatgagtttgggctactgtggcctcgctgttcctcgaccacttgcaccggtgacgtggccttgcggtcgtcaccggagtttgtgcccttcaccgcgattgtgccacacctcaggccattaaccacgtcgtcgtgagttgtgatcgttacccagagactgttgtggcttcttatcccacaattgccacgaatcactgcgctagtaacctctcccctctccggccaccaccgcaccatctccaattcacaagccaccgcccccagagcctataaatggagtgtgccgtcggctccgcaaggtagtcaagcaaccaatacaccaactcgtgcctcgaaatatccaccagagaacttcaatttaggatttcccccaaatcaaccaagaacaccgtgcagtgtgagctcaccgtggctagctcattgcaggtccgttcatcgcttccctgttctcgttttagcatctctatgtactatagatgcctagcagcctggtcaattgaactaaattaggctagatcaccgggaacaccacggattgtcctcggtttgcgccgtcgccgtggacagagcgatttaggggtagaactctgcaattgaaggtagggaaatggtgaatatgggtcaaatttggtgtcaaccgctcgggagcactgatagttgagttatc

SEQ ID NO: 47898 - DNA, 540 bp, Zea Mays
tctttaattagccggagttaagataatttactttcaccgaaggacttgccaaaaaaaacaggcaaatcgcattcgcatcttactcgtgtcacgtcaaaataaagaaaatgtttagactgattttttttcattaatatagctccacgcgcttatgtaagcattgtgttaaaccagagagaactcgagacgagatttccagttgtgcaaaacatctcggggaaaaaatatctatcatgccctttgccgccgtgaagtaataccgaggaatcagagatgttaacacgtaattcataactagtacaatgttcatgcgttgcgacaacgtacaatcaatcatgtttgacgagtgactcaagtaactttcacttgcatacaagagtcgcggaggacaacatgatggtggagccacagataaaggtcgtgtcgacgatcctgtcgaagcccttgtcgacgcggatttgtaacttcatgactacagaagcacaagtgtcgacatgatagcatcagcgacaataaaatggtttccaagatttggtttgc

SEQ ID NO: 47899 - DNA, 426 bp, Zea Mays
aaaagatgggggaagtctatgtgaagctcttcttctctttcccaagtagcttcatcttcaccatggtgactccattgtaccttgcacatcttgatcaccttatttcttgtaagtcgagtcaaagtgtccagaatcttgatagggtactcagcataagtcagatcatcttgcacactgaggtcctccagtggtagctgctcctcaggtaccctgaggcacttctttagcttgagacacatgaaatacatcatgtacatctgacagatgattgggtaactccaattgatatgcaacttctcccactcgctttaagatcaagaagggtccgatgaagcgaggggacaactttcctttgactttaaatctcctcataccacgaagtggtgataccttcaaatacacgtgatcaccctccttaaactccag

SEQ ID NO: 47900 - DNA, 1127 bp, Zea Mays
gtgagaagttaccacaacattcattgctattgcactgttgtgttgttgaaaattttaaccaaaattgaagctctctgcattgcgctttcaatcaagtgcttcggcacgtaagatcaactttgtttaaaagaagctgaaccctaaaatggccagagtaagatccactgctagggtgtcccgtgagggagatgagactgaagtatccgagacagctcccatatcagaagtgatgaggcggtcaggtctggttgtgcaagagggagctactgccgaaggtacctccaatgctgaagctgaacaagtttgtggccgaaattgggagtgataatgaatgtgaagaggatgatagtattctgtccccaaccaaacctagtcatattgaatttggaaaaaccatagtaaaagcagaggatctggttgtgatgaagaagctaggttattttggagaaaatgaagatggactgattcgctttgctggagaagaagtgattctagagccgaaggaagatgaggttgttgtgttcaagagcttcttcaaggtggggcttcggttccccctctacaatatgataggggaagttttaaagaaatttgagatatatctccatcagttgtccccgaacgctatcgtcgggcttagcgtttacatctgggctctccgaagccagggaaagagtgctaacgctgaagggttttgctgggttcatgaaattcattatcagacaaaggccagggttgatggtctgcataaaaatttcggatgctacaatttttcataccgaaaggatacgaagacccccgtgatcggctatcgaaccaagtggcccactggctggacaagtgaatggttttacatgaaggctgatgagaagaagatggagaagctcatgagcatggtaatgagtcccttgaagctgaactttggcatgactcgacccttgtgcaatatgcaactagagtctccttgccaactatccaaagtggagtttagggtcgtgtctgagaacattagcactagggacttagtgcaagaatatttagcaaacagaacattcccaacttctagcagatggggaatgtcgaagaagaaagaagaagggaataaatatgagcttgtttgtctaccg

SEQ ID NO: 47901 - DNA, 1156 bp, Zea Mays
ttcacatgctctactatagcattctggtcccatatctttgatagtgataatgtgcgcagaaatatgcggattagaagtagatgtatgtgtttcaaagcagaatcaatatggtacagttttacctttattattgtttatctgaagttctgaactaagttacttattagtactccctggtccgaaaaggaatgcaattctaggtttggaccaagtttacataaaataacattaacatatgtcttcaaataggtttactgtgaaaaatattccataattaattgaataatatttatttggcatcataaatcaatacttctttgtgtagattttgtaaaatttgaaatcatttgactccccaccaagcaagaattgtattctttttgggatggaaggagtagctgttttcagttcatgctatcttattgagtttaagtacgctgttagatctattaattaacaatttcattagccaaattgtcaagatcccattaacaaaggtatgccatttgagtttgatggtatgtttgatcctttaccttctattgccttcgcaacataaattgcaacttttttggtacatatgatgttgcatacttccagtttccattggtttgaccttgacacgaaatagcaacttcccaattttctgcccccctttctctgaacacaatattaacgcagtggttggctttcatttagtcagttctactcccaagacgacttctagagcgccaagttgatgcttatgttctccgaatgggactaaatatctatgggtttcatcttcctgataatgaaagaggaagtgccttcttttctagggatgatttcagtggagaacaaactaaagaagagaacaagtatatggcattgtgctccacctggagaaccaaggaaaggcagaagcagaaaggacaagcaaccaaacgaatagtgttactgactagtgtgacaagccactgaaaaagaatcagatccatcagtacgtttgatggagatgttccttagattatacacaccgttgaaattttttcactaattgtttaaccacagatccctcattcattcatatgcgcggcaggattcaagctggtagaatctccgacgcagctgctccattagctgtgcccgtctcagtggctacatggtgtcgaag

SEQ ID NO: 47902 - DNA, 396 bp, Zea Mays
gaaaattcaaacccaaatcctgtaacaccccaggtgttaccaaggtgttgacttcctaatggcacatctacctattgtcacatgtgggtaaaacttggaggagaggaagcacttaagaccttggaagcttgagtgagttaagaaatgccaagaaccaaagcattacccaagcttttaggtaatatcaccttgggcaaggtaggattgaaccttgggccccctctcttgaagcctttagttgagagaaagattaggcaaatgcacattccatgatttaaacccttaaccaaagtttaagagtacccaaaaggtttacaaaagacagcaaaggaaccttacaaaaagacccctaaaagaccactaaatcagtcccaagtggagaacactatggaatca

SEQ ID NO: 47903 - DNA, 691 bp, Zea Mays
cgcattgcgggtgatctggaggaaaaataggaactcgcgctcgtcgccttcctccaggcaaatgccgacgtgttcgcatgggagccatcgcagatgcctaggatccccaaggaggtgatcgagcaccatctgaagatccaccctgacgccaaaccggtgagtcagaagcctcggagacagtctgttgagcggcaagacttcatctgaaaggaggtctggaagctgctggacgtcagcttcatcgaagaggttcatcacccagtgtggctggccaacccagtcatcatccccaaggcgaatgggaagctttggatgtgcatcgactacaccagccttaataaagcttgtcccaaggacccgtatccacttccacgtatagatcaaatcgtggattctacctccgggtgcgacctcttgtccttcttagatgcttactctggtttccatcaaatcttgatgtctagggaagataggaagcataccgcttttgtaacagtggatgggctttactgctatgtcgtaatgccttacattctgaaaaatgccttgccgacatttgtgtgagcgatgaataagactttcggggatctgattagggacagagtagaggtatacgtcgatgacatcgtggtcaagactaagagatggtcgaccctagtggaagacttagccctggtcttcgacaagctgc

SEQ ID NO: 47904 - DNA, 532 bp, Zea Mays
aaataagagttcaaggtccaagcgttgtccaagaaagcagaaacctggttcagatcagcttggctctaggtatacctctcctcagcatcggagcaccgctgaatcagagctggtgaagcagcaggaaaagaatacaagatgtgaaacgagagaagcaataaacaacaagaaggaaaccatagacccactaaccaaagtttgaggccttcagatcatctatttgcctctgaagcagtagaggattctactgcatcaaagacaaaacttggtcggggacaggagcaccacaagatctcaacttggcagatacagagttgaaaacattctgcaagctcaaaagttggcaagagaacctgtttgtcaacacatataataaaaggcaaagattggctcacctagaggatagaaagaaataaaggaagtccctgagctggaagcatcgaggcactgtctgtcgatggagcattgataaggacaatgttgagagcatcactcggggagaccttagctccaacaacaggcgacggattcc

SEQ ID NO: 47905 - DNA, 413 bp, Zea Mays
ggagttaccacaacattcattgacactgcactgttgtgctgtcaaaaattttaaccaaagccgaagcttttcggtttgctctttctagacacactcttcgtcattcgaagtcagcttcgttttaaggaactgcgatacttaagatggctagagtaaggtccactgctagggtgtcccatgagggagatgatgctgaaacgataaagatggcgccaatatcaaaaatgatgaggcgatcgggcttagtagtgctggaagaggctgctgccgaaggtgacattgctgaagctgagcaaactatagctgaggacgggagtgatgatgagtttgaggaagacaatagtattttgagcccgtcgaaaccgagccacattgaatttggaaagtctaccatgtcagcggaggacctggtt

SEQ ID NO: 47906 - DNA, 605 bp, Zea Mays
tgaaatcaatagctgaattaggagagcgattaatcaaatagcaggcggcagagacaacttccacccacaaaacatgcttattccacaaacgaacattagaaagcatgcaacgaacacactccagaatagtaaggagcttgaccccaaagatcagaatgaatataatcaagaatacctttagtgcagtgagtggataaagaaaaatcgtctttcttctgtttgcaaaatacaaaatgttcacaaaattccaatttaccaataccatttaaataacctctattatgcaagagatgcatacctttttcagtcatatgtctcaagcgcatatgtcaaagcttggtatttgaaatgttggatgcaatagaaatagttgcagtatttgtaactgtggaaccttgcagtatttaaacaatacggttgccttgagaaaccttaagaacaccattatcaacaaaaaaattaaattcgattgcttctaaggtgctcaaagaagtaagattcctcttcatcttagaaacatagcgaacattagtaagggtcttgaatgtgccataacgaactttaatttgaatacaaccaattctagaaatttcaagtggagattc

SEQ ID NO: 47907 - DNA, 411 bp, Zea Mays
caacgactaggtggcgagaagacaaaagaaccaagtgtcttggagtttatctactctccatcgcaatagatagaggagacacctcaatcatagcgaattaattgctaatgtttctagggtccaatatcaggaagtggttgtttggcctcctagccaactctgttgattcatgggaggagctaaagcgtttatttgtcaataacttccgcatgacctatgaacatgagaaaacacaatatgatctcaaacaagtcatgtagaaggagatgaaactctatgcaactatattaagagatggcgcaacatgaaggttgacatgtcaagcatgtttaaggagactatcatctacgtgttccacaagggtatcagggattgagatctctcctagaatctcatttgtaaggatccaac

SEQ ID NO: 47908 - DNA, 376 bp, Zea Mays
tgcactggcaagaaatgagctgtcttagtcaacctatccacaatgacccaaatggaatcgtggtgccgggaggtattgggcaatcctacaataaaatccatgcaaatatcctcccatttccaagatggtatgggaaggggctgtaaggtgcctgctaccttcaaatgactggccttgactctttggcaagtgtcgcattcagatatatacttagcaatttccctcttcattctggtccaccagtacaaggatctgagatcatgatacatcatgttaccgccggggtgtatggagaatttggaaaggtgagcttcatccaatatcttcttttctgagctcggggttcttaggaacaaccaatcggtctccaaaccat

SEQ ID NO: 47909 - DNA, 535 bp, Zea Mays
atctgacactatggatttgggagccctacgcaacctaaccacagtatccatccttgtgcagtaaatggatgcttgagagaaataaaatgggcatatttagaaaacatgtccacaatcaccgaaaatgtgtcaaacccttctgacttagggtggccctccacaaaatccatagaaacatcctcacatgcaccttgaggaattggcaagggttgtaataaacctgttggatgcaccctttcacttttggcttgttgacaagtctgacattgtccaacaaactaagtcgcatcaattttaagtcccttccactaaaacaccttcttcactcgttgataagtaccatgcaccctgaatgccctccaactgcactatcatgaactgatgaaatcaatttagttcttaaagttgagttggcaccaatccaaattctaccatccttcctaatcacacttttgttgcagactaaaaccattctcattagggacctgaatcactaactgtgtctttaatacttgagcttcaacatcaatctcat

SEQ ID NO: 47910 - DNA, 784 bp, Zea Mays
agaccaactcgtccgtgaacaaacaacataacctacctcacaggctacttagtccatttgtcctaaaagcaaagtaaaacttcattcaaacctacctacctcgtgtgccccggctatcctaactatatatccttagccatatgtccttaactcggatgacaactccaagaataaaggccaaagaagaccaaccacatcaaaggaggataagcatcaactcaagtcttcaaagatcaagttagatcgccagagaaaccaggatccacagttctggatgaagtctgtccttattataccattgccataatcgtgcctcatgtgacataatagatggatagacatacaatatccatatattccaaatcgtctactaactcttatgaaaaaaaagttgaacaaaactttgatttccaaaacccaatgagaaactaaaattctaaaccaaacctattgtatcccttttcttacaaatctcggggacgagatttctgttaagggggtaggatttgtaacatcctaatttccgaacaaaaaaattattaaattcatcaaaacctattagagttctttagaaatttaagatttgaaagtgtcctcaattaaaattatgaaataaaacttagttgctaaagttaaataaacaatgaatattcattccgaacatgcacttaaacaataatatagaagtaatgtatatggtgggattactgatcatttaattcctatttgtgcatacttttctaagtagaagtggctatgaataatttttatttttgtcttaata

SEQ ID NO: 47911 - DNA, 881 bp, Zea Mays
aaagaattgagtatgacaataagatacttcatttccaacttcaaagttaacttctatacctttatactattgtacgtgaggctatcagcaagatcatccttcgacataaccgaaaggccttcctcaagcttcggaaatcccatacttttagctatctcccggcaaacgggtatttctttgttgtctaggagacagtataggaaatcatcctcgttagtgccattaaatactaaggctcctttcggatatttcagtctttgggcataatgtctggcttccaggatttcttcttcggataattttccccgaagcatgtcgaaaaatgtaatcaatatcttcaactagggcttcgaggacaggagattttgttttttctgccatgtcttgccctgctgccatgctggtatctgaagtttgttgatcagctttatcttcaggggcgatagcctttctctcaataggcgctgaaggcccagctttgtcttcggcttgggctttggcagcttcagcagttttcttagtaggaccagggctcaaggcctttgtagtctccaagacagcgtccagcacgttggccatcctcctcctcttgggagttgcgacaggagccttttgcaccttcagcaattttgcctctgctggtgggctcataatttctggcattttcattgtttttccacctgtggctcttcggccttatcatccttagcttcggctgggccgactgtaggcaccttcggcactacaatcggctcttcagcgctctgcacaatcggaacagcttgttttgtttcggcagttgaagaggtcccttcgccaaattcaggcactacggccgattcaatatatcgcggccggtgggtcagaaccttcactttttt

SEQ ID NO: 47912 - DNA, 543 bp, Zea Mays
gctggatggaatgcagtggagattggagaacaacgcttgcatgcacgccattagagagacgtactcggaggttgcatcaaatgctcgttgctttgtctttgcgcgtgcgtgtgtgtttgccattcaattggaggtgtacttgcctgctgcagtgccttaagatttagactgtacttggctgtagttgcatcccattactgccatgcatggaggagggagtgtcattttccagacctgattgattccattaatggaggcctggagctccatgtcagtctggtccgagacgggcggccggccggtcacgtactcacatggctgctgtcgcatgctttactcgcctctatcactctaccttccagaagctaaaggattttacaaggatttcgtttcatcaaatcgtgaggcccatgctgcaagagaggaggcccatgctgcaagagatgaggcggttgagaggcagataaggatgtaacggctgcgctccaagaaaattgcaatccatgaaagaggaagaaaaaaaaacggataatgagaaacgtg

SEQ ID NO: 47913 - DNA, 511 bp, Zea Mays
attttcagtcctttatagttctctctaaaatattttatcctctacatttttaacatctctagcagcgtcctctaaattacatcctctatatcaacagaatcaatgttttgggccataaatgggtcgttgtgggtttgctcgtcgttgacctaccatatttcttctcaccaaatagtaggtagccccagtcttggatcatatcctcctctgcacatggtcgtcgaacccttccctaatctgcgcccatggctagcaacgcccctcccggattcgtgtctgctctgttcttgccccatcctagatgtgaatcgcgtggccatcatcactcagtcctagctctgagcccgtggccagcgtcgcctccatcgagctcaacattcttcaccggatgtggttgcgtcgtgtgatggaggtcgacatcaccgtgcttggagacgtcacgggcaatgccacctccatttctgcactcgatctccgactcccaagtatctgctcgatctcctctctttcc

SEQ ID NO: 47914 - DNA, 402 bp, Zea Mays
cttccaagctagccctgggattagaagagttaaaatcccctcttctcctaaactagcactaagtggtgctagggtttggaaggcagaccagtggtgtttttgaggtcggtttggaaggcgaatccagcggtgttgttgaggtcgatgcgcacgaacatggtggcggcgttagggttttgttatggggcttgggatcgaatcaatctgaatggaatggaggcggggatggaagggaatggggacgtcacgtggtgcccacactgcaccctactatcgctgccctgctgctctccgtagtccactcctgtccaagaactggttgtcaaatattgtagctcctcagcttatccattctcatcccatccaatctacaaacattgcaaagcttatccattctcaccc

SEQ ID NO: 47915 - DNA, 651 bp, Zea Mays
tttgatggggtatgtcatatcctccattggacgtaatcttctagtactccttgtagttccaagaacatgctcgtccatcatttatgatcttgaccggattgtggaggagagttgcatcctgcaggtgtttgaagcctcactgtaatgtacatccccgaggatcgtatgagtagttccatagagtcctctcatttgtccttgtcttatattgttcgttatggcctgtaggtcctcgtttgtagttccaagggtgaggcatttgggcagtaaagggcatgtgtctaatgatcagagggttataaatgtggtgtcccttgctgagagattatgcttcttctaagttgttccgtcctattaggggtgtatggtctaaattgacttgttcagtacctagggttgggaccaagcgaccgaggtgactcaattcgatgtctttagggttatgtttgacccaatcaggggtttgggctagaaacacttaagataggtctatcccggtcgaggttacctggtcgtatctacggtggcaaagattggcttggtctgcttttcgttggggagttagcttggatccatcaaggttgggtcctactcggttgggctcatcttggtcaaggagttaggtcagggttgatcttgttcagggactat

SEQ ID NO: 47916 - DNA, 381 bp, Zea Mays
aactggccgagcacaaactaaaggtctatccccgggcaaggccgacacgacaaaagttgcgtcgtttcacgcctgacaagagagaagttattcgcgccgagctagctcgcttagtcgcagcagggttcattagagaagtactgcatcctgagtggttagcaaatcctgttcttctgctcaaaaagagtaaagtggattggcgcatgtgcgtcgactatacagatctcaacaaacactgtccgaaggatcccttcggacttcctagaatagatcaggtggtagattcgaccgctggatgttctatgttgtccttcctggactgctactctggataccatcaaatcagcctggcaaaagaagatgaggaaaaaactgcattca

SEQ ID NO: 47917 - DNA, 385 bp, Zea Mays
tgcataaatgccaaattcatatattagagaaaatcacaaatatcataggaacacctagtacacatgaacaataaatcacagtcacccactatcagggcttgctaaaataaaaagctattatgatcagcaggaccacaagtagtttaatgagctaaattgttagctgaaaagcgaacaaatgagtactgtgttctaatagcctagaaccaataggttgtaaacagagctcacagtatatacagaagattaatgattatgttcatggattggaccaaaaataaaaagcaatgtttgataggccaccacatagttaacgcttgtaccatgactccaaccaaaccccattgactgaactggaggcgaggttaacctcgctcttaaaaga

SEQ ID NO: 47918 - DNA, 307 bp, Zea Mays
ccataactaaatgtctgagccagtcccattgacacaaatctcctttcaacatcgcatacatcggtttgtgatgtgtaggcagtccaaagatttttggtgtgtacttgtgcaggcaatgtagtatgtagtgtgaaagcagcaaagaagctcaactcgtctagaaaggtattgcttgttctcccccatctgcgacgcccgcatgttccacccacatgatgcgccaaacccctcccacccgccggtgacctcccccatccaccatggtcccgacgctcctcctggccagcagcaatggtgacgggcccac

SEQ ID NO: 47919 - DNA, 504 bp, Zea Mays
atcaactcatttaagtgctaacaaacacacattctaatggagattactaaaattcattgatgtcacaagacaccacaaaagggcctggatctgcccctagtgttgagttttgccagcggcctgcgcactcaagcctagtcccgataggtcatgagtgtgtcgctggctgggggatgcataggtgctctgtggtctgaggtatttgtaggttatgtgtgggaggtagatcggtgcctgcgctatggctcggcgctaggcgccattaatacgaccagtcgttgatgacgggtcattatagctaggtgtgggtcagtctagctagggttttagggtttgtctaatcaatcatgtcttgtccctctcgtcctcatgtgcttttcctaagtagaggatctccgacagggggagtatatcttcgtctatgacaaagtgtagaatactctttcaaagggggagaacactcttttagggggagtaatcttttagaactacaagtggtaaatt

SEQ ID NO: 47920 - DNA, 470 bp, Zea Mays
gttgtctccctgggtggtgttgggaggatttgaaggaaaaaggaggggagcagtggagtgtgtgagagaaggaaggagaaggagcgcagtgaccgagttggcctttatcccaatggcaagtaggcccacatgctgtgcgcctgcttgggcccagatgtcagtgtccttgcctggcccaccaccatgagatgagagacagagacaaggtgtgccgggtttggcctcgtacgtaccggacatggggggacgacgagtcgtcaaccaaaccaactagccgttgaagattggtcaaggaaatattaagctcctatggtaaattactgttgtaatattactaggcagtaatatgttaaattcaggcaatctccagcggacagtttaaaggatctgttttacattgtatattgtattatttgcaaagtgaagattgaaatagtggttgagatagtgagtggaacatgaggtatgtt

SEQ ID NO: 47921 - DNA, 427 bp, Zea Mays
gttttttcagagtaggactctgacttcctctgaatgagatgataggggaagtcttgaaaatttttgaaatatatcttcatcagctgacccctcacgccattgttaggctcagtatttttatctgggccctccgaagccaagggatgagcccagatgccgaagcattctgccgagtgcacgagttgcactaccagacgaaggccagggcagacgatctacatgaaatatttggctgctacaattttgcgtatcgcaaggatacgaaggctctagttcttagctaccgcaccaaatggccaaccggttggaaaggtgaatggttttatatcaaggccgatgagtacaagagggggaaactgatgacgatggtcatgtgtctgctgactttaagcttcggaatgaccagacccctgtgcaacatgcagat

SEQ ID NO: 47922 - DNA, 807 bp, Zea Mays
atcaattgcacaaatccagcccgaagtccctctgtccacgacgacgacgagaaccgagggcaacccgaggtgttcacggcgatctagcgtggtctagttcaattggttgggcccacaagcatccctagcgtgcaagggtgctaaaacgagggtaaggagggcaagagcggacctggagacggcggtccgcggcgcggtgactcacggcggtgaggagaaccgaattgggggaaatcccaaattgaggcgctatagtggatgatcggagacgagagctggtgttctggcttcgtaacaacctaacggagcaggctggggcatcaatttatagggtccatgaatggtggctccgaatttgaggagagaagcttgtggccgaggagaggggatgagtcaatgtggcgatctaccgtggaattcactggacaaaggcgtacgactatcactggttaacctccatggctcaaagtgacttggtaaaatatcataaggcgtggcacgaccgagggaacggcgacagccatgatgacgaccacgcagccccatcaccaacaagtgggtacggcgtcagggcggtcacagtgccccaacttcattccttgccaaagatctttcaccccaagtcgttatccagacgccaaggggtgcgaatcacagcgccggtgtgaatcctggcgcaagggtcaccgacggcgagattcagtgcacctgagaatttcttcaatactgtaccatgggagctccatttagggcgcctgacagagcatctcgcagggccttgatctcaaatttttatgtggcaacttg

SEQ ID NO: 47923 - DNA, 501 bp, Zea Mays
cggacgttatgaataactgaaggcgggttcgcagtactgtttctagagtcattgacaccttacagaaacccccttcatgttctatttcttcgcaggttgaggtccacgacggtggacagcgcatggccgaactccggcgagctcacactggccgattcacttaatgaccggtgccctactttggtcgagaccgaattcaagacccaaggattgtttcccctcacttaaattcacaaacggtgatctaaccggctttgtccacggtgacagcgggcatcagggacagtcaaccgcgttcccgatgatctaagggatcctagctcaattgagttggtcggggagtatcaggggcacacaagaatgtagaaacgagatagcagggagcatgaacagacctagaggtcgcggaccacggtgaggtcaatccgagtggggttcttgagtgagttgggggaaatgagaaattagagctctctggtgaacgattggaggcaaggcttg

SEQ ID NO: 47924 - DNA, 575 bp, Zea Mays
gctccctggacttcgcgcataaaaacagagaagcacggggttcagtttgtaaaatccatggctcttctataattactttaccactaggttggacggcgggtcaattagtaaatactacggagcctcttttgaataaatcccgaggcgaaggggtacacgcattcttggaccgttggatccacccctggcggcacagattagatctattcacttgatgaagcggtatgcacagggccattggatcaagatccgacggttagaattttattaaagtgcacctaatctccaccacatgacctaaaacggatggctccgatctaattccgaaggggttgcctctgatccactcctaaccgttcgatccatgatcgatgatcacgatctgacccgaccgaaacaatatgtttgacctaatcctcgccgcacatcgcgcaatcaatggaccaggcacgccacctaccaccgatggcctaggacggcggcgcagggcaaaagcacggcggtgccatggccggcagcggtcaatcccggccaccaggtgcccgaatacacaagcgaaaagtgcaaaactttgt

SEQ ID NO: 47925 - DNA, 679 bp, Zea Mays
gacttaacaagtaacataaacaattttgtggatcccatagggaatcatgttcagctatgatatctaagtcttggctttcaaacagcgacgtctccttggagcatacttgaaaggcagcagttctgcaggaaggggggcaaccctgttgttgcgatgaaaggtttggtaatgcagaacaaaggcacgttggtccaatggttcatcctgaaatagtcataatatcaaattaatgctaagattaaatctgaaggagtaatatatgcaagatcagaacactaatttagtaacataccggagtataaattctgataagtcgccatcatcaaaatcgtagtagcggaggaagtttgcgacaaaaaaaaccacaatcatttgaccctggtgtcatggttggacaattgggaagaagcccaatcttgtagttgccaaactttggtacagttgaatcaggtcgagcttcatgtaaggcaatgctaagtcttctcattattaatctggaccaaggtatcttcgttccatttatcatcatttgatcattatggatttgtttccaggtagtgcctccaagcaatgtcccataaggatttgagtctaagatgtctattcgacgacgttcaaagttgattgcataaagggtccagtggctacggcgtagcataggaaccaggatctgttaaat

SEQ ID NO: 47926 - DNA, 607 bp, Zea Mays
aactcaacccagtcgagctctgcatggaaataccccgttttcatggtttatggatcagaggcagtgctgcccgccgacctaatctttggggtaccaagtttaactttcgaaagcatagctgaagcagaagcaaccaggctagaagatattgatgtactggaagaagaacgattaaacatagtaatttagtaggctaggtaccagcagaccttgaggcgctaccatgattaagctgtgcggcactgatcctttgcagtgggagacttggtccttcaccgaattctaacgggggaagggcggcacaagctatcaccactatgggagggaccgttcatcatatcagaggtcactcggccaggatcgtaccggcttactcagatggacgacacagaagtggggaactcatggaacatagaacacctcagaaaattctatccttagcgaggcctcaaaattcttgaaggagcattgtactttgtaatctgagggcttcatcatcaataaagttttcattttccaaagacattcagactcttgacttacagctgattgggttggacttgaaatcagcacacttacttgactaagggtgaccactataccctgc

SEQ ID NO: 47927 - DNA, 548 bp, Zea Mays
cgaatgatgaattcaaaatcgtcgggcaataccgcttcaagtatcgacgatgatgctttctgtgataggctttcactcacctgctctattggcctactttccgaaggttctgtttcggcacagtaaaaaacaatactttcagtagcctttttcaattctttagatttatctttggaaacctttgtagcagtaggtgttaccacttttgaaggtctcaaaatagcttcaagcacgttagccattctccttcatctcttaggcattcccactggagtagttgtaatttgtggtttcgcttgcgccttcggcaactcttgaactttcggctaatctggcagttcaaaatgaataggtttcggggcattcactgtagtttatagaaggattccttcgacctttttggtagtctttgtttctgaggtccctgtgtcaggcagttgtgcagccctctccaagaagtacgactttggtcggtgggttaaaaccttcaccctcttttgcttcggtgcaacagaagaagccccagcgcactcttcctttttaaccct

SEQ ID NO: 47928 - DNA, 497 bp, Zea Mays
ccttcacgaggctggtgatcatccttccccctgaatgctagaggaagaagcgggaaggagtgtcgcctccacggacatcccgcgaaggtaggcgacgatggccgcctgaaggatgaagcaggacaccacgggtagaggctaggggccaagcccctccagcagctgcacgaagaaagatgggatcagcagagccaacccgctggggagtttggaaacaaagaacacgaagcaagggtctagcaaggccatggtgactacggcaacgcgaagcagagaccttgaagtcaaaggggcgcggagagctcggaggcgaaaagatgccgcgagtgggagagaagcaaggcatggttgctactcgagggatgaacccttctttaaaggcagactcccctgctcccacctcgaagcgccgcgagaagcctcccccgatgcacaccggggtatccatcccatgacacggggcccggtcccacaagtcatacagctggcgcgctggt

SEQ ID NO: 47929 - DNA, 850 bp, Zea Mays
gccatggcgctgaagcctggcgggaggaaaggctccgggtcgacacgccggtacgccattgcaagattttccgaatatcgccggcgaacaagaggcaaaggagcggtttggggttttggtgaagtgacacccagcgagatctccaaggacgttataggtgtttgttcgtatttttttataaaaccgccctggcgaactcttcgaagcaaccaaacttgggaggagacccaactgtcagagaccctggggtagggcgaaaccaggaactgtaatccagaaaatttgacatcccttccaaaatgcaactgttctcaaaggaagggaacgaagaaaggggaaatctgaaatccgttttcttaaaattgcagaataattccaaatgtccctgaactttacaaaaatggcattgaaaagccgagggaactgcaccagacgaaccagtcgtcacagagatgttagaggccgaaaacccaggcccagacgagaaaggcccattccgcaaaatgggccgccattgaagcttacgggccgcagatagaccagaatttgaatttgaaaaatggcgaacatcgcgcccatgacgaccgcgtctactcatgcctccattatgattagagtaactcaccgagggagaaatcctgcgagaaggaatgttcatcggaattgccgagttcttcgctatgaatgaattccgagaaccccgaaatcttgaaggaggtcccaatctcttgaatacaaaaagccttggcgcatccaaattcctagtggagtggggaagcatcttattgcgatgaattgggatagcatttgcaccagataacggaggaagcttaacaatattggtaaaaga

SEQ ID NO: 47930 - DNA, 362 bp, Zea Mays
gagcgtgtgcgtaatagtcgtcgcatcgctgagtttgtcagcagaggttgagcgtttgcagcgggagattgtggagcgggatagggcaattgactaggctataaattcacgatctatagcctaggattgcgaggcgactacccgagcctgggtggaagagtgagtgtggccctggaaaatatgcaagtgtataataatgctctgcacgaggaagtgcacgtgttctatgaccagttacatccgaacgtgccaccagaagttgcggcgatgggagttggtgcagcaggagcagataacagaggaccttatggggagttgaatccctttggagcccctccttccatgaacatcacggatgatcg

SEQ ID NO: 47931 - DNA, 605 bp, Zea Mays
cacgcgtgtggtcaacgtagtctcaaccgcgtcgaggcactcccaggcggatgcttggaactcggcaacatgtgagttcatctgagacaccagggtgcgcgtgagattcgattggacctaggcgagatccactgtacccactctggcctcacatgttgccgggcgttggtggtgacccgacgctccaacgtcgcccaatggctatcctatgcgtcgagccgctcagcgatatgtgaaggagacgcgattgggtcgccatggatttggactgagcttccaatgccgccgagatgctgggatcagaggcagccaccatctgcttgctgcgtgtttaatatgccagatcgaggaaaccttagccgatacgagcctactacaactactacacaggaggagaacatgaggtaggagataggaggagaacgataatgttttctcattttttagcagccagacttagttttagtaactcctcactgtactcttacactgaccatatgtccgacggatatcgcccactgggtctagacacacgacggcccaacacttttctctgcagctgtttctgatttccaccgccattcagatgtctttctgctccgtcg

SEQ ID NO: 47932 - DNA, 718 bp, Zea Mays
tttagtaaaaatccatcggtgtcattggtgttaagtagaagtttatttgcgcgtggaaagtaataatggatttaatacttagaactcttagtcgacagtagaacctttttggcttatatagagaggtggtgacatgccaaagtagtcgtcgctttctctataattataagtcgagtcgtgacgatgcgtattatgcattcgttaaattatgcgtcgcgtatagtgtatgattgtgctcacaatttcgagtagacgcttcaagtaagtcaagtaggtttgtgatacaagtgtgtaatggagttagttgtcttaggataaatattgaaatactcggttcgtaggataaacatgtatgtgttcatgactgggaagtaaatgcatggtgattgcgagttggaaattggtcgatgtgcgaatatacttgtgaatctatgtgtttataaaaatattgtagtatatgttgtgtctcggattgcgataataatgggctagccgacgtgtatgttatttagcgggctatgtcgttgctccagttagccgacctgtcagatggcttggctaagctcgtggtcacgataaattgcttgttatggccatatagaaaacactaatcacgataaattgctcgtggtcacgatataatttattaattgttgttttgggctgcacgcactgttttcatcgtgctgtttgtttaataaactaaattgtgttttct

SEQ ID NO: 47933 - DNA, 469 bp, Zea Mays
gaattaatgattaaatattacacactatattttttgtatatttgatttaaattaaaagtcttcgcttattttggaacggggagtacatcacatttctttggaatactgacgctggcacttggattgcagcagattcctggtcaaaacttagatatccttcttttgtttttctttaagctatatcagaaagaaacaggaagactgcttgatttcatacgagcgtaaagaagttcaagattcataaggatcctgcatcgatcacactaagggtaattgaaaggattgaaagagctagaatcctggttgttcgcttcagattaaaatcagttgtttagactgttacagctacaatccataaagacgaaaatactgtagaagcagtacaaacccggatacaaactcatcggcacttagcttgttagcttggacttacctggcagaatacgaagcagtgaagatcagtgtgttc

SEQ ID NO: 47934 - DNA, 583 bp, Zea Mays
tgcccacactagtactaaccaatagcttgtgaaggatgtggtggtcggttgagtgtgtatgtttttatgctttcacagtaatccgtcgtataccatagatggacaaacttatttatcagagtatacagagtcatccagtcaaaatgaaggagatagggcaaacacatcctccctcacgctcacgccgatgtagcattttctcatacatgtactcgtttgctgcagacatgcacttgcaccgtcgtttaggaagcagacagcagtgctaaaagcacatgccagacactaattgccgaagacatgtcctttttatagtcggtaccagtaacgaaacgtccacagcaggcagcagagtatcacagctccacaggaacattcggttacctaaggtagtatacactccaaattctaaattctggctaccaattcatttgggagctcacatgtgattgcctaacattcagacaatacttccacaatttgcccttctccgcccagagcagtgcgggtaaagctgaatccaggtcctgaatatgacctttccatgcttctccgcccagatgggcatcagcgcaactttcag

SEQ ID NO: 47935 - DNA, 535 bp, Zea Mays
gacgaattgatgttggttcatatatgtttatatgagagtcaaactgaagcttgattgatcttaacattcatatctagatggcaatcaagcaagcatcactttattgaagaaatggttgtcaacggatactcaatatgatgtgacttgaggatggcttgatagggtgaagatagcaaggaaagggcttcgaggtactaagcgaaggtgaaggccaagcgacgacttgagggccaaggtatcatggctaaggtgaagaagagagttgtcgggtacccaggaaaggggtgcccaaggcaagggcgagaaacctctctctagcccatgaatcgatcaagtccccgctgagcaagtctgcaaggcagtgcaaacaatcatgtccacactgagctagtctgggaggcgaggcggccgacttgctcagcgaagcaaacgaccaaacctccatcgagtaagtctccgaggcagggtgaacgaccaagtccccaccgagcaagtctacgaggcgaggcgaccgaataaggccccacctagcaag

SEQ ID NO: 47936 - DNA, 365 bp, Zea Mays
ctaagattgacagcctccatgagactatattgaaggaagcccatgactttgattactctattcatcctgagagcactaagatgtatcaggatctgaagcaaaagtactggtggtatgggctgaaagagatgtggctgcacacgtggctatgtgtgatgtgtgtcaaagagtcaaagctgaacaccaaagaccagctggactactgcacccgttaaaggtaccgaatggaaatgggaagaaattggtatggatttcattctcgggctgcctcacacatcaaagggttatgattcgatatgggtgatcgtggacagattgaccaaagtggctccagtcatttcaatcaaggttacttataaaggttc

SEQ ID NO: 47937 - DNA, 703 bp, Zea Mays
cgacggtgtcagacacccttaaattggtcagaacctggagaacggtggtatttcaggcctgacttagtcaaggaaacagaagcaaatgttcaatggataaggcaccacttgaaagaagctcaagcgtggcagaacagttatgcagacaaacgacgctgacccttgttctttcaagtcaaagattatatgtatctgaaagtatcaccaatgaagggtgtgaaccgtttcagggtagaagggaagctagcaccccgatacagtggcctgtttcccattctggaacaatgtggaccagtagcataccgacttcagctaccagaaacactgtctgcagtgcataatgtgttccatgtttctcaattaaagaagtgccttcgggttcctaatctaaccatcgatgtggtggatgttgtcttagaaccagatttgacttattcagaatatcccattcgagttttggattagaaggacaggattacccgaaaatgactcttaaattctataaggtacaatggaaccagcatactgaagatgaagctacctaggaaactcaagacttcttggaaaagaattttcctaggtttttagcttcatgtaacctgtaagatatgtacatttgtttgtaaagttggaataaaccccataccaccccctgctctgtaagacaaataaggaaataaagatgtgacgcgtttcctttttc

SEQ ID NO: 47938 - DNA, 666 bp, Zea Mays
ggagtggtaaaaaaactacttgcaagagtgagatcgagggtttgattgccaccaaccatgtagctcgcaaaaaatgtcgggacctgcgactttgactcaattttttatgtacacacatgcatgcattttcgttgttatgaagacgtgtgatgcatatccacaaggtactcaatgcacaaatgtactactactctataagaccataaggagggcatccacagtagtacaacatgcccacgcctctgcagatctcgcctttgtcccgctcgatggaaggcgctgatcctccccgcccgtaatcccctccggcaaccctgcgtgatgtcaatccccacacaatcgacgatcccatcccttccaaaaccagcgcctactcacctcgccttgcctaacaaacgcgtcgcctgcatcaaagctgtagccatcgagccctctttctcccactcccctcccttcctctttctgcccgactcgcacgcacccccaccgttcaactcccccgcgtgggcacaagtcccattagggcagacaaggcatgtagctgctccacctcgacgtctgggcgctcgtcgacatcatccaggccagcgtgacaccatcgacggcctcgccctaggatccgctccctgcccctggaaactccggaggcacagtacccacagccac

SEQ ID NO: 47939 - DNA, 385 bp, Zea Mays
cgcttatacaagatagtgtgcgtggcggtaaacaacacaaggcgaaaatcgtactacgtactactgtactaggctgcagctacaacagcgagaaaagacttgacccgacaccaacaagaggcgacacaagttgttgcggcgaggtagtacgaccgtacgggctgggacctgggagtaataccagctatcgctgactcgatcgaccggaggtcaatttgtgtagcctcgcgatgcgatgcgagtgactgggatgagctactttatcagtgcccaatcacacacctgtactgcaaaggattggtggtggtgctggcacaagtcatgggtcgcgcgtaccatcagcgggttggtcatgtgctcgcgcagccatgtttgaatctctcaa

SEQ ID NO: 47940 - DNA, 507 bp, Zea Mays
atacatacacagagagatatggcacgagacgggacgttcaagaagtcaaacgacgtgaaagcgacgtttgacagacaaatagtgacataggatgattggaattcgaattgaggcacgaaatgatgtgggattgagccgatacttcacgaataggtttatataggtcaatatgagtgaagtgtgtgcttggtttgaatttaggcgaagaaataaggttttgggcactcggctcggaaacgatcgcgcaaaacgggaattttggtgaaatttaagcctgggatctcggattggcgtgaaatttggcaaggatgttgctgaaagtgttgtgaaggtgtctgaaaaatttgggttcaattggagcaagtttggctggtttgggcatttcaccgagcacgtggtgtgcggggatttagggtttcggtgaaaagcttatttggggtggaaaacccctcccgaaggagccaaggacctgcagggacatgtaataggggcaaaggaagatattcc

SEQ ID NO: 47941 - DNA, 566 bp, Zea Mays
taatgaccttttgtgataccaggtttccgataatcccatctattcaaggcatacctagatggtgtttatgtccactaaagtaaaacaccacacatcattttgccacattttttctcaaaataaaataaagaccatgggaaatttagccaaattgcgtaagggatctgtccaaacataggttgcggttgtaaggcaccttttttccaccatacagttgctaaaaagttggaatataaaaaattcaaaacaatagatcacctttgacaataaaaatattgtttctatgatattgagggcattgtattcacatgagagggtattagagtacaaatagtggataaagacattagtcggctagctaatgaccttttgtgacaacaggtgtaacaccccaggtgttacttagggttttcactcaagactacacaagtaagccatcatcacatgtgacttaagttgggaaaagtacaccaaagttggagctcaagatcctaagtaagtgcaacccaccttagaagtcataccttggcttgttatgcacatataatggggagaattgcccaaac

SEQ ID NO: 47942 - DNA, 1054 bp, Zea Mays
catatggttggcgtaagtgtcatttcttagagtggttgtataatgagtgggaagaagagttgaagtctgatccaatactctgcaaatgtggtattgaagctaagtatgggttagttccttctgaacatggtgttggctatttttgtggacatatggtagattacgatgatgttggtatttctttttgtttatatcagctataatgttgcatccgtacttactgtcttttgtgtaggagacgaggaaatgcagttggggaagatacgtcgataaagaagaggtgatgcatacaataaagtccacgagactaatgggacagaagatgcattgtggatctcagctcgttgattcgtaaattaaagatcatagacaagacatgcgtaggttcataaaatcaatgtggtttgacaccccgatgcgtgtagagttgaggagattgaaggcagcaaatgagatgagagcatatgatgcaagggaatgggaggcggctagagccgagaaacagatgttggggaatcttgctggtcgtctgagtggaagtgagtgagaaaaaggacatgttggtttcgcttgtacattttatttagcctatctttgcaaacttatttgtctcattatatttgcagagattggatgtgccatgaactatctcacagatgaggctcatgtaagatacgttcaggaaaaaatggtgacgatggagctgatggaggaggacatatcaaggttgagtgagcttatagcgctcgctgaggcaggattacatggggaagaggacgacgacatagaggatgagtgagctcatcgcactagctgaggtaggattatatgctcaagaggaggaggacgagtttatgtcttaggccgcgaagaagaggctgcttattataagcagaagtgtgatgaggctgaggtcgaggaccagctattctccaaagctgcagatgaagcataagccaattattacaagagaaaggtggaaaagtgtgatgcaggacaatgcagcaagtggaacgaggttgtcgttgaggattgcgcgacagatgactctgat

SEQ ID NO: 47943 - DNA, 597 bp, Zea Mays
gacgctttgaaaaagaccagtgttttaatcctgtaggcgtggcaataagaaagcatcatgatttttcaaacttctcagtatatctggatcatcttcttatcagtgtcaccattcacccacaccatgagattatttatgctgcatctgctagtggaattctcaaggaaaggatgcgtctttattgtcttttatacaagtgggctcaacattcctcgcttcgctttgttctttccccttgtgcaaagcgattccatttcgtttccgctttgagatgggaatggccgaatgggggatcgctcctgtccttccgtcgcgccacgtggcgattccacgcgcgttagaaggtggtggcagtagaaggggcagatcatctgagctgtgattgactctttcttgaccacatgccctttgtgtagctcattaactggacattctgatgctctatcattttgtagatacaataccagtataaagttctatttttttctaaaaaaatggatgacgtactataagtaaggctatttctagcagactttttatctcaccccttatttaaaaaaccactcttcaaatcgtgtaatctaccgtgtaaaacgg

SEQ ID NO: 47944 - DNA, 908 bp, Zea Mays
gtcctcctagtccaaaagaaggatggcacgtgatgtttttgtgtggattatagaaaactcaatgcaatcacgataaaaatgagattccctattctagttatagatgagattttggatgagttggcgggcactaaattctttcaaatctggatttgatatcaggctaccatctggtgtgcaagctacccatacatgaacataaaaccgccttcaagactcaccatgactattttcagttccaggtcatgccattcggtttgaccaatgcccccaccacatttcagtgtctaatgaactctgttcggaagtttgtgctagtcttcttggataacatcttgatttatagtccaacgatggagcaacacattagccacctctagcaagtattttcccaactcagagcaccagttatatatgaaaaggagtaagtgtaccaatcctctttgcattatctcagccacatcatttcccaggagggggttgctactgatccttccaaaaccacagcgatgcgtgattggcccacccctgcaaatgctactaacctacgaggtttttaggactcactgggtactataggaaattcatcaagcattatggcatcattgctagaccaatcactaatctcctcctgaagcaatagttcctatggtctcctctggttgctcaggcttttatgcagttaaagcaaggcatggtcactaccctggtattggctattttagattttgcactacagttcattgtggaaatagatgcttgtgaaatgggcattagagcagtgtttattcaaaaagaccaacatgtttcttttctgagtaaagccttggggccgcaacactagaaattgtccatatacgaaaagaattcttagccttgatcatggtagttgaaagatggagatctta

SEQ ID NO: 47945 - DNA, 428 bp, Zea Mays
tatgtatgtatgtatgtatgtgtgtaattgtaacttcgtcggactgtttcagatctattttagacctattaatcacctgtaatgaacatgttatggagctgttatgaactgtattagcttaccatgtgtatgtgattaaagtggtgtgagattcttatattcttatatatgtgttcttgtgatgcacatgtgtagtttatgtggtgtgaatgaagtttggtgaacaaccaaacagctgccacacattgacatgtatgcctaagtttaggtgtggcaacaatccaagcatgtgccacactttttaaagtcaagccaaatcttaggcaaacacatgaaccaaacataggctaaactaaggcgggttaggcaagccacaaatgtggtagctaactaagcttaggtgtggcttcctaggcatagaactaaac

SEQ ID NO: 47946 - DNA, 569 bp, Zea Mays
atcaccacttttttatgtgcaagtgcaacaggcaacaaacgtactgtatgagctcaagacctcaagtaggagtgcagtcgtaccgtggaagacatcatttactcggcggccatcgaaaatgcaagctaactgcgctggctaatcagagatcatcatcgaagactacttaaaaaagtgacacacgaaggagcacggatcggatggtgattagctcgctaataacccgccatctggcagagcacaagcttaattaaatgggcattaaacctgccgtgtggagacccgggtgggattagccatctcgttcttgtttaacattatcctttggacgaaagttaaccagagcgcctcctctgtcccctctttctatctccacttctccagcgtcaagctccgggcgtccctctgtcacttcacacttgacacgccgcacagcagccgtgaaaaaaaaagagcccgtagtgatcacttcgcttttgtcgcgcacacgtctatccgatccgaagaaaatcttctcttctctacccgccgcatccagccgtccacccgtccgcccacccgtatctcac

SEQ ID NO: 47947 - DNA, 1441 bp, Zea Mays
gttagggggagggcggctagggttaaggggaggttagtgagccggatcgagattcacggcccaactcgctcacacgacagctcccgaccctagcgcataagtctaaccaaaaatatccactgtcctactggtgaatgcttcccaaaaattccaaacccccaaagcgcatcacccgagagaaaaaacaaagaaagaataacctccacttctcttctttgcaaaccgggtatcacactctacctcccttaaaaagaattcgacctcgaattctaacgcttctatcagcacgacaaaagaaaaaattaatgaatcaacaacacttacccacaacaaaaagttcgggatttttctgccgcatcagctcctcaagttcccacgtagcctcgtgctcatactgattagtccataagaccttgacatacttaattgatctcttcctcaaaacacgctccgaggattccaagatacgcaccggacgacactccagagtcagatcctgttgcacagcaattggttccatttcgatctgatgatctaggtcccgcaagaacttcctcaacatagagacatgaaatactgggtgtaccccagccatggaatccggcaattgcaggcgataagccaaattgcccacccgggccaagatagtgaacggtccaatgtatctcgggctaagctttccggagataccgaatcgaacaactcctttagtaggtgataccctgagaaggacttggtcacccactgcaaattccaaattccgcctcctcacattagcataactcttctaacggctctgagcggccaaaatattctgacgaatttcccgaaccttctcagaagtttgctaaacccaatcaggaccaaccagggatctctctcctaaagtctcccagcacagaggggagatacaccgcctaccatataaagcctcaaatggtgccatcttgatgctagcctagtagctgttgttataagcaaactctgccaatgcaagatgatcctcccagctacccttccatgacagaacacaagcacgcaacatatcttccaaggtttggatcgttcactctaactgaccatccgtctgagggtggaaagcgacactaagtgaaagcttgatacccaatgcactgtgaagactctcctagaatttggatacaaatttggagtcttgatcagaaacaatggacataggcaccccgtgaagcctgattacttccttcatatacaagggaaccaattctgaagttgaatttgtggtcttcatgggaataaaatgcacagacttagttaagcgatccactaccacccatatagcatccctgccccgaggagaatgaggtaagcccaccacaaaatccatggtgatatgctcccacttccactccagaatttccaatggcttcagtaaacctgcaggcctcttatgctcggcctt

SEQ ID NO: 47948 - DNA, 754 bp, Zea Mays
gttacatctatccaaaaatccctaggcctagttaaatagtttaactattttcccctttaataagttaaaatgagcagattattatttaattcagaagtccttaaatcatcactaaaatagggtggtttcccaattttggtttgaagtcatatatttatagagttctacaaaattggttccactgtttttgggttcctaattaatttgttttgaatttccaaagttctctgtaagatcaataaatcatttttaataaaaaggaaaggaaaactaacttgcgcttaggcccctggctaaatctttccctctctgtcacaaacgggtcctcggtgcactattcactagagtcacagtgtcttcacttaaccccctgaattatccaggtatctaacccacaacccttggttcatcggaaaagtgcatgtgagcaagaatagagcaaagcatcttaccgacggcggtagctttctggtggagtggtcggcgaggttgagggcgtcacaagggtcacatcgatggccgactcatcgccggaggtggccggagctacccggtccacgtgtgcaggcggcggcggtcgacgacggctctaattctggccaattgatgacggtagagctcaatccgatggctcggggagcttcactggatgttggtgaggttgtgggtgtgagcaatcggactgtgggacttcgggtggctctggccacgtttgtcggcggagcttatctactccggcgagctatggcgatgg

SEQ ID NO: 47949 - DNA, 527 bp, Zea Mays
gggtttaggcataatatataattggcagctgattgtgtttagcggttgaaccatatataggttccggatatatatggtttggctcaaaacatatgcacctgttatgtatggtttatccccatatagtttgctgcctattgtgatttagggttgcaccattggttgtgtgcctatggtttaataagcttcttattttggtgtcattgctgcagcagtagatcgatgtgtctatatagtacggtctaccccgtatgtactttgcgtatctagtggcccggcccgttacaaaggttttgactatggtttgtcttttttctaggctctggcagcttgttatgtttaagatctgttgcaagggatttgactgcggttgtgagtccccaagtttgaggcatgttgtgtttacgtgtcactcactatagggattatatatggtttggtccaacccattgatcccccaataatagaaatttgttgtttttaagtgccatagcctggtgttgttattgtgactatgttttccccca

SEQ ID NO: 47950 - DNA, 838 bp, Zea Mays
gtcctagaggattgggacgcttcaggtggtatcggagctataggttggccgcaggacgtaacccttcggcttggaccaaaagtttttgagtcaaaactattttcttagaaaaaaatcttgctctcatccctccatttcaaaaatgttttccctcctttccttctcccagaagtcagatggaggttcgctaccaaaccagctattgccggaatgaagatggtttccccaagttgctgagagcatacacaacacgcctcggaatcaggagccagccagagtacgccggtcgtgagttcttcgagcatggcacagagaagtgtgtcgtgactgtatacattggatccagttcgcaccatgtggaatgaagtgtcactgctgcggggcacagattcagagacacctaccaagtcgtcgctcgcaaggcattaagagccctttgtcagatctatgaagaggaagtggtcgacacctcgctcaagttctttccgcccttttagagagaccatcccgtttggatggccaggatgcgtgccttagaagggcagcagctgctagaggacgaccctacagtcgtgtacctcacagcatacctgcttaccctggatgcacagtatgatctcttagctcggcatcaccatcaaatgatcacccgggcagaagatgcagagaggcgcaaccgtcagctccatgtggatctcacaacatctcaagcccgtgtagctgccttggaaagtcgtgaagtcattgctgttgaagccctaaagcaagccaaggatgagcacgtccagaagctggttgaggcctacttggtcacccacaaccaacatagagccctgca

SEQ ID NO: 47951 - DNA, 341 bp, Zea Mays
cattgatatgcttcagtttttttttcactttttgagaagatgaagcatgtagtagttgtttcaaaaaggatagtgacaactttgcaggatgttcagttaaattcagtagtcctcgttgttcacaaaactataaagtaagatttgcatgggcttctgaatcagtcacacaacatggatcatatgcaactgaaaaaacatccagatgcagcaccagagctacctggaatagctgccttttagctgatgctgtctaaccaaaataggcctcgtatttggtttctaggaatgtgcttctgcattgcattcatttgcctaatttgtaagatgcctatctggcattt

SEQ ID NO: 47952 - DNA, 364 bp, Zea Mays
agttatcacagaccacatgaatctgcaatcagagcatatgctttgactaaggccaatggatcatattcgcaggcgtccccgagaatagatcaaattccaataagtcaaatgtggatatgatattaatcccgggtatatccacatctacatcaggtagaagcattcaaaccaatatggttactcctcaatgatttctggcaaactccgtatacacaggagtacacaccgaacgacaggttcagtttggcttttgtgcgtttaatagaatattgaggcattacattatatgggcattcctcccgcaaatgtcgagatgttctaaaagcatacagataaaatccccaaccacaattatccagttgtg

SEQ ID NO: 47953 - DNA, 340 bp, Zea Mays
ttgtagtggctcacacctaggtacaacaacaaatgtgaggacatgacgaagtggatcgtgtcgacacggacacacggtcgaagattggcgagacatgtgtataggatacgatggacacatatggagtacttacatgtagtggtctggtggttgagcctaaaacccacctagtgacggttatacaaatttagcctcaaaactcgtggtggcacgaggagccatcacgaagattgtgtcgaggcgaagcaaatccataaagtaaacatgatcattagatctactattttttggttggaccagtacgctcctagctaaacggattagctctaaaatataaagg

SEQ ID NO: 47954 - DNA, 345 bp, Zea Mays
ttcgtggaggcgctcaactactacgcacgtcatccggtggtgcacaacttcaatgtgcacctttaatggactaatacacatctttaatatggaaatttcttcgtcagacccctccccctcacttgtgccgctgccgccgtcgacccctctcctcgcgtcatttggttttgctgagagttcatagtatcgcttaactcattatggttcgttcatggcaggagcttaggaggttacaatttgtgtaaaatgcaatttcattcgatagtgaaataacatgtcaagcagttattagctactattttgaccactctcgtttgacctagaaaatatccatctaaatctgtg

SEQ ID NO: 47955 - DNA, 382 bp, Zea Mays
gtttatcagtaagcctagggactctttagagattttgccaagcgaaggggtacgggctaatctgagccgtccgatcacagaccgaccgcctagattagatcatgaattcgattaaaacggtatggaatcgtggtccttggatccggaatctatggtttagattaggtttccccttgcacgaaacggtacgcttcaacagccataggatcgagatcctaaggcccagagtctacgaaacccgatctaatcatagccgctggatcgagatccaacggactacaccctttcttcctccccggctagcggtgcggacgccagaaccagccacggcggatccccgtcggcgcacgaacactcgccggactagtgccctaaccaaaac

SEQ ID NO: 47956 - DNA, 1408 bp, Zea Mays
aaaaaggccaccctagtgctccaatggttaagtttgaaaacagtggaatagagctgactttagagctctgtagatccaaaaatattaagaatttgcttagggtcaacacaccaaacttgtaaagttactataggagtacaattttgctatagggattaagccttggtgccatgaaaaattttgagaaaatttgacccaaagtcgggctgtcaggcaaccctaggcctgaattttcagaaatagtgaagttggatgaactttgagctcgattttgagtaagatccagtaacaaattgttgatggacattataacaaagttaaagctggtttattaggctataactttgaaacagagagttgatccagtcactacataaaatctagagcaaattgaccccaagtatgctctgtcagactaactgaattggttgcgcgatggtacaatatactgatcagatcgccagctcagagacctcaccgtcggcgaccacgcgtgtggattcatgctatcaccgtgattcacgctaaattaaacgcggataatgatcacggggtgaaagatcttgccgcagatgagctgggatgtactgtgtgcttgatggttcatcagtgcacaccggcgacgtggccgatcggctatcaccggcgtgttcgccattcaccatgagggcgccacgccttaggaagtttatcgcgtcggtatgagccgtagtgaccatccagtgaccgtcatagttcagtcgctctacgattgccacgatagatcgatgtgactcattcccttctcggccgccagcacaattcgtccaaattaaagaccaccgctcaagcacactaaattgagcacaccgacgggtccgtagggtaatcaagcactaatccaccaagtcgtgcccccaattactcaccagcaagccccaatttcggttttcccccaattcggtccgaaatcccgcaccttacaaccccgccgtggtcatcctactccaggttcgctcatgccctctgctctttcatttcagtgtccttgtgtgtcccttatgctccccgacctagccgattaggttaggaccccttagatcgccaggaacacgtcatgttgtccgttatgcccgctgtcaccgtggacagggtgatgtagaactccaatccagcaattaagcgagcggaaacacttgttaagggctagattaggtctcagccgaattagagcaccggtagttgagtgatccgaccggtatgagctcgccggagctcggttctccaccatgcgacatcgtggacttcgggttgtgaaggaatagaagcgcgggggtgtttttgcaagtgtcagtgggacagaggaatagctccatgaccctttttcagttattcaaaccgataggggcatttctgcaaaaccaccatc

SEQ ID NO: 47957 - DNA, 412 bp, Zea Mays
cttcggatatgccgggagtcctgagagaactggccgagcacaaactaaaggtctacccccaggcgagaccgatccgacagaaattacgtcgtttcacgcccgataagagagaagccatccgtgcagagctggctcgcttggtcgcgacatgattcattagagaagtgttacatcccgagtggttagcaaatcctgttcttgtactcaaaaagaataaagtggattggcgcatgtgtgtcgactatacggatctcaacaaacattgttcgaaggatcccttcagacttcctagaatagaccaggtggtagactcaaccgccgggtgttctatgttgtctttcttagattgctatttcggatatcatcagatcagcttagcaaaagaagacgaggaaaaaacagcattcatcac

SEQ ID NO: 47958 - DNA, 406 bp, Zea Mays
tgctgacaaagtgcaaaatgtccacctcggtttggcaatagatggtttctcacctttcaatctaactgcactgtcctactcatgctggcccgtctttgatgttccatacaaccttccaccagctctttgcatgaaatatgaatttattttcttgtgtcttgcaataccttgtctggatcatcctagaaaaaatatcgatgtgatgatgagacccctgattgaagaattgaaaattttgtgggaaggagtcgaggcatatgattgttacaagaaacagaagttcaacctaagagctacgtttttgtggtcgattgacgattttatggcttatggtatctttgctggatggagttgtcatgggattttgacatgatcgatatgcgctgaagacactttatgcttccga

SEQ ID NO: 47959 - DNA, 978 bp, Zea Mays
gtcatatctagtcattctttgcaaggctttttgaattgtttttcaaacttaaagcgataacggagccgtacaagctcgtgcttctttcccacttcttttctcttcggcattccccaaccactagaagtcagatatgttctgtttgataaatactcttgcactaagtctctagtactgatgtgctcggctaccactctaaattctactttagccaactggcagggtaaccccaattgcatattgcataagggtcgagtcatgccgaagttcaactttaacggactcataaccatgctcattagcttctccctctttttctcatccgctttcatgtaaaaccattcattagtccatccagtcgaccacttggtacgatagccaataacggggccttcgtatccttccgatacgcaaaattgtagaagccaaagttcctgtgaaggccatctgctctagccttcgtctggtactgaagttcgtgcactcggcagaaagcttcggcattcgcatccattccctagcttcggagagcccatatgtagacactaagtctaacaatagcattgggggtcagctgatgaaggtatatttcaaagttctttagaacctcccctatgatgtcatttagcgggaaccgaagccctgctctgaagaagctcttaaagacgataatttcgtcatccctcggctccggaattatatcttccccagcaaatcgaacaagcttgctcccatactccccaaaatagccaagttttttcatcatagtcatgtcatcttctgttatagtagatttttcaaattcaagatgactaggctttgtcgggtttagaatgttgtagtcctctttgctctcattatcgctctcaccctcaaccacagtttgtccagtttcaacattggaagcaccttcgtcagtaacttcccctggcacaattagacctgatcgcttcattacttctgatatgggcgctgttt

SEQ ID NO: 47960 - DNA, 341 bp, Zea Mays
ctgaggttctaaatcctttattcgcttacgttctttgtttttatgaatctgcttaagtgtactgtccatgtatgttgtctgtgcttccatgtttgttatgcaagtttgttttttataagcaagtaacatatggaccaagccagggatagtctgtttatgaactccacttagttaacatacaacccctttgtttgttacatcactaagcattgcatgcaactaacgaaaccttcacttattatgcagcttgaaatatttatttcattatttgacgtccacttcaactaactgaggttctaaatcctttttcgctttagttatttgtttataatcaacttctt

SEQ ID NO: 47961 - DNA, 866 bp, Zea Mays
agtgtctccatggatgaactcaagtggaatccaaaccctaagagtgcaagaaaccctaattggaaccctggaaaaccctagacctaaaccctaggggggctaagtgcaaaatcagtgcacttttggactaaagtgcaaaaactatgaaagtaaggtatcttaagtcatatggttcacaatcatgaagatttgcaagctaaaccctgaattttggacctatttgcaaaaggaccctatttgagttctaaagctaagtctgaaattcagtgttttgagctcatctttgtgaccttgtaacttccaaacaagaaggattttgccctagatcaccacatcaacattgtagacctgtcaaaggagaataactttgcttaagagagtaagcatggttgttatgaagaaattggagaaaaatgcacccaaagatgggctgtcaggctgtttgaagtctgaatttcagactaacagtgcaactgcaagaactttgggcacgaattcaggcatgatcgagcaagaattttcctagggttgctataccaagattatagctggatcctagagctataactttgctaaagagtgtcgatcatgttactacataaaattaagagaaaattcgccctaaactttgactgtcaggtgcactgaatgaggaatggccatggtacagtatctgaagtagatcagaccgccagctcagtttctcgccgccgacaatctctccgccgcgattcgtgccgccgccgtttcgattcgtgctcgggttgatcggataacgctcggagtcacgctgccgtggataagcttcggccagtaaattatttcggccaccgtaccgagctcgccgcggtggattaagatgagtt

SEQ ID NO: 47962 - DNA, 2050 bp, Zea Mays
gaagaatcgctacttccccatcaggggccccatcccgggcgctgccgcccgccgcggcacgccagcgccacctccggccgtggacacaacgggatgcagcaggaaaagggctaggcggccggagctgctcaacgccagggagatgtacggcggcggagtcatgttctccaataaagccgccaggtccacgttcaagcagcagtgccactacgcgcaggcgtctcagcccatggtgatcgcccgggctacttactccttgctttcttgtgcgttactgtattgtaatactctatttttttcatcatcgtgcggcttggcaggtctggaagtaccaagccaccacctctgtggctgataaggcgctcgaacaattggacgccatggttcagacaccgcaagggttgaaagagtccaggctgctagtctccggcagcatgaacggttcgattcggtaagagtcttcgttggtatctgtttctatttactatctatctactatttggattcatttgtttttttttgttcaagttatgtagagtcatggcattatgagactgaaattgtagtatgcaggccttgttgagactatcttggtatcaccatgtcacacttgctgtattgtctgctggcacagtcgcacagattgtcttttgtcttaactgttggttgttctaagagaaagtgtgcatttatctatacttcaattctcacaatccgtcgatatgttttatctctcaatgttcttacttctgtgtaagagcatgggttcatggccttactaatgtcaaatgtcacggtgcattttcctataatctcttaataggttatacggattagggactgctctgagtaactttgagaatgaggcagagtttttgccccaacctgcttgtactcttgtgggaaagcacaagccaggaccactccccagcatttggtcacctggaacaggcttcatagctttctcatccagtatatcatgcataaagaagctcggacgtcatgtccctgatgcatcgaacaccaattcatcagttcagcgagcattgtatcctgaactcgttacttattgtactctctatttatttggacatttggtgttgccatagttgcacatgtttgcattatgttttctttattattaactggaaatatgttgtgagcttgtgtcccttgacgttgtaaaacatggtggctactcttggatctggagaatctcgtgcctctttatatattatggatctttctgaagctgttgacttggcaatcggaccatggactacctacagagttcattcacttgatcgaacaatgtggacagctgattgtagttctgatggcacacatgcagctttcggtgagttcgttgagtcagagcttaaatattggagataattaaagtttcccttgcacttaggtacactatttttgcaacttgtttctgattgaaccttgtgttacgtaactctatcaagttggatgcattcactaagaatttcactacggaattagcatttctgaaattctttgataatttaaacgtgacagttgaatattgaacccatatagcaagacctgcttgttttggtacttgtatacatatgtgatttttttcacaataactcagttttggttattgtgatggccgttttgcaatttaaaggttagtcattgctatagttggaggaattaatttaattgtcatagcaagctgtactcattcttacagttttggcagtttgcagcctgcttatgttacagacacatatagtatcctttcgcttgggattcacttgttcatcttatttctaggttcggaccttggtgctggtctgatcgatttggaaacaaggggatcatcatggttatgtcgttctaaaagcgacattctttccctgaaatttgtgcactcggtaacaatcttaatctacctaaacttcttcccactttgtagttttaactggttgagatatcattttatggtttgttgtcaaatgacagttattgaaaattttgcttgcctcaaccttttgcccccactttccagtta

SEQ ID NO: 47963 - DNA, 503 bp, Zea Mays
gtttttttataggtgcagcactggtaattttacagctgcgctattttagacgtgcagttaaattaggacaatagatgcgacaagcgaggagagaagggaaaaacatccattttagctagcgaaaaaaagctaaactctttgcaccgacatggatgaaaaacaataatacgtcaataatgaacatactacattgctgggactggtgacaggtgatcaggtgggcccaagcactatagaaaagacaggggtcagatgcacaacaaaacatgaagtaggtaaggtaactgtattttcttgttatgtgcgtacaaaacaatgatatttataggacgcgtccgaggataggtggtccatagtacgtttatatcccggttaccgactatatctatggaattccatatttcgtataacatggtaattatagcaccgcaacccaccccggttaccgactatatctatgtaattccatatttcgtataacatggtaattatagcaccacaac

SEQ ID NO: 47964 - DNA, 644 bp, Zea Mays
atccattctcctcatgtcgcaatacacgtgtaacactgggtccaactttgaatggaagttaatatctaaattcgaggatagagaaacaactagctatccatactattttgcgtggacaaaccttgctagtttatctacattatattgtgggaagggaaaaacaggcgactcttttagttatttgtactggattattgcaatgtttctttttattgatttgttctcaagtgggttaattattattagcagggttgttgctgatgttgttggctgaaatgttttttttttgcactgctaatgtatataatatattgctttcattaaacctactgaagcttatatactatgttagggagaacattgcatgcaccgtacctacctctaattttcaggtgcaggtaagcaaacaaacaaacatagcagtaacacgctacagtaaacttttgtcggcacaactcggagcccacgaactaaattaataaaatcagatgaatggaccttaattgtatgtgttttaattattagagggcaggagcaggggatgtgcatataggaggattattattagcgtgaggacgtatcggctgggctccatttgcacacttgcgtcactctctcccttgacccccaccctagctagctag

SEQ ID NO: 47965 - DNA, 486 bp, Zea Mays
tatcgcagccggttcgatgtaacgcggccggtgagtcagaaccttcatcttcttcctcttcggctcagccgtgatggccgaagcagcaacctttccagcagcagcaatcttcctttttaccccttgccctcgcagcgggtaacaataatcagggtataagaagccaatagcatcaaataccttgtttaaccttttcttaatccgacccccgaaggctgcggacaaggcattgtcttcctttttggagtacgctccaagcagttcatcacttgtagcttcgatacacttcaaccaatcatcatttggtatcatcaaacttatccccaaacctaaatgtgtacttcagccggaccaaatcacctttgctacaattagtgatggtctccttcggcatttcccagctttctacaagcggccacaccctgaaggctatatgttcttgaattagatctcttgtcccaataaaagagcaaacagtgttgaagg

SEQ ID NO: 47966 - DNA, 931 bp, Zea Mays
ggcgagggggtgctagaggaggagggtgcgatataggaggttggcgacgtgggagggcaccactcagagtgcaattgaacaagatctcgggccgtgaatcaagaagcgatgagggaaggcgagatctataggaagtcgaaggggagcactacgtgtcgaggaggggatccattcctatctcgtggcgcaaggaaggcaggcccagaggcgggcgtaagacacaaaggcgggcacaatagacataaaggtggttggcaaggagtcagtcatatgcgcgacgactgaggcacagggaccatcgttatccgagtagcgcgctgggagtggggaggggcaaagagtggagggctgcaggctgattgaagcaaatttgaggagtgtttttgtaaagtcgtgacaatggaaaccaggaaaccgcgacgggggaggactagaagcgccgacgtcgaggagggtcaggtgagtggaggcgagggagtgctagaggaggttggcggcgtgggagggcaccgctcagagcacgattgaacaagatcttgggccgtgaatcgagaagcgatgagggaaggcgagatctagaggaagtcgaagggaagcaatacacgtcgaggaggggatccatacttatcccgcgacgcaaggaaggcatgcctgaaggtgggcgtatggtgcagaggtgagcgcgacaggcgcatatgtggttgacgagaaggcgattgtacacgcgacagttgaggtgcagggatccatcgttattcgagtaccgcactgggagcgggaggggcagagagtgaaggaccacgagttgattgaagtaaaattgaggagtgtttttgtataattgtgatagtagaaaacatgaaaactgatgtattataacagtagagatagagaagaaataagtggtagagactttgaaggctattattac

SEQ ID NO: 47967 - DNA, 674 bp, Zea Mays
atgtgccattttagaaaagcgatctacaacaacaaaaatagaatccctacccctctaagaccgaggtaaccccagaacaaagtccatagatatatcttcccaaggtacatgtggaataggtaatggagtatataaaccatggggattgaggcgggacttagctttcaagcaaacgatgcagcacccaacatgccgctagacatcatgtctcatgtgtggccaaaagaaatgatcggagagcaaccaaaatgaccagctagtccaccttcatgtgcttcctgcaaaagaactgggcgaatcaaacaagctggggtgcatattttgttagtccgaaataagaagccatcatgcacataatatttatcccaaccttttccatcaatgcaatgagagaaaggttctttaaaatcagcatcagcagcataaagtttttaatggattccaaaccaagcacttttgtatctagttgtgtaatcaacgcacatcttctagacaaggcatcagcaacaatgttatctttaccacgcttatgtttgacaacatagggaaacatttcaatgaactcaatccatttagcatgtcgacagttcagcttgccttggcttttaagatatttcaaagcttcatgatcagaatggattacaaattctttagggaacgtaatgttgccaaac

SEQ ID NO: 47968 - DNA, 557 bp, Zea Mays
agttcgccacaagagctggagctggcgaaggtgtccaaaattcatgcaataactccaaaaaggaggagaatgtccagcgcactagatgttgttatggaatcttcaaaagtacaaacccctgcttcagcgcctaatagaaagggtgaaatcccaaagaaatctagagaagctggtacggcactagatactgccgaagctgggccattagctcctatcgaggcatatgcttcggaatctattcctttgaccttggaagaagaaaatgcgcccaagaaagttcctgctctagatgtacctgtcgaagaggtggaatttatcgtacgacatgcttcggggaaggagctatcgaaagagcagattgccgaagctaaacaatacgccagggatttaaagtacccagagagatccttggtatacaacagcactgatgaggacgtctttttgtattgccttccagacgataaggagatatctatctgtcgggagatggtagatagtataggatatccgaagtttgagctcggtctatctgtaatgtcaaaggatcagcttgcaga

SEQ ID NO: 47969 - DNA, 513 bp, Zea Mays
gactggctactgcaagcagtcatccaatttagtcaacccatcatgccctgactcagtttgcatctttctatatggcctcaagtagacacatctcacattggcatttgtgctttgccatctacgtatgaaagcacaacttgtccacgacaaagtctagcacgtcaatctttatttaaaaagatcgagataagttgcctacatgttactctacttcgatgatattgtattgacaatgtcctcttttgttctactatgacgtgtcatggatcacctcagccctgagtttcaatgattggttttggcgctctccaccactttcttggcatctccatcacacactctactgatggcttgctccggtcatagagttaatacgttggtcatatatgctccagtggggcgacatggttgaatgtcactccataatgacttttatcgactctcagtctaggctatttgtgaatgacaatgacctgttgttgaaccctcatagtaccagagtctggctaacgc

SEQ ID NO: 47970 - DNA, 447 bp, Zea Mays
gcccgctcgactactaacgcggtgctcaccacgtgagtcgtgcaggagatgtacaacaacagatcttccgccggctggtctggcatggctcggcgtggcgtctttagcattggtggtgtggtcaagaacgcctttagtgcatcaagagcttcctgagcttctgaggtccactggaacttgtccaccttcttgagcaatttgtagaatggtaagcctttttctcctaaccttgatatgaacctgcttaaagctgccatgcatccagtaagcctttgcactttcttttgtgatcgtggtgcttccatcctcatgatagcctcaattttctccgggttagcttcaattcctcggtggctgacaatgaatccgagcaacttccctgctggcactccaaagacacatttttctggattgagcttttaccggtaccgcctcaggctgttaaag

SEQ ID NO: 47971 - DNA, 445 bp, Zea Mays
cgatacttgatgaagccgcgacacgataccaaggtgcacctgagctgacccaagacgaaagcgcaccggaaccgaccgatacaaccaccgagaggtcaaggaaaaggaagcagagcgataaaaaagaggtgacatgggactgaacaagtttgctaacaaaacatataaaatctcagatgtgagtctgaaaggtcagccctagctccagaagaggcactacataagttccgaaatgcacttgggttcttaattagagataatcttgacgtcacaatccgacattggagagatgtgttagttgaggtcaggaatcaaatatggaataagctattaacgaggttcgttctgcctcggggttcagaagaacttgtgaaggaatacacgatgaagcagcttgcaatgaattttcaaaactggaggtctaagatgaatacaaagtttgcaa

SEQ ID NO: 47972 - DNA, 465 bp, Zea Mays
ccggtggtacttcttaggcttagatgttggggttctggcaacctgggggtcaaacgccggtgcaagtcgtgccctggggcgagtgcagcggcgccgcatggcgattagcgagtcagaggtagaagaaaacatggtggccgttgacgcgaaaagcaacggtcaggattcaatcagggacttaaggatgcgataaccggcctcggccgttgatctgctcgtatgcggctgagattagctcatgtagaaatggatttcggccctcggatcttgatccaatggcctgtagatggcgctggttcattatgtggaataatctgatctgggcggtccgttttcgatcggacggttgatactgcccgataccccttcggcctggagattttacttaagagccctcgaagaaagtgaaaatcaacccgccatcctatacactgttccctgagtcgtaggcgttttacccagaac

SEQ ID NO: 47973 - DNA, 910 bp, Zea Mays
gggcatcttatttgaccctcaactgctaggaaaagtaaaacttgcaactagaggatattccgatatgtactcgtggggcaaacaggtctccatcctggtggttggagctcttcagtagcatcccagcaggtctcgctggtttcattgacctgtagagaatagtttgcttctgatccttaatatatgaaatagggaaatggatttttatattgtcacatgtacttataacagataataatcagtaggggtttgcatctcctattcttttttttaaaaaatatatttttatgccaatctagttttctttatttggaacgatgaacagctagcctgcctgttcaagaaaaaaaaaggattatcaaccatgataagcattagccagctattgttgagcatacttcacttgtagggcatgttttactagcaagcaggtctccatgatccttaatatatgaaacagggaatttttttttatattgttacatgcacttattgttaataataatcagtaggggtttgcatctcctgttcttttaaaaaaatatttttatgccaatctagttttatttatttggaaagatgaacagctagcatgcctgttcaagaaaaaaagattatcaaccatgttaaccattagccagctattgttgagcatacttcacttgtagggcatgttttactagcaatcaggcctccctgtggtggcatcaggatgtgcaacttgtggttctcaaacttgtgtttcacaacctttttaacttggacgtataaaatccattttcaggtcgtctttgcagttcccacggaattttctaaaaatctgcattgcttgcattttgcgtgtgctttagtgtcgttgtgaattcctgaaaggctgaaagtaccctttttatgtttaagtgctgtgatg

SEQ ID NO: 47974 - DNA, 461 bp, Zea Mays
tgatttttagctgcctacggaaaactagctcatcactagaaagctgcctagattcctgtgctttctccaatagggttaggacaatttgtataatagccatttgcaccttgatgtttcctactctcttttgcctccaaatcttcaaagctttggccgtgcgaatcattttcacatgtagacgtaagatgttatctgtagagttcactcttggtgtccaggcttgttgtatcacctctttgaaaccctcaatatttatccagaacgattcaaatctaaaccccttgtagaagtcataggaagagtaaccttgcatgatcaaggggcagtgatccgaggtcaaggtgcaaaaggcctggagatcagctgtcgggtataagtcgtgccactcggttgtcgctaaaaatctgtcgattcttgacattgttggatcattctgctcatttgaccatgtgaacaatctc

SEQ ID NO: 47975 - DNA, 775 bp, Zea Mays
gtggagtcatcatcgatgtccttatcattatcaccctccacatcctctccaagtgcaatagtgtagaggtgtctcattatgtcagtgaagaagtagagtccattaaccttgtcctcgagccacctctcaagctcgtcatcgcttaaagaagaagtgtcatcggagtcgtggtgaggtctctaagggaggagaggaaggtgtgttccttgatcttgacctcgtggaggtacttatgcatgcttgagcgtctccttgtcaaacctccccttggacttatacttgtcgaaggtgtatttgtgcttaccttgcaccaactggagtggtgttcgtgcttgctggcctcaagcttgcccttcatcttagtgtagttggcgatgaagtggttggggtctctccaattgaagtagccatccttggcccttccacatgccagttcatgcagttcttgtgaaactatgtgaaccgactagcaacaagtgacaactcctcatcccaaggaacttgacccgctcctttaaaataaatatcaaagaggacaaagaaaatatagtaggtgcaggcttagagggagaaccacctctataaactagagccatggtgggtgcactaggattcttgatgttggcccaactttggtggtcaatcttgatggacttcagcttattgaaaagctcatccacggtgagggatcatagttaggtgattctgttatcgccaatatctttacctcccaaacccttcgatctagaataattagtaacttgagtgctctctt

SEQ ID NO: 47976 - DNA, 391 bp, Zea Mays
cgcggatgaaccaaagatccatgtgttcccgacggtcagtggacccctagtccaattggacgggtcagcaagcatcgtagacatgtgagaatgcttagacgagggagagggagggttggactgaccgaagtacggctggccgcggtgaggttgggcttcgggtggcggagaacagatttggggcgaacgtgaaattggagagctgtggggagtaatcggagctacgcgtgggttctctggacgcacaattacctagcggcactggccgaggctccaatttataggcagcttcgacggtggccgggaattttaatggcgatgtatggcggtcggagataaggaagaggtctggcgtcgtggttacgtgtccccagccgtggcgagctcatcg

SEQ ID NO: 47977 - DNA, 294 bp, Zea Mays
aatcatttttaccattttgaatgcatgatatgaattaggcatgagtcttaggacaaaagaattagttgaatttttgctctcaagtttttggtgtcttttgctcaatttgattcacatgaaataatggttcttgagttagcactgagaagaactctgggaattactggggtgttacacaccgcgttagtagtcgagcgggtggaggaaggacaagcatacccggtgcagcatccagtttacttcatcagcgaagtcctcgggccctcaaagataaggtatcctcaggtccagaag

SEQ ID NO: 47978 - DNA, 507 bp, Zea Mays
tcggctgattggtaggagcgggggcagtagtgggacgaataaagacaggctgcttgaatggatatgaaggtgggcgaggtgaagaacgattttgattaaaaggtcggatcaccaacctggttctcttctcaggcccctgattagacctatcacctccaaacccttttgattttccatgtcctgcatttttggcttccactaccagtgttatactaatagccctactgtaggtaaggtccaagcatgttgccattttccgttgaagcctgtcattgagtcccctcataaaacaattctttttctttagatctatattcacttggtaaatggcatactaggagagatgattgaatttgttgagatactgcattacagtatctcccccttgctttaaccggataaactcttcttatttcatatgaagcactccttctggaacataatgctcccggaatgctagcttgaattcctcctaggtaatctgatgcccagcaggttggattgctg

SEQ ID NO: 47979 - DNA, 524 bp, Zea Mays
gagattgtcaatattccaggaatgctctaagtcttcgccggatggcgttgttagcctgtacgcgctgggggacgactttgtcttgacgatgaagggaccctcccactttggctctagcttgccccatgattctgtccgagctgtccggacaagtacgaggtccccttcattgaattctctcgggacgactgtgtggtcgcgccatgcttttgtttgagcttggtatttgttgagggcctgcagggcgaagacacggtctctgtcgatgagatccttggaagttggttcgtctacgtcggggacggctgaagtgcttgtccgtggtgacccatgtttgatttcctgcggggtcatggcctccgatccatatagcaggcggaaaggagtgaacccagtcgcccggcactcggtcgtgttcagcgcccagactgctttaggtagcaggtcggcccatttacccttcttgtcgtcgagaagcattttcttgatggccgtgaaaattttgccgttggcgcgctccacga

SEQ ID NO: 47980 - DNA, 1028 bp, Zea Mays
gtcaatttgcaacatatttagagagagtgaacaatcaacacaatacacaaaaattgagggatgcaacacaattatataggatgtgatgataaaaacaatagaatacacaaacaagcccattattgcatagcataagatatgaaatgttactactggctattacaataatgtcatcacatcacatcattaaaaagtttatggcctctaagccatcaccacatgcatcacgagatagacgaataataattattacaaaccatattgttcattacataaattaaagagctcctaagatgagactccatctccccctttttggcaacaagaaccaaaaaaggagagagccaccaagcaaaagatcaccacgaaggcggaggatgatgcaaagcaaagaaatgatgcgccaggtgagatgcaaagtgttcttccccagactgatccgggggaggaacacttcctgaaggatcctagggcagaggatgagacgaggattgacccggatccccctggtagggaggcggggcaaactgctcacgatcatcaaagtatgtttcttcttcttcatcatcgtcagctaacataaaaggcaccccgtaggcctgctggtgccactcattgatttctggaggaggcggatggagaggcacgtcaggcgagcgaggggcaaaaggcatacccatagaggaagcttgacgacgaagattgtcgtcagtctccctctgacgccttgccagctcatgcacatctgcagaaatattccggcacatagaaaagaatgttgcaatcccatgggccaggcgggcacccatccctcggccacgacctcaaccacgaccacgaccacgtggcgtgggagatccacgaccaggggagggacgtgaggcaccggcagcagcagcaggaccaacagaagtatgtgcacgggagctagaaggggctttcctcaaccgccgtgctggattgtttggatcaatccagaaaggggtataagatagatatctggtacctttctcatagcgaaactgcgt

SEQ ID NO: 47981 - DNA, 557 bp, Zea Mays
gtggtttgctgccttggtgagcacttgtcgatagccctccgcgtctggggtgcacggtagatcattagcgatgaactcccaccttgctcggtgtatttagtgctcgagcgaagtcagggtacatgttccgagcgaggagcgggttttcgcattggagtcgggcatcctgctcggcctgttcccgcttgtgttctagagcatggcggcgatcacagtggcgggaattgtggcgctcttggagtgttcttttgtcgagggtttccccatctcaaaagcttcgtctcaagagatgggttggctggattgcgctctccagcttcgtggtgacgtcgtatgttacgacgcctgttctattgtcgtcgcgcatcgcgttggggggttcctcccctagcacggtgggctcgtcatcagagatgggcgctgtctccactctcccctggatgaagaggatatcgggggaaaagggggtgggagtggtgacgcgtcctctcctgttctcccttgaatgtggagtagttggaatgattgtcggtgatgctccctgggccttgtctaga

SEQ ID NO: 47982 - DNA, 435 bp, Zea Mays
cagcagcaaccgacgacatcgggggaggcgaatgctgatgcggaggggaaggatcgaagggagttaggctttatacgtgcatcaaaaaagagatcggtctcacctggtgatggctgctgagtgctgaggcacatccttatccaggtgggcgatcggttacgtgcgatgaagacgtgcggcgaggcgggcggctagttcgttgttgtacacgcgacgatgaagacacacgctgggacgggtggcaggtttgttgcgatgaagatgcgttgcaatgatgaggccagtttcacccacgtaggatggtctaaactcgtccgttgcgcgctgacccaaaaattttggtgtcaacggataactactccccgcgtccacctcccattccggatcgcacgccagattttcctctacaacatgttcagtagatgtttatggtgc

SEQ ID NO: 47983 - DNA, 591 bp, Zea Mays
aacccagtcacattgaatttggtaagtctactgtgatggcagacaacatggttatgatgaagaaattgggatactttggggaggccgagagcaaacttgtccgttttgctgggaagaggtgattccagatccaaacgacgatgaagtcgtagtttttaaaagcttcttcagggtaggacttcgtttcccactgcatgagatgattggagaagttttgaaaatttttgagatatactttcatcagctgacaccaatgcaatcgttagacttagtgtctacatatgggccttccgaagccagggtatgagtcctaatgcagaagctttctaccgggtgcacgagctgcactaccaaacaaagtccagagcaggtggtcttcatgagaacttcggctgctacaactttgcatatcagaaggatacgaaggccctggttctcagctatcgtaccaagtggccgaccggttggaaaagcgaatggttttacataaaggcagacgagaaaaggcgggagaagctgacgactatggttgcgtccattgaaattgagcttcggaatgataaggcccctgtgccacatgcggcttggctc

SEQ ID NO: 47984 - DNA, 823 bp, Zea Mays
gtatgtactagtgatatatacctttttccagaacaatacatatggttgacaagcggaaaagtagtcaactctcaactctgaaacttgtaataactgaaaaaaagagagaaaactctggtggaacgcatgctatttccttgtatcttatacctagtaatcctttagatgctcctccgttgtgttaaagtctcatcgtatgagtgttgtttctgcatgtaaatcgagagcttagacctttgactccaactgtaaatacacgagtccatacagaaagcaaagggtgccgacaacaacacggcgtcgcttcgtcacatgacagcaggatctgattcctctggctaagagcaggcactctgtattggagggatcgggctcctaaatcctgatctttaggtccagaatagcatcttcagacagagaacccacggtctcattcagtccctcacacacacactctctcttcttaccttatctgcagtggcagaatctgcaacatttgctatctgtcattcctttgaacagttacaccataccttgtgagtaaatcattagccaagacaaccgtttgataattctgcctagtttttctatattttgttctctgaagcattttctgaccaatcactggccgcaacatgttatcagatacgcaggcatttgccctggcatagcattgcgtatcagcaaggtgcatgctgtgtaagtgatggtgtggaacagtcgccgttgatatgctgccgcgatggttcttctcattgtatgatgcaaaccccccaggacaagtagacggcaatggagaatatgtggatagacatgtatcctt

SEQ ID NO: 47985 - DNA, 337 bp, Zea Mays
taacttaccagtattaacagcccttagatcatctatctgcctttgaagagcaacaagatcccactgtgacaaagacgatatctgctcaggcacctaagctgcttgtgccttcagttggacaactacttgattcaagatgccctgcagagacaaaagttagaagatagaacaccgattgggaaaatgcaaggtaatgtgagttccataaacatgtacctagaagttcgctaagaaaactagaagacccaaagctagtacaaccaagacatctgtagaaagcaacaacacccacagaagccacaagggaagtagggacaaaagctgaaggttctaaatc

SEQ ID NO: 47986 - DNA, 352 bp, Zea Mays
ctggctcgaagcctccaaaatgggacaaaaattattcacatgtatttggagtgccaggtggaagaaattatccatcaaagcagctaaaaggaacgcgaagaaggttttacttgatatctattctttgtttcacaatccatcggtttaatcaattattgatgcttccttgccttataggtggagaaggccctaaaggtggttgcatcaattagggaggcccaaaggataaaagagctccaaggtatcagctttgccatttaatcaaatcttttattatttctatatgtgtcactaactttgtcttcaaaagatgcccttccacaggaggtgattgaagaatatcaacccgaag

SEQ ID NO: 47987 - DNA, 879 bp, Zea Mays
gttccaataaccaaagggcggtcttatgcaagctaattcgcacgcacttgattatatatagttccttgcagaaaagaaagagagagagagagaaacaacaacattagctagcagagacgcgtcatcgacaaacggctccagaccaatggagtataataataaaacgtcttagctagctggctaattaatgtgcaaacaaatgagctgagactgagagagaaggggggtagcaagcatgaccatagcctttgcaggccagcagatgcctgctccatctggttgtagttgtagcaccgtacctgacagtttagctatagcggttgcctagctaatcattgcaaggggatgattaactaatcgcacaaaaacaatccatggccggctttggtagggtagctagtagctcttctctgcctacgcatgcagtattattgcagtgaactgtgaacctgcctatcttccttggcattgtgctgaaggctgaacctatacacatatggcgcgatacggcatgcctggccgcctctgcgtgctgcctactccccccatgtcaaaagatgagacaggcacagacgactactccggagtccggacgggcccattgaatgaaccaaccagtcaggatctctgtatcaatgcactgtctgccagtagagtaccaggtcttggagccagccacacaggctgcagctttagctttagctgcggctaacagaatgttgccatgaacagagcgacgaaagctggtgccattagtgcgcctctgcatgctcgtctccgcgcgctcagctaaacagctgactggctacttctgcaaaagctcacatgtgatcgaatactaccgcccaaggttttctgttaccctgcacttggacagcc

SEQ ID NO: 47988 - DNA, 898 bp, Zea Mays
ttgacatagcgcaggatgcgcttgattagcgcaagatgcagctcgcgagggtcgtgcatgaagaggtagacttgctggacagcataggccaggtccggcctggttagagtggggtattggagagcactagcgaggctctgatactccgagcggttggcgactggagcgccctcggaggcagacaacttggtctgggcatccaccagagtagctgtcgggtggcattcagacatgccagcgcgctggaggagatcaacgacgtactgccgctaggagaggaacagtccactattgtcctgtgtcaccgagatgccgaggaagtggtggagatccccgaggtccatcatggcaaactccgacgataggcgcgaggtgacgtgctggagaagagtcggtaatgatgcggtgatgatgatgtcatcgacgtagaggaggaggtaggccatgtcgtctccagtcttgtagatgaacagggaggcatccgttttggaggtggtgaagccaatacttcagatgaagctggagaagcactgattccaagctcgcggtgcctgcttaagcccatatagggacttctgcaataggcagacataattaggtgtagcggggtcgacgaatcctttcggttgctcgcagtagacagtctcctcgaggttgccgtggaggaaggcattcttcacgtcgagctaccggatgggccagtctcaggacgcagcaatgctgaggatggtgcagatcatggccggcttgacgaccgggctgaatgtttcgtcgtagtcgacgccttcctcctgggagatgccacgaacgacccagcatgccttgtgccgggcgagggagccatcggagtggagcttgtgtttgaacagccacttgccagtgacaatgttcgcaccag

SEQ ID NO: 47989 - DNA, 309 bp, Zea Mays
gtctgtgttcaaccctattccctttcagccaagtttcgacaccagctccgacaccaggatgtatgccggacttcctttcccctcgaggtgcttggactccaaggaagaggatggtctgagctttggcttggacttcttcgagctatgggatcctaagtccatgctgcagttcttgtatgcatgcgacaaaatgctttccgagagctcggaaggttacaacactggtggggagggttgcgacccaacctgggaatgcctccacattcactcagagatccccgacgaaggagatcacctcagcatgccacg

SEQ ID NO: 47990 - DNA, 657 bp, Zea Mays
ctgcaagaaattcaacacctgatggccagagtacgttcaactgctagggtgacccgtgacggagaggaggccgaagccaccgaaacagccctgatttccgaagttatgaagcaatctggattggttgtgatagaggggactattgacgaagatgcacgtactgctgaggctgaagaagctgatattgaggaagaaaatgctgatgaagaggaagactataacactctagtcccagtaaagcccagccacttagattttgaaaaatctactgtctctgaggctgatgtgccgatgctgatggagctcggttacttcagggagacagagaagaagcttcttcgttatgctagcgaagaaaccaccccagagccaaaaaataacgaagtagtagttttcaaaagctttttcaaagctggattgcggtttccgcttcatgagatgattggggaagttttgaataattatgaaatttatctacatcagctgactcctaacgctatcgttaggctcagtatcttcatttgggcccttggaagccagggaatggatccaaatgctgaagccttctaccgagtacatgagctacattatcagacgaaggccagagaagatgggcttcatgagaattttggttgttacagctttgcttaccgtaag

SEQ ID NO: 47991 - DNA, 344 bp, Zea Mays
tgaatgtcgtcttcggaatgtttgaaggtcgaatcctgagctggtgataacctgaccttagatctatctttgagaacacgctggctcctctcaactggtcgaacagatcttctattctgggcaaggggtacttgttcttgattatgacctcattcagagctcgataatcgatgcacatcctcctggtgccatctttcttctccacgaataggacaggggcggcccaaggcgaggtgcttggcctgatgtaacctttctctaacagctcattgatctgcttcttgagttccaccaactctggtccagataccctgtaagctcttttagaaatgggggatgtaaca

SEQ ID NO: 47992 - DNA, 651 bp, Zea Mays
ttgttcctctttatttgatgagtaggtaggcagaggcgcgagggtgcggcgaccttgtcgctagaagactccgatgagcaattaacctcactggtgcagctcaaacaaggtgtaagaggttgcggtcatgggttctcactcgggagcgcgatgcgcagcggggacgggcacgcctttggcaaggtctaatcgacggggacacagtgatgtcactgcggcagctccaaacctgcaccaggagaggggctaagcgggagcagagcagagggaacgtgaagtcgggaaggtaagaactctgcgtgttcggggtacatccctatcgggcggtgcttaccaaagcaatggaaataccggggactcatcagtggtgcggaacactggcttgtcagcgacgacgtgcaacgacgatgtgcagcgtgcagagcagtggaactacggagtgcctgggcgtgtgaggagtcggggcacgcgcggagttcagatcctcctacttaggttgtgtttggttgaaaagcggacgagaatggagcgttttcattactgtttttttaatgtttggtttccaacgaaataggattggagcggctcctgaagtttatatatggtaaatatttgtgacgctctcgctccaataaaactactggatgcgag

SEQ ID NO: 47993 - DNA, 519 bp, Zea Mays
gtttcctagctcgcagcatgtagcgcgagcgcctggaggtttccgctaggaattccggccatttcgctgagttttctctgctgctcctctcgattttgtgcttcttcgacccgcgccgcggctcatcccggcggatagatagattctaccggttgtggtttgatggtttgttgcttttagggtttcgtttggcctcggcgttttaccgtccttttggcatcggaaggtggttggagctcagctcgtctacatcgcggccttttcctgtgacgtttggtttggttttgatcgaaacctcgtcgtcgccattgctctgattgcttgccttttcctgtgccgcggtttacaccgatcgatttcggtggtgctgggttgcttttgcggccgtgttgacggagaggattaagtttcagctcaataatgtgggagcttcagcagcaccgggcagatgaattttctgctctgatcgccctctccatgtgcagcccctcccatcgcattctatttctagctttactt

SEQ ID NO: 47994 - DNA, 345 bp, Zea Mays
ctgttaaattgcactcggtaaagagcttgacacttgacaaagagtctgtattgatccatctttataatagtcatcgcttcccttagaagggttacattttctggacagccgatgatgagaaataggatgaagcagtagtagtcaatgattctccggcagaaaaaacaaggtccagtggatgtttctaatgcagtgaagagagctattgctagatcgctcatatcaacgtatggcggaaacctaaccaacgacgtcggagaaatatcacagtggcagtcgatccacaggttttcttgggcgctcgagggcatctctcagtctcagctggaagtcatgttaatttgg

SEQ ID NO: 47995 - DNA, 546 bp, Zea Mays
aaaagtgaattgaggggttgggttgaaattggatttggcaaatagaactggatctcagtaagtcagtaggctcaccaagatgtgctgcaccagcatagatgcacacagggacacagtggggctgtcgagcatggaaaaagaagcaaaggcaagatggacgccgtacctccggttctgcgacaagcgtggcaacgactgggcatggggggaggctagggcatcgagacatgtttgtgtttttcctctagtcttgactgggatgtgcttgacatgttcttctttttcctctaaagtaccatgtttgttttttgaaaagtaagccttatcaaggcaagtggaagcttctattgctgctcctagatattgaatttttagggattattttaatcgtaaacatctcaatatttgttttcggattattttattttgttgttgtcagttcttgagatttacaatctactaaggcaagtggaagcagtattgttgtaccgacagctcatgttggaaaataatattttagaggaacccaatgaaagcttccttcag

SEQ ID NO: 47996 - DNA, 567 bp, Zea Mays
agttatcaaagtatcttgtaatactctagtgtcatgcactgaacctggccaacccgtgacaacaaatgtgaacctcatatcgaagtcacaaacggccattacattctgtgatgcgtacccgtgccgaccaatatatttcgcttgctccgtggccaggacagacgcgggaaaattacttccatcaattgctcctatgcaatccttgaaatggggccaaaatcttgtctctcgcaacctagggtgaatctctatgaaatttgggtcctttggcttgattacgtctgaagacatcttatatagtgcattaaggacttcactatacttgcgactaatagtttccaaggagtgaccaaacttattccttatctgcctaaatgattgtggacccccacatgcccacaagaaaatacctagagcttccgtagtactaacaccgcggcttggaaccagaccataactttccaccaacgtatcatgcaatcgtctaaaaacacgtgctcctttcagtcttaaacctaaaaggaagaaacaattgatgaaatggttaaaaacttaaagttcccagat

SEQ ID NO: 47997 - DNA, 676 bp, Zea Mays
gaaaaccacattgaccaattttgtttggttttgacaattggcgtgggtgtctgtcacccgatttcataggtcaaggttgaaaatcatactagcgcacaagtttgagggtgttcatggaattcttttctctcctcatgccatgctgccatatgtgtttctactaggtagtttgtatggtggctttcactcatatgaccatttgaaactggttacacagtagaccaccctttatatctaaaagaatcaattggtgattttatattatatcagaatatcatgtaatttgatagtggtaacaacatgaagggagaaatttgagaggatagttctctatttctctgcttgcactgtgttactatatgtttcacatgttagttccaatttgccatatatctaacagttgtccataaggtcacccttttgataagcctttggcagttctaagatagcactatttcattgcacacccaccattatggattattttttaagggttactaacgcggcctttcccaagccattaaattttgaagtggttaaatataatttctcagccataaaactaacctaattagtctagcgcggtggaaaaaaccatctgtgggcctaaattagaagctcgtgggatcgaatttttgtgctcttttccccacattttttagatttaaaagggggt

SEQ ID NO: 47998 - DNA, 519 bp, Zea Mays
caagggacgaggccactgccacgttggtgtcgtcggtggccgacctcgagacgaaggtcagggtcactgtcattggtaactctctttcccatgcttctcttccattttcacattcaatttggcaggactgtcatttatcatttcattaggcagagctctcggacaagctttccccggtagaggccaacttcactgaggtgatgaatcaacttgtggcgctcaacgcttagcatgtcatcctgtccagtgccatcatatgatcatctcaaggtgccgcagccggagggcacatccatatcagacgattgggtagcccgtgccgtcgaccgcgttcaagagtttgaggtggacgctctccggctaggggtaaaccatgccttcattgtcacccgctcttgttacaacgattcaatcgtgatggtctagacgagccacagttttgccctcaaatggtgggacgatgagttggacgatctggaggtggtgatcaacccctacgctcggtgtctggctaaccgc

SEQ ID NO: 47999 - DNA, 782 bp, Zea Mays
gctgtttgcagtctaaaattcagactaacagtgatagtgagccaactttgaactagaaatcaaccctgatctaataagaatttggccatggttgccataacaagattgttgttggatcatcagacaacaactttgttactggccaatcaactggttgccatagaatattgagagagatttgaccctaaaccttggctgtgaggcgcactgaagaagaatttgatggtacagtgaagggatcaggtcgccagctcagcccctcgccgccggcaatcatgcgctcggattcacgtcggtgccgcgattcccgcccagctaaacacggataacgatcctctggagaaaagatctcactgtggatgatcttggagcacagtagccactctgtcgctcatccacttaccggcgacgtggccgcatgtccatcaccggtgtgccgccgttcttcgcagttatgccacgccgtcagccatcttaccacgtcgcggtcgatcgcaacacaccgtccttctattacctaaggccttgccacggggtttgccaccaatcacacgtgccagtgaactttccctcctccgaccgccgcgcgtcatcgttccaattctcggccaccgctctcgcttagtataaattgagcccgtcgtgagctccgcaagatcatcacgcaccacaccacccagtattgcctccaatcttgcaaccgagagcttgaatttcgaatttcccccaaatctgctctaacccgccgcaagaacaccctcgccgtggccagtgcaattcag

SEQ ID NO: 48000 - DNA, 592 bp, Zea Mays
ctttgacccaataaatcaatgtaagtgcaaagtaagcaacagtgtgatttgaaatgggagcataagacacaacaatgatatgaaggcttgaattcaaattactaaaccaaatgccgtttcacccatctaaatcatataaattgagataggagcaatgcgagctcgctgtacgaatcaaaatactccaagaccatcacccgagatgaagagaaccatcattaatcctagaaagacacctaacagatcattgtgccctaacaatacaaaatatctcgccgataccatgctaaaatttgattggcgtgaatgcaaattatagaactcactcaaacccagtttctagaataaatttgagaaatgcacttcttccaatcagcctaaataaattagaatagccataagtctaggaccataacgcataggaaacacaagattcctgaggaaaattgctaagcaaagtcgcaaccaaacagtaacaaatgtccaatgggaatgtaataaacattcaaatttttcctgataaatcaaagtaggtgcaaagcaagcaacagtttgattaaccagcaacgggttgggcgcggccacctgcccc

SEQ ID NO: 48001 - DNA, 345 bp, Zea Mays
agacgcagaggaagatgcatgaacctcgtgtcatgcagctgctgccggtaggtgtggctgagagaccacagagtccgtctggcagcatcgctgaccgaagcagtgtaggtggataaaggtgtcagggactcatgagctgatagagtcctgaaccccctatcccctacatccatcaccctgacgtggatacgagtgatgtagtagcaagcccggggaggctcgcacactcgccttgtctcgtacaagggtcggacgtaggttcccaacgcatgcagcatgtcttgcagcaggttggggaagtgccccgtctcgaacattgatgtgtaatattcggtgacaggccca

SEQ ID NO: 48002 - DNA, 669 bp, Zea Mays
tttgcatctgatgatgtttatttttctgcttttattcccgtcgtaaataataagcagattttttttaaaaatgcatacgaaggttatatattgttcataattaaatcgctctaaatatttatgatgtgttgagcttttggactcacgtcgagcgattaaattgtatagtgggtactcagacacgtcgatcagactacgttattaatcgaccgagttatggcattggttgagcactggctacgccctgacaacacgacacagtatttgtgtcgtacgaacttggctgcgtcatttgattgatatgtcgcactctcgcttaatcggaccactctcgttgagtcggaccgccatcatcgagtcacatatttttcgcacgccttgtaggcattgtttgtctatcgtgatcatcgagccacaattgcgcatgtttcatggacttgtcatgtaccccgactattgagccataactgcacctgttgcgcttattatgaaggcttcctatgctgttgtagctctgatggccgcacacgcgttgacatcaaatacgttagatcttgtactcgtgtggattgtggtgagttgttcaaggccctgaagtcatattatgcacaaccttccttttttttgttctatattttatttgattatgttgtgtggcatcatatattt

SEQ ID NO: 48003 - DNA, 826 bp, Zea Mays
tccacatcagtcgatgcgcatcggctcatcaacatcgactctaccccaacctcgcatcaaccatgtcatccaggaaactacgcaatgctttcacacagtctggggggaggccagttcttgatcactgttactttcgcagggtcagtggaaatacccccagcactaataacatgtcccagaaattccaacgtatcttgaccaaaacgacacttggactgcttaagctttaactgattttggtctaggatttgaaaaacctgttccaaatgttggacatgatgttccaaagtatcactgtaaacaagtatatcatccaggaaaaccactacacacttgcgtaataatggagacaatatgtggttcatgaagtcctggaatgtggctggggctcctgtaagtccaaagggcatgaccttgtactcataatgaccattatgtgtttgaaaggcagttttatattcttccccttcttgtatctgaatctgatgataaccagccatgtggtccaacttagtaaatattgtagctccacctagctcatctgtgatctcatcaaaaacaggcataggaaacctgttttttacagtgtaggcattgagcctcctgtaatcaacacataacctccactctccatctttcttcttgaccaagagtactggtgaagcaaagggacttgaactctgttgtatgatgccagactccaacatttcctgaatttgtctttctatctcattcttctggtgtggagtatacctgtagggtcgtaaccagaaagttgttgctccaggtaataggggaatagagtgatcaaatggcctctttggtg

SEQ ID NO: 48004 - DNA, 500 bp, Zea Mays
gttggatctttgtaatgattgtcatcaagctgtgggtatcccctacaacttggtgtagttattaataaagtcagttatttagttgggtaatccatgtgtttccactttcctctttatctgagaagttgtcagtgaagatggtcatttgtttagtgctataaagatttccgtatatcttttcttatgctaaaggactgcagagtcagatttgatatatgtgtgtgatttctacagatgtctgagaataggcgcagaggtgcgaggcatgctcagcctgaacagtaggcaccccaagaggaggcagccccgcagcagcattttccaccgccaccaccgatgaccattgagcaaatgttcttgatgcagacccaagcagtccaggcaattggtcagaccttagcagctatgcagcagcagcccccaccgccttagcctccagttcaagtccagatgccacaagtgcccagagacaagcgggcagaattcatgagggtccatcc

SEQ ID NO: 48005 - DNA, 751 bp, Zea Mays
ccgctgcggggacaggggaagcagagaaaagctgctgctttggccgccccagctgaacctgtgccgaaggctgcagacaaaaagatgaaggtacttacccaccggccgcgttacattgaaccggctgtggtgcctgagtttggcagggaggcttcttcagctgttgaatcaagagaacttgttcctctcatgcagaaggctgaagagccggctataatgccgaaggcaccttcggttgagctagttgaaaacgaaggttgacaaagataaggctggaaggtcaaaaactgaagaagtaacaaagatgccagggattttaagtccttcaacagaagcaacagcgctgaaggcagaaaagagttctgccacaactcctaagagaagtaggatggtaaatgtattagatattttagaaacaaccgactccataagtcccgctcccacagggaaggttgccgaagctgacaaaacgcaacccaaagctgatactaagcaaatagaagttgaaactacaataacccaggctgaaaccgaggcaaggcccatagtgcctactgagacgaagcttgccaccaccgagcagaaggccgaaggaataactccagatattaatatagcttttgagaagagtgtggccaaaggggccgaatcccttgcccctgaagcaccctctgaagattttgattatatcattcgacatgctttgggaaagagattatccgaagaagaaatttttgaagctaaacactat

SEQ ID NO: 48006 - DNA, 903 bp, Zea Mays
ctagactcgaaatgatgccttttttagtgcacctagagaggatggatcgctttggttctagaataatcgacgacaatcgaatatgcgacaacactgatgagcacacgcgtacaaattacgcgggagcaattgtttgtggcccgatcttctcgaaggatgttcgaaacttgataaatatcgctgcgtgacctgacgaagaggttgcgcaccgcgagatcttgcacacgcgacgaacaaccgagacaatcgcccttccacgtaccgatgaagccagcccacgcaatcacgccatatagacgtgaaggcacaaactgggtgaaccgcagttcggtgttctacaactccctcgggaatcgaaagaacaagtctgcaagtctctcaagactcacgttgagaactcaaagagtttgtatttctgaattggcagccaaaaagctcgagtcgtcatctattacatggatacatatagcactagtggtcttttcagtttagataaaataaatgggaacacacagcgagaagttgtagcactccttctattaatagcctggcctaatggaactctttggatggttgatactcttctgcatgcttgtacgtgtgtggacagcaacctggttgctgactgccttcttaactcacaaatttatttgacatccacggctcatctgcatggtagctgaatggtccgtccttctccctttattctcacaagtacgtccaagcaccaagctatcattattcttctaagtttcacactgcaatatcagcatgtcatagagagagctgatcatcacaatgttggaaggcaaaatccatcatcgtcccatgaacttgggtacacgccatcattcctaagaatattcaaacaacaacttgaaagcactgactgatctggatcat

SEQ ID NO: 48007 - DNA, 457 bp, Zea Mays
tggttaccagccaaggtcggtgctctttggcagggtcgatgaggaaatcgtgggatgcattcgagaccgtgctggtgcaaaagttataggtaccttgtccaagagtgttggattcccgaagcttgagaacgacagcagctgctacaggcgtcagcatatcataggcagcctgttttattctaacttcaaagtaagaagctttctacaagttatcactgatatgttcgtattaacttaagtattctaattttgagtttgtttttacagagcttgctactgagcaaagctttaaaattgcaacaagatgatgaggatagaaaaaatgaagttatcatcaaaggtttagaggataaaatcaaagaacttgaggattctctaacagaaaaagatgagttactgcgctgagtcgaaggatcccttgccgaagcgcaaattcaaaataagaaattgagcaaag

SEQ ID NO: 48008 - DNA, 362 bp, Zea Mays
gctgtgttgctttgcttttgcctaggtgcataattgtctacttcattccatgctacggtttccattaaagtttcattggaaattttcttattgtgaatgcttcatttgcaggtcataattatggttcctcctcaatggctactaggtgcagtagggattcatatgatgacagtgttaacaactgcacacaagttactgcttcgaaggtacagaaatgttttgctatgccatctagcatttcttatgtcttggaagcaccattgaatcatcgataattcaccttctctaatgcattttctattacgcctgttcaggatgtttcttctagggaagcttcaaatgtcttcacatggttaggagca

SEQ ID NO: 48009 - DNA, 453 bp, Zea Mays
tttgtgatttgccatgatccatacgtgtgtcattttaggataaatcaatttaaatctagcctcgcacgcacacagatgcacttattattctctaagcttaatgctttgtgcatggattaaattaacaatgacaatatgttgtttagaaaacaacaccaataataatgctaatattttagacccactactggtacttgctagataatatagtgttgatatgatcatgatgcaacacgacatgttgattaaaagaacacgaaattggacctgggagccacatatgaagccaaacgccatgtcgttgggccaaaacaagcagagctcgcatgcaagctgcatccactcgttgaaggtcctccctattttccctgaaccacgccgtcgtggagcggtgccgaggagcagctccaatcaatcatggtgcccaccccccaaaactcctaaatactcaag

SEQ ID NO: 48010 - DNA, 542 bp, Zea Mays
caataacataaacatttacatctgcataatcacaactcagtttttaatagacattgtttcagcgtacaacatattttcacgcagaaaatgatatattggcattgaacataaatactaacttgtcgggggggagggtccactgctttcatccactttgtaacgatcttcttcatcattttggaggactgctatcaaggttacgcttcttcaatactggcataaagtcatcgtcgtcgtcaccgacatgcattgctttgtgactgacagacgtcaccggcacacacggtatgtcgacactaaagcactcatgactagactaaattataatgcgctttggattagacggaggtcggtctacgttcttcatgtatgattttcctgccaaaacaaaccacacagaaacatataaacatataaatttaaacttttggaccaaaaaaatttctgcacatatgcaacaacaaattaatatagtaagccacaacaacctacaaaccacgaataacgatcagttatgcataccgcacgtgggctcttttttg

SEQ ID NO: 48011 - DNA, 624 bp, Zea Mays
cacgagaaagagagagagagtcagacgattttcaacaggttcgggccgcttgagaagcgtaataccctacttcctagggtgactttgtatgtgggaggtgtttacaagtggtgtcttccaaatggtgatgtgctaatgagatgaaaatgatggggataccccttggccttatatacacgaccgtagggtacttcccgcgtacatgctgatcatactcttctagattatcctctagctaatagtgaacagactttacttatctcgaggaaaactcgacgcaattgttccgagctatccccaacgttcaaggatgtcgggcgcgggaaaagggagcagcttcaataggatcacgtccaagccgcgaataatctagatgtgagcccatcgccttcctgggttgacccatttccaccgttgtctttgcctggcctacgacgcggcgaccttgcggggcgactggcttgtggccccaagcaaggttttcgcttctagtggacccaggggacatctgtaccccacaagcccccaatctttgagttaattttgaaataattgattcaaaggttcctgttccttgcttatgggttcgtagtatgacttgaactttttgtacctctgttcggt

SEQ ID NO: 48012 - DNA, 479 bp, Zea Mays
ctggtagttgttgttataagagaattctgccaaggaaaggcacttgtcccaattcttcccatagtgcagcacacatgccctcaacatgtcttccaaaatctgatttaccctttctgtctaaccatctgtctgaggatggtatgccgagctccttatcacctgagttcccagtgactcttgcagctgctcctagaaacgtgctatgaacggtgctcctctatctgacacgatagtctttggtatcccatgtagacgcactatctggtcaatatagatttctgcatacttttctgccccatgggtggtatgtactgccaagaaatgagttgtcttagttagcctgtccacgatgacccaaatagaatcgtggtgtcgggatgtgttgggtaaacccacaataaaatccatgctgagatcctcccatttccaagatggtatgggaagggctataaggtacctgctaccttcaaatgactggt

SEQ ID NO: 48013 - DNA, 492 bp, Zea Mays
ctagggtgagtgtttttcttgggaggcatcgtgggtgttgtctacgtcacacgaacggtggacgcaaaatgttgggcacaaacacacgtaaatgcgttgtcaggtggacccaaacactcagaaagcatgtgacatcttaggtgcacgacaagacagatgtaggaaactttagattctcgttatgtgtgtcccgtcccgctatagcacaggggtatttataggcatgtccaggggtacatggtccaaagtatgaccctgcccctggataccgaccacatccaggggatatccagtgtaatggagtaattacagtgttgtctatacaataaacggcacacaccagatagtgcacccgcacactacgctgacttgtggacccctagtgacgtcttctagtggaccggtggcatgcaatgctgatttgtggtctttgtcccaagactcttcacgtcatcgctcccttcgttgtgccttaccagatgatgatccttc

SEQ ID NO: 48014 - DNA, 836 bp, Zea Mays
ggagcttagagcatctccaagagatacttaaaaggttgatcctaatccttagtttaggataagaagacaaaacgtgtttccaacagaaccctatgccatatccctatactgccgcacgcgaaaaaaatcgcctgagctgcgcaaaactccgccgccgagcgagctccccatccaacgtctgtatctcgttcccgcattgattttagcgattcgcgccatcccgcgtcgaaggattttatcatttcgcacgctcaccagaccttggagaagaactgctcaggcgacggccgcatacaatgcaaaccagagatggagccagtcaccggcgatccattcatggcgcaacctttagctgcagcgctatcgtcaaatcggtctccaactctgcatcattttgaggtaaagcactcccctccccaactcctaccctccgctgtcggagcgtcacctcttattgaatcgaactccccagcttggcatgatttctttgttcgcttgtgagggccataggcaagctagacgggatggtttaggcactcgctttggtccaggaaaccacatcttgtctgagcgagagcaaatacattcaaatcagtgatgtatagattaatttgtgcaaaatctattgtgtgtgcattgatgttaactgatgtcttctttttaatgtgtccagaaaatgtagtatagggtttttcacagcatctttttcacaacatcataaactagatggagacagtaaacaagttctgtgcttgtatatcagatatcgaaggtagaagacaaagtggtgtaaccttgcaagacaaggtaactgttgtattatttttctttgtttt

SEQ ID NO: 48015 - DNA, 620 bp, Zea Mays
cgatagtcatttaatgtcatgtaggacaagttgctgatgtggcatatgagttaaagaggtgagagaaaaagtggtatcatcctaaagatactgcttcgtctctgtatccaatgtcttggttttcggatgatactacactagtggtgctatggttcggatgatactacactagtggtgttatggtgtcttctctacgcattcacatagtattttgatcataacacatgcatcaacttattatacacaagatgtcttaaatactgtaggatgatactatgcactgagaatggtgtttcatccaaagtgtttgatactatgtatcctatgtggcagtctcggatcttggtatatcaaaccctgcaccgggagtagccttagttctctctttttgcgatacagtcctaggagctggagcaacatattcaggatcaataagctattctgtcgatttggatgccttttcccctaactgtacaactataactgcttttattgtgatacccgagtatattgtgatacccaattgaggtggttttaacgtttagagcaactccaatagcctatttaaaacaacgtactcggtaaaaaaagaaaaaaatctcgtagaaactcgttccaat

SEQ ID NO: 48016 - DNA, 622 bp, Zea Mays
gaataattgacactgcatacgaaacgctcttccatggaacactggataaaagcccgattaccgagagaattagcactggccttgttttcacagaacacgaggaagagatgttttcacctccaaagagagcagcagcgattaacaattcaggggagggagagggaggctgcaatggcagtaataagtacaccaactggcgataaacatatgcagagatcatgacaccaaccacaccaccttcctctcatcttccccgtcactagcactagcgcatccagtatccattttcctgattaaaaaccgattccagtacgattagtttaagtgtccaggccaagatccaatcaagcctgctctttagtagcagcagcacactgtcacacacaacactgcaacaatcgttcaaaaatctgttctttcgcttggtttttctttggggggccaaattgtaggcaattgcttggtgctcatttggatccagatctcctgcgctttccctgtagtacaaacaattcatggggtctccccctctacaatcccaatgcttgcgagaggcgccacctcacagagccagccatccaccgcattgccgcccccctcgcctctcctcacgtcacccgcc

SEQ ID NO: 48017 - DNA, 911 bp, Zea Mays
tttcattatcaataaagctttcgtgttctaccgcatacaaactctcaatcaacaagcagtttaagtcggaaacgacttaaaactgacacaacatacctgcatgcttacataacttagtgtgattactataccctactaatggagcaatcagcttaagtcggaaacgctttaagtcggtgcgacattatcacgcttgcataacttaaggtgattactataccctactaacagagcaattggcttaagtcggaaatgccttaagtcggtgcgacatgctcacgcttacatagcttagggtgactattataccctactaacgaaacaatcagcttaagtcagaaacaccttaagtcggtgcgacatgctcacacttgcatactcaagggtgattacaacaccctactaacagaataatcggcttaagtcgacatagcatgctcacgcatacatgaactctatgatgcacaatctcaacaagaaataccaactcaatgaaaagtgttttctgttcgaacgaatcaaaatttgtcttcattacacaattactgtgcaggagcgttctcgcaggggaccttgccagcaagatcaccagagggagaaggtttactcatactagcggacgcagcaataacaccagcaacaatgtccttaggaatcacaacaccaggtcttttcatcaggattcgaccagcacgaatagctttgtctattgctttatcacacattgctttcatgataccatggtcgtcatcctctaagagcttaatgtcacgacgagcgatttccaattcctgcgaaacaagtttcttcgaagcacgcaattctttgatgacagaatcttttgaagacagtaacatattaagccgcgacacttcagtctaagaaaccctcaactcatccctatgatggtc

SEQ ID NO: 48018 - DNA, 420 bp, Zea Mays
agaggcagtcctgtaactggagttcggcaacggcaagggagttaatggtgctgttgaacatggagcagaggtggttatccaggtgaccctggtttttgtcagcagcaccgcacaacatgttaaagtcaccgatcagtagccatggacctgagatgctggggaggaggtctgagagttcagcaaggaaggttggggagtcctggtggttggatggggcataaacgttggtgatggtgaggggcgcgtcggcaaggtgtgagctgaaggtggtggtgagggagaaagagcgagagatgctggacgtgagttcaagcacagcgctgtcccaggcggtcacggcgccccctggaaccgacagcgttgaggcagagaaagctgggtagatttttaggcaaaaacgagcgcgcttttagacagctg

SEQ ID NO: 48019 - DNA, 423 bp, Zea Mays
gaagtggatacgggtccttgggacaggccttgttcaggctggtgtagtcgatgcacatccgaagcttcccattcgctttggggacaatgactgggttggccagccacactgggtgatgaacctcttcaatgaagccagcgtctagcagcttccggacctccttttgaatgaagtcctgccgctcgacggactgtctgtgaggcttctgactcaccggcctggcgtcggggttgatcttcagatggtgctcgatcacctccctggggatcccaggcatctgcgacggctcccatgcgaacacgtcggcatttgcctggaggaaggcgacgagcgcgagttcctatttttcacccagatcacccacaatgcgagtggtctgggtggaatccgcagtaagctggatggctttaacggggatgtcgt

SEQ ID NO: 48020 - DNA, 400 bp, Zea Mays
gttcccaacgcgtgcaccacttcttgcagcaggttggggaagtgccccgtctcgaacattgatgtgtaattttcgacgacaggaccaaaccccatgaagtagtcctactgggcgtagttggcttactcgttgacttgttcttcttcgtcctcgttatcgtcgtcatcctcgtcccagagtcatctaggtcgtcgcctctgggtgcaggagcttggatggctggtgcaggcggtgccgatgtcgatgacctagctgcgaaggccagtgactctgtcaatggggtgggcgtcgacagctgttcctccgagttgtcctccaggatgacttcattctccactcgaatgtgagggagattcatcggaacttcctcgactaccactaggtagacagagatttgtcg

SEQ ID NO: 48021 - DNA, 602 bp, Zea Mays
gacatgttggagggtccagaaccgattaccatcgatcctagcatcacgaatatgtaatgtaggattttggaagcggatgtcctggagaagggcagaccctccgctggcagggaaatctgtgactggctcatttgcagatcgacgggcctccgccctgtgaagaaccaaccctcggataatgggtgtgttcatcatccttgcctctgtcatcatcgctagttggctcccaagcctgtggattggccgtgggtcgagaccgaccggagggatttcgggtcgttcgaccgcgagcaccatgagaccttgaggcctcaccaccttgcatcacattgccggatcctcgcccgcacttggatctggaatgcggaggagtttcttcacgaatttcttgatcatcatcggagtcagattcaactactgacgggttcctatgacgcaccatccttaagataaaaaggagaacatatggtgagcgaggagatcgatgttcaaggattttaacaaacacgtttgagtaaagatacgtatgatattgagcatgcacttcaaccgttcatgtgagcggttcaactacaacgaacaataccaaactactaaactca

SEQ ID NO: 48022 - DNA, 327 bp, Zea Mays
ctgcgcaagcgaagcaggtctaacattcactccaaaggtataagacagaatacttcaaacatatttactcgcatgggcattcaaaaaagaaatggttcactgattccttttctaggcaaaaggcacaggaatgatcacccttccatttcttcttcaaaaggtcatcttttgtcaaagttacattttggaacaataatcacatgaaaactttaatttttaatggcaacttggcctcccatatttgcttgtgaaacacccattgacggttacggtgtagatattgatacgacaatctaaccgaaaacaagccacctttttcccacttcc

SEQ ID NO: 48023 - DNA, 510 bp, Zea Mays
aaatgatccatcttatcttaaaagatactcgcttaccttaatagactcatctcatctcgaaaggattctctcttatcttaataaatctaactaatctcaaaagattctatcttattcttagggactcatcttgtcctaacgagcacacttatctccaccactttgcttatctcataatggtgtgaccgacatagtctattctaaaataaaataagtagatcttgtctagattaatctagtcatgcctagacctcattcaacctaaactgatccaaaattaattaggtcttaattagtcaaatctagttatgctaaactaatctagtttctatctaatctgaactaacctaatgtgacccactcaaacaggttagtcaatacatgtaacatggattagaccctatccacctgttctaacgtgattcactcggcactaaattaagagtaaccgaccaactcggccttatgccactaccttaaccatccgatggttgcataactcctctattt

SEQ ID NO: 48024 - DNA, 627 bp, Zea Mays
gggaggaagacagaatacctcgacatcccactcaaggatagcatcaaaggatggcgcttggagtggtttattgtggagaatcatggcaagtccctgccccctcggtcagggagaaaaccggatgttcatgctccaagttggactgaatcccccacagacttggagatagctgaggccagggttctgcttgccgaagttggtttgttgaaggagagaggtctgactgctgaagctgtagttgcagactttgtttttaagaacattcagccactgaaggacagagcatacctggcttatttgtatagtggtgtcactgactcaacccgggttgccaacaggaggattcctgctatggatttggtaagccgactagagatgatccttagaggcaaagtgtcaaatattggtgctccttcctggaatctgccaccttccaagacttttttctgttttgtgtccaatcctcctgctagcgatagtggcctgggtcttagagtgcgaccctctcccgaagaagtcgaggctctggttgcttcacttggtgatctccccaacgatgaaaggcaagttcactttgaaatgcttataaactcgagtgatgcagagataagtgctatgctggacatg

SEQ ID NO: 48025 - DNA, 820 bp, Zea Mays
agttaattgaaccaatgccacatgactgcgttatgtggtttatcattctgcgaagccaagtacactccttagaggcttcatataacgcaataatttcagaatgattagtggaggtagctaccaaagtttgtttggatgatttccaagagatagcggttccaccctgtaaaaatacaaaaccggtttgtgatctggcattatggggatcagataaatagccagcatcagtatatccaattaaagtagggtcttgacttctactatagaaaagaccaagatctctcgtgccattaagatatctaaaaatattcttaattccagtccaatgacgttttgtaggagctgcactatgtctcgcaagtaaattcactgcaaatgcaatgtccggccgggaattatttgcaagatacatgagtgctccaatagcactgagatatggaaattcagaacccaaaatctcttctccttcatcctttggtcgaaaaggatctttattcatatcgagagatcttacaaccataggagttttaactggatatgctttatccatattgaatttctctaatactttctggatatatgccgattgaaatataaaaattcctgaaggtaaatattcaagttgaatacctaaacaaaatttggtttgacccaaatccttcatctcaaattccgtctttaaatgatgacgtgcttcatttatatctttttcgcttccaataatgttgaggtcatcaacatatactgaaatgatacaaaatccagtggaggacttcttaatgaacacacatggacaatcatcattattagtgtatccttt

SEQ ID NO: 48026 - DNA, 384 bp, Zea Mays
aaccgaagaagatcctggctttacaccctcaggggctgggtcgtcttcagcaccaccctcgggggctgggtcctccttagcggcaacctctaaagctgaagcaccctcggtcgtgcctagggaagctgggtgactctgatcagcagcgttgagggccagcatgtcctcgtgagctagagtgccctacaacgtcgacgaagcacgagagactgtacgagttgcctcttgcccgacagaatcgcatggcaaaggaacatcgtatgggacctctgaacggatgatggaactgtcaaccttagggggctccgaaaaaaggttctcagggatgattttgtctaaatcatggtcaaaatcagatatcgacaacccctggaggcttataag

SEQ ID NO: 48027 - DNA, 621 bp, Zea Mays
gggcgcttccagcgggatcccactgacgatgagtagccaggcctgcgtggagaaaacgagggttccgctggggagcgggttgtaatatatcttgattttgtaagatactctttaagcactacttatcaggcgatattacaacttatctgcacgctactttttctttgctgtgtgcgttattaccaacttcttccctggtacttggcccccctgggatatggcctcaacgtgtcgaggctggatgccaggattcttaagaaggaattggtgacaaggcccctaaggggtaatctcaactgggacccgacctgcacacagtcttagctaggaatttttagtagcgcacccatagggtctgctagctggtatttcttatcctttgattcacgcaacaggatcggctgcagagtggtggggcgtgtaggcttacggtacttgaccatactaagcgacttcatggccccgaaccaccccagtgtctggttgctgggcctggctactcaattcgaatgtcgctataccagctagggagggagactgcatgggtgggttagataataataatggttgtaaactcaagaataaaaccaacagaaaaacaaatctgtgggtcgaacccct

SEQ ID NO: 48028 - DNA, 1401 bp, Zea Mays
gtttgctgactgtataactgttggttggtatgatgccaatttgctgaactccccttgctttgttagtaaatggttcatgaaatctgtacaaatacaaacggatgcaaagtcttgatagaaaatctgtttctcaaacaaaggagcattattttagaggaggtcggtgtgaacgttagaggagtggactggatccgtgctggagtgcgaagcaaactgggggaggacaagtggtggagaaataaggcttagtactaataattaagtaacaatttgaaaaatacaagtgaagcatataaaattctctaaaataaaataacaatagagcttgaatggctacaaattatcactcagttggccatttacaatatgcatatcctacggctttcacggattaaagagtttggaagaaaaaatggaggtgaactagatcatcttaagggaggtaatgatctgtgactgcatattcagaacattttctatttccgtattgataatattcataattttattacatggcaaacaattttctatttccgtattgataatatttgatctgtgactgcattagggttgtttgactgtggcagaggtcttcagaacatttgataagaagatgggaaagtaatgtcatgagatgcttatgtcaagaagaacatttgataagaagacaggaaagtaatgtcatgtgatgcttatttcaagaagataggaaagtaagtattcactgcttgctactgtccaatttttagtgcaattattgttgcttgtcatgactttaaaaaaaaaaactcgaccacaggacgagacacctagggatttaagaaggtaccgtgcttcaaacctagattaggactcaagtttaatgactcctatagttcaacactactggtccacaacaacaagcttggctgatcaggcaagtgttaatggagtttcatggagaattttgtgggcattaaattacagaacacatcaacaattctaaactagggttcgaaggggattagtattcatgagaacatttaaattttctgttgcaaagcacgagcactctgctatatatttaaagcaccagtttcgtacgtcgtgcgtcaccgtaggtctcactacgtcaaaaacgctcaaaggggacgtgaccatctgtgacacttgttaaaaacacgtcactaatttttcacagtgacttcttttttaaaaaacgcgtcactaacaactgtgcacatgtgacatctattgtaaaaatacgtcactagcaaaatatggtaataactcagtgacatcttttattttacgtatctctactatgatctgtttagtgacatgtatatataaatgcgtcactggcttcatacgtcaaatctgtttagtgacgtgtatatataaacatgtcactgacttcag

SEQ ID NO: 48029 - DNA, 711 bp, Zea Mays
gggctacacaaaaaaaatatgtgatatgacgcgatctaattggttagatcaggggaacataaagaattaagaggtaaatagacataatatatgagatttaggtgtggtcatcttctatctctattcatctcctatcttggacaggggctatggggaagaagatcacgcatataatctgcgaaaataaagaaacatgaggtggagcaaacctcgcttccgtaaacataaacgccatctggttatggatctgctagttgctccaggttgctcctcctcgccccggattgccgcctagcgcacgactctctgatcctaggttctcaatggctagagcagggttggatggaacgaagaaatcaagtcacgggattatatactccgaagggatcaaaatgaggaaggttggttagccgtgtgattcgcaggtagttacaactacctaatcgtaataggctcgtcatggagaaagtagctagcaggaagggtcccacccggcagagaattaactcccatgagcacggtggatgggaagcataggtgcgggccccacgagtcaatggtactaggatgcacgtgggggatccatggaaaacgagttgggctggtgcaaggcaagactcgccagttttgttttttttttctttcctgattttatttttttatatttttagtttattcaaacttgatttgtgtttttgaattctacactca

SEQ ID NO: 48030 - DNA, 386 bp, Zea Mays
tgggtgtgctgctaaaaatacctagcctagactgtgtgcaggtaggttcccagttgggattaccccttgggggtcatgacatcagtccctcctaaagaatcctggcatccggccccaacacatcgagcccatatcccaggggggccaagtaccaggggaggagttggtaacaatgcacacaacaaaggaaaagtggcatgcagataagttgtaatgtcaccgataagtagtacctaaagagtatcttacaaaaccaaagacatattgcaacccgctccccagcgggaccctcgtttttctccatgtaggcctggctactcatcatcagcaggatctcgctggaagcgcccgaccaccacgtccacagcatcttgtacgccctcccg

SEQ ID NO: 48031 - DNA, 426 bp, Zea Mays
gtaaaccctagatttttatagcggcgtgatccaaaaaatcaagcagacagtgtcgtcccacctcatcccactttaacattaaatcaaacacataataagcctcacccaaggcgtaattcatggaaagtaaatgcagaggatcgcattcctatgttttcgatagggggagtacttctcattttattttgcgcaagagatacttcataatttcaatcctaaccaccatcgtcctcacatagtgctttggacaaagaactcgtaaacacaattatttggtgtctactaggccatctatcgcatcgatccaattgatgatgaaactcataacccgtgatatacaaatatttattcaatagatcattatatcctaaccatcataaatgaccaaggaaaaaatggacatatagtaactccaactgattctag

SEQ ID NO: 48032 - DNA, 762 bp, Zea Mays
ttgctttggtgaccgattgagacccccggcaccacgtaagagatagggagttgagggagccgtcgagcttggagttcgcattcatcaccgttcggtgctcggagcgggattgtgggggtccgcttgcgtcctggggtcacgtaggaccattccccttgagcgcataagtgataggggtcgaagaattcctcgtcgatgtcgaattgcagtcgtagaccccctaccaacgggagcaatcgtatctgcgcaccggatctcggtgagaactctttcccttggttcgttattgtttccgctaagtatagtccgcacccggtgaaagtctatggcgggatcgaggtttggggcatcgctagtgatggcgtccgcggttcgggcggtggcgccactctgcgagcgtggggtggaagatgagtggttagccgtcgattggctaacgaacggcctgaattagatcgaggattccccttcgtctcataatgatctggcccttgatgtgtgatcgggtgggcgtgatgtggtgtagccataaatagaatcggtaccgttcatttcagatcctgtgagcgggattgcgtaccagttcacttttaatcctcaccatacatcacagatccaacagtcaaggcacgcccgtaccccttcgccttggcatattttctaaagagaccctagatttctaggatatcaacccaccgtccatacctgttagaaaataattacaactgagccctagaatttgaagtttaacccctatgcttc

SEQ ID NO: 48033 - DNA, 498 bp, Zea Mays
ctagaatcgagggctctggttagatctaggctttgactgaatcagtacgcatccatgaccacgggatcaaggatccacggccaaaattcgttcacacctcaacccaatccggccgaaagggtgttcgcgcatcactatcgttggtcgcctatctaacgattaggaatagatcacctattctgaaccgatatgcaacccgcaccgttgatagggggatcgacggacaatattttattatccgagctctaatcgcggtcgatgatcctaacacatgcggtagagatctatcccgagcgcgatctaatctcagccgtcaaaacatgatgaacgactatgaattcaccctctacctcccgcacctaggcacagcggtgctctcgccggagttcgaccaacccggccatctaccgaccagatccaagcgaaacccaatctgtttcaaaggggagaagaaagcggacgcgtatcgaggcttaccagaaagggaaaacggtccgc

SEQ ID NO: 48034 - DNA, 414 bp, Zea Mays
caaaaccaaaagactgagttggcccctcgtctctcctgtggcccctttccattcttgttccgttcttctaccaccaaacgccaacataaccctaggtacatggctggcgcgcggcggcggtggctgattagcacttcaaccacaaaatcccctcaaaaacagacaggatcagaagtgagcggcgatggagatgaacagcttcaacaagatgatgggggatgatcccatctttcagcgcgggtggggaagggcacagacacagcatgggaggcggtacaatggtcggcaatgggatcacaggtctcagcttgatggaaattacagcgcgcattcgtagagtgagttccacatcttaatcccaatgttgagtctggttttgtagttcatccatagagtgatgggttctaatttttt

SEQ ID NO: 48035 - DNA, 349 bp, Zea Mays
gtcgatgaggaaagtccctataactgtccttatctaaatttctatatcgaaggcagctggtacaaggtgagctaccggaggtttgctcacattcttggattctctgatgaagacatttctaaggacaagattagaattcatgactttcgtcaacccaccagagatgaagcccgggatctccatatatctgagactggtaaattttgggagtccaccaatctgcataagttttacagatatattaactctctcagcagaatgactctcattccaaaaggaggtaaccaaatgaatatcctgggcgagagcaaggtcttgctctcgtttatgaagccaaatagttcagaga

SEQ ID NO: 48036 - DNA, 1014 bp, Zea Mays
aaaatcttctttctatccttcagtttactactgacagctcttgttccatggagtttgacccgtttggtctttctgtgaaggatcttgccaccaggacccttctcgctcggtgcgacagccccgggtcgctctacacccttcgtttgccttcttccgctacaccgacctctaccccgcgtgttcttgcagccgctgcctcttttgtgacttggcatcgtcgtctcggtcaccccggtcgtgatgtgatgtccaagctctccagcagcacctccgttttcggttgtaggggatcttttgagcacatctatcatgcttgtcagttaggtcgccatgttaggctctcattccccatctcctcttctagagcagcaggcatttttgatctgatacactgtgatgtatggacatcccctgtaatcaacatttctggctataagtattatttacttattcttgatgacttctcgcattatctgtggacttttcctctacgtcagaagtccgacacttttcccaccctgtctcacttcttcgcttgggtctccactcagtttagtcgcaccatccggagcatccagtgtgacaacaggcgtgagttctataacaatgtgtcccatgacttcttcctctctcgcgacgtccacctccgcatgtcctgcccctacacgtctcctcagaacggtcgagatgagcgtatgattcgcacgacgaacaatgtcgtgcactctctacttttccaggcttcccttcccgctccttactgggttgaggccctcggcactgccacctatctcctcaaccgtctccccaccaaggcggttgcccaccccaccccttacttcgctctcttcggcgtccatccctcttacgaccatctttgtgtcttcgggtgtgcttgctatcccaatctcgcttccactgctcctcataagctctcccctcgctccacttgttgtgtcttcctcggttactctcccgatcataagggatatcggtgtcttgacctcgcctccc

SEQ ID NO: 48037 - DNA, 682 bp, Zea Mays
aattcagctggtaaggtagagaacaccgactggtccttgtctggcaatgcagacaaattacatagttcaatgactgcattttggcccttggcagactggagaccaaacaattagaccgtagaaccgttgtaaggaatcatcaaccacttgtctgcccaattcaccatcataggactgaatttttcaagccaatccatgcccacaattaagtcttatttctgcagtggtaagacccgcagactagaagtggtcacaccctgatagcgaccaaactgcattggtgagttcgtgagtacactgcagttgagccccatttgctacttgcaccgtcaagggtcgttgcagaggagtaaggccatggacatgagctgccacttgagcacttaaaaaggagtgggaactccctgaatccagtaagactaatagctccataccctgaatttgaccgatgaactgaactgtttttggggcagcgacaccctccacttctgcctgggataaacagattgcattcagttattcagaagagctctcatcctcattgattggaagttggaagagttgccagagttcatccacaacatgtaattgaactgagtctgcacaacgatggcctctggtatacggtagcccacacttgtaacataaccccttggccttacgataagccatcaagggcgcg

SEQ ID NO: 48038 - DNA, 605 bp, Zea Mays
tagattttgtagtatacttccatggcttacggtcatgttagcacacatgaaatatgcttcataagaaaacatgccttcaaatccacctgattatttagaaaattttaaatattttaagaatatgaatatctagttttatatgtgaggattaaagtatataagtgccaatagtacgggtggttatataatcaagcatatatataggttataatcacaaaaatcaacttgtgagttaaagaaagcctacataactataacatcaacacaatgctagggtttggtctatggactgtgtcccggtgataagagagagactaggatgaaaatgaaccatagaagcattcaaaagaatggaaccagaaaaattgaagcaaggtcttccattcttgctcttcgttcgcaaaagcaaatcttctcacatcttattgatcatcaacaacaaccatgggaacctactggtgagagcatcctcgccttctcatgcttggtcactaaggggaatggggtgtgatagttggtattcatcggcattgatctaggtatatttgcttgtgttcagttcatcgcttttgatcctaacccttccctcgatatcgagtttgttc

SEQ ID NO: 48039 - DNA, 724 bp, Zea Mays
tttaaaccaaaactttagtatggcaatgtttggtagccagcagccatccaagcaggttccaagacttggggtttaaatacataaatactcttatctttgacctgcaagccccgaacacttgtctttggaggaaatcgccaagaagagaatatcctagcctatcactatgcgcaagtgtgtgcaatgatatatctttgattctttctctggacgtaccatcggtagacttgcaacgaagcactacgttcgatagagcgagcgagatttggtccagaacggtaggagctcactggcaacagatgaaggcgaacgaagataatgcatcaagtattttagaatctagctataatctaatgatctaatcattagtcactaaccgcgtgattggatgcccaactgagtggctgtaggccctgtgcatgccgttgactgtgaatgtttggtgattggtaggctgcacctgtccaccctggtctgcacaggcggatgcagccagacatttttttggcctgtccgcctacatgcgtggagacgtgggaaggaggttctctgtccatccaggctgcagcgagtccggcgtcctcgagtctagctaccaataaaagacttttatagaccaggtagaagtttaggagggccaaaaaagggtggctattcgctacacgtgataacttgttcagacaaacttttaaatctaaaaaaatgtgttaatagcatataaatt

SEQ ID NO: 48040 - DNA, 390 bp, Zea Mays
taaataactgactttattaataactacaccaagttgcaggggatgcccacaccttggtgacaatcattacaaagatccaacttcattacaagttcatcacgacaagcatcaagacatatgacaagcaaactaactctaacaaagactaactgagactaagacactgacttaagcattattacaaaccctaactccgtcgatctatggatccaaatctatctgggtcctggagttaggggtaccgtaatcaaagcgaccacgggacgacgaacggtaagggtgctaaatcccgacaggggcgggagaaccaccatccagatagtggtgcgctgcgcactcaatacgcaattccacaacctccacccgaaccttgcccaactcgtcaagggc

SEQ ID NO: 48041 - DNA, 446 bp, Zea Mays
aaaacagatcaaagaagtacatctcagagcctccaagggagggcgagtcacatatctatctgctatcacatctaccaattaataaactatatcatttggtacccggagccttcgatcctagtccacaaattcccacctctaatctaatccagatataagatcccatctcctcccatccataatccaaaatcagacagacgtcgtactgttcacctgcgactactgttcacacgtgaacaatactgcaacagatattgttagcagcaacattgcctagcatcacctctggtgatgtcacccctgatccagtcgcaggcagctacccaaggtgggcgttttccaccaatgtatgcctccgcgatcaacatgaagaccacaacaccccaagctaccgcagagtaggaacaaggaattgaggatggcgtctttgcgggcttcaatgtgca

SEQ ID NO: 48042 - DNA, 597 bp, Zea Mays
atcgatctagtgaggtccagaatagtccagacttgactcttttgaacctatcttctctgacactttttggttgcccttggtagcttgcctacgacctagataaacataattagcacctaatatccaattgactaattgtggaaaacatacatccttgctcgtagtttcaccaagattttcaatatgcccagaccaagtccaataatgcacttttctctacacagggggttagagtccaaacacaagtactagaaacattagaatcgacctatacaacatgtccaaaagtgcaaacctcacaaatataccattttactctaagttacatatgtgggacccctgtttgagctcttttggacttgatctattcaaattgccttttatggatccgtgcttatatccatatcaacaaagttagtccagtgtggtgtgttggacacttaatcaccaaaacaagtagaaatgatcctatggcacatttctctttcaattgtacgatcaccatccgagaaataatcataataaatttcagcaagtcgagcaagcttattgatgtcaaatatgaacactttttttggatcaatacctaagaagcaa

SEQ ID NO: 48043 - DNA, 690 bp, Zea Mays
ttatatgtccgtgaacttcttgtcttctgagatcccttcctattccgttgttaagtcgttatattttggctttgttctattcccttgtcttggtatgctcgtgtccttgaaatcttgcatactaatatttttatatatgcttaccctcatatcccaatgactgttcaaaaccttttagttaatatgcccttgatcacccttgcttcttgatggtccatgagcgaccattctatttcacacatccttgatgatctcaccgtttcctcataacttccctatgtaataatttctgttacttcaaccattctgttgggacctcacctatctcacccttgattgtctcatccactttgccacttcgagagtctttccttaactgcatccttggttatgctttcacgatcatcatctttacccttgtcgcctctatatcttaccctgaagcttatattatacttgtcctctaaaaccttctctcttccatctcaattttagagttgtattttacctattttcccttggttgtatccgcttcctcgtcgcttacgagttttcaactccatcctttattgtgcatctatttagtgttgcgttgacctttcccatctctcgaccataccttggtgacgacattatgtctgttatctaaaatttccagtctcctatcccaatttgagagtggtgttttac

SEQ ID NO: 48044 - DNA, 284 bp, Zea Mays
gatcatagtataaagtggtgcgttgcatgctttaataaattaattttaaatatgtcactcaatttttataaaattagatagctaatttatgtagatgtaaccatataacatctaaataaaattagctatataattgtgcaaaaagttgaatgatatatttctagttgacccttttgttgttagtatgattgttatgtcaagagatgagcaaacaggaagaccaaccaatttgcttgtccaccaaaagcccgtggagaaaatttccaggcagttcggcccaagaa

SEQ ID NO: 48045 - DNA, 880 bp, Zea Mays
cacaaaccgcactaagagcgccattgtcactgttcttctacctcaaccttttcgtgcctcccgcactcagcccttcccacgacctcgctctgccacgacctagccattacctccacctagagcttgcacgccctagcccacctactatagcaaccctaagaccgagagtcgaatgtcgatgacgctcaccgccacctccatcctcaccctaatcgataaaagagttaggaggattacgaatgaggagacatacatttaggctagctagatacttggcctgaagtagggtttcccttccttagcctctgtctcttgggtcgggagtgagcctgtctatcctcgagatcgctccacctccacatgtcgcttcaggagggagcctagagtgtcgccaacatgtgctactctgccctcgcgtgcctgtcccgtcccaccgcctaccctagtccgtctctagctctagcttcatatccaccgcttccacccgcaagctgtccgagccgctctggagggtcgtcgtcgactacctttttattgattaaaaatagaaatctacctttaaaattagttaaatgactaaatttgttttggttttgataataagagggtatccattacatggtttaatataaacctttctcttaggatctgtttggttgccttatgattcttatttaaccaaaatcatggcaagtcagtggaggagctaggattccacaactaagtatgccgtataaaaaaatttggtgcaaatatacaatagatacgaaaaatctcaactcttactctaaagaatggatctaaatgtgctcaccttgcttcaaccttcatgtcgaagctcgtgctagactgggtgggccaaaaggtaggagggggtcgt

SEQ ID NO: 48046 - DNA, 968 bp, Zea Mays
ctgatggttgctactgtttgttgcttgccgctgctagctgcgtgctgctgcgtgttgttgctgctgcttgctgcatgctgcgtgttgctgcttgctgcttgctgcttgctgatggttgctgctgatgctacttgttaggagttgtgctgtagctgtagctgtaggcactacagttgtagtcttccactaatgattaaccaagttattgtagcttgactaattattgttttgaacacttctaacaggttccttgtcgtcgtgttatcgtcgtcagcctagctaaccatcgcttgcatcaatggaggggatggaggggtacacgatggcaaaaaaacttccaataatttgctagtcctgagtagtttattatctatgttatcacaatccaagatagtatgaggatgttgtgattgtgagctatgttatcaaattaatttgtatttggccactatttatttggtgcaacctatttgttacaacttatggtatggatatagttaatatatgagacaagagacaaatattatggttgtcaattttggttcttacgttactgatgtaaaatataattttttttgcataacattttatgcccaatagaaatgcaaaatgcattgtcgtataaattgtgggtttgaatatatgtaaatgcaacggttttattggttgttgtatggttcagttgcaatgatttttattgttgcaataagatgtaattaccatggatctatttcgttgggacttcagtagtcgcaaccttttcttcttgttgcaacatcattagttacgatattttttgttgttgttataacagttcttaccacagataatttttatagcaaaaaggtcatgtagccacgagacacattatgttgcaaaatgatcaaatgcaacgaaattatttgcatggcaatacatcttgttgccacgagtcactggtgtggcactagtgttttgttgccacgaag

SEQ ID NO: 48047 - DNA, 308 bp, Zea Mays
gatcatgttcttttaagctttattgtaatttattgcttattttggtgctcaagttgtaaaatgtcatccccggacctcacaagtccttatacattgatgcatatacttagggggaggatatgctataacttcacccattgagactaatatgtttacttgagttgtgttgatgtagtctcaaaggtggattgaatgggaaaatgtggagttggataaagaaaaggcttccacttcataacgttacattgtattttgttccaagttgacgttggtgtttcattgccttttgctcttaatttgcttttttg

SEQ ID NO: 48048 - DNA, 277 bp, Zea Mays
ctaggagtagggtgtgattgggtgttcggcttcttaggaggcatcgtgggcttactttttggagcgaacatggtgggcatcaaatattggaatctgacaagtgggaaccaaataattgagagcgggtagggcagaacaacaagacaaactaggaagaacatggctctcaataagtcttgtcaagtgtgttctctcccatttgactggggtgtttatagggtaaccaaagggtagagccctaaaatacgtgtctacccttagttacctaccatattcc

SEQ ID NO: 48049 - DNA, 331 bp, Zea Mays
ccctaaaactatatgctacttgtataagaggtagtcccaaaatggattggcaaatttctagaattttagactttgaatagtatctgaaactggaattcagtgttttatggttgttttggagcttcttttgtggctattctataaggtttttggttgagatggttgtacagaaagtgaagaccatgtgttggtgaaccactttctttaagggtgagggacatgatcatatacagaagttggagtaacagctacttaaagattggaatgtcaggtggtgaatgacttaggttgttcataactgaaaccctgaaaatcagtgagtgatgccaag

SEQ ID NO: 48050 - DNA, 564 bp, Zea Mays
gcttttcaaggtaatccaacactatctcacgcaccagcaataaaaaccatggtggagtagggtattacgctccgcgcggcccgagctactacaatcccgatgtattattgggtaatcaggtgttcatccatcccaacaggctaaccttaagccccctcctcatccttaggatttaggcgagtgcagtacatcgttgttcgtgttaagtatcggtaacacgctaaggggatggtcgtgtagtggttttctgaggacggcgatgacgatcgcaactcgatggtacgtgcaaaacacgtcagagacacaagtgatagttcatgtttgcataacactctacatcctgtggttttctgtctgtgtatggttgagttctctggaatatagggactgtttagaggaagatgggttctatgggtgtctatctcgtttttgtagggtcctctcctcagcattattatctactgagttgaggttacagagaaactaccacgagtccatgatctccatgctccacttgttctgccactcgtcgcgcttggctacgatcaaacgagtcattcgtcg

SEQ ID NO: 48051 - DNA, 297 bp, Zea Mays
ggagaccttacttatgggggcgcccattcgtggtccgcacagatcatgccagtctgaaattcctgctggatcaagctctagtgactccgccgcaacagcactggcttaacaaactgatggggtttgacttctctgtggaatacaatccaggctaggcaaatgtggtcgccgatgcactatctcgcctccatgctccagtgagtacttttgcagctatttcagctccaacagtgttatcccgggagaggtgggaaaccgagttgagaaaggatcctgccattcaacagcgttgtgcac

SEQ ID NO: 48052 - DNA, 721 bp, Zea Mays
cgagaacggtatggaaaaatgctctatggcagtctacctgggagaaagccaaaactatccgaaccatccttctttccaagtcactttcaccggataccgcttcccagatacttgccaagatgtttcccggaaagccctccgacaactatgccagagctacaacaaggtgatctttgaaacccccttcgctacttcccacccagcaacaaaaatacacctacctggaggaagagactttaggccctgtcaggaggagaccctattgaggatgaccccaccatcgtctacatgactggataccttcacaccctcgataaccaatatgatgaccttgcctcccactgcactcacctaaactcccgggtggaaagcctggagcaaaaagtcagggaacttacaagggaaaaggcgtcccttcaagagagcctcgagatagcagaaggcgaggaaaccaatacccgtgaagcctaccgcactctgaagatggattacgacaagaaactgaagaagctcgcccccgcaagaaaaatccgcaagaagaccaaaagccaaggatgccagactgagcagaaggaagaagcccctccagccctacctcctaccaggataagaaactcgtccgacaccgaggaaatgtccctagctagccttgatgaccttctcaaggaatttggggacactttagagaaggagttcgggagtaccctcgatagcactcgcg

SEQ ID NO: 48053 - DNA, 763 bp, Zea Mays
cggacctgatcgaaccgtggcgaaagggtacgccattttctaatcctggccgatcgtcatcggatcaacggctatcaccagccttggctgaagcgctatgctcaacaaaatctccatcgcccaatcccgatctaacggtgcacgagtatcgccttcctcctgacctcggacggcggcgccggttctacggtggcgaaaaaaaataactccgatgagctcgacggttcttcgccctaaggtctctaggtttacccgagatctaccaaacgccacatagaactagcgcgaatcataagggtgcggtcttaccagacgtagtgcagaggagggttccaatcgcggcgcggggcggagaagtgagttgagctagcaccggcaagaaattcaccgagcactgtggcaccccgcgcaaaacttctcagccagacactgcgcagagtgtaattagactccaccggacaccagataggagcacaagcggtgaggggaaacgaagtcaacggtggcggcggtaatggtggatcggcgttggggaagcttgcgcccgtgcgagagggtagcaggggggaagaacgggtctctggaagggcctttatggccggccggtcggttcgcggatagcctcacggatttccgagaagcacgccatgcacgcggcacgccttgctcgcgtacctccgaaacgcacggcgaaggaagagggaagacctgacgagggtggcccgcacggaagtggctggcgcgatggagaggctgtcgcgtg

SEQ ID NO: 48054 - DNA, 430 bp, Zea Mays
gagagcccatatgaagacgctaagtctaacaatagcattgggggtcagctgatgaaggtatatttcaaagttctttagaacctcccctatcatgtcatttatgggcaaccgaagccctgctgtgaagaagctcttaaagacgataacttcgtcctccctcggctccggagttatctcctccccaacaaatccaacaagcttgctcccagactccccgaaatagcccagttttttcatcataatcatgtcatcttctgttatagtggactttccaaattcaagatgactaggctttgccgagttcagaatgttgttatcctcttcgctttcattatcactctcaccctcaaccacagtttgtactgcttcggcgatggaagcaccttcgtcagtaacttcccctggcacaactagacctgatcgcttcatt

SEQ ID NO: 48055 - DNA, 418 bp, Zea Mays
caaaacacatatggtcggctgatcaaagcttaccctacttttagtcagttgctctccaaaaatgctagcaaaaagactgttccacgtgatcagtcaacgaagaaaccccggtcacctgctggaacgaaacggcccaaaaggcgacgcaacaagcatcgcctgttcattatatgagaccagggtactttccacccgtttattcatcgtcggtatattgtcctattcaaatatggaatggtacgacgatgaatccatggtacatgtacagtccctttgtctatccaaactgggggcacctccattctattccttttgatctattggtcaaaaggtcatggccgagaaagatacaatccgaaacgacctatatgcattagagctctattgaaggatcaccctattggtgtgaaaagctggt

SEQ ID NO: 48056 - DNA, 513 bp, Zea Mays
atcccattcttccttctgcgtcctctcagcctgcagaacagatggaccagcatcttattaggctcaggtactaaatttccaagaaatactactggatgcatacagctaggagtaataataataataatatatgaatgggaggagaagcgtaaagacaccagacagtgcctgcggtgagcagtaaactgaagggctggttagagatttttactgcctgcacccaatcatcttttacaggcagggaaataaacgcagggtagtactatgttttatgcctagtttgaagccacaaaacggtaggtgattggagggactagaatccctttttattcaatgctaggccctataatcctctctgtttctatggctcctaaattaaccctacaaacaagatggatatttagagatggtacatcagctaaaaaggtgaaacatttggtttccagcaacgaaccaaagtccgtcctggcagcagcataaagtttggttcatcattactaatatataacaaga

SEQ ID NO: 48057 - DNA, 536 bp, Zea Mays
gagaatggctagaggtcctcttgaaaccagtagtctagaactatcttgaaaaccaaatgggaagtgagaactaggcggccataaggtttagttgatacctaattgtgtaatgtttttcacctctactaccgtaaatccagcagtcataaagaggacatttagtattatgcatcttgcggcctaaataaacctctataaaactctcgtgtgcagatagttaggcagcacctagggtctgtgtgcctctagccatgctccttgctctatccatcaactccccctctctcttaagtacctatggtaccttggtgtcattacaccaagacatttgacacgctagacagggactctttttggctgaagcactttgtccgtgcctggtcagcatatgcaaatggcacaacgttgtcccggtccaacctcacttcagcgaccccctcgtgtactctcgtgcctgtgccgcaatgcgtggcattgcattgaacaacagctgcaaaacagatgttctcctttttctttttgatgccgaagtcgat

SEQ ID NO: 48058 - DNA, 499 bp, Zea Mays
caaatggctgtggttgtaagatatgtaacatcttttactttatattttgttgtttttagttctttactaatattattttccttgtttcactttgatgtaggtatgtcaatgataaaggccatgtagttgagaggtttcttggtgttcaacatgttcctgatactacatcatcttcattaaaggtatttctgttggtgagttactaccatcattttcataatggaattttcattgttgtcattgatcaagttcttgttgagttcaacaactgcttccctgaaagattaactcagttacttggatgtatcgcttgccttgatccaagggattcttttgccaactttgatttagagaagttaattgagctatcaaagatttatgatgctgattttagtgattatgaacgtacatgccttatggaccaacttctcttattcattgatgagaaatgatgaaggatttagagattgtaatgatcttaacaccttgctacaaagat

SEQ ID NO: 48059 - DNA, 342 bp, Zea Mays
tttgaatatggggatgggtaagctgctagagatagccttaacatgatatacagggcacaaccaacatcacacaaatctagaaagccacaaaatttcttcacccgaaggtaacaaccccactacaagtaaaacaatacaaccacaagaatcaacatgaaaataaccaaattttcattcatgttatgagccaaaaagttaagttacaacatctgtcatatggtgtgcaatgcagcattgacactaagaaatcagtaccttagtttctacatgcatttttgaaaatcttatatctgaccatatgaggcaaaaaaaatctttcttggattacttatattttgtgac

SEQ ID NO: 48060 - DNA, 628 bp, Zea Mays
ctgtgacaccccagtgtcacctagggtttatctcaaatgccaaaccaagaaccattattttatgtgaaccaaagtaagcatgagcatcaaaataacttaagtaataaagaagtcaccaagtttatacttaaaagtgtcatgatcaaaacaattgagtctttgaaaagggtagaatgtgcaaccctaattaaaaaccctaagtgagccccatgagcaaaattcaagaaaataagaaaaagggaataaaaagtttaaaattatgacttgagccaattatataagttaaagtatatttattgagcaacaagaaaggttgagaaagcttagccaaaataactcaaataaatccccaaatcagcccttgatctatgaacccttagagaaattcagatttctgaatttctgaatttcagacctcttcccaaagatcatctgtgttctctgtttttcgaaactcaaaaccaggagatccaaatatcaaagtcattccaaattcccttgaacacatcctggaaaagtttgaactcaaaccaaattcatttggcatggttttggcgcagcttgacctcgggaccaggcattctgacactggcaccttggtgacgctacaactccctgtccctagcct

SEQ ID NO: 48061 - DNA, 415 bp, Zea Mays
atgttttttgttgttgttgtaagaacgagaaataatgtcgtacgtcggggtgtgtctttggaagagaagggccggggagacggaaagggctgatgaaagcttcggaagataggttatcgccgcagagcagtacacgtacgtacgtgtgcccacccaagcaccaacgaacacgatgagatacttcgtcccgacaagaaagctgatacctacacacgagctaccctcttttaacgatccccccatactctgaacagcatctagtacgattattttaatttattcaccttgcaaataacaactctactttcttcctcatgcatgcaatatatatataccccagtgtatcctagtataaaaaaattatacttaaatgtataacaggttttatgtgtcaagaaccgttttgcattaaaac

SEQ ID NO: 48062 - DNA, 1221 bp, Zea Mays
cgacaagtggtatgtgggcatagcagacaggacagaagtcataagcgtgagacgactagcccgattgagcatgcttcctttccatccggccacacggttccggattttctcgatcagaggttggacatgaattctctagagcgcccgggtgtaaagttggaggcccaggtaacgacacgggaaggtcccccgggtcccttggaacgactggagcacgtggtctaggtcaatgttatcacatcttatcgggtggatagagctcttctcaaggttggtgaccaagcccgaggcgcaaccaaaagcgtgcaggatgtctttgaccgccaggaggtgttctctagaggggttgataaagataacagcatcattggcatacagagaagtcctcagttttgctgtagttagcggaatgggggaaaggatcccatttctggctgcaaggttcaggatacgctgcagcggatcaatggcaaggatgaacaacataggggaaaggggtctccctgcctaacccctctcctgtgctggatgtttgctccttgtcggccattgaggagggctcgagacgaggtggacccaaaaaggatggaaatccactcacgccaacgagggccaaaacccatggtctagaggacttctaggagataaccccaattaactgtgtcgaaagccttctagatgtcaagcttcaggaagagcgccgatttttttgcttgtgtagtcttctaactacgttatgcacataaaggaagttgtcttgtatacatcttttctggatgaaggcactttgggacttggagattagagtgttgaggagagggccagccggttagcaagcagtttggagaagatttttgcgatgttgtgtatcaaactgatggggcggtagtcacccactgtcaaagcatccggcttctttgggataagcacgatgttggcagagttgagtaaacgaaaatccgccccattcatgctatgaagttggtgaaaagcctcaagaacgtcctccttgatgatatcccaggatactttgaagaataaacctgtaaagccatccgggcctggtgctttgtcgctcggcattgagaagattgtttcctttatttcttcgagggagaacgacacttatagcgatgagaggtcatgctgcgctaaagctagagtcggccagttgagggtgatccctctctccggggttgtccctaggtgagatttgaagtg

SEQ ID NO: 48063 - DNA, 692 bp, Zea Mays
aaaaagttggtttgcatttactatctcagaaggtctagccttcagctgcttgcaagcattttaatcccaatttgtgaccatacttctccccctcttatttacaacatcattgtaatagggagttgagtggtgttccatttaaccactctttctggcacttccacgtaggattaattttagtgacacatcatagtaaatgcacatggcagtcaatttgcaacttcttgcaaatcattcgaactcaaaggttcagttttagtacgtgatcctgagcctgaatgctttctgcattcattataatttcctggcgttctttttggtactcgaaatctccccctaatgcctggaaaagctcatgattcaagcaagcgtacgggccataaatagattctcatgaagagattctaagacttaatgatcgacggagaatgaattctcacatagatccccagttttctgtgtgcccatatatgtacgctgcggtggtgagattgggaacatacccaatgtacgcatgggaaatctttcacggatttccacgtactaaaaatcataggggaacttgtacatgcagtacatgcagttaatcacaagtcaggagcgtgcaaaactttctgactccaaccataactagttggaaatgacaattcattactgatggtcattaatgatctgaaattttcgaatctatc

SEQ ID NO: 48064 - DNA, 472 bp, Zea Mays
cagttaattctcgtcggctaaaaaccgacaggaataacctataaaccgacgggaataactaattcttgtcggtaactggctaactcccgtcgacccaaagccgatggccatcaggtgtcggggataaccttattcccatcgacggctgacgggaataagtaatcctcgtcggccaagtacaagtcgacggggataagctttaactcccgtcggtctagtgaaccgatagggattatcttttaactcccgtcggtctggtgaaccgacggggataagctttaactcccatcggtctggtgaaccgacgagaattaactgggtcgacggggattaattgttaatccctgttggtttgaccatagctgacgggaattaactaggtcgtcgggaattaacctataatgctgcaaaaccagcaccaaattaggtcactatttctccacaattgcacacaaaacatatatatcatcac

SEQ ID NO: 48065 - DNA, 324 bp, Zea Mays
aaggttctgactcaccggccgtgttacatcgaatcggccgtgatacctgaatttggcgaaggggcctcttcagctgccgaaacaaaagaaaatgttccgactgcgcagagcactaaagaactggctgcaatgatgaaggtgcttatagtcgggctagttgaaacgaaggttgataaggctgaaaggctagaaattgaagaaataataaaaatgccagagattttgagccctccaacagaggtaactgtgccgaaggtacaaaaggggtctgccgtaactcctaagaggagaaggatggcgaatgtgctggatgttgtgttagaa

SEQ ID NO: 48066 - DNA, 538 bp, Zea Mays
gcaaaaagagattgaatagggtgtttgatgtcatcaggtttgtgtatccagactacaaaaaaggtcgaagatgaagctatgacaactgccttcacgaaagcaagggaagaagaggaaagctgctaccttggtgacttctagtgcgtcgaggtcaaaaaggctaaagttttgatgcgtcaacccagatgcattgaaacagccgacgtgccaaagctaattgagggggccgctcctatctctgagccaagtcgcgctttgtcagtcgaagctaggacaaatgtgactgaagagccgaaagtggagaaaacagcagagcagttgaaggtactgagtccaccatgcgcgacggaactgctgaagccattaaacatccccgcagcaactccaaggaaaaggagaatggctagtgtgctagatgctgtaatagagtctattatgccaaggatctgaagtacccccgagggtccttagtgtatggtgacgatgacgaagatgattttctttattgtctgccagacaataaagagataaatgtcct

SEQ ID NO: 48067 - DNA, 1103 bp, Zea Mays
caaggattgtactgtcttattttatttgcgcctgctccttgcactacacgggcttggcccaagttgtgtcttcggctgccttacttgtctggctgctgtttctgctgatgggctgggctgacccgcacgaaacaaacactgttttaggtcgttaaacacatgtgattatgagtggagtcacatgccgatcttactgaaagtctgaaacgcttgtgaaactgtaaaattcagtagtacgttaaactggcgatctctgaagacatgaatttctgtcgagcggtgtcagtgtgaagccaaccaaatactccacaaatgaacgaactgaacatgacacaaatgaacgaactgaactgagcatgggagcgtgagctgtgcattcatgcataggcgatgataacttaacccaatgataatacggcggcggcgctatcatcaggagggaatggttggtcgctgcgctgctggccttccaaaatccaagctgtagctgtcttgcttgtgttaattgacaagattggacagcggccacctccttaactgagcaggttgcctcgcgcttgtctgctcagtcctctcctccgtatcaacgacctaacacttatccatatttttttccactggaagcttggactaggaagcctataggcaaagttcgtagatccttcctatggaaatggaaatgagaggaacaagcaaacagaggccactaactagtcaactggcctacaataagcaaatcaaagaatttgggtagcctaggagttgttgacatcgaccaatttagttgggccctccaccttgggtggctttaatttggcaggagaccatcgaagagaagccctgggttaggctgcaagtgccttgtaacattatagacaaccttctgtttcaggcttccatcttagtgacacttgtttgcttcttttcttttcttttccgcatcctagttgaagtccagctgcatgcatgcatgcctccggacctgtgttctatctgctcttcaaagcaaagcgaccgagccgtatacctttttcatcatccgcaggaaaaccactttgcattgcattaattgattcgatctgtgtagaaccaacagtacagat

SEQ ID NO: 48068 - DNA, 291 bp, Zea Mays
ccggagagaggggtgagtcaccggcgcggactatcgtggctttcaccggggcaacgtctcaggcgatggacaaactacctaaggcggtttactgcgacgtggtaacaccactgactatgtggcgcactagcggcaagcggccaacgccggagaggatcatctcggccgcccgcagagcaagtgggtacggtggccaatccagtgaccaggtccgagcttatcctggcgccaagatcttttactccccgcggttatccactttgcgccgagcacgaatcgtggcggccagcg

SEQ ID NO: 48069 - DNA, 293 bp, Zea Mays
catgagtgtccgcctcgttttcacgctcgacgggtactggcgtgcgcctgtgacatgagtcgtggaaccggggttcacaagtgtactagaccccgtcacaggcccttgcgtctgtccgcctcgctcagttgctcggtgggagttggtcggatcgtccgcttcacctggttgctcaatgggagttggtcggtccgcctgccttgcccagttactcggtgggagttggtcggatcatccatctcgcccgattgctaggcgagagttggtcggatcgtcagtggcgccttgctctt

SEQ ID NO: 48070 - DNA, 762 bp, Zea Mays
ccttcaaagttggaaatactctgaaggctaagaatttttgcaccagatccctagtgccaatttgctctgcaataacccgaaattcgcccagtgtaatttggcatggactatctggtttcatgtcgcattggggcctagtttctccgaagattaaactcaaagggctttgaaccagcttctccttcttctcatccactttaacataaaaccattcagtcttccagccagctggccatttggtacgatagctaataactggatatttcgcgtctttgcgataagcaaaattatagcagccgaagttatcatgcagcccatcttctctagctttggtctgataatgaagctcgtgtgcctggcaaaagccttcggcaagcggttctgccccttggctccggagagcccaaatgcagatactaagcctaacgatggcgttaggagttagctggtgaagataaatcccaaatctctccaaaacatctgcgatcatatcatgtaaaggaaatctcaatcctgctttaaaaaagcttctaaataccaccacctcattttttttctggcttcggggtaatttcctctccgccgaaacgaatcagcttctttttggcttcactaaaatagccaagcttcaacatcttaggcacatcaccttcagtaatagtagacttcccaaactctaggtggctcggtttagatggcgtggcaccgtactcatcttcatattcatcctcttcagcatcaacctgctcagcttcaacagca

SEQ ID NO: 48071 - DNA, 425 bp, Zea Mays
ttgccattgatgcatgcatcagtggtgcatctttttggttttgttttttcttccacctgtccattatgtattcctctgggattttcgtgagcccttcttcaatgattactttaagtatgtgggagcataaaatgccatccttgtcaaacttgccgcatacacaagtgaactcttccattccatatgttaggttagccataacaaggtacctccttgttttatgtggtttgtgttcctggtttgttcttgtatacacctcaaaagtatgcggggcagctgttctgttgtaacttagttttggggttgtttgcaactgggactggaattttttgaatatgttcctattgtatgcttcttgtgcttgcctctctattgtatatccaaacattagttcctttggacgtttccgattgctttcattatcc

SEQ ID NO: 48072 - DNA, 289 bp, Zea Mays
aggaatattcggattgctttgcttggaattacactgagataccgggattaagccgagagatcgtagagcatcggctgcccattaagtccggtttcagacctttcaagcagaaagctagaacatttcgtccagaccttctcccacgaatcaaggacaaaatccaccggctgctagaagctaattttattagaccttgcagatacgcagagtgggtctccaatattgtgccgttggagaaggagtcaggtaagcttagagtatgcattgatttttgcaatttaaatagagc

SEQ ID NO: 48073 - DNA, 322 bp, Zea Mays
agcccactatatggcacagagccttgctttgcagccccatgggcgggcttaataggacggttcgtttcaaaatccagagtacaacccccttatctgtctgttcgtgttcggttgatgaataggtgcagtgccagtgccccggtgaaatatgtaaaccaagacagtgaaactctccttggcacatcatctttcttccactgcccgttttgcgcgccaaatttcggagctgcgtgcatcggattctctatcgtcgctgatgatctgggcaccaccgtaccccaggccctgccaacacatcatcagtcgcccctgatcgccttcc

SEQ ID NO: 48074 - DNA, 1571 bp, Zea Mays
tatcagctttttcttcttcctatcctcccctaacgagtgtttagaccaccctcttaagtactttcggacagccctgatcctattttgccatttttctaaggcattcttccctctaacctccctattccaaacctctgctaccatttcttggaaaccatccctatgaagccatccaagttcaaatctgaacctttgactttttccccgaaaggatgcatttccagtttgtagcaaaagaggtgtgtggtcagagttttcacgagaaagggcctgaaccgacgccaatgggaatttttgttcccactccgaacttactagaattatgtctagtttctcataggtaggattttctcctgcactaacccaagtgaacttcctgccttccatttctagttcacggagattaagtgtttggatacaggcattaaaaagattcggccacctactatcatatctgtcattacttttctcttgtggtgatcttataatgttgaaatcaccaccaattaaaattggcaagctttcattgctacaagtattaacaaactcagcaagaaagcgatccttatgttcgggttgcgcggcaccatacacagccatcaaagcccaacaaaaaccatcatctttatttttaactttcattttaacaataaactcccctaaccaggattcttggacgtcaaaagttaccttattcacgcctaaaagaatcccccctgaccgccccttcggcgggcaccattgccaatgatactctcttccaccacaataggaattaagatctgcatcagtaaaattcctcttgtgtgtttcgagtaaagcaataaagtctaggtcatagtcattagagagatcacagagaaaattcggtttagccaagtcccgaagacctctgctattccagaaaaccccattcatattgaagattttttatatcccttaacttttctgtttttgttttttcctttttgctttctcctaggaaccactttttcaaaaggggtgtcctcactgtctacacccactatatccctttctgctaaggatccagcaaaatccctaagcgtgtcaagaatcaaactttcatcttctgatactccacaatcaatatcgacatggctatcatgacaaggtttagaactatgctctatgaatctatttctttctaaggacatgattgattttatagataattgaacttcactttttgtatgccctaaagagattcctagactagcacagttatcagaaacataatcatccgataaagacaaaattgaattaataggaaagttacctgtactatcaagattcctgattgttgttaacctttttgccctctcaagagagtcctcatttactgaatcttcacgcctcttgctcctcttgctcggagtattaacagcgtctttcggaattataacaggaccactacctgagaaaaggcctgcccccattcccagctgcttgcttttcttttcagccaaggtggacgacccctgtctggcctcttcaggtggctgcgccaacactgcaggctccttctgttcaccctctgttgagatcacact

SEQ ID NO: 48075 - DNA, 761 bp, Zea Mays
caacatagtagcattctttcttcgcttcacgaagctcttcgacattcttttgtaccctagatcgttcagtatcaaatatttcatgcttagcttgctcaacgttaaaattttctgtaacttcaccaagtttcttctccagtcttgccacttcagatttatgcagttctacttgggcagataaagcatattcaagatcatctatacgttttgcgtccgcttcttttttcaagcttcgaaatcttttgatctgcttcagagaatttagccaaattagcttcattcgtctttagcctttcgactaaagaaagaagaatcttgtctttctcaaggacctcattccgaagcgttataacttatgagcgcaaattttcgaaagctattttagtgctctcatcctcacattctttttgcaccttcaaagctttgcttaaaataagtccctaataatgacaaaaagaaaacaagtaaatactttaatcaaaataattatcaagagcccaaagaaaaaagtaagcacaaaccttcaagctattgtatgccaagcaatctgccaaatggtcctttggcattaaggatagctcgagctcaagctttgggtaacccatgttatccatcatttctccgcagacgtcaattgccttgttataaggaagacagtacaataaatcatcctcatcgttgcctccataaactaaggaccctcttggatacctcagatctttggcataatgttgagcttcggcaacttgttccttcgtcag

SEQ ID NO: 48076 - DNA, 601 bp, Zea Mays
gccagcgagaggcatttgtccctgtttttgccgtaatgaatcacacatgcccttaacatatcttcaaggatttgatttactctttgtttgtccatcagtttgagggtggtaggctaaactccggatttgcttggtaccaagtgcttcctgtagctgttcccaaaaacgtgccacgaattgggtgcctcggtctaaaagaatggtctttagcactccatgtagacggataacatgatcgatgtacatctacacatatatccgagtctggtaagtcatatgcactggcaggaaatgagttgtcttggttagcctatccacaatcacccaaatagagtcatggtgtcaagaggtattgggcaatccaacaatgaagtccatgctgatgtcttcgcatttccaagaaggtataggaagtggttgtaaggtgtcgggtgtcttcaatgacttgctttgatcctttgataggtgtcgcactcagacacgtacttagcaatctccctcttcatcctagtctaccaatatagggatcggaggttgtggtacatcttgtttcttccagggtgaatggagaatttggagagatgagccttgtccaaaatct

SEQ ID NO: 48077 - DNA, 833 bp, Zea Mays
gaaaatcaccatcccaggggctaggatatcacaactacccatagtcgtgtacccatgggtaattatacccgcatgatgctaaaataaaatccttctccgactatcgtttgtttaactataaaattatataatcatatggtttgttatatttgaatttgattttttgtgtgtttgtttgatatttctagtgatttgcatgttataatttgtgacttacctagctggtatagattacctggtggataaaattactcgtgcgggtacgtgtacaaataaggttctatacctacgggtggatatgggtaacccaacagttagtatttttgatgggtatggatatggaatgctactactcgatgtgtatgtacccgttgccatccacactcaaccaccataagatccccgcgagttcgaatctgggttcgagttttttatgtacaaataagatccccgcgggttcaaatctaggttttcactcgtagtataatctgggttcgggttgggtctgtaattcgggtttcgagggcagggtctgcggacactacaccccgaacttgccccgttgccaacccaactattgggggcctatattcttgaagatcctcaaaaccccttatcaccaaactgagaaggtgtgtttcaggtataatacaacggatcaacggagctaaccttcgtcagaagcagcttgcgaatcaaaaaaggataagatgtggagcttcacttgtacataggcgttgcgaaggactgtgccgaagcaggtagcttcaacgtcgaaggctttgatgcatgaagcagagacgaagataaagattgtgaaagacttgatcaac

SEQ ID NO: 48078 - DNA, 496 bp, Zea Mays
gcgacaaggaagagaatacgaccaagggaaaataggtaaaatacaacgctaaaattgagatggaagggagaagattttaaagggcaggtataaaataagcatcaaggtaagatatagaggtgacaaaagtaaagatgataataatgaaaagcataacaacggatagagttaaagcaagactcgcgaagtggtgaagtagcaaagtggataaaagaatcaagggtaagataggcaaagttccaacaagatggttgaagtaaaaattcattaccgagggatgttataagggaacaacaagatcaccaaggtgtgcgaaataaaatgattgctcatggatcatcgagaaacaagggtggtcaagggcatgtaaactaaaatgtcttaaacagacattatggtatgaagataagcatacataaaatataagagtatgcaagactccaaggatacgatcatactaagactaagggaatagaaattgccaaaatataacgac

SEQ ID NO: 48079 - DNA, 324 bp, Zea Mays
gcttacagcgcactcataacctgcgcatccctttggtcaccagcgcattcttgacctacgagcccctcagcccgcggatcactcatgacctatcaagcttagacctgagagcacgaatcgtccatagggcccataacgcaacgagacacgccgagacctaggctctagaggccaggggtcggcgtggcacaaaggtagtaatgatggcaccagggcccccgcaccgctcacactagccgtcataatgagtgggagcagaggttaccatacgacaatgtgcatgtgggcaaacggccttgccacggtaaggcactcggttttacc

SEQ ID NO: 48080 - DNA, 1105 bp, Zea Mays
aaagaatgttaccaggaatgttgggcataatacacaccttttagagcatctacgtatgacctgtccaaaggaagtgtggttgacaatggctcgtcaggtaccatgtgatgtactctactgtgccggcgtcgcctattggctattggatgcggcaagcgctgaagggaatgacattatagatctactacctatgccgacataagcatcactaacaccatattgttttttgctgaagtaatggctgaacaaacatggttgtacgcacgtgttccctgtagcgcaggtattggctagttagaggtccccgaaaggttagatgggtctactttgtcttcaccatgaaaaatgtgatgggcatcagttgtctcaaagactgggcaatctaaagaggctgcgtatttttttggcccgcaagagaagcattgaaaattaggatgggtaccggccatcgcatgcataaacaaagcagcgaacttgtgaggactaaccctgtgcaattgcactgtgcctcggacgcttcgcttcgtggcatctcgcaacacgcacacatggagaatcaggcatagctctatatatcgcatattatgtaagaacgtcacataacactggtgaaaaaataggcccgtaacaaacaacacattataaaacagatcaggcgtataggcacacaaacccactgatgatcgaaaacgcaaaatggcgagcggtctcctccaagctgcgacaaaattcccccaagcagcaagtacccagatcactagaaaaaacaacccataagaattagccaaccagtaaggatatatctctacacataggtagagactagtgcctcttttagagactggtatgttgaatatcaattccaaagaatctagatcctagtaaaaattggtaagctctaaacaggctgggcagcaggcaggaaacctagatcagagggtaccacccagcatctaactgcacataagcatcaaaaaattggaaatgctgaaacgtccaagtaggaagccacagaaatgcgatcaacgactggataactaagttcacctaatttaaaataattttgtgaaagtaagacataaatctgctatagaaactggtccat

SEQ ID NO: 48081 - DNA, 483 bp, Zea Mays
aatggtatattttgctctggcagaacagcagtgtacagaacaacacccttaaccttatcaacctcctcccacaactagtccagtacatgcctaccaaccaaggttcaatatatcggatatcggaatttaatcggcaagctggacatgagcgattaatcggttatcagggattaatcagaaattaatcggtaggcactaatcgaccaaattgtagtgtcaatgtgcattgtaataattaggatataaaatatagacaactagccatcatcaatcttcatcgtcttgctcataatcatctgttgggagcacttcatcatggtctgattcaaactcaacatcctcatcctgtattttgatgtcttcacattcactatcagactcaaaaccatcttcatgaagttctctaactcttgaacttctacaaagttgcatagcttcattttcttcatcaatatcgtcacatccttcaaccggccagtcttg

SEQ ID NO: 48082 - DNA, 576 bp, Zea Mays
tcaaaaactaggtcggcaaagctatactgtacaaaagagaaaatgggcaaaggaagatgcacaagcattaactgagggtaaatctattccatttcaagacatgccagatggtcgtcataaggattgggcaagggtgaggaatccttctggtgacgtgaacataacagagtcgcatccaatcataaagaaaattgtaatgttcctctccacacataacttgtccatttaattttcttaccctatttgattcacacataaaactgttttttcaggtagatgtaaatgaaaagtcagtagctagtacctttacaccattttataatatggacatacttgcaacagcaatagggagtaatcatccagggaggacaacaggggtgagtgcttatgtgggtttagggatgggtcttgctcaaggtgatgggcactagtaagaagaaacgtaaaacaacaaaagaatatgtcaagaggattgtggatgagtatgaggtcaagtttgagaaactgacagccatgtgtcagagtatggagcgtcgattaaacaattctaagagttgctcatcatcaaaatttgtt

SEQ ID NO: 48083 - DNA, 273 bp, Zea Mays
aagaccatttcaatcatcaatattaaaggaactagtaaaatagaataaatgtgatatatctttgtgtcttgatcatgcccaatatttctttgttttcgaagcactctcgttagtattcagttaggttatggagctcttgtgtggccatattttctaagccttgagtttgttaggtttgactcaaaaagcacccctttgattagaatgaatgtcttcccaagtcaacttctgtaactctgaccacactcatagaagaatgcaccagcttcaaac

SEQ ID NO: 48084 - DNA, 837 bp, Zea Mays
ggcgtagacaatgggtcaccaagacgatgaggaggagaaggtggtggagccctgaatgacgatgcttgtggcagagacagtgggtcagaaagaggatgaggagaagcatgtaaattttgaggaggttatggcggttgtacaataggatctgcatgtgatgactgttgtgttaggggatgggcatgagacgatgacggtggtggatcaaccaatttgacatcccgtcgaggccaaaggatgaaattcttgatagcctgtccaagtgtctcattaccttcgggcctagggatgcctaacatgtcgtccttggatccttggacgaccatcgtcagttctaccctgcaataatcttctagaatgtcgcttctatggaacttgcgtcataggatcataaggcatgtggctactttcttcgtacgatgatcgttaataacatatcttataactaggggtcacaccataggccttgtgatgtcatcaactagacagcggaccttatttctcgttgacgcgatagagcttgggacagttgtacaatcggtggaagacggtggttgagctgctggaattagttgcatctgtggaggttgagtggtcgtctgttgaatagacttcacactcgccaattgctgcatcaattttggagaaggattcgacaacatttgagacatcaggtctttgaactctttcttagcctctccattaaaataatatccatcttttccttgtattgatcacgtttcttgtatagaccttcccaatgtggtccgaatccttccttccatccttcgttagatgagatgcctcgtacacggctaggatgctcagggttagcaa

SEQ ID NO: 48085 - DNA, 722 bp, Zea Mays
gtcgcagctggcacagctccctgcaaagggccttcgtcgaccgccactgccgtcctttttccccggcggtcgacaacaacagcatcgtcgtctcctgggtaaccgccatatggtagacggtcaactcaaaaatgcggttcaaacgagcattagaaccacgaatatcccaactacgcaaggtctccgtcctcggcaggtatcgccctacaatcctcgcgcctcggcctccacctcacgcacaaacgcagccgggttccggccccgcaaatccaaggcgaaggcatgacttcacaccaactgatcgcccaaggacggtattcagtgggagcacacttcgccaagtacccatctgtgcgccaagggccatactccatatccaatgaattcctcaactagatcgcgcacgctactcatgcgggcagcgtaccgaagggccccttcgtcctcatcatcctccgccacctcgaacggtgggaatgccacatagcagtgagagcacataatggctacagggagcccagggagatcttcgacttccccaccagagacataaaaccaaaagtcccaccaattgccccacttgttccgagcacaagggactatttccacaacttccgccgaagtctttccagtcctcggcgtgaaggtgcacgatccaaattgtgcaatattatttcctatttccttcttttgccagtgcagcaatagttcttggtgaagac

SEQ ID NO: 48086 - DNA, 339 bp, Zea Mays
cccacgtgtattttatgcgcgctaagcacgttattcatatcaataaatggaaactcaatttagaaattggttacgttagttatttcatgtagctaatcttggacctcgtgcaatgttgatcaattgaaaatagttacaattctattagtgcatgtggctaatacttgttagtgtaactcgatggaattaaatcacgcaatgattagttatgcatctacccgtaatacgcttcgactatagacttaaccactgcgagaccttccctcttctctttctagccatggcgaatgcaatatcgtatgtcatatcttatgcatgtttgacttatctgctctttcg

SEQ ID NO: 48087 - DNA, 502 bp, Zea Mays
aactcttaaaatatatgaagtatgttgaatgtgtgtgcatatgtatgtgtggtgtgattaggaataaaaggataccctccaaccctgctaagtgtaggaaagtaagtggttaggtaagaaaatgaaagtatactatgttttgtgaataatggcttgcttgagggtaattgacctgctaggtaggactaccttgtagtggagatggtgatgggttgtacgatttcttgaaacaataatcaggagcgaccaagaaaagacaagctacaagttcttggacaatgtagactatcttgtagaaccaatttgtagctaaccctaaaaaagtataccgtaaaggatgttataaaccgcgtgcacccataagcatcatgcattccttgcactatgcatcacctaccctcatactacacccatgtatgagggtaggtgaagtgacagtaggagttgccgaggaactgcaagaggttctcgctgaagagggtgagtcggaagccgaagtcta

SEQ ID NO: 48088 - DNA, 1155 bp, Zea Mays
agaaaaagagaaaggtgctacagtattgggctgaatctggcccgagacagcccgtacacagacgaaagcgcgcccgcgcgcacccacgctgccggctttgtgaataggtccctactgatttgaatagctggaaaagggtcacggcgctattcccatgtctcactgacagttacaaaaatccccccggacttctgtttctctacaacgccaggtccacgaaggcgagcggcgccagaccgaactccggcgaacctatactggccaaactacgcaacggctagccctcccctttgctggacaccgaattcaaccctacgtgactatttcccctcacttaattattgttcgagctctacatcaccctgctcatggtgacagcgcgaggaatggaccgactgagatgttcccggtgatccaattgattctagctcaatttgatgggtcagagagtattaggagcacccaaggatactgaaacaaggaatcaggggacatgaacggacctgaaacacgttggccacggcgaggtcaacaccgcgcggtgttcttggttgatttgggggaaatcccaaattgggacttcctggtgagcaattggaggcacagcttggtgggttgggtgcttaactaccttacggacctgacggcacgcgcaatttataggctctaggggcggtggcgcgtgaattggagttggcgcggtggcggccggagaaggaagaggtcactagtggcgcaatcgtggcgttcaccggtgcattggttcagagagggtaagctcaattgtgccacggttactacctcgtagtaaagagtcacgctgtggcataactgaggttgccggagtgtccacgacgacaccggcggttcggccacgtcgcaacggctacaggcacggtgataagcttccccttcgaccctatctacctccccgcgagatctttcacctccccgtgaatatccacagcgtgcccggcacgaatcccggcgaccggcgcaaatccggacgtgcagatcaccagcggcgagggggactgaaccctaggatattctagtggcactgtaccatggaagatctgattcagagcgcctgaccgagcaacttgtgacgccaagttcttggatttttgcgtgagaatgtattaatctcgctac

SEQ ID NO: 48089 - DNA, 336 bp, Zea Mays
ttccaagctccgaattactattgccaaggagaccttccacatcacttgctacggtcttcctctagccggcttcgacattgtcctaggggtccagtggctttggtcattgggacccatattgtggaacttcaacgccttatccatggagttctggcgcctgggacgcaaggtgcgttgggtaggactgggtgcgcctcatactcagtgtgcagccatgtccgaaccctgcgaactactacaggcattactgcagtcctacgccgacatcttcgctgaaccacgtggccttccgccacctcggcgtcacgaccatcacatcaggctgctgccagggac

SEQ ID NO: 48090 - DNA, 428 bp, Zea Mays
gatgaactcagtgttcatgccagagctggacaagtttgtggtggtctttattgatgacattctggtttattccaaaaatgaagatgagcatactgagcatctacacatcatactttagcgactgcgcgatcatcgcctatatgctaagctgtccaaatgtgatttctggctgaaggaaataaaatttttgggtcacaccatttctcgggagggagtatcagttgatcctgagaaagtacaagaagtgatggattggaaaccccctaccacagtacggcagatccgtagttttctaggattggcagggtattatcggtgatttattccggatttctccaggattgccaagccaatgactgaattgttgaagaaaggagtcaagtatgaatggagctagaaatgtgaggatgcctttcatacactaaggc

SEQ ID NO: 48091 - DNA, 827 bp, Zea Mays
gtttggattacattataatgaatcattaaaaacattacattacattacattagtacctttggcttgctcgaaggagagagtgcgagagtgacttttcaatgaaaaaagcatgaatagtacgagggtattggtcatctatttataggcatgggacgtagcacaagcaaaagtataattatgaccctgatatctatatattgctctaatacaaatattaaggatgaacatgtcttttcattgctggcttgatttcttgtatgaccttcgtgatcatattaagctgaagctttagctcttgccaaagctctatcacattccctacgtgtctgtcacaacttcggcattcagtccctttgacgtatcttagtcaagatgaatcacaaatggtttcttcatcctgaggaccttcggtagagaaggagacccccaacaacctgctctccaagcagcaacccttcttatccataacatcccagaaatagctagtggatagtgggaagatatcttttcttgagatctttttgacttcagtcctgatctttggctgctcacaggccatacaacagtccaaaactagatattttgcagcaaagctgaggtcactaaagccttagttatacactccatccatatcccaactcgagcacccaagtgaggcacaacagggatgaaactatcttcttcagaaacatgtcccaagcactaaatcgacttccctgtcattactgtcccattgcatctcccagtttagctcttgttatctcacaaatacccttaacaatagacccatctcccttaactaaatttactctctaactatagcccca

SEQ ID NO: 48092 - DNA, 357 bp, Zea Mays
gaagcatcagaaatacgaggtatcgtacctcgtaccttggtgaagcgggagatgaacttccggagggtttccccgggctcctgcctcactacatggaggtgggcccccacaccgtgctgctggtaagcactggtgaagttggccacgaaccacgcacagagttcttcccaggagtagactgatcccggggtgaggttcatgagccaggtccgggcaggtccaaacaaggccacatgaaagtatgttgccatcacagtggtgtttccacctgctgccgtgatggcggtaacgtacacctgcaggaactctgacgggtttgatgttccatcgtatttttccggcaggtgcggccggaac

SEQ ID NO: 48093 - DNA, 520 bp, Zea Mays
gtgggatgcctctgaaaccttctccgcggatcttgccgcgatgagcgaaccgtcttggtcgttggatgacgtaggagttcaagccacggaggacttcgctaattgagtcaccgggggtaaattaggaaaagatttgattccagtaagggttgattcgggtagcgcaaaacggtgggtggtgagagatgcgaccgtggtgtgcagctgcgaggatgtggctctggctcgcgcggtgacggagttggttatcttcccttactcgcataacttcctcgatgtcattgctacagcaatggacccgaaggggaaggccctcgctctggtatacggggtagtaaacctggtcggctattcgaagaaaagaaaggtatcggtgcctggagtgtccacccctacaaagtctcctaaaggagcgaagactattgtcgacgttggtgcagtcgaggcgactaccagaggcgctactcccctgaccgtggaggactacgacctcaacgatgtggagatacttatgaagtct

SEQ ID NO: 48094 - DNA, 551 bp, Zea Mays
acatatcaaaagctcaaagaagaaaatgagaggctaaaaatgagcttgacacaactaaaagggaagtgtattgctcaaccttctcaagataaccgtgattacatggtgaagaagcttgagacgggaataaccgaagcatgcactaactcccttgaagaaaatgtcaaggacttgaggattgccaagaggaaggaacaaagaaaggaaatcaacacctcctcgaaaagcctcaaccatgcctccatgaaaggtaacatccaaggtaatgatcaagccacacttcgcactaagaagtgtagtgaatgctttgaaaagggacacttgattaggtcatgtccctacattaaaaatggcttggttattaacaaggatgatagactttgttttaaatgctcaaaaaagggacacttaatcaaatcttgtccccatctaaaacggaatggcatagcattaggaaagaagaaatcctcaaagcttgaaaaacgcctatgctacacttgccgaaagaagggacatcaatgcaaggactgtcccattaataacaatcccac

SEQ ID NO: 48095 - DNA, 882 bp, Zea Mays
ggtatgctaggatccgagccacaggattagaaaccgagggctaggattagttcagccaaacactgaaccagtaggttttctgggccacaggattgaggatcgacagtccagatttaatgatttgaagggatgcgccgggatttgatctaggccattcaacgcatgatcaacggttgaaggccaatacgagctagatctaatcctagccaaataccgctgatccaacggccagaccactttcttcttcccttggccgtacccagcgacggcgcaggggcaccgcgccggtgagcacgcgcccaacgccccagagcaagattcccagtgccgataggtaatacacgttctacggagcatattgaactgattacggtggggcttacttggatagggtggcggtagcgatgttgcccacacagcacagcgggtcaacggtggggcaccaaccccgtcaagaaatccgggcgagccaaggtagtttccccatccgagatgtccacgagcaaatcactggggttcgatgaagttctctgcccaagagcccgagcgatggtacgccacggttccgcccacggcggcgctacacttcccctggttcgacggtggaggttctccgttctccctctgtctatttctggcgaggcgcttcctactgggatggggtgaggagaataggtcgcggggccagatttatagcctggggcgaggacgagcatggcagagagtccggatgagaacgagcctgggaggattcacgcggccatcggtgttctgttgggattcggttgagggagcaccgtgaggaccgcgcgacttctgtttcgcccgcctggttcgcgatccgttgggaacgaacgatctggcataaggggcccacccgcc

SEQ ID NO: 48096 - DNA, 567 bp, Zea Mays
atcccgcaaaaacggacggaacaaaccctctcctgtttctgtcacgtttccatatttttccgtaaatacggaaacggtcgggtcaaaacggtacggttcgggatgggattttattcttctgtattcaaccctacacggcacagatccgaccgtgcgaaggaggaaacacgattatctaatgctggtcgtggatgcccgatccaacggccgacgtctcttccccaatcccccgctcactcgccgcgcccagcacgacggagggcattgcccatggcggcacaccgccggaatttagtcgcaaaaggggggcccgacgatcataccccgattaaataggtttccacgtggctgggaacatggagaggccaataggggtagttgcaccacggattatggcaccaaatcaccggccacgggatttatgtggacgacttagccgcggagccacagcggcgagcgcggatgctcaggatgccccaaactaacctcgactcgtcataattgatcgcagaaatgatgcgtaatgaatgtagtatcggtgtggattcgtggaggcactggtcctct

SEQ ID NO: 48097 - DNA, 683 bp, Zea Mays
aaaataaattacttatgaattatacaaatttctggaattatttttatactaaaaacattttctatattaatatactcattttatttaatccttggactgtgccactatttcagaagagctcaggggttgcttcataagaatctagggccctatggtaaatattttacactcaaagtggacggcgggttgataattaaataagagagggactcatgcaaaaggtaatggttgaagggttatggttcggtcttggccgtccgatctactacgcaccacacagattagatctgatctttccctaaaccagtatccatccctggccactaaatcacgatcccacggcctatggcaagcgacaccgtgatcagatctgatccctccatccgtcgatcatcggcaaggatcacagcatcccgaagcggtaaccctattctaatctccaccgttggctactaatccaacgccatgcgatcgcctctactaatcctgaagcccgatacacgacggaggccatggccgcgaaaatgatacactctcccccgttgtcccaacaacgtttggttcggttcaacacatacagaaaaaacagggcgagagatgtgtggagccttcaccggccaaatggtccacgaaggactccgaccacggtaattgtggcggaaccgtccgaattattccaactt

SEQ ID NO: 48098 - DNA, 508 bp, Zea Mays
atgaagagggggactacgataggacagaagagatgcttgatgatgtacaccatgagcttgtacccatcgattccgagaaccccgtcaaccctccgattatgaggatccttctacgcctgaggttcagaagttcttcgagctccttaaagttgtcgaagagccattgcacgagcacacgaaagtgaccgtccttgtgttcgtgactcgacttatgactattaagtccagtttgcattctcaaacaactgctataaggagcttctgaacttgatcagtgatgtacttctggagaatcacaagatgccaaaggacatgtaccagtccaagaagttgctctctggtctcgatatggactacgaaaaaatcgatgtctgtgtcaataactatatgcttttctggaaggagaccgcaaatgagaagtgtacagtatgtggtgagcgtagattcgtaaaggttgaaaacgatgatggtttgaccgtgacgaccgaggtagcacgtaagcagcttt

SEQ ID NO: 48099 - DNA, 664 bp, Zea Mays
gccaaaacaaactagagtagagataaaaattaaaaaagtaagaacacttgtgagatataagtacttgtgtatgtgcagctccccctaaatgtgtgcatgatttttgtgatattcatattgacttgatatgtcaatttgcaacatatttggggagagtcaacaaccaacacaatacacaaaaactgagggatgcaacaaaattatataagatgtgataaaaaatagcattacacaaacaagtctatcattgtatagcataagatatgaaatggtactagctattacaataaggtcatgacatcattaaaatgtttgtggctctaggccatcaccacatgcatcacaatagtcaggcgaataaaattattacagaccaggtgttcattacaaaaattaaaagcgctgccaagatgagaatccttctccccctttttggcaactagcaccaaaaaaggagagaaccatcagccacaaatcaccactgaggaggaggcggaccaaagaattgagtcgccaagttagccgcaaagttttcttcccaggctgagatgggggaggatagctgcctgaaggatcctggggaggaggatatgaagaggattgacccggatcccctggtggggaggcggggcaaactactcacgatcatcaaagtattattctt

SEQ ID NO: 48100 - DNA, 602 bp, Zea Mays
cttgttctcaggtgatgcagggtggtgtaagtggtcaagataatatatctgaaccaaatagaaaaacaatcatagatatttagtatgaatgttataaatgattatgtatgtaagtacaaaacaaatttttgtatagcatatatatacttggtaaacagagagttacttacaagaacaatgagtgaacatccatatactattgcagtaatgtttgttctgttcctcttgtgccaacgactggcagcatcacacaaatcagtatatactagttaacaccaatcaatctcagccatccggtccacgtttgttgtcattaggacctagttgttcgtaataccccatgaagcagatgggaatagaagtcgattgaataaaatcagaaaaaacatctgatggataactcatcatcattcccaataactagcttgtcctgtagcttaacaacatcaaactcttctttacaaatgttgagatcccgtctcagttttgaagcagcgtcaacttcaccataccaatcagtgaactccctgccacctccagcacttggcaatcccaatataagacagatcgtctcttttgtgatcttgagttctttaccagcc

SEQ ID NO: 48101 - DNA, 842 bp, Zea Mays
ccaaatccctttatggtttgatggggtatgtcgttaacgacttaatgtttgatatgatatgttacttctaattaatattggtttcttgatgtggttgttattgaagttattatgcaagtgaagctactaatgtacttgttttgtatacatatcgtcatgatgttttttatgcgatgtttttcaaatctttgagctattactatcatatatttctatatgcttgattatggttgtttttttaaaatggatttttttggggttctagtacttgtaggaccgattgtttattgagtctgtgtatagtgggtctaatccggcttggtgtggtgtgaaaacactatataatgtagttttatcatgttgttgggtctaattgaatgttgggctacaacccaacttatcaatgtaatatttccatggaggcaatgctttgcgcctcactttttttaggctagtgtggctacttgctaacttgatcttagtataaaattggtttgtctctctagagcagaggcaacgttgtaatgtctatgaaatctttagactggtagaactcgagtgaatttgtgagatgacgtagattgataagtccaaccatgtctacctgataggtttccttattatgtgcaaccttatttttaacaataaatagggtggtttcaagtggattttatgtcatgcatgttttccttctatggcttgtttcaatagccataaaggctatgcataatttttagttgttgcaggctagtcatgtgggcgatattgacaacccattttatatttttttatttgccaacattgtactactttgaatccatcctatgatatcacgaggtaca

SEQ ID NO: 48102 - DNA, 576 bp, Zea Mays
tggagagctgccacggtgaaagccactaaccccgagcgccagtgaccttcttcctctccagtcgtcagtgcatcatcgtgaaattggatgccaccgctcaagcctgctataaattgccgaccccgcctgctccgctaggtagttgtgcaaccagtgaagcaactcgtgcctcgaatcatcccctagaactccccaatttgggatttcccccaaatcactcaagaacactgagcggtttgacctcgccgtggccagcgcatctcaggtccgttcatgccctctgagtccttgtttcagtatccttggatgctcctgatactctccgacccatccaattgagctagagtccctaagatcgtcgggaatgtgtttggttacccgtggtgtccgctgtcaccgtgggcagggcgtgttagtgcgccactggtgaaattagttgagtggaaacatttattagggcttgaattaggtttaaaccgaagaagagcaccagccgtttgcgagatacgaccggtgtgggctcgccggggctcggctctccgccggaccgcgtcatggacctcagagtgtaaagga

SEQ ID NO: 48103 - DNA, 768 bp, Zea Mays
gcggcgagcatctccgtgcgaagatctttttgctccgggtaagaccgtcgcggtggagggcactaactcaggctgccacgcggccatccctcctcccggccgtgtccgatcatcggcgtcgttcaccttcgttcttccacaccgcatcgattcggccatgttactgtcgcagcagggacgtggcaagccataagaaaagggtagcgcttgacgtcgccgttgatcgccagctaaggccggcaatggttatcaccgtggtcgcggctatgcttcaccgcgcctataaattcaccccatcctcgctcccttcgctcaaatcaaccgagctccgaccttcgtctccaagttgcgaagccatagccaccactcccgtctccgattagcccccatagccggagaatcactcacttcccccaattcggtctccgccgccgtgaaacacaccccaccgtggctgaaccgctctggtaaggctctgcccaattcatgtgttgtttccatagccctgcgtgcttgtgaagctcactgtggcatctgttctcacaactcggccttggtttggcgggaacgcgtgatcccgacctcggtgtccgccgtgatcgtgggcaagcgactcccagtgggtttgatgtcaaattaatggttgttcctaggttgccttaggtcagtgaagtctctatcgctagcgttggcgtgccccgttttccctgtgttactaggccgcctggctgaaaccggcccagtattgtttaatatttttcctttttc

SEQ ID NO: 48104 - DNA, 476 bp, Zea Mays
agtaaccaagtcaaccgggatcgagtggaacatagattgttactcgttcttggtcatcagcctattttccgatcaggaaccaatcgaggagacaaaccacagactcgtccgagaattgaaggaagggagttgaaatcaggtgggattattttcggcaacttaaaacgaacacctctaacaaccctgtttggcacaacttaattttaacttcttcacgtatttaagcagaagtatgccaaacataatacttttacaataacttatcagtttagctgcttttcagaatggactaaaacagtcaataactgcttgtcatcagcttctcacataagctgttttttcaacaaacagcagctgtccaaatagggtcagcatactagaccagtttctaacctagactgatttattccacatggagctagggccggaatagaccaaaccggctaaaccaaacacaacctaagactatcttcagc

SEQ ID NO: 48105 - DNA, 747 bp, Zea Mays
gacgttgttttagaatctgtgaaggagtcaactcctgcctcagcacctactttagagggcaaggccccaaagaaatctagcgaaactaccattgcgcagatcagtgctgaagctagaccatcagtccccgctgaagcaaaatcttcggaggctgttgaagaaggtaccgaaacaagaccttcagaggctgccggagcaacattaatgttggaaaaagaaggtaatgctaaagaatctgaatctcttgccctcggagcgtctatcgaagaattagaattcatagtacgacatgcttcggggaaaaattatcgaaggagcaaattgtcgaagcgcaacactatgacagggatctgaagtaccctcgagggtcgttggtgtataatggtgatgatgaagatgacttcctttattgtctgccagaatataaggagatacatgtctgtcgggagatggcagacaatgtaggatatccgaagcttgaactaggcttgtctgcaatgacgaaggaccagcttgcagtaacagtctgaaggtgagaatattttaacttattggaagacagattatttttgtagcttatttctttatcagtaggtactcatcctttgtttttgtagggtttaattctgagtaaggctttaaaggcgcagaagaaagcagaatatgaaagctgccggctggcccttggaaatctgcgatcagaggttattacagtgaggaatgaagctcttgaaaaagacaaaattc

SEQ ID NO: 48106 - DNA, 562 bp, Zea Mays
gtacaaagggaaccaaagcccttcgtgaaagaagcttttaaaaactattacttcatcatccttcggctctagaatcacttcatccctagtaaatcttatcagttcatcgtcatttttcccaaaatacccaagctttttcattagaactaagtcttctgctttcacagtggatttcccaaattcaacatgattgggcttgcttgcactcaagatgccatcatcttcttcatcatcactaccaaattcggcaacaatagttttagcttcgacattaacactgtccttctcgagaaaagatcctccttctcttgaacaactaatccagagagcttcataacttctgaaattggagctgtctcagtggcctcagtttctccaccttcatttgttagtctagcagtagacctaattctagtcatttcagttcttgagacgaagctaactttctattttttacgactgttcgaagaccacttaacaaatgcagagcacagacagcttcggcttcagtaaaaaactttagcagcacaacgatgcaatagcaatgaatgctatagtaatt

SEQ ID NO: 48107 - DNA, 628 bp, Zea Mays
acggtccaacgcatagacgcggatggcccggaacaccgccagacaattcggatcattccagcggacgatatggcaacgccttggaaccacgacgaccacgcaccttcaaaccacaacgaccaaaaataggtacgtggaaaactaacacgttcaaggcagctggtcgactggtcagatctggcccaaccttcgatcaattattgtctaagtatgaaaaaaagaaggtcaggccaagtaactggccatcaaagcgacctcgctcagccactcaggagcgacaacagataagaccgattggaccacctcaccaatcggaaaagacggaaggttatactgtccagttaagacctaacgtgcctgcatggacaacttcactcccatatccacctatgtcatatcaatatacatacataccgccgccacatgccccgaatcaaagcatgccaccatatccatttgggatgccatagtaccccgcttggagggcaccacaaacatctgtattcaataggttggcgcctctagtacaagaccaattgagcgccactcaatccggtcaccaggcacaagcccagcaagattgccggaccactcgactgcaaaggccgaccaatccgacagggggtca

SEQ ID NO: 48108 - DNA, 1500 bp, Zea Mays
gacaactggattagtaatttagaactaccattgggtgaatccaactgaactgtctgttgcaatgtatcaataatagccccatgttgatgtaaccagttcatgccaaggatcacatctatatcctgcttctgaaggacaagcaagttagtaggaaaaatgtgaccctccagatttatgggcaccttctccaccatttccttagtatagatgcatcctctaggggattgtatacagaaagtatctttctcttcttcaattggtaattgatacttcacaacaaaggctctattgatgaaggtatgagatgcgcccaaatcaaacaaagtcactgcaggatggttggcgacataaaacacactcatcataacaggggcaccttcagaaattccatgagtatgagtaagattgacctgccccatcctaggaacagtccggcttttctttctagtattctgtcgactactctaagatggagtcgttagcgactgtcgctcaaccactggtttaggcaaacgacaatcttgggtagtgtgtcctgacttcccatagtgatcacataggttcatgttgaccggattgtttttggaatgaacgcctggggcatccgactaatgtgggacaaaaggaacaatagcctgtcggacacacgactgttgtgaactgggtaactaggatggaggatcaagagaacaaatgataggttgataaacaatcctctgatgtcgattactgctacttgaggattcttcggcaaatttctttctcttagactcttgatgaaggcgaatcttatcatcacctagaatggcctgactgactacatcattgtaactttcagccacattgggtgctatcaagagttggagcttcatattaaggccacacatgaagtagaacttcttcatggcttcagtaccgacataggctgcaacatactgagataactgattaaacatctccaaatactccataacactctccccttcaccttgctttaggttaaagaactcatcaacttttatactcatgatacccttcagaatataatgtgcctgaaatgcctcacagaactcaacccaaggaacttgatatccctctggctgggtcacacaatattttgcccaccaggctccagcttgaccctgggtcacacaatattatgcctcacagaaggtgagtatgatcaatgcctacactaatgagttgtgcaactgcattctcaagcatggatgttgactgtggattcgatgtgttagccttattctgggaaatgccctcaccatgaaccaatccagaatgagtcctcattctgtcaacaaaagagaacttagctcccaatctcacggatttgaaaagacaagacagaaaagcaagaatgggtagcatgaatagggtggatgaaacactctcaaatagctacatgggggttgaatttaaggttatatgtcatgatgcatgctcgtcctaaacgtcacccaggttgtgggttagtattttgat

SEQ ID NO: 48109 - DNA, 721 bp, Zea Mays
gccgcttgtagagagctaggaaatgccgaaggagaccatcaccaagtctagcgaaggtgatctggtccggctaaagtatacattcaggtatggggataagttcgatgaccaaacgatgactgctaaaatgcatcaaagttacaagtgatgagctgcttggagcttattccaaggtagaagataatgcgctatctacagccttcggaggtcggggaaaaaagagaatgaacagagtttttaacgccatcggcttcgcctaccccgactaccactacccgctgtgagggcaggggaagaagagaaaagctgctgctttggccgccccagctgagcctgtgtcgaaggctgcgggcaaaaagatgaaggtacttacccaccggtcgcgttacattgaaccggctgtggtgcctgagtttggcggggaggcctcttcagctgctgaatcaagagaaattgttcctcccatgcaaaggactgaagagccggctataatgccgaaggcacctttggttgagctagttgaaacgaaggttgacaaagataaggctgaaaggtcaaaaactgaagaagtaacaaagatgcctaggattttaagtccttcaacagaagcaacagcgctgaaggcacaaaagagttctgccgcaactcctaagagaaggaggatggtaaatgtgctagatgttgtattagaaacaacaaaaaccttgaatcctgctcctgc

SEQ ID NO: 48110 - DNA, 1039 bp, Zea Mays
gggtggtgtcgcgtagagctccgacgagctcgtgtaccggccaaattcactcaaaagaccggcgccctaccttagcccgagaccaaattcaaagagctaatgaatgtttcccctcactcaatttcatgaacgactacccaatttgttctggccatggcgatagcaggcatcgcagacagacaaccgcatttcccggtgatctaagggatcctaattcaatcaagttggtcggggagaatcaggggcacacaagaatactaaaacgagagggcagagggcatgagcagacctgaatcgagctggccacggtgaggatacattcacggtggcggaaacttagtttgggggaagtgagcaattcgtagtctctggtggataattggaggcaagcgtggtgcgttgacttcgtgataacatggcgcaacagacccgaccatcaatttataggatcgctaagcgatggctagggatttggacgaagaggcgcgacggtcgggggaataggaggtcactagtgctcgggttagtggctttcaccgtggcagtacaccggcgatcaccgtgcatgcgagacgcgacttacagcgacgtggtctaacgctttagcacgtggcagacgatcgacgggcaggcaacaccggtgaactgatctgcgctggccgcaaggcatgagggtaaggcggccagctgccggagttatccccaggcaaagatcttttgccccgaagcgctatccggtcaccagtgagcgtgaatcttaacggcggcgacgatcacggcacgaattcatcggcggcgagggggggtgaacctggattcatgttcaggttactgtaccatggcgcagtctacttagttgacctgacagaccaacattgagctcgatttactctcaaatttcgtatgacaacataatcacttacctgtatcaaagttgtggagctataccccaactgcaattcgactataggaactaaactcaatcgagcactagatcctttataatcttgatcccaaagtttggtcaataacactggcg

SEQ ID NO: 48111 - DNA, 1135 bp, Zea Mays
ctgtgagtccatctaattacatgtgtgtacatgcacatgccaacttcgatccctttcaaagattattatgcgtacatgagcacacccatgtcctttactggatatgcgcctgcagtcaggtgtgctttgcattgaatctttgtagcccttctattcttcatcctccccacagtggtggcatttggataggcagtgcaagtgggatcaggatatgtgatgctgagacagttaaagttatgatgaagaatcaacagaattgcagtatgattcggaaactagtttcagaagttagactatgggttagcctctcaataacttagttttaaatggtctacgttgacatgtctttgtctaaaattttattggtacttgcattatcaacctaccaagaaataaagtttgttctgttttttctgctcctttgatctctttgctaaaattcatgcggtgatctgtgttccaggccaatcaagaggttgaacagagctgtgcaggtgagcatgcattcattatattcccacagttcatattctttgcggtactacatctatggtagatttagtcgctgctgccatacatcagatgcccagatcttcttcaggcccttcgtcggcgaggagtatcacaaggtacgccaatcgcttggtcttatcttcctgctctgcaaaaacaagcacgcaaacccaatttactatgttacaccccttggcttccgatgaggtggccgaggtgtgaggctgacggtggcgctggtagtccgcaaggaaccggattggatgtgctctcccttgtcacttggtaagagacccaggtaaggaacatataagtggttgttctaatttctgatattagccaatttcccccctccaatctgttactgatttatatgcccttctagggaccagcagatcccacacctattacatgatctatccttctagaatagaatctgctctctatcttctgaaccggtactgccttcttcaatatcgaccaccgaccggtccacctcttcaataatcgtccttcattgcccttcagttgtgagttgtgacatactatttatattcgaatctgatctattacaagtatacatgcatattatagggtgtgcatctgtatacccatgtccttt

SEQ ID NO: 48112 - DNA, 599 bp, Zea Mays
gagctgtccttttttctctcaaattatatgtactccatctccatgcattccagttctcaaatttggtctcttttatggagctcatctcgactggctatatatgagaaaggaaggagggaaatgattcgggagtccaattgttttgacaacacctatttcaagaagctgcttaagaagtctcaaacatcttcgagtaggtgtgccttcctcaccaattgctttgatgtctatgcttaccggaacttactgtctgggcttgtcgtgttcctctctgtgaagaagctagcatgccatgttcctctatgaagaacagcttaactagaactgtctgtttctctacaatgttaacaaatctacccctatcccagtgtcaaacataggagttgcactgaaattttaaaaaaacaaagaattttatttggggaaggttgagtgaaaaaatgcttgcattttagattcattcgatctgtatttaccctagcaatgagtccacaggttcttgcacaaaacctgtaaccaccgagtgaaatgaagattattagtgaactaaattcctaataaagcaatccttgggactaaaatcaccttgagtcaaacta

SEQ ID NO: 48113 - DNA, 749 bp, Zea Mays
gataaatcgggtagcgtcgccgcgccgccgctgctgaggtgtgtgtgcggtggtcacgggtagtgccagcaagctggaacgcacacgagtgagatctagcatcgaaagacggcggtgacaggcgaattgcccaacagaatcgaagaagaaggtcgtggacgtgggcttcaccgtcggggtcgatctaccattccctctacggtaaaacttttttccccgtcgtgttcatttggttcgtagtaccgatttgcgcccacatatgaccgtgttggggctatggagggttggattcgcgccgacgtaattgctccgatgtggtcggaccgcgccattgcgaagaactagtgtgcgcagggccccatccacggaattgagcttagggtcaggttcgccatgcgttaggcaacaggttgcatccaggggagagtcgtgattggagttggtcaccgaaattgggcagggagatcgccgcggtcggcggcgccgccgtggtcgcgcaaggaggtaggcgatgtcctcctggccgttggatcggttggggcatctagtattagatcgggatggaggtagaatattgatcgctgatccgtgaagcatcggctgggattagtcgcgcataccatcacgccttcgttaaatagtggacgtcgatttttgatccgacggtccgtataacataccggttcacggtggggcaaaactaatccttaccgtccacttcaaatccgatggccgagatctaaacttac

SEQ ID NO: 48114 - DNA, 377 bp, Zea Mays
tttcttactggatgtcaaccatttaatttactactgcactagttacttgcacataacccaattataaaaccaaaacagacaagcagtcactcaagacaaacacaacagagtagagtagtcaatcacaatcaacatgactaagacaacagcacaatagttacttgtttcagtcataactcacaagatatttatccacaaatagtgatcaaatactttttggaaagcataagaaacaccctacaactttggtattgtcatctcaaggtgattagacacttaataaggttaaatagtgataaatgacagttttattcagagttggacagattcagacttgcgacttcaaaaattcataactagagattcatggatccaaa

SEQ ID NO: 48115 - DNA, 507 bp, Zea Mays
ggagtcccaagaaaactggccgagcacaaactgaaggtctacccccaggcgaggctgatccaacaaaaattacgtcgcttcacgcccgacaagagagaagccatccatgcagatttggctcgcttggtcacgatcggattcattagagaagtgttacatcctgagtggttagcaaatcctattcttgtactcaaaaagaataaagtggattggcgcatgtgcgtcgactatatggatctcaacaaacattgtccgaaggatccctttggactccctagaatagaccaggtggtagactcaactgctgggtgttctatgttgtctttcttggattgctactccgggtatcatcagatcagcctggcaaaagaagacaaagaaaaaacagcattcatcaccccattcggtgccttctgctatacctccatgtcgtttggcctcaaaaacgctggagcgacttaccagagggctattcagacatgcttagccgaccactggggcaagcgt

SEQ ID NO: 48116 - DNA, 614 bp, Zea Mays
gaactaccatgtcacagtagatatccgtatgaggtctgttcgtcgccagagacattaccccggggaacgccacgatagttcacgccggtgactcacctctcccctcgaccgccggtctccccctttcaaatttcggcaccaccgcttagcgcccttataaattgacggcacggtctgctccgctatgttatcaccaagccaaagcatccatccctgccctcgattagccactacagccgttgaatttggattttcccccaaattggtcgactgcgccgccgtgaatcaccccatcgcggctagctgctcctaggtctgcacccaccctccgtgttcgtgttttagcaccctcgcatacttgagatgcttgttgactcaactaagtaagctttacggcatccactcgtcaagaacgccttgaattggtctcggtgatcgccgtcatcgtgggcaggcaaatccagggccgggttaatccaattagagcctgttctagggtcacctcgggtcggtaatacttgcccagtagttaatttgggcagccatcgccaatcttggttggtccgagcagcagtgtggtcgacggtgagcgcgccgtggacttggatcaattt

SEQ ID NO: 48117 - DNA, 972 bp, Zea Mays
atttattattctttcgatacatttcaatctaaaaacaacaaatataaatagaaacatatggattaaaccacaggctatagactaggtggcccggagatatgtccaaaataggtcgcctagtcaggcccgagctaagcctgccgaggcccgacacgaattggaacaggcgtagcccgacctagttcaatctacaggtcatgtcgtgctggcccgtgggccacggataagacacatgcacaatgtgttaggttgtttctagtgtcgggtcggcctgtggcccgacgagcctaacggacccatgaccatcatgtttaaatagcaagccctggtcggtgccctccctacgacccacgcccgtatggccccaccaccccatgtttatatatatggtctggtcggctccctcctccacgacccacgccccgtatggccccactaccccacatcccacgtccagatcatgtgggtgcgctattttagggatctgtttttataacagttttatgcgtgataccttgttttctagtgtaaaaatcatcacgtttgagcataaaatagtatccgacaaagcataaaatcatgtttccgtcacctcgcatgcagggtcctatttttatgtaaggtacagtcaacacccaccagatatacatgcgattttcgatttttatggtaggtgttgtttcaaatccgaaaattatggtaggtccaaaattatggcagatccgaaaattgttgtgcatgtgggacactgtgtgggtgcaacccagatttaagcgtaaaaattctcacgctagagtgtaaatagtgtcagatatagcgtatatgttgactcactcccaacaacaactctcgcatccatgcgaccaccataaatcaagggatttgattgggtgagttgattaggggatttaattagttgagtcgatcgggaatttgatttttatggtagtcacatacaccataaaccatgtg

SEQ ID NO: 48118 - DNA, 348 bp, Zea Mays
gtttgctaatgtctattaccttattgtaaagtcttctgctcaaactcctatgtttaaagttgatgttcatgttttcatgatgtatgattattgtaatgttcacaatcacaggtggatgatccttgggaatgaacgagtccattgaaactcagcaccccgagtaagttatcgggttcacttacatattcatctaaggccctgagggaaaggattggtgtacgtgggcccgatagtcttgttgggttgtgacaaaaataaggggatgaactatcatgaactctgcacgcttgtcccttgccatttgtagcatctgcatctgtggttgtgactaaggttgtttttgtgctt

SEQ ID NO: 48119 - DNA, 396 bp, Zea Mays
cagaaacctcgattctagccagataatggattttacgtgatcgcaaccagccttctcaagtagggagactgtcccttgagcacccacacacgcacaaaaatcacctcgaccagttaaaacttcatcgaaggcctcaacttcgcattcgatccatttcattgccccagcaacgtcaccacgaacaaactcctcgctagcgaaggcaccaatattgacaaacatgttcttcaacttttcacagcattgggcagcggtggagaagcattcttctttggattcacgaagctcttcaacaatcttttgtactctatccctttcagtttaagcaatttctcgctctgtcttttccacttcaaaattttcgtttgcctcatcaagtttctcttttaaatcaac

SEQ ID NO: 48120 - DNA, 486 bp, Zea Mays
tgcgtgagggagaacgccggcagcggctgaagccgcctgtcttcagctccaaaaccgagctgcattagcatccattctcattatgagttcccagaaaacgattaaagcaaacaactgcatcaacagggacgcactaacctcctcgagctaccggcagacaaaccgctcgctaaaaaacgtcgcttctttcgtcggacgggattattcctataaatctatttcgtagtggattctgtacgcagccactcccattacgccgaacaggtccgcggcgtgttattccctgacgaccacctaccctactactactaccacccctatggaaagttcttggcctttgtgaatccatgcatgcgtgcgtggaatcacaagcagccgcattgtttatctccacttgattttttttaataaacacttgtttcgaaccagtcatgcctcgaagccccgttcttggttcaaacggacagagattttgctagtggctac

SEQ ID NO: 48121 - DNA, 458 bp, Zea Mays
gattgtctacagatgtggttatatattatagtcttttttaaaggccattatgttatgcgaaatcttgaaggtctacatgtcacacttatggcaatgcttcccaatacttgtagtatccaccgtcccttccatcgattaatgttgccgcaattttcaatacaatccactcgtcaatggaccaccgctttcgagcacacgagtaataaacatggacaaggtacatatgcaatatatagtaacgactaattccttacttacggtccaatgtttggcactttgatgcattccaattttaataacgagtattatttgggcttataccatataattcaccaacagttacataaaaaccacatgaaagttagtatttcataaagtctcccaaaactatactccatatataattatgcacccttgctaccaaaccacaatgtcaaaacgcaaaaagtaggcacaat

SEQ ID NO: 48122 - DNA, 398 bp, Zea Mays
ctgaaattcagatttctgaattttcagcctttgaaccaaaaccgagcgcgttcaccttgatctctatctcaaaactctaagctcccattgacaaaaatgtgtctaactaacccctctacctcataccagaagatggcattgggacgcatgctttgggcacgtcaaacccggaatcttctctctgtgctcggcagtgagacaaacccaacttcacccctccatatctcttgatccagtcagcgaaacctgcaagcctccacacacaaacgacaaaggaatgtctggggaagagatctctcaatgggatcatggccgtaatctcaaagatttggagccaatccgcgcttgaacacgacctctctctgcgctgcctcgtgctcgacgctgtgctagacgcc

SEQ ID NO: 48123 - DNA, 354 bp, Zea Mays
caaacaccctggcaagcagctgttgcagcagctatgtattcagattcacaagaggagagagatactactctttgcttctgagagctccaggtcacaatgttctttcccagaaagaaagcaaccccactagtgcttttcctcttttcaagatcacctgcatgatcgctatctgagaaaccaatcaggtctgcaattgctccttgtacatacttgcagccgaactgtttagtgcctgcaacatatctgatgatccttttaatggcagcccagtgttcagtgtttggcatttccataaatctactaaccatcccaactgagtaagcaagatcaggtctggtattaaccagatatctt

SEQ ID NO: 48124 - DNA, 767 bp, Zea Mays
ggcgctcttccgtgcgggtttggcgaccaaagctcggtagatttctcgccggacttcgtgggttggcggcggaccgtgtgtggtcgtggtcggagccgtccactgccagtcgcaggtatgtgacacctttatggtattcgtcgtctccgccgcatcggttaggccttggaattcgtaggagataaccaccgtgccgctaattgtgttctgcgccgtgccccagccatggtcaccgccgcggtggccctgggttctgccgctgggcgatgtcgggcggaggagaaacaaccctgtgcgtagatctgttggcaaacgaccatgattagaagttaggggcttgcctcggcgactgtctgatcttcaacggatggatgggattagaacatggtagcgtttcgagtgaatcgatctagcgcgttgatctgaaaggaagtggtctagagtcaaccgggtagttttaaatcttggccgccgatcgttgatccgagggcctgcgttgcttactggtgtagggttatgaacgaatgaatctacggcgttggtggacgatccaacggccggtaatgtgtgcgggttcataagtaatcagatctaatctgggcacttgaaagatgatccgatgggccagatcacaccataccccttcaccgagcccaattagcatataagcccctcaacttcattataatcaacccaccgtccactacggggttagtctgagtctagagaattttatacgcaagcccctatcttctctggtatttcgc

SEQ ID NO: 48125 - DNA, 548 bp, Zea Mays
ggaccatatgacaaaaatggcaacatgttgacagtaatagtattgccacatccactgcataacaaaaaaacagtaagccaagtaccaaatcatgactactaaaacaggaaggtgattagacagttaagacaataacaatatcatatactctgcctttttcctgtggcgcatcgcatcacagacatcatacacttttatttgccaccacatatctcagcgaatgtctggacgaaaatatggtcttctttagcataacatactttgggttttcatgggcacatcaaaaagctcttgccatttcctataatgttgcagaagttgcaagttgcaacaaaaacaatagacaaagccttttagtgccattgtgaaaagctacagttgaaacccaaaagaagccttaaggttttgttttacattcgctcatattcaaggcaggctaaatctttggctgcctcctcccatgtcaacttcagccttccactgcctctctttccattactacccggtcttacttctcaggataccaaatacccgacaaaccaactggc

SEQ ID NO: 48126 - DNA, 382 bp, Zea Mays
aagaggaaaatgcgagtttacttcatgtccagagtattgggcccatctaagagaaattatgcaaaaatggaaaaagtcttatacacagtcttaatggcttcaagaaagcttcggcactatttccagtcccacaacatcatcgtatcttcatcccagccacttaaagaaatcataagaaaccgacaggcttcgggccaatcggaaaaatggacaatagaactcaatgagtttgtcatagattttgtgcatagatcatctatctaatcctaagcactagcagacttcattgtcgattgactcctagcccacaagtcgaagctaccccattagacgaagctatctagatagttttccatgatggttcatgggggtccttcagggc

SEQ ID NO: 48127 - DNA, 483 bp, Zea Mays
gcttgttgtagtctaaatgcgtatgtttatggtcgcggatgaaaagtattagtgctcatgtgaggtctaagttaaaatgcaaattattgtgtgaacaacacttcgatatcgattatcgaggagaatgcgttgttaattgaatctggtacttctagtgctcgtaatgacacagataaaaatttgtaagtccacttgttagttctcacttggtattttaactctaacaaatgtcaaagtgttagaataattcaagtctctagaacatggcaattcttgaattgtataagagctgaaatttattagtttctgttttgggctgccccgcactgttttagttgtgttgtttgtttgatgaactaaatcatgttttctgtagaaaagtcatatggaaaagttatagacaactctattatcttacttgtgtaaaaatttgacaggcataagtctgatcgtttacgagttatgctttttacaaattcagta

SEQ ID NO: 48128 - DNA, 275 bp, Zea Mays
ctgacctcagtacccaccgcgagttcaaggtttctcagtgggatcagagggatgtgggaggttgagaacttaaactagatgtgtgggattggtgtgatgcggtgagatgatcagggaatcaactgtgatataggaagtgcagttttgcgccctatttcttcatgaccagcaactaaagagggatggagtttctgggttaaatgggcacctcaccgggtaataccagtttacatgttcaacccttccattgcatggtcaccacgtaggatagaggc

SEQ ID NO: 48129 - DNA, 516 bp, Zea Mays
tgtttcttagacctgatgcgaccatgaggctgaaactgtgtgcaagtaatagtccatccatcaatgtaacactcatgtatttcttcttggggctgggcattcttgtgatgtttcctttttggaatacctaacaattcatcgtctgacaatgcatttgctattagttgttcttggggagaccattgactttttatgccagaaaataaaatccggttcttctgttttgtagtttcactttcgtttgtactgacctggcgacaaggaattccatagtactcacaacaacaacatgttccaaggtcacttgtctgttggtttagttgtgcatccttttgtgtcttgaatgtctgttcatccgttgttttatttatagtgttgttttgacttgtcaacacaccacattctttgcatttagtgacattacttgtagttgacattccaaggtctgacatctgtatgggtatggaagaatggaagggacgaaagggttgagtaaagacagattatagagagcag

SEQ ID NO: 48130 - DNA, 678 bp, Zea Mays
ggataagctctatggcaaattcgactttcctctcgggtggcatgcccgttagctcctcgggaaatacgtccggaaagtccgacacaaccttgatagcctcgagcgggttgggctccttactatcaactgaaatctggtgacagacaccctccgctgatttaggcatccttaactcggccactacctcttctcctgatggagacttcaatgttacggtcctcttgtcacagctaacattcgcttcatacctcattaaccaattcatccctagaatgacatctatcccaggggtgtctattactattagatcactggggaaccctatcccccttatttccacccttatattcgagcatattttatctgtttgcaccttgccaccaaccgaattaatcctcatgggcggcatcattgcctctactgagatgttatgcaattctacccaggttgcagtgacaaatgaatgagttgcaccagtatcaaatagcactttcgtgggatgagattcgattgagaacatacctactgccacatctggtgcatcctggatcgcttcggcctccaagtggttcacctttccacggttgtacgcttggttacgattgcctgctgtcggctgcagtacaccttgccttgttggagcattggggttggtctgctgctgcgccgccttcttcg

SEQ ID NO: 48131 - DNA, 721 bp, Zea Mays
ggatatctgacccgacggagtcgggtaatgatacatgctttgactcatcgggcagacccaaagttgggtgggcacggattaggatattacctttcacgcacgggttatccattcgatatccgaaatcgatccatagtgtatatttttgtcctagcccatattacatagtaaagaacaaaccctaacaccatgaacctgttatcaccggatctcaggcgagcccaagataggcctcaacgcaggatgggtcgcgaagagcggtccgaaggagcgaaagggcgtaaatctgttacattggggaataagcagccacaaaatcagcaataataagttagcttaagaataggaagatagagctcgtctattacattatggttggagagctccctagactataaaaatgtatatgtaaacactcaatagtggggtcgtaaatgtacacacgttttgcgaccacaagctttggcacttcgccgcccctgttcttagggttcttcacgggtaagtgacatgccaccttgttcgcgtcttgcgatcagggtggtgttgtttttattcgttaagtctctttgctttctcgtaccgaaacgtttttaaggcgacatgcactagttatcgtagtatacatgagaatgcatcgacaggatcgttacatgtgcatgttatctatcgattcggccatcccctcgggaagatttctacctcgcccgagctcgactcc

SEQ ID NO: 48132 - DNA, 381 bp, Zea Mays
ctgatggcagtttgggccttagagtgcgaccctctgctgaagaagttagcgccttagtttcttcgattggagaaattcccgatgatgaacggcaagtccactttgaggtgcctttggatcctaatgatgcagaaataagtgctatgcttgatatgctggccgaagatttttctgatgctgctcctgctgggacattggcagtggcgcctctcccagaagctggtacaaccttggatgttcagagacctgtcagtgttcgcctgagacatccttaccgagccaatcaacttgatccttctgctgatgagcagaaaaggaaaaagagacgtcttcggcaagtatctagtttggatcggggcgctggtccctcggttcctgctg

SEQ ID NO: 48133 - DNA, 480 bp, Zea Mays
cgttatcaaggagaaaagtagagaggcaaaggtttaatatatcaaggtagatattgcgcaagggtcgcaatacaatggcacgaaagcaaaagtataagaattcaatagggagaaagcattatcaaggagaaaagtagagaggcaaaagtttaatatatcaaggtagatattgcgcaagggtggcaatacaatggcaagaaaacaaaagtataaggagtcaagggttatatagcaatattagggattagaaaaccacttataatataatataatattgccattaccgatctagtcgaaaacttagcactatagaactatcctatcaacctaaccaagaagaatggtaatagatccaaagaatccatagcaaaacttcttgcggagtggggataagacagaatagggcatcgtcgatagcttcaaaagggcttcttctggcaaacttcgcttcaagttccgcaatcctagcttgatcatctt

SEQ ID NO: 48134 - DNA, 815 bp, Zea Mays
cttcgacctcaacacacaagtagatgccgaggtagcggctttcctcttcctcccttgcttccgggtgggatagtagtagtctgggtatacgaacccgataacatcaaacaccatgtttaaccgcttcttgtcgtgagcgccgaaggaagttttcatagcttcgtctccaagtatctcatcacttgttgcttctatggcttccaaccaatcatcatttggctcgtcaaactggttcctgaaccaaaaagtgtacttcagataaaccaggccactctggctggagctagcggcgacctccttcagcatttcccactcgcttgcaagaggccatactttgtacgcaatatgctcttgaattaagtctcttgtgctaatataggtgcacactgtgttgaaagccgcttggcatgcttgcacatcatttccaagtgtagtggctggcctcctaatgccgaagagagaccatatagggcgttgaataatccctctcacatccaccctctgactcatgtcattctttacgtaaaaccattcctgcatccaggagcctggccacctcttccgaaacgtgggcacagggtaactcgcctcagatcgaggcacgaagctgtaataaccaaagttgttgtgatattgttcctttatgatcgcctttgtctcataagacagctcatgaacattgcaaaagcaccttgcatctggttccagtccttggctcctcatggcccagataaaaacccccactttaataagagcttcgggggtaatctgatgaaggtatatcttaaatgttttcaaaacatcgactagcatct

SEQ ID NO: 48135 - DNA, 593 bp, Zea Mays
aaattttggtgtagaaaccctttcatccgcccttcctgaaacctgttgcttcatgtctttagtcaacagatgctggccaacaggctgtcgaactgaagatttggatgtagatgcagcctcactccatcgataatctcgcttccgtagcatagcgcccgcttcttcctgcaactgagcaagaacaacagcagtatcgagatcttggggtcgttgaagcattacgacggccttaatatcatctctaaggccatccacgaacttcgatgtataatatagaggatcattcatttgttggtaagcattgagcttatcaaccaattgtaaaaattcttctacatatgtcactaccgtccctgtttgcctaatctaaaatagctgtcgaagcaacaactgatattggtccttcccaaacctttgttggatcatacacccaaagtcaccccaagtcatggtagctgctctatactccaccgactgccaccaaagtgcagcaggtccaacaaattgcatagaagccaccttgatccacatcctaggatccactggatacatgtgaaaatagtcttcacatcgggattgccatagctttggat

SEQ ID NO: 48136 - DNA, 519 bp, Zea Mays
cgcccacggagacatgcaacgacacaagcaagacgatggcatgtgtaggtagaactaccaggtatgagcgtgacggagatgtcatgtcaacgaatgaggtacaagagttttcgatttggtaaatttggtattagtcagatacatggggagaccctttttagaactactttttaaaactatcgggtatgagcgcaggcacctatcgtggcgtccccatccatcatgcccctaaggcctaaagtcgcgaggacatgaggatgaccctacttccaccatccacaaactgctcgaaactttctgctgcttatggtaaagatttgaaacgtgtttgaacaactataacatttacacaaggtctattttaatgatacatagataccgtagcaatgtatgggtacttaactagtattgatatatatactggcggtaatgaatgcaaatgtgtgtgcggttgttaccccaattctcttcttgtacacagtaaactatataaccgactaggggcttgtttggaagtac

SEQ ID NO: 48137 - DNA, 343 bp, Zea Mays
gatgggcatcaggtgactgtcgcactagggaggaggccactatgttgagggagaagcagtcgcatgggtgccacatcagggaggagtccgacatgctagaagaggcggcacatcaatgacacggatagaaaaaagggagtgaaacagtgacaacagaaaaagaggcagtgaaacagtggcaacatagaatgagaggttgtatagagccccatgaataagagcttgaggatgaaatttaggggtctcttacttttgagggcattagtagaagtttcactagagtggatttgatagagtaggggtctgatctttcgataagttgtttgggtggagatttcgatgt

SEQ ID NO: 48138 - DNA, 383 bp, Zea Mays
agggacggcttggtacgccgagcgtttagcaaactgtccttgagtagtaacttgacgtgaccgcggggtgtaatcatatcgtccaagcagttgaccttagtccaaatggtgtcgtgttacataaaatggcatctgctgcctgacttgcttccagatgatttgaattgcttattgaatacttgcgactgttcggtgaccgtggtaggagatgagtggctgcttccggcctctataaatagactgcctacctcgctggtgtcttcacacatcttctgatcgtctgttgcttattttttcacttttctcttctttccaaccgaccatgggcaagaacaagaagggtggaggttcgtcgcaccactccggcaataagcggaagcgcg

SEQ ID NO: 48139 - DNA, 433 bp, Zea Mays
acaagtcaacaacacgtacaagacccatgctccaggccatactgtctacaagggctcggctatgcctcctcaccatacgcagccaactccggtactcctagcagtcctccttgaggctataaatagggtagcctacgacttcagggagacaggcgaacacttcacggttttctccccccacgatattatcacttgcctcaatcaaccttagggacttgggatccttccctctctcgttcaacttgtattccctactgcaagcacttaggtgcaagtaatataagtctcatcccctctgttggaagtagggcttctcttgctcgaaccaggataaagacttgtgtcacttgcatcactcatctgggttaggggcacacaacattatttcactcgttggttagaccctcggatccatacactgacaatatctaaa

SEQ ID NO: 48140 - DNA, 830 bp, Zea Mays
ctttttacgtgagtttgctacctcgatgctctgtatgattttctttgcgtttaatatcaattataactatgataactaatttttagttgttttcgtaccgaaaatatagattggtcaagtcgtttagtaaaacaacatatcacacatacttgcaaattgttttcacatcataatgaaatatatatccatatgcaaattagcaagtcaatttttagaatagttcatagccatcggttcagaactttatgcgaaaaaatgttggctctatgtctacttatacgaaagaatgttgtttcttccctttcctataggagggtgaaataagttttactagcagtgtcgtaccagagttgctagtagcctcagtgtgccagtcgcttctcaagatggcctcactggcagcaaaatgttctctgatgagttgactcgcgtgcttgactgggattgtactttatctcttatgtcagctaagctctagtgaattcctccggcaccaatgttagcacgatggttcgtccaaccgagcatgtccccgattcacaaaactatatagttgggaacctcataggtagattcatagtagttaacagtttgcttaaacaaactgacgtggttgtttgatctacgcaaaagatggcactggttgttggttttaatagtgaaatgtcatcctaaccatttaactagctatgtccaacatattatgtatttatttctctaaatattgccagctgctctccaatacaaattacatggttgcctcactatccgtttccaaaaaactttttgggggtaaaatcaaactgaaatttggcgatggctcgtcccct

SEQ ID NO: 48141 - DNA, 357 bp, Zea Mays
gggtaggttagggcaagaatagcctggggtaagaaagtttatggtgagaaagaactccgtgttgggtggtactgcatctgaagattgagtttgacttctctctttccttgacgaggttgatcttttcctttcctggtcttagtctcattgggtcgggtcagtgtatatcataggagttgagggaatatggttaagatagatatgggtgagatacactacatgatgtagatcaaaatcttgtttgatgttaggtggggacggatagattatacaatccatcatgactctatgggttgggttagctcttctgctcacagttgagtgggtctaatgcgctaagttaagttaatacctggc

SEQ ID NO: 48142 - DNA, 326 bp, Zea Mays
tcacctaaggttcagcacaagggagaattcagattttgcctaagtataaaaactaacccttgaacaaagattccacatgttcaccctaatccaaatttcaaaacccttcgacccaattgacaaagtggcgccaaattaaccctagaataccctggaaagagatgacacctaccctagggcgctagacacgacttgacaccatttttgtctcggtttggacatgtctgacacagccaacttcccaccctcatatctctctcacccgaccacatctattcttggaacttacatgaactaggtagctctaggtgcagggaagagatctc

SEQ ID NO: 48143 - DNA, 336 bp, Zea Mays
gtagccatgtcatgtaccctaagcctacatgctccaccaccctagaacaactattctagtacctaggacttgacccctagaggcctaacccttatcctcaccaagggacagtttcctgaaatcctgctcggcaaggtccaaaatcatattccagaagattgaaggtagtcaggatgagaacctcgtaggtatgccattaagcaccataatagggtcgtgtgccgggacgccttttcaattcaggtcaccagacgagggggcacaagcatgaagccttttagaagcaaagcgtggttatggccccacctacaggttcgccacctcacttgaggtggg

SEQ ID NO: 48144 - DNA, 617 bp, Zea Mays
aggagggaacccatgagtacaagggttgtcgtaatgtggagaggaggcgatcctgagcccctgtagcagtatggccaccgaaatgggttgatcaggaggaggatgttcggcccctgtattcgtatcttgaccaagcagagagccgagtccagggtcgggggcttggacacgtacccgagcccatcttgtggaaaagacgtttgagtcgtagttgttgaaacaacaatgagtatggtgaaaagtgcatgataattcgtttcgtatgacataaagcggacttgacactagccctgtaatttctgtagccatcctgttgtcagcggtctttatggaagggtcggtggcatcggtcgtccttctatcgctgctgtttggtcgaggccatgctcgggcgagatagagatttcacccaaggccgaggtcgggtctacacctggacatgcaggtgtgcagtggagtggtcagaatagtagtaggagtggtcgcctgcgggattcatggggagttggtcgctactaccaaggcagttgaccgagactaagctcgggcgaggcggagtttcctcccgaggatgaggccgacttcgagcgaggcggagttctctcccgaggctgggg

SEQ ID NO: 48145 - DNA, 272 bp, Zea Mays
gcattggagaccaaggcacgagcaaccaggatgggtggttgactaggttggccagggcacgatcaaacacgggccagtgaggcatgtggtagccaataaacatctaacacggtctcagtggcaaggggatggggagggagggcatgcaacatggtaacatgggcacatgcactatgaccggttacattgggctatggcaggactaggggcaagctagactaggtgtggttgtcttaggctagctaggtcaccttgggctagctatggccaac

SEQ ID NO: 48146 - DNA, 632 bp, Zea Mays
tgaccacaaatatacagtacgtaaggtaaattcacgttttcgatgaccatcataagcctttacccctacccatagctctttgaactcttcaatcaacgattgcatgaatacattgatcttctttccaggatgtttaggccctggaataataagggcaagaaatatgaacccttctttcatgcatttgttgggaggggggttgtagggcatgatgaaaaccggccaacaagagtatgtagtggaactattgtcgtaaggagtgaaaccatcagtggacaagcctagacgaacactcctagcgtctcttgcaaattctgggtcaaaacgattcagagccttccaagcattgccatctgatggatgcatcataatgtctgggtcttggctatcacggtctccttccttatgccacaacattagcttcgcagtttctggggttaaaaacagacatttaagccttggagtgatgggcatatatcgaagctatttaactaccacttttgtagcaaaagtagttccatcctcttttagtacctccgcatatctagatttaccgcatttctgacaatgggtggccgcttcatattccttccagaacaacatgcaattatcttcgcacacatcaatcttct

SEQ ID NO: 48147 - DNA, 889 bp, Zea Mays
cgcccacatctccctccgtcccacttccccggctatagagttcagtttctctccccactttccccatttttaccgcacctctctctttctctctcctccggtcctccctcaaccccagcagcttcgtctcccctcccctctccccagaaatcggaactagatagatagatcagccctatctttgcctcctcccggacgactcggcgcaaggtcgcagcttttctctcgatctttcgcgcttcctctttttgacgcttgctccgcatggggttcctggagatctttggggcggttcgctgctgagatggttcgccgcatcacgcgctgctgtgactctcaacaggtgggcttccgtagactttccactttcttactccgatctactgtacggagcagccggggagtagtattcactaaccttctctgccggctgagagcgtgagctcggtggaggagtcctgatctagccaaagattggatttttgtggggttgattcgaggtgttttttttcttgcgcgatttggtggtgtgggcttccttcctttcattttcgtagcatctatctttatattccttccgatttcgtgtcacttctagtccatatctcgcactagtgatgacttgcttgactagtttcttgactggtttcctctgtttatcatcgtcgcttcagttcttccgatccgacgagccccggtgatggacggcacgccgatctctgcgtcctctacggcaggcgtcgacgttggcgcggtggcgaccggcacgcccatgaagaatgcgatgacggcggccgctgtcaccgagatggcgaggcatctcacagtcgacacggaagacgccttcgcgggcctgctggagctcgccgctgacgacaacgcggagggg

SEQ ID NO: 48148 - DNA, 622 bp, Zea Mays
cagagaagcccaggcaagaacccacacacgtcgggccttgaatctgcccctggctataactagttcataataatctcaccattattcatttgttttctccaccactccatgaaatcattagcgctcaactgctcaacaatagaagcccacaaggccccaaaagcctggccatacatgcattctcgtatgcctattcaacacctctttcccatataaaaatataacctcatgtcccctctcttcctttcttcgtgatgcaataatgcacacatggtgcaaaatgtacggtactacgacgaagttgcatcacaaaaaatttacaggtgatcctaccttcatacgaaggttttcgggatctaaccctgtcttccatctgaaggattttagagtcttatcaccattaccgggtgatctttttctgtctctgccctcatttgaaggacttcggagtcttgtcaccattacttggtgactattcttgcattcatatgaaggtcttcggggccttttctctcatcttctttgctacactcgaagatgaatcctcatagttatatttacaaatttaggcatgacatacaaccttgtagtttgttgtaatgaaaagaaacaacaagaaaac

SEQ ID NO: 48149 - DNA, 495 bp, Zea Mays
taaatagtaacttcatgtcactcaacatattgatatagcatacaagagcctacaacatgaacgatcagagttttctatcaaatggcacgcacaatgggtgatactttctagctatagcaggagtttactggaaataatgcaaaaggatggtcacaagacattacaagccagatacaacccagtaatcatctaataacacaatggtgttcaactctaatcatctactcaattgtgctaacgaaggttaataaacccttagaaaagataatttgggtccacaattgcctcatgaacatctaaagtcatatgtgggtctgtaaagctgacatggtaggaatatatatatatcttagagcacagacggcaacaaaacagaggaacgcagtgtattgagaaacagtttagtagtgtgggggcaacgacattgcgagtagaaagtaaagatgcagacatcaaattgcactgaattatttttactgtgcatactgatcagag

SEQ ID NO: 48150 - DNA, 792 bp, Zea Mays
tcgggaggaggtcggtccacggttgggtatggttctacgacggaataggggcaccggtgagcaatttcaacggtcacaaggtccttccccaccgaatgacgccaccacaagcatccatgcctgccgctgaaacccatagtgccactgtcgagcccccagtgacggtgatgtcccgattcacccgcggtggcgcgacggctctctctttcgcctcccttctctgatttcggtggcacggttcaccgcgtgatgtgggggacaggccggacagcacaagggcttgcgggttggcttatatgctctaggaaggtagagtccgcgaggaaggtggcaacacgatcacacgcggattccggactggttgcaataaacccaggtgagaacgacatcggagagccaagcgtgttatgcgctcagggccccacatgtcaaagactgagacgacgacgtgcatgatgaaaaacaaaaaggctagcgcatggggtgaggccgacaagttgcttaacttttgttactctatcactttgttgtatacacttttgactaaaagtgcatagaacttgaaatcacccaatagggcactatttagggttttagggttctatagggttttgagtgttcttgggtacatgtagcacttaagctctctaagcttaacttttcttgaacatttctaccaacttgttgagatcatcctttagtgctcatctcacaagaccacaagcttctaatccttggaggatgacactcccacctagggtcaatgacctcttttaccacatccgatcatca

SEQ ID NO: 48151 - DNA, 426 bp, Zea Mays
ctctgtaggctctcttagaaataggggcggtgccaggttcaagctctatggcaaactcaactttacgctcgggtggcatgcctcgtaagtcctcaggaaacacgtcagggaactctgacacaactctgatggcctcaagcaggttggcctccttattatctacagacatatggtgataggctccttcttctatataaggcatgactagttcagttactacttctttcccgagtggggacactaactttactgtcctcttgtcacagctgatagttgcttggtttctgtgcagccaattcatccctaggatgatatctaacccttgagtacccattactactaggttagcggggaaatctatcccccttatttcaatccttagattcgagcacatcttatcggactaaaattttccccaactgaatt

SEQ ID NO: 48152 - DNA, 742 bp, Zea Mays
tagacgtcatgacaaccaacactacattttacaggacatcaccgtgagcgacttcatcaacattaaaataaaatcaacatataaccatgtaattttttgactcctatgacctgcattctgaaatgtctagggataaaaaattgaaggaatttcataccatgataatgtccaacgctttgacgccttactccagcaaggatctacatatacattgtatggagtggcgttccatgtaaactggggggcgtatcaatttcagaatattgcacatattctagaattgaattggcaacacatactgttgtcgaaccattcaacctatcaattcagttccctccatatccaaaacatcttatgccattttctgaggtggtcgaacaacgtcataagatgtttgtaggtaatgacccatctttatttatgaattatatcgatttaaccctataaaatattcatattttacctaattaatcacacgtgaatggcccagatgttattggaatagttattcatttggagccattacaacacatcgctggaaggccgtaccgagaggtcatactaatggattccaggtcactgattcatagctacattctttttataaaattgaacatttgttaggttttagggttaactcatgagtttatttataggtgggatataatcgtcgtggcaatatggcctgaactcttacaaaggaatgctctgcgatgggtgttagctagagaaaacaaaggca

SEQ ID NO: 48153 - DNA, 486 bp, Zea Mays
taggtggctctcatgtgcactaatgaggtcctaacatggaattataattttgctaatcacctcactaggctttatggacttgtaatgctctagcaatgaatgcttgttggttggggcaggaagacaataaggactagtggagagtgacgactagccgttatagggtgttctatgcgtggtcgcaccgaacagtccgatgcgccatcggtgtgccaccagtgtgcttccaacagctagttgtaactagtagttgcatagaggcgcactggatactgcatagtgactgccgggtgcacaccggacagtctggtgcctctctaaaaatcgactggcactctctatttctcaggttctctgggctgctctcgggttactctagggcgatctctggtcgactgcccatggcaccacctgacagttcggtgcaaactggacagtccgatgccgggcagagcagcaacccttctttcttttcttgggtttttc

SEQ ID NO: 48154 - DNA, 737 bp, Zea Mays
aaactagcgaagctcagctgcggagtaataaagtggtgaagccgcgacgaggacgttacaaagtcaaataacttccgttgcgctcgttcggctcggctcatttgtgtttctactctgctcgattcagcgtctgcttacttgcaagcgtatgcctgagacgcattttgctgcggatggtataaaagctctcctgtgatccctaatctttatctttactatacgaatcttggatctattcttgaaaagaggagatagccacgtagcttgccaaaaacagtaccgtgtgataaagctggaacggtagatcgttaagctctgagttttctcggcccaccgatactctctcgcctctgtaaaatatctacccgtgtgatttttgtttgcagacagtcatatacattcgcaacgcacaacgaagcagccatcaatccttccgtatgaagagaagctagcggctcattgcatgtatgaatcactttctgcacactgtttccaaatcatgtcaacatcgactcttctgcttggctctgagaatccccaaatctcatcagcaccagcacccactccaccctcccaatcctgtcaacccaaacttccctcaaatctgaatatcaaatcacctctccaatcctccccaaatcccgctttgccctgatgatccctaaatctcatcaccaccagcacccactcccctctccaaaaactatcagcccaaacgccccactcaaatataaagg

SEQ ID NO: 48155 - DNA, 563 bp, Zea Mays
aagaaattgaaagacagttttgcaaaggtgggtgcatactcatcggagcaaaaatttattcaaggcgatcccgaaggagtcattcaatggattgatgaagaagttgaagcttttgaagaaatactcagcgatcgtggggacttctgtgccttcgccggtgcccgaggtgttgcagtagttttggagaaaactagctatgaacatgttaaagctgcagcccgggcagaagttgtgttctccatagaagatacaaaggaaccttcagccgaagctactctgatgggcgggaaattttattccgacgtttggatgaagggtggtcgtgagatagccgacgaagcaataaagaaaagtgaaaaagaatcccatgatgcccgagtagaagcaaaggaagctgccgaacgcgcattgattataggtacctctatttagtgccattttgctttattatttgtttctagcttccaaccctaattatcatatactttgctacaaccggccttttaccacctccggaggcattcgatcctgaggctgacctcgccatgaaagaagcttttgat

SEQ ID NO: 48156 - DNA, 455 bp, Zea Mays
atcaactgcacagttcgccgtcacgtcagacaccaggcatctctccttcgaatacaaggcccaacttcactaaggatgctctccttggtgtataaatagggcggtggtccctccacggatgggggatcgacgacatcaacacacacacacaacacacgtagatgaacgctcgtcctctcactctgttttagatattggcacttggctcaatcatctctagggacttggggacttcccctctcccgttgtgcttgtaaaccctactatagtcactatggtgcgagtaatataagcctcatcctctcttctggaagtacgaccttgtgttgcccgaaccaagataatcgtttgtgtcttctcgcacaccatctagagtcggccacaaggcacaattactggttagttaaggacccgcggtccaaacaccgacaacagcaaaaactacttcaatagtg

SEQ ID NO: 48157 - DNA, 379 bp, Zea Mays
aggagaaggtacccctgattctgggtaccgacaccctccatcccgacagcgttggtctgcattaggtcccacgaatgcgacacggactcgatggacaggcctgtgaagatgcccttggagtcagtgagccaaaaaatcagatgtacgtatgggcataccttggagaatgtaggtgagtcagagtagctggagagcgtaaggccacaggcggcgagcagattcaccaccgctatcgcctgaggggcctcaatacgactttttgtagttaggttggtgggcggattaggatgagtaaaacgactccatcccacagctgttgaaatcactttcctcgtgtttctatgcatggaagacgtgacgtgtgtgggtctactgaaac

SEQ ID NO: 48158 - DNA, 400 bp, Zea Mays
ggattagaacaaagcttaacataagcaataccgacacttgtgtctgaccaaacaaagaccggagcaactaccaaagcttcatgggatgtaaaggcaagcaacccatcaaataatttacaaagttcaactaagcacctcttgggccacaatactatatctcaaataccatagtatcatattagaactgtaaataaaccttctaccaaacgagctctaaagaaacattacatttttcgagaatcaatattcgtaggtgttacacgaatctatatattgtgaggtttatgtgcggagaaaaaggaaggggttataagttttagggtttacaaagcagtgacccctcatgtcgcgatgactagacgaattatacatttatctatttatattgatttgtgagttg

SEQ ID NO: 48159 - DNA, 393 bp, Zea Mays
ggtccacttccctcaagtggaagccccagaacctgtggatgcagttcttgctttgccagcctttcctccagcgggtatgcttttggagggaaacaatgactagggggaggagaacatgcaagtggaagagaacatcaatgtgggcttcatgcaacacttggagcagcccaaccatgatcctgcatatgaagattacctggctagaaaacgcctttcttcttgggctgacttgttccccaccaactcagaattagttcctgtcccaaaggtgtgggctgctttcttcatgggcctactgttgaggccggattcttttgaatgggccaagaaatttttattgtccggtgctattgagagcacctagagggggggggggttgaataggtgatcctg

SEQ ID NO: 48160 - DNA, 786 bp, Zea Mays
aaatttgatgagccaaatgatgactggttgaaatgtatcgaagctacaagtgatgaactgcttgagccgtactccaaagcggaagataatgcgttatctgcggccttcgggagccaaaaaaagaaaagactaaatagggtttttgacactattggatttgtgtaccccgactatcggtacccaccgcggggtcagaaaagaaaaggtgcatcttctgagaaggatgttgcttcagccgcctcaagcgagcctgcatcgaagaggaaaaaggtgaaggttcttactcaccgaccacgctacattgaaccggccatagtgcctgaatttggcggtgagaactcttcagctattgaagccaaaggacctgctcttacgcagaagattgaagagccggctgcaatgccgaaggctgacaaaattgaagaactgatagctgaagggacgaaaacatcaaaagctctaagcatttcggcaggagcggaggcactgaagacacagaaagatctggcggcgacccccaagagaaaaaggatgattaatgtattagatgtgctagagacaataaaaacttcaagctctactccaggaaaaattgccaaggcttcgaaaatacagattgaaaccgagacaaagctgaccgaaactgaagctatatcgagccaagttgacgccgaagctgggccttcaatgcccgccaaggagaaatcatcggagattggagaaaaggcagcggaagaaggggatatagaacagattttgcctgaaaagactgccgctcctgctccc

SEQ ID NO: 48161 - DNA, 1043 bp, Zea Mays
gttttgttgtattgcaattgccctttttctgtatctttctttaagaattcatgattatgctcaaagttaaccaaatcaatccggacagaaataacattctctttagcatcatcgtagattttttaagtttcatcctagccttgcactgtgttcgtttcgaacatgtgttacacatcctgggatttccaactcccctttcagcattctttccttccattgaacaattcaaccatttacaattcttccactccctttatttcttcaacggaaatcctaccacatatgcatattgcctataaaaattatatgcctcgtccacattacaaaatgtcataccaactttaggtatcaatcttatatcaatattgtccggctgtgcacagaaatttaacatttatgaatcaatgacgaccaaatttactgtgctactgctacaccattacaaaagtatgtatgtaactgatattatcatcttagaggaacttacatggctttgcagaatgtgaggtgtgtcctgttcatgcgccctaatatgtctcatggggattcgtttatctgctcctaccacatctgccgatcttgtgttatcgttaatatgtctaggtgccttcaacgccgccggtggagtaacagatacactgtctgcgtctccagtcaatgcagacggtacaacttcgatgtccatggcagtagacgtacctattgatcaatgccttcagtatgtccggtgcagtccctctcgccgccgctaactggcgccaagagcacaagaatacgatccttctgctaccgtacaggaaagactactacaaatctacgctaaagtcttaaaagaatatttgcttccttattttaatgctccttaaaccgtaacgttgagtagaaagcggtaactgtcccacttttatcgcgattgtacagcacttctttcctaatctcaaaccaatctagatttatgcacacactggtcacgtatatacaataccatatatgggctgacgtctcgatattgcatggtttatgatgttaagtttcatgttttt

SEQ ID NO: 48162 - DNA, 682 bp, Zea Mays
gccatatgaaatcgggagaaaatttgccccaaacttggtctgtcaggccgactgaatgaacttcgcaatggtacagtgaccggattggatcgccagctcagagacctcgacaccggtgatcttgcgcccagatccacgccggcgtcgcgattcacgcccgaccgaactcatataagtgctcctcggtaagaaatatcgcgctggagataaactccggccactgttctcatcgccgttgtgtcccgccatgggaagtcgcgttggcatcaccggcgttcgccgttatacagccaggctacgtgcctcaacattttaccatgtcgcagtgagtcaccgtaagccactctctgctactggttcgttgccggtgaggccaccacggtagatgccaccgagctctcgcgacagtactctcttcactctccgaccgccactgcgccaactcaaattcacgagctaccgcccccaggtcctataaattgagcacaccatcaggtccgtagggtagtcacgcatccagccaccaagccgtgccctcaattgatcaccagagctcaataatttctcatttcccccaaacctactttctgccaccgtgaaagaggcctcgccgtggccagctcaattcaggtccgatcttgccctctgctttcttgttttagcaaccttacttgctcctaat

SEQ ID NO: 48163 - DNA, 421 bp, Zea Mays
tattcagtacaaaagttcagagaagcatattgtagagtcatctatcctataagggatcattcacagtggcctcaagttgatatggactcagttgtcaaaggacctttagcaaaacgaggtgttggtaggcaaaggaaattacgaatcaaaggttgtctggaaggtgggagtagacctaagacaaccactaaagaaggtggtaggcaaatgaaaagaggtcctatacgatgcataaaatgtggagagcttggtcacagacaaacaagttacagaatctgttatgtgcagtgaattctgttattgagtctgtttattgttatgtttttagatgtgccgttgctcgatttcagtgaatctgtgaaaacataacatccgttgctcggtttcagcataacagattctgtaactattgtctgaacag

SEQ ID NO: 48164 - DNA, 468 bp, Zea Mays
gttagattgagggtggtataccgaggcgaaggcaagcttggtgccgatggagaagcagaagtccctgaagtcctggctatcaaatcgtttgccattgttgactgtgagctcggacgggactccgaatcggcaaacaatgttttgccagaagaacttctgggcagtcttcgacgttattgtggatactgccctggctttgatccacttggtaaaatattcgacggcgacgaaggtgaacttgaggttcccttgagccgtaggtagtggcccgatgatatccagcccctagcgttgaagtggccatgtgtgggcaatcagcttggtgaactgcgaagggttgcccgagcggggagaaaacttctggcaagcttcgcacgaccgtgtgactcaattcgcggcgcagattattgcggtccaataaaatccttgatggatcaccttggcagcgagggccctgggccctgagtg

SEQ ID NO: 48165 - DNA, 420 bp, Zea Mays
cccccgcatgcccacaagaaaatagcagttgcttccattgtactgacaccacaacttggtaccagaccataattttgcaccaatgtatcatgcaaacgatgaaacactgttcgatgcatgcgaaacatgtcgaagcaatcgtcactactctccaatgttcgctcaacccattggatacctgtttcaaccatggttcttctggaaaccccacttggagagctcccccatatgtcaacagcaaacagtgcaactagcaattctccatccctctcatcatcatatgaatctgtattaggctcagacatctgcaaacatacaaacaataaccagattcctagaataagaactttaccatacaaacaaactcatggacatacttgttgacctccaatatgtttcacacaatgacattgttcacag

SEQ ID NO: 48166 - DNA, 458 bp, Zea Mays
tttttttttaattgtgaactttaaagaatagaaacttaatttaactttgcacataataaatggataaatttttgctgctcttctgtattacaaaacatgagcacaggttgaggttattatactcttggtgtgtgggcatcaagaaatagcagcactatattttattgttggcactaaaaaagttctgctaatcatgaatcgacaatagtggttgtatagagtgacacaaaaggttaggtacaagacatcaatatttgtatctgtgaagttgcaatacgaatgtcatcatgtcaatttatcctgtgacactgttttttgaaaccatgcatcgagcacccccttttcttttacggcatgatgcttttttgctgggtatcactacaatttatactcctattttaagcattgaacacacacttatagcggcgatatatatttgggatgaaatattttttttc

SEQ ID NO: 48167 - DNA, 1546 bp, Zea Mays
gggacatagaggccacctctagatgagtaactgtaagcatgtggcaccgtcttaagtcattgccgacttaagtcgattgctcttgttagtagggcataatggtcaccccgggttgagtaagcgcgagcatgtggcaccgtcttaagtcgttgccgacttaagctgattgctccgttagcagggcatagtggtcaccccaagttaagtaagcgcgagcatgtggcaccgtcttaagtcgttgccgacttaagccgattgctccgttagcagggcatagtggtcacctcgagtcaagtaagcgcgagcatgtggtaccatcttaagttgttgccgacttaagccgattgctccgttatgagggcatagtggtcaccccgagttaagtaagcgcgagcatgttgcaccgtcttaagtcgttgccgacttaagccgattgctctgttagcagggcatagtggtcaccccgagttaagtaggcgcgagcatgttgcaccgtcttaagtcgttgccgacttaagccgattgctccgttagcagggcatagtggtcaccccgagttaagtaagcgcgagcatgttgcaccgttttaagtcgttgccgacttaagccgattgctccgttagcagggcatagtggtcaccccgagttaagtaagaatgcaggtcgaccatgaacaatttgagtattcttgaggtctctttattgataatatatttccagtttacagagtacattgtcgtcccgatagcttttgaaatacagctaggggtaaaaatttctgaggtgttctatgttccatgagtttccaatttccgtgtcgtccatttgagtgagacgatatgatcccggccgagtgacctctgctactatgaatggtccttcccatagaggtgacaacttgtgtcgtccctcccccgttagaattcgatggaggacgaggtctcccactgcgaaggatcgacatcgcatggtcttatcgtgataacgcctcaaagtttgctggtaccgtgctgattgaattaccgtgttcagccgttcttcttcgagtacatcaacatcttccagcctagtagcctcggcttctgctatgcttttaaagaccaaccttggcgccccaaacttgaggtcagcaggtagtactgcctctgacccgtagaccatgaagaaaggagtatttccatgcagagctcgactaggttgagttcttaggctccagacgacgtagggcaactcccttatccactttcctgcgaacttctcatttttatcgaagacttttttctgagtgcctccaatatcatcccgttagctctttcaacctgcccgttggctcttgggtgtgccaccgaagcatatttgatctgaatgctcttttgctcgcagaaatcgaagaactctgaacttgtgaagttggatcctaggtcagttatgatactatttggtatcccgaatttgaatattatgtctgtgagcacctagaggggggggggtgaataggtgatcctgtaaacttcaaaacttaagccacaaaactttgattaagtgt

SEQ ID NO: 48168 - DNA, 1080 bp, Zea Mays
ctcaggtggaggcagggcagctccgcatgagtggcgcctgtgccgaagaggaagagtgcgagctcaccgacatccgctctgaaatatgccatctttgaagcgaggcgtcacccttgcgcatggagtgtgatggtgctcgtggtgacgtggaccacctccgaaacgggggctctcgactcaggaagacacttcgtggagtgaagtctcgcgctaagttggctgagtcagcctcacgggaggtggaggttcacctggtgcaagcgggctcgaaactggcgagggagcgcgacacgaccaaaggtttgcccctttcttacccttcacgtctcgaccatctgccacctcggatcgcttcacgctttttctcccacagagctctgtaagatgctcattcaagtgcaggatgcaaaggctatggcgaatgaggagagggtggcagccatagagaaaacacatgagttcttgctcgcctgcgaaaatgcaattgatgcagggcaccgggcagacgcccttctttcagagaggagctctgaactccaagagctctgcccggctgctagcatggtgtgtgtccacctctctcctccaccgtcggtcgaagcgcccctgatcgattgcctgcaggagctgcccgaccacatggagctctttgtcgtagaaggcgtttgctgaggtggtggtgtcacgcttggtcggatggtttctcactttgctgagatcgatgtcaccgtcatcgctgtgggttacactgtcagccaaagcgacgaggagctgggatgccatcgaggatcaagtccacccctttgcctagtccatcgcgagtcggatcgacgtctggtctctcctgaccgaccccctgaccaaggagcctcccgtttgtagcccatttttcctctgtttagatgatgactgctaggatttttgtaccatgcctccatgtggtgcttttgtatatataagaatgcttgctttctgtttttctatgtgccttggtgtagacaaggtgtagacaattaatttcaacgcgcattctcgtctttcattgattttttggggcgaacatacattactccaccttgc

SEQ ID NO: 48169 - DNA, 386 bp, Zea Mays
catcgtcagaccctttcctcagacgatcttgaagagctgcaaccccaaaatcttctttcgataaaccaagttcagcccttaaattgttggtagcaatagcttcatcaatgcccaatgtcgtccctccgccagcatttggtaaccccaaaataaagtgcaccgtatcctttgtaattttgagctccttccctgggccggctcgaattgtcatgtcattatggtcaatcttttccatcagccaaactaaatgagatctactgcccagtgcgtcaactctcatatcaagaatactggagaaccccctccgtgcaatagcttggcgctgtctgtcatttaatatctggatgcttactaatacgtcttggggattgcatctcacattaagc

SEQ ID NO: 48170 - DNA, 442 bp, Zea Mays
gcggggatggcgtccgtgcccgtgcagatcggggggaatggtggacgggccaatgacgggggcgccgcgttggcgttgatggggggtctatcgggggcacggcgggagacgggagcgggggcagcagggtgtggacgcactctttgctctcttaatagagtagtatagatatagggaagccagctacaggagtatgcacggcaggcccgagcacgtacatgggtctggcccaaaactatcacaatctaacactaaatatgagttgtactctaatcagattgttcatgataatctcttggtcatatcttcaatcataagcgattccgcgtgtgaactcgagaaaaagctggaatcaaaatggtatgcggttttttaagtgagatcaattttgatcactacacatatataaagagcgtgcggcaaactacagagataaactgct

SEQ ID NO: 48171 - DNA, 1028 bp, Zea Mays
gtcggtagcttatcatgtagaaatcgaagaaaacacctctgaagatgctctgtcagaacaactaaagaagatcctgatggtacaatagcgaaaagatcttcagatgcagtgaatgtgccacccgtgaactccgcgccgtgatcctcgccagcttcacgatttgtgcgctcgttgtgcggatatcggtcggcggtgaaaagatcttagcatctggattggttcgaacctggtcactagtaggttcaccgtacccacttggtctgcgatcgggcgagatgatccccgccggcattagccgcttaccgaccgtgcgccacgtacctaggggctttaacacgtcgcagtaaaccattgatgcaagtccgtccatcgccggaggcctttgccacggtgaaagccacgatcacccacgccagcgcatttctcctctataaggccgccagcgcaacttctcaaaattagccaccaccgccctcagacactataaattgggtgtgccgctagctctgttaggttgtcacaaagctagagcacccgcccctgcctccgattagccaccatagcgccctaatttctttcttcccctaatctggttctccgcgccgccgtgaaccaccgtgtcgtgaatcgtcgtttccaggtccattcataccctccttaccctcgtttcagcacccttgtgtgctatggatgcttatcggcctagccaattgaactagaccacgttagatcaccgggaacacctcgggttgtccttggtttgcgccatcaccgtggacagagagattttgagctagaacttcgcaattggtagagggattagggtcgcccgaggtagaatttaatgtcgaccaagtaagaagcttagcctttgcatattccggccgatacaagctcgctggagcaactgctccgtcgtctgtggtcagggacctgatcttgcaatgaaaagaaaagggaagggcctctgagcaaatgtcagagacacagataaatagtgcacatggttctttaccggttatttgaat

SEQ ID NO: 48172 - DNA, 408 bp, Zea Mays
tggtagcggctgatatctatttcgagcttcgagaaactgatactctttgatagagtaccgataaccttcgcaccggtctgatcccggacgcagcccaacctttcatcattaatgccaccgaagagaagtgctcccggccgatatccacaagatataacatattcttttagctcttctttttcagcctttgtcagttcttgaccaactaagttttgaaagttaaaaacttcatcttccgaagtgtctttggctatttctttctctttctcgggctctggggtcgtagtctcttcggtggctgtggcagcttcttctgcggccatgtctagcagtattttatctatatcaacaatcgtgctttctaaatgaatatcttcggctctggtatcttcggcagttgtggcttcc

SEQ ID NO: 48173 - DNA, 336 bp, Zea Mays
ccggagaggaggtgagtcaccggagtcgcttatcgtggcatttactgggcaacgatttacggcggccagtgtctagtctttacggaccgcgacgacatggtgaaatggcttaaggcgtgtcagaaccgaggaaaacggcgacacgacggtggtggtcgcgtggccacgtcgccggtgcaagtgggtacggcgacatggcagtacagtgccccaagttcatccacacgcgtgatcttttcacccgccacggttatccacttgacataggcacgaatcacggtggccggcgtgaatcgaggagcaagttcactggcaacaacgttcactgaacctgga

SEQ ID NO: 48174 - DNA, 459 bp, Zea Mays
tgacgatatgcggatggtctgcccttggtccgggtggtccgcgccagctctaaaaatccttctgctaaacttgtcacctttgggctgaaccagatcttcacgtgtgaacggtccgagaattatagtcggatggtccgcgctgtatagtcggattgtccatgatttagttcctattcgaagtcattgtggtgtagcgggcagtccgctagaagggtcagacggtccgcacttggcgatttcagaacttgagtttctgacttgtctttgatctttgaacaattttctccaagttgctttggctaaacttgatagagatcctctgactttgaaaaatatctcaagtggcttttcatctagtttaagtcatggatcatgaacattttgattctttaactcatatttcttcttttgctcaaactagcttcaaaatagtgagatgttgattccgagctttccaac

SEQ ID NO: 48175 - DNA, 670 bp, Zea Mays
ggtcctagtagcggtggaggtgttggggatcgtggaggctgatagttagaggaaatccctataatagcataggtgttgaccctgcaacgatgaattcattgatgctaggaggggacgatggagaggcatcaatctctccatcatgtgctgccctagcaccccatcactaacattttgctccaaaagatcaccgccccttaaggtgcagggcacaacaatgtctctatctacaagggtatcaatgaggacccgagcctaggggatgttatcggcaagccaagcccgagggacacctatactacccccacatgatagaagtgagccctctaagggtcaccattgcctctaggtgtggccctcacctaagctcaagaagccatagaggaggtcaatgtcgttatagtcacatagtggaagcgactgaggcgggactcttggactaaatgtgggaccatctagagaggctgatgttctagaggtcaacgcattcgtatctattgatacccgtcgaaggagggaaatggaggaagccctggcctctagtattgctgccgctcaaccccaagaggaggctaaggggatctaggataacatgttttcttcttgattgtcaccctttcttatcccatatgcatgttttgacttgtttgggcttggattttgatcaaac

SEQ ID NO: 48176 - DNA, 663 bp, Zea Mays
ccaagtggccaaccggttggaagaatgagtggttttatgttaaggccgatgagaagaagagggagaagctcaagacgctagtactgagcccgctgagcttaatcttcgggttgactaggcccttgtgccgtatgtcgacggggtcaccgtgtcaagaagctgtggtagaattctaggtagtagccgagcagatcagcacaagagatctagtccaagaatatttggcctataaggtgttcccgacgctgagtgaatggagcatgccgaagctaaagcggacaaatgagaagaatgaacttgtgcgactgccttatgggttcaagtttgagaaacaacttaaagggccatgccaagagtggttagaaatgatagaaaccatgtgcaacaaaattttgggtaattacactaaaaagaagatcagctgatgactgcggccttcggcagccgaccgaagcgaaggttgaatcgggtgatggatgcattgaattttaaatatcctgactatgagcgattgaacaaaggtgtcgaaggccaaaaaagaaagaggattgttagtgttctaagtagacaagctgctagaatggtgaaagaagatgatgaaattctgaaaaagagaaaatccagccctaagccgaaggtggttgctccgaagaagaggaaggt

SEQ ID NO: 48177 - DNA, 668 bp, Zea Mays
taggaatgccggatggtggtggttagcgattgtttggttcagagcggttggatagcagacgtggagctgaaggcgttcgcctcttcgcagtcgcccacacgcagacaccctgctccgccgcggctattgtttttttgtctctccgtgggcggtgccgttgatggttagctgcgttccatgccccccctctcgacggttcagaaaatggtgatctacgtatagaatcagcgtcagtgccggctcctcctgagtggattaggcggaggcgcatcatggcgcggacctaacagctctcgtgatctccgtcagttggtcaatacggttgggcttctttaatttgacgattatatgtggtggtcgtcgtctggacgtgctcgttaatttttaggaaatggagtcagcgtctgtgcaccgtctcagggtccgatttctgtagctagtgcgatggtagcatcagaaaacggggttgcagtcctcaccttaccctggtggtttggtcagcgagctactcgtgcctcaacgaagaacaaagggttgcagtttttctggggttttttttttcaggacaagaaagctcgcgggcttgcagagtcgcagttttgcgcggtccgtgttcgttgggccctgaagagcttcatgcccatttcggcccatggagtggttggacc

SEQ ID NO: 48178 - DNA, 810 bp, Zea Mays
ccctgtgccgtatattgtccatgttgttgacgaggaagaagaagaggaagtccccttagttcgaaagaacagtcggcgttacagagtcagtggagggagtagcgatattccttctccagctttgtctgcactcgttggtctgcaagaactatccatagcaaatttcgatcaggctctcgaagatgtcgttcctgaagatatgttgtccgagccagctgatggtgatatgatggacgtttgttctgacatcccagaggtgggattagaattatcccgagtagcgtctcgtgtctcgtcgaccttggaaagcggtcttcggagtcaagaggttggtcaaggttgttcagttcccatggaggtgactgagagtccttcagccttagaggtggctgttgcgaagaacccaatcctcaaggatggtgccagcggttgcccagcccccgagggtgttgccggtggtgatccggctccgatgggtagtgcgggctgcaacccagcctctgagggtatccaagcaggctccccttctcatacctccatggatgttcacgttgggtcttctcctccatgttttgatggcatggtaacaacgcgtgcttcaaatgaggaagtcgccttagaggtcgacacacctgatgctagagttctgatgcctgctggtggtgacgagttgattcctggcgatgttcttcaaattgcctcagttgatattccttcatcgagccaccacctagcttctcgtgacttaggatttccgtcattcttctctaatcttcaggtaattcggcttttctggttctggcaatactc

SEQ ID NO: 48179 - DNA, 369 bp, Zea Mays
atgacaacactgacgacaacccaatgatgagatgacagagacaccaagaagagttgtggtcaacttccaaggtcaataggtctatgccacgctgacactgaacatcatgacaatgaagctcctattagacaggattactccactgccccgtggacgagggttcaggggtaggagtctccacgatcatgcccaccatcgttgttgcagcttctgtctaggtcggactcttaggtgatggcactaatgacacctgaagaatggccaggcttccttgacatggggcctctggatgtgaagcttggcctagtgatgacagggagacctggaccccttgctcccctcgttgggttgagcaggagtggggatggc

SEQ ID NO: 48180 - DNA, 399 bp, Zea Mays
cagatatcgtttttgttaagaactcatgaagttacaaacttagtaacttaccattcattaaaactgaggtggctcgaaagttcataataaacatgcccgacagctgtataggcaacattcttttaaagcattccagcagtaacatctatttcttgtatgtgtagtttaggctcacatatgtttgtatacaaataagctagaattgtaagaaacctaataacaaccaaggaagcagtgaaacacaacacatgcacggacaatgacgaaagagaattttttgcaaaaaagtggcaaccacaacgcacgcacgacaatgacagattggaagtcattgacaatttgacaccctctcatgccaaataatgaatgaacaccactccaaacaaataatgaatgaac

SEQ ID NO: 48181 - DNA, 1167 bp, Zea Mays
caatctcgcttgtaatccaagctaatcttaatgcgtcatttttaaatgataagaatacttccatgttatccttaatcttgaatatatcagatgccatcaatagatctcccacttgcagaccatccaaatcttcaagcacagtaatacacttgttgatgctgtaaggatcttccaatttcttctcttcaatggcatcaaatcgatctatttcttctttctttagttttaggtatctttcatgaaatccatcaggagggctagcagatttgttttttttcttctttccacgtcgagaatcaggaagctctgaagttatttgtgtggaactaggtgggacttccttttcatgaacctgagcagatgggtattgtgataagcccaaatttccctcaatttcttcatcaaaagaaaattgcaatcccaattcatctacaccatttaaagtaggagatggtgactgatatgtttctgctacagttgttgcttgtcctccaggagctgatgctttcttcgtcttgtttgcataatgatccataccttgacgagttcttccttcagcataacgacctgcagaatcatatttaggaaaacacatatgactcggatgtatttgcaagcaattagaaacaactcataaaagcacataaaattctcaccatcatacagctttgataaatcatcatagtatgggaatgacttgtctctccaatggagggctgacttgttattcttgcgagcagcaaaagatgcccaaacactatctggtgcttccaccatcattctctcaccattccatccaaaaccactttgctccaccaattctttaacactgcgataatctttcttcaaatcttgctccttctgtttgacttggccaatagtatacgatgtaccaaatttttcattcaagcgacgaacaatgttgttccatgcctccttactccaagcattttgtgttctaaaacccggcacattgtgatcctttagtagctgaataaggaacaacttcctctcatggatccacttggctctctttggggcacctaaagtcacaacatatatttaaacatatattcagttttagttactgatgcactgtgcaactaatattcaaattgtgacaggaattggagcactacctatttcttgagtagctgttgcagaccc

SEQ ID NO: 48182 - DNA, 597 bp, Zea Mays
ctcaaagttctttaaaaccacccctatcatttcattcagggggaatcacagccctgctctacagaagctcttgaaaaccacaacttcatccttcttcagctctgggattacctcttctcgagcaaatcgaataagtttgctctcagcctctccaaaatagcccaatttcatcatcataggcatgtcatcttccgtcacagtagatttttcaaattcaagatgactaggctttgttgggatcagaatgttgtagtcttcgtcactttcatcaatattttcaccctcaatcacagtttgttcagcttcggcattagaagcaccttcgtcaacaacctcttctaccacaactagacctgatctcttcatcacttctgaaatcagcgctgtttcaacggcctcgattttgtccccctcacgagacaccctagcagttgatcgcactctggccatttcaatggtttcaccttttgacgaagtcaacattaaacgatgaagtgtatgctcgagagtgcaatactaaaagcttcggctatggtcaaattttttaacagcacaacagtgcaatggcaatgaaagatgtggtaactcctcaccaac

SEQ ID NO: 48183 - DNA, 313 bp, Zea Mays
atcgggtccagtcaagatggattaattcatttgaaatataccttcaaatacagagaccggtttgacgaaccaaatgacgactggctgaaatgtattgaggcaactagcggcaagttacttggggcatataccagagccgaagatgatgctttgtcctaaaccttcgggggtcggggcaagaaaaggttgaacagggtcttcgatgcaattggttttatatatcctaattattgctatccctcgcgaaagcagggaaaaaagaggaaaactgccacttcggccatctctgttgtgccgaagggcaagaaaatca

SEQ ID NO: 48184 - DNA, 1130 bp, Zea Mays
ctcacactatttttttaagaatcggttactccctcgaacagttttattatcaccaaagtatttctcagtactttccattaccccctcttataatttcaacatattgcacgattttgacatcaatatgattatacacctaccccatctaaattcaaattattacgaaagcaaatctacattttcttcttgatagaaagccatctagtttatctcacatagatctatttttcctctactgatgtcaaaaccgacctgcaaacctctagtacctcactctcttcaagaacaacatttccacatacttcaaaccagatatgaatttttgttatacattagacacaatatttgatagttcttattcacttacttacagaatactgaccaggtttcaaaccaccctatcccaaaagatctggcatccccaccaaagaggtatgttccaaacttgcttattctttttcaacaattcataccataatccttttaacattaaagaacacagacatgatgaaaactatgaatgttcaaaaacaacaattaggttctacggagcctgaaagcgatggcgagtaaatcagcgtcgttctcatgaaggtgagacattatgtacaactcttctttgtataagatcgttcttcactctcatttataacctttgtgcataaaatagaatagctcacagactctttaaaaaaactaatctttccttattttttgtgcagaaaaaatgctttacgtgtctgcgacgaacatcatcacttttgaagagcaaatgcttttatgtacataaacaagctgatgaaactactttatcttagtatctgctttgcatacctatgacgaccatgtcactgttgaagcgcaagtgcttttgtgcacataaagcaaagctgatgaaaccttattagtttagcctaagctctgtgcaacctacaactctcagaacacggtaccgaaacaagatgtaatatgcatggtcatatcagtcagatgtaagctgagtgtaaccactatacttatgaactcagtacaacttatgtaatcactgctacccgtttaaatttgctcttaatcttatgttatcatgtgctacaaaacagctgctataaatgtacacatgatatatcaat

SEQ ID NO: 48185 - DNA, 756 bp, Zea Mays
cctgccactcgcggtcaacagtgaaagcagtcctagcagataggtgagatgaccctctgtatcggcactgacggctagcagaaaagcagataaatccaaaagttggtgcccttgcaaggcaatctgagctgtcagttgtgcccgaaagaaggactcctgagtcctggtacttaagagaggtgcagccgcagggtccctctgagctggcaaccaggactccatgggtatgtgtctgaatcgatgtacccacgctgcagtggcacgctgaaggtagagcaaacggggatcagtagctagtggtcgcaccttagtcgcgtcacgctccctgaagcgaggtggtcgcataggcggagcggaaatgggagcgggagggggaacagtggaagctggagtggtggaggtggtgggtatagcggaagtggtggatggctctggagcgactggagctggtgaagtgggaggtggagtagatatagtgacagaaggtgcggagggagcagtgcagcgagggccagatgcgaggtgacaaactatgtaggctatctgatcagaagagatctacaactgtcctccccgctcagcctgctctgttactgttgccgctgcaagtgctacatgagcggctctatccatacaacgcttcttcctgccctcctgctgctcaagataaaccgtctttcccttgacctgcctgaaggggcaaggagggtcctcgtcgtttccttcccctgacgatgagacgttcttcgtccgcac

SEQ ID NO: 48186 - DNA, 378 bp, Zea Mays
ctgggcgtaggcgacgaagggcagtggcgaagcgtagagtgagtgaagtggatggcggtcggcttcgtgtgggcagggctggcaagcaggaattgttgtcctcgccggctggggcgagtgtaggtgagggggagttgcgaagtctttttgagggtgaggagcttatgctaatgctatttaactatagggagatgggaatcattccgaaggttgaaccaatgtaaggtgtgatgccctcgctgtacgtgtgttactatagtttgtatgatgaggctgtgcgccttcgcgtatccgactatgtccataggggcgttgcgcgcttggtctggcgcatttattatgttggtccggctgcgcctgtagttggtctgtgcgcgg

SEQ ID NO: 48187 - DNA, 1034 bp, Zea Mays
gtgacacaaaaattagagaaaaacctgttacaagttgctctgtcagaacagtttcagaaaactgaaactgaacctaaggttaaaacaaggttccagtgaggtgaggtcaagtttgatgtgccatatcttcgaatccccttggttttgacccaaatgtcctgtataaggattgaagactgttaaatcaagaacaaaccttattaaggaattttgcccggttattcacaagaatcatgagagctagtcggtggaagggggacggttcaggcgactgacgaagatgtgccatggtacagtgccccgatggatcagaccgccagctcagctcgccaccgttgatcgccgcccggattcgtgcacggtatagacggataacgccgggaaaagggtgaatcgtacgtggcgccatctcctgtgctcggccggagtgattcaccggcggccatcgcgtcaatccttttctgccgcggtgtcctcggcaccgtgattcttcctcactgtaccagttctctacgtgcttggcatgcgcttgtgatggtattcgagccgtgaggtgatcgccggacctccgcggctataaatagcccatggttcgcggcgaggctcggtcatcacacacatactagtgaaccaaatcgagtcaaattcgcactgccctctccacctttgcccaaatcgtttgcgcacggtgaaagcatagtttcttacggccgtgtagcctcaatccccgcccccaatttcacccagagccgccgcaacgccgtttttccccaattcggtcgactgcgccgccgtgaatcacctgctcgcggccagatgattccaggtccgtccacgccctcgttgttcgtgtttcagcacccacatgtgcttgtgatcgttacctgcccagcccttggagcttgacttcacctaatcaaccggaacacctcgatctgagttctgtacccgcggtcaccgtggtcaggcacatcctggcccgaattagtccgattagagcatgttctagggtaaccttgggtcggttatgcctc

SEQ ID NO: 48188 - DNA, 624 bp, Zea Mays
gtcatcaggagtttagggatgaaattgaccggattagtaggctagatagccatactattaagaggggtcaatgaatttgatcagtgtaaaacctagtgcctcatagagcatatagtgttgcatttgtatgaggactaacaatgcttcatttccaaaggtcaaaagtcttttgataagcgtaatctaaaattactgaagttccgcgactctaacactagggtctgctggcacacctgtctctgtgttcctgcgcggaccgtccgcatgtgccaaaatgtttttggcagggacagtgtgtttttgtgtccttgtactacggactatccaaggtttttgataggacaatatgtggtctaggggcggacagtccggccatggttggcgagcagtccacctgtgatgttcaatatagtcagtgctctgacatctcatgttgacaggtcccggaccgtccggcctaggctggcagactatccaggcttgacttttttgacagctctgacatgtttcaaacaggtattatagccgtttctggtacggcgaaccgtctggccatagggccagaccgtccacgtgtgcgcaagacatgtgctagttgcacataatggttagctttgtgttgcg

SEQ ID NO: 48189 - DNA, 910 bp, Zea Mays
gatgagttaacctatgtgttaggtccaatagctttttttagaagagtgacatgaaagacatggtgtatgctggaggaaggtgacagctctaaatgataagcaacaacaccaatcttggccaccacaggaaatggtccaaagtacttgaatgtcagtttgtggttcgcccttttggtaactaacgattgaacgtttggttggagctttgagtaaaccaaatctccagcttcaaaagttttgtcagattgatgtttgtcagcttggtccttctagcattgctttgctctccctaaatgttgtttcactaactgtaccatcactttgtgctcctccagccatgtctaaagaggggggacatcataggaggttctgaatcaaaacccaactggcacgcaggatagccatagagtacttaaaggggtgtgagcttcaaggatatatggtaactggtattataccagtactgagccaaaggaagccatcttttccatttggttggacaagcatgagtgaaacaatggatgtaagtttcgagacactagttgacacgctccgtttgactgtctgattgagggtgataagctatagtcaaacgtaattccactctagccaacttgaacaattccttccacgcactagtgaatattcgatcatgatccgagataatagacttggggaatccatggagtttaaaatgttgtccatgaatttgtgagccactatgaaagtagtgaaaggatggtgtagaggcacgccgttactgtattttgaaaatgtatccacaacaaccataatacagttcgggtgattagacaaaggtagcccttctatgaaatccatagatataactgtccaagcaccctctagaactggtaacggttgaagtaatccgtggtacttacccctctca

SEQ ID NO: 48190 - DNA, 392 bp, Zea Mays
cgacgggttgctccgtcggggagtgttgttccccagctcagccgcgtcgggggggaagaagaggcttctgtgccatcggatccagagcatgcggtcatgattagattcgggcgtggggtgatttcaaccgttgatctggccggagacggatacgattagattgggcgcttacctcttcgctggctgaattggtggcattgatctctggatcggtggctcgggtgggttggatggtttggatctaatcttagcccccgatagtgaatcgtgcggccgagaatcgaccataccccttcgctgtggcgatttagcgtatgagcccttctattatttaagaataaacccgtcgtccttgaccgctattcactgagtcttggtaaacttgcgccaga

SEQ ID NO: 48191 - DNA, 272 bp, Zea Mays
acatcattatatcaatgtcaatttggaataatgttcacaatcatgttgtgcttgaaatattttttattgtctcaaaatataaaccttctttgatccaccagtgaacaacactccacaagcaagtgtttgtaaccagtagccagtgtagtgagaagtcgagattgaaaaggaaagaagagttgtcagtagcttgtgaacccccattcagatctgaaactaactcgagttgtgattccctattagcagaagtcttcctagatcctatattgtgg

SEQ ID NO: 48192 - DNA, 781 bp, Zea Mays
gccgccggccttcctctgggtcgggcccaccgcgcagatgcttggcctctccttcacaatgcttggtcggggccttcctttccttagttccgttccccccgctagtacttgtttctacccatcttagtgctgtctcagtgtctcgtgccacttcttccaagttgactcaaactctacttcccctgtgggcttattagctctgttgatgtcctctacatgatattaaaacagctgctggcaatgagatcactgagtaaaggaaattatatctcaaaatgaaaaaatgacagacaagtgattaggagaaaagaagacaaagatttttaaaaagaaccgtacaatttcagtactctagcacaatccttcatcttttgcatattctcactttgatacgagttgttggctttctagtttctataaaatgttctctttactgtgccattatggtggaggcaacaggattaaattctcgagcactcttcagttcatggatacgatcaacacaatcttgcactcacgtctgttccactgtacatgtgcaaactgaggggtgtttactttcttgtgtgtggacatattattcacccctgttttcatttgggggtcattgcatttatagatgtgtaattgatatatgatttatacctacaggaatgggaatgacgttgactttggatgacctcaaaaccacattattgatgcccaaggagttggctgctggatttatactgcaatacacggtcaggtccccccatttttgttcttcatatgtctgaattct

SEQ ID NO: 48193 - DNA, 735 bp, Zea Mays
agttcctggccacccaagtgtcataggtccaattctttactcttcgaagaagctccttccaattctttcacctttaagggtgtaaccctaccagcggtcacttcatccatttccctctcaggaaccacatcagctataatcctgtcaatctccggcattgtggttccaagagggcctccgctattttcagctttagcggccatttcatcagcatcggcatcggcgggggcagcaattttttctatcgcgatcgggggtggggtttcttctgaccaccctcatttcctctggtcgctgaagcagtcttcttcttgacttccgcacctttttcaacccccttctccttcgactacaataagctagtcggttctgaccccagaggacttagcatagcaaacgagaagggttcagtcattaccttcaggatttctgttacgccgatagaggaggacaaagaggttctagcaatcttctatgctgaatcttgtaccttcgcctcgataggggctagagttgagcactttcgctttttgggagccgaaagcttcggctccgctaagattttctgtttcttggaggcagccctttgcttgtctttttcaatagatctgattgcttgacttttcaaaatgcttacaatcctctttttcttcacccctagcttattcgttaagcctttcatagtccgagtattcgaagccaagggcgtccattacccgattcaaccttcgtttc

SEQ ID NO: 48194 - DNA, 1755 bp, Zea Mays
gtcaagcttaaatactaacagtattaggtgtaatagattcatcagcccgaagaacctcatcaatcaactctccaaatgtagcagctagattggactactttgtaccaatattattcaaacattgcttgatagtggcaaatactttgccaacctctaagtcataatcaatcaacttagcttgaaacttctggcgttgatgtacaggaagcatctgaatcttatttgccatcaggtcttgcataagaggcagttggatgtctatatttggaagtcgaccatgttgatttgggtcttcatcaactgtttctggcctcattggagactgaagtaaaaaatataataatgatataataagtatggtaaagaaacagacaaacgaagaacatagtgggtatgtgatctaacctcaagctgaccagtagatggcgattttgagacataacatgtctcactgctgctccaaaactgatgaaacataatgaaaattaataattatgtatatggattgactcgtgccatgaattgagatcattatatgactactaaaatcattggatttgtaactagtcataaataacattgttgtaaaaaacaaaaaaattatgatagaagaaatgaagactcacacggcaaacaccaaatggttcgccaccctggcgaggcttctgcttgtcggccattgacaacgcccttatgatattcttattaaaatactttatgcgcggagtgccacttttgttgtttggagcagcggcatggtgcaaatggtccaaataatacagctacatatcatatatatatatatatatatcatgagaatcatatacaaatgaacgtaaacacataatatatgtatgaactttcaaattgcaattgattaatctaataaaagatttgccaaattaattatgaaacttacaagaacaacgatggaacagccatatatcgtcgccgacacattattaatgctcctgttgtgccatttctgtgcagcctcacataggtcactaaaaattagatggcaccaatcaatttgagggaactgctccatttcttctgtaagtagaacctcattgtaagaaatagaccagctagctgttgggaatagcagccggttgaagagaatcaaaaaaacatctgatagaaagatcatcatcctggcctagcctcaatctgtcctagagctttgtaataacaaattcatccttgctaatattcaaggaggcccgaagtgttgccgcagtgttcacttcatcaatattgagtggctttccaccacccaaatttggaagacccaatatctgatggacagtctgcttggtgattttgagttctttgtctggaccaatacgaagagtcatgtctctggggtctagcttctgcatgagccaacaaagaagtgttcgacatccaattgcatcaattgtcatgtcaagaatactagagaatccttttctgactatagcttgacgttgcctttcattcaatatctgaatggacgcaagaacatctcctgggttgcatctgatgttgagtctctataatgaaaaggtagatagatggataaatatgttaatacttaaatatcacaatttatgtgttcttatttatacaaagttccttggcctatgactattttggattaatgagctaaggtaatgtagaaagctatatatttcagcacataaggtatgtattatgattagatgcatgattaaaatattggaaacgatcaatttctgcaatgttgtaaac

SEQ ID NO: 48195 - DNA, 419 bp, Zea Mays
ctctaacttggctgatacctaattcaacatctaacaaacgtttcccctcaatcaattgcatgattcgagctcccggcctctctgctcacggtgaccgcacgatcaacggataacacgaagtgttcccggcgattcaatgggttctagcttaatcggttgggtcgagaagcatcaggggctcataagagtactgaaacaagagagcagaggacatgatcagacctgaagcatagtggccatggtgagagtctttcacggcggcggaaaaccgatttgggggaagtgagcaattcggaggctctggtgaacaattgaaggcaagtgctggtgctttggatgggtaattaccctatggagctcatggcatgctcaatttatagagtccatgagcggtgttgtccaattcgaagggattgcgc

SEQ ID NO: 48196 - DNA, 543 bp, Zea Mays
ggaaaggaccgcgggttcgatttccagaaaccctagggggttttctgcagagccgtagactcaaatgaatagtgccccagggacctatctgtaattcctttaagaacgttcgccagggaccccagcgcaaaactgcttttctttaaaccatttctaattaatcttttattatttagcagaagacttaggaaattcataacttgagaaatatttaaccaaaatttgtcaaaccaattttgctggattctaaataatatggactatcaattaaaaatactgaaccccatgctttctgttctaaattttagagtttagaattaaatactgaaactgaccaaaccctatttaatgaaagaaaaatggttatgcttctttgttaggcttgagaaatttgtagatgttcaaaccctaattagacactgttcaaaaatactagacatcccagtattggaagtttaagtatagttatccaataaaagccatttttgcccaaaacttaagaaaatcagagaagtattagaaaataaggagcaataaatgaaa

SEQ ID NO: 48197 - DNA, 617 bp, Zea Mays
tgaatcggagctacaaaaatttctctactcgagagcactctgagttgatcccaaattgtaacccaaaacccaagatactccaaaaaatagcgaagcactgtaaaaatcaatccagtgtcgattgactgcaccaaaatgctagataagaaccaactcaactatctgcagacaactagaagcaaaaacgcagaacagaccgagcgatagtgccgtgcttcaaaacctacaaaaaatatcatctcaaatttcacagacaataagcacagaggaaaagaagaggttttgtgaagtttgatcaagatcaaatcacaaacacacaggcagattcaaaatccccatttgattagggttttgttggtgttctcaaatgaactcaaaatggggtggtcttggatcatgaccaaaaactgctcaaacctagtgttcacaatggtctagagaatgatcttcatcccaaggcaatccccaacaaaaaccacaactcacgagatcgaagatcctctcaatatccaaaagagaagggaagggaagagagcaaatacaaaattgaataaaaaactacagctaccaacaatctgagcacatgattcgacaaaaacgctgtcgatagatacgac

SEQ ID NO: 48198 - DNA, 319 bp, Zea Mays
gcagcaacatgcgagtgcataacattaggctgcccatgcgggaagagactgaatttattcatgtctctaatgatcgggagttctggacgaccactaacatgcataggtactacaggtaccttaattctttgtccaggatgaccgttctcccgaagggcgggaatcaaatgaacgtccttggggagagtcgagtcttccttctcctccttgctcccaacagtctcgcccgcatcaatgtgtttgacatgatctgagaagagatcattcgtgcttcctggtctcctctcagagggtgtcttcatgcaccctttatcatgaa

SEQ ID NO: 48199 - DNA, 351 bp, Zea Mays
gcagtcattagttccaaagttatacaatgatgatttagaaaaaatgaacataaatgtatctaatatatgaaactataatatgttgcataaaacttgaacattacggaaaatatgaaactagatatatgccaacaattggtctggaacgattaacaatctgacaaactagacatgaatggcatagacacttggaaccgttaacataactaaacattcagttaccacatcggttttacacacttgacataagactgatatgaagtagcataaacactggacacagtaaacataagtgccatgggaagtagcatacaagtgtgcaacacttgccataagtgccttcggaagtaa

SEQ ID NO: 48200 - DNA, 432 bp, Zea Mays
ctgagctcttccatcggtaactgttcctcagggacacggagacacttcttcagttgagatacgtggaacacattatgcacatctgataaagtagcgggtaactcgagttggtatgccatctccccaactcgcctaaagatcaagaatggtccaatataacgaggggacaatttgcccttgactttgaatctcctcattccacgaagtggtgacaccttgaggtacacataatctccttcttcaaattccagtggccttcttctattatcagcatagctcttttgcctagtttgagccactctcaaattctctcgaattatacggacttgttcttctgcttcttgaatcaattcaggcccaaagaattgtctttctccagtctgatcccaatacaaaggagtcctgcacttcctcccatataaagcttcaaaa

SEQ ID NO: 48201 - DNA, 610 bp, Zea Mays
agtacatatttctttagttgagtagcacattcttttggagttctgaagatgaagtggcatattattttaaacttgcctagatatccaataaacaaacaagcaaaaattataattgttacaatggctctccacagcttcattacagatagtgccatacatgatgcaaattttgataactataatgaagatagtgctcaaactactgaagatacagcaaatgttggaagtggttcagtagatgactcagatatgtgtgctttgtgagattctattgcagccgcttggtagcataagcttgttttaattagctttgtttctgtctcgcatgccaagtcgctaaacttgcttgactgttggcttgatcactaccaatctatcttatgttgcattaaccgttgtacttgtgtgttcgttccaaatgtggagactaatctcttttcatgtagaaaatgatagaactattaacccaaaggtacaaaaactagttcatgatgcaacatgtatctattcagcaattaatcaaggcaccattagttccagtggcactcaggacattacacactcaggacaatcgtctcctcaaaaaatcaggattgttaaacacctaatt

SEQ ID NO: 48202 - DNA, 592 bp, Zea Mays
gccgcgcgggccccatatgtcaggcgagctcctgtggatcttcccccgagcgccgcactccggccagctcgcaacggactccgtaacctcatccatgcatgtcgggcgtacatggagacttccgagctcctattaaaggatggataccgcccctttctcgtgtattctatccaaaccacacagaaccccactcaaatccatggcgtaggagaaatcgccgtcccaaatccgccggattggagctcggtctagccgccgccattggttcacgctaacgccgtcgctgggtcccttgaatctggcgcaaagcctgcccaggcttgtcctcatctcaggagcacccaagtactcgccgtggctcacgatccgtcgtcgcgccgccattacccgtggccagacctgctgtcgccgtgaaccaaggtgagagcccctccatcgtgtccgtcgtacctcccacgtcgtgtagcactcgtcgcgttcagatttatacagagaagagggattggcgggttgccggcgggagcacatcggcgcttcgccgccgtcggtctcgcccagctccgtatggaggatgacgacacctatgtcgtgg

SEQ ID NO: 48203 - DNA, 279 bp, Zea Mays
cgaagaatggagtatctgactcggtgaggtctttgagtgcgacccccaaggctaggagcgtccgggggaaggtaacgttaatgctaattcctacatccactagtactttcttcacctggctttctcagatcactggatcaacaaggagcgggtacttgccggggtggttgaagttgagccactgatccgcccggctgaaggttattgcgtgctccgaccaccgataaggagcttgggcactggtggttgccgccaggacctgtcggtcgttgagctttt

SEQ ID NO: 48204 - DNA, 622 bp, Zea Mays
gtggaaaaaagtggaggtgaaagggcccacgaataaagaggttgtgcaagaagaacatggtgatgtcagatctatcaacgatagggaaaaaggtggaggtgaaggggcccacggatgaagaggatctgcaatgagaatatagtgacgttagatatatagaaactccaattagagtgtgattggtttcttatatctaacccaacttggctccatcaatgtaccttgtgggtgtttggttggtttggctaagggttggactagattcaagtcacacaaaagcatccccaacctaggtttggcttcacatgaacgaatctcaaatctatttccttgaagcctgatttgccacgaaccacctcacgtgcacctagtgctaatattctcacacacctacgcttgaccctacatgtgaatatgtgatcacgcgaaaactagtaaggttgtcgccctttcacaagttctcctcccttctatttgtcttgttgccgcgactacttcctctcctcgtctcttattcacttgtgtcctgcctaaaggtaaaccatagatggcagcaacaaagagcaaccagtcatagacagattaaataaaaccaccaaagagtcgcaaaagcacgatcgcc

SEQ ID NO: 48205 - DNA, 616 bp, Zea Mays
aaatctaaaaaccctcatcatttccttcgcgttaactttgatcctatttaagttatagctgctggttgagttctttgttaagtattataaagtgtgcaatatcatatcagatctctgtgtttagttctataaaaaagagtatcaaaaaaagagaagaaagaaaagtaccaaaaaagtgttgaacaagattgtgaaagaaaagtagaacgatcagtttgtttatgtgcacaagtgctgaaagttcatcaagttgttcaactagtttgctattgtcatttggtgcaaaattttggttgggtctgatcgcaacacttgcattccaaccatactccttgatttgcatcaaatctgaaaattctttgtgcgtgtgtttgatctacttacatcactcgtatcttatggtcagcactaggcagtgaacttcaagttggatggttatttaactttacaacaactaggatttagattgcattccttgtttactattccccaccaagctccacatataagccatcgtaatcagtactctggtcttgtattcgcttaaccatcactttattgttaccaccacacatttttcttgcaacccgcagggacctcataagagttttggttg

SEQ ID NO: 48206 - DNA, 496 bp, Zea Mays
gaagagccggctgcaatgccgaagactgacaaaattgaagaaccgagaatcgaagggacgaaaacattagaagttctaagcccttcggtaggaatagaggtgccgaagacacaaaaaggtctaacagcaaccccaagagaaaaaggatggctagtgtattagatgtgctagagacgataaaagcttcaagctccactccaggaaaaattgccaaggcttcaaaaacacagattgaaaccgagacaaagatgaccgaagcctaagctatactgagccaggctgatgccgaagctgggccttcagtgcccgccaaggagaaatcctcggaaattggagaaaaggcagcggaagaagaaggtatagagcagattttgcctgaaaaagctgccgctcctgctcccaaagcgtcttccgaagtccttgattatattattcgacacgcttcgggaaaaagattatttgaagaagaaatttttgaagctaaacactatgcccg

SEQ ID NO: 48207 - DNA, 608 bp, Zea Mays
ggatattattcatctaccccctagccaccatcaaccttctccacttcttctccccacgccatcctcctctctggtttcccaggacagcaaccaccaaggcgccaacccctgctcgtggtctccccaagatggcacctctccctgttctccatggggctcagcagcaggaaacctctccatctgttgtccatggcaagcacctcccttgctccctcaagacggcatccatggaggcaggtggttcctattttccccatggtggacgccgacgccccctctgttgcagccatggcaccctcacctccagcccctccactcagctccctgggcgcaggtactcctcttccccatggtcgagcctcctgaaccttccccttcctcagctcagcacccaagagcagcagcccttccttcccttccttagcgccccattccagcagcacaccgaccagggaaacaccagcgtcgcccttcacagtgcagggcagcagggagcatcccatggcgcctgtttcccccaatgctcaccccgtcagcagccgtcgacctcacgctgtcgcgcccctcccctgctccgttcctactccctttgtggatgtccccatggc

SEQ ID NO: 48208 - DNA, 508 bp, Zea Mays
ttgttattattacttcaacagttgcaggtatttcagttgcatcagttttgggtttcgctgtcttatggaagaagtggagggaagaggaggagccgctgtttgacggcataccggggacaccgagccgtttcaccttccacgagctgaaggctgccacgggcaacttctccaccaagcttggagcgggcggcttcgggtcggtcttcagaggcaccataggcaagcaaaccgtcgctgtgaagcgcctagagggcgtcaatcagggaatggaggagttcttggcagaggtgaagacgatcggcaggatccatcagctgaacctggtcaggctggtaggattctgcgccgagaaatcgcacaggctcctcgtctacgagtacctgtccaacggctcgctggacacatggatcttcggcgcgagtttagtcttcagcctctcctggaaaaccaggcgcggtatcatgctggccattgccaggggcctgtcgtacctccacgaggaatgcga

SEQ ID NO: 48209 - DNA, 340 bp, Zea Mays
aaaggaagctagaacggatagtagttgggctagaactaccttaagagaagctggccacggaagagctctcctcggcggcgacggtgaccgaattacggaaaaaaccaaattcaggcgctatggtggctaatcgggggcgaaagttggtgttctagcttcgtaacaagctaacagagcagatcgcacactcaatttatagcgtctgcatgcggtggcttcgaattcgggggagataagttggcggccggataggaggtgagtcaccggagttcgctaacgtggcatttactaggtaaaagcttacggtcgtcactggttatactccacaacctgtgacgac

SEQ ID NO: 48210 - DNA, 528 bp, Zea Mays
cccccctctaggcgactttcactctgcgagtgcaccgtgttttggaccttcccgcttttctgctagccgctggtgctgactctgaggtgcacctctcctatctgcctggccttctcactcttttgactaccagcggcaggtatgttgaggaatgggtccgagttttctacgcgactgtatggatcgaccctgatcaccactagataaagtttcgttttgagcgagaggatgtcactattcatgccagccagatttgacaactctttggatttcacaagtcattgactcgtcttcacagcttatgctatggcacctctgaccctcctcgtcgccctcacggcggtgttgctcctggtacagcccacgtcgcagctctgttccgaccgcccttctcagatgggtcgcgacgctctccagtagacttcaccacaacaacaaagtttctatatcagcttatgagacggacacttctgccgcggatggggtacagggaggccaccactcatatccagctctggctccttggtg

SEQ ID NO: 48211 - DNA, 367 bp, Zea Mays
atttctctaataaataagggtaaatgggctgcggccacaaatctagagttccctagggtcaaacccgcaaaaattagggcccatgtgtaattacttttaccctactgtggatcgcttgtcaattgagtagaagttcggggtctcttaagtaaaattccccggctgaaagggtatcaacagatcctattcatccgatcctctacggacggtccagattaaaacccatccacgctgaaccggtatggagccccaaccgttggatcccttctagacgacccagatcaaatcatacaacttaatgtattggcacgcactcgaggccctcggatacgagatcgatggccgagggagttccacgccttcggcc

SEQ ID NO: 48212 - DNA, 413 bp, Zea Mays
ctgttacctctaagagcgccgacgtggtcatcagtcattccgacgctgacgtggcttcgtcatcactcggacgctatttcaaaagcgtaaatgttgacaataatagctcagccatcacccctaaaagcgacgatatgatgcccgagttactcagttactattccagaggaatcaacttcacaaataaggcaaacagaggaatgattcaagaaccctaagttatgccacaaacataacagatagagaacatcacgggcaataaatatcatgacagagatcaattgactacgaagcaaaataattgacacaggagaagacgaaatcattcttcattaagggaagttacagtacttacaaatcaactcattatgaattgatacttccctactgctgctactactactacgctacac

SEQ ID NO: 48213 - DNA, 417 bp, Zea Mays
gaattttccataaaggatgagcaaaataagaataacacgggataatcgtctattgatgtgcctccgtagtttcattgttggcattcttctgcttccgtggctttttagtctcattatcggcattctttcacttgcgtggcttgggcagttctttagatttcttaattcttttactccttccctttgaacgaacatcggttggaggatgtatgtcaactttctccgggattttgcaaccaatgaaagtctcatattcttcttgtggggcttgcatactggtaggaacaatttgactgaaagaagcctctaggttcataacacctgatactaagaaatccatgccttcatttgaactctttgctctttgaatcaaatcttcgaccttgtttcgcaccgccacgatctttttcctttttt

SEQ ID NO: 48214 - DNA, 748 bp, Zea Mays
agacagtggagatgttggtttgcataaaggattgggagataggccatcaacgagcacaacatgttgcggtggacaatgagttaaaagagtccttcaaggagctctggctggatgaaggtgttggtgttgctgcatgagtttgttttcgagatgaatatcttatgctacttgtgggagatagatatcacatgggtcctaataaagcacatgtatgatccatgggctacctaatggccccctggtagttcgtctagcaaggcataccattaggtcgcatctaggcagaacgagtctgaccaagaagatgatgaccggaacaggaaatggtcttagaaaatacaacacaagggtgctagctgtacgcgcctggcgtagaaggatcgctgatgtttcgcgcgcacagttcgcatgtacctcaagagctagatactcggaagataactcgaaagaaaggcgaccaaactccggatgagcagtaatgcctgcaacgtcaaagatagactcagatagagttggataggcttcacaacttgtaaagggatatccctccgatcacctatataagcctgaggggtacccctacaaaacgatctcatcatccctctcataacaaccatatcaccattagattgataggataattcatccatcgccacccactactcatctgtaacctgagcaccaccaacaaactcaatactcagtaccaacaggacgtagggtattattcaggcggcatgaacctgta

SEQ ID NO: 48215 - DNA, 593 bp, Zea Mays
ggttggaggaggcccgcgaagtggtttgaggagccccacatggaagacatcatggatccgtacactggctggtagctgcagccgatatgccaccgtaccaatgccttcgagcacttggaaaggtcctgcataacgaggccctaatttccctttgggcctgtcgacgagtgtcaaagcttggcgattcagaagacggagccagacccggtccccaacagcaaactccaggtccctgtggtgagcatcatagtattgtcgggcataagcttgggcttgcaagagtctgtcccgaacttcctgaaggaagtgatcccgctccttcaaaaggtcttcacgcttcctccatgctgcaagttcccaaccgccccgtgccaggcactgctgctgtgcaagttgcacggcagcacacggctgtgcagacatctcagactccatcgagggcttctccagggacattatcggtagccagggagttgttgcgacaccctctaagctccacggcctcaccaggggccatgaagcaatggcgggacgacatcgaccgactactcggtatgacacattctacttcgatcaggtcaaggacacggtca

SEQ ID NO: 48216 - DNA, 301 bp, Zea Mays
tgaggatttaagcatcaggcatgaagatgggtgatcagtccgcctcagcagcagcaagcacccaaccgttttccagctcctgccccaaggaacaatcaaccctagcagtagcagcagcagttccaccagagaaatgggaacaagtgcttcacttgcaacaatgtgggtcattatgccaagaatttccaaagaaatcagtagaggcagatgccagcaccaaatcaagacagagggaggaagcagaaggtgcaagtcagacaagggaagctcaatctcactactctcgaggagctacctgaag

SEQ ID NO: 48217 - DNA, 344 bp, Zea Mays
tttatttacaggcagaatatgcgattttcctttcttgtttccgatcctcccatcttgccacatctcgcatgcgtgctaggaagtgggaattgggtggtagctgtagctgtgtgtttttcttgtctggtccccctcatcgaatccagcatccttcatcaccatccatggatgtcatcgacaggacaaggatcgggactaggacgtgctatgtctgattcacatctgttagtctgtcgtttgctgcttccagcttctactgctacctgttcactaatcagtgccctgctgtagttctgctactgccctaaagtccgcaacactatgaatggtttcctgtgaggaag

SEQ ID NO: 48218 - DNA, 515 bp, Zea Mays
aaatttcattgcacatagcttcaatcatttccaaccattcttggcaaggctctttgaaatgtttcttgaacttgaagtgatagggcagtcgaacaagttcattctttttcttttctcctttaagcttcggcatattccattcctttaacgttggaaatactctattggctaagtatacctgcaccaaatctctagtaccaatatgctcagatacaactcggaattcgcccacagcttctcggcatggtgacccttgcagcatgtcgcacaggggcctagttaacctgaaggttaggtccagtgggctctgaactatcttctccttcttctcatcaaccttaacataaaaccactcattcttccaaccggttggccatttggtgcgatagctgatcaccggagtcttcatatctttgcggtaagaaaagttgtaacacccgaaattctcgtgtagcccatcttctctagcctttgtctgataatgaagctcgtgcacccggcagaaagcttcgaca

SEQ ID NO: 48219 - DNA, 515 bp, Zea Mays
ttgcaccacactttcatgatctcacagtcgtcctctaagaccttcatatctcaccgagaagcctctaactcctacgacacatgtgttggggcgaaggcgtaacgcccccctctcttagttgttttcatagcagaagcggaacgtgtcggagggaaagcaagagcaggcgaagactggaagagcaaaagccccatgacggagggagcatgtggaataggtaaaggccttggtggttcccgtcacagccgggaatgacgaaggcctccacgactgctgaaggttgggtgcatggagcgtgaagactatgtgtcgctacccgcacgttattgtaatggtcccccctataaaattgctccgtgccacagggtcccacttgtaagccactgtgtgggcagagttgatggtgcgttcgtccgttggtgtacttaatcacgctgtaatgacccgcgataaccccttgggaggggaatattccagggataacgaaagtaaccaggggcataactgtatttgat

SEQ ID NO: 48220 - DNA, 535 bp, Zea Mays
gaggaagtaagaagagttcgcgtgagacggaatcccagtctcgcggatgacaggctgcctcagcgtcgctttctttcccgaatgcagaatgcttcctatttcgacgtcttttctgaagctaactgtttccaccattcgcacctccgtccccatcgcccctgcagtgtcgttccttaggagtcaggaagccatcgggtcgcactagcttgcgccgtccggatgtcatcatgctgcatgcccctatcgtccatctctttgtttcccgcgccgctacagttgttggtacagcaaaatcggctctgccttgtcacctgaaaccatcatcccgttcattgagtcaactttgtataaatcttatttaatttaatatttgtgcattacctgattttttattaatgaatgttctactgttcttattcaataattcaatgtttatgcattatgtaaagttttttaaaataattagtaaatctgacgggcagaatacttttccaatctaggagggcctccagtttcctaacgaaatttatatttt

SEQ ID NO: 48221 - DNA, 549 bp, Zea Mays
aagaggtctgactgccgaagctgtggttgctgactttgttttcaagaatattcagcctttgaaagacagggcgtatccagcttacttgtacagtggtatcaatgactctacccgggtcatcaacaagagaattcctactgaggatctggtgagtcgactagacatgatcttgaggcaggggcaagatatcaaatgttggtgctcctgttgcctattatgcttggaatctgccacctcataggtcattttccaatttcgtgtccaaccctcctactagtgatggtggtctgggtcttagagtgtgtccctctcccgaggacattaggctctggttgctccccttcggaatcttcccgatgatgagaaacaaattcactttgagatgccagcaagtccagatgatgtagagatagatgttgtgcttaatatgttagctggagaatcttctgactctgtccatgctgaaccgatggttatcacggttggacaagagcttaacaaagcaatggagacccgaaagcctgagggtacctgtccaaagcgtcctcg

SEQ ID NO: 48222 - DNA, 649 bp, Zea Mays
gccagagctgccaaaccggacccgcttgtaagccaaacagagcagcgcgggtggtgttagtctggcgagcaggtcccgcatggtcagtgccatcttcagccctgggccgcacggaggaacaggttgggcagggagctagattctttttttccaagcgcggtttggttctactgggccaaaagtgtagttcgaggcccacttaggttttcttctcctttttcttttgcttttattattttctgttttcttttattcctaattcatttgaacttaaattttgaactcaacttaagtgtaaattcaagttcatgttgactatgcaatttggtcaccccatcatgtggtgaagttatttaattataatattatttatattgaataatatttctttctcttctctacttttatggttttgttcttcaaattagaggttaaattccatgggtccattaacatattgttaatgatacacttattttattatccacaaatgcacaatcaaataaaactcaacatgatgcaagatttattttggtgtctttggttatttactcctttttgatgatattcattcacatgtgatagtaaatggatataactcacacatatagataaaggaattattctcttatcacatgatttacaaatt

SEQ ID NO: 48223 - DNA, 1643 bp, Zea Mays
aaaatgagcgtacttcgagaaacgatccaccacaaccaagattgtatcatagccactcgacttgggggcagtttttctatgaaatccattgcaatatcctgccaggcgccttgaggaatcgaaagcggttgcaataaaccagccgggtgaactcgctctcctttggccttttgacaaatttgacactgtttgacaaaatcttccacatcaatcttcatatccttccaaaaaaacaatttcttcaatctatgataagtggtgtgcacccacaagtgacacctgtggcactatcatgcaatgctgccaccaacttcatccggagaactgaattttggccaacccaaatcaaactgcccttccgaataactccctgagaaagagagtagccatactcatccaggctgtggacacacaaccgagccaacagtgactgcgcatcagaatcagtcacataagaatttgtaacttcttgaatccagcgaggttaaacttcattgactactgtcaacgccatcacacagcccacccgagaaagagcatcggcgactttgttctctttgccctacttgtagatgactttaaactgcatcccaattccccataagctttgccatggctttacgttgcaactccgaatgaagctcctgactgcccgagaaacttaagagccttgtgatccgtccggatctcaaactcgctctgttggagataatgacgccaacgatccacagccataatcagggcgatgaactccttctcatagatcgaaagcttctgattggtaactcccaacgccttactcaagaaagctataggtcgcccctgctgcatcaacaccgctcccaccccatcatcacaggcatcagtttcaacagcaaagggtatgttaaaatcaggtaatgccaataccggagtggaaaccatggcctgcttcagacgctgaaaagccagttcagcttctggtgtccacttgaaagcccctttctgcagtaacttcgttagtggccgagcaattatattgtacccttgcacaaagcgcctgtagtaccctgtcaacccgagaaagcctctcaaatccgcgacattcagtggtgtcggctacttgagcatagcttcggttttctgagggtcagtagccacaccctcaccagatataatatgtcccaaataaatcagctcctttttaccaaatacacatttcctctaattgagatagaacttgtggtcccttaaagcagcaaagaccaacctcagatgctccaaatgagagtgccaagtgggactataaatcaatatatcatcaataaagaccataacaaatttccgaaggaaaggagctagcaccaaattcatcacacactggaatgtagcggtgcagcgccgtgagtccggccgttgagcaccgactccgatgactccatgtcccgtgccatctactccagacgcagttccgccacctccttccctgtttgttccaactgttgtgtgaaacagactctctcctccattgccttctgggccacgtcggccgcgcaagcccgcctgcgccaacaattgttgttgaacctcatccatgcccatgaccttctccgtgagccgatcgagcttcgccatcatcctctcccactgatccacattctccc

SEQ ID NO: 48224 - DNA, 552 bp, Zea Mays
ttaaaaagaaaaaatgttggaacaaaagaaacaaacagaacaaaacaacaacagtacgatcgctgcacaatctaccgagtgcggtaaaaagccctgctttacacgacgaaccgccaaaccctaacccgcaccattccacatttcctcgtcgaccatagacgacacaggaacagtagcgcgaggacaatgcagcccgaagcctcaccttgacgacgagatcccatgcattgatgcgcggccacgcgtggctgtatcgcaggtccatcgcggaacagaccaccctcggatcgcgaagaaaggagggagccggagactgaggaaaccttggacgatctaacggagggcggaggcggttgggttgtgtgtcctcgaggggttcattttatcgcgacttcgcgagcgtttcgcgttttcagtttgcttcgacaggcgaaggagtcatctttgcgactctgccgcgggagttttgcgtgacagtttagtaaaccgtcaaccactttatatattttactagtgacttgtccgtgtttctatatacactgtataaaattt

SEQ ID NO: 48225 - DNA, 990 bp, Zea Mays
ggaaggcaaccggaccacgaggcgtgccccgacaccagttagctcctcgacatgaggggagcagtagcggaagtaatgatcctataggggatctggaggtcagagttgaacgactcacatcagaactgtgccatgtaaacagggagcgtgcgcgagatagtcgtcgtgttgctgaattgtcggcggaggttgatcgcttgcagcgggagatcatggaacgagacaggcctatagactgggccattaattcgcgctctatagcctaggattgcggggcaaatgcctgagcttgggtggtggagctaagcatagccctggagaatctacaagcgtacaataacactatgcatgaggaagtgcacgtggtatacgaccagctgcacccgaacgtgccatcggaggtcgcagcaatgggagccgaaacatctggagcagctgacggaggagattatggggagttggatctttttggagcccctcctttcatgaacctcacagatgaatgttctcccgaagttggcagtggagtgggagcagccaaggatgaagataattagagtagtatagtagtaggtggtttccttatgtaaattaaataaggaaagttgagttgtaccagtaagtatgtattattagtaccagtctggcataatgtaataaaggtggtgtacttgtgacatataataatcaagtatgtttttcttcctcagatgccatcaagaactcgtgctcaagacggggcgggaacttcccgtggtgaggaggaaactctgaactcgccacctgtacctcccacgttagctgaggctatcgctaccttacttaatgccactactgataacactcgtttcctgcgtgaaatggctgggaatcagtttcatcagcagggaggcagaggtcaacctcaagggccccgagacaccacgtacttggagttttctgaaactcgtccaccgctttttgttaaagctgaagaacctttggaagcgg

SEQ ID NO: 48226 - DNA, 570 bp, Zea Mays
gcaaattgtctcaatcatttctagccactcttggcaaggctccttgaactgttttttaaacttaaaacgataaggcaatcgcacaagctcaagtgctttctttgttccctttagcttcaacatgctccattcacttaacgtcggagatgttctgttagccaagtattcttgaactagatctctagtgctgatttgttcagccaccaccctgaattctgatacagatagttggcatgctgatcctggcttcatgttgcacaaaggtctggtcattccgaagctcaatgccaacgggcacatgaccatcgtcatcagtttcccccttttcttctcattggccttaatataaaaccattcactctttcagttggttggccacttggtgcggtggctaagagccgtagtcttcgtatccttgcggtacgcgaaattatagcagccaaaaatttcatgcagcccgtctgctctggctttcgtttggtagtgcaactcatgcactcggcaaaatgcttcggcatttgggtccatcccttggcttcgaagggcccagatgaagatgctgagcctaac

SEQ ID NO: 48227 - DNA, 476 bp, Zea Mays
gtgacctgatgtccggctggttgaactgctacaaaatttccccaccagatactggcagggcctctcagttgttgggcggcgaacaacggcttctgtatttctgtgcaacggattaatccaaacttctgctccataacccttatccactcaacagcttcaagagggtcttttgctttaacaaagagtgggggacgcgtttttgagaattccagatatgaggtttcacgcggtccctgtggaggagctcttcgccatgctgctggaattgattacccgccatctcacgtaagaagtgagtattatctgcagtagcattaaccaaggcagcgatagcctcggccagtgttggtggcataggtggcggattaggagtatcttcccgaccacaggaagtccccgcaccgtcatgcgcacgagtccttgatggcatctgaggcaaagaaacatttgggaaaaatataacatgccgatacaca

SEQ ID NO: 48228 - DNA, 944 bp, Zea Mays
gtcaggcgcgctgaacaaacatcgccccgatacagtgaactgaacaagattaagtgccgtgtgctcgccgtcgacgtcccgctaccatgatttgagctcacaccacgattggtgccgccgagatgtggatcaatgcgtggtaaaaagatctctggctcggattcggtgatcgaattaccgctctagccacggacaccacgtgtcctcaccgtgattcatccaccaccaccgtagccagccaccggatgctccggtcgtccacgtagctggttggaggctcgcgtattgaactgacgtaaagggttcgcagtaagtccgccacgttactagcctgtggacaccgttgaggctaatgtggagctcctcgggctatcgccgccaccatgagtcagcgatcaaattgatcaccgacgtggtgactccctttaaattgagcatgtgctcagtcccgcctctccatgaggcacccaagccaccctttgtttccgctgttccatcgtcgatagccaagaacaccggtttttcctcatcggtggtcaccagcgccgccgagcagtgcaaccacgtggtcagactttcctaaggttagtcatagttgtttaactcgtgtttcgtagtctatagatcatggtgaagcttatgcgcttgctcatttgatctctaccgcacaggattaactacaacatcgccgtgtcgttcggtgaatgccgctgaaggaagtgtccatgtcgaccggccaacccgtagctcatacgaacaaacctaggtgagcatcgtatgtctgatgtattactagtactcgtagtgactttggattgaaccctatcgtactcgaaacctcggtacacctcaccggagctcgtcaatctgccgtcagcatggctagtgaagccctagatggtttaaggtcgattaacttaggggaaataggaaataagtctcgg

SEQ ID NO: 48229 - DNA, 338 bp, Zea Mays
ttcggcctctctggccgcactcttctcaaaagctatattagtatctggagttatttctttggccttctgctcggtggcggcaagcttcctcttagtgggcaccgtgggctttgcctcagcttcagcctgggtttttgtagtctcgacttctatttgcttagtatcagctttgggttgcgttttgtcagcttcggcaaccttccctatgggcgcgtgacttatggaatcggttgtttccaaaacatctaatacatttaccatcctcctcctctaggagttatggcagaactcttttgtgccttcagcgctgcgacttctgtcgaaggatttaaaatccc

SEQ ID NO: 48230 - DNA, 1089 bp, Zea Mays
caggccaccacgttcccttcgctcctctcatcgccttccaccaccgccttctgcaccgcgcagctgtacctgaatatcctcaagacacgggtcacgggggatcgctagtggggttattctggtcgacgaagcgctgaaggtgttcggtcaaatgacggtaaggagcgtcatcacctggaaggctggaagtaagtgtcatctcttcgttcttgcggtttggtcgcggccacgatgctgtgtcctggtccagggagctcccgagaagcggcgatgcattgtcagatcagatggctcgcttgttgccgtgttgcctgcatttgggcttggcaaagcaagttcatgagaaaattggaacgggttccttctcaacaggtgaaaatgcactgttgaattcgtactgtacttgaggtgctctatgtgtggcagagaagctgtcgatgagtttagagatgcgatgcacaaataaactcatgcttcctgttcacctacaatggcattgaagtaaaaggggcagaattcacttggtttgcttggaaggagcaaaatggtcaatttcctgccaaaataacaccccactaacagcacatggacggaaatggtgctgagggaatctgttatttcatttgatggcaccaaagagaaattcaaaaaaattcaacggcatcgagagaagcgctataatgtccagggctgggccatggcatggctgttgtaagggacagtgcgtcggtgcgtgtggtgcatttgtttaaagagcaaggcacaattccagctttatcctttggctcccacaccaagcaaagcaaagaacctacgtgccttcacactgtagtgaaactgtgaaagcagcgagagcagaatttaaaggcaaagtaagaagtgacatcagaagctccctgcagatttgcatcaaactacaccatcgacagttagcaagttcctcatcctccacactagggcgtcttcgcaatatttctgctgtagcgctagcattgggtagtggacacgacatagctgctcccaaggtacctactaaaattcatcgttttcatgtttttttctcgaacacgcaggagagctgaatatcat

SEQ ID NO: 48231 - DNA, 449 bp, Zea Mays
ccgcgggtcacattcaataagtgtagatgtgcaaaccatgtgtagttgattccatggccctgtttgcactatatgttgataccatgtacacttcgggcatgtttgtttgtgttccatgtagggatgcaagcaaaatttgtgctagaaacttctagcagcggtgcattaaaaatatatatagagtttactaggatatctgtgaaaacccagtatattaaggtatagtaagtaataacataaaatcgaatcatatgcctttgtgattctatgataaagataagccgtggttataagcaacttacctgaatgtccagaacaatgcagcccagcatgctttgtcatttgctttgtgtgcaatgtgtgaggtacataatcatcttgggttgtggtagcggaatctctagaacaggaagcagattagaacaaagttagctatgaaccactgcttt

SEQ ID NO: 48232 - DNA, 432 bp, Zea Mays
gttttgtctatgtctttactgattttatacttgcacttcaatacttatctgcggtataagcagtatttgaagtgtagggtattttgagacatgaacttcattttcactgtgacctactcgaatggtctttcattccacgacgacccagtcttcgagtagagtaagaatttcctgttttaaagtgatatttttactcgcctattcactcctctaggcgacatctaaatcctattcccaggtaaaggaaactttcagaagccaccacgagtcgaccccctccttagcctagaaaaggatgaggtcggcccccgtacataggaagaccctttttctggggagcgcactcagaggttcctttcgctaagacgaacgaagcaaggacggaccccagacgagacaacacccagaagactgacgaacaggaggaggact

SEQ ID NO: 48233 - DNA, 924 bp, Zea Mays
gcttgacggaggtttggccgactaaagcttagtcgactgagacctatctggctgggtcatgtctagccaaggtttgctgaagttgttggctgagttcaactgatagagtcctggttgactaaggtttgactggacaacttgttgatattttttggtttggagttttccagaaaacccagacttggtacccaatggatgtgtatgtcgtcttgtccgcagagcagtttcttaagctgataggacgcaatgatacgtgtgagtagttcaattattgaactctgatgctgtgttacgctatgttttgcaagaagcgtgtcgtttcttggaagtttaaatgacccttgatggcttacgactgttcgttgtatggacgaaagacgaaagggcacccttctgagccaaccgtctggtatgtacttcttcactcgtctttgcttcactttcttgctatcactttctccacctgaaaactctaatggctggaagcaagagcggcaagggcagcgagaaatgcaagagaggcaaaggtggtaagaggaagtggcctccaacctcgccgttagaggacttcgacgactctgagtactcggaggtaaaatcttcctccggggatgagaggaccctgccaccgactcctcgctcgtcgtcatccgtctgcacggatgactccctagggcggagagattctatgtttaggccatcgagcgagtagggcttgatggctcggatgactccaaggaggagaaggacaaggatgggtactagggcgacgacgagggcggcgaggacagcaaggtcgacggtggtggcaagggtggaaacggcaagatcgacgatggcgacaatggcaatggcaacgacagcaatggcggcagcggtgacgatggcaaaggcatcagcggtggcgatggcaatggcggcggc

SEQ ID NO: 48234 - DNA, 528 bp, Zea Mays
ggttttaataggtcgctgtcgaagatcccggttagaatggatctctacatgatgccattttcaccagagtgtatgctgctttgtcaaagcgcctcgagatatgatttagtttgagaccgtaaaatctgtcctctagtgtgcagacttctttacaataggcctccatgttcaagttaaggcaattggattctttcatgacttgttccaccacaagggaatcaccttgattgtcaagtcgttggatcccaagtttgttagcgatccacagatcattgacgagtgcctcgtactattacattgttggacataacaaactagagtcggattcgtgtacttcatgtacacctctagtggggagacaaataccaatccgaaccctgcgccctatttaatcaccgagccatcaaagaacatcatctagtattcctggtccaccatcaccgatggcattgtgttttggtccactcaacgatgaagtccgagcacctgtgactttatggtggtttgtggaacataggatatcccttg

SEQ ID NO: 48235 - DNA, 477 bp, Zea Mays
ttcatcttcagtatgttggttccattgtatcttatagaatgggatgtctctttttgggtggcctgtccttttgatccaaaactcaaatgagatgttctgaatatgttaagtctagtttctaggtaacatccatcacctcaatggttcgataaagaacccgaaggcacttcttcaattgggatacatggaacacattgtgcactgcatacaatgttttgggtagttggagtcggtatgccactggtccaacttgttcaagaataggaaatggaccaatgtatcggggtgcaagctttccttttacaccgaaacgggtcacacccttcaatggtgatactttcaggtacacataatctttgacttgaaagtacaagggtcaacgtcgtttgtctgcataactcttttgtcgagcttgtgcctatttcaagttatgtatgattcgttgaacctattcttccatctctttaaccatgtcag

SEQ ID NO: 48236 - DNA, 626 bp, Zea Mays
ccaagcaaggagcttctagttgagcccttcaagcttgatgatgaggagatggatctcatcatcaaaagcttctggcaaatcttgaagaactagaaggagaagtactacaagcctcgaggaaagacgacatactacaaatgtggtaagactagtcattatatagcacaatgtccatatgatagtgatgatgatagggaatagaacaagaaaggaaaggcaaatgttgggaagaagaaattcttctacaagaataagggagcgaagctcatgttggcaaggagtgggacttggacaaaagctcctccgactctgacaaagaagtcaccagcctagccttcaacaaaagtgccatcttccccaaggtcgacaacatgtgcctaatggcaaagtagagaaaaaaagaaggtatatccaagatccactcctaaatacacatcctccaatagtgaatcaaatgatgaatctagtgatgagcaggatttgtctaaaattttcaaggtccttagtaaagatcaaatagctaaggtgaatgaattgatcaaaaccatcaatgagaataaaggatgaaaactcttggaaaagcaagaagatttactttgatgagaatgcaaaatgcaccaagctag

SEQ ID NO: 48237 - DNA, 398 bp, Zea Mays
ctggttccactaagaggatgcatgccaactcgcatcgcatgcatatgcccaaaaatggcatattattctcttggccggaccacacacacaaaaaaaaataaaaataaatgtatatgttcttatatagcatattggaggttctccaaaaacacacaagctgacatctttcggcgcacagtcaagttgaggaacattacaaaacaaaaacaaggggcagctagcctgtggcccacagcctaatcacgttccattcgggggataaggttttctcgacataaaactacatcgatcaaatgggatcatagcaaaagcgttttcaaatctccccttttaagatcttgtttgcagttgggacatcttggcggatatggtgactcacatgggcctcctcaggccag

SEQ ID NO: 48238 - DNA, 514 bp, Zea Mays
acacaacctcctttgccgacacgtagcgctagcagacacgaaaattttatcaaatgaagctatggctgttctcggggcccgagtactctccctcggtcccactatggcaatggcaggaaggccggcgatgaagtcggcgatgaagatggtggctgttgagaagaagcagcacgctagtccccgcccgtgataggagcctgcttcgccgcctaaaggacggtgaggagactgcccgaaatgctcaatcctcttccttatctgatttgtggtagtagctctagggattttggggcgggatcaagaccgtgatttcttttggcaccgcagttttgctagggttttatctccatggatgagcatttgatgggcctgatccctagcccacatcccaacctaatgattggcgtcgccccccgcggaagaaagaggtgggagcggggttgggtgtagggaagacaagcgatgtggattggtccatcaatgagtgagtgcaggttgttaaaaattgaagctc

SEQ ID NO: 48239 - DNA, 596 bp, Zea Mays
aaatttgctgaagacagaggggtatgttgcgattgggaaatggaagtaaattgcccccaaacttgctctgttagacgggtgaacgagtgatggcatggtacaatacctaaaaaagatcatagaagcagtgcgcctcgccgccgatccccatgtcgtgattcgcgctcgccggtaaagatcgtgctaagctcggcgtggataaacgttggcgtgaaaagatgggggaggtgaatgtggtctctaacaccggctcgacgactgtgattcacttgctccgcaacgtggccgagcggccaatagcgtcatggctgtcattgatcccagtcatgccatgccataggctaattcaccacgtacccgagacggtggtgagcagtaagtaagcattcccgagccattgcgcctttgcgtgtcacaacgactgacctcagtgaaaaatctgagcgttgccgtgggcacttctgtcccaaattagcgaagcaagcgatcaatccttttaaattgagtgccctccctgctccgccctcttgttacgcacctagcgcaccacttctcacctcagatcatcaaccatagctcgtgaattccagatttcc

SEQ ID NO: 48240 - DNA, 1044 bp, Zea Mays
gtgctttccgcgtgctctaggataaaatttgagacccctagggctcccgccttgaacccctagaccaaacaccctttggcttccgccgccatcgtcgtcaaaccgtagagggagagagagtcgaggacttcactgccgccactgcaatttgccccggttttcaccgttggaacttcagtcgaggttcaagaggattcacctagggctagggatcatatcggtgtgggtggacgcgcgcgtaactgcccggcagctaccagatttctcgtcggagcatggtgggtccgcaaatccgccctccgtcgtgtctaacgtgctctcacctccaccctcgatgagtatctctacacctttgccttcacgtcctcatcatgtcgcacccaggattagtcgtaggagttacggtgggtggcgaggatttggcgcgggcgtcctagcatcgctgtggagttaatctccaccgtggtcagtcgcagatttgtctttaccgccagtgaatgcaccacccaggtgctcgctatgtgatccgcattgcctagcaattgttggtgttgcatctaggccatcgaggcaccggatcgggtgactccggtgaccctccgctgtgggtgtgggcgtcgctgtgtcgggattgttggagaatggtggcaccccctggtcgttgatctacaaatgtgcagctaggattagaagtcatcataccctttcgtgttttgaagctgggtcgttgatccatggattaacgacgcagatcaaatcaaacgttccccattcactacactaaatcagaatcgtcgttataaaatcgtgcggtggtgattggataccagttcgcccatttatcaaggccctcggatccaaatacaaccgctcaaaatccccgctaccgcttcgaccgatcagtatttcacataagccctctagattgttaaaaatcaacccgccatccacatataggtaaggaatactgcgcatgtgccctgaaatttacacagagcaccctaggattccccaaaacatcatccacagtccaaataaaaccac

SEQ ID NO: 48241 - DNA, 483 bp, Zea Mays
gttaaatatgtaacaggtgcaaaggagaataagaggaaaacatgaggatagtatgcaaaggattgtagacggtgttatacctttgagtgcttcatggtgggctagcagtcttcattttttgaacccatagaatatggcagctctttgttaagttgggtatgcttcatcctatatgcattgttattgtatcagtatggaatagaagttgcggttgtgaaattgatgggtagacgttattctcattttctaagtaatatccacttgcttttttggaagcgatgatagttcgagcttggtcagctgatccatgactttgtggatgacttgtgaatgataagataaacatcactatcttactatggtagtccaaagtgggagagcacttttgtaccgaggaatttgtaggtgtttaacttggaaaacatgtttttaccatttgttgtataggcattaatagtatacagatatctagcttcattagta

SEQ ID NO: 48242 - DNA, 391 bp, Zea Mays
ccgagcacgaaccaccaacggcgagcatgaatccgagtgcacagctcgtcgacggcgaggggatctgaatctgatccaatctggtcattgtaccatgggattgttcttcagtcagcctgacagcccaacttgcaaggcctggatcttaattttccatgtagcgacttactaatccacctttaagaaagttgttgttctactatccagattcaatcttactatagcaatcactcccaaattcttactagatcatactcgaatcctagctcaaagatggctcaatcacattgtcagtctgaattcagaattaaggcagtctgacagcccgactttgggcacatttttctccaaatttttcatgtgaccatggtttaatccctatagcaaagat

SEQ ID NO: 48243 - DNA, 348 bp, Zea Mays
gttaaatggatcctacgtatgtagagtgtagtgtattggttaggcgaagaattttagaatagacgagtatgaggcatgcagttaagtcgagattgaagtgcaaatcctacgcaatgtgatgggattcgtgattatataggagttataattattgatgtgacgggtagtttagagaatgctagtgtgcgtggaggatgtattgttaagacataagtgtcagagtttatatactagtaggttacgctacgttgatcgaaatgtctcgagtgcacgccacaacatggttgtatgcgagacaaggtaatataaggtgtgctcgacatgaatgttcggtcggtataagtagaa

SEQ ID NO: 48244 - DNA, 775 bp, Zea Mays
cgaaaaaggatgaagaatggggttgggaaaggccaaactagatctaggttactactactcctaaggaaagaaagtaaaggaactgataaattgattgattggatcgattatgtcatgcaccaatcgaccataccccttcgtcatggataagatccatggcccctagagcccataggtcagtgagtgcattgataaaaggcctctagcaactagggaccactggtcagtcagaggagataggtaacgtctaccctggtggcatccacccctagacgaaccccgcgacaccgaacctggggtcgggcgttgaagaacctgacagggggtcgagcgcgccgaacgaaaaccactcgagtggatccctcgccttgctcaagaccgactaatcataagtaactggccgcattaactatgcttggcaacaagccgcagcagaggcaccggtccgcctcccactcatgacctacgaacccctcggactgtggtgcatttatggcccactcaccctccagcctgcgatgcactcatgacctatcaaactaggccttagtgcatagaccgttggcagggcgcgacacgataagccgtattgagccctaggctacgaaggctacgggtcggcatatcccaaatgacggcgctcggtccccctcgctgcctgcgtcgttcaccataaagaacacgagacatctaggtgaccccaaggctcatcagcatgtgtggcttcaccccatggtagaatgcttggtttaccgccacctggtggctccttcct

SEQ ID NO: 48245 - DNA, 415 bp, Zea Mays
caaaattctctaagtccccagaaccacccttagcccaaagatcaaaggtgttcacctttgtgctggcgccaaaaccacttggaccaaatagcaaaaagtggccaaattacccaaggcacatccctgaaaaatttgaattcaaaccaaggtcatttgacatggtttgacatcggttttgtcactggtgaacagtgcagacaaacaagacttggcgcccacatatcttgtgatctagggcagatcttccattggaacttacacaaactagctagccctaggtgccaggaagatatcttacacacgttggtaagattctcacgttttggagccctgctggcgcaagaactcgggcagatgaacatgaccacgtgttcgacgcgtcctggcgcgccagagcacgccctcggcgttccgc

SEQ ID NO: 48246 - DNA, 587 bp, Zea Mays
gtcgaagcatgggggaaaggcccgcgacgtctccttgttcagagtgggggggggggggggaatcgtccgcgacatcatagagacgaagaagcagaacctcgccggcggtgataaaggtgcaccgtcgctcggtcggcctatgtctcaatcaccagtaagagtaagttcctgtagttcgcttcgctaagcgcagtttctgctcacgtcggcgctagcagaggagaacaataaagctgggcgatgacccgcctgcgtcgttgggtggatgggctccgctggagcaggcaccgcgcgaggtgagagaggggaagaatgggtggagcgcgtgagagggaagatgatgcgattaccgtccgatttagaattaatggatgggattagatctggggaagcaatcaccgtggaccgttgatcgtgtatccaacgcctggggtttgatctcgtgtaaattgaatccgagccattggtcacaaatccatcggtggaaatcgtgtaccccttcggcttctaatctcgacccttgaaacttgatcaggcggttgtggattggttgtaccccttcggcgcgctagattttcaaaagagat

SEQ ID NO: 48247 - DNA, 436 bp, Zea Mays
aggaactatagctcggcaatttggccgccgccgtttatctctccgccagtcgtcgtggtctgcgctgctcggccctcaaagtttgctgcagagcgtatggtcgagtccgctgtaccctaaatgtcgtatatctgtagtttagtggggggaaaagccatggaggaaccgagatggccatcatcggccatcccccaccgcgttcgggggagtagcgccaccgcgcgtggactcgggtggggaagacgggctactgtcgtccgatccattttgggcggccatgatcacgccaacctatctgtgtggctaggttgattcgggtctgtccgatcgtaatcgggagaacttggggctgattgcttgtacattaaacctgggtcgtagatctcacatcctgcgctcgtcatcgcgtaccggttcggatagacatgatctaatc

SEQ ID NO: 48248 - DNA, 351 bp, Zea Mays
ccaaatctttcatttcaaaattgttggaaaaaagtccttcatttacttaatcacatcaacgctagtcccaaagatcagtctatcatcaaacatagtcacaaggttacaccttctcccaccatattgatagtacacatatttgttagctttgttcacaacaaagttgatagatattaaagtttagtgaacctctcatgctattgtttaggtgcttgtttcaggccatttaaggacttcaataatttacacaccatgccttatttattattttctataaatccatctagttgattcatatagatcttctcttactcttcatttatgaaagttgtctcaatgtccatttgatga

SEQ ID NO: 48249 - DNA, 617 bp, Zea Mays
cgacgccagggcgattccccttgctgccctcccgccagggcgattcgccgtcctccgccgccactcgccctcaaccctaatcggcgcctccgttgtcaatgtcttggagccgcccgccgctgacaatcctccgcgcacgcgtcacattgttcttctacacgctcgacgcccgttgtcctgcttcccaaggtgctcgagttctctgtaatttttatgcatactctgctacttcctaatctccccattcatatgcttcattttcttatgcattgtgtgccgtattccaggtgcccaactccatcaacctctgtcggattttctggcagtcaataacaaagaaatcacaggtgatatatttacgctaatttatttttttgtttactgcataaatgttttttgtttgtccatatatgaatgcttattctagtactatataaatatttatttttgttttgtttctttttctttgtccaaacctagcagttctagttcaaatttattgcttcacatctagcagtttaaacccatcagatccaaatacaattggtacattttctttatcatcattgtgtgacaacataaattgtattgtaaaaatccagtgatctctttggaac

SEQ ID NO: 48250 - DNA, 680 bp, Zea Mays
agggttgtgaaaaggaactaaggcttacattccaagaataatcactatttcataagatcccaaatgtccctttctttagcccttgttggtaacactaacagggactaaaggtgcatgtcctaggttttcagtctcaattgactgaatcgaccctaaaaactagagcctttagtaccaaattattcacaattctgttcagaaattcgacagtagagagattttcagttagaactacaaatcagttttatactagtgtaaagtagggatttcgtggtttacatagatacttcattcttatctctcatttcttttgcactgattgtagtttagttccttccattaaatcttctgacagtttgttggccacttagagcgcatctcttgaagaaaaaataaaacaagacactaacacaagagcgggagctgcaactaccggttggtcaatttatagttaccggttacattcccaattgcagcaatgaagtagcacttgatttacctacgtttcagttccaaagctggataatatttctaaagttcatgtgctgccaccttaattaacttgattagctcttctgacatgatgtgcaatagaatgtgatgtcgcttcatgttgaacccctctgtttgttttaccaattttttattgttgattggaatagtggcacaaacaacttgca

SEQ ID NO: 48251 - DNA, 510 bp, Zea Mays
ttagttatctaattcctctggtctcaggactgcgcaccaaaaatagagaagtccagggtctaacgtgaaagaatcccaagactcagatctaccccgcggtggatggcgggttgattttttttccagggtctcttatgtaaaatgaaacggcgaaggggtatcattaattattggtcgtcccatcagcacacaacacgccagattaagtccaaacgatcacgaatacgtgaccgactccgactatccgatctagatccaacagctgatagtctctactgcaccgagccgttcatcatcgagtcaatgacccggatcgaacctcgcgaaacgatatgtcacggtctaatctgcaccgttggtctaccgatcaacgatacctgctcacccctctcgtccgcggtcgcccaagcgacggggcgcgcgatgacgcggcggaacatcgctggagcattccaattcacaacgccaacgaataattggcgcccacaactacgcaaaaaccaaatttgc

SEQ ID NO: 48252 - DNA, 297 bp, Zea Mays
caaaaaacagatttttcaggtagacaaacagcagcagtattagcagtttctggggatgtttcgtgagtaattagtgttaatcagtatgagaatcatgtagggctttgtcttacctttccaacaagtacttatgcgctcgattcggaattatattttaaaagttatcgctgtttgaatccggatatgtcgctgcccaaaagagaaaaaaacagattgcagggtttatcttgtggaccgtttaggggtaattagatgttagaatttaatcataaattgtatacaaaacttgtgggaaat

SEQ ID NO: 48253 - DNA, 343 bp, Zea Mays
cggagagaaaactctagccaggtggcgtagtgcacccgcgctaatcctaagatgaggaggggccaagggatttgcctgattagctgcaagaacacgcaagaacacagaggttagagtggaggttagagtggtttgggtcgccggagcgtaataccatacatcgattgtgggtttgtattgcctgggagtctctgtgtttatgtgtccgagaagcctgagttggcatctgccatacttgtctaggtttagtcggaactgagttctaccatgtgtgccttcccttttatagtcaaagggaggcatgtacatggtgatcgagccccgacaagtgggcatggtaaat

SEQ ID NO: 48254 - DNA, 1073 bp, Zea Mays
tctggtgacaactttgagctgaattcatcaattttattacttagcggcgaatttgatgattcagaaatacgacaaatttttacttgatagagaaatttatccatgtttcataaacaatatgggatggttaggggggcaaggcccctgccccacccccttggcttcgcccctgactgtatggatgtacatgtacctgcagtgtatgtattgtagcactacaatcggattcccgacgcaggaatttccgaacaagctcgtgcttgagtaattgagtgtttcacaggcatgtgggccctgtttctctattattacttttgttgttgttgttgttactaccggtacaattgctaccgctatccttcacgagcacgatcggcgaactattcctatgatttgattctacatcatttttatttctatggcccgaacgattgtgttcgagatgacattttagctatgaacctgactcaaacacaatcttcttagggggatactatatcctagtcctagatgctacttattttatagctcaccttctacaacacacacaaacctgtctcaggcatccgattccgatgcaatgatcagtgaaaaatgttgaaaactattcaagttgacacatcgaacaacaatgttcgagccctagcttctttaggtattgaacatgatagggcatcaatagagctgcttaagacaatgtgcaatagttgatcttaaattttgccccccacatcccaatatcataccacaccagtattatctctcctcctatatcacttccatcttcaacggtttccccttaatcacaacccttcatccactatgcataaataaaataatttacatttggtcgtcgtacaccatccacctcctccttcccggctttccccatcatcttctatgaacaaagcaagatagtgtgccctctgaaataaggggagagagaacatccctctagcttagggggacaggtatagaggcaagtgatacaacatatagaggtgtcctattcaaggggagagagtggtcacaccggaagtgttgtggatagcctaaagataagacgaactcta

SEQ ID NO: 48255 - DNA, 395 bp, Zea Mays
gcgcgagctacaacctatcccccgagggtgtacgagtgagctctccttcccacacctccatggatgtctatgtcgggtcgtctccaccacgatctgatggggtgattgcgatgcatacttctttgacttcgagcaagcaagtcgccttggaggtcggcgagccagatgcaagaattctgatatctgctagtggggctgagtcaacccccggcgatgctcttcaaattgttccggttgatcttcctttgtcgagctacaacacaacttctcatgacttgggattaccctcattcttctccaatcttcaggtaactcagctcttttcattttactgttcctcctggtaaatcatcttccctatactcatttacctttgatcatagaccttggtcgac

SEQ ID NO: 48256 - DNA, 360 bp, Zea Mays
atctcagctcaaagtggacctaagaaatcttatgaagggaaggaagggaaaggggcagggggttctaagaaattctccctctacatatagtttatcaatctagtgacctccccaatgcttagaatagtagaacacaacagtcgaaaacacatctatcgcataatctgatgatcaccaaatcaatactagtttccgtggtcatcgtgcgtcatgtgcgaaacgcgtaggtttgttcttctcactcgcttctcgcttaacaaacaggaaaggataatgatggtgacacacccttgtctcgctagagccaaagctagccccctatttctgctacaaatcatgggcaatggaggcatgctcagg

SEQ ID NO: 48257 - DNA, 646 bp, Zea Mays
cgagcgccgaaggcagctgtcatagcttcgtcttctgccctcgagtacgctccaagtagttcatcactcgttgcctctatagcgtctagccaatcatcatttggctcatcaaattggcttatgtaccgaaaggtatatttgagataaacgaagccactttggatggagccagcgatggcttccttcggcatttcaattcgtttgcaagaagccatactttataagtaatgtgctattgaacaaaatatctcatgccaatgtaagtgcatatgatgttgaaagcaatttggcacgcctgcacttcattcccaagtgcgatggatggccttctaatgccgaaacatgaccatataggacgttggataacgcctctcacatcctccctcttattcaggtcattcttcacgtaaaaccattccttcatccaagaacctggccacttcttccgaaatgtaggcacagggtaatttgccttagaacgaggcacgaagccttagtagccaaagttgtgatgatattgttcatttccggtcgccttcgtctggtaagatagctcatgaatgttgcagaagcatctggcatccggctccagtccctgactcctcatggcccatataaaaacccccactctgataagagcttcgag

SEQ ID NO: 48258 - DNA, 496 bp, Zea Mays
attgaattctagatccgcccctgaggtggactaattaccaagtaacacaagatgttgataggaagagacgaaatgatgaaaataaaggcgcttagggaaaaggatctcaccaccaagtggaaacgaatcctctacagttacttctaatcactgacgaccccacacttcagtgacccatctgtagttacttcacgagaagtagaagtaactctagaggatcttgttgccaagtagtagactttatattgtgtcaatagtactctcaacattttctagtttatgcaggtcactttatttgtagttaaaccattaacagcgataaaaccgaatgaagaagcgcgtaggaggagccagcaattgaaggcccttcttgccccgtgcaacttacgcaatctgaatggagtgttgataaggtagggacttcattggctcgtgcaaacattggatatgaatggaggtcagcgtaaatgaaaggctgtattagataaaatcaaca

SEQ ID NO: 48259 - DNA, 517 bp, Zea Mays
ggacactagaggtcaggaaagcggccacccaaagaaattttaagtttgggaggtaccaaagcgacgaagactcctcgaggtgctcggaagagagctagtcttgttgccatgactgatatgttcgttgggcttcctcatagcccttgtattcacaaagatgagctttttccttggatggactaccgatgagttcaacatattgccgtggggatatttagagctcaacctccttataaaaactgagccagtcagtcgatgtgatatagttttttgcgattgattgcaggcgaagcctacttatatgtatgtgttgtaataaagcattctttgtttggttgtgtttattgaggtcgtcgatcggcaaccctttggcggaatgctgccctcgctcgcccccctcttgtcgattggtgactgaagcaggactatagattaaggaccgttcaatgcctgttgaggttacacccatctatgtcgattaaggaccgttcgatgcatgttgaggttgagactttgc

SEQ ID NO: 48260 - DNA, 804 bp, Zea Mays
aagttcgaaggattagaattccaccacgtggaaagggattgcaatgtagcagctgacgcattatcgaagctgggatctagtcggacccaagttccacctagggtcttcatcgaagaaatacaacaaccgagtattgccacagatcagatggaggaatgcaatgctctgagtcaggcagaggcagatcccaataactagagagagccgatcatcagatacataagaaacgaggaagaaccggatgacaaggtcgtggtagagcgcatcgcaagacagtcggcccactataccatcattgggggcctgctgtatagaagaggcgcaggaggggtcctcatgaagtgcatccactcggctaccaagaggcagcttttatatgagattcacgtcaggcagtgtggcatacatgcaacatcaagaactctggtgggaaaggcttttagatctggggtttactgtccgactgcgaagaatgatgccgccgagttagtctagaagtgcgaggcgtgccaattcctgtcaaaataacaacatctacccgcacaacagttgcagactattcctgtgacctggccatttgcatgctaggggctggacatgatcgggcccttcaagaaagctccaggaggatatactcacatactggttgccatcgacaaatttacgaagtggatagaatacaagccaatcatttctttgacctcagcaaaggcagtagagttcattcaggggataatgttcaggtttggaatacctaacaacatcatcactgacctagggtctaacttcaccagtttggagttc

SEQ ID NO: 48261 - DNA, 523 bp, Zea Mays
taaagtttggttgctaatttagatcgttattggtttggtttttatcactccattcgctgccatctataaatttcacccactgatcctgttcccaatgtttggtgcttcaaggaaacccgtatttagggaccatttttacaacaaccataagtttcacatatgaactcaaaattagggactttcactaccaactagtcattcatttgaaaacctatcggtatattgtttgccccttagtcttgaaccacccacccaataggccctcactgtccattgttgataaccaacacaccaaaccacaagtccaagaacactatctaatagcgagattagctagcgatctatttgttgttataattgtggattgtccgccactgagagtcaccgcatgaatggtgctcctcttatgttcaacatcgggtcaaaggcacggtacaatgccaatgaattgttcgctgctataggcatgagctgcttaccattgtcttgatattctgatgtggatagtgacaaattttggttc

SEQ ID NO: 48262 - DNA, 1299 bp, Zea Mays
tgatgatgacctgaaggaggtcaatagccataacaaacaagatggtgagaggggatcaccttgtctcacccgtctcttgctgtgaaacaattttctgtggaccccattgagtaggacagaggaggttcttgagttcatgatcattttgatccacattagccatctagggccaaaacctttgtgcctcagaatgtcaataataacattatgttctagtttgtcaatggctttctcaaagtcaagtttcagaatcaccatttccttttttgtctgtttgcagagatgtagatattcaaaagaccaagttggacaatcttgaatgctacgctccttgatgaaaccatattggttattatgaatgagcttggtaatcaccctatgtagtctgtttgctagtagttttgtcagcatcttgacacttatgtttagcagtgatatgggacaatagtcattaaatgaggtgggagaggaattctttggtatcaagattatgttacacccattaatgctttgcatgcagatgttcctctcatagaagccattgaagagtgcatagaagttggaggacatgacatgccaacatttttcatgaagtttgtgttgaaatcatcctgaccaggagctttgccaatagggagagcaacaaccacaagattgatctctgcctctgtaaattgcgctttgaggtggctcagatcctcaggcacctcaaggaggcggtgaaggctgaagaccactgtactttattctaaggtaccaagcttggccttataggcttcatacaggagtgtggctttactgtcatgattgaggataatttgacttgtgatgtcctgtaatgctgctatagagttctacttgtgtctgatggtggtgttggcatgaaagaacttggtgtctgcatcaccacaggtggcccatttaatgtttcctcactgcttccaataagtcctttgttgatccagtagggtatcacgtaagttccatttttgcaaagtgaggtatcgagtttcttcaatcagatctaagaactggatgactaactttatgttactgatagtgaccgagagcttggggagatattatgccagaggcatagagtttttctagacaacaatgcttcaagagaattcaaacacgtgcatatacatatacaaatatatgtgctatatgtcacctacggtaaagcttcacccggaccgaaccaaccaacgtaatgccccaccaagcgaactagcgagcccaccaaatccttcggggtccgcaatccactaacgtgtcgcaagcactgcccaatga

SEQ ID NO: 48263 - DNA, 348 bp, Zea Mays
gcccttaatagcgatgttggtggtggagacagtgggtcctgaagaggatgaggaggtggttatggtaggtcaaaaggaagagactagatggtaggtgaagattgtgggttaggaaaaggatgtggaggtgatgacaatttattagcaatatgatcatcatgtgatgaatcctgagtttgggggagggcatgagaggatggtggtggtggctcactcaattggacatctcgtcgaggccaaaggatgaaaaatttgatagcatgtctaaatgtctgaatacccttggggctagggatgtctagcatgttgtccccatatccatggatgattgtcgacacttgtacccta

SEQ ID NO: 48264 - DNA, 526 bp, Zea Mays
attcaatgcaactggaatgaattaaaaaggagctaagattaattttctatgagttatataagttctagaattattttggcaatagaaatccattttctaaattatttttcatattttctcaaagctctggactgagcacactattttaataaagcccagggtctaactcataaagtctaggaccgatctgatactgtctttgtgtcctagtggatggcgggttagttttaggaaaccccagggtctcttttgcataatggcatggccgaaggggtatcctataatcagagccgttggattccccatcagtggcccatattagattacgtattataacgaaatggtaagcaacgtggatcacaggatcatggatcagtggtcctaagccctccatgccctgatcgagcgtcgatcgcacatctaccgatcaacggtcaagatcttaaatagcgtaagggtatgggatcgtcaatcgtggacgcccgtggatggatcaacggctcgaaacgaatcggtcacgatctaa

SEQ ID NO: 48265 - DNA, 535 bp, Zea Mays
cgcgaggcgtgcccaagcatcagctggcctcccgtactgtggagaccggcagtagcagtcgcgcacctccgtcgcaggtggaggcgaacagtggccgtcgtgcacctctatcgcaggtggaacaattacaacaagatttaaaagtgtcagtcaacgaacggggcctggacgctgctcatattctagaactactggctgaaaagaagcagcttcagaagcagttagctgaacagaaggagcaactggctgcgacaatgcgatctagggaggcagcgtttgctcgtgagaaccatttgatgggtcgtttttaggatttggtcatggcctacaatgatctgtaggactactccaatgtactgcatgaggaagttcaccagctgtattaccagctgcaccccgatgatgcaccaggagccgcagaggcagagggtggtgttgtgttagctgatgggggtgaaccggatgcagactcagaggaagaagcagcgcctgtgtttgcaccaggtggaaattctccagtgggtagtgatgtgtc

SEQ ID NO: 48266 - DNA, 297 bp, Zea Mays
cttagaggcatcgaacctttgcaaggttagccactgggctacaatgactatatttcaataactagggcatgtggcataatctgacagcgttggaccacgtgatatggtatgccgatataccgttcaacgatccaattatatacagatgatagagatgctttttgaatgtttatctctccaattggtattataaataggacgccaactggacatttgcaatgtgtgaaagctgagaaacattgctagagagttgagactttttttatagttctagacatccaagtgcttaaggaatca

SEQ ID NO: 48267 - DNA, 560 bp, Zea Mays
acgtcgtacatgcttgttgtcgacattattattctgatcatgttttcttttgtggtaaactaatcgcggcttgttgtccatattggtcgtcgtctcaagttagacgtgtatatggccatggtacgtagctagggtacacaggatggatgcgcccaaaatgtttggtgccatcgatggccgacaggcgacagctagtagctaacacacgttgttcaatgatttaatggacggagcttcggtcacaagctaggagtccgatggatggatgatcagtggtcgccatcacctgctgcagtcccctaattacaataaaagctgccttgctacgtgcacttgtgcctctatagctgcccccaggtatctttccatcagaccatcacatatgtcaagagacagttatacaagtacctgtcccgatttcgatttgtcaattgctagttgattacacttacgatggagaaaagagtattactatttgggaccattattgcttgtgcacctcatcagcaccatcatcctattacatatatttcatgtacacttcctcttccataaaaaag

SEQ ID NO: 48268 - DNA, 459 bp, Zea Mays
ttgggtcacactatctctcaggcaggcatagctgttgatcctgataaggtgcaagaggtgatgaactggaagccgccgacaattgtccgtcagattcaaagttttctgggattggctggttattatcgaagattcattccagatttctctcgaattgcgaagcccatgactgaattgttgaagaaaggagccaagtttgattggggtcagaagtgtgaagatgccttccacagattgaggcaacatctgaccacagcatcggtgttagcgcaacccgacagcggcaagccatttgatgtgtactgtgatgcctctggcactggaccaggttgtgttttgatgcaagacaactgagtcattacttacgcatcaagagcactcaggcctcatgagcaaaattatcccactcatgacttggagttagcagccgtggttcatgcattgaagatgtggagacac

SEQ ID NO: 48269 - DNA, 840 bp, Zea Mays
gtgatatgtatgtatggatgagagtactgaggacatgagagtaaggtgacccacatggtttaccaaatgccctttccatcctgcaagtcggtttctgatcttttcgattagtggctaaacatggatcttctataaggggcgagtgtgcagatggagacctaggtagaggcaggggaaagaaccttgagaaccttggaaagcgtgtaggacatgatcaagatcaatcccctcacatcaaattgtgtgaatggaactattcccaaaattagtgaccaattctgaagctttgccaaaatatggatgatttccttgagggcagtcacctcctttctaaccggattaaggaagatcgattcgtcgtctgtgtatagtgatgtccttgagctggcgtggttgagtggcagcagagtgacaatcccatgttggttcttgaggttgaggatttgttgaagtgggtcaatggcgaggataaacaacatagaggagagggggtccttctgcctaacacctcgtctttgttgaatgttgtctcctgggaaccattgagaagagcccttgaagaggctgatccaaagtgtatggagatccattcccgccagcgggggccaaagcctatgaagtcgaggatttctaacaagtagcctcggttaactgtgtcaaaggccttttagttgtcaagctccaggaagagagcgggttttttcagattatgaagcttcatgattgtatttacgtagagaaaattatcttgtatgcatctcttcctaatgcactctaggacttggagacgagagtgtctagaaagggggctagcctattggccaaaagcttggagaagat

SEQ ID NO: 48270 - DNA, 442 bp, Zea Mays
ccggggggcagcatcagctagtgggggtgcgagtttagagatgcgccgtgggaggaagactgactaccttgaaatcccactcaaggatagtatcaaaggatggcgcttggaatggtttattgttgagaaccacggaaaatctctccccccacggtcagggagacagtcggatgttcgtagtccaagttggaccgagtctcctatggaccaggaggtggctgaggcaggggctttgctggctgaggttggactgctgaaggagaggggtctgactgcagaggctgtggtcgctgattttgttttcaagaacattcagccgttgaaggatagggcatacccggcctacctgtaccgaggtctagctgactcaacccgggtcaccaatagaagaattcccgttgtagacttggtgaaccggcttgaaatgatacttcgaggcaag

SEQ ID NO: 48271 - DNA, 499 bp, Zea Mays
ttgatggctaactagtgattgactggcagcgcaacaacatgaaacaaatagatatagaggggcaacaacatgaaacaaatagatatagaggggcaacacttcattgttgttaacttgctagtggtgtatatataactatgtcggtgctgtttgagcctttaggctacttgtctttgaggagagccggtggctagaaagatctcttgtgctaaaatttgccacatagagatatggggctttagctaatgcactgatacctagagccatgttgtgtgcacatagtttagtatatgccactacttcctgacaagaaatctcacttgtccgaggattgggagaatccttgtttctagtggtacacaagatcatgcttgtaataaaaggtacaaggagacattaatatgttaagggaagaacgacatgattacatcaatgcatgcctactttgagagacacaacacaatccagtgacaaactggcaagacatggacaattggct

SEQ ID NO: 48272 - DNA, 826 bp, Zea Mays
cgcaattctccaccttaccattgaccagcaccgagagtctggggcaataggaggggaggaaggtggaacacattcgggtgaactgcgcgtgcggggaggccgtgaatcggtctgggttcctcgccatctacgtacgccgcgacgcgctgcggaacgcccctttgacgaccgttgaactaggtacgttacccacccgcatactcgcagtgtgccctatgtcgtgtagaagtgtttcaatcgggatttagggcattgggggttgggaactgggtgcctccgatgagatccgccgtgaagaggagcagcgccgccatctcggtcatcgctaagaagggagatgatctgcagtgctcgctgaccgttggatcgtagaggtgcagctctaattagatctggagtagcgattggattagaaatgtcggggtcatcgatcgtgtaatcaacagtatagattagatcgcgggttcattagatctagaccgtgggtcgaggatccatcgacactgatttgtgtctggccataccgtttcattgagttgatcgtagccgttggttgtcaatcggtcggactacctgaaaccctagcttccaccatcgatctggggatcgatggccctcggtgcaagctccataagggttgggctgatctaatctggatcctagatttcaaatcgaacggcctagatctcgtgatacccttttgccatgcaacttttacaaatgaaccccaagcttattataaatcaactcacagtacaggacagtgttgaaataattaccagaaggccttagaattaacgaaaacaacccccgaactccctagttt

SEQ ID NO: 48273 - DNA, 886 bp, Zea Mays
attttattaaactgagatttcattcggactacagatacaaaaaccagggaccgcagggtttgttttgtaaaataccaggacccagactgaattacttctacactcacatggacggcgggttaattttattatcctctgaggtttcttttgtaaaacagcttcggcgaaggggtacgggctgatttgcgtcgttggatctccattcgacagctcagattagatccgaaacctaaacgaaccggtacgcgttgagggtcgtcgatcaagcaatctacggtcacgctttaatgcgtgaaggggtacgcagcgttttaatcccaagcgtccaatctagcatcgaacggtcgcggcttagtgactcagggctctcatcatgagtcatgactgtccatccatgaatggacggcgcgggggcttctcccacctccgaaccaaacagcggcggcgccaaaccaaacaacgacgtgcgccatggccgcagaacaacaaacttgtacccacttgcccaacacttacaccggatgtgcactacatgtagcggggcaaagacgaaccagggtggcttgtgattaccaggacccaaagcgccgcagttgacccacacgtccgcgaggtaaccacgacgactacacagcgccggcgaggaaattctccgcgtcccgagattcttgactcatcccgagggtacggacggattcgccgtgcctagaggattccccttggaactgcgccgaggacgggatgtcggcacggcagggatcccccagcggcggccattttcttctctctctcggtttctgtccatggtgggatgcagggcggtattacggcaccttgctcatatatagcccaggggttccatggccccgagaagcgcgcgaatctg

SEQ ID NO: 48274 - DNA, 558 bp, Zea Mays
gtacacacttttgtttgggcagaacaagaaccgaagagcgggtcgacggtgagggtggtcacgacggcgttctaaagagaaggcgcgtgttccggtgaaaggcttcggccgaacttcaattggtcggtttcgagagcaataagagaccataatcatgctaaaacacggagcaattgggggaattactaacccgaggatgctgattacggtagagttccttgcggcggagcaagaacagggaaggggagaaattgtggactgcgcaagttctctggtggaattgagtcaattgcttaagcactgaggtgcggaatgtggagaagaagccaagctcgagcgcaatttgtatgctactggccagaaccagatgaggatcacagattcctgaccgcgctggcgggcttatcgcgcgggcgggtcacaacgatggtccggtggacgtcgattaaccggagaacgccacctcagtaaaacaccgccacgtcaccgataacttttaccacagccgccgacgaccatcccaagctgtggtggcgttcttatcgccggcgaggtcgt

SEQ ID NO: 48275 - DNA, 979 bp, Zea Mays
ggaaaaggaagcagcatgaggaagaaactagatggcacaactggaggaaaaagagtatttttttatctaccttattggaaaaaattgcttgtaaggcataatttggatgtgatgcacattgagaaaaacatttgtgatagtatattggggactttgctaggtatggaagggaagtcaaaggatagcgagaaggctcgacttgacatggagcatttaggcatcaggaaggatcaacatgttgtggtcgggaatggaaaatacacgttgccatcagcacattacacattagttcaggatgagatgacatgattatgcaaatttctaggtgtgaagatgcctgatggttatgcctctaatattaagaggagtgtggatgtgaacaagtgcaaggtgtctggtctaaaaactcatgactgtcatgttatttttcagaagctattacccattgcactttttcgcaacgttttgccagaaaatgttgctcttccattgattcagcttagtaggtacttcaatgcaatatgttcaaaggagctgagtgctgaagagttagagcagttgagcacctcgattcctaaaaccctttgttagctcgaaatgattttcccaccagccttttttgatataatgattcatttgccaattcatctagctgaagaggctaaacttggtggaccagtgtgctatagatggatgtatccaattgagagatacttacgtactcttaaagcctatgtacggaacaaagcgcaccctgaaggctcgatagctgagggatatatattagaggagtgcatgacattttgcagtcgcttcttgcaagatgtggaaaccaagcttaatcgtgcagaccgtcatgaagctgctgctgtgaatgaaccaccatcaggcctaagcatatttgccaacattgactacactaagaaaggattcactgtcgagtcactttctaggagtgagctgcagcggatgaggcact

SEQ ID NO: 48276 - DNA, 471 bp, Zea Mays
tgcggatgctgaagttgtgcctggtccgagtgctgggcgtaggcggcgaagggcagttgcgaagcgtagagtgagtgaggcggacagcggtcggcttcgtgtgggcagggctagcaagcaggaattgttgtcctcgccggccgttgcgagtgtaggtgagggggagctgcgaagtctttttgagggtgaggagctgaggataatgttatttaactatagggagatggaaatcattccaaaggttgaaccgatgtaaggtgtgatgccctcgctgtacatatgtaatagcttgtatgatgaggctgtgcaccttcgcacattcggctatgctcatagaggcgttgcgcacttggtctagtgtatttattatgtcggtccggcgcgcctgtagtcggtctttgtgcggacagtttggtgtagggtttagcacgggtagtcttttgaggaagacttcgattcttcgcacttttt

SEQ ID NO: 48277 - DNA, 678 bp, Zea Mays
tacaccagagatttgggaacacttccctctctcgcctttttgtaaccccctactatgagcaagttggtgccggtagcgcaagccattgaagactagaatatagacattcggcccgaaccagtataactcttgcgtccacctcgcacaccatctaggcctagaacgcacattacaaatttactcgctagtgcttactcaaaacatcaacacatagctatcatcaatatgtgatgcatgttatgttacacaaggataaaatgtttcatggataaacttagtagcaactaataaattattcatcgttactctattcattttctaacacaataatcattcagatgatccatattacaaatttactagttacttcctatgttctaatgtgtgtgtgcatctgttgcagcgcacctttataaaattttcacaatcttttttgcattgtgctaatgattttttggtagtgaatttgtatggggtggatcatgagatctagaactgaaagtaagtggccaaaaaatatgagaatttagagtctttgactctcgatgcgagataataccatacctgatgcatgttggtgactattgtttatgatatgatgaattgtcctggattggagctaccatccccctttatagtccaaggaggtgtggtagattacaaaaaacttatcttgtc

SEQ ID NO: 48278 - DNA, 273 bp, Zea Mays
gaacgtgacacgattatgtttgtcgttttttgccgaaagaaaaataatcgcatgaaaatttaagacaaccatattttaagggtaagggtaacgtagctatttgatgttagaagtgcttgcctatgactcactcagactcagtcgtcctttgactcacgaatactttgtcatcctcgtctcctcatctttatgtgccggtcgggatgctcatttttatggaaaagacaagcgattcgcctattcggggtactccacctttggcctaggttgtca

SEQ ID NO: 48279 - DNA, 321 bp, Zea Mays
gtgcagtcctgtccttccaaatggtcctcatggttgtccgtagctgagttctggtacaacacatgctctcactcatccttgggctcttccccatttgaggttctttatggacgtgcacctcgtcacttcggtctttcagtggaagattctgtgcaacaaactgatctcagttcttggctttcacaacgtgagctgatgctgcgcattatcaggaacaacttgttgcgtgcccagcagaggatgaaacatcaatatgacaagaagagaattgaacgcgtatttcaggtgggcgataaggtatatttgaaactccaaccgtat

SEQ ID NO: 48280 - DNA, 356 bp, Zea Mays
aaaaaatacaatccatgggtcagcaaccaagtgaagaatcaaggaacaagcgcaaggtggggcctatgttgccacctagcaaaagaccaacaatgtgtggccgttgtcaatctacaaaggttggtaaccattgcaacagtgcgtcagaagctcctccctccatacatggttagtacttagtttttactcaacacatggtaaatcatatgcaagtgcattatagagatttacaaattaactcttatatgtggtttatgtaggccatccaggaggctgatgaggatgaagaggaaattaacaggattgacatgaatgatgatttatcagtaagcatgccttcatgtgcttcacttgaa

SEQ ID NO: 48281 - DNA, 389 bp, Zea Mays
atcgcccatacccaacccgttattaaatcgggtcaagttcggattttatattttacccatgggtctcggtggatatctgaaaaacccaggcttttatctcatcccaatagccaataacccattagcaattccatggccagctggcccagcccaccaccgctccatgcctccatctcgctaagcctctaatcctaggctccatcgcccaccactggcttcatcgcccactgtcccccttttctcaagctcacgcgccgtaaggacgtgatggccaccgcgacacaccacagcgacgccccaggcctgaacagggccaagggccgaccgtggagatggtggaggcgagcgagctccgccagcggggtaagcccagatacaaccacatggcg

SEQ ID NO: 48282 - DNA, 663 bp, Zea Mays
gcaggcttgcagctcttcagcacagttcagccagactcggacacaagttcttctaaaaaaaaattgagcctgcgccccgggccgtggcccaggcggccataggcctaggtccgcccctgagctcaaatgatgtacaagtggacttcgattaaggtaaagaggtgctccatacgatcaacacctcaaacaaaagtgcaagacatcaaaacacgcattgaagagctactagctatacaaaatcttggacacaagatggacaatcaatcatgaagaccataaagtaacaaagagaataaggatttcaacaactatcagatcgaagcattatattaccctctggagctcggaccatacgatcaagctaaccttagccatcagataataggagcgtcgaaccagcactgataaagacatcaaaccatacaatctcactaaacacacgtagaggtgtgttggactgaacgtcaaactcacaatagagatggtgtcatagtaaatgattacactatttacgctcagaagagcatcaacatcaaaccatcagagatgaagtctgacagacacaagaaatatcccttagaggagaaaagggtgttggactagtttgacgttagccatcagattggtctgatgataggcataagactacacaccacaggcgca

SEQ ID NO: 48283 - DNA, 530 bp, Zea Mays
gttgcttgaacgttgcattgcccctccagcttgtgtctgctctgctgtgatgcacctgcttgtgcctggatgtgaagttgtgaactgctccgcctgcttgtcctagactgctagtgctaggtgcccagcagtccagcacttgtgttttgtgctctgcaagtttgctgctgcatagccatagatccagagtgcttcactgctatgggtgaatgtgtgcctgtgctttactgcctttagttagtttgttcatttttagctgattacagtttacagattgtgatatatgtctctgtgttctgtgacagctcacagctacatcaacaagttcgttcatgctgctccactgtaggttggaatgtatgtgtggtgttccctcaccacaagcttaggtgtctggaagggggtgggtcacctcgccttacgccatcataaccatgcctgtcactaatgattaatgttgttttgtactgtcatcttttttattcagataacaacttgacatcaatttgcatttttgtggtacttgaaac

SEQ ID NO: 48284 - DNA, 578 bp, Zea Mays
ctgaaccaagatgaagacgcactggtaccgaccgatacaaccaccgagaggtcaaggaaaaggaagcagagtgaccggaaaagaggtgacaggggactgaacaagtttcctgacgaaacatataaaatctcatatgtgagctcgaaaggtcagcccctagctccagaagaggcactccctaagttctggaatgcacttgggttcttagttagggataatcttgacatcacaatccgacattggaaagatgtgtctgttgatgtcaagaatcaaatatggaataagctattaacgaggtttgttctaccttggggttcagaagaactcctgaaggaatacacaatgaagcagcttgcaatcaattttcgaaactggatgtctgagatgaatacaaaatttgcaaagaaaggtctagacccgacaaaaaatatgaaatctcagaaagtcagtgggcagtatttctagagcagaggagcagccctgaattcatatctctaagcgaggcaaattcagaactatctaagaagaacaagtaccaccaccacttaggcacaggtggttacaagtgtcaagtttct

SEQ ID NO: 48285 - DNA, 441 bp, Zea Mays
attacgagaacatgaatttggaatcccgacccactcttgtgattgttgtcctaagtaaatattattagaacttgacgacaacaatattgacgcaaaattaaatcggatcgagataactagaaccgaactgagtattcataattaatctgtttcactgtctacaactgtggaaatttgtctggtccgtaaaatacctcccattgtaagcgcagtccataaacatcaaaatttatattattttgattggtctgattgcgtctcgtccagatctaagtattcggatatatataactatacacaaattatcgtactgtgagaatattcaccaaatcgaacgcaatctaaaatagcgttgttgatattaatctgatctcatatgtttgaatcttgcccacatccaaatccctaaacaccaatacgtatgtattcttttatataaaa

SEQ ID NO: 48286 - DNA, 1741 bp, Zea Mays
tcataatcaagaagcttagtaggagttctattgataagatgtgttgaggtgaggaacgcttggtcccaaaacttgagcggtatagacgcattagcgagtaaagagaggcccatctcaacaatgtgcatgtgcttacgctcgacgaccccattctgctgatgagcataggggcaggacacaagatgagtgatgccaacgatacgaaaaaaggaattaagccgctcatattcgccaccccaatcggtttgcatagcaatgatttttctattgagcaagcgctcaacaaggctttgaaattctttgaagaactgaaacacctcagacttatggcgaagaagatagatccaagtaaatttactataatcatcaatgaagctgacataataccttttattacaaaaagaatcaatggcgggtccccagacatcgaaaaacaccagatctaaaggagcagcagactgactggtcgacttaggataaggcaactgatgggccttagcacgaaggcaggcatcacaaacatactccgaggaatctaagcctgaacacactaaattattatttctaatgacacgagcgacaatatcacgcgatggatgacctaatctgcaatgccaacgctcataggatggctttattgcggcaaggtcgtgcttctgggtaggtgtgcaagagatgtcaatgggtagaggccacccctacatggtccgcgcaccagcacttgcctcgtggcctgatccttaatcaagaaaaagaacggatggaactcaataaaggtgttattatcaagattgaaacgatgaatggaaacaagatttttatgggtatgagggacacgaaggacatgatttaggtgcagagggcggaaggaagtgggcaaaacagaataaccaatgtgagtaatctccatacctgcaccattagccgcccgaatctgatcattgccattgtaacgatcatgctgttagcttttccagctcgtcggtgatgtgatcagtcacaccgaagtcaaggtaccagtttggatcagcagcagtggaggatgatgccatggccgcaacccgatcatcaggagtgaattcttcataaaagcggtaccaacagatattagctctgtgaccgactttaaggtagacctagcagcgtggacaagactggccaccggattgatctgtcggtggaccggaactgcgcctgaagtagttgttgttgctgtagttgccgcgcgaagacgacgaaggatagccatggccatttccgcgcgagcgtccgcgaccgtgattttggagaaccatcatgccaggagccaccacggccacgagtagccgtattggctgatccatgagcagcgtacctgccgccggactgcttcgcaagccgaagctcatagctgagcatctgcgagtataacttggcagaggagattggctcgacgcaagtgacgatggacgacacaagcgggttgtagatttcttcatcaaggtcggtgaggacataggcgacgaactcctcatcgcccagaggttggccggacgccgacatctcatcggcataactcttcatcttggattagaatccggccattgtggtcgtgcctttcttcgtggtggcgagcgcaatgcgcgtgttgacagaacgcgcacgtgtgcaagatccgtacatagccgcgagggagctccagacgtcggccgaggtcgtggctgtcgtgacacccatcaagacctcacgcatcagagaggag

SEQ ID NO: 48287 - DNA, 1032 bp, Zea Mays
ggaatcttggggccattcaccgagttggagtaggtaggtccgggtgccttcaactgggggcagttattcttgaagtgactggggtctccgtagtgccaacaggcatttgctggcggttggttgcttgcaacggagggtgcctgatgggagctctgactctgctgattgtagcacgatggagtgggtctagatggtttattgaagcttgttcccctgggtggaagcccaaagggtcaagctctctggtgacgttcttgctgatgagcttggagaacttggaatttcctcttgaggtgccctttttcttcctcttttgccctttccacttggatggctttgttggagaggtgagaaaagttgaggaagtcttggctggcgaggatggtcttaagctcgggtcttagtcctttcagaaaacgggccattttcctggactcggtgctgacatcgtcaggcgcataacgggctaactctgtgaacttgtgcacatactcactgactgttctcccgccttgagttagctaccagaattcatcctccttgagttgaactatcccctagggtacatggtgctcacggaaggctgtttcgaattctgcccaggtagcatctctgacagcctcactgaaggtgtcccaccatgctaaagccattcctgaaagctgatgagcagccagttggacacgttgattttcagggcatccgatggcttccagcttcctcttgatcgtgcgaagccagtcatctgcatcgaggggattgctggaccctacgaacgtgggaggcttgagtctcaaaaattctcccatcctgtcctgtggccttccaccacctgggcgctggttttccagacttctagtgaggacttcaatgagtcgggtttgattggctagaacttgggctaggtctagtggtagatccggaggtgcggggaggtgggtctcactcccttctccgccagcttctccttcgactctcagaggaaaacctgctccaatcccagaggcggtaggagtggttttatccgaagcc

SEQ ID NO: 48288 - DNA, 1028 bp, Zea Mays
gctcaatgtaaccttgacctctaaagtaaaataagtggtcgatccacacacccttagactttgatctagaagaacacatgtcaatggaggaaaccacaagactctaccaatgtcgcccggagtcagtgcacctgatcaccatgtacgcatgatagtctaaacagcaagagcaccagaactcaaacaacgatgaggacttgcatacacatgcatgatgatagttgtgggggcaagaacactatcgccttgagaggcgacaacagcatgaggacaagtggcatctacacgacaaacactgatattgtaagcactaggattgtcccttcttgtagttttgttgtagcgaggatgcatcggttacagattttttatgactgactcgagtgggctaggccttatcatcctcaacactgagcatcagcctttcagtggctcgagcctacactggaacgccaccaagagtcgatctaagaggctccaccacccagggagtcagtctaaaaagatacatgtcaacaagggtcgatggaggaggagcaaaggcaacgacaaaaaaggatcgatcttttggggccaaatagcgactacatacaactcttcgctaccgtaccccaaatagctaaagaattgatggtccataagaaattgcaaggtcaccctcttcaatggtatctacaaccaattgtccacatcccgaccgaggggagtaggtgatgctatgctccttcaagtaacaaaggagactcccgcaacagactcaatgaaacgaacttcaagatggagctcatgtggcgtgtttttcgccatcagtccaagtggtgcgcacaacacgatgacgataactccaataattggagcaaacaatcttatctcaatgttcaatgagtatcagtgagtccctgccataaataaaagtatggtaaataagatctacaaggcccgatagatgataacttaataataattgtttaagcatttcaccaacttgttggatcaatccatcaccgatatggacgatgatataaaaa

SEQ ID NO: 48289 - DNA, 620 bp, Zea Mays
agtgccatagtacaaggagaaaaggtcaggtgaagggtgcaaccaaacattgggttgctgatacagtgagagattggttagtggacaatccaaggttgactccaaaggcccttcaacagaggataaaagatgagttcaaggtatgggtgcactacaagagggtttaccatggtaaagaactagctatgactcaattatatggtgactggagggagagttttgacaacctatataggttcaagaagcaaatagaagaatcttgccctggtagtttagttgttattgatcatcacaccatcaataagaagattaagttcaacaggctattttttgccatgaaaccttgcattgatggtttccttcaaggatgtagaccctatttagctattgatagtacatttctaactggaaagtttaggggtcagctatgtgtggcttgtgcagtagatggacacaactggatgtatccagttgcatttggagttatagattctgagacaagtgaaaattggtcctggttcatggagaaactcaaagaagctataggtactcctcttggcttgaccattagcacagattgtggtcaggcaatcatgggagctgtgagtgaggttttccca

SEQ ID NO: 48290 - DNA, 355 bp, Zea Mays
aagggtgtcaagacctatgatgcatgtactggtaggaagttcgaccttcgtgctgctgtactatggtgtatacatgattatccagcgctagccacgttatctgggcgaacaacaaaagggtattatgcatgtatttattgcgacaagaatccattgtctctgtcaataaggaacaagttattctacattggacatcgtcattaccttaaaaggacacattcatggcggaatagcttggatttcaatggtaagcgtgaaaacaaagttgagcctggcaggtttactatggatgaggtcctacaagagctagagaaggtgaaagatgttaggccaggggagcaggctgacattactg

SEQ ID NO: 48291 - DNA, 721 bp, Zea Mays
cagtcagattcgccagctctttggatttcccgagttgtcaactcgacttcatagcttatgctacgacacctctgaccctcctcgtcgccctcacgacggtgtggctccgggtatagctcacgtcgcggctctgttccgcccgcctttctcagatgggtcgcgatgttcaccggcagattttactacagcagccaagtacttatttgagcttatcagacggactcttcggccgaggatgggatacagggaggctaccacacatatccagctctggctccttggtgccctggtctctcactctgagtttgacgtcgtggatttccttatttgtgagatcgaggacaccgttttggatggcatacgtgctcgtcgacagttgccatatgctcactacttgtgtcacatttttgcgcagctgattcggcctccacagttccagggtacacttgaggcctcacgccttgttttggatcctaccgtcctgcgcctgaggctcctgtgccagcttctgctccagtttttgactctcaggccgaggatgctgctcttcatcagttcgaagctcaggatgcagcagctgttgttgttgatgatgatgatgatgatgattttgggattcctccacctccgcctcctatgcctgcacgctcacatgatcatgaggctgggagttctagtgctacccctgctgcccctccagctattgacccgactattgctt

SEQ ID NO: 48292 - DNA, 274 bp, Zea Mays
gtataaccatattacggcatatacccgcacacctcaatcaaatatcttacgccaccaccactataatacaccacggcacacccgcacatatgtgtccccatattacgcacaagacatcaaccgcaccagtgactctaacaggattaatcatactcctcattcgcatcgactatcacaatcgccgatcatatgcataaaacaaatacacttttcacgtagacacctatcgatgcactccccaacacataatccgcattttaaaaatttatcctca

SEQ ID NO: 48293 - DNA, 656 bp, Zea Mays
cgaggatccaggcatccggcccaatcaacatctgtgtagacgagcacaacagaggtcgtggatgggcgaaggagaccatgactaagtgtcccacgaaggtagcgcaggatacgcttgagtgccgagaggtgaacatctcgaggatcatgcatatgaagacacacttgctgaacaacataggagatatcaggctgggtgaaagtcaagtactgcaaagcgccgaccaggctacgatactgagtggggtcgctgacaatggtaccgatcatggcagagaccttagcatgactgtcgacaggagtactacacggcttacaatcggacataccagcacgctcaagaatatcgagagcatattgctggtgtgaaaggaagaggccctctgaatgttgctcaacaaccaaacctaagaaatgatggagagtactgatatccttcatgtagaatgccttctgaagagcagtgataatgcgacgtagaaggtcttggctggaagcagtgagaacaatgtcatccacataaagcagcaagtaagccatgtcaatcccatgatgatatataaacagcaaagtatccgacttggcttcgacaaaccccagagtgagtgagtagcaaagcaactataccaagcacgaggcgcctgctttagaccataa

SEQ ID NO: 48294 - DNA, 573 bp, Zea Mays
tgcatcgatgattggagtgacttcagtcggcgtttcatcaccaacttccagtctctctccgacaagccggcgcagccatgggacctcaaatccatcaggcgccagggcgatgaaacactctggtcgtacctcaagaggtttcataccatgagaaagcgtatccccgaggtcactgaggaagcagtgattgaggacttttaccggggatctaatgactcggccttcgtccgagccatattgcagaaagcaccgaccacctccgaacaactgtttcgagaggcgaacctctacatcaccgctgacgagcgggcccaggacctcatcgaaggaataaaacctgcaccaccgcaccacggcacgacacgaaccagcaacccgacatacattgggagaagaggcctcgtgaggaggtccacgccgccggaccacccgtcgctcgtgctcgaggggcaccccgtggaggcgagcaaacactggacgacatcctcaacgcccagtgcccgtaccataaggacatgcgccacaccttgcggaactgctaggacttcaagcactccgtcgggaatggccgac

SEQ ID NO: 48295 - DNA, 511 bp, Zea Mays
ggttaaatggattgatggagaagttgaagctttcgacgaagtattatcatcctgaggggattattatgcctagataggtgcccgaagagctgcttcaattttggagaaagttgggtgtaagcaggctaaggttgttgggtgatcaaaattcgacatattagttgatggtattaagaaacccttggatgcttcttctaacatggctaggagatttttcacgaggatctagagcagagagggcaaagagttggctggagatgctgctaaagaaaatctgaagaaggtttacactaatcattaacctcatagctcattcttagtattaggtacttacactagttttgcttcagtgggtggaggatgctgcaaagaaggctaaagctaataaggtgtcgcaaaaagttaccaagcacgaaggtcctagttttaaaccttgttttgagtttaaagtcatagtacttctgaatacttggtgagacttcagtaaagatccttcttgacaagagtatga

SEQ ID NO: 48296 - DNA, 396 bp, Zea Mays
gcttttgcaaggaagaccgccttctaaggtcgacgaggcacgagataccacccgagttacctcttgcccagcagaatcatgcagcataataccaccatctgggacctctgaacagatggttggaatgtcagcctcaggaggctatgataaaatatcttcgggaacaacctcttccagtgcttgatcaaagtctgatattgaaagcccttgaaggctgacgagtgccgacaaggcttgggagggaatatcgctgcccccgtcgctgcctctgtagtgacgactgttcttgcggatcagcggaatttcttcttcttcctcttcatcctcgtcaaacacaccgccagcagcctgagcatcatcacaaccttcaacattgacctcgggaatgacgtccac

SEQ ID NO: 48297 - DNA, 553 bp, Zea Mays
ggcagatgtccatgactcaaaatgtcccctcgtaagtaggggatagcttgttcatccctaacggttaaggatgtgcaaaagcatgagatgccctttgatgagtggttggtctctaacgtggcatagatggtagtggcatacagtgtgttggtagtctgttgcctagagaagaaatttccatcactgtataccaaggaagtccaaccccttagggcagatttgtcctacaaaaaactcagtgtatgctttgacacagggagagcccttagtgatttttgggggaagcttgactcaggccccataacaagaaagaacgatgcttttaatatagttcaaatgatgaacaggtgcgttaggactaagacaaatgggtgatctggaggatcaacacctcaagcaatacattagaaaacgaattgaaaacctactagaatatacaaaggtctaagacatgagatgaaaccaagccaaacatgaagatgataaagtaacaaggagtagaagggttttagcagatgtcgaaccaatgcattgtactactctatggggcgta

SEQ ID NO: 48298 - DNA, 285 bp, Zea Mays
gtttcctttcctacatttgatctgtcatatacatggttatgtattgcttaatttatatgtttgttggatggttgggcaattaatatcatcaggatgaactacccgacaactatctggtacgtaatcgagtagtatccgttatccgtttcttaccgcccagattattacccagtctcgtcctatatccatcccaaatcttaactaccagtatccagtcctatatccgagagaaatacattagagtagaatacatgatgaccatgtattcagctgtatccgtcccgt

SEQ ID NO: 48299 - DNA, 607 bp, Zea Mays
cacaacgtccggcgaacttctcggagagccgtgcttccatcaggcgcatttcctcgagcacctggcggttactggcgtcggtgtactccatcgctgcggctgtggcccgagtacgccgtggaccgttgccgctcggatccagaatgcctaaatctgataccagattgttagcacgtgtggaggagaggagtagcagaggcagggattggaggtagaagaagggtattggggagacggcggcggccaagacagccaacccccaggtactcgtattatctttctgttgtttgatgccctctctgtctcagcgttcccaggtttatacgccttattacaactcagcccaacaggcctacacaacccactccggcccaaatactttcacgctacgacgctttactcgttgtggacgcgcagcggcttcctcctcggactcgccctccacgtatttgtctgcacgaccgacgtcctggctgttggagctgacaccgcgccactcggtgaactaactcgccggtgggcactgccgccctgggggtcgcaccatcgcggtcatgaccaaaggaggaagaaactcggccagccgttcgatttagtagggacgcat

SEQ ID NO: 48300 - DNA, 555 bp, Zea Mays
gtggcaggtgccttctgaaggatagcccagacgaaggccgagtcattggatccgtggtagaaatcctcgatcacggctgcctccgtgacgtcagggatgtggttcctcattgcctgaaaatgcctgaggaacgagcggagggtctcgtcactttggcgcttgatggacttgaggtcctagggctgcgacggtttgtcagaaagggattgaaagtttgggacaaaccggtggctaaagtcgttccagtcgtcagtgtagtgtcgaggtatatgtcggagcgattgcaacgtgtcttgccctaggacaatgggcaggtacgatgtcatgacgtcttccatcgcccagcagcccgagcaacgttcttatagacgactagccagctgccagggtcttgcttgggtttgtacttgttgacattggagaccttgaagtttgacggtaaggagctggggcactggtggtagccaccaggacctgccggtcgttgagcttttgctgcctcctgttctcttgtgctctgtgccctccgaagatgacgttgacctccctatcaac

SEQ ID NO: 48301 - DNA, 485 bp, Zea Mays
gtatggggttattctaactttacaaacaaatgtacatatcttacaggttacatgaagctaaaaacctaggaaaattcttttccaagaagtcttgagtctcctaggtagcttcatctttagtatgctggttccattgtaccttatagaatttaagagtcctttttcaggtgatcctatccttctgatccaaaactcgaatgggatgttctaaataagttaaatctggttccaaggcaacatctaccacatcgatggtttgatcaggaacccgaaggcacttctttaattgagatacatggaacacattatgcactatggacaatgtttatggcagttgaagtcggtaggccactggtccacattgttcaagaatggggaacgggccaatatatcggggtgccagctttccttttaccccaaaacggtttacacccttcattggtgatactttcaggtacacatgatctttgacttgaaagaacaag

SEQ ID NO: 48302 - DNA, 612 bp, Zea Mays
aatgcgaacagtacacccattgggatcagcgtcatccaggtcacacccattgggttcagtagcaggcaggttgcacccactaggctcagtttcagcaaatgctggcactggcacttccttagcaacaggaacagaaggaccggcatcctgatccaagctagacacttagcgaagacgtctctttttctttctcccctcagcaggaaaagctggttggttagaacgcttcgggcgggcaccatcagtcctctgaatatccaaaactctactagcctctaggatgggcgctactaccgatgtctcagcaggggccgcgtcagaagagtctccagctagcatatccagcatggcacttacctctgcatcactcggattcaaaggcacctcaaagtgaacctgcttctcgtcgtcaggaattccttcaagtgaggcaaccaaagcactaacttcctcgggagagggtcgcactctaaggcccaaaccgctatcaccagcaggaggatttgacacgaaattgataaaggccttaaaaggaggtagattccaggccgagtatgcaacaggagcgccgatgttcgacaccttgcctctgagtatcatttcaagccggct

SEQ ID NO: 48303 - DNA, 533 bp, Zea Mays
gaagtttgtccttgtgttgcgatccttaaccaaaaaagaccatggattaaattcaaaaacacatcattgtcacgtgtgaatttatgaacagataaaatgtttttggtgatatttggaacgtgaagaacatcacgaagtgcaagtgggtgatcattagattcaattaaggaatgacccatatgtagaatttgcaaacatgcgccattgctgacttggaactgttctctgccattgtagcgttcacggacagtcagacggtcaagatcactggtgatgtgatccgtcgccccggtatcattataccagtttgtgtcaaccgagtacgaggtggaggcaacaacagccgaagggggatcttcattgtagtattcatcattcctgtaccagcaccaaactgctgtgtggtcggtcttgccacaaatttggcagatgggctaggacaaagaagtcatgttgcttctgtcgctggaacggggagcaccaccacgtccccgactacagcctcgaccaccacggccgcgaccatgattacc

SEQ ID NO: 48304 - DNA, 744 bp, Zea Mays
tgtaacaggcaaggtactgtcctgtagggtacacttgtaagaatacacctatgtgagtttgactgtgaggtcgcagtctatgagatgtgggtaatctcaaataaattcactaaaagacacgggagcatgaccataacgctccaatgagaggcatggctttaggtggcctagtatcagtgatgcctataggtgaaaccaacttacacaagactagcaattcaaggctttgtccattgcaaagtcatgaggaggtgaatcctgtaatgcaaggtgtagctcaacccgtatcgggtctgcactataaagctggtatatgaaagcgtagagattgagtcaattggacaccttggctttggtggggattgttggaattaggaccactagtttgtggcacaattcaataaggaagccaaggtggtgtgtagagatggcatggggatttagtcccatattgcccatctaggtaggcgagaaaaaacatatatgtgggagtgttccctactcttcacatgaaacaaataaagggctatggaggctgccacacgtgcgcgctcgctcgcgtttcgcgttatttatcgcgtgacttgtgacttgcgacgacgcacaatcgcgtcgtgacgtgttctaaacggaagtttaatttttccttttgtttatttggttatcaaatatcacacctagactaccatgtaaaccagaagtaatgggcacgcacgttatgtgcgagatctccgcgcggttgca

SEQ ID NO: 48305 - DNA, 742 bp, Zea Mays
gcggtagagttcaaattgaaggcatggtaagcataagtgactcaccaggacaccgtaacaaagggcgagaggtcgaaggggtcagacagagtagcgggtcgacgtgcaggcggtctgcggcggtgctcttcagagcaagcatacgttctggtgaaaggcttcggtcgcagttcgattgattgatactgggggcaataggaggctaacagcaagcaaaaacatggaacaatgaataggtactcacccggggacggctggccacggggggtttcttcgcggcggagcaagaacagaggagagggagatttgggaattatgtgggttttccggtgagctcgagtcaagtgcttagttgctgcggcacgggatgtggagaagaagcagcgtccgtggtcaatttatagcctaccggccggaatcggatgagaaccgcggacatttgattgcgcaggtgagctcgccgcgcggcggaacctggggatggcacggtggccgccgttcaaccggggcctgccacctcagggaggctttgacacgtctccggtaacctttgccgtggctgccgacgtcttacccgagccacggcgacgtccttatcgccggcgagccaatccttatccacggcgatgttactgaaaaccgatgaacagtgcgcccaattcagtaaatagcttgtctgacagaccaagttgaagcttgattttctcttaatttcaaatggcaacataagtcaagctctgca

SEQ ID NO: 48306 - DNA, 761 bp, Zea Mays
agtcaatggcctgtagtggatctatggagctggaaaaggttggcagattgtggctcataaactcacgatatttgtcttagggtggtggctggtgcggttgctgttgatacttattgaactaagcttgcataatggccattgcattgaccatctgctgtagtaactgtgcctagactatgaagaatgcttctgacccaatggatggaggatttacgggattcatctatgattccgaactaacccttgtccttctttgacgtatgtgtgcaagttgatcaacacctcctcctgtcatggtattgaccatctgagttagagatataaggtaagatagatttgcagatatgatagatagctaggtacaaaacacatggcttttagcttgagaattttgggtcacaatagctcaattaattaaagcacctatcattgctatactagacctatgttggtacattctagaatgtacccactatactaggtattattgtggatataaccccacactcaatcagagaagcgaatcaaccaagtttcataagaacaagcattcaatcgcattggtacctacaaaaatagtttttttctcctaggattaggatccatgttccttaaaacctcggtggaggattccaaggtgtgaagtcctttttgtctttagaatagaaaaggtaagagtagctagagtaaagctgcaaaagatgaggaaagatcaaggaaagtgtacaaatagtcagagtagcaaggaaagtaggctaagg

SEQ ID NO: 48307 - DNA, 523 bp, Zea Mays
caatgtttcagcaggagcggcgtcagaagaatcctcagctaacatatccagcatggcacttatctctgtgtcacttggattcaaaggcacctcaaaatgaacctgcctctcgtcgtcaggaatttctccgagtgaggcaatcaaaacactaacttctttgggagagggtcgcactctaaggcctaaactgctatcaccagcaggaggatttgacacgaaattggtaaaggcctgggaaggaggcagattccaggccgagtatgcaacaggagcaccgatgttagacaccttgcctctgagcatcatctcgagccggctcaccaagtccacagcaggaatttttctgttggttacccgggttgaatcagcctggccctcgatacagataggctggatacgctctgtctttcagcggctgaatgttcttgaaaacaaagtcagcgaccacagcttctgcagtcagacccctttctttcaacaatccaacctcagctagcagagcccctgcctcagccacctcctg

SEQ ID NO: 48308 - DNA, 533 bp, Zea Mays
ggcggggagccgagctccggcgagcgcatactggtcgaattactcaatgactggtgctctgcttcggtctaaacctaattccaaccttaatgagtgttccccccaactaatttcatcaaaggggctttaacacggtctgtccacgacgacagcgggtaaaacggacagtcaaccgtgttcccggcgatctaagatagcttaggtcaatcgagttggtcggggagtatcaggagcacacaagaacgctaaaacgggagggcagagggtatgagcggacctgagatgcgttggccacggcgaggtcacaaggcacggtgttcttggttgatttgggggaaatcccaaattggagctctttggtgaaggatctgaggtacgggtgggtgcgctagatgcctgaatatatagcgaagacgatggcgcactcaatttataggctccgggggcggtggcgtccaatttcacgaagagatgctggaggccggaggggaaaaaggttactggcgcgcaagcttagtggctttcaccgtggc

SEQ ID NO: 48309 - DNA, 428 bp, Zea Mays
cttggcctaagtctagtggtcaatccatagtgagggtctcatagttgggtgattctatgatcatgaaaccttcacctcccaaaccctcaaatatagagcatggagtaactttagtgttgtctcatcatcatcatagggaagctacaccttatttgcgcgcatcttgttgacacttgactagaaccgagagaacatataatcaatggtctctccaatcaattgcacaaaattttcatactctcgacagtaggtttcaaagcgtctggtttcacatgatcatttccctcatggaatttctccttggtagtccagatctcatgagacatacccaaatgtccaactctttcaaattcagggagtaagagacaagaaaacaaaacatttcgagtcggatctctatttgaagaggagtgatttgaacattctag

SEQ ID NO: 48310 - DNA, 1089 bp, Zea Mays
ttattagcccacaggccggttacactgattttttttttctctcgcaaagtcacacacacggctgacgacgttcctgaacagcacacacgtcagcacagtctcttttggcagcccatgacgccacggtgagctctgcatcaggtctcccttggcctttggctgagaccggtcctctgatagttgacctcctaacggaaagtagccgagagccttgtttgtcaaatagtgcactggcagccaccccacccctgctgtgcctggtgctgagttgaacgaagcaagtggcgagtggtttgtgtgtgcgctgcgcaccaccagcgttcatcactggctaagccacatgcagacattccctttggttctgttatgacatttcctttttcatcagcatcacactgagcacatactacatacaacttgcagggatttgttcttttttttttttgcacggcatggttgattggttggttgtacagcattagaattgcgtccctgatatattacctacacgcgtggcggaaaccactgcacacgcactgacgcacactggtgttccggatactttggatggtggggttcagctactacagagatgacgaagggcggcgaccactgctttttatttgcagggttggttcctgtgtgctggatggagggagcagagaccaaactaactaacctgcctttgccgtaaaagcctccaataattgagggggggcatccaatccaatccaatccaacccctcttttcattcttttggccagccaaagcccatgacgagaggagcccctgccccaccacacacacacgctatgtacgatggctgatgagccgatcgccgtcactgtcgccacactcacctgtttattaacctctgctactgagtaatggctgtccttgtcgtcctgtcctgtcctgccaatcaagctaagggtagagatgcatacttggccggatagcgccaccgccggtcgtcgtcggccggtggtgcgtacctggccgagctaggccagtcatggtgcggctagctaccttaccggcctatcgcgagtagatcggcatgcacacgagaccttatcctgcgtact

SEQ ID NO: 48311 - DNA, 812 bp, Zea Mays
tagaatggtgttgctaagtgtaagcactgccatcttcttaagactgcttgtgcattactcctgacatcctttgttcctcctcagttctaggctgaagttgtgtctaaaattatttaccttatgaacattcaacctttagttgctcttcatggtgccttttgagcatctctttggtcgaccatcttagtatagtcaccttcatgcttttggctatgttacctttgtccttcttcaacctcgtgagaggaccaagctcactacgcaatctattcattgtgttttccttggatatgactctgagcgtaagggatatcattgttgggaccctatcgctcaccgcatttgtgtgtctttggatgtgacctttgatcagtcatgtcctttctttactactgatttgtcctcttcttcctcttcctctgagtctgttgatttcctccgcttggttccacctcttccgaccaccttgtcttcaccaccctcccctgttactatttcatcacctccaccactatcaccttctccacctccaccatcgtctccaccacctccaccatcccctgtgtcacgtcctccaattcttttccactgcactcgacatccacgtccatgtcctctaccatcccctccgacatcatctagctcgtctccttttgtgcttggtgtgcttccttcgtggtatgaccttcgtgatcgacgtacgctttattgtctgactcgtcttggttttatcgcttctggttctattctctctaagcctgcttcctaccatgatgtgttttcacatcttgagtggcaattagttatggctg

SEQ ID NO: 48312 - DNA, 284 bp, Zea Mays
aaacggggcgcgcccgcgttggcagtcttgcagaagggtcctcggcttaacggctaaacagaaataggtccattcactattgcactaagtcactgacagattgcagataagccctcggtcttctattcctttacacgacacgtcctcgacggcgctccgcacggggagtccaatctctggcgagctagaccggccggaggggaccaagaccggcgctaatcttcggtttaccccggattctaccccagagaagtatttcccctaacttaatttctgaattgaag

SEQ ID NO: 48313 - DNA, 449 bp, Zea Mays
atttaaggttaacttcgtcagacgggttagcttcgtcaaactgtaaaaatccatcaaaatggccagagtgcggtcaactgcaagggtgtctcgtgagggggaagaatctgaggccactgaaacagcaccaatttcagaagtaatgaaacgatcaggtcttgttgtggctaacgaaggtacttctaatgtcgaagctgaacagactatgattgagggtgaagatgttgagagcgaagaagactacagtattctgatcccaacgaagcctagtcatctagattttgaaaaatctattgtgtctgaagacgacatgcctatgatgatgaaactaggctattttggagaagctgaaagcaaacttgttcgattcactggaaaagagactaccccagagccgaagaaatatgaagttgtggttttcaagcgcttcttcaaagcggggctgcgat

SEQ ID NO: 48314 - DNA, 308 bp, Zea Mays
atcatgctagtctattgaaggcggggaataatagagccctagcggcaatggatgagcttctggaggtactttcgcgtttggagacagatataggagttgacgagtcttgtggaactagtggtggtgatggcatgcatgtatgtgatgttttctattattattagtaacatagtattcgtccatgtacattaatgatgtataaaaaattaaaagcataggacgatggtgaagaaaatagaaacattgaaagagatggtgaatcaggtgaaaagaatggcaacaaattaacagtaaatattgatgcataa

SEQ ID NO: 48315 - DNA, 671 bp, Zea Mays
tttattcatcacacaagttcattacaagcatacagttgccacagatcacactacgcgcgagcgttttctaaggtgcttccgaactccctttctaaggtgtccccaaattctctgagaagatcgtcaaggctagccagggacatctcctcaacgtcagacaagctttctaaccttgagggaggtagtgttggcggggcttcctcttttcgttcagtctggcatccttggctcttggtccgcttccggattttcttagtgggggcgagcttctttaacttcttatcatagtccatcttcagggttcggtaggcttcacaagtgttggcatcttcaccttctgctatttcgagactttcttggagggacgccttttccttttttttaattccttgatttgttgctctaggctttccacccgggaatttaggtgggtgcagtgggagaaaaggtcgtcatagtggttgtcaagggtgtggagatatctggccatgtagactatggtggggtcatcctcagtaggatctcttccggacaaggcctgaagtcttttccttcaggtaggggtatttttgttgctaggtggaaagtaacaaaggggtgtctcggagacttccctgttgtagttttggcatagctggcggagggctttttgggcaacattttggcaagtg

SEQ ID NO: 48316 - DNA, 318 bp, Zea Mays
ggagattgcacaaggtgactggcattagttgctccgggtattccatctgtggcgttcctaggcccacatgttggggttcagtgtctttgtatgtgcccccttgggctataaaagggagggcacgtgacacagatagactcagactctcagctctcaatcttccacaacaattcaacacatagtggagtagggtattacgctccggcaacacgaaccactctaaatcctcgtgtgttcatgtgctcggtgatcgcttagtaagacaggcaaaacgcttaaggcccttcctcatcttaggatttagggcgggtgcattct

SEQ ID NO: 48317 - DNA, 404 bp, Zea Mays
gaagaccatgcagattgtcggtgagctggcgggattttcagagctcattttattggattcaggcaattcagtttcatttgtcagttccaccatagccaagcactgtccacgtattgttcccctatcaactcctttatgggtccaagtagcaaatggtactcaggtggcatgcgtttcataagtgcttgcagctgattggtctatctagggttaccatttcacctctaacctcaagatattggatattccaacttatgatatgattgtggggatggattggctttccactcatagtcctatggtagtgcattgggcagataagtggctatccatgtcaacaaatggcaattctaaaaaacttttcggtgtgcagacatcacagacccatagtgctttagtacaac

SEQ ID NO: 48318 - DNA, 580 bp, Zea Mays
ggagcggagaaccaagctctggcgaactcgtaccggccacgacacttaatgaccggtgctctaatttggctgagacctaattcaacacctaacaagcgtttcccctcaatcaattacacaatctgagctctaaatcgtcctgcccatggagacagtgcgaactatggatgaacaaacgtgtccccagcgatctagggcaatctagtttaattcaatgggttggggagcaaaagtggcaggtaagaatgctgaaacaagagagcagagggtttgatcggacctgaaacgagctagccaaggtgaagactctttcacggtggcggaaaatagatttggggaaactgagcaattcgtgggctcaggtgagtaattggaggcacgagcgggtggattggatgctggaatacctaatggagctgagggggctcaatttataggacacttgatcagtggctcatgaatttgaaggagacgtgcagcggccggagagggggaagagtactggcgcaagcgattggtggcatttatcgtggcgggctcaccagcgatgaccgggcgtgctagagcaaatcactacgac

SEQ ID NO: 48319 - DNA, 1423 bp, Zea Mays
gatgtaacacccctagtgttactgttactaaaacttgagcataacatcatgagcatcagcatttcatatgtgtgatacacctagaatgcattcactaggcaaaattttcaaacaagttgtattgttatggtattttgcaaataaaaccctagtgtagggtacttaaccttaaatatggttctgaggggtaaaacaacacccaaatggagaaaaccttaagcttaagaaaaatagtcataaaatgttactaagaagggacttacattacattcacacccttgaaataccaaaaaccctaaaaaggaccctagaaaaaccctaaacctaaaccctagggggctaagtgcaaaattagtgcacttttgattaaagtgcaaaaactatgaagctaaagcatcttaaatcatgtggttcacaatcatgaagatttgcatgctaaaccctgaattttggacctatttgcaaaaagaccttatttgagttctaaccctaagtctgaaattcagtgatattggctcaactttggagctctatatcttccaaactattgagaatttaccctaggtcaccacatcaatattatagacctatcaaaggtgaacaactttgcttaaggggttcaacatggttgtcatgaaaaatatgaagaaaaatgcacccaaagtcgggctgtcaggctgccttcagtctgaaaccagtctgacagtgtaaccgagccatctttggactaagattcaaccttgatctagtgagaatttggcttgggttgctaggacatgatggtagctggatcattgggctataacttcgctaaagagagatgatcatgttactacttaaaacagggagcaattctccctgcaaatcgctctgtcagctgtctgaaccaagctcaccatggtacagtataccccaaactgaatccgatcacgggattcatttcccctcgtcgccggtgatccttcgtcgtgtgtgttgattgatcgtcgcgattcgtgcaccacggtcgggggataactacggtgaggtaaaaatcttggcataggatcgactcgagctcggttgcggctaagcccgccgtacccccttgctcatcggtcgatcggataagagctcaccgccattggttgatcactgccgtgcgccgcgtgtgtaggctctgtaccatgtcgcaattagttatgttaagggatccagtgatcgccggaggaagcgccacggtgaaagtcacccatcccgagcaccagtatccctgtttccctccggccgccagcacaacctcgaaaaattggacaccaccgacgatgggaactataaattgccacctccgcccgctccgctaggtaactgcgcagccggtgaagcaatctgcaccttgaatcctcccctagaattcaccaatttcggatttccccaaatccgc

SEQ ID NO: 48320 - DNA, 940 bp, Zea Mays
ttcgggtaccttaagatatatctcagtggagcccactttacatgagcaaatagtcatggcacagattggtgacaagggtgttcaagtcattaaggaaatgatcaaacagaaggtggataaatacaaattcttccgtcaggacagcaaaggaattctatggtttgaagaccggttggtggttcctaaaaatttggaactcaggaagaaaatattggatgaagctcatctttccaaattttccatgcaccccggtagtaacaagatgtatcatgatctcatatctttgtattggtggactagaatgaagagggaaattgctaagtatgtctctgaatgagacacttgccaaagaatcaaggctagtcatttgaaggtagcaggcaccttacagccccttcccataccatcttggaaatgggaggatatctgcatggattttattgtgggattgcccaatacctcccggcaccacgattctgtttgggtcatcgtggataggttgaccaagacagctcatttcttgccagtacataccacccacagggcagaaaagtatgcagaaatttatattgaccagatagttcgattgcatggaataccaaggactattgtgtgagacagaggagcatcgttcgtatcacgtttctgggagcaactgcaagagtcacttgggacccatgtaataagaagctcagcataccatcctcaaacagatgatcagacataaagggtgaatcaggttttggaagacatgttgatggcatgtgtgctgcactatgggaagaattgggataagtgtctttccttggaagaattctcgtataacaacagctaccagtctagcctaaagatggcaccgttcgaggccttgtatgggagaaggtgtaggacaccgctaaattggtcacaagctagagagagggaaatatttggacctgac

SEQ ID NO: 48321 - DNA, 370 bp, Zea Mays
taccggccgattgaggctatggctgggttctccgagcggcggacatgaaatcggggctagtctgagtatttcccccaacctaattgcaactaggaccaactacatggctctggccacggtggccgtgagcatcgcggcaagacagccgtgttcccggcgatgggtggcggtctagttcaattaaaggggtcggggagcatcgcagatgcatgagaacgcttaaacaagggagcaggagacgggaactgaccggagtatggctggcgacggtgaagcttgtttcacggtggcggaaatcggatttgggggaaactccgaattcgcggaccttagcgaacgatcggggctaattcaaggtggctggttagct

SEQ ID NO: 48322 - DNA, 397 bp, Zea Mays
ggatactgaggttgttcaggtgattgttgatggaagaggagatgttgagcaggtcctggataacttggctgaaatggaggatgttagctcggatgtggaaaaacagatcagttggtcaagctctgagtatttcctgaacagagttgctatcaggccggctgctcttttgccaaacccatgcatcaaagtacacaagaagacatcttctccactctcatcgctggctgttccccgaagaagtcgtagagtggctggggttggagttgaatttatcatgcaggacctaggaagaagatcaatgaaaaaagctttggcaaccctgcacattatttcagaaactgagggcataaatcaggaggctatggatgcatacgccaaactgttttcccaacccctg

SEQ ID NO: 48323 - DNA, 485 bp, Zea Mays
acaatcgtgttcccggcgaccagaggacttctagttcaattacgtgggtcgacgagcatcaccagcatgcacagatgctagaacaggaacaaaaagggtatgagcagacctgtggagggctggccacggcagggtgtgattcacggcggcggagataaggaagaataccatcgcagtgactacgtgttccataccgtggcaactattccggtgatccacagggagctaaagtgaatcgtggcggtgcggtggcaaggcttggacacgtggcgggcaacggcgacggcataccagcggtgagattctaatccgaggggcggtgagaaaggggaggggtattgcggctagccggagtggcgcccagctcaccggcggcaaagatctttcaccccgcgacgctatccattcacccagggcacgaatcgggacgttggcagcacgaatcacggcggagggagtcgtcagcggtgaggacagtcgcgctg

SEQ ID NO: 48324 - DNA, 575 bp, Zea Mays
gagagaactgtgctaatgatgtagctaaacttctatctttctttacggcatgcaagaaatagaatccacaattcttttgtgattttcagctagacaaggatgaaaaaatagtgagtattttttggtcacatgcaagtatgcaggggaatatgtagattatggtgatgttgtgacctttgatacaacacccaagaccaatctatatgataagccactgggcatgtttattggaggtaacagccatctggaatgtactgtgtttggctttgtgttgttgggagatgagaccgttgaaacatttgaatgggctttcaatgcattcaaaacatgtatgggatgcgagggatcgagagttatgctgacaggtatgtggtatgcgaatttgttatgctaattcgtcatgaaattaaaattaaatgaatgtgttgtgatcgtttgcagatcaagatcctgcaatgccaattgctctgcgaaatgtatgtaatacccaagttgtaaaggataagaaatggaaattatttcctatatatgagttgcctctacatataaacacatgtgaacaccccatttaaaag

SEQ ID NO: 48325 - DNA, 330 bp, Zea Mays
tgggggccatggaaaggatgataaatgaacatctaccagtaataggaggtcgaaggctacatcatcgtgatccagaagaatttaactgcgaagaatacggagatgagaattctggtttcggccatgaattcgatcccttcggtggtggccatagaggttatggtgatggtcgccactctaatttcgataattttcatagaaggcgttgtgcacatggacgtcgagtaagatttgaagacgaggagtttgaagatcgtgatcgtgaggaaggatctgatgagaatccctttgcaaatgatggaatgtttggtcggcgtcatcatcaccgac

SEQ ID NO: 48326 - DNA, 756 bp, Zea Mays
cataaagtcaggctgtcagtcacccctgaagctgatttttgactgacagtgaactgggacaaactttgggagcgattttgagtaagatccagtggatgtttgattatggttgctacatcaaaatcaaagctggtttgtaggagatcaactttgttacagacggattagtaggttgtcacatgagaattggagaacaaagcgcttcaattcgctctgtcagaacaactgatgaagaacgcgatggtacagtatctgcaaatgatcacagatgcagtgaacgttgccgtcggtgaactccatgtcatgatcctcgttggcgttacgattcgtgcgctctggcgtgtggataacggtcgacggtgaaaatatcttgcgcgaggatgaacttggggcactgttttgccctgtcgtcgcacccacttgcactggcgatgtggctgtgcgaccatcgtcgtcgtgccgccgtctagctaggttgtcacacgccttaagtcatctcaccactcgtctcaagccgtgaagactcggcagtgaccatcgtagaccatgaaccagtgaactccacgttagcaaactctggtgactcttccgccttcccaccgcgagtgattttctgttcaaattcgtcctactcgcggccgcgcaatataaattgatacctcagcctgttccgctagattgttacgaagtcagaacaccaaccctcgcccttgattagccaccatagccagagaatttcgttctttccctaaatct

SEQ ID NO: 48327 - DNA, 285 bp, Zea Mays
caacactcaggatgtgcggtgcaccaataagtagtcatctacaggaaatcaagtgccaaggaaagatccataggcccaccacttagagggagcgtgggagaaagacctccggactactagggaccaccgatcaacaggagaataagggaactgtctaccctggaagcgcccgcccccggataaaccttgaggcactgagtgcggggtcaggcgaggcagagctaaagaggagggatgggcgaaccgaggggaagccacaggagtggattcttcgcctggcctgag

SEQ ID NO: 48328 - DNA, 495 bp, Zea Mays
gtcctatatgtatatgtctggctcttttatattttttggtcccctttggcctttatttgcctttgtccaaagctgccctttgtgccttcttgctatggtacccttctgctgctagggaagagggatgtgagagtagtagtagtatgctactttggaaaaagaaaaccaacatggaggtcagatctgggaaaaagagaagccttgtcaacatgggtatgtttgcttttgcttgaattgcttcgattgactttggccactgcatgaaccatggctgtttcattcttctatgccacctgctagctaggcttcaatgcaacaaccatgcgcacatgcatacatagagtactaagtttcatattaaactccctcctaatgttccgtaacgttatcgtgtctttggttgcatgattcctccaaagtcccctctcgtccgtccaattctgatggatagcgggccttatctcagtatttgaccctagaccaaacaacgttatc

SEQ ID NO: 48329 - DNA, 549 bp, Zea Mays
gtgatattgtataacatgttttttgcttgtgatgtgtagctatgaaggttggagatggtcgatggcgaaggcgaaggttaaataggttcgtgtcgatgaactagtagtggtgagggataactgtggagggttagaccgagggatcggagaagccaaaatactaactgtggtgtttgacgcttagggacatcgatgaggcaatggaggagcatactgtgttgaccaactgtgttgaccaagtcaagatgacatttcaccaactcaaatggaggcattgaagaatttgatgctcggtcgttgaacgactagcgatgacacatgttgtgatcatgagggaacatatcagatacgctactcataaggggtttgatggtttgggcctcaaaaccactaacaactattttggggattgggcttttaaaactcggctagagttccagcaggaactagaggtggtacgtggcggcatcgtgaaaattgtgtcaagatgaagtgaagtcaagaagatcaagtggtcgttagatgcactgacccaaagttagaccattt

SEQ ID NO: 48330 - DNA, 495 bp, Zea Mays
accaaatcagacctactccgagcattttccctaagttaattgcacggttggtgacctactccgccctgcccacgagaacagcgaaggctaaggacttttgctcgtgttcctggcaatgggtggcggcctaattcaattggacgggttggagagcatcaccagaatacagagacatgagaacaatgcgcgaattggatggtgccttaccagaacgggctggccacggtgaggttggtttcacggtggcggaaacttgatttggggagactccaaaattcgtgagctctggcgaacgattgctagcgatttttggtggctgggggggcgatgaccttgcggggctggcgggggcttcaatttatagggctcaatggtggtggccgggaatttcagtggggacacgcggcggtcggaggaagaagaagagtactggcgcagtggattcgtggctagcgccgtggcaatcactccggcgagccacagagagtcgcaaag

SEQ ID NO: 48331 - DNA, 294 bp, Zea Mays
agaagagttacgcagacaacaggcggagggaactccgatttgaggaaggagacttcgtctaccttaaggtttctccaatgcgtggtgtcaggaggttccaagtcaaaggaaagctagccccacgttttgtaggtccctatcccattattggcaaggtaggacccacagcataccgcctggaactaccagaatccatgtccgacatccacaatgtgttccacgtatcccagctccgcaaatgcctgcaagcgccagaaagtcacctcgaagaagagacagtgcagatccagaaag

SEQ ID NO: 48332 - DNA, 302 bp, Zea Mays
cgtcgtcaaggttatggttgggattattgtctcgacaatccctatgttgcaccgacgctttataaaagccttcagaagcccagcatcgacaacaagcacaataggcatcttgcacgagcgccatccatggaaccatcacctacacacgtaagcttacatatcataacaatcacaacaattaacaaaaacgaggaaaacaaattgaatactatcctcatgatattgttcctcggtgaggtttatctttgaggacccttcctttttggtcaagggaccttctttatctggatgcaattgaaaat

SEQ ID NO: 48333 - DNA, 1170 bp, Zea Mays
cgcaggtgaagtccccgacgacgatccaagctaggagccaagctccgacgaactagaccgcccggatgatgctacagctggagctcccaagcgacaggaaccagattagactccatccgcacctttccccccaatcaatttcgctagaggtggtctatcatgctctggccacggcgtcagtgcgggtgatcaagtggattaaggtgttccggatcaccgaaggctgggctggctaaattgaagctagggaaaggttcctgggttcaccagagctgacgcacacgctaagctttgggctaggcccgagcagaaaggtggggcgacagagagggtgtcatggcggtttttgacagtgcacgggtgcgttccggtgatgggcttcggccaaactccaaattgccgcatccaggagcaataagagatcaaagactaactaaaacagggagtaatttggtaattactgaccagaggagcgctggccacggatgtttcttcttggcggagctaagaacagaagagagagggaattggggctacgtgggttttccggtgagctcgagtcaagtgcttagtcgctgatgtgcggaatgtggtgacgaaacagcgcccgcactcaatttataggccgccggccgtagtcggatgaagatcggggatctctagatcgcgctggcgagcataccgcgcggcggattccggtgacagcgcggtgatcaccgtttaaccggagcctaccaccttagtgactcgctgacacatcgccgggaacttttaccgtggccgccgacgacctatccgagccacggcggcatccttatcgccggcgagaccgatccttatccacggcgtgatctttctgaaaaccgatgaacagtgcgccagattcagtaaagagcttatctgacagaccaggttggagctctattttctccaatttttatgtggtacctaagccaactttctgcatcaaagttacacacctataatccatcttcaactttgccacaacgcttaccatcaaatagtcactgaatcacattcaaaatcgagctcaaagttcaccccatcacactgttactgaaaattcagtctaggggttgcgtgatagcccgactttgagcttaattatttctggatttttcttaacaactgagctcacactcttaagca

SEQ ID NO: 48334 - DNA, 754 bp, Zea Mays
ggagcagacggcggtcccgtcaaggccatccaggtcggcgtggactcctcccagaccacccgcatcgcgggcaatctggaggagaaataggaactcgcgctcgtcgccttcctccaggcaaatgccgacgtgttcgcatgggaaccgtcgcagatgcctgggatccccagggaggtgattgagcaccatctgaagatccaccctgacgccaaatcggtgagtcagaagcctcacagacagtccgttgagcggcagaacttcatccgtgaggaggtccagaagttgctacacgctggcttcatcgaagaggttcatcatgcagtgtggctggccaacccagtcatcgttccaaaggcaaacgtgaagcttcagatgtgcatcgactacaccagccttaaaaaggcttgtcccaaggacccgtatccacttccacgcaaagatcaaatcgtggattctacctctgggtgcaacctcttgtccttcttagatgcttactctggtttccatgagatccagatgtctagggaagataggaagcataccgcttttgtaacagtggatgggctttactgctatgttgtcatgccttacggtctgaaaaacgccttgccgacatttatacgggcgatgagtaagacctttggggacctgattagggacatgatagagatatacgtcgatgacatcatggtcaagactaagagagggtcgactctagtggaagacttgaccctggtctttgacaagctgcggg

SEQ ID NO: 48335 - DNA, 405 bp, Zea Mays
tgcaaatagaaccctagagtggggaacttaaccctagattgggtgtaatagaaccaacaaggcttaaacaagtaaaaacttcaaaatccaattgaaaaaagtcataaagtgtctccacggatgaactcaagtgggatccaaaccctaagagtgcaagaaaccctaattggaaccttggaaaaccctaaacctaaaccctcgggggctaagtgcaaaattagcacacctttggactaaagtgcaaaaaccatcaaagtatggtgttttaagtcatatggttcacaagtatgaagatttgcaacctaaaccctaagttttggacctatttgcaaaaaggccctatttgagttctaaggttaagtctgaaaccagtgatgttagccccactttgaagccctatatctc

SEQ ID NO: 48336 - DNA, 487 bp, Zea Mays
gttgcccgaggcagaagacacttctttccagttcgattgctcaagggataaagggcagtgaagtcgaggggagagggtgtaccttttgagacgggatgcggaacggcgctcagggtgtttttcctcagaggggacatggtcatttaatgcgtctggacgtcttgcctgtcagcaaaccgttcgtggcacacgtgcgtgtgggattcgaaacaaccgtcgcccaaccattttcgaatcacaccttggtggctccgtccgtccaataaactaacagggaggggggcttcagaccattacctttgcttagccctttgccttctaatgtcgttttcgccttctgctcaaagagcccttcgtcttcctctcaccctttcgtccgtctcgatggtggaaaagatcactgtccttcctccccgcgacccatggcccgtgtcctccatcaccgatggggatctagaggcactgattgatgctggcctgctccggc

SEQ ID NO: 48337 - DNA, 740 bp, Zea Mays
ttagaatggacgaatatgtttgaaaaacaaaacatcttgcttgggattattagttactcttcatgcagtagcactacagttttgtcacgactatggctgtgcagtagaccagtactaagggtctaacagactaacaagtgtaaaatgcccagctgtatgtgttttgttagcatctgtgcttgagtgcttctaagtttgcatgggatgctgcacaatctgttgatgttgttggaatccacaagcatctgaaggggtattcagattattctttcattctgataacgcagaggagggtgctgttgtggttgctggaagcctgaaaccattgaactgattgggacgcactggcttttaattattataggtttttgatgtgcccttgctactgtgtcttcactgatttgtttcatttgtcttgacaatacacttttttctttccacctgtctggatgctttttcctgtgtcaggaatgtgttatttctgtctaatgctgtatgcctcaaaatatagcacatcatctagccactactggtgatgttggcaatgctgctggtaaaagaatggcagtacataggagtacaaaatggaaaaatgccagcacatgatatactgcatttgggtttatgcttgtttgaggggtaatcctgaatcaaataaagatatactgcaacttttggtgtgtccttgattggaacccagagtctaggcataggggccattgtacagtgtagtagtcctc

SEQ ID NO: 48338 - DNA, 638 bp, Zea Mays
gtccaagctaaaaggttcatgcgctaattcacatcacatgctaagcccacaataagtgtgtcgtaaggactactctagagaagcaccccaacaatacacgatttcactatagttgctctttgtaaacctctcatggggaatgagcataaaagcatctctcacagtgatgatcgaagctgacaacaataacaaaagtcgttcaactatcctctactaccaccaagtcatctggtggtggaaaccaccaagagtaataagaatactatagcttaatatgatcattagcaccagcaaatgcaacaacttaatgtaaatcatgagagaccacttccaaactcactttgaatcaatatcacgaaatatgatggggaaatgttttttcttaggcttactagggtgcatgacaagttggaaagccagaattatctctaagtccaaacaagatctacttggcatgctctgccctcattgtctagatgttgtctgacatatctacataggacaatttggcatagttagaggccttcagttctaagaccaataacaatcacaatagaggaggcgagagtatcctatttagaagtcgttgatctcgatcataccaacattcatacaccgagttggagacttgcctaacg

SEQ ID NO: 48339 - DNA, 439 bp, Zea Mays
tgtatcttaatgttgtgtatttaatgttgcttccatgcgcagggtaccacatctagtcggtagaggctagagcagctcatctcacctctttcggaccaccaatagccgtcaggtcacttagttgtagatcaggtggcagatgacaagactaatgaggtggtagatgatgaggacaatcagatgatagcagatgaggtagaggttgaggcgacaacagatgagaaggaggcagatgaattgacagtcgcagccactgccagcattaggtattttattcttaattaacacctttactattaatttcattttcaaataacaagtttcatacaagtttcatttgcataggtttcttcagtacctaacatttaagcctcggaaggagttcgagcaacgacacataacaaggtagaaggggaccaggtgttgggaagaggtggtc

SEQ ID NO: 48340 - DNA, 385 bp, Zea Mays
gcggccgctgtcggaggtggtcgaccccacgctgctcggcgaggtgcacgccaagaagcaggtcctggccgtcttccacgtcgcgctcgggtgcacggagcccgaccccgagatgcgcccgcgcatgcgcgccgtcgccgagagcctcgaccggatcggctgacttccagcgcgacggcgtccggccggccgccggttactgatcatcaactacgtaggtgcaatccaacgcataaaagagactcgcagtcctgttcatgtagattagcgcagttaagcattgtggatttcagagacggtaaacgcaggtaaaaacaatcatcatccgctccatctgtgaatgacgaaggtgaatcactcgacgtagcaggctataggctagcag

SEQ ID NO: 48341 - DNA, 1012 bp, Zea Mays
gtagtgcgagatatggctaaagacagtccctgatgtctgtgttctctgctgtgcagagctagcgcttctatcaaatgctcctttacgtcagtttttttcttgaattcaaattaaagttttgcattactgactcacatcctctaccgccgctccgattctcgctatggcaacaacaaaaaaaactaaaaacacacagctttcaactatactctggtcgatgaatgcaagtattcagatcagacatcactgagttcttcacacattttaaaaaaaaaaatagatgctaaattttcagatttccagtcaacgtactagctaggttcacaaccaaacattcaatcattttgcgtattattcaactttcttcttcccctaccaaatcattgggttcatcatgggtcacgctaacctatacttctcgagccgttctttataactcttagaatccattgggtagggatctattgatatgcaaaattaaaacaaaggattgcagtgtccctatctacagtcggtcaggccaggtcagtgaggctttctccaatatatcccctgtctcattctctatttcaaactccactctgcaaatactgtcaaacggtgtcatctacagttccacgtcctctgttttacagagtcagctggagacgatctgaagccggctagacaacctttaggatccggtcatgtaggctttatagtgatgttgttgcaatcaagcagcgtctgaacaaccggcacacatggagtcaaaagacacaccagtgctgcgattgtttctttttgaatgcggctccaaccatctctacgtgctagtggcgatcgggttttagaagtgtcacgttgcttgacctgtcaaccaaggacggtatgcgatgatcggtaaattgctctatagatacataacaacaataaaacatcaaaatttggcctaatcacgcggattggaccactagtcagcccccttgagttaattgtccttttttactagtcacctaaaataagtaaataa

SEQ ID NO: 48342 - DNA, 582 bp, Zea Mays
ctaaactataaaacatcagcagactcagaccgtgcttgcctaggaccgcgggttgacatcactcttttgcgggggttcttacgcaaaatgacaaccgcgaaagggtacagtcggattaggaccgtccgatcaggagcggtcggatcagattagatctaagtcttcatagaatgggtacgcgctcagaaccgtaggatctaagatctagggcacacatttctcggatcgaaggagtatgctaccgatgatctcgcctgcccaacatctatcccacggttcaaaacacttcacaactctctctgatcctggccgctcatccagagatcaacgacacagggtcgtcttcctccctgagttccaagctacggccgtagtgcaaatccggcgagcggtgagcaagctgtcctcgaccacggtaaggagtacgcactaatctagcgcgatagaggaacgatggctaattacaagctcgcaatcataccggtgtcagacacgtgcgcagagccgtccacagacgatcggtgcgacggtgctcccagggtcggcaaggtcgatgcgtcggcaccccaacacggcgatgcc

SEQ ID NO: 48343 - DNA, 996 bp, Zea Mays
ccggtgcagtccgtcgggagtagacgatattatcgaaccgtcgtagagacggaccagcaggggcatgatcagcggtcggcgtatgtcttggctgggtcgtgtgcgcaggtgatgaagatgacgtagagcagccctgctaggctgaagaggacccaggaacagcgacggcgttgggcgcctgtcctagagaactccctggtgcctggactatacgacactcgggtgctgttgcaggcgctgtagagcacccagacgatgtgggaggtgtgcctagcataggtggtagaggggcaggcgtggccgcacgtggcagtgcggtggtctccgaaaatcctacaggtatagaaaaacgtgctattccaattggagcaggcatgatagggttagtgtcgagtaaaaattcgaaagcctcggcggaaagaggtgaaggatgagtggcaaagggaaaggaagtctcatcgaaaatgacatggcaagaaatgatgacccggttggaatgaaggtctagacaatgataccctttgtgatcaaactcgcggccattgtcgcactggattccttggatggtggtgccaaacatagtatgcacaaaggagaaaaaataagtgagggtagaaaaagtgtgggatttaagtcgtaaagggaatgtccacaaataatgtgagcaatcatcaagaatgactaaataatatttgaacctagaaatgcttgggacgggtgaggtccaaaggtcacaatggattaactgaaaatttcgtgtggcacgtgatgaagacacatgaaatggaagacgggtgtggccacctaactaacacgcatgacataaaggatcactagcagttttattacatgaaatcccggaatctgctagtttggatagggcttcatgaccggggtgcccgaggcgctgatgccaaagtgacgaggatgtggtggcatggaaggtggaggtcggcagccgtagaggatagagcgggtcggagctgacacagcgga

SEQ ID NO: 48344 - DNA, 878 bp, Zea Mays
attattcttctccttggcatcccatgtctaaacacctttttcccaaaggtctttgagctcatcaatcagaggctacaaatatacatcaatattgtttcgtggagagtttttaccgggtaacaaaattgacaacatccagaaaggttgtttcaaacacaaccaaggtggcaagttgtaagggattaaaatgacaggccatatagtgtacgcaacattgaccatcccaaatggattgaagcagacccaaccgaatgttacgaggatcagaagcaaaatctttgcatatgttatctacccgcttccatgccttagagtcagcagggtgcctcattttgttatcttggactaagccctccttgtgccaacacatatattcagatgtggtcggatccatatacaaccattaatatcgaggaataactgggcaatatcttaggattttctgcggggcacgctagttggttgcctcctcctgatgcctagaaaccgttagttgcccgcgagtataaaatacccaatataaacttggccaaaaaataaacatgggtacttggcccagcccaaaacaaataaaaccctagctatataatttctttctactctagaacgacatagacagtcacgcacaatccacatatagtcatactcctgctcatcctggtcgtatcctcgtccaatcaattatgtaagtatagtttccaagtagattttatagttatttcttgtgtagctatataattagatattttttctataaatctgagcacaatcctagccatgtagtttgttttctgtagcacaatatattgttagaattcaaataatgtgatgcttaattatgacacatggtttatttaaatttgatgtttagtagctag

SEQ ID NO: 48345 - DNA, 640 bp, Zea Mays
gcacgagatgctgctcgggataactctaaccccacatctggaatgtcagtgcaaacatccatcataccaccatctgttggcttggacagcagatcttcaggaaccatatcctcgagagcttgatcaaaatttgctatggacaactcttgtagaccaacgagagcaaacaaagcaagagaaggaacatcactactctccccactgactaggtagcgccgactgtttttccgaattaaggggatttcctcctcttcttcctcatcctcgtcaataatatgaacaacacacccattgtggtcagctctggccagatcacacccattgggtttagcatcatcaaggtcacacccattagggtcagcgtcagcagggtcacacccattgggatcagctctagtaaaaagttccactagcacttcctcagcagcaggagtagaagagtcggatcctgattcaaacatgacactcgctgaagcctcgtctttttcttcttcttcccctcggcaggagcagttggatgactggccaggcgaaggcgctttgggcgagcaccatcagatttttgagcatataaggttttttcgggctcagggatagttgcaacagctatggtttcagcagggacggagtcagaagaatc

SEQ ID NO: 48346 - DNA, 1078 bp, Zea Mays
cggtgacgacgacaatgactttatgccagtattgaagaagcgtaaccttgatagcagtcctccaaaaatgatgaagaagatcgttacaaagcggatgaaagcagtggacccccccgataggttagtatttatgttcaagccaatatatcattttctgcgtgaaaatatgttgtacgctgaaacaatgtctattaaaaatcgagttgtgattatgcagatgtaaatgtttatgttattgttatctcattatagaggtataacatattcattgttacatttttacatcagaggcttaatgttagatgcaatccacaagatgttatagtaagcattcagattttaaatgacagacaacgtcaagctattgcacggaaggggttctccagtatacttgatatgagagttgatgcgcttggcagtagatctcatttatcttggctgatcaaaaagcttgatcataatgatatgacaattcgagccggcccagggaaggagctgaaaattacaaaggacacggtgcaccttatactgggggttaccaaatgccggtggtggaaagccattaggcattgatgaagttgttgctgcaaataatttaagggctgagcttggtttatccaaagaagaattcggtgttgcagctctacaagatcgattaaggaaaggatttgacgatgatctaagcatcagatctttctttctgatactgttcaataggttgttgttccctactgcaagctggggaataactaaccaagaggttcttttgactgaagaaatggatcgtttccacgagatggactggtgacagctcatattcaatgacttatgccaagcagccaagaagtggcatactagaagcattaccaatgtttctacaaccatttacggatgctccatcgtcattcttgtaagcatatcacgtttttttgtttgttttatgtagccaaatttatgtatgcaaatatcatttacattagattatgatctcttatgtgtcaaaaaacgattcatgttatgcagagttacataatatattttgttggctttgtagctgtactatctggatcatcttcat

SEQ ID NO: 48347 - DNA, 1164 bp, Zea Mays
ggccgtgcgggtccagctctggggccggtcgtccggcgcccagccggggcggcacagcagcgagaacctgagctcgaccaccacgaccttgccgtcgtcgttgtcgtcggggccgccgccgacggtgtcgtcgtcgtccagcttgaggaagagggagacgtggcccgcggtgtcccggcagtcgccgttggggaagaagaggatcttccatgcgcggccagccacctcgaacctgcaggagtcgatgctcctgcccttgccgtacatggccttgatccgcttgtagccgtcgatcttgaacatgtggcacttggtgccggccgcggtggccacggcggtggacacgatcacgtcctctgctctcgccgtcgacgacatgcacctggtgctgctggcggcatcggcggtggctacgatcatctccgttgctcccgttgacattgctagatcggaaagcgagctgtacatgtgggaggagatggattgcctatgtattgttgatcgatcgatggatggtatggttcgttcgaataggatactgctgtttatatagagagcaagcaggcccgccggcggcgcgcgtcttcacgctcatgaggcctggcgggcgggggttggtaacagatgcactacgctacgtctgatcagaggataagtttgacggagtttattgcaggcatgcaatcgctagtaacaaacggacgccaggttgttacattacatgcacggaatcgccagggacaaatggaggcatggttatgcacgtacgtttagatgatcaaaacgaccttcaatctaatactccagtccacaaatatccacactgctttcagatcgcactctcatgcatgcaccacctagtcattaggatcgagtttccagacccgtttcttgtggcattaaacaacaaatcttgccaaaatgtttctaatagtctcattaaataccgttccgtccccaaaaaagaagcacacaaactcacgttattaaaaaaatcaacactataaagcatactgtatatattattttatcatagcaaataaatatcattatatttaattcatactagttgtcttactaaacatgttgcagattaagagatgctagaaatatttttgaaatcagttggcttttaaagtgagatatgcatgcatgtattacact

SEQ ID NO: 48348 - DNA, 572 bp, Zea Mays
aagaggcgatcctgagggcccaattgagtggatcagcagcgaagccgaagcttttgaggaaattttgagtgaccgtggggacgtctgtgccttctctggtgcgaggggaattgcagctattttggagaagtcaggttgtgagcatgttaaaaccttggctcaagctgaagctgccctctgcattgatgatacgaaggacccctcggccgaagcaagcttaataggtggaaaacattttactgacatatgggaaaatggcggtcgaggaatggcccatgaaataataaagaaaaacaaaaaagatattcatgacactcgagagtcaataaaagcagctgaaaaggttgcggagctcgagagacgaataggtattacttaatggtttttaactttgttgtttatttttgtgactttgaattgatttacgttttctaccgcagctgaactatctcctcccccagagcccttcgagtcactggccgacccagaggcaaaggaaacaacaagaattattaacatggtcgaaactattgtagacgaagtcgtacccaactgctgaccaaagctgcata

SEQ ID NO: 48349 - DNA, 313 bp, Zea Mays
tatccgcgcagaagtcgcctaagggtgcagccggactaagcacaacaagtgcgcaaaaatccgaagactatccgcgcagaagtcgccgaaaggtgcagccggactaagcacaagcacgcaaaaatccgaagcctatcgcagagacttcgcgcaagagccgcctaaaggcgcagccgacccagtacaacaaaagcagaaacgacaccaagaccaattataatcatgctggcacagcataaccaatcacaccagacaaagtacacagccctcgcaggcacaggcacgcgagggcacacaactccattttacaagc

SEQ ID NO: 48350 - DNA, 617 bp, Zea Mays
cttaataattttgatttgatatattgtgatctttggacatctcctattgttagtgtgtctgggtacaaatactattttgttattttggatgattgttcccattacatttggacttttcccctccgcaaaaaatctgagatgttttgtactctttctaatttttttgtgtacacactcaatttagcaccaccataaagagcgtccattgcgataatggccgtgaatttgataattctccgtcccgcacgttctttctctcccacggtattgcacttcgcatgtcatgtccatacacttcccagcaaaatggaaaggccgaacgctctctccgcacacttaacaatattttgtgttctattcttttccaggtgagtcttcctctagtttactgggtcgagacccttcataccgccacctacctagttaactggctccccacaaaaacccttgccttctcgacgccctacacccacctctattccacccaaccttcctacgaccatctcaaagtttttgggtgtgctttccactagtacaaaaaggctcaaagcctgcggcacccatatatttttacaggcggatccggttatccaccgactgtgctatttttagtggcg

SEQ ID NO: 48351 - DNA, 300 bp, Zea Mays
aagggttagaggaagaacctccactagacacaagggccatggtgggtgcactacggttttcaattttggccttcgtctagtggtcaatcttggtagacttgagcttgctgaaaagcttatccatgacgagggcctcatagttgtgtgattctatgatcgctgagaccttcacctctaaaaccctctaatctagagcatgtagtaacttgagtgctctctcgcgatcatcatagggcaactacaccttgtttgtactaatggtttgtccaatcaactgcactgagttctcatactctcgac

SEQ ID NO: 48352 - DNA, 1273 bp, Zea Mays
attttctgggaactctcaaagtccagaagaaaaataaaaaggaaaacatgctacaggattgggctgaaactggcctgggtcggcccatctacaggcagaagcgcgcacgcccgcgtccgcggtgctgactttgcgaaaagaccctcgccgttttgaataacctgaagcggggttgccgcactattccccgagtcactgacagtttacaaaaacatcctcctagttctatttcttcaccgcccgaagtccacgacggcgaacagcgcagggccgagctccggtgagcctgtaccggccggattacttgatgacaggtgctctactttagttgaaaccaaattcaaggcctaacgatcgtttcctctcaactaatttcacgaacgacgctctaaccaactctgtccacggtgaccgtatggtgaacagctaaaccaacgcgttcccgacgatctatggtaacttagcttaattgaataggtcgaggagtactaggggcacacgagaacactaaaacgagagggcagagggtatgagcggacctgagatgagcagaccacgacgaggcctctttctcggtggcggaaagcaggtttgggggaaatgagaaattagcgagctctagtggatgattcgaggcacgatttgcttcactggttgcacacctacctagcggagcaggcggggtcggcaatttataggctcccacaacgatggccggtgaatttgagagagacgcgcggcggccggagaaagaagaaggttactggcgctcgaggttagtggctttcaccgtggcagccctccagcgatcaccgggcatgcacgatgtgattcacagcgacatggtcaagtgctttagtacgtggcgcacgacggtaagtggccaatagcggcgaggtctatccgactgatcgacgagcaagtggatacgacgagcttagctgtgaccgagctcgtgtcgattaggtgccaagatctttactcgcccacggttatccgtaagtcacagcgcacgaatcacagcggacggcgtgaaacgcggcgcgacggtcaccggcggcaaagtctctgagctggcgatccaatccggtcactataccatcgcgaagttcattcagtcggcctgatagaccaagtttggggcgaattttctcccaattttccatggcaactaaactaatgctctgcaacaaagttgtagcctaatgattcagctacaaacttactatagcaaccatagccaaactctcacaagatcatggttgaattccag

SEQ ID NO: 48353 - DNA, 497 bp, Zea Mays
aataattattacaaatcggtgttcagtacataaataaaaggtattgctaagataagaatccttctccccctttttggaaacaagaaccaaaaaaggagagagccaccaatcaaaagatcaccacgaaggcggaggatgatgcggagcaaagaagtgatgcgccatgtgagaggcaaagtgttcttccccagactgatctgggggaggaacacttcctgaaggatcctggggcggaggatgagacgaggattaacccggatccccttggtagggaggcggggcaaaatgctcacgatcatcaaagtatgcttcttctttttcttcatcgtctgctgacataaaaggcaccccgtaggcctgctggtgccactcattgatttctggaggaggcggatggagaggcacgtcaggcgagcgaggggcaaagggcatacccatagtggaagcttgacgacgaagattgtcgtcagtctcccgctgacgccttgccagctcat

SEQ ID NO: 48354 - DNA, 415 bp, Zea Mays
tctcgatgtcctctatggtggtccggaaaaatctagatgagggagccgaagacgtggaaagagatgagaggttagagctaatatatgacaccaacaatgagtaggaggaggaaacactcggggtagttgcatggttggttgtgcatgcacgagtgcttatcttatctagttgttaggcatgacatggcggagaaaatcaaatctacacgcttcgcgcgtgacacacgacgcatgaaactcatgctttaaaggagtagagaaataatgtcgatatctctaccacaagttttaaatcaacctaggtttgattcctatcagctaagctatgaaagtaaaacacataatctaagtacatgatatgaatgaagaagcttaattgatatgcaaacttcaatcaccaacttcgattttttat

SEQ ID NO: 48355 - DNA, 439 bp, Zea Mays
gagattatgcttgggttacataagaaatttggagaaaatttgactccaagttgacctgtcaggctgtcttaggtctgaaatcagactgacagtggcctagaactaggtttgaaagccattttgagctagatctattgctcgtttggtggttgttgctataacaaaattgcagctggtatgaagggctgcaagtttactactggcgaattagcaagttcttatatagaaatttgtgttctggacgctacaagttgggttgtcaggagctctgaatcgcagttccgatggtacagtgtcccgatcaggtcgccagctctgtccctcgccgctgacgagccgcgcgcggattcgtgctttcaccgccgtgattcatgctcggatcagttggatagcgcttggggttgagtaaatatcatcgccgtgggtatactccggccac

SEQ ID NO: 48356 - DNA, 604 bp, Zea Mays
tggccgcatagcgctcatgacctacgagccttcggactgtgacacattaatggtccacgcgtccctcggcctgtggcacacttatggcctatcggactagacctatgtgcgcagccttcccatagggcactacatgacgagctgcatcgagcgccaggctacggaggccaggggtcggcgtagctagaatgatgaagtctgggaccatcattgcccccatgtcatccgccacaataaatatgagacaacgaggcaaccacggaccccacgagtacgcagggcctcacccggggtaaaacgttgtttttacccttgccgtacgactccttctcagggaagccatggctggtagacccatctcccagcctataaaagggagaggtcggcctctagacaaggggatcgaaaggagagagctgttggacacaaccggacacctttagacgaagacgaacccacaaggacgaacaggaggatgagaagcgccaacgaggacctggaggctggagccccgccaagccaagacttagctagggctccaccttgcagcttctcagctccaccccgataagagacctagaagcctctcctccctctctcaacc

SEQ ID NO: 48357 - DNA, 418 bp, Zea Mays
ggctgcagtggtgtaagggctggaaggtacgtggtggaggaaggagtgacgaggaaggggaagaagtgctccccctagtccgtcgagaacgacgaagtaaagctggtggcgacaagtcaggcctagcttctgtggggacaatggatatctgaggcctgataatttctgcaattgacagtgtgctggaagacactattcctgaagatcttttgcttaagttgtctgaaatcagggtcgctgacgtccgtgtagagtgcccggacgatgtgccctctgctggctttctggtcgggccggaggtaagcgtgccagtctgctagggctcttcaacccctgtgggtgctttagcccttgagggtgctccatcccccaaggatccttcgattggctacctctctactgcttcgatggatgttca

SEQ ID NO: 48358 - DNA, 571 bp, Zea Mays
tatgtaatccccatgggcgactctgcaaagccaacaaaattaaattacctctcgtcgtttgccaggcaggctgacgggagttaatttaattaatttccctggatagtttgatcgacacagattacttaacttcaatccgtttggtcaaaagccggcggaaatatttcagattattgttgtgtagtatcttttgcatagttgtccagatttaaaaccgacactagtctcaataccggttttaaatcaatcggaataaaggttgttacgccagagccccattccccaatagtgtgagctagctccgagctctccatgaaccgaggtaaattaaaccatatatcagatcgtgtgcaatacgatataatttcatcgtcaagaactgtgcatctacctagatattattgttgcgtagaattagagtggtccaatgactccaaaggtaagcactgtacatgtgacctatatggatagctccatttctccacggcaccactggcaaaatttggtgtttcctatgagcatcattaacaggctccacatattcgtctggatttttggcatgtgcctttgc

SEQ ID NO: 48359 - DNA, 350 bp, Zea Mays
aagggtgaaggccaaagaagatcaacctcgttagggaaggagagaagtcaaaatcaaccttcagatgcattaccacccaacatgaagttcttcctcaccacaaacttttttcacctctagctattcatgccctaacctatccatcttttatcccacataataagtagttggataactatgctctcctaatcacccaccattgactataaaaaatgagactctagatttttttgaaccaattatagactaaaagttgaactacaaaccaatccttctttatcctttttcttacaaatctcgaggatgagatttctgttaagggggataggatttgtaagacctaaaaattg

SEQ ID NO: 48360 - DNA, 632 bp, Zea Mays
gtggaaactccatcaacaaaatcctatggtcatagacagatgagcagaagaaagataattcacaagtacaaacgatatagagcaaaagaccaactcacttgaagactggaaagaaacagtggaagacttagggcaggaggagcaggagcatggcttgacaagggaagatcagcgggaacaatctggagagcaccactcagggtaacctcagccccaccagcagacagcagtctccttgcgtctacttctgaagctgaaggcccttcaaccacctccatgggagtcagataactcggactagtgtctttgcatgggagactgccctctaaggtcgatgatgcacgagacaccactcgggttacctcttgcccggtagaaccaagcaatggaagctcaccatctaggacctctgaacagacggctggggtatcatcttcaggaggctccgatagtatgtcttcaggaatgacttcttccagtgcttgatcaaaatctgatattgaaagcccctgaagactaacaagtgccgacagagctggagagggaatatcgatgccccccttgctgcctttgtagaaacgattgttcttgtggatcaatgggatttcttcttcttcctcctcttcatcctc

SEQ ID NO: 48361 - DNA, 328 bp, Zea Mays
atcgccctagcctcgtgcctgccttgcctagacgaacatcaactcccctcgtgatctccctcaatgacagcgatgttggtggctgcacaggagctccacagcccacgtggagccgatgtgagccccgtggccacgacgacgactttgggtggccaactaggctacctgtggcacaacagctaacgtaacctgcctgctgcgctccctagattgtccgtcttcgagcgtgatggatagacaaaggatgtggatctgcaatggagcggtccaacatcagcgtgggaacatggctagatatggatgcggtggagagggcaccaccatcatg

SEQ ID NO: 48362 - DNA, 1036 bp, Zea Mays
gttcaattgtagaaaagggtaggggctaaactgcatactatccgggttgaaggggtatccatgtacgagggccgatgataaatctgtggtcagaattagattctcattgtaacgaaccataacgctataacgaccgtcagatcaaggtcagactatccggatcacaggcgcggagggactcgaccagagttgcacatcaaccaatctacgaccctgatcgggtcggatcaacgcggcaatccggttctaatccacaccgtctatcaccggatcaatgacttgacactaatcccccaacatccgcctagatacctaatcttaaccgtctctccacgaatcaacgatcgtgaatccgcgacccccatcctgcacgactctggcagcgctgtcaagtctgcagcggcggagccttcactggcgacatcgggttctaagtgccagggctctataccccaaattaatccgcccaacgcaacaccccctaaccctagatctggtacgccccgcatatggtatcagatagtgctccacggacctcggtcacggcgagtagctgcgccacggcgcaatccagcgctggtgagcaattcacagctgataaggcgcttatacgctataacacttgatggtacatcgcatggagaagcaggaaggggcagtgggagatcttcatcggtggtgacgccgcgaattgatcgacccgcggtgtggggcggaaacacgatagagactcccgccaatgtgtaattcgccgtgagcagggcatctccgatccctggcgacctccgctctagctactgcggcttcctggtgacctccccagcgtgtaaccggatcaaatcggtggcgagccgtgggctgcgtgtgatggctctcaattcgcagcgcgcaatggtgaccttcacccaattacagcggcgtatgacaatggctaggggcagtatataaatggacaacgcccgaacgagttgcacacggacggtattcgggcgggaggtgcggcggatctgttatgcttcacaagcagattgcgccg

SEQ ID NO: 48363 - DNA, 854 bp, Zea Mays
gaacaacgaaacgaaggaggaggccatcagctgttctagtatgtactagtgggtagggtagtggcgatcgtgactcagccgtccctatcgattgatgtgtggttgttctagtatgtacagtgggaagggtagtgacgattgtgatgcagtccctgtcggtctattttatagcagcgcagagcagatcagtggagcgctagcctagtagcagcagtagattctcatcatgattctacaactaccagcccggctgtgcactgcctgcagcagcgcatgtggcgttgttggtcagaagaaggctgcttcgtgctattaaaacccggctggtcgggcatcatgtctgtcggcttcttttccactccactccactccactcgccgggcgcgggacacggcgagaaagattctcctcgtctgtcgcgtcgtgctagctcctcaggaatggaactcttctgcctcttgcttgccgtgacggcttcaccgactgctccaccgccggcgtcaactagggtacgcacgtcctactacttcactgtaggcctgccgagcaaaaaagacaaaaaacaaaaaaacaagtcgtttagttaggacatgataacgcataccaatgagcgattaattagaggtgcattttcctgctttatttggccatattaaatagcatttttttctgagcccatgcaacaagtcttctgtacttgtgccttctggtttgctacatgacttggcaatgtctagcacctactgtagtatagtataggtaggttcgattcctgcatttaaacattgcatgcgtggctagctacttcacgtggaggtcggaggagaggaacgctgagtgatagtagtaattac

SEQ ID NO: 48364 - DNA, 454 bp, Zea Mays
caaactgtaaaaatccatcaaaatggccaaagcgggatcaaccacaagggtgtctcacaagggggacgaaacttaggccgccgaaacaacgtcgatttaagaagtaatggaacgatcaggtctagtagtgacagaggaagttgttgacaaaggtgctcctgatgccgaagctgaacgaactattgctaaaggagaaaatgttgatgagagcgaagaagattatagtattttgatcccaacaaagcccaatcaccttgaatttaaaaaatctaccgtgacggaggatgacatgccgatgatgatgaaaatgggctattttggagaagctgagagaaaacttgttcggtttgctgggggagaagtaatcccgaaacctaaagaggatgaagttgtcgttttcaagagcttcttaagagcagggctctggttccccctgaatgagatggtaggggag

SEQ ID NO: 48365 - DNA, 336 bp, Zea Mays
gtgcgatgtgtgtcaaagagttaaggctgaacacgagaggccagctggactattatacccactgaagatacccgagtggaagtgggaaaagattggtatggacttcattactggattgcctcgcacctcgaaaggatatgattctatatgggttattttcattccggtcaagactgcttataaggtatctcaattggcggagttatatatagctcggattgtgtctctacatggtataccgaagtggatcattttggatagaggatcacaatttacctctagattttggaaaagttttcatgagaatatggttacgaagttgaattttagttcggc

SEQ ID NO: 48366 - DNA, 397 bp, Zea Mays
acttaggatcttctctatttacagtctgcactaacaacaactccatctccttaaagtatttgtcaactgatctcttcccttgcttcaacaattgcaattggtttcaaagatcatgctgatagctagaaggcacaaatcacctcatcattactcgtttcatctctgcccatgtattgatatgtctcaatcccattctaagttgatgtttttgcaattggttccaccaagtaagagcacaaccaaggaactcgactgaagccaagttcactcggtgttgatctgaaagattgtgaactctgaaaatttgatcacactactcagcccaattaagatattcatctgcactttctttcccagtaaatttaggaatatccaacttgactcgggcaatattgtt

SEQ ID NO: 48367 - DNA, 327 bp, Zea Mays
aaaaatatcacaagagaatgccaaaacagacggtagcgaactaaacactaaatagcgagacatcatgaacaaccacacacactagtgctagctatctacatgtcaacgacttccaatattaacaccactagaaggacgacagacatttcctatatttacccaacacaacacgacatcacgagcacaagcattgaccatgtttactttaatcatccattagttacttaacatcaaattagttaattacctatgttcgctacgacttatttatagacaaacttagttgaaaacaaattagtcacttaattgggctttacaattattcac

SEQ ID NO: 48368 - DNA, 637 bp, Zea Mays
gttgggacaagagttcaccctatgcggagttctcttacaataatagttatcaagccagtctgaatatgccctcgtttgatgctttatatggcagaaagtgcataacccatctgtattgggatcagactggtgagagacagttcttcgggcctgaaattattcaagagaaagaagaacaagttcgggtgatcaaggagaacttgaaaatagcacagtcgaggcagaagagctatgtagatgtccaaataagaccactggaatttgaagagggtgatcacgtatacttaaaagtgtcaccaattcggggtatgaggagatttaaagttaaaggcaagttatcccctcgctttattggacccttcaaaatccttaagcgagttggggagatggcctaccagcttgagttaccagatcatctatcagatgtacatgatgtatttcatgtatctcagcttaagaagtgtcttcgtgtcctagaggaacaattgccaatggaagaacttagtgtgcagggtgatctaacctacactgagcatcctatcaaggtcattgacaccatgacttgggttacgaggaacaaagtgatcaaaatgtgtaaagtacaatggtgtcaccacggagaagacgaagctacctg

SEQ ID NO: 48369 - DNA, 1695 bp, Zea Mays
attctcctgtgggaacccaattgacgtggtggccacagagcctccctttcgtcggcaaggtcgatcaaaggggcgatacggggttgaataaggaaggactcaatgagatgtccccagcgggtcgagccccttagtgggaccactcgctaagagtacacctagcaaaaaggtggtcggatctcacttagataacccgttcacagattgacgaccccctccgcgcgccgaataggtcgaaggagggtgtccctcccctcataagggctttagaaaacccttttcgaacatggatgcgtgcacataagaagtcagactgacgaccaaagaaacaagggccagaaatcacaccttacaccagcaaaatgggctcacgctcaacatgtgatgaccatcgcagaaagggttcgcccctgaagctgcaaaccaacctagttaaccccaagcaatccacatgaattactcaggggctacatctactagatacgctcgcgtgcacaagactttggtcataagcagaaggcgagacaataatagatgggctcacgctcagcgcgtgatgaccactgcagaaagggtctgcctctgaatctgcaaaccaacccagtaaacccccgagcaatccacacgaattactcggggctcaggggctacatctagcagatgcgcttgcgcacacctagaatggccatttcccaacaaaagcctctacgcaactccaaggagttacacaaaggctcggggctgctgttgggcacccaggaacggggtgcccaaaggaagtccaagaaattccttgaaatgacccactaatcgattctccatcgagcaaacccatgaggtggaacagacgaccaagtctctaccgagcaaccctgcgaggtagagcggacgaccaagtctctgtcgagcaacctgcgccgaacgaccaagtcctccgttgagcaaccccacgaggcggaacaaaagaccaaccatttgtcgagaaatcccgcgaggcgcaacaaatgactaggtcccgagcaaaacagcgtaggggaagggacaacctaatgctgctgacccacgtcagcatgacaagatgcgtcaccaccaaaccatgttcgggccacgtgtacggtgtcgaaaagtccctgtcaaacacaatggtatagtctcaggtgagcccccactgatgtgtggagctagtcaacccttgtcgtagggacctcagcattggagtatctacagtgacccacttacaggaaaggacgggacgatacaccataccgggtgtatgcctacgcatgctggaagtgacgtggggttcatgatggaagacaaagctgcgccaagcacgaccctgagctccaccataagactaccctttggcctttgggacccgtcgaacgtcgctacatcaacatcaagcttgctacagggacccgtatgccaaacagacgaggcggtacgtcataccaagagtacaacgacgtacaaccctatagacgacgtcgggaggactacaccatccaagggcaaccggccgagcaccctccagtagaatacaagtccgcattgtaaagtcctaccttagaactataaaagggcaggaccactttctttctagggacacaagcacacttgttgtaacaatctccaagcaatactacgattgacactacactatagtaaggtgcgagtccgaaccagtataac

SEQ ID NO: 48370 - DNA, 574 bp, Zea Mays
agacagggctatagactaggctgtaaattcacggtctatagcctaggattgcgaggtgaatgcccgagcccgggtggaggagctaagcgtagccctggaaaatgtgcaagcgtacaataatactctgcatgaggaagtgcacgtgctatctgacaagttgcatccgaacgtgccaccagaggttgcagcaatgggagctggaacattaggagaagctggtggaggactttatggggaattggatctctttggagtccctccttccatgaacctcgcagatgatcgttctcccaaagctggcagtggagcggcagcagccaaggacgcagataactagagtagtatagtagtaggttgtttcctcatgtaatataaataaggaaaattgagttgtacaagttgagtatgtataattagtaccagtttggaataatggaacaaaggctgtgtactcgtggcatgtaataatcaagtatgttttcttctgtagacgtcgtccagaactcgtgctcaagacggggcgggaacttattgtggtggggaggaaacttcgaacctaccgcctgtacctccc

SEQ ID NO: 48371 - DNA, 563 bp, Zea Mays
gagacttggtcgtgtgtggaggttgctggggatcttcctggtgcgagtactgggtgtatgctgcgaagggtggtggaaaaacataatgtgggtgaattttcgcgaagtggcaggcgtcgtcgtatgggaatggagcgtggccgtttccgagtagaccgggttggtaaacgagaattgttgtcctcgccgattggggcgagcataggcgaggggatcttctgaagctttttgagggtgaggaattgaggataatgctgtttgattacagggagatgggtatcatcccgaaggttgagccgatgtaatatgtgatgccctcgccgtgtgtatgtaattgtaatttgtatggtgatgtggcctattggtcgtattcgtacgcctgtgttggtccagttgcgcccgtgggcgactctgtgcggagtgtctttttaatgagagacttcgattaacgctattccggctgctcccttaggcgactgctgcgtggagtgtcttgtaaatgaaagacttcgattaacgcacttgttatgctgttccggctgcacccttaggagacttttgtg

SEQ ID NO: 48372 - DNA, 453 bp, Zea Mays
gccaggcctgcctaggcaagtgcgtgggcatggctccgctggtggttccaagccaggagggtgccattgaatgtggaggagcgtctggtgcgggaaggcccaacgaccaaagacttgagggtgagacagatgatttggccggaggtcgtgcaagtggttccagcgtgggacgacgggagtaggtgggggtgtcggggctgaggcgtgggtgggagtgcagggcggccgggggccttcacgaggaacatgagagcacctagagggggtgaataggtgatcttgtaaaaatcaagactaaacaacacaaacttggtttatgaaatgttagtgaagtcaaaaccaaggtgctactaatagagagggagagaacaagtagagataacttcttcacttaattgctcttcacaagatgagtattaaacttagagcaattatggagtgaatagaagtaga

SEQ ID NO: 48373 - DNA, 926 bp, Zea Mays
agtcatcacttatattattgagatcaatctcatccaacaacttttttttgatatatataatcggcaagccatttaacctctattgagttattgttgaccataaatagttcacaaaaatatttcaattttaaaaagcttctctcagtcgatgcaatcatcatatgtatagtaaataattactctctctatatcaaaatagaatttgttttgtttatttagtggattcatcattatatagttgaatataaacataaaaaatcaagagctaaaacaaatactattttgaaacggatgaagtattcgataagcaattgagacattagtttaacaatataaacgaatctggtcgatagtgtatcgctctttgcgtatttatgtttagaatagatatgtttaacagtaaaaagtactagcgtctagtgactaaggggctctatgtttttgggggcctgatgcggccgcaccctctgcaccccctctggtacggccctgacagcaagataatccgaaatgagtgagttgagagtgtctgttccgaggcctaaagaatgattggtttggatatcgcatgtgaagattttagtcgcactagcatatatatacaaccctagaccctagtggtagttccgatacaaagggtataacgacacaatacacagtagtggaggttagtggcgcatcgctatctgacgacgatcatgcaatgcctgtacaaaggaagagaacatcgctgtcgacagaccacaggcaaaggaccgcattcacgcttgatgtgcgatgcgtgtgtgtccaggcatcctgaggcacggaatttgtcccccctggttggtccaatagaacagggaaatccgcatgctgtgtgcttgtcttcttccagctagctaggatatatggcaaaattggagaccaacgaatatcgcaagcgc

SEQ ID NO: 48374 - DNA, 454 bp, Zea Mays
cacatttagaatgttagagcagatgtccatcatatcaccattagttggcttggacagcagatcttcaggaacaacatcctcaagagcctgatcaaaattcgctagggataattcttgcagaccaacgagagcaaacagagctagagaaggaatatcactactccccccactaattctgtaacaccgactgttctttcgaactaatgggacttcttcttcttcgtccttgtcaataatacggacaataaatggcacagggtcacacccattgggttcagctctagcagggtcacacccattgggatcagctctgatagggtcacacccattgggatcagcatcagcagggtcacacccattgggatcaacatcagcagggtcacacccattgggatcagctttagtaaagagttccaccgatacttcttcagcaacaggagcagaagggccagca

SEQ ID NO: 48375 - DNA, 574 bp, Zea Mays
cgcgaagtgtaagaagacatcaccgaatgggcatggagaggtcccgtcttcgaagtgggccgcgattggattagggtacccgtcgcgagttacttgcgtcgatatccgggtcatgcatcggagaaggagacctgcgggacctttttgagggggaagagttgaggttgatgttgtttaattttcgggaggctggtcttattccaaaggaggagctgatgtaatagtatgtttccctcactgttccgttgcgatgatgagtgaaaacgctgccctccccctcttcacaatagaactatgatggccatgcttgtgaggggtaaatattgtgtatagtgtatactatgatgtgttgtgcgatggttttgattggtggcgtttttgagcccttcgcttgttgttcatttgtgattgtgctatgtaatttgttgtgcctattgcaagtttgctgcaatcttaggtgattttgctgtggataggcgtgtatgtgccataggtgactccgcgcttggcaagtgactgtgcatttattgtgcttatccggctgcacccttaggcaacttttgctcggatgatg

SEQ ID NO: 48376 - DNA, 969 bp, Zea Mays
caggaaccgagcaagggctaagagactcacgaatgtagcccttatcaagtaacgcttggaattggttctgaatttcctttgtctcatcgggattggtacagtacggggcacggtagggaagatgagcacctaggatgaggtcgatctgttgttcaatgccgcgaatgggaggaagacctggtggtaactccttcggaaacacattggcatagtcctgcaaaagcttagtaacatcagggggtatatccaaagatggtgcatcatttagtgaaaaaatcatatgagagcatacaagcacatagcaaggcagattatcaacacgtacatcatcaaaatcagatttagtggcaagcaaaacatgatcttttagtttaatttcatttggtatgtgtggcttctagtgttgttgtttagctctaactatgtcagattttacaatatcttcaggggtcattggatgaagaattattttcttgcctttaaacatcaaagagtaatagtttgcgtgaccatgatgtaagctattcgtatcatatttccaaggcctaccgagcagaagtgaacaagcttccattggaacaacatcgcaatcagcataatcatgataggaccccatagagaaatgaacacgtaccgagcgtttgttcctggagtttaccgccctcgttaagccattgaatatgatagggtgtgggtgtggacgagtggagagagacaacttctccactagctccatgcttgccaagttgttgtagctgcaccatcaataatgatgtgaatggaacgttcttgcgcaacacctttggtatggaacaaggtgtggcactggtgctgctcaagttgtgcaacctacgtgctaagtacgcgttgcatgacaaggcactcatgcttgtcagcatccgtggcatccacatgttcttcttgggttcctgcaacgtcaatggcaagcatagcatatatggtttcttc

SEQ ID NO: 48377 - DNA, 767 bp, Zea Mays
ctggaatggaccaatttggagttcatatgcatttactatgaattaaacaagttttaacatttatttatgcactaaaaattgatttctgatattaatttctgattttcaaagttccctggattgggccttaaattccagaaaacccaggggtctcggtgcaagtgttcccaagaccccgcgaacagtcccagtggactgcgggttgaatcccttaaaattcgagggctcttctgcaaaacgacccggccgaaggggtatccaacgaccctggccgtccgattcaatttaaacaatccagattagatcacggttcatattgaagtggtatggaatgcgggccctcggatttcaatcgcacggcccacatgaatctacgtcgcaatcaatcgtgaaccctacgatccaaatctaatggccatgatcaccctgagtgaaacggtacgcagattctaatctcaaccgtggggaactgatccaacggtcccggcgcgttcgcccaaacccgacccaagccgcggcggagcgccagctccggcacggcggcgccatagctgcgcagcgttcctagagctcggctacgctattcctcaattcagtaaagcataacgtggaggagggtacggcgaacatgatggggctcgaattaccttggttcacggcgacagcaggtctggccacggagggaggcggacgcgcgacagcgaccctgctccggcgagaaattccccgggctaccgtcaggttcccaccgattaactctccccaag

SEQ ID NO: 48378 - DNA, 656 bp, Zea Mays
ctttgccagcatcttcggcatccacaggaattgctgctttcgttgccgaagctgaaggcggcgtttgctcaattgcttgcattacattcacaatttgccgtttcttttgcccttcaatcttctcttttgtagccgaaggcgtttccttcctcgataaaagttttgtcagttccaatcccagaggacttagcagcttgaatggcggagattcagtcattaccttcaaaatttcaaccacttcggcagcagacgacaacagagggattttctccgttgctttgtctaccttcggttcagtagacggtatctggtcaagctttcgcttcttagagattgctgtcttcggctctggtgcagtttttgctttcttcagggctttttcatcttcttttacggaccgggtagcttgcctgcttaggatgctgataaccctttttctcttcacacccccgaccccctcgtgaagcctctcataatctgggtattcgaagttgaatgcgtccattacccggttcagccttcattttggccaggtaccaaaggcagcagtcattagctggacctccttcttcgtataattgccaagaatctcattgcacatggtctcgatcatttgtagccattcatggcatggtttcttgaaccatttctcaaat

SEQ ID NO: 48379 - DNA, 718 bp, Zea Mays
taattcactgaccacggtgagagttctaccacgatggaggaaacagaattgggggaaaagaggaattggaaggctctagtggataatccgaggcaaggatcggtgcgttggatgtgtaattacctagcggagcagcgggtgcgcttaatttataggcttcgggggcggcggcgcatgaatttgggttggtgtagtggcggtcggagatgaaaaggggtcactagcgcacgtgcttagtggctttcaccgtggcagctctcctgcgatcaccgggcatgcacgatgtgattcactgcgacgtggtctaacactttatcacgtggcgcactgcacggcggtaagcggccaacaacggcgaggtctatccgaccgatcgatgagcaagtgggtaaggcgagcttagctgtgactgagctcgagtcgatcaggtgccaagatctttactcgcccacggttatccgcaagtcacggcgcacgagtcacagcggccggcgtgaatcgcggtgcgacggtcaccggcgccgatgggggatgaacttgggatcttgttcagtcactgtacaatggagtctctatttagtgcgcgtgacagcccaacttgcaaggcctggatctcaattttccatgtggtgacttactaatccaccagtgacttactatccagcttcaatcttgctatagcaatcactcccaaattcttactagatcatgctcgaat

SEQ ID NO: 48380 - DNA, 863 bp, Zea Mays
gggggatgctgcagcagcggtggctttggcttgctgattggagtcttgttggcgccggtggcgaggcgggtagaagctggtactgaggagtgatgtacaagggttagttcctcaagtaacaagtcatttcgaacctctaggaaggtagggaggggtcacctgcaccgatggtgaagcccaatgctggcgaagcactcatttagaccacgaatgacgttgaggacgagagtgtcgtcatggaccggctcgccgagatcgccgagaccgagagcgtcagccatctctttgagcttgcggcagtagtcggtgatggagaggtcgccttggcggaagttgcgaaactccgcgtcaaggaagagagcccgagtttcgtgattctcgaggaactgggacccgatggcgagccaatcgtcgcgagcagaggcgtcacatatgagcatggcagcaccaagctcggtggtgatggtgccgacgatccatgacttgacgacgcagtccatttgcacccaacgagaagaggatgcagatgtgtcagtgagcacgtgatctgtcagcgtgtacttgccgacaacaagcagggaggagtcgcgccacctagtgtagaaggaggagatgtcaagaacaacaggggtgagagccgagaggttctgaaccgccacggcctgtgcatggaggttgaggagggtggctgcctcgtggatgaggagggcagcgtgtgcatctcctgatgcatggagattagactgggtggaggtagcgtcgtcttcaggcgcggctcggcgtcaggaatgagtccaatggcggcacaagcctaggccgtgtgcgctagagcggtgcggatgcaggtgtcaatggcgttgcgc

SEQ ID NO: 48381 - DNA, 581 bp, Zea Mays
gaggagggagatggcatagcgcgcattgtcccatgggttcacttcagtgcccagcatggactggtggtggagatgtgggtgccatagtgtcgcatcttagcacactcggtctgcgacgtgttcttgtcacactaggggtccagctccatgttggagtccctggcagtgggcatgccattgtggcactgccgctgcacatcgatcagccactagcataaacctagacaccgtatgcatgccgcgagagtggttcggggagttttgggtcgtcatctaaatatatcaatgttgttatctagtgcgatggtcctcccttggcccaactaagtgaggttttgtcatcgcaggaacaactaacacacgaggacacgagaggtatgctattgttgtggtcatcccttctgattgtgactccaaatatgggagttctaggcatcctacctagcttgacctatagctatggattgtgtgttgatgtcaatgagttgctctacaaatgtacaacaataacttaaacatgtatggatcggtctatgtcggttgcattgatcgactcccttaagctgattgtcatttttcta

SEQ ID NO: 48382 - DNA, 645 bp, Zea Mays
cccgcggtcactaaggtacgacgctagtgcatggagaccacgtaacaaggaagcacagtgtgatagaatttgggcgcgggcgacaccgcgacagaagcacacgagccacggtgcacgccggtgagatatttttggcccttccccggcctaatccgcaagatggtgaatcggctcagagttatccgccccggccatctctatctcctcttcgtttggacgtatccggattccacagcgacgcggatcttttcttcagatatttcccagcgcctctgatcttcctcgcttaactgaaccgactctatgtagccccccctttctcctgattcttgttaaggacaggttaatctccgttaacaagacttgttcaccatacaagggtcttcaaacttactataggattctaagacctaaactgaataggtcccaagatatggcgctcacaaatcagccacatttttactgggaccattactgtttctgaattcagtcttcagtattacctgaaccgcgcaactcacttctgacagagcaacttcgtgagactaattctctgatttttatacaacaacccactaagccgactgtaccaaagtttctcccctataaaatagccttaactttgttacaaaggtttcggtcaaa

SEQ ID NO: 48383 - DNA, 525 bp, Zea Mays
gtcattggtttgaccctcaagtgacgagacggacacattctaatcttaggatagtcgaaattcgacaagattccaccttaccaggagacgatgtctatatcgtggcccaacaggccacacaagtgtattatctcccatatgcgtgccaaacgaaagaacatcttaagggttgagatgttgtgtataaggtatcgccgcacgggaggttacctgttcctaacgatgaagattacaacttagacccggacacatatgatggagagttcttccaagaagatgggctagaagggcgatttgagatagacttaaccgaagctatcgaaatggcgtagatattgaaatggttgttgatgaggaggacgatgaggtgcaaaatgataatgacttagtaatccttgaaggcaatgacattaatgacaaggttgtgtcttccgatggtgttgagattgaaatggttgatagtgatgatgagagttatgatccggctaactccgacatatatgaagattatttttagtcgatgta

SEQ ID NO: 48384 - DNA, 397 bp, Zea Mays
aagacaatgccatctgcatattgtaatgcatattgtaaacagacacagccattttcaatgatgtgaggaacaaggcccaccaaaagacctacctcatgggaccttttaatcatgcaagaaagaccatcaactacaatgttttggatggcctgtgcggtcgcgcagcacgcacgagcccaaaaacacccctactggtgatgcctcctagctggatctagatgctccaccgggcccatatccagtgccaatggaggcaaggtcacccgccccattgcgttactggttgccacaggttttggggaagagtgcattgtcgatggtggggcacatgtgactcggtctaggcaaatgagtcaaaggaattcataccgcttgtcgctaggtcgaaggatgtagg

SEQ ID NO: 48385 - DNA, 614 bp, Zea Mays
gcagctaaaactttctttacagctggagccttcttcgtagttgtacttttcttcacaaacttggccttcttcttttctgggcccgaaggtggctcttcatcatcatcagacccttcgtcatcttctgttcgacgttagcaattttctttgaagttttgctggtacctttaccacctcatttccttttctctctagtttcggcaatagctgcaggatctatgtaatctgggtactcaaatcttatagcatctataactctgttcagccgaagtttttcctcagcccccgaaggtggttgacatatcttcatgttctctagtcaagtagttcccacaaatttcattacacttcatctcaatcagcttcaaccacccttcggaaggagccttgtacggtgattgctctctaaactcgaaggctagggtgacaagttcaccatctttgtgcttcacctgcttcagcagtttccacccagtgcgggctgagacaatattgtaggcaagcacctcttgaatcaagtcctaggtcccaaccttctcaacagcattcttgaaagtgttgtagcatgctttgacatcttggttcatatcataatttggtctcttcacgccaaa

SEQ ID NO: 48386 - DNA, 693 bp, Zea Mays
gacgggcgtggcgttcttgaagaacctgcattggaacctacaagtcatgtgaaatatctggcagagctagactgacccgctcagggcgcttgtttgccggcttgagctgcgaaacatgaaacaccgggtgaatggaggatgattctggcaaaagcaacttgtaagcaacaataccgattctagagacaatagtaaacgacccaaaatatctgaatgacagcttctgggaagaacgccaagacagtgaactttgaacataaggctgaagcttgacaaacactgaatcgcctactgaaaaagtacgttcagacctgtttttgtcagcttgtttcttcatgcggagttgagcacggtgcaaatgctggttaaccaattcagtcataacagccctctcggatagccagctagtaacatccggactggtgcaagcatcaagtgcagtaagcccaaagtgatgaggagaatgtccatagagaacttcaaaaggggagcggccaagtgaagtgtgccagctggtattataccagtactctgccaagggtaaccacttaagccatttcgaaggacaagcgttgataaaacagcgaagaaacgtttccatacactgattgacccgctctgtctgatcgtcagattgcgggtgataagcagaactcatccgtaactgaactccagctaaagaaaacaactcct

SEQ ID NO: 48387 - DNA, 789 bp, Zea Mays
gcgatagggacgcacttgcacaggttgagcgccgggaaccaaaggaatactgtggtcacaaggtcgagcaggtggcaaggacaactgggtagcgaacaagtgttgaaacctgtcaaggaggacttgaatttctggaatcacaggagcctcagagctattgtctgccacagatacagaagataattgtataaggatatcatccggaggctccgagttaataccatgcaagacgactggcactttttgatatggtataaccatccacttttgtttccaatggatgtgcatggggctgaactgctctagccaatcaatacccagaatcaaatcataatgttggagaggcagcaacttgaggtcttgagagaactggtacccttgaatctgccaagttgcttgagacaaggcctaggaacatggcataatgttgccattacccacttgcacctgaacactaactgacaccaaagtaaccttagtcagtttagagacaaattgttgactgataaaagagtgagtgctgcccgaatcaaccagaatgagcatatcctgctgttgcatacacccccacaaattgcatagttcgctttgactgtgttcccagtaaggctgcagtcgatagggccaagaatagctgctcttcagctggtgaaattgcatcctccactggcattgagtcatcagcaggaaacaactcccacacctcttggatggcgtgaagctgaaccgtggcagcacaggtatgcccacggtgccatttctctacacaacgatcacataggccacgag

SEQ ID NO: 48388 - DNA, 572 bp, Zea Mays
aaaacgggatcgacgaaggggtatctagccacgtgagccatccgatctagtatctacggtccggattagatccgacacacttcaaaccagcgagttacccaggctgcccgatttgtatcctacggtgcagattttaaatacccgcgaccacaaggacacgtccgatcaaaaaccaatgctccagattagatttgtcgttgaattcaaccggtatgctaccagagccgatggatccgcgatctacgacaataacttaatggaacacgatctgttttgatccgcaggatgccgattcgacggcacagatccaatcacccaacagcgatacgactaaactaatctgggccattcaacaatggatccacggcccaatcacgagagatccggccacggcgatggtcctgcatccgaacaggtccgatgtgatccccgtagtgtaggtcgcccccagaatctttcctgtccagaggttcccaagaaccgtgcggcgcgcctccaggcgctttgctgcgcgcgcagaaggaacaccaagcagtgatcccccaatctcttctctctcttcttcgttgctc

SEQ ID NO: 48389 - DNA, 1518 bp, Zea Mays
caagtcggcctttcaacacaggacccaacaacatatgcttgatgacatctgacttgcagatgacattcatttctacgaacaacaaaatgtgacgaagtttggtgcaggtgaagaataggcagagacataacttctcaatgttagggtatctggtctctgcatctaacattcttctactgaggtagaaaacaactctctcctggccatcatggacttgtaccaacacgaaggagatggaggtgtcgcctaccacgacaggtatacatagaacagttcgtccgcctgtggtggaaccaacattggagatttttataggtattccttaatttctttgaatgccctctattgatctggtctccaacagaacttgttatcacttttgatcctcactaagttcatgcacggctcaatccgcccctgataggttggaaataaacctcctaacaaaatcgaccttgctgattagccactagagctccttcatggtaggcggtgtcattgtcttgactgcttcttgactcttcaggtcgatctctattcctcgctcatgaaccaggaatctaaggatttgactggccattaccccaaaggtgcacttttttgggttcattttgagctcaaacttcctaattcattgtaggacctaacgcaaatcttctatgtgcctcccagtggatacagatttgaacacgacatcatcaatgtagatctccatcggctttccaatcaggtcgtggaagatgtaattcatggcgcgttggtatttagcgctagcattgttcaacccaaaggtcatgatcaaatactcgaacatacccactgagccaggtaccctggatgcggtcttgtgcacgtcttttggggccatgaaaatctagttgtacccagcatttccgtacatgaagctcaaaatcttgtggccggcggccgcattgaccaatgcctccgtgatgggcatagggtactcatcctttggcatggccctattgaggtctctaaaatccacacatacccgccattggccatccttcttttgaacaggcactacactagaaatccattcagcgtacctacatggcctgatgaacgttgcttctagcatcttttctacatctttctttacctcttataggacttcatctttcattaattttgctcgttgttgaaaaggtcgaaatcctttcttgagcgagagccaatgttcgacaatgttgttatcgagtctagacatttttgtgtaatcccaagcaaagcaatctgagtgttctttcagcaggcttatcaccggctctcgtaactttgggtccaacctcttgttgatgaatgtgagccgcggctcttgtaacttatccccggggccaacgtcgacttcttctagctcgtcagcctaggtgaacacgtatcctagtttcccatcaccttgctatatgttcttttaagactagattaactaacccacttgagtttttaagtattaatagactttaacatcctactattactttaagaattaaaccc

SEQ ID NO: 48390 - DNA, 671 bp, Zea Mays
gcatgatagttttgtggggggccattctggaggacctgcaacttatcacagtgttaaaagacttttttggtggaaagggttgaaagctgaggtgatttcttttgtgcagcaatgcttggtgtgtcaacatgccaagtcagaaaggattcatccacctgggttgctacaaccattaccaattcctagtggggcttggcaagatctaaccatggattttattgaaggattacctaaatctgagggctatgacactattttagtggtggtggatcgttttttgaagtatgctcatttcttaccactaaaacatccattttctgctgctgttgttgctcaggtttttctagataatgtggttaagcttcatggagttcctaagacattagtgtctgacagggataaggtcttcactagccaattctggaaagctttatttcagacattgggaactcagttggctttatctatagcctatcaccctcagttagatggccaatctgaaagagttaaccaatgtgttgaactgtttttgaggtgtgccatttatgatactacaaagaaatggaagcactggttacccttggctgaattgtggtacaattcttcttttcattcagccattggatgttctccttttaaggcactatatggctatgatccagctgtttttg

SEQ ID NO: 48391 - DNA, 567 bp, Zea Mays
aaatatcagaagaagatcctgccaccaaacaccgaacggacaaaaggactttactaaggttaacacgctcttacacgcttctcaatgttcttaggtgtaagccatcaacccatgatagcgaatcttttatcttctctagttcctcggtaccaatctcgacgtccgttcttcaccattcttagtccatcaccatgaaaccgtgtgacctttaccttaatcatctaccacatatctgagctccgcacttgtgcaccactaaatcaaatccgagtatcttcttaacaataactcatcacacttaaacatcacggccgcatcttatctatgtattcgcactagttgcaaacatgaaattttacttcaatttgcaaggcttcacctctagctacgaagtctcgaaggtggtgaggaatcgctcagccatttaattattcctatgttaattcggtggtggcggcgaacggtaaccagaccgatagatgatgttgatggcaacttttaaatcacttgaaaaaaaatcgattgatttattttttgacatgcatgggctgaagaggccattattat

SEQ ID NO: 48392 - DNA, 1105 bp, Zea Mays
ttcaaacctgaacagtatgtcctgaatgaacttcactgcctttgcagaggtcatggaagcgattagcttgtattctatccacttcgtaaatttgtcgatggtaaccagtatgtgggtataacctccttgacctttcttaaaggacccgatcatgtctagcccccaacatgcaaatgactaggtcacaggaataatctgcagctgctgcacgggtaagtgatgttgttttgacaggaattggcacgcctcgcacctctggactaactctgcagcatcattcttcacagtcggttagtaaaacctggatctaaaagcttttcccactagaattcttgatgcagcatgcacaccacactgcccagcatgaatctcatctaatagctgtctctcggtagccgagtggatgcacttcatgaggacccctcctgcacctcttctgtacagcaagccccctatgatggtatagtgggccgattgtcttgcaatgcgctctgctgaggccttgtcatatggttcctcttcgttctttatgtacctgatgatcggctctctccagtcattgggatctgcctctggctgattcagggcgttgcattcttccacctgatccgtgacaatgcttggttgctgtatttcttggacgaagatctcaggtggaacttgggaccgactggaccccagcttcgacaatgcatcagccgctgtattgcgatccctttccacgtgatggaactccaatcctttgaacttgccttccaacttccgcacgactgcacaatatatgcccattgagtcggtcgagtagtcccaatctttgtttatttgtcttatgactaccagtgaatcgccgtacaccatcagcttcttgattccgagtgaaaccgcgatgctcagcccgtggaccagcgcttcgtactctgctgcattattggatgccgaaaacaaaagctagagtgcatacttgagttgttcacccccgggagcaataaagagaatccctgcccccgctccttgcagcttcagcgagccatcgaagtacattctccatacttcagcaacctctaggctttccgggacctggtgctcagtccattctgatgtgaag

SEQ ID NO: 48393 - DNA, 381 bp, Zea Mays
ttgaaaaatcaataccagggcgttgagtgaaacctcgaagaacccatcttgccttgtagcgctcaagagaaccatcagctttgaatttatatttgaagacccacttgccagtcacaacattgcaatgcggcggacgaggcagaaggtcccaagtgtggttaccaataagagcagaatattcttgttccatggcggagcgccaattgggatcagtaagggctgctcgatatgtcctcggaatgggggacaatgcagaggcttcaaaaagagcgggaaatcgaagtccactcttgccacgggtcgtcattctgtggtggttgaccatcggatcgacaagaactgcactggcaggaatggggggtgcagtggcggtcgtcggag

SEQ ID NO: 48394 - DNA, 819 bp, Zea Mays
aagagctagaaagcaatggaacctgtcacattcaaggccctaactaggtctatggaacccagacccttagcaccacccataacccaacaaactagttcatcaaagaagctcctatgaagccttcccaatgaaggggaatctcaatcaaataccaccctgttatgatgaagccatacgcccctaagatgatgacactgtcaagccccccttttttgcttctgtgcatacaatgctccaccagtttccactactctacaaaggatgatacatcaaccgtcatagcgaggtgacccaaaccaaatggatataatatattgtgccagaactgacggacaaatatttaagtgatgagaaggtgctggattgtttcttgctcttgatcgcataaggggcaaacgcccgggtgtggtaatcctctcttttctaatctatcagtagtccaacacatattcttcatagccaaacaaagaaagaatttacatttttggtggagcccaggtttttcaaagtcttttccatggttcaaaaataacatatcctataaacaagattcgataacatgattttgaggaaaattttcttgaagcttcatgcctccatctatgttgatcgagatcttgtgataattcaacctccataaaagaatccgaaagcagcaaatattgctgcagaccaaccagagaaagaggaatcggaagttatcaaaggcctaagctacgattgtagaggatagggctcttttacccaccttggcgaccacatatagggcaatgttcctgaccgcagccccattcaaccaattaccagtccaaaaaagtg

SEQ ID NO: 48395 - DNA, 621 bp, Zea Mays
cgatcaacatcacaggcaggtcctctacaacgtaggtgactgggcccttcttcgtcttcgccaaaggccatcggcatctctaccacgttcacccactggcaagctgaaatcccgctacgtcggcccctaccgtgtcgaggaaatcatcaacgacgcggccgtacgcctgcagctcccgtccgacgccagaattcacgacgtcttccatgtgggcgtccttaagaaattcgttggggcgccaccaactgaaccacctgcgctaccggccacactcaacggcgcagcggtgtccacaccttcccgtgtcctggcgggtcgcctggctcgcggcatcaaacaagttctggtacagtggcacgacgaactagtagcgtctgcgacctgggaggatttcgaggacttcagggccagtttcccagctttccagctcgaggacgagctgactttcgaggacgggagacgcgagatcccagccgtgacggcggctagggcagggtacagccacgacggcggctagggtgggtaacaggcgcgacggcggctaagaaattagggtttagggtttcgtaacctgctctgttcagccagtaggcctgggcctaatgggccttaacagaacag

SEQ ID NO: 48396 - DNA, 501 bp, Zea Mays
aaacgaatgagatatgaattttacaagtctctagaatttatttttagactataaatcgttttcctgggattttattcatatttataactcatttgatctattttctcacagccagggacatcgttcaacattttagacaagctcagggtcctcggtgtagtattttggacctatttacaattagttttgaactgacaaggatggcagtttaattctttaaaagagcaagagctcttctgctaatggtctggttgaagggatatccttgcatctgagccgttcaatcagttttgaagggccaaaaatagattataacccttagtgaaccggtatgcgatcttatccatccgctgcaagatcgactgctcggatttaaataaggcaagatccaactgtgaccctctgatcaagatcggacaaaccacccatattgcagccgaaccggtgcctgtgatctaatcctagccgttgcttaatcgatcaacggttatgcgattcccc

SEQ ID NO: 48397 - DNA, 638 bp, Zea Mays
tgagtagggagtttggtgcgagctccctggtcgccatgatgtttgcgtagtgacgaggaaggaggaggcgaagaagagggagaaggagatgatttgtcacctacacatgaagaacagccgagcaggcatgcaaggaagaggaagacgacgtgaggaagacgatggggctactcctccgacgacgcgaggaagacgacgaggcggccccttagaccacggcggcacaatgcatagagaagaaaacgcgtgggctgctcctgtgtgagaaggaagaggaaagaggttcatggcaggggtgtgcgattgtatagaaaggagagggtatgtatagaaaggagagggcacgagaggtggttgtcaatttcacggcggctcttgtcctggccgagcgagagagacagctacgcggcgagttgcacgagacatggttagacagagttagatgggtggtagacagggttagataaaattagatgaagacggttagagccagcccgtgggcccaagatgacgaggtggacgccaaagggaaagacgaggatagacgaggatcgccgacgagaggagcatgccattcgcgggaagacgcggttcagtaatctcgcgaaaaggggcacgagatctggaataggttcgac

SEQ ID NO: 48398 - DNA, 1071 bp, Zea Mays
cattatatgcctcaaatattgcaactcctacctagcaaaagtgcatttcttccttttcagatagaatctattttctttgagtcttgtgaacaccattctcaattgactcaaatactcctccatagatgtactatacataagtatatcatctagaaataccattacaaactttctaagataaggactcaagactgagttcattgcacattgaaaacttgtcgaggcattggatacgccaaaaggcataaccctgaattgatagtggccttgatgcgtcttgaaggtagtcttgtgttcatcctcaactcccatgtgtatttgatgataccccgcagtcatgtccagacttgtataaaactgtgtaccagccagttcatcaattatctcatccaccaatggcatagggaagcgattcttaatattcatagcattcattttccggtaatcaacgcaaaacctccaactcccatccttcttttgcaccagttacactggggaagcaaaagggctagtacttggtacaatgatccttgttgctagtaagtcgaccacttgcctttctatctcacttttgtgaaaaggagagtatcggtatggccttgaattaactggtactgatcgtaggatcaatggtatgtagtggtcatagaccttggaaggaggcaattccaatggagtagcaaacacatcgtcaaattcagccaataacccctacaaagttggatcacagttccagtcaatcttgtctagtgaagtctccagcatgacaaataaccagactcatttccccttagccatttctccacttgcatagcagtgacttccaacacctccttatgaccaacttcatctcctttcatctgcactactagtcctctattaacaaaagacagtatcttatgatcccagtcacactccatgggactgtgtgacctcaaccaatcaaaatcaaggattgcatcataagctcctgagtccaacaccctcatggtatggttgtaggtatggccattggcccaccattccaccttctgaaccagctgatcactcaccataatctctccatttgcc

SEQ ID NO: 48399 - DNA, 462 bp, Zea Mays
gaggaaaacttccgcactgagaacgtccagttcgatgttgcggaggttaacctcccttttaatgccatcattggcaggctggccctgtaccggttcatggccattgcccattacgggtacttggtcctcaagatgtcgtcccctgctggggtcctcaccgtgcagggcgaccgccccgctgcgcttgcagctgtcgagaagttgcacgccctggcggcagaagctgcacgcccggatgacggagggagggaccctcgacttcctgtaccaagacgcctgccaaggtgcctaaggtgcagccatctagggcagacgacgtccccatctagaccattcggctcagcgcggattcctcccagaccactcgcatcgcgggtgatctagaggcaaaataggaaatcgcgctcgtcgccttcctccaggcaaatgccgacgtatttgcatgggaaccgtcgcaaatgc

SEQ ID NO: 48400 - DNA, 554 bp, Zea Mays
tgttacttccctttaatgaagaatgacattgccttctctgtgccgattgttttgcttcgtaatcagttaatttctgccatgatattcattgcccatgatattctctatccgttatgtttgtagcataacttagagttattgaatcattcctccgcccaccttatttgtgaagttgattcttttggaatagtaagtaaataactcaggcatcatatcgacgcttttagaggtagctaccgagtgacttgaaggcgacgtcggagttttagagataactgccgagcgactaaagacgacgtcggcgtgttagaggtaactgccgagcgactgaacacgatgtcggagttttagaggtaactgccgagagactgaggacgacgtcggagttttagaggtaacgtcgagtgactgaggacgacgtcggagttttagaggtaacgccgagtgacttgaagacgacgtcggagttttagagataactgccgagcgactgaagacgacgtcagcgtgttagaggtaactgccgagcgactgaacacgacgtcagagtttta

SEQ ID NO: 48401 - DNA, 687 bp, Zea Mays
cagttctgttgccctgttcgtataatacgactttggccgatgggtcagaatttttattttcttttgtatcgacgcagtggaagaagtcttcagcgtacttttccttttcaacccctttttcgtgtagggaagcaatagtcaggataaacaaatccaacgacatcaaacactctattcgatcttctttttcctccggcaccaaaggcagtatctatagcttcgtcttcagccttggcccccaacatctcatcactagttgcctcaatggcctcaagccattcatcatctggctcaccaaactgattcctataatgatagatatatttcagataaaccataccaccttcgctcgagcttatgtcagtttccttcggcatctcccactcactaacaaggggccacaccttaaaggatatatgctcctgaactaagtctctagtactgatgtagctatacacgacgttgaaggccactaggaaagcttgggctttctcagaatttgcaatagcgggccacttgatgccaaagcgtggccgaataggccactagatcacacctttgatatcctccctctcaaccaggtcattcttaacgtagaaccattgcttcatccacgaccctgaccattttttccaaaaggttgggacggggcgccttacgctagactgatatatgaaggaataacaa

SEQ ID NO: 48402 - DNA, 457 bp, Zea Mays
cagttgtcacgtcgttcacgaatgtgatgcctcctctcacacacgtatactctctaactgtgtcctccacgcaaaatggaagcaacaaaccaaccgcatcatcagtgacctaacaaacaatccgtcgtggctatccgtacgcaatggaagcaacaaaccttcgtaccatcagtgaactaacaaacaatccgttatggctatcggataagccttatcttctccaacaaacaacaaataaatcccgccataacacgcatgacgatcgtgctcgccaaagtgatccgtgtcttctacccgctcgccgacatgctccgccaggacgacgcctacccactcgacggccgcatccactaggacgacaccgatggtggcgctctcaccgtcgagaacgacgagggcgtggaggtcttcgagggcaaagccgaggccgagcgcgtctccttccacccgatcgcca

SEQ ID NO: 48403 - DNA, 621 bp, Zea Mays
gagtgagggtctcgatagaactgaggtgatgctctctaggaaagaaaagtacaacaataaattctatagtatcatggaagggtgatgtattcactatccacagggcaatcatactactcaagattgtcgacatatcaagggtatcatgttgaaactaatgaaggagcatgagcctaaggaccaaaagttggagactagcaagaagaatgacttggatgacgatgacagggccaaacttttagagtcaatgtaggacatgatgtacaccatcgatgacctggacacgtataaatctaagaggaaggagaagctcgaagctagagatgtctacaccatgcaatcatccactcccaagtttctgtgttgattagagttacatattacgtttgatagatgtgatcatccaaccatataccacacttggggtgttatcctctcatcctaagcatgttggttgttgatgcatgactacattgagtcctcatcaaaggtgggagacacctcaacatcctttttgccaacacatttaggaagatggcgttgtccaagaagtagttgaaaccaagtccaatgccattatataggattatctcaagcaagtcaacaactcccctagggtag

SEQ ID NO: 48404 - DNA, 782 bp, Zea Mays
aagttcctcgatgtgttggcctgtgccttatattgtagtgttggcttgttggcacgtatcactgcctagttaattttttttaatccagcaaatcgcctgttgatctagacttgttgataaaataggtggcaaatgaatcattttctgttgatctgggctcattgattgaacatttttgtatggcagacaatccatggctagttgattaattacatctagttgttactgttgttgagttagtggatatgcataaagcactaatatactgctattctgatttcctaatatgtagatgtcacaaacagaagagaatatgtcacaactggcattaaccaacaattctgaggaactcagtgccaatgggtcaaggagccaaagtcaaagtcaggagcctaataaagagaatgcagaagcagataaagacaaagatgtcaagaaaaggaaagcaatggcacctagatcagaagcatggcaaagcttcacaaaaattatagagaaagattctgatgttgtgaaggaagcaaggtgcaactattgcaaggctattatcaagtgtgaatcaagagttaatggtacatcctcactatgcaagcacttgaaaatctgcaaaaaaaatccaaacaagataaatgatacaaagcaaccagttttgcaagcaacagctagtgaagatggcagcaagcctggtatcactgcttggaggtttgatccagaaatgataagggaggcttttactgaaatggtgatttcagatgagcttccttttgcattttcagagagac

SEQ ID NO: 48405 - DNA, 460 bp, Zea Mays
gttgggttctattatttcttagttttcctcgatcccttgatccaacaccatgaagccaagaagttttcccttagggacctcgaaaacttatttctcaaggtttagtttgatttggaacctttgaaggttggcgaacgtctcttctagatcagcaatgaggtcatcagactttttggaatttacgatgatgtcatccacgtagacctctaggttacgtctgacttggtcgacgaagcagtggagcatgcacctctggcacattgctcctatgttctttggaccgaatagcatcgagacataacagaatgtgcagtagtgggtaatgaaagtggtagcgtgttggtcgatttccttcatggcgatttggtgatagcctgagtatgcgtctaggaaggaaaggagctcgcacccggcggtcgagtccatgacctaattgaaacagcctgaatttgggggtata

SEQ ID NO: 48406 - DNA, 645 bp, Zea Mays
cttccttgtttttattgaaggagttttgcagacagctttcatcactgccataatgtgtcgtttcttttgaggagccttctcgtcacatgttttggtcatctcctctgtagcaaccttctaaggactcctccctgcctcttcttcggcattcttgtccttcatcgtcaataataagctagtcaaatctgaccctagtagaatcagcatagaggaaggcaaaggacgagtcatgacctctagaatttctgtaacgctaatagacaatgttgaaggggtctcaccaatctgcttcggtaactcagatggtttcctgccagcgcgatcaagcttcgatgatttccgtttctttggagtgggggattttggccctgattgcgaagattcaccctcatcagctcacatttgttttttcgaagccattttcttccttttatcctccttcactgatctctttgcctgcgtttcaagatacttacaactctcttcctttttatgccagtcgcttcttctttagaaaacttcttatagtctggaaaatcaagtcttagcgcatacatgactcgattcaacctttgcttttcttggttaccaaaagcagtggccatcaactggtcttccctccttgaataattacatagtatttcg

SEQ ID NO: 48407 - DNA, 507 bp, Zea Mays
cttgtggagcatggggattgctcgccggagccaaagaaccaccgcggcgccgccatccaccgtcactgggtctctgcgccctcccatcccttggtaagaccctcctttggtgttcaccttcgccttctcatcacgtagtaccctcgggattcgagttgtgcagccgtgtgtgggggatcgggggggtaccggccatggcgccgccgtggatccctggccgctgttctttttggtcgggggcaagaagaagcctggtggaccgttgagagtgagatgggcgatccagattcggttaggcatgagagatgaggagagttgagcagcagccgttggatcttatgctagcgcgccagattagaaactgaggatacctcttcgtgcggattgatctggaccgttgatcgcggagcgtgcggccacggatgcgtaccggttcgtttatgggggggattgaatccggaccactggattgtaatcggatggctcagggcctttgttaccccttcg

SEQ ID NO: 48408 - DNA, 321 bp, Zea Mays
aaacaatcttcccacacacgtggagaaaatccctgaacacctatcccgaccatacatagtctgaaattcatcccatgtgttactgatggtttctactcagcactttcaccaaaacctcattatctcacgtgggttagcttgagaaaatacaccaaacttgagggacaagatcctaatttagtaataatcatcttagaagacctatgttaaccataccatgcaattaaaagggggaatgtaaccaaactctaaggcataccacccttgagcatatgtaacacctaacaggaattgggcaagaaaactatcactacaagaaac

SEQ ID NO: 48409 - DNA, 620 bp, Zea Mays
cgttgcacaaggatccagcggccctcggctatctcctcccaagcacgatggcccgaggtggcatcgcctcgaccgcggcggcgagcttgccggcgagcggcgttttgtccctccggaaacatagccaaaacacccatatgtgcagaatagagaggagacaatggagaatctgttagagaggtgttggaggcgttgtccgtggcgagggacggatccgtggctgtctacgaactccagcgaggaattcacgatccacagaacggacgatgtccccgattcaccctcgtgggtgtccagtgtacccaggcgtaccctcggaaccaatcgttgtgtccgcgctcgcatcggggtaacagaaggagatcgccacaacgtggagtaggcattgaccgaaacacgggataaaatcaccatgtcacttgtgaatctttctatcatgattgttttcttccatagagttctcacatattcacttgcactattgttccaaagtttaatacatatctcaaaggaacaatcaagtgaagagttctctctctattcacagtaacttggttttcatttcactaacatttataaaccaagtttgtgttgtttagagttaatttttataggatcac

SEQ ID NO: 48410 - DNA, 378 bp, Zea Mays
gagggccctaggtcccaaatgtgaaccgcatgttcctctatggaccttgcgaaggagttctatgccttcgattattgtgatacatttgagcattggttggcttattcccttcttgtatcattgtccatctatcaatgcgaagtcacggcttctgtgcttcaatcttttggcttctctctagtaagaggggcgataatgaccttggaggtataaggtgatgagtgcaggccagtcttcggtcattattagatgtacgattctgtggccgtcggggtcttatgtcatctgcaggccttcaggatttctttcagctggtgtgtcgattgtgtggaagaacatgtcagatgccattgggtcgcctttcgctgcttcttttgc

SEQ ID NO: 48411 - DNA, 522 bp, Zea Mays
gagcttgggatctggaatttaaactctgcttcgggtgatgagttgagtgcttggctgcttgctgtgctcgtgttgctttgctttgtttcagctagcttcacacaggctgtgtggatactccggaataggaattaaatattgtgcggtgtggccactggctcgaagacctgtaccagtaggtcaagttgtgcacgatgctcatttgaaaagagagagagaacaggagggggcaaggaattgtgcacggacgacgctgcaggtgagggtgagctggatggatgtgtttttgaatttcatgtagattctgtcctccttccgtcccgtggatgtactaccactttgcgttggaacatgaaagggaggaaagctctacaggttttgatttagatgtaccactccggttctaggctttggctttctgaccatctttcgtagggattttagggaactctatttctggggatgtttgttttgccatcttgtgttcgagttggagaaaaagtgtagttttttcttttcttc

SEQ ID NO: 48412 - DNA, 336 bp, Zea Mays
gtgtctaacctgctaaggccttagactccttccatttcttttgggagatcgtaaaacccacgacaaaacagtcgtggattctagggtttgaaagagcactctgcaagggctcgtgaccacctcatctaaaattagagcaaggggcagcaggtgacgggcacactagcagccatgaccctaatgcgcaaaacgctaagggcgtcatcagctcgtgtttgagtcccggaaaggtctgactcatggtttatcgcaaagagaggaagcgagccatcgagtccggtcgaacgaagtcgacaactatatgagtcggtgcccggtagatgagaacagtcccca

SEQ ID NO: 48413 - DNA, 282 bp, Zea Mays
gacatttcgaccaatccaagggttagtatgcatgcatatacacattatgtatttgaggaatgcaaattttcatatcaaactacttggatcaatttaaaatgaaaattcatcaaaaataccaaataaatagcgtagagagcatatttagagccgaaatgcaatactacacatgtgcgatcaacttcaagccacatttgagagatcgatcacattcatttcacttcttagagtacaaaatctcgttacatccaatggctttgtaaaaatgttggctaattgatc

SEQ ID NO: 48414 - DNA, 605 bp, Zea Mays
tatggagtcatcttgccataattagaatatttatcccactctaggataacaaccatgagataatctaaaatttatttagatcctatctagtctaaaatagtcatatcaatttattctagatctgatctaatgtgatatgttaatctaacctaacaaagtctaacctcaagttgagctaatctcatgtaagttgcttaagcaagttggataatgctggtggcataaattagaccctacccctataaacatgattaacctaaaccggttccctatattagctcagccatatacaagtacttgactgatgcgttgggttgcaaaatctgtatagatcaacatattaaaattataagcacccaagattttcaactatcataacttatcctactcacatctacctacttgtccctaatttggataacaactccaaggatgaagaccaaagatgatcgacctcatcaaatcaaggaaaaataggattcaagccggatcttaaaggaaccaagatccacaatcttggatggagtcttttcttaccctacactttcttaaccaaacctatctatgctctaaagacatctactatcctacataataaagtggac

SEQ ID NO: 48415 - DNA, 390 bp, Zea Mays
gtttgctgcttctgaccatctgcggaccgtccggccatcatagccggactgtccgcgcctgtctcggactgtccgaccttagtacccggaccgtccgacgtacgcaggataggtgaccgtgatcgggtgtccgatcgtgcttgcccccctggcgcctccggtctttcttttgtccggagtctttcgagtaaccactctacgtaacatatttggtgtgtggggctcaccaataacgacatttttatctttacttttatcagccgcacaaggccgaactatgacttttttgcttgtcgactctaatgtggtggcagggacatgtggcctgtcaatcctcacctccttttgaaacctcatccgtccttcgtttatagccaattatatttgcct

SEQ ID NO: 48416 - DNA, 340 bp, Zea Mays
catttttcctaacatgagcagatttagaattatcactcttaggttgtaccaattcctttgtaacatctagatttttatgatgaacagatttgtttttctctttgcatgctctagcaacttcatctttcaagatagcatcaggggacatagggtgcaaaacaagcttcttctcattatgcataaaagagttttgatttgttttaccatgatgcacggtgtccttatcaaattgccatggtataccaaataacatagagcaagcttgcatgggtaccacatcacaattaatataatcatggtatgaaccaattgtaaattccacatggaccatacgtgttac

SEQ ID NO: 48417 - DNA, 737 bp, Zea Mays
ggttaaagctatgccatatagtagatatcaatatctatgccatatataaaatctatcacttaaaacttagcaaaaccacccaaccaaatcactttcacgcctataaaggtcataactccccactaaatccattaaataaattacatctagacttaacacaccatcaaaaccaacgatttacatcgatgaataatactcaaaaaatattgtttgaattattcctggtttctccctctccgatcccctgtgaccctgccgccctctcttcctccccttactcgcactaccgctaatatagatctctctaacgttagcacgatctatatgtttagtattacaaagtacgtacgaggaaaaatggttagaaaagaaaacgagagaagagaacccaatgcaagtagcgtacgtgggagtgggatccatttccaagcagataaaacagagggatgcgtgggcatctgtggccactgctcactcgtcgtctcgtcgtccttgcatgcaaatgcattgcagcagcaggcagcagcagctgtacatggctggatgggcatgcctcatcttttctgttgctgggacatgaggggtgcccgtttacttcctagggatgcttgatgctgtagcggacagggtgctgtctgtgtggcctagtggccctgtgtgtctgtgtccaagtggggaatcgtacgttgtgggaacttttagagtgggaaattcattttttttgtattttagcttat

SEQ ID NO: 48418 - DNA, 430 bp, Zea Mays
aaatgctttcgttaggacagcaagggtattttatggttcgaagatcaactggttgtttcgaagaatccagaactcaggaagaaaattttgaacgaagctcatctctccaaattttccatgcaccccggaagtaacaaaatgtatcatgacctcagatccttatattggtggaccaggatgaagagagagattgttaagtacatatctaagtgtgacacttgccaaaaaatcaaagccagtgatttaaaggtagcgggtaccttacaacctctccccataccatcttgaaaatgggaggacatttgcatggactttattgtgggattgcccaacacctcccggcaccacgattccatttgggtcattgtggataggctaaccaagacagctcatttcttgcccgtgcataccacccacaagatagaaaaat

SEQ ID NO: 48419 - DNA, 617 bp, Zea Mays
cttggttttcgtgttcttcgtcgtatttatcgttaaaccaaaacacaagaatttcatgggtggcagtatgtcgtcgtcgtctatcattttctattatacttacatgcggtatgagattaattatttgaagctttcttatatatccgtgtgttcaacacttgcagttggcatcacatcatggaactttcagcagaaaaattaagtcctggcaaatctatcccaatgcaagatccattgaccttcaagccgcgtctcggtgacaccgccaattcaagatgagcgatgcaggttttgggcagatccaaggagataagttggaggttgggaagcaggggcgtggcttgtccgggagcaagggcgcctccacttgtttaatcacgcccctgcatcattaacaaagcaagtggagatcacggagcatatatatgagggaatcgagcacatgatgatggggattaattagtgtcgcctagctcctgaccagttcctcccggcccagtctcatgacgacaactgtgcccaagccctaagcttagtgctgatccctttagctaatctcggctgggaacagcctagatgtgcgtgtaaagaacatggtggttatatatacagcctcg

SEQ ID NO: 48420 - DNA, 368 bp, Zea Mays
acctgcggtaggaattgacgactggagttgaagcgctgccgcgacatcgcagcacgcggtggcccggctttcctctacccctatggccaggattggataaccatctccactcgttaggtattccgcatggggtagcacatgtcttgcgtgggtcgcaatgccaaggttgctaatttacgtcgccggcgatacactccgtcgtgggcgcgatggcgctgccgtgattggggggagtcctcaggtggaagacgacccctatccattggttttccgatgagcgggtgagattgagtcgggctatagggtttcgaggatttcatcgcgatcattgaccgtcaatcgggcggccttcctaggaccctagtttc

SEQ ID NO: 48421 - DNA, 273 bp, Zea Mays
gtggtgacaaaggttgcacataaacagcttcggtacatgcctctcactcctagagtgaaacatttgtttctctcgaggaagaccgctatgcacatgaggtggcataaagattgtacggacagacaagatgggttaatggtgcacccgtcagatggtgatgcatggaaggcttttgacaaatttgatccagattttgccagcgatgcaagaaacgttcgtatcagcttggcaactgatggttttacgtcgttcaatatgaccgctgcgtcgtat

SEQ ID NO: 48422 - DNA, 891 bp, Zea Mays
atcatgttgcatgaatcaaaggatgaaagataccagatgctgggtcctatgggtgtgctcctaaaacttcaaagccgaagctatgtgcaggtccaggtcccagtccagaggtaggtagtctcaaactgtagagactacctcctaggggttgggccaccaatttttttctttggtatactagtatccagcctcaacacatcaagcctacctcccagggggccaagtaccaggtggaagttgatgacgctacacataacaagggcaaataacatatagataagttccagtgctacttgattaacggatattaaaatgtgttacatggccaaaagttattacggtcgccccccagcggaaccctcgccttatctctacaggttcagctactcggcgtcgacaggatcacgctgaaagcgcgcggccaccatctccactacatcttgtacactctcccggacgacatcttctgtggcggctaccggaccatcgatcaccgacgccaaggatatggcggggtcgtgactccggaagcacgttaggacgtagtccaccaccgctcgacagagcttgctgccctctgcctccaggcgggcaccgaggatctgatccaggcgtcggaggcgatcagcggtagagtccagcaccgggagggcatcggagatcgacactggcggctccgacactgggatggggctcatccctagtggcaccagtgtcgtgcttgcctcgccgacccactcggtaatgcgctggacctcggcgcgatgttctgcttggagatcttcgagggcctttctggtggcctccattgcctggggacccggcgccgcctgcaccgcatcaaactggtggatttgctcctccagcttcctctccttttcctcagcttcg

SEQ ID NO: 48423 - DNA, 291 bp, Zea Mays
gttacaagcagatgagagaggaaagggatcccaagtcacttatggttgttggctagaggatctacgtatcgagtatttgatctcttcctgtggcctctctttagtcaggccgaccctcctccttttataattcttactcggtaaaagcattgccatgcattattatttgtccctacataaatatccagttgtgtctcttcaagactgttggtgaagcgtggcgacgacgggagtccgagcgtcattattacttctatccatctctgtgggggacagatatcccccgggtcc

SEQ ID NO: 48424 - DNA, 607 bp, Zea Mays
gccccgtcgggtagggcgatgcggcatcagccgtggagtctggggaagaagatacaccccccaccgttgatctctctgcgaatgactaggattagatctaggtgtgagtgtgctgctgccgtcgatttggtagcgaacgggcaagatcatgccatcggatacctcttcggaatattaaatcaggatccttgatccatctttggacgatcgtgatcgactcggggttgctttagatctaggccataggtttgtgattgggcagtcctgcgctgtccacggattcataatgcactagatctaatctgaaccatcgggcgccgatccaacggctccgatcctagcgtaccccttcggcctggctattttgctaaagaacccttattgtttacagaaaataacccgccgtccgcgttggctgtgttatgagtcttggtgtcttttgcgcagaaccccctgggtttctgataaatagtggccgcagtccaagtaactcagaaatctactaaattaaatacagaaattctttttaatacaaaataatgtcccaaacttaggaaattcataacttgatgaatttagctccaaattgattcattctagtggcaat

SEQ ID NO: 48425 - DNA, 375 bp, Zea Mays
cgatttgtgaatttattcgatctcaagaacagcccaatttggagcctgttaaaacttttatttctcgaagcaaacgcaaattcgaaagtcaatctcgtctcgcaactcccgtccagactcatttatccaaactctcgacaattgtgatgttacctaatctatgtccgaatccgctctctcgatagccagtctatgtccaaatatttaatctgaatccgcattctccatcggaatctctatagtatcaacctctaattatttcttatgcaattcagcttgttatatttatgtcatcatccatctctatctatcaagcgtattctaaagatttcttaaagtttgaaccaaatattcgtgtgaaattataaatcctac

SEQ ID NO: 48426 - DNA, 631 bp, Zea Mays
cctataaattgagcaaggagccacggcgaggtgctttcatctccaccagtgaagctcagtcgaagtcaaattcgcactgccctctccatcttcgcccaaattgattgcacgcaatgaaaacacagcttcttacggccctgtagcctcaatccccaaccccaatttcaaccagagccgccgtgacactgatatccccctttctctgtctccggcgaacgtaaagccctgcgctccgtggctagccctctctggtaagtccctgtccgattcaagccttgttttagcagctctatgtgttcatgaagctcctcgttgtggccgtttaaccaattcgagcgtggataattgagaacacgggattgacaccgcggtttccgccgtgcacgtggataggccgttctcagtgcgttcttgtcaaattgatgcatgttcctaggtctccttaagccagtaatgcctccccggtagttagccgtaacagtcgtcgccggccatggccggtacggaccacgtcagggacgaacgacgagtgcgccatggccaggggtgtttttggagaagagatagaagatcgagggtttatttgcaacctgtcagcgacacaagaaatagtgaaagaactcattcccag

SEQ ID NO: 48427 - DNA, 477 bp, Zea Mays
ctggtagatcagatataggttatggtaagcatgccatggggtgaaatccaatgtagttctgctacataaaccccatttatatgtccctccaggtttgacctttaccgttttggttacaatatataccatattcatcaaaggactatcccgagttaatttagcaactaggggtatttataattttgagagatgtatgcaacacaagcataaaggtcctagataggacgagcaaagtggttctacaggaacacacaatggttttcacaccaacatagtgcaaattttctcagaataaccttttgatgtacgtgtaacttcgtgttgctagaggttatatgtccttttatctcatagtttgcttcttgtcattcagcgacaaagagagcaatgtgctaatatctggttgagcactatataactaagatttctagcctttattcatttggtaaggtctctttgcttactaacagaatccca

SEQ ID NO: 48428 - DNA, 434 bp, Zea Mays
aggggggtgtgtgggccataaacgcgttgcagtccaaggggttcataagtcatgagtgctctgtggatcgaggggctcataagctatgagtgggaggcggaccgacacctccactttgacttgtgctaggcacaattaatgcgaccggtcacttatgacgggtcggtctcaagctaggcgagggatccactcgagtggtttccctattagactccgccacgactgatctcaggctcgacgccacggggcttgtccagtggtggatgcctccagggtagatgctacctgtctcctccagctgaccaagctcgttgaccgatgggccctagggaccaaggatcttatcctgatagtagcccctgagcctccgaggggaaagtatctctcctctggggcttttcctgggttggacattgtctcatccctcttgtcgc

SEQ ID NO: 48429 - DNA, 655 bp, Zea Mays
tgaggattagttttcctctttgtatgtacctcaacaaaatagcattgttgaatgcaagaattagactcttgttgagatggctaggacaatgctcgattggcataggactccacagaagttttgggtcgaggcaatcaacgtagcttgccatgtatccaatctcaatttttctttgagtcttcatgaataaaactccttatgagttgtgatttggatagccatccaagataagtcacttcaaggtgcttggttgcatgtgttttatgctccaacaaggttatgcattacattctagagtttattgtgcacttaaccttaagattaaccatattatggaggcctatgaggtcacaatcaatgagactatgtttgtacaacccctgcgtttgagtgtgcacttgaataaatgataaagagatggacaagaccatctttgtggaggaggagcaagatgatgccaattagggtgatcctgagccatctctactgtatgccctagttgagcttgcttccattactttggttgacgaccctaatgccacttcttcctctacttggggtctttttgagccattgtaagttgaacctggaggaggtcaagctattgttaagggggaggcaactttctaaagtgaggcaccacagcacatttagt

SEQ ID NO: 48430 - DNA, 428 bp, Zea Mays
ttttgcaaaatttaaagtggtagattatatagtggtatagatgatgatgtgttacatttgggtgcaattaatttggtgaatttagtggatgttatggatgtgggggtgatttggttgagtgggttttgcaaaatttaaagtggtagattatatagaggtatagatgatggcgtgttacatttaggtgcaattaatttggtgaatttagtggatgttatggatgtggggtgatttggctgagtgggttttgcaaaatttaaagtggtagattatatagtggtatggatgatggtgtgttacatttgggtgcaattaatttggtgaatttagtggatgttatggatgtgggggtgatttggtggagtgggttttgcaaaatttaaagttgtagtaaaagtcgcctagagggggtgaataggcaaatctga

SEQ ID NO: 48431 - DNA, 924 bp, Zea Mays
cttcaaccttaaagttctcagttgcttcgataactttcttctttagctcttgcatctcggcttcatgagttttatcttgaacagaaagcctggcctcgctagattttaatctttccaccaaggagagaaggatttttatcattctcaagagcttcgtttctcaatgttatgacctccgaacgaaggtttccaagtgctattcgatagctcgcatcctctgcatctttttgggcctttagagccttgcttagaatcaagccctagcaaacgaagagtgaacacataacgacgataagaactaccacaaaaatagttcaccgtaacacaaattacaaaatgatgagccaaagtatacaaacctttaggttgctgtaggaaaggctatctgcaagctgatccttagtcatcacagataaaccaagttcaagcttcggataccccatgttatccatcatttcacggaaaacattgatctccttactgtctggtagacagtagaggaactcatcatcattatctccttcgtatgctaaggattccaggggtgtactttagctccttagcataatggtgtgtttcggcaacctgctctgccaatagctgctttcccgaagcatgtcgaacaatgtaattcaaatcaatctggggaggtgcttcaagagcaggtgttgtgggtctttctagaaggctctcttccacaagtttttctcgcgtagcttctgaaggtcccgcttcagcgtgagcagaagaaatgtttgcagtaaccacttttctggcatcttcaattttcccgccagaagcttcggcagaagtaggagctggtgtcttcacagattccagaacaacatccaaaacactagccatcctcctattcctcggagttgctgccgtagtagctgatagcttcggtaacgccgttgccag

SEQ ID NO: 48432 - DNA, 523 bp, Zea Mays
ctgtgaatcgctcgtcggagcagccacgacgtgtctgatccgcgccgcgccgagagcagggcatccgcgccaccgccgttggtaagatttccccagcaatcctgaacataggtccgtgtggtagtgtagcaccggttagaataccgaattagccatgggcgtgctcggaacgggatcgccagcgatccttcgccgtggggcttggctgccgccggtgtctggtgcgtgcgtgaagaagacatgtccaggggcgttgatctgtagtgtgggtcgtccgattctgatcgatcgggtgaaagtcaatttagggtatttaaatctagaacgtccgaatcggatctattggctcagattgcataacggttcgctgggggtagatctaatcggggccgctagcagttgatcggacggcccagatacaaccataccccttcggcgtgtacatttcttaaagaacccttctgtttatagggattcaacccccggtccgtcctggtagatgtctgagtctaaggagttttta

SEQ ID NO: 48433 - DNA, 588 bp, Zea Mays
cgaaatgtcgacacaggttagctggcctcagtgcggtgcacgaagctgtagcagccaaaattgttgtggtattgctctttccaagtcgccttcgtttgatatgataactcgtggatattgcagaaacacctggcgtctagctctaacccttggctcctcatggcccatataaaaaaccctactttaacaatagcttcgggggtaagttgatgaagataaatttcaaaagtttttagaacttcgaccaacatctagtccagggggaaccgaagttcggctttcatgaagcttctgaaaattaccacttcgtcagcttcgagaagaggaacattattctcccctccggccctcacgattgaaatatcacgaaagtatctgcctctcattacttcgatctgcccttgtttaatagtcgactttccgaaaacatcatggctcggtctccatggccgatcttcggcatctttgtttccactttctacgttgaaactctcactatcgctggagtttttagataatccagccaacatctcattggtgattttctccatgttggttttttccatagctttgtaaaatccggccagt

SEQ ID NO: 48434 - DNA, 379 bp, Zea Mays
ctcgttgccctttgttgggaccccgggcatgtccaccgtcacgcatcgggccgctggtgtcctctggcctgccgatcgactagtcctcttggcgtccaactcttctacgctctccctcgagccatcatatgcttgtggtgcgctcgtcgaacccaactggcgccacaccatggaggattacgaggccctgctggcgaaccgtacctgggacctggtgccacgccccttgatgccaatgtggtcaccgggaaatggatcttcaagcacaagatgaaggcgaacggccctctggatcgatacaaggctcgttgggtcctatggggtttcacccaacgtcccgaggtggactatgacgagactttcagccccgtggtgaagc

SEQ ID NO: 48435 - DNA, 949 bp, Zea Mays
ctcccatctccgtcccacgacacaaaaaattccccgcggggatccccacgaacgcttgcatggaacatttgttcttcgtccccgttcccccacgaggataaattccctgtcggggatccccgtcgtcactgaaattttattaggatgtacttcatatattattaattcatatattattaatgtaaaacattgtcacttatacacattgtgtcgtggtttcagaaaacggagggacaatagatttgtgttggtgggagatgcaaacgcgaactcactctgaatggtggatcatgtgaatccgagctaggaattgagacacaagggttatactggttcatgtcgaggccctagtccagtgcagtgcttatcgttgtattgcttaggagtgtgttacaacaagtgtgcttgtgtgtagaaggaagattgtctcgcccttttatagctcaaggtggactttacagttgggacttgtattctactcagggtgtcctcggcttgttgcccccgggctgctctagccctcttggtgtcgtctacgaactacggggcgtgcactgtcgtactcctgatactgcattctgtctcgtctactctccatatgggtcactctagcttgccccgtgtcaatgttgtcgtacctggagggtcccgcaaagtgggcttatggcgaggtttagggttgtctctagtacatcttcatcttccgtcataccccttgcgtcaatatccggcacacgtaggtatacacccggtatggggtattatcttgtcctttccggtgtatgggccacttagaagactctggtgctgaggtctccgcaaccgaagttgactgaccccacgagttaatgagggtatatccgtggacgcacgcagggatgttccatcatgtctgctagagaccttttattactgtatgtacggtctagatgtggtttggtgatgttgt

SEQ ID NO: 48436 - DNA, 555 bp, Zea Mays
tatgctacttcgtatcagtatttatttcaagtgtgtaaaacagaagtggtaccagaatgcctagttatgctatctgtgatgaacttctatgccttacatgtccagattgtcagattgttaatcgtttcggtccaatgtttggcgtatttctattatcatattatccttaatattcaagttttatgcaacatatatacttccttattttatatacattaggttccttttacaaatttaccatgttaaatatgctaactgtgtccagtgtctatgctactacctttctggtttagatgaagtgtgaaacccgaagtatgtaataccaattgtttagttatgttaagtgtattgagtttatataccattcctgtccagattggccgattgttaaacgttccatgccaatttttggcatatatttagtttcatattttgtgtaatggtctagttttacgcaacatattatagtattatatcaacgcattatataacccagtcatgcaaaatattaatttcctcaaccaaaacataggtcattgtgctattacaaattta

SEQ ID NO: 48437 - DNA, 511 bp, Zea Mays
cgattgcgatgaatccaaatgacccaagcccctaatatgataagggagttcagacccttgcacaacttatttgaaggaccattaagggtcaagtttacttcctcccacaagtcatcgaaggaagtagagctgagactgggagtgaaatgctgccaaccgacagtttcaggatattaaaccaaacttcccttgaaaaaatgcaggatgctaacaaaaggttcatagtttcttcctcctggtcacataacagacaactttgagggtgaggcaagccttttatcgccagccggtcagcggtccatcatcgcccgtgcgccacaagccacatgaagaatttacattttccaggagcccagcttttccaaatcctcccccatggcctaaaagttgttgagccaatgaagaaaccatcatatgctgacttggcggtatattttcctgagctagagagcagccatatatgcttatcctcctgttccgggtgcaaaatccagtttgcagcaaggtccca

SEQ ID NO: 48438 - DNA, 574 bp, Zea Mays
ctgggcctagtggccgaaccgtccgtagtcctgaccagaagggtatcgttttgcacatgtccctatgtgtttgggcgaactgtctggccagggttggcggacagtctgcaggtgcctaaaatggtttggacagggattgtgtgttttgggcaagttctattatggattgttcgaggtttgagcttggacagtactaactcctaggtcgcggattgtctggctaggattggtggaacgtccatctgtattaaaagtcaagtgggcagagctcggggagttattgttgttaggtctgacagctctgacatgttttaaaatgggaaaactagccttcacttgtacgctagaccgttcagccagagggcacggaccttctgtgagtgcgtaaaaagggagcagattgcccatcatagctagtattgagtggatatgtataaatagaagtgatgctcatgtatggaacctctcttgtccattgaccacactggagcttgtcatacactctcactcacccacatcacttgagatttctttctattgagtgattgagtgaatctaatgtgttgcatcattg

SEQ ID NO: 48439 - DNA, 591 bp, Zea Mays
ccgtggatccagtgatgggcggcccagattagttggagcataccacttcggttggggcaatccatgccgttgggttggttgtgaaggggtaggattagatctagatcccgacccttggatttagatctggcggtccatatctcgtgtcggttcacttaaagacggatctaatcaggggcatccactcgcgatcggatggctcagggcactggataccccttcggtcgtgggcttttttagatgagtccctagctttattgagaataaacctgtcgtcctcggtctgtgtaaaataattacgatggagtccgagatatttttaagctagcctctgtattctttagaattgtaatagtagtgtgtagctcttgtttttagtaaagagaattttagaaaaattatatataacatagaagtaaatcacataatcttataaaaattataacttgcacgttataactccgatttgatccatccaaattgcgttgatctcatagaaatatttattacgcactagcaatattgattatatgatatcccatacttttctaattaggtaactaatttgattaatctatgtttactggatta

SEQ ID NO: 48440 - DNA, 570 bp, Zea Mays
tgagaagggaattctatatcgcatagcagatccgccggagaagaagttttcctcggaaattcccaggaaagctggaataagacaacggatagcgcaacctcctgtgccttaggcaaagactgtttcttgcaagccgagaatcggggatttacccgctcgaagaaccccgctgcccacttcgcccacaaaggagtggacacgaattacaaggaagaaagaagcgagtgttcctcgaaaggggacagaactccaccaagctatctttctggcaccttcatcctcaaaggaggacggaaaggaacccaccatcacgacaactcctttctaccccgacatccttttcatcagggggagattggaatcatctcccatctccgatgacaagccgaccgtgcagggggaagaacctccccagcgtgaagcacggcgacgaaggaacgagcgctggaatattcggcgacatcacgaggctggggagcgggacccagcatagcccgtatctcgggatgaagtttcagaggtaggagaaacccttgacgagcgggtataccgagaaaggcagaattctcg

SEQ ID NO: 48441 - DNA, 377 bp, Zea Mays
gagaagttggttgctctacgtttttattgtcatgccaaggctcttttgtattcgttgtgcgtagaaatggcatcatggacatatgtgtagtgcttatttccagttgcgtgctcttcaggaggtatgggatctttttctaactgaggtggattctcatttagatgttcctattgctgaaggtcaattacttttggttatctcttctgaggttgtatttggggcgttagctaagaggtccatgcagttaatgggggtgatgcacaatatcaacattgtgattcttatttattctggtagttcacattattttattagtcaaactctcattgataagctcgaccaagttcagttgatacctactcaggctcaagtccaag

SEQ ID NO: 48442 - DNA, 717 bp, Zea Mays
tcccgcggctaggccaccctttcctatcaggatgtcccttgttcctttaggattccgtttttgactaggccgaaagcacgaaactcatttttaataaaaacttttttgagaaaaaatggcacagaggggtttccccctttctagcccccaagggaggttcggtctggtgaaaacatggccaagcctcacttgaaggttagactttttattcataaggattcggaatacataacagcttggaaatctaagggtaaaagcgacatagttgttcattgttccgggcatcgttgtagattttgcttcagtcattagatggctcataggtcccttggtggcacgactggtcctttccgtgctccatacatttggtgctgaggtgttcctaagtagggtcataaccctagtcgtcgaagttgtagtcgttagagccgtcggagaggaggcaatcatatgtggacaagaaatgtcacatggcctcgggatcatggagctcggagaagtataggtctagacccagatcatcttcagtctaggagcctacgtgctccaatgttcctgggagttccctgtacaggttggtgtagatgcttgtcatatacgggtagcccagaggatcaaagctgaacttgaaggggatgggattgaataccgacggttcccctcagtctattggtggagccagcacctcccgacttgtgggatggggagctggtgaag

SEQ ID NO: 48443 - DNA, 742 bp, Zea Mays
aagggtgttcaggttatcaaggaaatgatcaagtagaaagcagaaaaatacaaatgcttccggcgggacagcaaaggaatcttatggtttggagatcgataggttgttcccaaggaccctgagctcagaaagaagatattggatgaggctcacctttcaaaattctccatgcacccaagcagtaataagatgtatcatgatctcagatccttgtactggtggaccagaatgaagagagaatttgccaagtacatatcctaatgtgacaccagccagaggatcaaagccagtcatttgaagacagcagaccctttgcaaccccttcccataccatcttggaaatgggaggacatttgcatggactttatcgttggtttgcccaatacctcccggcaccatgattccatttgggtcattatagacagattaaccaagtcagctcatttcttgccggtacacaccactcataggacggagaagtatgcggaaatctacattgaccagatagttcgtttgcatggaataccaaggactatagtatcggacagaggagcaccatttgtggcacgattttgggagcaattgcaggaatcacttgggacccatgtaatacgaagctcagcataccatcctcaaacagatggccagaccgaaagggtaaatcagattttggaagacatgttgagggcatgtgtgctacactacgggaaggattgggacaagtgtctttctttggcagaat

SEQ ID NO: 48444 - DNA, 749 bp, Zea Mays
catcaaggcccatgcacttaagcaagatgtcactaagattttagcaataaagttcattatcaattaaatatacttgaacgatctacgccgaacgtttctatctgtcctaatactaggatcacgtaggtagtttattaaaggcatcctccattcaataacattagttgtattgttagccgaattgattaagtcgatgtctttggtgtcgtcggatagtctaaacctcttacccatatggtctgacccaattatggacggtccagcgacccagcccggatagtctgcaacctgggtactaggcccaacactagttattagacattcagaattatggaatctcccttgctttatccgataacctaatgcttctcatgccaagccgttagctctgcaattctcagctctagatatatgtcgaatatcaaattcatcaaaggagcggattatgtctcaacacctctaaagataaccatttaaagtaccatctaaacattgatactcctctaaaatttgtttcactcccatgttttctaaaagttctaaactgaacaagagagcttcatattcggtttggttgttagtgcagtaagcttttaatcggctagagaagtcaaaagtgacgttctttggtgaaacaagcatgaatccaatccctttcccttcattgcagaccggtccatcaaaatatagagtccagggagtaacagtaaggtatgacatgtctagctcatgcatattatcaatacgat

SEQ ID NO: 48445 - DNA, 328 bp, Zea Mays
atgcatcaacatgttataactcttcgtagctgattagttcatcgacttagtgcaagtattctcttctttaccctagccatggtacctcatcccacaagccatcgcttggccttcacctttgcttagttcctcgaagccctttccttgctatcttcaccctatcaagccattcttgagtcacatcctattgagcatccattgagagaatcatttcttcaatattgtgaaccttgcttgaatgtcttttagatataattgttaagatcaatcaagctctagtttgattctcatagaagcatatatggactgatagtaatatggtcaagcc

SEQ ID NO: 48446 - DNA, 831 bp, Zea Mays
ttaaacaagcttttggaattattcctctactagaattcattttctatattaatttatctgatttattttctctctgggtcacggttatcaatttccaggaagtccacggttactttggctaaaaacaggacctatattaaaggttttatcactgccaccggactgtgggttgattacatagaaacataagggctcttttgcaaattatcgaggtcgaaagggtatgagctgtttctggccgcgtgatctgagatggagggcccagattacatcgggatgacattgaaccggtatgcacgccaagccgttggatttaagatccagggtccatgttttaaataaccgtgatcagatcaccaccatacatcagccatcccacggtcaatgatgcacctcgaatcagtacgcgccctgcactaatctcaaccgtccctaatagaatcaacggctccaatccatctccttcatcccgcaggcaggccatggcggcgcaccctgaccgcggcggcgcttccgccgaagatggccgagatggcaccctgacccataatatcggttgtccgtgtgcgtaatatgaagagtaggctgaggcaaaatggggaagtacacccttaccggtggttagggcgatggcgggggtactcctggggaggtgcgaatccaaggggaaggccttactccgatgagcaattcgtcgaacaccagcgtggcaccacacccgcgcagacctcgaacgcaatcccgaaggtgcagtggagctcccggactcgccgatgactcccaatcgacggcgcaggcacacgaccacgatgacgaccaaattttccccac

SEQ ID NO: 48447 - DNA, 746 bp, Zea Mays
ggaagttgggtgaaagagtgcatattactaggctatatgtaggaagtatgggatcaataagcagttgattccatgattgtaggatcatgcatgcatcatgttcaacaatactaagtgtttcccctattatagtgaaatgtcatgcacaaagaccatactccggaaagcaactggaccttagggtgtggcccgtcatgagttggctcctcgacatgaggggagcagcagtgggagcaatgatcccataggagacttggaggctagagtcgagcatttgactatggagctacgacatggaggcagggagcaagcgcgtgctagttgtcgcatcaccgagttgtcaggagaagtggaacgcctacaacaagaattggtgtagtgtgatgaggctatagattgggcagtaaccttgcggtccatagcttgggattgtgaggcgactgcctgagcccaggtggaagagctgagtctggccctagaaaaatctgcaagtgcacaataacatcctgcacgaagaagtgcacgtgttatatgaccggctgcacccatacgaaccaccagaagttgccgatatgggcgttggcacaacggaagccagtagagaaggaccttattgggagctagacatttttgggacccctctttctatgaatatcatggaaggtcgccctcccgaagctagtggcagatctagagcagccaagggcaccgaggactagagtagtatagtaatatgttgttttctt

SEQ ID NO: 48448 - DNA, 703 bp, Zea Mays
ggcggcttaatccttcctgaggtctgtcctttttaccatccagtttttatatgttgcttacgaagccaattacaaggcccacggccctttactgtacccattcggcacctgatacgcgcgagctcggccttctcttccgtcggcccattatctgaacgtgttccagctctgttctggcgtcttccatctgttgtggctgttccagcctcctgacattatcctccccttgaaatgccgcttgaccccaagcggccgcagttggaaattgagcgtgcaaggcttcttcattctcccaggtggccaacgcatcatctccatgagaccacttgattagtaccggctgaacctgcttgtttccccgcacaactaccctcctgtcaagggcctgcaatggtacctgaagatgactcaaactgtcaggtagaacagcattgacaggtctgttgcccactgcacgtttaagctgagacacatggacaaccggatggatactagctgaagcaggtaattgcaacttgtaggcaaccttgcccacccgctgaagaaccatatagggcccaaaaaacttgaagcttaacttgtgtgctgctctgggagccactgatgactgcacatatggctgcaacttgaggtaaaccatatctcctattgcaaactcccgttctgtccggcctttgtcagcttggaatttcatccgttgttg

SEQ ID NO: 48449 - DNA, 328 bp, Zea Mays
ccacaccgcgcccgccttgcttccaaacgaatccaagccgtggaccaagaaggtgatcgaataaaataaaaagcaaaacattgctttctgctagggtgtgctggccggaaacggtccagataatggaagcagttggcctgccattgggaaagtcggtcaatgagcagcttggggatggggggtggctagctcagggtcagggatgcctgccgctgccggccggataggtgaagctaactgagctgaggtggctatggctaattggctatggctacgtgcatgtatcgcacgcccttcaattcaattcttcttcaacttcgtcttccac

SEQ ID NO: 48450 - DNA, 396 bp, Zea Mays
gtttgttgcagaggtgaaatcctcttgctctccatgtcctcctatatatacctctcatctcacgtctaggtatgtgtgtgtgtgtagagagagagagagagagtggtgttgtctgatattttagagggagagtgagtgtggaagtatgctgtgactgagtggtttgtttggaagaagctacgcagctgtgagtgatttctttatcttttctttctttctcagttgtgcaagtgcaacaaatttatggggaagagagcagagggtagtgtgcaagtcattcgtgtcaatggcctacacatgtggccatgtcttggagcttgtgattagatgcatctattatgggtcaaagcttcatatatggctgcatgcctcctcaatttttggtgtctcttttct

SEQ ID NO: 48451 - DNA, 828 bp, Zea Mays
gtcggcgaggacctgcgatttgattgttgttcttgtttcaaatgcgatgttgtagctcaagagtttggctacccacttagctattttggaagatgcttcgggatttcagaacaaatcattgaggcctcgatctgtagggactcttattttgtatgcctcgaagtagtgccttagtttatgcaaagccattaggactggataggctatttttcgagttctgccatgttgcactttgaattggtgaggacctcggagacaaaatagatgggacattgttgtaatctgccatctttgtgtctttcctgcaccagggccgtgctgactacattgtgtgagactatgatgtatagcaggaggggtgacgtgaggcctgggctaatcagtgttgtgagcttagacaagtactcctttagtgactcgaaagctgtaacttgctctcggccccaggcgaagtcttttgccccgacgcaacgttttaaggatggggaggctccgctctgctgaatgggagatgaatctgttcaaggtggtgagccttcctcttagtttttgcacgtctcgggcagactgcggtggtgtcatgtccagtgtatcttgtatcttggctgggcttgcctctatgcctttgtttgatatcaagcaacccaaaattgtgccttgccagatcccaaatatacatttctctgagtttaggcgaagtttggcttcgcacatattggcaaacgtttctgcaaggtcagagaggtgatcatctttgtttctgcttgcgacaactatgttgttgacatatgtgaaaatgttgcgacccatctggctctttagaatggt

SEQ ID NO: 48452 - DNA, 674 bp, Zea Mays
atttgttattggttcccataaacgagaagtcttactgttggttttcatgaaacaaagctttgtgtgaagttttatttgttgcttagtttacatagtgaggcctaagcattgtttgttttgttttgttttgcaaagatgtatggtacgaagagcttccttttgtggctttgaccagatccgatgtggatttgacgaatgttgaagcttcacagccagagttagtggatgatgaattcaagtcaatttggcgaattttgagtcttcttagtcgaagttagtggataaataatataaatcacttaagtttgacatgtctctgatgcatgaagttgtccttgtactgtttgttttgaggatacattagtaagagatcaagttcgtttgcctagaagcgagattgttccaaagccaaaaggcatatgaatgcgtgatttttaaagatttcttcactgccgcgttttgcttccatgttcaagatataactaagtgataatctcctagagggggtgagtagacgacacctgaaatttaaacacttataacaaaattagattccaaattagtggttagagcgagagagaatagaattagagtagggagcgagttcttcttgtacatttgctcaaatgattttggaattaactttgggagcaacactcaagatttgaatcaac

SEQ ID NO: 48453 - DNA, 525 bp, Zea Mays
gcgggtgtttgatgtcgccacccccgtgggttttcatgctgttattgccggtgctggggttcgtggctgggccattgatgcttggtggcgccaggtgttcagatgcttcaaggggggtggtgtgctaggttagtgaagcgagttcgctttgatttgtgtggactggatggaatggtcaggttgccatttgtattgattttgggggcgatatgactgattggattcattttagtcagttttacttcccatttttgttgttgatgctggtatagatccctcttattatgtctaatatcaatgttttgtgtagatttgttgttgtgggtgtatggtttactacatgcagattggtgtggcaatgttgatgcacctgtaaatattcttacgatgcataatgtagctaaaaattgatgcatcagccctgtttcttaagacttgtcatgttcgttgtagctttatgttgcggtactacatctatggcagatttagtcgctgctgccatacaccagatgcccagatcttctt

SEQ ID NO: 48454 - DNA, 533 bp, Zea Mays
caagatccaaggggataataagcaggaaaaaggcaatggctaaggtgaacagtatcagccgcatcaagaatagatgataatcaacatgaaaagcacggcaagccagaaattaaaaagaattaaccttaacgaccaccagtactgttccagatgcaggctaattcaactgaacctaatttctcaatgaagatagtatactgggatatgaaatctttaagaggcggatgtaaaagtaatcaggcaaatgatccagaccatctatctgaatcaacaacgctagaagcatgggcaaaattcaacaggccaaagaacctggtgaaaagggagggcgcaatcaataagtaccacaacagcattgacagtcaagggcaagcaggattcatctgggcaataaaatcgccctgaaagtgcccagaatataactttaacaagcatatacgacaatctatcaatacttacaagcaacaatactaataaatgcactatcaagacatgttttcatggtggatttaacagaactaattttgatgttg

SEQ ID NO: 48455 - DNA, 482 bp, Zea Mays
gtcaaaggtaccctttagggctggatctgtgtcaggatcgtatggcttcgggggaggagagagttcaactgcaccaaaatataagtttctataagatacgaagctaaaaaatttacgaagctaaaatatgacaaatgcacctatatgcctttcgcgctctgcggcttcttcagcttttcttgcttcctctgaagcaaggtgagattcttctttgctttgtttgatagcttcgtctgctatctctctgtcatcgttcatccacacttcagaataaaatttcccaccaagggcggtagcttcggctgaaggttctttaatggcatttgctgaaactaggaattctggctgaattacagccttcacattttcacatccagctttttcgagcagtgacacaaccctcgagtgactacacaggcacaaaactccccctgccagttagaacatcgtcaaatgctttgatttcaccctcaatccatttg

SEQ ID NO: 48456 - DNA, 607 bp, Zea Mays
cgtagccgtgggcaatttggaaattggggcacctgggtgccaggtaggctccgcgccggcaaggtccggccgctgggattcgtcgcgccgctggggtccgatgctggaggtaggagaggcatcttgggccgttggatcagttccccacggttgagattagaatctgcgtaccgtttcactcagggtgatcatggccattagatttggatcgtagggttcacgattgattatgacgtagattcagcgtggaccgtgcgattgaaatccgagggcccgcattccataccgcttcaatatgaaccgtgatctaatctggattgtttaaattgaatcgggcggccagggtcgttggataccccttcggtcgggtcgttttgcaaaagaaccctcggggaaaatgggaatcaacccgcagtccgctcgggtgtctccctgagtctgtggaattcttgcaccgtagcccctgctctttctggtatttgaggcctagtccagagaacagaaaaaccagagaaatgaatttataaatagatttttaatattaaattaatggcaaaaacttgtttaattcacagaaaatgcatatgaactccaaattgacccattc

SEQ ID NO: 48457 - DNA, 517 bp, Zea Mays
gaggacatgcgggtagcctacgtactataggcatgtttgtgagggtggcctgacggcccggttgtgctcgtgggctgcaatttccgtgtttgtgttgcttggctcatttgagtacctggttgtgcgcgtgcacatcaaccccctctgcgtggctccagggaaacacaactagggttctttttttgtgagctcgactgctcgcaccataaggcggtgattcgggggcgctctcgcatgacgatgggtggcacgtagaggaaggtgaaacctccgtgcgtgtgctccacaccaacgaatcctcccgcctttataagtggtgttgttgcatctcctttcttccactttgagcttgttgtctttcctccttcctcatgagagatcgacggtgctgagcagttgttcatggcggtggtgagctgctccgatgggcttcatctctgttccccagtctttgaggttgcttgatgcacgctgctccaactgttgcgaggactccgaggtgttggacttcttcctc

SEQ ID NO: 48458 - DNA, 275 bp, Zea Mays
agtttgaagcggccattcatggactttacctctgcatgaaaatcccaggtccgcaaggcgtgatcacagtttatgtcaaccagcagactgcgcgcaatattgaaagagactttgtcctagggcaacggaatgtgcactgcctcacagcacaacacgaaggttttgaagggacccgcctagtcgccgacgaaaaagtaaaggcacaactacaaagcaacgacagaacgaaggcggtacctctcgacctggctacgcctaagcaaacggtcgtaata

SEQ ID NO: 48459 - DNA, 697 bp, Zea Mays
aatgaaaagttcacaggaaagtggatcaaagagttgtcgtatgtggtctagagcctaagaactcaacctagccgagctttgcatggaaacactcccttctttatggtatatggttcggaggcagagctacctgctgatctcaagtttggggcaccaagattgatcttcgaaaacataactgaagctgaggccactagactgcaggatgctgatatactaggagaagaacgattgaatacaatgattcagtcagccaggtaccagcaaactctaaggcgctatcatgataaagccatacgacatcgagctttcgcagtgggagatcttgtcctctgtcgaattctaagggggaaggacgacacaaattgttgccactatgggaaggaccattcatactagcagaagtcactcgacttggatcatatcgtcttactcaaatggatggcacgaaaatagggaactcatggaatatagagcatctcagaaagttttacccctagctagattttaaaagctattgggacggcattgtattctgtaattggataatacaccatcaataaaaagacttcgttctcaaaggcactcgaactgtttattgtcaatctgcatgcttactcgactcagggtgaccactataccctactaacggagcaatcgacttaagttggcaatgacttaaggcggtgtgacatgc

SEQ ID NO: 48460 - DNA, 398 bp, Zea Mays
tccgcccaacgccggcccctccacacccaagacaaaaccccgacgaggacccttggtgctgactgactgaagcccttcacacacggtcagtgctaacgacgcccatgaagcacccctgaacccatgctaaaaatccaaaccccccacgacggttgcacacaagtgctgcgtgatgcaaagcccaggcagcctcactcccatcccatgtccagcgctagttgtgggcccctagtgctcgtcctgtgttccccagcggcatggtggctagcgcccctagccctctctccctgctgctctttctctattatctcaatggagagggtaatagattcctatacgtgaggtggaagaaggagttagccacactaaatcccactttcttttatcttgtgtggttg

SEQ ID NO: 48461 - DNA, 1294 bp, Zea Mays
gggattcttgtaactcggtccctgttgaaacaatggttgttgcaactatcccagagcttgaagaaaccgtggacactcgaaggcctaagggtacttgcccgaaacgtctccgccaggtcagttatccaactgcacctaccgaggggaagaaaaagaaaaagagatggcttcggcgagtgtcgtgtttggaccaggatgctggcccttctgctcctgctgctgaagaagtaccggtggaactctttactggagctgatcccaatgggtgtgaccctgctgatgctgatctcaatgggtgtgaccctgccagagttgaacccaatgggtgtgaccctgttgatgctgatcccaatgggtgtgaccctgccagagctgatcccaatgggtgtgtccctatgccgtttattgtccgtattgttgacgaggacgaagaagaagaagaggaagtcccattaattcggaagaacagtcgatgttatagagtcagtggggggagtagcgatattcgttctccgactctgtctgctcttgttggtctgcaagaattatccatagcaaattttgatcaagctctcgaggatgttgttctggaagatctgctgtcagagccaactgatggtgatatgatggatgtctgctctgacactccagatgtgggattagaggtatcccgggcagcgtctcgtgcatcgtcgaccttggaaggcggtcttcggagccaagaggttggtcaaggtcgctcaattcccatggaggtgattgagaatcctttagccttagaggtggctgttgaagagaacccagtcctcaggggtggtgttggtggttgcccagcccccgagggtgttgccggtaatgatccggctcgagtgggtagcgcaagctgcaacccagcccccgagggtgttgccggtgatgatctggctccaatgggtagtgcgggctgcaacccagcccccgagggtgtccgagcgggctccccttctcatacctccatggatgtccacgtcgggtcttctccaccacactctggtggcataatagtagtgcatgcttcagatgatggagtcgccttagaggtcggcgtaccggatgctggggttctgatgcctgctagtggtgttgaattaatccctggcgatgttcttcagactgccccggttgatattccttcgtcgagccaccacctagcttcttgtgacttgggatttccttcgttcttttctaatcttcaggtaatttggctttttctgttctggcaatactccttgcaaattactgtcttcgtactcat

SEQ ID NO: 48462 - DNA, 368 bp, Zea Mays
ccgacccataaaccatgaagaacggggtatttccatgcagagctcgactgggttgagttcgcaggctccagaccacgtacaacagttctttgatccattttcctgcaagtttttcgctcttgtcgaataccttttttctaagtgcttccagtatcattccgttggccctttccacctagccattggttcttggatgtgccactgatgcgtacttgatctggatgctcctttgcttgcagtaatcgaagaacttagagctggtgaagttggatcctaggtcagtgatgatgctattcggtattctgaacctggatattatatcctggataaactccactacttttgatgaggtcaaggaggcaattgac

SEQ ID NO: 48463 - DNA, 294 bp, Zea Mays
gagcactttaactccttatgttctttggtcaccttctctaagctttcgtatcttttgatgagggtctcttctagcttgagaagagtttcactttgttcacccactcttatcaacatattcattagtattaccttatcttccttgttaagatgagcgtcgagtcaacgaatatcatctttatccacatattcaatctcacttcccctaacattctaattagcggtaagatatgcatgataagtggaacgataagactaaccttttagagaggtcgattcatcatttgatctccac

SEQ ID NO: 48464 - DNA, 762 bp, Zea Mays
cgacaacttgctggatcttataaaagccatatttctttttcagcacaaaatagttctactccatggcgcaattcacagcagcaaggctcgagggcacacacaccttcatctcatgcagcttctacaccatctcgtgcaacccctcactcagtttcagcttctggaaagcaatctgatgggaaaggcaaagctgtgagttctaatcagtacaactcctctactgcagcagcccaaaataagacaagtaatattgagtgttttaagtgtggtggtcatgggcataagcaagctgaatgccccaatcggtgtgttattctagcacttgcagatggttcgtatgattcacaaagtgaggaggaggatgtaaaccatgacaccaatatacatgatgaaaatttggaaacttttgagtacgaagcagaggatggtgaatgcgaattgggcctgaattgtttagcactgaaacaagttcattgtattgctgagaagcacatgactcaagctattgttcctagctctctagaagaaattacttttgctgattttgatgaactacttactaatatttgtgatttgtacactcatatttccccaccagaagctagtctccatgaatcttctaatgatccctctaataatcggagtatcacattactagctgcaccctatcacatttcaagtagccacaagaccactactctagctgttgcaccggatcaagtagtgcaagaagtcatttgtgctccagagtttggtactgaa

SEQ ID NO: 48465 - DNA, 397 bp, Zea Mays
ctttccggcccatagaaggccgggaagggatgaccagtcctatgaaccacatagggaaaatattagtacaccacaaaactcaagccaatgggagggaagacgacataccaacatccaaactacctcacccatattggaccaaagagtcggtggtctcccaccgactgccatcgatatagtaagagaggaaatagctggggcgttccgagataagctcggagttagcatagtccccggggggcagtcatatcgaagaccttataatagccagtttgaccgtctcccatacccacaggggaccagaatacccgaattcgcaaagttttcgggtgaccaaggaaagagcacgtgtgagcacatagaccatttcttagcacaattaggagcattggccgac

SEQ ID NO: 48466 - DNA, 475 bp, Zea Mays
aaaaatttaaccatagccgaagctttatgcattgcactttcgagcgaacacttcatcgtttaaggttaacttcgtcagacgggttagcttcgtcaaacggtaaaaaaccgtcaaaatggccagagtgtgatcaactgcaagggtgtctcgtgaggagggcgaaacagaggccgctgaaacggcaccgattttagaagtaatgaaacgatcaggtctggttgtgggcgacgaaggtgcttctaatgccgaagcggaacagactgtggttgaagatgaaaatgttgaagagagtgaagaagactacagtattctgatcccaacgaagcctagtcatctagattttgaaaaatctactgtgacggaagatgacatgcctatgatgatgaaattgggctattttggagaggcggagagtaaacttattcgatttgctggagaagagaccatcccagagccaaagaaggatgaagttgtc

SEQ ID NO: 48467 - DNA, 428 bp, Zea Mays
ccactaccttgacaccagcagcagaattaacctgggacctgctgtggggcgtcgacaaagggacatgtttctccatcacagcgcccatcggcagcagcagtatcatgcatcgtgggattctagctatggacgggtgggaagtacatggcagtgtgggacgattgtgccagcttgaagcagcacgcatgtgttgcctgcttgccatgatgtgcatgccttatagtagtctcctattcttatttggccacatcttcttgactgcttaggccttggctagatcatagctacatgtctctttcgtttcgtctatatggacaaacagaccgacacagcccacctgcatccaattcgaaggcaggcaggctacgtttttattattatttttgagtttggtgttcatatattccactcccctactgatatctgac

SEQ ID NO: 48468 - DNA, 832 bp, Zea Mays
cgggtttgtacccgttgctcgaggaacaatttgagataaacagtgccatgcaggtacagcagaatgtacttcacggtgatgagatgcgactcccaaagatcttgcatgtagaggcaaacgcgttgtactacataggtgatatctggacgagtgaatgtgaggtaatgcaacgcaccaaccaaacgacgatacagggttgagtatgaaaccggagagccatcagaggagatcttggcctaagtatccagtggggtgttgtagggcttgcattctatcattccgacatagtctagcatatcaagagtgtactaggcgctgagagaggagcattcaggtagcggtgcacgtaatacgttcccaagaaaatgctggataggaccaagatctttcatatggaaagcggcttgcaatgcagtgatgatctgacagaggagagggttgtcgtggtagttaggacaatgttgtccacatagagcagcaggcagtagtgctagactcccgctgaagcacaaacaaggaggtgtcggacttggcttcaacaaagttgaatgacttgaggtgagtggtgaagcagttgtaccacacacaaggagcttgtttcaagctgtagagcgatttgttgagctggcagacatggtcgagtggagctgggtcaacaaaactaaagtgctgagtgcagtagactatctcaaatagggtgtcgtgcaagaagacattcttgatgtcaagctgatggatcgactagtctctagagagagccagattgaggacagtgcgtatggtggcgggcttaacaacaggactgaaagtctcattgaaatcgatgtcaggg

SEQ ID NO: 48469 - DNA, 793 bp, Zea Mays
cttgtgcttagagaaaccgttttagtatctctttgctatatatgcccttaaacatgttagtgtcatcggaaagcgcgccccgcgtcctttcggggacggcatgcatcatgtattcatatctctccgttgatggagaaagccattaatgtaaaccgccacatgctttcatcagcgattaaggcgtgatgctgtctgcctgctgaatgatgatgatgacacttgcaacttgccggacactttggcgtgtagtagtaactggccaacaggatcgcccggggtcatggaatctgcagattctgtttgcatctccgtcgtttctcataatggcgttggtcaatcattttccccatcatggagcaagtgagtctgccaagttttgcatccaccaccccagatccaactcgtacgtttctccctgccgtagccgtacaatggagtatcatacgtagtgcgccgtttgatcgtcatgtcactattttacgaggacataaaacaaagttgttagcgagaaacgtctgatcggtttacatggacaaggtcattgtagtaggaatacttccttctggtcgctaaagtgtgatatgcttcgactcaatacccggtaccggctccaaactcaactttggccagtaacatctaggtgtcgtttggtttatatattggtaacataacgagtaatcgataacattaaattatatttgtcgataccctgtatcaggggtaccctctactacaggatgaaggcgccgcacccgtgcaacacctcaagaccacacggagaatggcgcccaac

SEQ ID NO: 48470 - DNA, 641 bp, Zea Mays
tggacgtcgagaacggtggatcagggacgagcaccggggagctcacgcgtgtgaagaagctcgacaccaatctgctgctgttctggcgtcgagaggcgaggcgatggagagccggcgtgagggatggatgaacgcgagcgacggtgatgaagaccgggcgtcggtgaggtgacaggagttggtatacagggcctggcaaacttggagataagaacgatcccttcctttcccccctccggctactctttatatggatacagaaaagctccagcagtggctggtttcagggaataaacagcgaaggatacttaggagatgtgggcaactgcatgggcgtgagtgcgtggcgaaatttcaaggatccacgcccaactctgaagtacagcaaagcaatgaccaaggcagatttttaccacggcaagggatacagataaggctgtctagatagatgctctccagttcacctgggatatttcagtgttggctaaagttctaaacacccgtgcaattcatctcatctctatctccacttcaaaccaaaataagatacgacaaggagaagaaaatcagtggtagatatttctgatcaatagtatctacaacattcgactgactcctccctgttcagccactcttttctc

SEQ ID NO: 48471 - DNA, 285 bp, Zea Mays
tcacttttgaattttgaatgcttttaaaataaaacggctcagaaacaaccgttaccggtccacagtctgatttttcacgagcgggttttaaatccctctccatatttgacgaagcattgtctagctagcctgtgtgatgacgagcctcctgccaatgaagagcagtagtagagaattccagtagcgtgttcagagccatgttggaattacagagatgacgactatctagctccatcgtggacacatataatttgatgtaggcagtgtgaattatcttcgtttttg

SEQ ID NO: 48472 - DNA, 412 bp, Zea Mays
tgatgcttcaagacaaggtttgggatgcgtacttatgcagaatgagaaagtcatcgcctatgcatctcgcctactcaagcctcatgagcagaattatcaaaaccatgatttggaactagcagccatagtgcatgctcttaagatatgaagacactacctgattgggaacaaatgtcatatattcatagatcacaagagtctgaagtacattttacccaaccagatctcaacctccgtcagcgaagatggctagaactaattaaggattatgacatcgagatccactaccaccccggaaaggctaacgtagtagcagacaccctcagccggaaacctttcggggagaaagcaacaaacttcttggaagactagaagagagaatcagctcaactgaatgcttgtttgggagaaa

SEQ ID NO: 48473 - DNA, 302 bp, Zea Mays
ctaggcataggttttgacttggaaaattttgattttccttttggatttcaatttgggttaggcttttgagaaatcgccaccccttttcatagcttgaacctattgtagctttgttactcacattattatccacaacttttgttaagggtccaatcctagttaagtcttctaggccagtttcttcagtgatctttgttttgcactctttggagtttatggaggggattaaggaggccaacttaattcatcttctctgcatgatatgggcatgttaggacctttttagcatgtttatcttgttt

SEQ ID NO: 48474 - DNA, 486 bp, Zea Mays
ttgttcgagaagtcaggtccctatgcttattggtggagatttcaatattctcagaaaagctgatgaaaaaaataaaccaggtaccctcagcaagtggagttttctgtttaatagtatcatagatcatcatggtctagtggaatttgagctgaaaaacagactatatacgtggtctaacaaccgcaacgatcctacttttgaaaaacttgacagatttttggccagtcctgactgggatcttgcttataataatattagtgttgttgggttaaatagatccttctcggatcatgttcccctttgccttcaatctgataccctccccatggtgcgtaaggactttcgttatgagctgtgctggaatgttagacctgattttcacaaattagtggaaaatgtttggtctctccctgttggtgtgtccaatagtctggatgtttggaagttgaaactgaaacgtctgcggcagaagcttaaaggttggaa

SEQ ID NO: 48475 - DNA, 623 bp, Zea Mays
tgtccgatttcatttcctggttcaaacgtaaggtacgtgcttagtttgtaaaagagatacgtctttgaactcaatttagcctcttttaacttgcgaatacttgcagggccaaagagatccgtctatgagtgccgagtagagacaagtagccaatggctttgcttatagggtcaagaaatattctgggtatgacgtcaatggataccgttttcgcacaacaaactacgacaaaagtcggcccaatcggaaaacaacgtgttctggagtctttacgctcggccttgacaatgtcgattattttggacgaatcgaggaaatatatgagctcaatttttatggttccaaacctcttactccagtgatattcaaatgtcattggtttgaccctcaagtgacgagacggacacattctaatcttgggatagtcgaaattcgataggatttcaccttagcaggagacgatgtctatatcgtggcccaacaggccacacaagtgtattatctcccatatgcgtgtcaaacgaaagaacatcttaagggttgggatgttgtgtataaggtatcaccgcacgggaggttacctgttcctaacgatgaagattacaacttagacccggacacat

SEQ ID NO: 48476 - DNA, 482 bp, Zea Mays
cttatattcactcatacactttcacctccaattctcaagtcatctccttcattcatacactttcatcaccattgcaatccaattgcttcaagtctacagcgaactcgacggtctcagccttggacaccaaaaatcaccggaccatggtccaacggctacttcgacttccaacagcaaccacaacgattagttgacgtggcaggtggtccggtggcagaccgagccagttcggtgctagcttaagttggaaggtcccagtcaggatcctagagatgacgatactattgggggtccagtggtgcgccagatcgttctggtgcgtccgcacagagcaaaattacatcaattttttcaacggctattttggctatttggggctataaacaccccctccatcaaccatgtcaagtacccaagcatccctagagcaaaggaacactcacatacacttgcacaacacctttgattcattctagagaaat

SEQ ID NO: 48477 - DNA, 1079 bp, Zea Mays
gactctaaaggttaccatcactacctccaacactgggggccagggcaggcaagtaaccaggcgtgggtccctgttctgcgcatcgtggatggtccagcgcatagacacggacggtctgggacatcatcggacagtcaggatcattcaagtgaacggtccggcaacgcccaggagccacgacgatcacataccttcaaaccacgacgaccagaaatatgtacgtggaaaactaacacattaaaggtagctagtcgattggtcaaatctggcccgacttttgatcaattattgtcaaagtatgtgaaaagaaggccggcccaagtgatcggccaccaaagcgacctcgctcacccactcaggagcgacaacaagtaagaccgattggaccacctcatgaataggaaaggacgggaggtcataatgttcaattaagacctaacgtgcgtgcatggacacctccacccccatatccacatgtgccatatcaacatacatacataccaccgccataagttctgaataaaatgtggagcatgccaccatatccatttgggatgccacagtaccccgtttggggggtaccccaaacatttgtgttcgataggttggcaccttcagtacaagaccgatttagtgcccctcaatctggtcactaggcacaggcccaacaagattgccggaccactcgaccgcaaaggccgaccaatcctattgggggacatatacctgcagccaccaagaggacgtcaaaaggggacatcatcaaaatatgaacaataaatgtcgtcatataggaaaataatgaagggccaatgatttttggcaaatcagccaatacaggcgaagaagaagacacagatgccagtaaaacagccgatccaaaatacttcatgccccgatggttgtgggagacagatgtcccccgggttcactagaaggctagaaggcctcacgaaaggctttgggcccattatttcgcaaggccatcccttcgtgggccagggaggaactgctggcggaatggattgacgctggattggatagactcgggcccagacaactcattggatttaagcatt

SEQ ID NO: 48478 - DNA, 716 bp, Zea Mays
gtcaacatgggctcaggcgacatggcctccatgtatggaggtcgaccccctgcggtgcgccatagaaactctgaccctcgacgctgtcaaagggggcgtcccaaccgtatggagctgggtgatattccggagatgtagatgctggccttgatggtgacgatgatgtcatcattatatattgtgttgttcctattagggccaacacatatgatgggattggggatgatggcgctggcattggtaggaggtgaatgggcatgcacaacctagcgtggtggtggatggaaggccgtaaagtgacagaggtggaggggaggtggtggtagggttgtggttggtgttggctgtgggaatctaggtgccatcgggaaggcctgcatggttgccatggatcgggctaggtcctggactgtggtggctaaggtttcaagtgtgagggggtgtagaagaggatggtggtataaacatcatggtggtgtgtggcaatgggacggtggaggccgatggatgtggcgggtgggtggaagatggaggatcgctggacatctctgatactaggttgataggattagagttcctaccagagaggctatgcagattgtatgtatgcggtgtggagggacatggctatgtttagcacaggggcgccgtggctgctctgcgtgcgtgctagagaaaagagagagatatggagccacctccctcgagaagcggct

SEQ ID NO: 48479 - DNA, 349 bp, Zea Mays
aaaagaatgatgctttttaaatgaaaattatgtaaccaacattaatatttagtcgttattatatctctactactctataagaacctaatgtagaccgtggtgcatagttctgcctcctcacggcgcatacgacccacatgttagtgtctcccttcttccccgtgtgcgccctctcccctctacccctgcatccgcatggtcctcgccacaatcccctcaccgattaatgcctcagccatggaaggaaaaatctcgtcactgccacagaaggaaacacatccccttgccgctatccacgcctcgcagcaatccagcacgcaggaatcccattgccgacgacgcgcaggac

SEQ ID NO: 48480 - DNA, 597 bp, Zea Mays
atcttcccgactgtagcttcgagttcgacaattctttttcctcgcgtgaccttagtaacgcgctctatttcgttttgcatgttttattatgttttatttgaatgatgtaatgttcttatacatatactagtattgtgcccgtggcaacacgaacgcacatatttacgatcttatttgatgaatgacttagtattgggcttttctctctttagacgttccacgagcattagatgtgtccaggataagtcttttttagcttcagttcatcctcctccaactgaacaattcatgctttagcgtcactcttagctgttagctccatacagtcaaattagctccatacagtcaaaattaagcagtttaaaaagtgcatacgcaccctacttcacaaagttaggaaaccatacatgattcacttcttcagccatagacaatatgtggttcaaatggagtgacataatagatacttatataccttagaggcaccgacatgattaagacaaatgcccaccagaccaacaccggaacctagctgcttatcatgcaaaatgttagagcaataatcagaattaacaaaacctgaggatactcctcaat

SEQ ID NO: 48481 - DNA, 508 bp, Zea Mays
tcgattccccctgtacgatatgataggggaggttttgaaaaggtttgaaatatatctccatcagctgacaccgaataccattgttaggctcactatttacatatgggctctccaaagccaaggtaaaagtgtgaatgccaaagggttctgctgagtgcacgaactgcactatcagacgaaggccagagctgatggtcttcataagaacttcgagtgctataattttgcataccgaaaggataccaaggccccagtgattggctaccatactaaatggccaaccgggtggactaatgaatggttttacatgaaggctgacgaaaagaagagatagaagctcatgactatagtaatgagccctctgagattaagcttcggcatgacgaggccattatgcaacatgcaactcggctctgcatgccagctggccgaagtagaattcagggtggtagctggtcatattagcactagagacttagtgcaggaatatctggcaaacaaaacagtc

SEQ ID NO: 48482 - DNA, 674 bp, Zea Mays
ctcttgtgatgtcattccccctgcctacagctacaacttgctcaagcatatgggaatgcagcagcagcatagccggcatgcagtagtgctgctgctgggctggtagtggtacgataatgatgagagtctgctgctgttgggctggttgtacgatagtactactagtgatgagagtgacgctagctagttgctctgctctgcgttgctctgctctgctctatgtccccgatcaaacgagagagggatggcccacatcgacgcagtagtgcccggctgtttgcatgggctataaaatggaccaccacctcaatcgatagggacggtcgggtcacaatcgccactaccctacccactagtacatactagagcagccgatggcctcctcctctgtttcgctgctcgtcacgatcatgctgctgctgccgccgtcacatgcatgctcctcgctgagttgcaggcttgacttcaccagcgtggcgctgctctcctgctaggagacggccccacaaaaccctactgcctcatgctgcgacaccctcctcttttccatcgacatctgaccaattcatgaactagaaaaaggtctttgttgcctatgtgtgtacatggtttcaaggaacactacctttgacctgcctatgtcttacgtctcatccggggataaagactcaagt

SEQ ID NO: 48483 - DNA, 568 bp, Zea Mays
caactatcagggcttcatcttctgtcctcgagtaggctccaagtagctcatcactcgttgcctctatagcgtctagccagtcatcatttggctcatcaaattggcttctgtaccggaaggtgtacttgagataaaccaagccactttggctggagccagcggcagcttccttcatatgctcttgaactaaatctctggtaccaatgtaggtacatatggtgttgaaggccattaggcacgcttgcacttcattcccaagtgtgattgatggccttctaatgccaaagcgtgaccatataggacattgaatgatgtccctcacatcctccctctgatttagatcattcttcacataaaaccattgcttcatccaagagcccgaccacttcttcagaaatgtaggcacagggtaatttgcctcagagcggagcacgaagctataacaaccgaagttgttatggtattgttcttttccagtcgccttcatctggtaagataactcatgaatgttgcagaagcacctagcatccggctccagtccctgactcctcatggaccatataaaaac

SEQ ID NO: 48484 - DNA, 927 bp, Zea Mays
atttaaatgggcactggactgggcctcattttctgaaaagtacaggggtctcagggtaaaactcctaagacacaagctaaccacgcaggggaccgcgtgttagttttcctaaaacagaggggctctttaacacttttgccagggccgaaacggtaccgtgcactcacagccgtccgatcataaacatagcgccgagattaaatcaagtcatacgcgaaacagtacatagcgccaaccgtctattccgagatctacggttcggatttaaatacatctcgaccgatctggttcgtccgattgtgatcgaagggacccgaatcagtcctggtcacatcttatgctggacgcgatcatggccgtcgcagacggatcgtacgacaagcgttcatcttctccccccgagctatcccgtggcagctcaacaccctgagcgcggtggagcaccaccgtcgcaacgcgaatcccttccttgatgcaccaaatcccgatctaactacccctacacgatgcgaggaaagaaacgagttgcagggagggggtggtaccgactagattggctcagagttctccgctcgcggcgacggtgatgtagcggtggaggagttgacgacggcgagaaatccctgtcgccccagtcgccaatcccacctggagatgccccaaaccctttcggcaaacccaagggaagctccacgacgaggccccacgcccagggtggacgaattcgaggtcacggccgcggcgcgtcgacaacgattcctggcggcggtgaactggctgcggaggcacttgtttttggttgcggagtccaaggcagccacgctgggtgaagctttataccgagtcagttcctaactccccttccaccccagtagccgagcatcacggagttcgtttatctccaacacgcgccgagatctcaggaag

SEQ ID NO: 48485 - DNA, 573 bp, Zea Mays
ttgtcaatactctatcaaagactattagatttctgaagcttgagtgagatcttagtaattgtagaagacaacacattactgggagcctattctactcaaactttaaggtacaaactcttatgtctgcccctttgaatttttaacagttaaacttttagattttgcggttaacttttgtttcttggcagagtttattgctgagtaaggctttgaagcttcagcaagaagctgaaaatcaaaagaatgaacttgttgtcagcaatctggagaaaagggcaaaagagcttgaaatttttttggcagagaaggatttgaaggttaaaattgttgaaacttagttggccaaagctgaacttcgtatcatggatcaagctactcgcatctgtgatcaggataaagagcttgaaatagcacattcaaaattgaaggaagctaaagatcattacaatgacgaggtcagaatcttgagaagcaaggttgaagctgaagaaaaaaagagttccaaattatctaaaactttaacgtcgcttcgggaaacatgcttgagcttcgtggaacgaagctcgcccgcct

SEQ ID NO: 48486 - DNA, 358 bp, Zea Mays
gtccaaaggaaagtagatgtgggggtaacgaaatgcaaggttacaagaggaaagagtgcacatgtgggtagatgccatgaatttggagagtctgccaatgttgcggtgaaaataatgaatgtttttctatgaaaataagctcaaggagggatgatgacatgaggcaataccgattagatatgtcctcagacttggttaagggattgagctagtatctcgtccacacgccctgatcaagagaacaaacctcctgtagttgtgtcccttggtcacatgcataatataaatatgaggcaaatttggcatggaagccaacgtttcagcgctaccataaagccctagctgcaacatgagaaag

SEQ ID NO: 48487 - DNA, 871 bp, Zea Mays
cgctgatgaagtagatcgggtattggactgcttgtatgtgctcttcttctctttgttcgactactaatgcggtgcttaccatatgagtcgtacacgaaatgtatagcaacaaatcttcggttggctgatacatgacggctcggttaggtggcttgaggaccgggggagtcgtcagaaacttcttaagtgctttgaatgcttcttgtgctttaggagtccactggaatctatccatcttcttaagcagcttgtagaatgacatgcccctttcaccgagtcatgagatgaaatgactcagggccaccatgcaacccatcagcttctacaccttcttatatgatcttaggggttccatttgtaagatggtgtcaatcttctcaggatttgctttgataccccaatggctaacaatgaagtcgagtaacttctcattcagaactccgaacatgcacttgtccgggttgagtttccaacggtagcatctcaagatgttgaagacttgttgtagatcaacggtagcacctcaacaatgaagtcctctaggtcctttttcttgatcacaacgtcgtcgatgtagtcctctacacacttgccctagtggttggctaggcacatttggatggcccactgataagtcgccccagcgtttcttagaccgaacaacatgcaggtagcagaatgccccgaaaggcgagatgaaagcagttttctcctggtcctcctccactagaatgatctagtgatagcccgagtaacagtctaggaagtagagcaaggaacatcctgccgtggaatcgaccacctggtctattctgggtagcccaaagggatccttcgggcagtgtttattgaggtccgtatagtcaacgca

SEQ ID NO: 48488 - DNA, 415 bp, Zea Mays
tgtatatctgcaatttcttgctctagcactcttgttctttccttctcgtccgtgatcaaattgtctcactcttgggatatggtggatgagaagggctgaatgagggtgggttggcgtgtaaaagatatgcggagtgaggggagtgctcaatttaaaggaaccgatcgtgtgcttcatgaatttgggcgagagtgttcataacgacggtagaatatttccacagagacccaaccatcgtggcacgcggtgaaacaatggcctcgggcagtaactatctacccagcactactcctagcattgtggtagatcggctcatggcatggtgcaaccgaggaagccagcagctaccaagggggacgactgttcagccacgtcgccggtaagtggacacagccgtgcagagcgtcaattctac

SEQ ID NO: 48489 - DNA, 953 bp, Zea Mays
agttacacctttcttgtccccaatatctttagaagcatcttcagtttgaagttcaactagattcatgttttctttctcttgaagggggtaaaactaagtcttcatctttagcaaactcctccagatcttgggaacacagtagatcatcttcactttcattgaagtcatcttcatcattacccggattatcaatataccctttatcatcttcaatatttttctcaacatccataccctctgccatctcataatggcgcccagactctttaccttgcgatagaggaacctcaatttttgcaggcctcagatcttccatcacagatttttcaccaacatttctggctttttttccagatttttcaaatgaaggatcaccgaaaacctgtctatcaacagaagctctcttaccaagttcgaccccaaggaaaatggaaaccaaaatccttttcaaggtcttcagcagcaatcaaaccctctaccactttcaccaaaccaatgaaacttctcttaggttttttcgacaagggttcggaaaagtgagacgagtaaaaccctaacccatccatcgccatactaacaataggcatacaaggtttgttttgcttggggagtacacatctagcagtgttatgagtttctttacgacatatatcgcaccataaagatttgaagcaatccctggcatgatgcccctccgcgccacacttttgacagaaaaaacgacgaaaaatttcattctcttttttttcaaaatagaaggggggggacttgagaatatctgattggccgccatcaccagaagaagaagtcatgatgtcttccttgttctcgggttttccagtggccggtttcaatctccagctgagatttctatttttcccccacgactgagagccctgggggcatccttttgcccccaacactcccagctaggggtcctgcccttcggatcc

SEQ ID NO: 48490 - DNA, 787 bp, Zea Mays
tttgtcttttctgaagatttggggttgtgaggtttacgtcaagtgacttcagtcggataaactcgctccaaaatcggacaagtgcatgttcgtgggatatccaaaggaaactttgggatattacttttaccaccggtcagagggcaaagtgtttgttgcccggaatggtgtgttcttagagaaagagtttctcaaaagagagaaaagtaaacaaaaggtgtatcttgaagaagttcaggattagccagtgtcacatgatccaacaagtgatgctaatgtagcagaacaagttgagacatctgtggcaagagaaacaccaccacaaccatgaaggtcagtaaggcttcgcgaagcacgtagagaagtgctattgttgggcaatgggaaagtgttgttgttaaacaacaacgaacttgcaacatatgcagaagcgatgatggacccagattccgagaaatggcaaatcgccatgagatccgagatagattccatgggagaaaatcaagtttggaacttggtggacccgcctgatggtgttagactcatagagtgcaaatggatctataagaagaagaaagacatggatggaaatgttaacatctataaggctcgacttgttgcaaagggttttcgacaagttcaaggagttgactatgacgagacattctcgccagtagcgatgcttaaatctattcagatcattctagctattgccacatatttcgattatgagatttggcagatggatgtcaaaacagctttccttaatggaaaccttgatgaggac

SEQ ID NO: 48491 - DNA, 441 bp, Zea Mays
attcgacgaggatgggtatgttaggagcaaagtcctcgagatctttggcctcctgcccaaagcccccactatggactaggcccttattgcctatagaccctgtctggggcctacagatcctttgtgtcgtatgagggggacttcacacactcggcataatctccggccttgaggtttgtttgcattagaacatgaacgaacacaaatcatagtgaagtgacaaactccctcacttctcagttgtgttgacagagagcattcctgtcccaattatgcatgcatagagaggttgggagagcagagtaggcctctagaaccattgaccatgggagacaccttctcggtgttgtgaatgatcaaggttttaggaagcgtttttatgattgctcactgaagattagaaagtgttcttgtgattgctcaatgaagaactcaatattt

SEQ ID NO: 48492 - DNA, 814 bp, Zea Mays
tttattgtttttcagtttaatttcctagatttccaagctataaagagcttgatataattgttgtggccacttggcgatatatataaatatatgatgtcacacaacacaatcaaataaaatatagagccaaataaaattgtttatgaaggttgcgctatgatatggcttcaggggcttgaacaacccacctcaatccacacgagtacaagctctagcgtctggtgtcaacgcgtgtgcagccatcagggctacgacaagacatccatccttcataataagcgcaacagacacaattgtggcttggtagttggggtacacaataagtacgcgcaacagacacaacagacgcaacaagtgtaattgtgactcaatagttgcgacacacatgcaatgccttcagggccctcaaaaaatgtgtgactcggcgatggcggtctgactcaacgggagcgatccgattaagcgagagcgcgacatagcaatcacatgacgcagccaagttcgaacggcacaaatactgcgtcgtgttgccagggcgcagccaatattcagctaatgccataactcagctgattaccaacacaacctgatcagcgtgtccgagtacccactatacaatttaatcgctcagcgtgagtccgaaagctcaacacaacacaaatatttagagcgatttaagtatactcaatataaccttcacatgtattttaataatttctgctatttatttacagtggggataaaagcagaaaaaataacaaatttaatgcatgaacatgacacatcaggtgtaaaagacatttttttcatattt

SEQ ID NO: 48493 - DNA, 578 bp, Zea Mays
gccgtgattcgtgcttggcacgcagaggatatccacgggaaagtaaaagatctcacgggggaatggatttgatcgcggattgaagtttatcaccgtgcctgtagccgtcgcgacgtggccggaccgccaagtcaccgtggaagctccggtgaccccggttgcgccacgctgtagcttgttactgtgcggtagtaatcgtggcccccttaggagtattatccttgcaccgttgcaccggtgaacgccacggtcacagccacccgtattcttccctatctccggccgccagcacgccgtaatcaaattgagagccaccgcccccggagcctataaattaagtgcaccatcggcttcgttatgtattcaagcagctagcgcacgcacccgtacctcagatcctccaccagagagctccaatttctcatttcccaaactcactcaagaacaccgctcggattggcctcaccatggtcagcgacctctaggtctgttcatgccccctgctatcttgtttcaacattcttgtgtgcccctgatactccctgaccaacccaattaagctagagtccctaggatcg

SEQ ID NO: 48494 - DNA, 407 bp, Zea Mays
cttcgcacaacagagagatattgcatgagtattggttctttagtggtgtagtatttttcgatttagccagcgactaccatagaatcagttttgactatgcacgttgtcactccgagggctcacactttgcgaaggcctaagatgacggcttcatattcagcgatgttatttatgcatttgtccgagtctagtgcaaaacagagacacgtggcatatctgtatttgattcctatgggtgatgaatgattgttgcagtgctggtgcctgcgtgataccacgccttgtcgcagtggatggtctagatggtctctgcgcgaaactgttgtagctctgaaggccctgtctagtctactatgaagtctgccaaaacttgggatttgattgctgtcctaggctcgaaggtgatg

SEQ ID NO: 48495 - DNA, 1020 bp, Zea Mays
gcagcactatataaatagataggttggtgaggagttactacaacattcattgccattgcactgttgcgttgttaaaaaatttaaccatagccgaagctttctgcattgcgctttcgagcaaacgcttcatcatttgagattagcttcatcaaaaagtgaaaacaatgaaatggtcagagtgtgatcaactgctagagtgtctcgcgagggagacgatgtcgaagtaactgagacagcaccaacatcagaggtgatgaggcagtcgggtcttgttgtatcaaaagagcctattgccgaaggtactccgactgctgaagctgagggaatcacagttggagagggaagtggtaatgaagacgaagaagattacaccatcttgatcccagaaaaacctagtcaccttgactttggtagatctgctgtgacggcagatgatatggttataatgaaaaaattgggttactttggagaagccaagagtaggctcgttcattttgctggtgaagaagtggttccagagccgaaggatgatgaagttattgtgtttaaaagcttcttcagggcggggccttggttccctatctatgatatgataggagaggttttgaagaattttgaaatataccttcatcaattgacacctaacgcaattgttaggcttagtgtctacatctgggccctccgaagccaggggatgggtcctaatgctgaagctttctaccaggtgcacaagctgcattaccagacgaaggccagggcagatggccttcatgaaaattttggctgctacaattttgcgtatcatagggatacaaaggcaccagttcttagctaccgcaccaagtggccaattggttggaagagtgaatggttttacatgaaagcagacgagaaaaagagggagaagctaatgagtatggttatgagtccactgactttaaacttcggaatgacgaggcccttgtgccacatgcagcttggctccccatgccaagtagccgaagtggagtttagagtggt

SEQ ID NO: 48496 - DNA, 496 bp, Zea Mays
ccgttggtaagatttccccagcaatcctggacataggtccgtgcggtagtgtagcaccggttagaataccgaattagccatgggcgtgctcgaaacgggatcgccagcgatcctctgccgtggggcttggctgccgccggtgtctggtgcgtgcgtgaagaagacatgtccaggggcgttgatctgttaacgagtggcgcagattaaatggtgaatgccgattaggtcagatgtagtgtgggtcgtccgattctgatcgatcgggtgaaagtcaatttagggtatttaaatctagaacgtccgaatcggatctattggctcagattgcataacggttcgctggggggtagatctaatcggggccgctagcggttgatcggacggcccagatacaaccataccccttcggcgtgtacatttcttaaagaacccttctgtttatagggattcaacccgtggtccgtcctggcagatgactgagtctaaggagttttta

SEQ ID NO: 48497 - DNA, 1610 bp, Zea Mays
aagaccgtgactaggctttggatacttttcattttacgacttcaggttagtcgttgtggtgtaccacatgtaagatgcaagaaaagattatttagcatgtatcctctctcctttagagcatctacaactgagccctcaaataaagcctctacttttgatttaaagactatgctttagagcgtattattttctaggaaattgcactcaaatcaagtaagctagaaaggtaaacacaaacacaaaagtacacaatataaatgtggaagcttaagtgtgatagagatatggaatcttgttggcggacttcggtatctttgcaaagtatcgagaagcgcacgacattctctctagtcttcatttgagcctctcgcaaggatgtctacacgagagccaacctcatgatcggctaaccctatgcgtaagtgggtcttcagtgtaacctctcttggatgcttccctccatgttcactatcgagttttcggctgaaatgccgcatacctcgttccctccaatacacagtggcagccacaccacagacgcaattgttatgatctcacgagaccacaagcctctctagtacaaaactacattggtgcgcacaagaatcaagaggcaagagatgttctagtctcactcgaacactaggcttaaacctagagcaagcactataagtagcggtcaaacttacggggtgtttggttcccacctcctaaattttagtgacttcccaaaactgccaaacggtatgactaaatgaggcttcccaaatagaaaatttagggactaaagtttagtccctaaagtctaggaaggtaactaaaggaaccaaacactccctaactagccacttcacaaagcacttccactaattgccaaatgattctttaagcacttaggtgtctagagtactagagatgaccctcatctctcttgatatgtacctcaactcctacacatctcaattggccagttggggtcctatttatagcccacatggagagaaatagccattgctcccacaatagtcaactctgcaccctattcgacagttcgacgagtgcaccatcagaccattgtgtcagggtttgatgcctttcaatgactacattgtcagtcttatgtcaacactagacattgttgttcgtttaggggcatgctctttggtgtatattctgatgcccccaattactacttgtgaacctcattattcatcatcagactccatctagatgttcggcgatctcatgtaggaatggtccgacactcaacatgaacaatgtgactgtatggtccaacatcatcttcactatgagaccgatacttagtttgataccatgtacaatgaaaccgtatagtcaaacattcatgttcttctgtcgactgggttagctatgatcgtatagtctggcactccctcaggatgatctgacgccttctaaaacccttcttttttgtttcttattgctctttgcatccgtcttgattccatgttatgtcttggacttttgcatgttcttgtagatcttcaataggtctttaatgtattgcttgaggtgctgatcaccagaatcacaagttcctttggtccaagtccactttgcatcctttg

SEQ ID NO: 48498 - DNA, 737 bp, Zea Mays
ggtggtgaatgatttccactggctctccattcactagcaccctagttgaggaagaaaggagcatcttggaaatgatattacaccatatagttccaaaaccgaggtgtgttaacacctcaagaaggaaaggccacgaaaccgaatcaaaggctttaccaatatccaatttcagaagaattctagaaactctctgcttctgaatagccttagccgtatgctggaccaaaatgaaattgtcatggatgcatcttccttttataaaagcgctttgatttgctgacactatctcaggaagtctggaggccaatctgttagccagaatctttgtaacaatttttgcaaagctgtgaattaaactgatgggcctggaatctttgacttccaacacttcagctttcttgggcactagggtcacataagctgagttaaggagatgaagtttggatacatcaccttgtaacaccctatttaacgcctccataatatcctctttgatgattggccatgattttttataaagttttccagtatatccattcggccctggagctttgtcagcagggagagatttaattattgcccagacctcctccatagagaaatttcgatcaagagcagtaaggtccaaggctggacgatgaaattcttccagatttaaagttgactccctgggggctgctgtcccaagtaacctgttatagaaatcccagattacctctttcttttcctgctgctca

SEQ ID NO: 48499 - DNA, 930 bp, Zea Mays
tagtgtgaacgtgcgaggggtgctaatactacacacgacaaacccacctacctgtgtggacgcttaagacaattcccaacactcacatagtggtcaccatcgcgatatagggacttgacctggtcggaccccgcaagaaagcactcgacgactacacgcacattctggtcaccgtcgacatgttcaccaagtgatcgaggcatggaccatcacaaagatcacctctaaccaggccatcaggctcgtcaccaacatcttccattgcttcgggggtgccaaacttgatcatcacggacaacgatatgcgattcatcgggtgcatttgtctacctcaagcaggtagacgacagtggccctaggaattgaccgtagtgctttggagcctaaggatgaccctgaatcgattgactggatacacaccatacttcacggcttatggagccgaggcaatcctccccaccaacatagaatatgacgccccgagagtaaggtcatatgcaaacgaagaaaacgagtcaaacgttggtgacgcattggaccaactcgatgaagctcgcgacgtggcgctcctacagtaggtgcggtaccaacagacactacaaaggtaccatgatcaccacgtgcgaaggagaaccttagaattgggggacctagtgctttgacttgtccaatttaacaaggagcctaacaagttgtcccaaccaccaggaggggccatttataatcggagaggtactccaaccaggaacttacaagttgaaggataagagaggaaggatacttgctaatgcatggaacattgagtagctacgatgattatacccttagcaaggcctcaactcccaaggacattcctgcccccgactctaggacaacctcccagggtttggggacagtgggtcctagagagagggaaggctccagatggct

SEQ ID NO: 48500 - DNA, 1025 bp, Zea Mays
gctcaggattggccatctggagccttgatgggaatgtggtgtcaacacgcaactgcccctacctggcgtgccaactgttaatgttttgaaccgagggtcctaaccaactagtgtatttgtgctacgtttcccggtccagatgggtgatacaagaagacacaagatttatccttgttcgggcagtagaaggccctacttctagcgagggggattagacttatattatcttgcacctaagtgctcgtagtagggggtacaagctggtcgatggagggagtggatcccaagtctctgtgagtgatggaggctagtatcaaaagtggagggcgaacgatcaagtcttgtcccctgtcctctggaggccttggactcctccttttatagccgcaaggagggagtctatgagtataatggttgtcatagtgtttgagtgggggtgaacccgagcccctgtagcggtatggccgctgggatggcccttgtcctggttgttgcctttgatcaggaggaggatgtccagctcctgtatttcgaccaagagccgaggccagggttggggctcggatgcgtacctgagcccatcttttggacgagacatctaagtcgtagtggttgaaatagcgataagtatagcaaaaagtgcatggtaatctggcccatgtgtcatgcggaatggtgtaaagcggacttgacaccagccctatggtttctgtagccatcccgttgttagcggtttttgcgggagggttggcggcgtcgggtgttcttctgttgatgttgttggccgaggccatgcttggacgagatggagacttctcacgaggccaaggtcggtctgcgcatgggcacaaagtcgtgctgggtgtggttagaatagaagtcctagtggtctcctactggattcgtggggagttggtggtatttaatgcgccattgctggggcagtttggcctagattgcgctcgggtgtgacagagtttcctcttgaggctgacgccgacctcgggcgaggcggagtttcctcc

SEQ ID NO: 48501 - DNA, 322 bp, Zea Mays
ctggtgctgatatgctcagccatgaccatgaactcctctcagctagctggcagggacacccaactgcatattgcacatggaccgagtcatgccgaagtttaatcttagcgaactcatcaccatactcataagtttttcctttctcttctcgtcagctttcatgtaaaaccactcgctcatccatccagtcagctatttggtgcagtagcctatcatgggggggccttcatgtcctttcggtatgcgaagttgtagcatccaaagttcttgtgtaggccatcagcccttgccttcatctggtaatgaagctcatgaacccgat

SEQ ID NO: 48502 - DNA, 541 bp, Zea Mays
gttattaatagcacgacaatctacgcacatacacctttacccatctttctttggatcgagtaaaacaggaaccgagcaagggctaagagactcacgaatgtaacctttatcaagcagcgtctgcacctggcgctggatctccttcgtctcatctggatttgtacggtacggggcgcggttcggaagagaagcgctggggatgagatcgatctgatgctcaatgccatggagcggaggaagacccagtggtaagtctgtaggaaaaacatcagtatactcttgcaaaaggttaacaacagcaggggtatatccaaagatggtgcatcatcaagcggaacaagcatgcgcgagcatacaagtgcataacagggcatatgaacttcatggagatcatcaaaatcagcatgtgtagcaagtaaaacaggagattgcaacttgatttcagatttaataggtgcggctgatgtcgatttgacttgttgtgtagttttagcagccctagtacgatcatctttcaaaatttggtcaagggtcattggat

SEQ ID NO: 48503 - DNA, 466 bp, Zea Mays
gtgagttttggttagatcaagtttcatttcttggtcatatcttgtcagctgaaggggtagccgtggatccgggtaaagtgaaggatattttagaatggaagccgcctaccacggttcatcttgttcgaagttttcttggtatggctgggtatcatcgtcggttcattcccgattttttcaaaaatctccaagcctattaccgaacaattaaagaacaatgtgaagtttaattggacgccagaatgtaatgaagcttttgagaagctaaagaaattgctaactacggcaccggtgttagcccaacctgacattgagaagtcatttgccgtctactgtgatgcttcgggtatgagcaacggatgtgtattaatgcaagaaggtcgtgtaatagcatatgcctcacggcagttaaagagacatgaagaacactatcctactcatgatctagagcttgccatagtggttc

SEQ ID NO: 48504 - DNA, 832 bp, Zea Mays
acaacatcaatttgggatttcttcaaagagagagacaccctaggggaactagaagaatttccaaagtttgcagctaaaagatcttccatggtaaagggaatatccaatctagtagccctaaggtaacgagcaattgaaccagaaatgtcaaaagtaaaagaaactctaggctgatgctccccttgatcttctccctatccatccacttccatgtcatcttgaaaccaattatctgcttgagcgaaatcattttgaacatgatcatgtgggaacaattcttctgcagtcgtttgaacatcatgctgacttaggccaagctgtgcctgaaagtcatcacccgcccaactacatcgtgcacccagtgctgaggtatgttttatttccttgtagaaggttgccatgcatgggatgtggatttccaagaggtgggaaaacatcttcatctagagggaagttatctagaaaatgcgtccaatcccccccaagatgtagaccgggaccgcccaggatctaccaaccccaccaagggttcggtaataaatggatccactggatctctatgattcttggctccggatcttctgaagttcttttgaatggtgtccctgggaaaagatttcactgtagacgcgacgtcatgcaaggcgaccctctgtcccctcttctttttgttcttgctgctgaccttttacagtctattgtcaacaaggcctgcgaaggtggcattcttcgtcttccattaccaaacaattgtggcccggatttccctatcatacaatatgctgatgatactattctcataatggaagcctgccctagacagcttttcttc

SEQ ID NO: 48505 - DNA, 596 bp, Zea Mays
aatacttgtctagttcagatttgacagtaatatttccaccccccattattgttcatgtgctgagcaacaatagacctcatcaatcgtttgctatgtgatggttgctctttagagtcaatggcttgtggtgtcttctcatgtggagcatacatttctttgtactcatcaaataagaaacgaaaagaagtgtttactgtttcccacaatttatctcctatgtcatcaccaaacattaccatggtagccaactttacataactagaaagcttgtaccttggatcaattgcaacccagaaaaaacaaccaagttgagtctctctccatacttctccccacaatacttataatatttcagaatcattctctttcccatttcagcacacaagctgtcttcgctatgacaccactctcgcaataaaaccaaaacatcaacaatctcatgaaagtatgaatgagacgttggtttacttgtgactgaaacacgatgggtaagttcatagaagtgctctaggaattcagccatttttcttgccttttcccaatctgatttctcaggaacaccgaggccattttcaccttctaaatctagcctatag

SEQ ID NO: 48506 - DNA, 1441 bp, Zea Mays
ctttggagcattgtatctttcaaaataatgagaattcatattaggtcaccacatcaaaattatagcctaatcataggagaaaactttgcttaaaggtgtgagtattgttgttaaggaaaaactggagataattgagcctgaagttggactgtcagactgcttgaggtctgaaattcagagtaatagtgtgatgggatgaactttgagctcgattttaaaagggatccagtgactttttgtgggagcacattgtatcaaagttatagatggattatagctctacaactttgctgcagaaagttggcataggtttcacacaaaatcaggagtgaattgtgctccaagaagctctgtcaggtcgactgactgaaggaacgccatggtacagtgctcggatatggataagactgccagcaccggatgttcaccgccggcgacctctttgccgggattggtgccgcggccgtgtggattttgctcaccctgaaaagatctcaccgtggataaacttggagcacattggccactcggtcactcctccacttaccggcgacgtggccgcacggccatcaccggcgtgccgccgttctttgctgttatgccacgccgtcggtcatcttaccacgtcgcagtggattaccatacgccgtccttctattacctaaggccttgccacgacgttcgccacctatcgcacgcaccagtgaactctctcccctccggccgccagctcgccgtgatcaaattgtgagccaccgcccccggagtctataaattgagtgcaccatcagcttcgttatgtattcgagcatctagcgcacccttctgcacctcaaatcctccaccataaagcttcaatttgaaatttcccccaaaacactcaggaactccgcacagcttgacctcgccgtggtcagcccgattcagatccaatctcaccctcggtttccttgtttcaacatccttgcttgctcttgatgctcaccgaaccgttaaatcaaactagaccaccccaatccgcgggaacgtgtgctcccatgctcggtttccgccgtgcacgtggaccggccgttctcggggtgttcgggtcaaattggtgtatgttccgaggccttcgtaggtcagtgaagcctcatagatagttagcttgagcagtcttcgccggccatggccggtacggaccgcgtctgggacgatctgcgtgcgcgccgtggtcaggggcagtcgcggggaagaaatagaaagggaagggcctttctgtgatttgtcagtgacacatcaaaacagtagaagaacctgtctccaaatagataagaacccgatgccctttctgcaaagccgccagggcgcgggcgcgcgcgcgttctgcgtagacttgggccgcctgggctgaaatcagcccagtactattcataagtttttctttttctttttactccag

SEQ ID NO: 48507 - DNA, 299 bp, Zea Mays
acttgcccctagcgactcgaatcaccatcggggctaattgcgtacacaatcagcagattgacgtaacagatcggcgtcgcgatagtaatcttctttaggttgaaggtctcgaatttcagttgatttgatcaatcacatgagattttcagtgaaatttccatacatatgatgcatgaaatcatgtgaggttatctgttgtagaaaacgtgtccgtctaacttattttttgcagagtatgatgtgaatggtgtggccttaatatcatgtgatgttttgggcataacttttgtgcatgcctg

SEQ ID NO: 48508 - DNA, 455 bp, Zea Mays
ggtattgtgatggaaggggagcctatccattatgacaacttaggatgggagggttttacctctatttagtggggagtcctgaggatcgttggctaccttacacctccccgctacaccacttagcaatatgaggagcatggggtacctcggttccatgtgtcgcttgctctggggctgcacctaggctagcattctctggacactgaggtcattacgttcaggaacgacgacacatgtgaggtcgccgccctactgaccctgtccagtttctgcgaataccatcctttggaggtggcgacccgttccatcagtctcttcccagttgtttggaatgacgaccctatgtagggcgatagacttgaccatgctagagggactattagcacatcggtccgatgcatgaatgtattgtatcatttgtgttgcagagcggggctatgttgcagctgatcggc

SEQ ID NO: 48509 - DNA, 1157 bp, Zea Mays
cggtgatggcgcactgacattcatagataggcctttccctttctccgttgctcaacacctaattctaccctcggcgacactaatcccccacttaattgcacaattccggactcggaactctctgtccatggtgatggcgcataccggggataatccgaggtgttcccggtgatcctacgtgttctagctcaattggctgggccgatgagcatctacagcacacaggggtattgaaacgagagcgaggagggcgtgaatggacctgtagagagctggccacagcgagctcacacacggtgaggttcttgactgatttggggaaaactctaaattagagctctctggtggacaatccgaggcacgggctggtgcattgggtgtgtgattacttagcggagctcactagggcaacaatttacaggttccatcggtggtggcggctaattttgaggagacgtgcggtgaccggagagaagggaggtcactagcgcaagtgattcatggctttcagcgtggcctgaccactggcgatgaccagacatgctaaggcgagtcactgcgacatggtacaacacctagtcacgtggcacccaagtggcaggtggccaactccggcgaggttatctggaccggtcgtaaggcaaggggggtacagtggccagggcaaaacagtgtcccgagctcatccccagcgccagatttttcatccgaggattgttatctgcgtttaactgggcgtgaatcacgatactggcatgaatccgggcgtgagatcaccggcggcgaggggggctgaacctgataccttgtttagtttactgtactatcagactttcatcagagcgcctgacaggccgatttgtagagcgcagatctcagatttttatgtagtaactgcttaatccatctgtatcaaagttgtagctctataaactagctacaattcggctataaagaccttgctcatttacttactcccttgagcttgaatcgagtcccaagttcatcagaactcactgtcagaccagtatcaggttgtatggatgactgacagcaatactttgagtccttttaactccaaattttgtacagcactcatgtcttgtgatttaaacaaagttatacccctttagtagctctacaaaattgatgtgttg

SEQ ID NO: 48510 - DNA, 379 bp, Zea Mays
aggaatggtgcgctgggctcgtagcaagataatagagtaggtagggcctttaatttatagtgatcgactatggtggttccgaattttggatgacaggtagactcatttccccggtgggatgattaccgagacccaccatggagctcgtgcgttcaccggttcacggtcatgacctaggggatgccacgaccacgacaacacagtgaattaagcgactatgtgtctttcaccgggaacacgacaaacaccggcggcgatatttcattgaccgcgcgggcaagtgggcacgacggtgatccagctcaggacctatgttcaccttacccaagatcttttcacccaccaaagttatccacaccaaactatgcacgaatcttac

SEQ ID NO: 48511 - DNA, 687 bp, Zea Mays
ctgacgtggacatcgcctgtggttaccggacttcgaagcgtcggtgtcatttcggtgtttctccttccaccggacttcccactgctcctccgttaagtacagcatggcgagctgtgcgacgacgtcgattggccgaagtgtgaacgcctccaccaactcgccgtcacggaacgacaacatctcgtactcgcggcgtagcctctgtgtcgtcgacttcctcactcgatcatcgctgattcacagcgtcttcaggccttctcaggcttcctttgtcgtcggtttgatggccaacatggtgaccatctccggtggcgcgacgttgtagatgacatcgagcgccatccgatcatcgcgttcgtcgtcgtcgctgatctccacagcctcccatagttcgcacgcttgcatcttcaccttcatcagcaaagcccagtggttgtagttcttcttcgtgagaatcgggtaagtgatcgatccaggcgccatgatacgctccacgatgcgcttgatgacaatctcgcgagtccgcgatcgtcgcggcgacgaacgtcctcgtcggaactgcggtgtcctcgagtgctccggcgatacagacatcttcccggtctttttcctcggctctgatgccaaatgttgcaaatccgacgagtttagctgtcgacgctcacactcatgaactctccaatcaac

SEQ ID NO: 48512 - DNA, 359 bp, Zea Mays
ggaatctcgtcccgagattcgggtcggagtcctcccggggtgaagcgaagggtgagacttacttgaagtgggtgctttatttattaaggcaaactgctcttcgaatgtcattctctgcaacttcagaaggaagtccttttaactttagttctataattaactcattctaatttaagatcatttttctgaaatttagattcgaagggcaggaggaggggttgggcatgattacgtaccaatttctgtatgttgataatcaggaaagttggaacgcaggaattcctcaatctcccaagtagcctcttcctttgagtagttactccattggatcttatacattttgatcgatttcgcctgag

SEQ ID NO: 48513 - DNA, 507 bp, Zea Mays
tgtgttcctgagattgacagtctccatgaaaccatattgaagaaagctcatgactcagcctactccattcatcctggcagtaccaagatgtaccaagatctaaaacaaaagtattggtggtatggtctaaaaagggatgtagcttcacatgtggaagtgtgtgatgtttgccagagggtaaaagctgaacattagatactagctggattacttcaccctttaaaaatacccaagtggaagtgggaataaattggtatggacttcatcgttggtctaccccgcactcctgctgggtatgactctatttgggtcatcgtggacagactaactaaagtggctcacttcattccggtgagaactaattacacaggcgccaagctagctgggttgtatatctcccgcatagtctgtctacatggagtacctaagaagatcgtgtatgaccgaggatcccagttcacttctcatgtttggcagaagttacatgagtgcctagacaggaagctg

SEQ ID NO: 48514 - DNA, 633 bp, Zea Mays
acggtaccagcagactctaaggcgctatcacgacaaggctgtgcgacaacgatccttctcagtaggagatctcgtcctccgccgaattctaacgggggagggacggcacaagttatcgcccttatgggaaggacccttcatggtagcagaagtcactcggcccggatcgtatcgtctcattcagatggatggcacagaagtagggaactcctggaacatagaacacctcagaaagttttatccctagctgtatttcaaaaactgccgggacgatgatgtactctgtaaagtgggaatatgtcatcaataaaaaagaggtttcaaagatactcagattgtttacgattgacttgcattcttactaaactcggggtgaccactatgccctactaacggagcaatcgacttaagtcggcaacgacttaaggcggtgcaacatgctcacgcttacttaacccggggtgaccactatgccctactaacggagcaatcgacttaagtcggcaacgacttaaggcggtgcaacatgctcacgcttacttaactcggggtgaccactatgccctactaacggagcaatcgacttaagtcgacaacgacttaaggcggtgcaacatgctcacgcttacttaa

SEQ ID NO: 48515 - DNA, 528 bp, Zea Mays
gaaaaagggtaccgtggggaaagaaaaattacatagatgttacacatagtttctccaaagttcatctgcgttccaggatcttgaaatatcattcccatccatatttcttaatctgtatgatcctagtcttgacgaagatactaccaagcaggggccctcccacttgagctatagttgccccactgtttctgggttaactatccttcgaagcaccaaatgtcctggcttgatgttctttaatctaactttcttgtcccgtcactttgctgtttcagcttggtatttattaatatgatctattgcctgaagtctggcccccttctatagagtcttttgacactttgcaaatgtcttcgtcctctgccgaagctagagtccttattgatcatgtctttgcttcttctagtgttattgcttcatcaccgaacaaaaacttaaacagggtgaaacccgttgatcttaagacgacggtattatgattccacaccacctttactagctcatctagcccctttccctttggcaaat

SEQ ID NO: 48516 - DNA, 419 bp, Zea Mays
gtccaagagaaatgggaggggaagggggcggctgcaaaaatcccaaggggaaagggggcggctagggttaggggagactaatgggccggatcaaggttcaaggcccaactcgcccatgtgacagctcccgaccccatcacaaataactaaccaaagaaattcccaaagcgcatcacccgaatgaggaaaaagaacaaaaagaataacctccacttctctttgcaaaccgggtatcacaaaggggtatgcaagatttaatctaccccatccgttcaccatcctacggtcccggtttctacaaccctttcctctaatcctcatcatccatcgtgagatcaagggatgccctggcgtcttcaacctcgcgctcacactctactgtagcgtccctagctatcccaaggtccatccccacgccc

SEQ ID NO: 48517 - DNA, 1169 bp, Zea Mays
taattgtgtgcttcgcattccaagagtgaatacgttcttcatgtaacattcagcccatttctccttttgttggtagagaccacccaaccaagtatcatttttcactttacttctcaaggtgctgaaacttttctcaaatgtgttcacatcctcatattcatacatacatgcacttaactcagccaaggcactagattcatctcttcctatgcgagctaggtgttttacagcattttgcataatgtgaaatgaacacaagccatgccaagattccggaaataccactgatattgcatttttcattgccatatcttgatctgtatagatagttcttggatgcttttgcttttgtgcttctagaaatgcttcaaacaaccatttgaaagaagattctgtttcatcatacaatagagtagctccaaatataaccatttctctgaattggttcaatccaacaaacacaccaagtggcctacaatctttgtctgtcccaaatgtggtgtcaaaagtaataacatcaccaaaataagcataatcaataagcatcttagcatctgcccagaacaagtttgttattttctcatcgcaatctagctgaatagctgaataaaatgaaggattttttgcagctttctttgtaaaatacctcacaatacttcctgcctctccatacatcatatttctttgtctttttgtcctcaaataatttttgtgatcaattcttgtgtaaccaaggttacatgaaccaccagcttgtctactagctaactcatgagcatctttagggctaattccacaatcatctgccatatcaatttgacaagcttgcacacttgaaattttctgttgtgaaggcattaggtggcatgtttcatgaagttgaagaatatggttatgttcaagtactaaatcatttaactggtaatttccctcttctctgtttgatataatgctcattcgaactttacaaccagttcttgtttcagcccgaggatgctttgatctcttggataattttctctaaaaccagcctttgcacacacaaatctgcttgaagtggatactccatctatttttcttttgttgttatattgttttcttgcatcaaatcctaccataccaccataggaaacccagaaattccatgcctgttctacactattaaattt

SEQ ID NO: 48518 - DNA, 477 bp, Zea Mays
cgcaaggatctcagtcgtgggggaagaatcggaacctcagctggcggttgaagactggatccggaaaacctgatggcaaagatgacattcctgtctccactcccggtgatgtcggtcagccaggtatcctcaaaccccccctcctaccattctgaaatccgagaatgatttggtgcgtagggttttttgcctgaaatgtggtatggatggccatcatgctagggagtgttttaaatctttgtggtgcgagatttgtcgcaaagaaacccacaacacagctcggtgtgttcttcccaaacagaataaacccagtatgcctattgttggtatggcggcagatgggctagggttttactcttctcatttcgccaagcccttatccaacaaatctaaacgcagttttattggcttggttaaaatcgttgagggtttgatcacgaccgaggatctggagaaggatttcggttttcactttcc

SEQ ID NO: 48519 - DNA, 553 bp, Zea Mays
atttgatgttatcttgggtatggattggttaactcagtatcgcatagttatatcctgtttttggaagacagtgttattgcaggcgtcgttgggtagggaggtggtattcttgggaagttctccaaagttcactctatccttgttgtctcaattacttccggatcgtcagtcaaggaagtcaggaatctttttctccatggtggtggagagtgagactgccttgcgggtgcaggacatccgtgtggtgtgtgattatgccgacgtgtttccagcggagcttccaggcattccaccggagcgtgatgcagcttttgaaatcaaactgattctgggtacgcagcctattcataaggcctcgtatcggatggctccaaaggagcaggttgaattgaagcagcaattggacgatctgctggctaagggtttcattaggcctagcaggtctccttgggctttcctggtattgtttgttgagaagaaggataaaagcaagaggctatgtgtggattatcgtgctttaaatcaagtgacaatcaagaataaatatcctcta

SEQ ID NO: 48520 - DNA, 656 bp, Zea Mays
ttctagtcgtgttgattggaagccggatcatctgtgtgacatctccaccaaatcgatagttatcttcacctgacggaagatcgggcacccccgttcctatcagcactcccctatcctcgcaactgccgagcgtcaacttggacccaccagttcctgtgccccgagtatatatcccgagccgaacgcctcctcttgttcgccagactcgtccgcgggcgccgaaagatagagaaagggtgagtgagggttggagggtcgcgcaactgctcggagaccgggctggtggaactgtgggacctccgatactctacacacggatcagagtcgtggctgtggacaggacacaatcgaaatcgctcactgacgttcgacatcaccatgtttctgcccctcaatgtggatcggctccatcaccacaaattcacgggtatgaccacttttgttgatgtcattggctaatccttgaggtgtagtgtcacgagggggaggaaattactcctcgatgggacgagaattgctcaccggtgccactccggctttggtctgctatggttcatcgttggcggggagctaggcatgacaattggtggcgtgtagtagattttcgagttcaggagggtcagggcattgtgcgctagcatttaaacttggaatcc

SEQ ID NO: 48521 - DNA, 530 bp, Zea Mays
ctaacatgtagacttactaatttttatacaagttatttcgcgcactaaaagtaccatactcaattaacaatgcattctctataacaatcaatatcgaagcgcatttcaccaatagtttgcattttaatttagacatcacctgagcactactacttttcatccgcgaccataaacatacgcatttagactacaacatcccaaacggatgcgagaacactagtttctagtttaaccccatgattattcccttaatcattttaactacttaatcggcatcgaccgacttaaccttcatctcgacggtccgagcaccataattctcgaacgtctacctagacatctagcatcacatacagagcctactacttcacattgcaattcatacagaaccacaaggtgacaataataacacacagacaatcgacctttctctacgaccttcagttaggtcaccaaccgacgacatgatgactacgaaggcatgtcaccatttcatcacacccattcatcgcctatatgtgcactaattc

SEQ ID NO: 48522 - DNA, 542 bp, Zea Mays
tctcttgcctctgcccatggtcatgcagaaagaggagaagagaagaggaagaagaaggcaagtgatcaagagcgagtgaagaaagcagccgaggcaggcaggctatttatagaggacgaggggtgaccgttcatttcctaccccgctcactgaacagtcacaagaattcaataagcaattcaagccgcctgaagatgagtcaggcgactggtgccgtttcgcataacacggcaccacttggattcaagtcaaccgctcaggcaaatgattacacctctccgtcatgtcaagttactacttcaggacagcgagataaacacctttcatggggggagacaccctttgggcacacccattgggtgtaccactcggcctcttcaagattttgtgaagcggtgatacctgcaaaatatatgctatgaatataccgcagccaaaagagaagatcggttgaaatgggaggacgtccaaatgcggttaccaaagcacaagtccaatcagcagaagcaataaagtatggggctgagtggtgtccagccaag

SEQ ID NO: 48523 - DNA, 751 bp, Zea Mays
gaaaaaccattttctaaatgaatttcctggttttaatagatgtctggactgcacgctaaataaacagaaacagagggtccactgcgcaaaagattctaagactcagtcaacagtcgaagcaggacaactggtttaattttaataaagacaggggctctttaaaagggatgccacgcgaaggggtatctacctacaagagccatctaatcacatctgaacgaccaggattacatcttgctacattagactcagtgtggatcccgaaccgtccattcccgatcccacgcctcggatctaatgaggccactataaacgggcggacacaatttacttggccgaaagggtatctgcgcttttaatcacaactgtccgcacagatctaacggccagaggctttccccccattcccctttctcctaccggcgccaaattcaatctgagccatcgcttggctgatcgacgattcacgcctaatttggcttgatccgcccccggtttgatctacaccctagatctccaaatctacggccctaacgttcttcgtcaacctcctagtatatgcagccatcgatcaacgatccaacggccatgacagcttcttcaacccctcgaccagacaccaagcagtggcgcgcctagctcaagacggctagctcgccggcgtttactggcctgtcagactagtgcttctctgagcatacgacgaggcgcaaaaccgagcatagaagacgtagaactacatgagattgcc

SEQ ID NO: 48524 - DNA, 451 bp, Zea Mays
gccatcgggtctcaccttgatatagtataattgggtacccatatttagggtaacgatactctttatgtttttaaaagaaaagttcttctatgtctgtggcactagcattaaattgccggttttgtacaaccaaatgtgggaggctctaactggcacaaagcaaacaataaagaggccgagccgaaatttggacgcatcccaaacctttactgcattatgctattagtgaatgatgatccaatagaccaagactgtgagaggtaagtgattatcttacttgtagttgagttaatattgcagcaaatgacaacatgtaaacatgattatcaaaaggccagttcattttgtggagaagctgattggttctagccttctgagcgtaaattaccagctaggagtatgaatcggccaacatgtggctgatacatgcctaatatctgtgttctgtgag

SEQ ID NO: 48525 - DNA, 885 bp, Zea Mays
cttgttttgttgatgggctttagtgcttctatcctatctcaatgagccaaaccgacaggctgcttcttgttttgtgatgggcttcaagtgcttctatcctcaatgcgactcatagcttggttggtaaatagagatgtactttgtatttcaagggagaggtttgggacaacttaaaacatactgcaatcggtccacaatgaatgcgtgcgccgcgcgggttccgattgctactgctggcggcggcggacagaacagtgctgtgctggtgtaggtgtaggggacctgacttcacagtcggatctcgcgacgccggtggcaatgcttttttgacacgttgtctgacttgatgtgctgcagatcaaaaaaaaggtgtgagattttaatttctctgctgttctaaaggcttattaagcgtggaattcaacgcttctcatgatgttttgtaggcatttgcatttctttttggaaaaaaagaagatttattgaacttagtaaattacatccagtggatacaattggactaaaaaacccttagcctctacacagctaaggtgtacacagccacactcacacacacagaaaagaccagctaaaactagctagacatggcacacacacacgcaccaacgttgtcatggtccaaccactgaataccagatcaaaagctttcaccacagagagtcaatcgttgaccatcaaacaatgcctccagcaacgtcattgcaagcacaaccatctaaggtcaaacatagggatatctccccgaggtcaaagatcaggatttcaacgatactgcaatgggtccacaatgaatgcgtgcgccgcgcgggttccgattactacttctcattgtgctggtggcagcggcggacagagcagtgctgg

SEQ ID NO: 48526 - DNA, 491 bp, Zea Mays
gcaagggagttctatggtttgaagaccgattggttgttcctaagaatcccgaactcaggaagaaaatattggatgaagctcatctttccaaattttccatgcaccccggtagtagcaagatgtatcatgatctcaaatctttgtattggtggaccagaatgaagagggaaattgctaagtatgtatttgaatgcgatacttgccaaagaatcaaggctagccatttgaaggtagcgggtaccttacagcctcttcccataccatcttggaaatgggaggacctcagcatggattttattgtgggtttgcccaacacctcccgataccacaattctatttgggtcattgtggacaggctaactaagacatctcatttcttgccagtacataccacccacagggcagaaaagtatgcggaaatctatattgaccagatagtgcgtttgcatggaataccgaggactatcgtgtcagacagaggagcaccgttc

SEQ ID NO: 48527 - DNA, 442 bp, Zea Mays
atttcctacaacatcaacactttcctcgagatgatatgagtttaagatataacaattcaaaataaccttaggtcaatcttggatatagatcattaaagattgatagcttgagtaaaaattgaattgactctctcaagcatcccaaagcttcataccatctccttctcctgcaaagcttgtcaagcatgttttggtacccatcgcttgatggatccattatggttagtcaacaaagatctaggaacccaaaagtcctttgtgctagcgcttggcaaattcattgcctttctagcacaagttgcaattttgggttgcctagttatatatgaaccaaacgacaagttatgagtggaggagttaccaatgggacaatccttgcattgatgtcccttttcccggcatgtgtagcataggcgttttccaagttttgaagatttcttct

SEQ ID NO: 48528 - DNA, 593 bp, Zea Mays
acggtaccctatttagtgtgaaaactgctgtttctagagcgtatccccaaaacgacaaaggtaggtccaactggctcatcattgatcgaaccatatccaataaagtctgattacgtcgctcagacatgccattcctctaaggcgttccaggcgacgtaagctacgggacaattccacaactctttagatgattgctaaactcatggctcaaatattcacctccacgatcagatcgcagtgctttaattttcttgtcacactgattttccacttcattctgaaactctttgaacttttctaaagatttagacttgtgtttcattaagtagacatacccatatctactaaaatcatcagtgaaggttatgaagtattggaatcctcccctagctgtcgtactcattggcccgcacacatcagtatgtatgagttccaacaaatctaatgccctctcaggtaaacccgtgaagggtgccttggtcatcttgccaagtaagcatgcttcacatgtctcgtatgattcaaaatcaaatgaagttaaaagcccatcagaatgaagcttgttcatgcaattctcacttatatgacccaaa

SEQ ID NO: 48529 - DNA, 671 bp, Zea Mays
gtcgagtcaaaatggagtgaagaagtttggctaagtttggccaaacttgggccagtctgggcctcaccggacagtcacccgagatgctcttgggcgagtcggagatgcgcttgggcgagtcgtggctgtgctcgagcgaattggaaccacgtctcccgcagaggttggcctcgggcaaatcggaaccgcgtctcccgccgaggttggcctctggcgaatcggaactgcgtctcccacctggagttggcctcgggcgagtcatgatcatggttaatcgaagagtgattacatttgctttaggatattgttcatgatactgttcattagcctcgggcgtcgcccacagagtagtttgatgatcttcgctctcgtatttaggatattattcatgatcccatcatgagcagaatgaacaacatgcaacatagatttcagtacaatatgggtgctctgtccagtcagtttgagactttgtccagtagtgacagcatccatactcttgatgagacgcatcaacaacttcaaaatgatttcaaccaattcacctccatatttgatagctttaactctcactattacaacatgtatatgtatcctctgtcgggtgctcagtgagacccctcttttatggcaattgatgccaaagggggagagagatgaagatggaaggt

SEQ ID NO: 48530 - DNA, 292 bp, Zea Mays
ctaccatcgattatagccgagaagtagtcagggagagttgtgtagtcgttggtgggacatcttcttccacgaaggggcctcgattgctcgcgaattcctcaccatcgttgcaccgccaccatggaccgcgcttcgttgtggactgcatgcctacgcgcacgattctcggtatggatcttgcccgtattcgccttcatttcctcaacgagtagaaccgtttgattcgaggttggtgcgcctttgttgaggattcacctcgccggcaatggcatcgccgtaactgtaacgcggg

SEQ ID NO: 48531 - DNA, 432 bp, Zea Mays
ctttttcatcacaaccaagtcctctgttgttatggtggaccttccaaattcaatgtgactaagtttggttgggcttagaatgtattgttctcttcactttcgttgtcactcccgaccttagcctcagtctgttcagcttcgacattgggggtacctttggcagttgctccctcctgcacaaccagacctgagcgtctcatcacttctgatatgggcgctgtctcagtcatttcagtttcatctccctcacgggacactctggcaatggatcttactctggccatttcaatgaatagtttctttcagacgaagctgatcttaagtgacgaagcgcctatttgaaagcacagttcagagaccttcggctttggttaaaattttcaacagcacaacagtgcaatggcaatgaatgttgtggcaacttctcaccaa

SEQ ID NO: 48532 - DNA, 628 bp, Zea Mays
tgcacctattgtgttttgcctctttataaagagaataaagtatggtgtcatctgctatatgcaaacaatgtgatgctctattctagttgccctaaaatcccgctcaagtctttctctcaatttgtgctcaaagaaatactcttggatcagaaagattatttggatatcatgctctgaaatctataaaagttcaaaaggatctatgttaaggattataacacttgtacgctcttgtagtatgatgaagctaggcggaaatctgaaaccatccttgttccttaacttatcttatattggaaatcaaaaagttgtgttagatctttatcttaatgtcatgtaagcctcttatgcaatctgtctcactaactcttttaccctctgactagatgatgaaccccaacgggaatgaagtaaacgatgccaacgacaatatttctaccttaacaactatgaacgagaaaaatgagtcacagagatattcaatgaaaggaatgaagaacaacaaaaggaatagaaaaatgtttgggtacatgattagttcacctcaaccacaagcaaaagccccgaaaaacatggatacccaaacggaagaatcaagccagattcagctatgtgagatacagacacc

SEQ ID NO: 48533 - DNA, 927 bp, Zea Mays
cgagcaccgagcactggagatgaacacgcaccgctctgcttctctcccagcgaattgcttacttgcactctggtgctgctgtgtctgcctgcctgcctgccattcagaagtcagaactcgtgttctctagtagaacagcaagtgtgcgtgacgttacagtgctactgttgccgcatatactagctgctgctggtggtggtggtggtgcgtgagaagggtgaattcacgatgagcacctctgctagtagcgtgcgtgcgtcactcaggtgcgtgtgtgcaaaactcttacgaggcccgcctaacccgtccctgttcagttcctcccaatagtctttctctgctcggcagtcggcagtcggcaggcgctatctcggttgcagaaaggcaaacgctcttggtccacaggttgcgctgctccacatgaaaaccttatccgttcatttttctgctagtcggcccttacagaaccgactttctgaattactcccccctaaatatatatacacacacacacttttgtcatgcacaagctaagtcagtcagtcatctctctcacctggtgtggtggtggtagctggcgttccaaaaactgttgcctgctgctcttcaccgtacgtgtgtattttttctggtcagtattcgtggcgtgcgccgggcagatacatgtaaagatgacgacgagtgtttctctgtctgtcacggctagcttttaccatgaacatggcatggcatggcatggcatgcccacacgtcaaggacatctccccagtttgagtttgactagctagctagctagtcttcctgtttcttcacgctcgctctcttcctcaagaacatgtgccgcgcgcacgcacgtttcttccgaataaccgtgagaaaacatgcacatgtaagctggtggcgtgttacatgcatatatattagtat

SEQ ID NO: 48534 - DNA, 848 bp, Zea Mays
tgaaaatacaggttagtaaataaaagaacattgtccgaatccaagaacgacacgttttatctggtcccgacccctacgaactgtcctgcctcgactagcctctgacctcgagaggccaagggtaggacaggtcgaccctagaccctcgtcttgcccgacccctgatcgcccaagggggttggagtgcaaagtcacatcctgtagagtctgcctcgcatgaccaggaacaagggaagcgtcctgtccccccgagaatctggaattcaatggatcgtaccaatgaccattctaggtaggggtacgtatgagtccgactctaacatgggtgtgtggttcaaatgacaacacaggttggtatgttagcatataggatcgccatgtcgcaggatggtccatagtaccgcctcatccactccacctggaggagtcaaataagtacagtagggcagtcaccatgtagataggacaacacataatggtgaccctaagggcactcttggatagtgacgggagatggagatgtcatctatggaagtccttaggacgataagaatcctagaggacaaggagcaatgcaatggaactcaaccattgtctgtatcgctcgagccttaaatttatgtaacatgtccccctcttttctttgtctataaaaggatggggaggacaacggctgaaggatacatgggcaataagctagcacaagtagccaacacaccaataatagaaaatttcactccgctcacctcactcattgtcaatcgagcaaaaattcaaccctttaaatgtttgactaataaatatgttgaattaatgtgggcctggctcatattaatattcaataatag

SEQ ID NO: 48535 - DNA, 287 bp, Zea Mays
caacaattaacatttatttaagacatttaaccgatcacaaaatgtagaagataatgactactagagcagggcattgactccatggcataaccaaaattggcacagcaacactgatacaacctgtcggcgggctgataaaaatactaaacttatcctacgcatcaccaatgcaatcacacatgacatctatagaaccaatacacactctgcctactccgcacctcgaacctaaactttatcatacgaatataaataccacatatctattttataatcatgaacacaac

SEQ ID NO: 48536 - DNA, 658 bp, Zea Mays
aacctgaaatggatcagatcaagcgctcagctcacccgcgacgatctccaccgcgattcgtgtcatcggcgtctcgattcgtgctcggggtaagtggataacgtctcgggtagaaagatcatcaacgccgttgagctggacaccaatccggctagtcgccgtacctcccccttgttcaccaatcgctcgggtaggatctcaccgccgctgatccctcactgccgtccgccacgtgtccaaacactttaccacgtcgcggctaattgtgctacgcatgttcggtgatcaccggaggagcggccacggtaatagacacgttgcgcggccaccagtgactcacccagttcatacctatcgcaatccgccgcttaaattcgctgtactcgtgatcgatctctataaattaaagccaccataagctctgcaaggtcatcacacacccagccaccaagaatcactagcaatcgttcgtaagagagcttgaattttggttttcccctaaccaagtttccgccaccgcgaagaacacctcgtcgtggccagccacttccaggtttgttcatgccctctactaccttgtttcagcattagtatgcttccttgatgctcatccatccacccaattgagctagaccgccaccaatcaccgggaacgcat

SEQ ID NO: 48537 - DNA, 846 bp, Zea Mays
tcaagatgttgctgcaagtagtgaagccctcgagcaattgagcattgctagggaaaaggcagcaagccaagtgaatataaaatgtagatgcttcagtaagcctatggtaaaggttgaggctcccaaggagaaaaagaagagtctctgatgtctatcaagcataaagcctgtgtctgccctaaccaaatcaaccacagttgagaaaagccaaaacaaggtgatgaagaagaggttagctagcaaggtcactactaaagacccaactcctccagtggattggaagaataagaagaagaagaagaagaagaggtgctcccccttattcgacgcaagaaaggatcaaaggcaatagaatgatccagtcaagcttgccttaccagaacatcggaccaagctttaaagcttagacttgtcattaattgatgcttttctagacaaaatttctactgaagatgccttgaccaaatcacccgatacccacgttgtggatgtggctgagagtcactcaggtgagccatcagagagcccacaagcatcagcagctccttcctatgaagtataggtggagggggaggagatttgatccttggagatgtgatgcttcctatagccgagctggttactaagccataggtaggccccgcttctgcatcagaggccaaagagtctaagtttctgactgaaatagtggctgagccgcgaatcgactcaaccccagcccccgagagtgaaggggatgaggcatctattgcaatggttgtcgttacatagcccgacttgaccccagccctcgagattgaaaatgttggggtgtcggttgaggcatctgtcgaaccgcagcaagtc

SEQ ID NO: 48538 - DNA, 1065 bp, Zea Mays
ctgcttttatggaagcaatgaataggatgttgcatgaattcctggacgacttcatggtcatgttcctggatgatattctgatttattccaagtctgaggaagagcatgagtagcatctccgtctcgttctgggtgctctaaggaagaatcagttctatggcaagttgaagaagagtgccttttggctgtccgaagtggctttcctggggcacgtgattaatcaacaaggcattgcggttgatcccaagaatgttgcggctgtggtggagtggaagagaccctctagtgtctctgaaatctgaagtttcttggggctcgctggatattatcggcgctttgtaccaaatttctccagcattgctaagcctttgactagactcttggagaagggtgttctcttcgactggtccggcgattgcgaggtcaattatcagacattgaagagcaagttggtggacgcccctatcctagctttgcctgagagcggtaagcgtttcacagtttatacggatgcttcgcgtattggtcttggttgtgtgttgatgcaggaaggcagagtgattgcttatggctcaaggcagttgaggaagcatgaggggaattacccaactcatgatcttgaattggccgcggtggtttttgctctaaagtcgtggaggcattatctttatggcgaggcttgtgacatttacaccgatcataaaagtctcaagtatatttttactcagaaggagctgaatttgaggcagcgtcggtggcttgaattgattaaggattatgatttgtccattcactatcacccggggaaggctaatgtagtggcttatgcccttagcaggtccggggttccaaaggtggccttgccgatgattgctgatatggaccgtttggggatcgctttgtgttatgtcggcaccactagcgaggagactcggatgcttattcaatcctctctcatggagagagtgcgtgcggctcagcagcaggatcgtctattgcaggaagctcgaaagagggttggtgatggtaaaccacaggagttcaccattgatgagagtgatttgg

SEQ ID NO: 48539 - DNA, 330 bp, Zea Mays
gattaattggagaggccggtggttagcgttaccatacaatgggaaaattgcggtattacaaggaaaagttcacacttcagactagcctgatataatgcatgtggtgtatctgttgcagtctggtagtgaacctcaattgctcgacaacttggatccaaggctgtccctagttctgtagaaatatctatcagttttcaaccctaaaccctaaacccccaaaaggtttaccaccatcctgtccttgtgatcataccataccactgatacacggtgcacaaccagtgtttatccatccttaccggtgtgcacctactatcaaggatgagatca

SEQ ID NO: 48540 - DNA, 983 bp, Zea Mays
gaaattttggtgatcaataagagccgagcaaacctggactcacgcttagtgtgtgacgaccatcacaggaagggcccgcccctgaaatgcgtgaataccgagttaacccccaagcaatccacatgggttactcgggggcacggaggatacatctagcagatgcgtttgcgcacacccaaaaatttggtcctcaacaaaaacctccgtgcaactccaaggtgttacatgaaggctcgagggctgctttggagtactcgagaaccgggtacccgaaataggcccatggcccttttaaaaaatggtccacctgccaaccaagtctctgtcgagcgactttgtgaggcagactggttgaccaactacggcgaccaactctatgaggcggacggatgaccaactccgctgaccaactctgtgaggcaaatcggctgaccaactccactgaccaattctgccaacaaactcggcggaccaactccgtcgaccaactttgcaaggcggaccggctgaccaaatctccaccgaccaactccggcaaccaactctctaccaaccaactctttgccgaccaactctccgctgaccaactctccgccgaccaactctgtgaggcggaccggctgaccaattctctatcgaccaactccgctgatcaactctccaccgactaactccgaccgaccaactcaccgtcgagcgacccaataaggcggagatctgagtccagcaatactaacccacgtcagctatgacgagatgagtcaccatcaagccatgcctggacattcgcatagcacatcgaatgggcgttgggaggtcaacatcaacacgactgtacgaccgcacgaatggtctcaagcatatccccactgccctgtgggttcagttaaaaccagttggggaggacctcggcaccggggtctctacaatgtcacgttgacaggtgatgaagggatcatgacgaatagagaagccacaccatg

SEQ ID NO: 48541 - DNA, 491 bp, Zea Mays
gtttctgggtgtcttagggcgattggtgtggtctagggaggtcagggagggtccatggaatctagtggcaagggccaaatcacagtaggagcaccgaaggtcggagatccacggtgaggcgacaaggcggcgacggtagtagctctaacgagcaattgcgcatgacagagtgcaagggagggaaatggaggggcaggggaagttccttacctcaaggcgagactcggggtcccctcgaaggctacaacggcacgatggcagcttggagtgatggcggcgactccaggactgcaccagggaagaggttaagcgaggatagggcgaagagaccaggaaaaaaaagaaactgaggtgggttcctagtgcatcgcactcaggcagagcgcaccatggcaaaggcgacgacaagagctcagcgacgacgacgtaacgacctttgcgatgatagcagtgttgttgtatgctttggtggggaaaacgggtagggagag

SEQ ID NO: 48542 - DNA, 299 bp, Zea Mays
ttctgaatatgttaagtctggttccaaggtaacatccatcacatcaatggttcgatctggaacccaaaggcacttcttcaattgggacacatggaacacattgtgcactgtagacaacgtttcgggtagttggagtcggtacgccactggtccacacctttcaagaatggggaacagaccaacgtatcggggtgcaagctttccttttacaccaaaatgggtcacacccttcattggtgatactttcaggtacacataatctttgacttgaaagtacaagggttggtgtcgtttgtcta

SEQ ID NO: 48543 - DNA, 972 bp, Zea Mays
agaccctcaaagttctaattcttcacaagggaatgtccacgacgggcagcgacagagaaccgagctccagcgagcctacaccggccgattcacgcaacgaccggtgctctactttggcttagacctaattcaagccctaacaagtgtttcccctcaactaatttcactaacgaatctctagagcgctctgtccatggtgactgtgtgatcaatggacaagccaacatgttcccggtgatctaaggggtcctagcttaattggccgggtcggggagaatcaggggcacacaagtacactgaaacgaaagagcagagggtatgagcggacctgggatgagctagccacgatgaggtttcttttacgctggcgcaaagcagatttgggggaaatttggaattggcgagctctggtaaacaattgagggcacgacttggtggcttggtgcttgacaaccctacggacccgtcggtgtgctcaatttatagtgtgcttgagcggtggagttcaatttggacgaattgcgctagcggttgagaggggaactgagtcactggcgtggtgattcgtggccttcaccgtggtagacccactagtgatgagccaggactacggggcggtttatgatgactcaccacgacgtggtaaagcgttgaggcacatagcctggccggataacgacgaacaccggtgatgccagcgcgactgaccacggcgggacacgacggccggtgagaacagtggccggactttatctccagcgcgatatttcttaccgaggagcgctatctgtgattggtcgggcgtgaatcgcgacgccgacatagatctgggcgcaagatcacctgaggagaggtgggtgaatctgtgatctgtttcagtcactgtacaatggaattcctatatagtgcgcctgacagcccaatttgaagggcctggatctcaattttccatgtggcaacttactaatccac

SEQ ID NO: 48544 - DNA, 1091 bp, Zea Mays
ggtccggcacatgttgctgcaaaaatagaccatctaccatgtgccaaacctttaggtactcgaatataacctggactgtgagcgctcctttgatgtcatccacccatctttggttttggagagcttgggctacctcttcctcttcctcttggctgtccgctttgagacagcactaaataagctgggtgtcacttcagatatggtatggccatccagccatctgtctgtccagaagagtgtttgctcaacgttcccaacaatgacgtccactgcaatgttgaagagggcctgagcattgcgagggacttgagttgggaggcctgcccaaaggctactaggaacagttttctcagccacaaccagcaaatccgcaacgctcagccaagcagatacagattatgaattccaagaccaccatattccagaggccgctgcaccctttcccaagagaccaaacagtgacctcctttagcttgttcctgaccctttcagagaaaactcctccttttgtcgatggcttttagaacccactttggtagatccatggcaatcaaaaggtaaataggagcagcagttaacactactcgaaccattaccaatctgcctgcacggttcattaaggaagctttccaccccggcaaaaattctgccaccttatcaattaatggcagcaagacctcctttgtgggtttgccaattagcccaagataagtacaaggaaaatccttgactgtacaggacttccgtgagacatatacaattattgcattcagaatattcatgaccaaaatgaatagcattggagacaaaggatctccctgtcttaaacccccgtctatgataaattgtctcccctggctcaccattcactagaacttgtgtagaggaagtagataacagcaaacataagagattaatccatcgctgtccaaacccaatatgcctaagaatttccaataaaaaggaccaggagaccgaatcaaaagctttagatatgtcaagtttaaggaggatgtgagcttctttcttcttattcttgtgcagagccttgaccgtttgttggacaaacataaaattatcatgaattcttt

SEQ ID NO: 48545 - DNA, 506 bp, Zea Mays
caaacgaatcggtatggcttgacctaatcctagccgcccgacaaggatccaatggttgcgagtcctcttccccaacccgcgtgcccaggtgacggcaccgcgcaatagcccaccagcgagctcgccggagatggcggatctagtgcatcgggacccaatcctcacgatcgaaagatgcaaaacgatgaggagactatggcgaacaatgtggtggcatcaatttagtgtaccgtaggtggactaggcacgaccacgacagcgccagcatggacccgcgacggcgaccacagccagcgtaccatatccatgtatcagggccctaaacccaaattcgaacagcgctgcgccatgctaagggaaggacgaactggttggtgagcttattacctcaatatggggctgcagcaccacagtccgcgcggcggcgcggctccacggcgaaccttcacgacgacgatgaaattcgctcgctccaaatagtttctcccgcacaaccaaggctccca

SEQ ID NO: 48546 - DNA, 523 bp, Zea Mays
gccagaatagaattgtttttgcgaattacaacggcgaatcgaccctgatgagtcaaaccaaaaatttgcggagattgtcgatgttccaggagtgctccaggtcttcgccgtttggcgttgcgagcctgtaagcgctgggggaagctttcgtcttgactatgaaggggccctcccacttgggctccagcttgcccctggactctgtccgagctgttcggacgagtacgaggtccccttcgctgaattccctcgggatgactgcgtggtcgcgtcatgcttttgtctaggcttggtatttatttagagcctgtaaggcgaagactcggtctccatcgatgagatccttcgaagtgggctcgtccacgtcggggacggctgacggaactgttcgcggggacccatgatttatttcttgtggggtcatggcctccgatccatatagaaggcagaaaggagtgaacccggtcgccctgcattcagtcgtgtttagcgcccagaccgcctcgggtaataaatcggacca

SEQ ID NO: 48547 - DNA, 306 bp, Zea Mays
gaaattttctcttgaggtgacctttttcctcttatcatgctctttccacctggatggccttgttcgagaggtgcaagaaactgaggaagtcttggctggcaaggatggtcttgagttctggtcttaaccccttcaagaaacgagccatcttcttggcttccgtgctgacatcatcaggtgcatagcgagcaagttctattaatttatggatgtattcactaatggatcgccctccttgagttaactcccgaaattcctcctccttgagctggacgattcccaagggcacatgatgctctcagaaag

SEQ ID NO: 48548 - DNA, 645 bp, Zea Mays
ccctatgctgctcaagaacaagatgggaattaaatttttgttctaccgtcatctcccagtctaagtaagcttcagcatcataagaacccatgaaaagtggaatagagaacttaatcttagcaaatggatcatggtctggttaaggattatgatgacgacgtctaccattacctcccataccttgtcaattatgtacgaagcgttgtggcagcagtgcataaacatcgtcgtcatcgtcgtcatcgtccacaggagagtgagatggggctggagttggtggtgggggacgagcctctagtacgtccatgcgtgtaacaagttcatcaactcgtcgatcaagctgctcataggatgtcgaggcagagtcctggtattttttaaaatcttcagtcatcgcgcgcatcatctccttcaattccatctgagagacacactcatcatcgttaagtttaggccccttgtccttgtccatttggttctttggtcctgtcattgttagcacaaaacagagacaaaaaggcaacaaacaatgtgaaccctacaactatctctcagggtggtggtggaggtggtagaatacaaattatgaagcgtcttaccccgctcttacaatgttcttaccagcactgcaggtggcaaacggtg

SEQ ID NO: 48549 - DNA, 333 bp, Zea Mays
accacatctgcccagattgtttaagcccatacagtgccctctgcaacttaatgctatacatgttgcgatttgagttggcatccgatactctcagcccatccgagaccttcatatagatttccgaatctagtgacccatacaagtatgcggtcactacgtccatcatctgcatttttaagtttaaacctgctaccaacgatattaaatatcggaacgttgtgccactcattaccggggagtaagtttcatcgtaatcgatgtcgggtctctgtgtgaacccttgtgctacaagtctcgctttgtatctcaccacctcattgttcgcatccctct

SEQ ID NO: 48550 - DNA, 391 bp, Zea Mays
tactatcagccttgccccaccttcgcctatcattgctatgccacacaagaacatttgggttcacaccctatctaggcctccatgcacttcgctctatgataatgcaagaaagatgttttgcgaccacatccccatccctaatcatatccaaagaacttgagtgctctttcgaacatgccctactcaacctatccccactcttactggtagcagctttgccatgccattcattttcaaggtcataacatcaatttcccaagcaagttgaagccccaagtgtgcaatagaagctatcccaaacctcacttatacctcaatcatgctcaccatgttcaatcatataggcagcaaaaatgcacatggtggttcctctatgttcttcaaaatttac

SEQ ID NO: 48551 - DNA, 962 bp, Zea Mays
gtacaactttgcttaagtgattaagcattgttgttatacaaaaagtggagataattagccctaaagtctggctgtcagactcctctgagactgaacattgagtgacagtgagttctaaggaactttgggctcgattcttgtgcaaggatataagcaaatgggcaagatccctatagcaaaattgtagctggtatatagggctacaagtttgttacagatggattggcaagttcttgcacaaaaatccaagatctaggcgttgcaactctgtctgtcaggcgctctaaatcaggtttgcgatggtacagtgttcggatcagattgccaggttcagttcatctcgccgccgttgtgattcatgctctgtggggtgcagataactcataagggtaagaaatatcgcatcgtggatgaactaacgccactgttctgctccggtcgccgtacccgccttagtcacgaccgcttcggataaactcacctgagttagccacctcgcgaccttgcgccacatgctttggtgctttaaccacgtcgcagtgagtcaccttagcccacccgttcattgtcggtaagcttgccacggtgaacgccacgaattgcttgcgccagtaacctcttccctctccggccgccaccgcgccaactccaaatcacgagccaccatccccgaatcctataaattgagcacaccctttagctctactatgtaattattcacccaacacacccactcgtgcctccaattactcaccagagagcctcaatttgaaactttccccaattcagtccagagcaccgcactgcgtgagctcgccgtggccagcgtgctacaggtccgttcatgccctctactctcccatttcagtacccttatgttctcatgatgctcctcggcccgttcaattaagctagaccgcgctagatcatcgggaacgcctctgttcatctatagttcgcgc

SEQ ID NO: 48552 - DNA, 773 bp, Zea Mays
catgtgaagaatataccatagtcgttctacctcatcatccttgagatgaactatcgctttagtatcgttgtcattaaaccccgaacgtataagctccgttctagcgcatctagtggctggggttcgcgagcaagtttatgtcagacttaactatggtactaaagataggttggtgtccatactttaaccctagatatttaaaaatcttcagtttagggatgaactcaagcgaaaccctctcaaagtcttgattcatccattagaaagcaagtagaacaaggagagatcaaatccttaccgattttcccccaaaaccctaacctcaactagccatcctaagcacacacagagagaaaagggcgtaaggcttacctagtcaacgatgaccatgtaagaaggaaacaatgttgctgatcttacgtgtgatggtgcgtgtggacattatggcgccgctaagagaccactcgattgtggcacgatcatcctcgattaggagcatgtgcacaggcgagagacccggcgggcgacgctaggacttcgccatgccctctcttgcttgccagagttggagaaggtagaggaagaggagatacttaggagagagtgagagggagagttgcacgagggtgaggaagaaattaattagggttccccttcagtcaaaaacgatgtattttatacctgcctaagaagattattggtcatccgatcacatatgaggatgtagggtgattgggtttcttcgagcctaggcgggtttgcgctttggtgga

SEQ ID NO: 48553 - DNA, 529 bp, Zea Mays
gctagaactccatcctataaacatcctatttgtctgataccttcaaccgttgcatgaaacaattaattcggattgctaaagtttctgcacttcaccttgcagcttcacagatgttacatataatctaattttcacccacatattaagtcccaccagaattggctagatagaaattgaagtagaaaaccatgtaacttttatcttgaacattaatggagaaagcaaaagagcagtacccgcatgaccaccatgatgacttcctccgtagaagaccaagcaagaacagcaacagcgcaatcattaatctaatccatccatcagttgagaatttctgttgcgacaacctacatgcacacaccatatctataaatgttattgagttattctacatttatgtgggatggacaaatttagtcggataagaacagcagaagaagctgaacttgaatcccacaaaattcaaggagacctaccagaggtgcgcagacaagattgagaatgtaccagaaggcggctaccacaggttgcc

SEQ ID NO: 48554 - DNA, 533 bp, Zea Mays
caacaatcaagtactaagcaacaatcctcctaaagcaactttcgcccgccagccccgtgagggggaagaggaggctggagttttggaggtagattcaatgcacaaccaaggaaaatgtacaccgtgttttgtggagaatataaaggccacacaataaggacctaccaaataactatctagaagcaaatagagctcgctgctacatcagctcgaacatcctagcctaaggaggtgtttagtacatctttgtactactcaccctacatcacacaatatgtccaacctaggtccccaagccataacagcattcagcctcaaatgctttgagtaatcctatacacagtggttggtcgccatctacttcctttatcctaggtccaccaccatatgatcaagtccatgttgccatcccaaattcccagtgcaggacatgcaacagcacgatagaagggagcctttcgaagcacacagcgtccacaacatgcttttggaaacgaagcatatatactaacgcttgaggggctgggtcatta

SEQ ID NO: 48555 - DNA, 299 bp, Zea Mays
taaatctactaacaaggccaaccgagaaggtcaaatctggtcttgtgttcactaaatacctcagactaccaataatgcttcagtcagtgtcctatatttcacaggaaccattcctgaactttctgaactagatggctatgaattgtaactagtagctgaatctgagcctggattttgtgcttgtgatcctgaaagtatagcttgagttcttgaattttgaggggtcacaggtgattgtggtagtggtgacattgagggtacttcaccacccccagaactctcaccctcctcacttgtac

SEQ ID NO: 48556 - DNA, 700 bp, Zea Mays
tgttcccaatttaaaccacaaggttctccaaaaatggcttaaaaacttagcatccctatcagaaacaatagtatttggcacaccatgcaaacgcacaatctcaatgaagaacaaatcagcaacatgtgaagcattatcagttttgtgatagggtataaaatgtgccatctttgaaaaacgattgacaatgacaaaaacactatcactccccctctttgttctaggcaatcccaaaacaaaatccatagaaatgtccttccaaggtgcacgaggaacaggaataggcaaataaagaccatgggggttaagtcgggacttagctttgttgcatgtggtgcaacgacagacatagcgctcaacatcacgtcgcatccgaggccaatagaaatgagtagacaacacatcctcggtcttcttgacaccaaaatgtcccatcaaaccacctccatgcgcttcctacaagagtagaagacgaacggagctagctggaacatacagcttgttagcacggtagagaaggccttcacgcagcacaaatttttgccacgttcttccctctctgcaattttcaaaagcatctatgaagtccaaatcagcagcatataattcatttatagtctccaaaccaaagattttatgattaagttgggacaacatagtataacgtctagacaaagcatcagcaatcacattatccttt

SEQ ID NO: 48557 - DNA, 539 bp, Zea Mays
ccgaccagcaaccgaccaggtgcgcagactttttagctcaccgtaccaccttcttacgtcaaatattattacgtgttatgctcattcgtgcaacggtttacacactttttggtatgcgcatgtttcgggcatccgggcccacacaaatattgatattacgatgtcttatgtttccgtttacgaaacagtaatccacgtgtcggtccatgcatgggccttcgcgttgatttcgcccagcagattacgtgtatcgggcccacgaatccacccacgagcatgcagtttttttagctctcctcacccgtaacgctcgcggcggccgaaccctagctttatcgccaccgtctgcttcttctccaccgcagatgccgaaccctagagattctacccgccattgccttcactgtctccaacgcagagaccgaccgccgtcgccttcaccttctccaccgcatagagggagacgctgtcgccttgttcttcttcaccggggagggactcggaatcgcggagacttagccgccgcccccttgttcttc

SEQ ID NO: 48558 - DNA, 521 bp, Zea Mays
tttagctttacacacttgcactgatgttataatatctagctttacacaccaacacatactttaaggctcgttctagttcaaatgcagcatgagcccggctctggcaactgccaacctcttcgatcgcatacagccaaatcgcgtgtcacggaaacctattggcgctggaaaaaaatcatgatccttggtcgacggaaggaaatagacaaagagattgatcgacgggagcaaacagacgagcggtgacgtcgggaggaagaagagaacacgggcgcagcgccaaaagcactttaaatagggacgatgatgagaattgagaagccgtgaatctcattgggagccgtccgggcgatcggatgctttcggtcttctgccgtcctctgcaaattgcaccagagcagaagcaaagaaggccaaggtacattgtatggcagagcgacgcgattggaagagacaagctatttgaatggacaaccaaaagcaaaagagaatgcttctctataccatttcgagattcaaac

SEQ ID NO: 48559 - DNA, 435 bp, Zea Mays
cacgattcttggcatgatgcacgcctgccgtcgcaataggcatactgtggcggaggccttaggcactccgggttggatcatggatgtgtcggggtcttggacgtcgcaaatgatcatcgagttcatcgtggtctgggacctattgagttgcttgcccggtttgacgctggatcacgaccgtttcgtctggaagtgggagtgttcggggacagttcaccacgttgtccgcctaccggccgttctttgagggacgaacagatctcaacggggtgtcgatccattgggcctcgcggacaccagggttgtgtcgcttctttgcttggttggttttgcaccataggtgttggacatctcaaaggctttggcactttggtttgatcaccagtggcctctacgcgctctgcgatcaatgcgaggaaggaatcgatcatctta

SEQ ID NO: 48560 - DNA, 372 bp, Zea Mays
atgagcaggacgacaactttgttgggatatggcatgtcattaagctttacacttcaatgtttgagatgggacgcttcccaaacctgctgcaggatgtattgcatgcggaacctacgtccgacctctatatgacacaaggcgagtgtctgagcctccccgggcttgctactacatcactcacatgcatatcagggtgatggatgcaggagataagggtttcaagactctatcagctcatgagtctctgacgccactatctacctacgcttatttggccagcaatgctgctatgcaagctctgtggtctcttagccacacattatcggcaacagttgcatgacacgaggtacatacatcttcctctacgtcttt

SEQ ID NO: 48561 - DNA, 419 bp, Zea Mays
agtgtcagcaaccaggcgtccagagatgatgtcgaagacatgagccgtgcaagtggtgaagctgaagatggcgagctcaagaaggtggtcaggatccgtaaaccaaacgtgcgcgtgggtggtccggagtgggtaagggcgtagaagtctggtcaggtcaccaacagaaaggttgtatgtgtgagtggttgagtcatgtaatggcttagttaaaaagaggaaagcgtggagaagaagggtatcaattgtaacagaattttgtttccctacgaaaatactcaaccacttcgcccattctctcttgttctctgctatttctgctctcttgttcttgctggagattggcagttaacagacagacatgtcgaccccaccgccgtccatcgccgccgtgtgggactggcggactgcgattgctg

SEQ ID NO: 48562 - DNA, 566 bp, Zea Mays
cgccgcgcgtctcgcccgattcaccagccaccgccgttgagccctataaattgaagcctccaccagccccacaaggtcatcagctacccagtctccgagaatcgttagcaatcgttcgccagagctcgcgaattttgaattcgccccaaatcagttctctgccaccccgaaatccacctcaccgcggccagccccattccggtcagttcatcctcccctctccctcgtttaagctttctcatatgtctacgatgcttgccgacccacgcaattgcgctaggagccctctggtcgccgggaacacgactgtctagccgcactgctcacggtcaccgtggccagagcaaacctattggtcattagtgaaattaggttgggggaaaggtttgggatgggtccaattccgtgtttgttgctcgggaaccctagtcattgccccagtcggccggtacagttgctcaccggagcgcggccgcgttcaccgtcgtcgtggacttcaccccgcgaaggaatagaaatcgaaggacctctgtgcaaatcgttagtgactcagaaaaacagtaacc

SEQ ID NO: 48563 - DNA, 745 bp, Zea Mays
tttcaatcctagtctgaacacttccagggcaaggatcaagtgaatctagttggttcactgaaacctgctcaccagtgaaattcaggcaggaaagaaaactgtagaaccaatgatggttgttcgtttcaaatagaaatagaaacacttgtttcacaacaaactggtattatctagtttgaacttgacaataaaacaagtgataagcatgatagctgttaacaacaagtgtgctagtaataccaagtgataaagaagtgatggttctagtgatgcttggaaggcaatggataagttgtcatgtggcagagctcaaatatgagtacttgctagcatcctgaagttcagacacgagtgttagtctgtcagcaattgttcagtagccttgttatatgcaactgaaatcatgttgattcccttgagtttcctccggaagtcttgaagactggagtacaacaggtttcacaacaataggcactaacaatttgtagtagtatttctgatataacctacaaacttttttattattatggaaggttatatgccttgtcaaacccatacatcatccatccatatggctctatgactgcacatcctttggcctacctgctccgtttgtttgccagtgagtcacggaagctcgcctcgcctgttgccctcaccacgagcatttactcaccaatgatttcacgaccctctcgcactcatagggtatgtttggtttactatctaacttaccacactttac

SEQ ID NO: 48564 - DNA, 999 bp, Zea Mays
aggggcaaaggtctcctcataatcaatacccactttctggcaaaacccttgggcaaccaacctcgccttgtttctcactaccaacccatcctcactctctttgattttgaaaacccattttgtacctatgggatggcggttgaaggaggtggcaccaaaacctaaacttgatttatctcaaaattttcaagctcctcatgcatagcattggcataattaggatcatacaaagtgtgtccaacatttgggggctcaaaagtagcaaaaaagttgagtgagaaaaatgagaaatttgttgtaacctggagcgagtgactcgctcgtgaagctccccgatcatctattgaggagggtaacgacattgaatgtgttgtggagcctccttcaaggaagtggcctccccatcaacaatagcatgactgcctccaggctcagcaggcttaggctccactagaccccaagtcgtagaagaagtgatgtctggtccatcaaccgaagtagtggaagtaggctcgactgggtcagctgatggagttggctcgggatcatcccaatcgatgttgtcatgctcctcccccacaaagatggtctgtcccatctgatctggacgtgcaaactcaaagataggggattaataaggtgcagtcttatctaatgtaatctgaaaagtttccataatgcggttagtctccaggttcagaacattataagcacgagaatgtactgcataacctaggaaaatcccatcagaagatcgagactcaaatttgtccaaatttccctatttcagcacatagcatctacaaccaaacaccctgaaatggctaaccttgggtggccgcccaaatctagctcataagaagtcttgttcaagaaagctcaaagaaagatgtggttcgacacatggcaggaagtgttgaatgcttcggcccaaaaccgcctagagtactatgctcatcaagcatcatcctgaccatctcgacaagggtccaattcttg

SEQ ID NO: 48565 - DNA, 455 bp, Zea Mays
cgagaggagacgtgtcgacgatcgggcggggtggccatcaagtcggcaagatctcgcaatctccgtcgctgttcctaatgcctcgatcccaatcctaacagtcatcgtcacactgctcgatcgccgtgtgcccaattatttcgcggaattccacgcaaccacctgtacgcacaccgacacacgcgtgcactctactgatcctcccgtgctccaccgcatcgtgtctccctcgtcattctttcttcgttaacacggtatacaacctcagttttgaataaataaattaaagtaaaatacgctgctagtacctaaacttattcgaatgtgtcaaaccggtatctaaactctcagaacagccagacttatttggttcgctgcctcatttttcacagtttaccatgcctaaagttagataagtttaattaagttagatctaagttttggtttgtagccac

SEQ ID NO: 48566 - DNA, 495 bp, Zea Mays
ctgggggacagcaccagcttgttggtagcgcaagtctggagcttcgccgggggaggaaagcatagtacctcgacattcctctcaaggacagcatcaaggggtggcgcctagagtagttcattgtggagaaccactgcaagtccctcccccctcggtcagggaggcagccagatgtctgcacaccgagctggatagaatctctgaccccttcggagataacagaggctaaaatattgcttgccgagatctgcttgctaaaggatacaggtctgactactgaagctgcggttgctgacttcattttcaagaatattcaacccttaaaggacatggcctaccctgcttatttgtacagtggtgtcaacgattctacctgggtcacgaacagaaaaattcccactgaagatctgatgagtcgactggacatgatgctgaggggcagagtttcaaatgctggtgctcctgtggcctattctgcatggaacctgccaccac

SEQ ID NO: 48567 - DNA, 361 bp, Zea Mays
gacggcacacggtcaatcaaggtcactgaaatgacagaagaggtgagcacgtattagtcacatagtcataagcatatgaaatgtgaataaatacatacacagagagatatggcacgagacgagacgatcaagaagtcaaatgacgtgaaaacgacgtttgaaggataaatagtgtcataggatgtttggaattcgaattgaggcacgaaacgatatggaattgagccgatacttcacgaataggtttatataggtgaatatgagtgaagtgtgtgcttggtttgaatttaggcgaagaaaaagggatttgggcactcggctcggaaacgatcgctcaaaacgggaaatttggtgaaattta

SEQ ID NO: 48568 - DNA, 309 bp, Zea Mays
agaaatttgagaaaaatgagttaaaaaaaaccgtgacttttctaaaaatacacgcctacccatacatctattcgtgtagttgtaccctacccatacatcttacctcatggcaaaatgaatgatccacctcaaatgcacttttcatgttcttccatgtacactcgtggcatacaacaaacatccgctgctttgaagtctgtcgaaggaaaatggtcttcatgaatatcgaccaccgaggatagatgtcaatggaatggtggtacttctggttgtactcatggtaaaaaggccattcaccgtaaagtttac

SEQ ID NO: 48569 - DNA, 846 bp, Zea Mays
acaacttccagatcaccaggttacttgggctgaatttaaagaagctttccgcactcatcatgtttctgacgggattttgcaaatgaagaatgagtaatttctgagacttagacaaggggcagatactgtgatgcagtatattgcgaaattcaatcacctttctcagtacgctattgagcatgtgaacacggatattaagaaaagagattgctttatgagaggcctcaactcaaagttgcaaaagaagatggccacttgctatgatcttactttcaatcgggcaataagtgtggccatagccgtggaagaaaaggcacaagtacatccaaatgtgaagcaggcatagaaaggttctaggccagggttttctcagtcaacaacaaagtgccagaaggtggtaatcaggactgcaggttcagcaaatgttccttatcgttcaactacctatccattcaagaactctacatatattcatcccaccaactagccaaactagcttccacctgcaaatgcccacgttccccgcttgcctgctcccactgacactaaatatccttgctacaactgtggaaatgtgggacatttcattaaatattgtccctattcccgccagaataattccaatttctagagaacagcaggaaacaattctcaaaatcagaacaagaatacttctggaaatagtgcaaaaggcaaggacaacatgaaatccgggcgagtattctatacacaagtggatgtgactccggaaggaaatcctgtgcttatgggtaatttccttgttgcccatcatcctgccaaagtactttttgatactggtgcatctcatacattcatgagtagaac

SEQ ID NO: 48570 - DNA, 520 bp, Zea Mays
ggacggtctgccgacctcgatcgaacggtccgcgacctagcaacatcaactacccaagctctacccacatggatttaacacaggcggtcggtcttccaaatcaggtcggacggtccgcgacctaggagttaatactgttcgagatcaaactttggatagtctgcaatacaactctccaaaaacacatagtccctgcccaaaccacaattggcacctacggacggtctgctgaacatggttggacagtccgcacaattactcaaggacttgtgcaaatttccaactattctggtctagaccgcagacgattcggccataaggctagatgatccgcagtacaaaaactttggagcactccgaaactcaccaattctgcaaacctctctgagtggatcacggacggttcgaccacttggcccagacggtccacgacacgacacttagcccccttcgaaaacacgctttcgaaaagattttaacttgcaaactcggaagcaatgttagtcctcatgcacatgaa

SEQ ID NO: 48571 - DNA, 562 bp, Zea Mays
gaagctgattcgctttggcggagaggaaattactccgaagccagaaaaggatgaggtggtagtctttaaaagcttctttaaagcaggattaagatttcctttgaatgagatgattgcggatgttttgaagaagtttgggatttatcttcatcagctaactcctaacgccatcgttaggcttagcgtctacatctgggctcttcgaagccagggggcagaactgcttgccgaaggcttctgccgggcacatgagcttcattatcagacaaaagctagagaagatgggctgcacgagaacttcggctgctacaattttgcttatcgcaaagatgcgaagtctccagttatcagctatcgtaccaaatggccagctggctggaagactgaatggttttatgtcaaagttgatgagaaaaaggagaagttggctcaaaggccattagaattaatcttcggagagactaggccccggtgcgacatgaaaccagagaatccatgccaaattgcactgggcgaatttcgagttattgcggagcacattggtactagggatctggtgcaa

SEQ ID NO: 48572 - DNA, 327 bp, Zea Mays
ctcaagggttgctcttcacccaaaggaagaaaggtaaaagcaaagattctttattggacttaatttttgctaggtgtgcattcaatctcattctcataaatgcactagtccattagaatctatttcatgcctttgctatacatattctcatatatttacttccaagtaatgattaataaactcaatatgaagaagtaaatttcctatgattgatcaaaatgcttaaaggatgcatattgttgtgctcaaacgttaaggaatttacttcatgtatatgtgaaatatggatgatgaattgtgtttatttcctatctaaagaaatcatcc

SEQ ID NO: 48573 - DNA, 676 bp, Zea Mays
catacaattttctatgtggatagaatatctgcttcttggatactctaccaaatcgcacccacaaccaagagaatttcaggagtagattaattggtctagctacattaaggttatatgggatggataacatcattcatcacccgtgtccattttctacaataagttatcctacagagaattttgaagcaaaacataaatacttcaggtttgtttttccaagcactgttcctgcttcagaagggctggtgcaacccacaatgccatcaccatgggttttaagttgttgcctaggcatctagtcgcgaagtctaggcgtcagcacacaattttctgtctgaaagaggacgatgaagtagggcgtgggagtttcgcgcgctggggagatcaactggagttgtgtgctagcaggaaattgcacgactacaatccccgcaatcattcttcaccgtctcctgtgcgccaatacacatagcagggagaagggggcaaacctagtatttggcagcgcaaggccagaagccagctgctacagaccattttggtccatcgattcatgcctgatgcctcccttgtccctcctttgactcattcctccctctctccaccgatttatgccttcaattcgtgcatccatccttagcatcctcttctccaccaattgacgccttcagttcgt

SEQ ID NO: 48574 - DNA, 769 bp, Zea Mays
ggcccatcttgtcgcccacgatgtcggcgacggtgcggccgttgcagaacctgccgttgggcatgccgcggccgaggtcgatgccgtaccacgggagcgcggcgcgggcgaggctcttggtcaggtagttgttgttgcccacgtcggacagcgagtcgccgaagatgaactgcaccacgtcgccgcggcacagccccaggaccagcgccgtggccagggcagctgccagcggcgccttcctatcccaagccatcgtgttgtccggttctctcctaggaaacgagacgcgagggcgagcgagcgaggctctctgtcacgacgaggtagccggtcgagaaaggaggcctcttattagcagccgacgatctgccggtgcttctaatggtttgtcagggtttgactggatccgcgtgagcaggtttggaggttcgggatggtgatcagttcttgggttttgaagcattgtcttgaggtatatggatgtggtttgatgcacctaccaacctgggaagtggggtggcaagtagaggagttggcctaacatcagtgctcgcttactcatcagctggtctctatcagtgtcagcccagcagcgacttgcaaataaaggaacaaggcaatttcaatttgttcagatgaatcctagcacgattactggaaaacctcttgtaatattgttaacgagggggcatacttgaaatggcggtaaacattaataattctttaactaaataaggttccaaacttcaatttcttttactctttccat

SEQ ID NO: 48575 - DNA, 432 bp, Zea Mays
taccaatttactactactactattgaggtggtggaggaggaggatgcatctactgagctacatctggctgatgggcatcctactcatcatcatcacatgcaacctacccctagtctaggaaagaagttagagacctagattaggaaaggagtcataggtctatgagtgaaagcagtgtcattcttgaaaggtctaaagaaagtatgagccacttcacatctcccctcaaacctggtcttccccttgatcaatgccatgatgtatggggcataggccaaaatctggttcttgtccatcttcagatcgttgagctgcctgagcataaaggtcacgacatccacggtggatgatgttacaaaatttgtctctaatcttgctcttatccccactctagggaggatagtaaccctagctatattgttaatgtcagct

SEQ ID NO: 48576 - DNA, 523 bp, Zea Mays
gagaacaagtccccaacagttcccctgccagaaggtgatgaagtggtagacttcaggagcttcatgaaagctgggcatcactttccgctccacaagatgttggtcaaagttttgaagatgtttgagatataccttcatcagattacccccgaagctcttattagagtgggagtttttatatggtccatgaggagccaatgtctagagccagatgcgagatgcttctgcaatattcatgagttgtcctatcaaacgaaggcaaccggaaaggaactgtaccataacaattttggttgttacaactttgtgcctcagtctgagacgagttaccctgtgcccacgtttcagaagaagtggctaggtccttggatgaaggaatgggtttacgtgaagaatgacctaaatcagagggaagatgtgaaaggcgttatccaacgtcctatatggtcacgcttcagcattagaaggccatccaccacactcggaaacaaagtgcaagcgtgccaagttgctttcaacaccg

SEQ ID NO: 48577 - DNA, 354 bp, Zea Mays
gtgaaatggaaaatcaagggtgcaaaagaatgttgaagagcttcgggattccaaggagagatgctacgaaacatccttggaatgcgccaagaagctaaaaaatagttttgcaagggtgggagcatactctttggaacagaagtttattcgcggtgatctcggaggggttattcagtggattggcgaagaggtcgaagcttttgatgaaatactcatcgatcgtggggatttctgcgctttcgctgatgcatgaggggtcgcggcaattttagagaaggccggttgtgaacatgttaaggtcgcagtctagccaaaatctatttccttagtagatgacaccaaggacccctcgac

SEQ ID NO: 48578 - DNA, 649 bp, Zea Mays
accacccttgagaactagatgggccgcaacatagtcaattacgtcgacgacatagttatcccaagcaaaaacaaagaagaccacctcttggaccttgcagaaacattcaccaacatgcgcgaagctatctcaatctagataaacacatattcgacgtccgtcaaggcaggatactagggtatcttctatcacacagaggcatagaagcgacccagccaaaataaaagcaatattgaacacgacgcccccgcaatgagctcgagatgtgcaaaagctgacaggaaggctcacggcattgaacatattcatctcgcgctctgtggaatgaagtatgcctttcctaaaaacattgcacgaagaggaaaaattcacttggggcccagagaaagttgcaacctttgaaccactaaaggagtacttgttggagatcacaactctaattagcccaaaccccgcttcaccgctattgctatatgtcgtagcctcatatagagcagtcagtgcagctctggtacaggaaagatccaaagacggcaaactacaatagtatcttgtatacttcgtctctgaggtcctcactagctctaaatgcaacatgaccaaaatggagaaaatagcatattcagtccttgtaacacccaaactccaa

SEQ ID NO: 48579 - DNA, 396 bp, Zea Mays
acgacttccgggatgaagttgcttcataattgaaacagataaaacattagcaacaaaatggggataatttggttttaagctctatgactctactatctgtatctatgaaatttcaaacatacacctttttgctggattcatctcatggtatttataactgataaaacattgtgatccgtgtattgcagcgggtgctggataggggtactactatatattctgttggaattgtttgcacatgtgtagcgcaagcgcagctgcctgcaattgcaactctgcgtgctagtccattgcttgagcatcatttatgcatgtcagagcgggacaccaaagcaaacgtgcagtagatgtagtgcaaagtttagacgtgaattttggtcctatcacaatggtaaa

SEQ ID NO: 48580 - DNA, 390 bp, Zea Mays
cgagaagcagaggctggatggaatatggtgctccctccgatggaaatggaatgaaacacggtgcagttgccctgcccattccctgtgcataaacaatggcatcccccggggcacagagagtgatggcagaccaatccattgtccggagacatgccgggcaagactttgctgttctaccctgtaatcctagccagcttctcgacagccacagagaaaggaaggtgtccttggactggtatgtaactacacttcttgtcccttgcatggtgtgcttccaaactcccaagtagtctaatggtagacggctaaacctcatggtagatcaactgctctgcggttttgttttcatttctctgttcaaaggttcttagaataattaaattggaagcg

SEQ ID NO: 48581 - DNA, 589 bp, Zea Mays
gccgaaaatcatcgaccttttattgtctccctgtatgacaacatttgcagtgcctattttgatgatgtccttttttgttgtcctttgagttgctacaggcatatgcccccctgccggattggtcggcctaggaggccgagtagtccggcaatcttgtcgggcatgtgcctggtgaccggattcagcagcgctcaatcggtcttgcactggcggcgccaacctatcaaaaacggatgtttggggtgccccccaggcagggtactgtggcatcccaaatggatatggtggcatgccccacatttcttttgggacatatggtggaggtaagtatgtgtatggatatggcatagatggataagggggtggaggcgcccatgtcggcatgttaggtctcaattgtacaataggacctttcatttcttccgattggtgaggtggtccaatcggcctgacctgacgttgctcatgaatgggtgagcggggtcgctttggtggccggtcactggggccggccttctttttcacgtatttagacaataattgatcgaaagtcgggccaggcttgatcagccgaccagctgctttaaag

SEQ ID NO: 48582 - DNA, 573 bp, Zea Mays
gtgtgaagcctaccttggaattcttcctcacttcggtttgtggaagtacttgtatcattgtcgtcctgggatggctagggggcagcaccagcttgtgggtggtgtgagtctggagatgcgccgtggaaggaaaacggaataccttgacatcccactcaaggataacattaaaggatggcgcttagagtggttcattgtagaaaaccatggcaagtccccccccccttggtcagggagacaaccagatgttcgcgctccaagttggattgagtcccccacagacttggagacaacagaagccaaggttctccttgctgagatttgtttgttgaaggagagaggtctgactgctgaagctgtggctgcagactttgtttttaagaatattcagccactgaaggacagagtgtacccgacttatttgtatagtggtgtcaccgactcaacccgggttaccaacaagaggattcctgctgtagatttggtgagccgactggaaatgatccttagaggcaaagtatcaaatattggtgctcctgttgcatattctgcttggaatctgccaccttccaa

SEQ ID NO: 48583 - DNA, 370 bp, Zea Mays
tgtacggatccgcctcataacttgatattacttccgacagccaaaccggagtacctgaggaaatgtgataaaaatccagagtatccgatggtcgacgcgaaagagcgtcagcatctctgttctcgataccttttttatatatcaccttgtattggagccccaagagcttggtgaagaatttacgttgccaaaagatgtttagtttctgctcgatcagatgggctaagctttgctgatctgtatagatgatgaattcgtcgtgctgaagatatgccctccactggtcgaccgccaacaagattgctaggtactccttctcgtacgttgaaagaccttggttcttcatgcccaaagctttactgacaaatgc

SEQ ID NO: 48584 - DNA, 564 bp, Zea Mays
gcgccgtcgaggacaacgactttctccctccgtcacgtcgccgttggccacggttgctgtgggagatagatatcccctgggtcctcataacatggatatattcaatggttgtctggcgggctctcgaaagaatcgtcgaacaagcatactattgggccacccccagacagaacagatttctccaaagaaggtgacactcggagctagaggcaatcccgaagaatgtggcgcaaggcagttatctgtgcatatccgacacaaaaaggattgctgataatccgagggcatactttgcgcacaacataatggcgagatacatggaggataactcggacgaccgaactccacggtagtcggcacacaatagaagcggaagtagatagactcatatatgattagataagctgttacgatctgtaaagggacgtcttcctagctggttatataaggccgagggggtacccctacaaaactctctcgacgttactctcaccgcaaccacaccaccattagactggtaggagatctcatccatcaccacccgcaaatcatatgtaatctgtg

SEQ ID NO: 48585 - DNA, 471 bp, Zea Mays
gaagcggacaccgacggaacaacgtcggtcagctattggtgtttccctcgtggacgtcaatgtagatatcgccactggatcttgtgcagatggagctcgtgccgccgttgttgtctccgtgccgtggtcttcgcgtggtttctttccaagccatcgagacgaggattttttctatgctgggatgaggtgggaactgctggggttaagacctgagttggcgtaaatgaacacagttattttgtgggttaggttttcatccaagtgagtttgatccatatggttttgatcccaatccagaccattctaggccccaaacgaacaaggcatggggaagttgcctctctcatccatccatgtggggtatggtgtagtggggggttggaggtgtttgtcagttgtcaccccataatccactatggggtggagggagggttacgtggtaccatagaagatggtctgagcacgttttgg

SEQ ID NO: 48586 - DNA, 773 bp, Zea Mays
tttccctggtcacccgaaaattttgagaattcgggtatcctggttccctgtgggtatgggtggtgatcaaatcggctgtcatatggtttctgatatgactatcccctagggatcatgcttactccgagcttatctcggaacaccccagctattttcctccctcactatatcaatggcaaccagtgcgagaccaccggctctctggtcaaacataggtggggttggctggatattggcatgttgttccccccccccatttgtttgagctatgtggtgcattgtcgtttgccctatatggctcataggattgatcattcctttccggccttctaggcggggccggaaagctttcctgggctctgaattttgtattattgggctgatgcatcgcatagtgtgatgggaagtgttgctgggacaggtgaggattcgggtaacaatcctcctcaaaaaggtcatgcgcggactgtccgtacattggcccggaccatccgtggttatatgcggaccgttcgtcgtaatatgcggacagtccgactgggtagtttgaattttgcgcaaaacgatgtggctcgggcacatgtgttggtaattcattaaaaatgggcccgaccgttgctggcctggactgtccgcgctcgcgtgcggacggtccaggcatgtgcagatcggctgatttgttgccgatttggggttgctcagggtatgtgtccatcggcatcccataaaggggttgtgactggtcgtgacaacctgtagccgatgtattatgc

SEQ ID NO: 48587 - DNA, 590 bp, Zea Mays
ttgaatgttccctcgcacgcgatggttatccagatccgttagtaataactgaacgtttcatcagtaataacaaaatgttttatcactaaattactgaatgttttgtcagtaattgttcgttttgcactaacaattacggtgcatgctgattattactgaaattgagcgacgaatgactcaaagagcacaaattactgaaagtcgcgggtgggcgtgcgtgggagtcgcgggtgggtgcgtgcggcagacaggagttgcgcgtggctcgtgacccattggtggaccggctggtttgtttggttggtcgtttagctggttgattgggtctagttgaagcttcaccctaggcgatatatataaatatatgaaagggtatgtggacgatttaaacaaacaacaagatctataaactggtatttgccttatttccttacaaattagatctaggagtagttctagccattgtttagtcatagttttagttcccaaccataatcttcacctagcttcggctctacatcgtcttcaaacgctttagatggcctaccgaccctaatgtaacccaagatccttccatggtgaggtcgctc

SEQ ID NO: 48588 - DNA, 293 bp, Zea Mays
ccacccctaccgtggcaaatcctctgaatcgggtacttcaggaggaagtactcagaggtatcgggctgtccctaagcccgggctggggctggtgtgtttctgttgtggtgacgcgcatcgccgtgcggagtgtcagtggagtggcaggtgctctatctgcagccaagatcacaaggatgtggtgtgtaggaggaatcccaatgggaagctcagatgtgagccactgacttcctcctcttctcagggcactgtcaacatgatgtcaagcgctgagaagcaattttcagtaccac

SEQ ID NO: 48589 - DNA, 462 bp, Zea Mays
tgtaaacaacaccaaggtggtcaataatccattccatagcgagggtagggacaacctgaaattctaggagtcagagcgtattatgaccacatctatggtggctccggtgagttgtgctcttgtcgtgtcctcaaggttccacatcgagaggtgtacattgcaatttcacaccattatgttggcccctcaaatggtataacactcccatctcatttgattatttttactatcctcacaacatgaggggcatagggatccttcccattatggcccccaccatcaacaacgttaagatctggaacatcttgattgatggtggggctagccttaatgtcttgtcgatgtatgtctttgatgagatgaaaatctcacacacctggctcatagcttgtgcccatttatgaggtttcttcaaggttgatcctccttatcatctctaacaatctttcattgaccttcagc

SEQ ID NO: 48590 - DNA, 502 bp, Zea Mays
agtaaagggtttcaggagtgactgcagttgctgatagtcagggtcattccgtcactgtgctgaaaagggaaacggatttggcaaccgttagctaaacggcaggcatggacctgcgagctgaaactggaagcctgcagttgcccagattgcctgagttgatgcatgtactggcaaccccatgacgtgccattgctgcacctgttgcagtcctgattggcagattttcttttatcatgtgttttggttcttaacaccatgtttcttagggtactttgctcttttcgtgatgaaaacatccttaaatgatatgccttatttatttggataccaaacaataacaggctaacagctacagaatgtcagaatcaattatttctttcatgaactctcttgcatttagtagactgaagggataaaaaggaaagtaatggcaaccttttggaagaaaatatagacacttgaaagtcatgcagaaacatttggtgaagcacggtaactttgg

SEQ ID NO: 48591 - DNA, 587 bp, Zea Mays
cattgctggtttgtgtaattacccataaactagatgcctggcactgcactcattcccatgaagatgcctcattcactcagggaaccttacagccttgggatgggatggaatagaggatcaaaatttaccctgcatcctctaaatgttgaagcggaaagtgccttccgggttgacagcttctcctttttgaagattttggttcacaattgttgtcacacactactagaaccattgttggagattgaactaaaaaccgtactcatctgtttgagttttattcactctctattacagaagaattagatgctcgtagcagatgtccactcaggttgagattttgcacattcagcacatatgcttagtgcttaccacgcatcagggtgacatgcgtaaagttgtgtgcttgctatggtgaactacatctagaatttcagggatcattgttttagttgggctcaattgaataccatttaggagaacatgaagctgcttctttagaattggctagatgctagctttggccttttaatatttatggtgcatttatatactgccttatgggttgtattttctctgacataatttcc

SEQ ID NO: 48592 - DNA, 379 bp, Zea Mays
gcttgcattagaacgagcaatgaatccataacaaccgaagttgttgtgataatgctctttgccagtggccttcgtctcgtataacagtttgtgcatattgcaaaaacacttcgcgctcggttccagcccaaacaaacaaacccattctgattatagcttcgggagtaatttgataaagaaagatctgaaatatcttcaacacttcaaccaaaattttgctcaatgggaaccgaagacccgccttcataaagcttctgtagacaacaatctcattttcttcaggagcaggggtggtgctgtcccctccaaccctcacaatagacatgtcacgaaagtatcttcccttcatggcgtcaatttgactttgtttaatggtcga

SEQ ID NO: 48593 - DNA, 413 bp, Zea Mays
aaacatttcccccaagttaattgcatagttggtgagctatcaagctctgtccgtgtgaaccgaatgggtggcgaacagatgagcgtgttcccggtgaccagagggttcttagcgcaattacgtgggtcagcaagcatcgtggagttataaggaaactcaaacgagggtaaggggaggctgaactgactggaatggggctggccgcggttagcagttccttgcggtggcggaaacttgatttggggggaattggaaattcgcgcgtgctggtggatgatcgagggtgggagcgggtgctacagattcacgacgacatggcgcagctacgggcgaggtcaatttatagagccctcaagcggtggtggccaatttggtcgagcaatgctggcagtcggagatggggaagaacctgg

SEQ ID NO: 48594 - DNA, 483 bp, Zea Mays
cttgattccttggatgatcggtgatttggagcctgattctccctgatttctcccttataagagccgcccgagctcccgctgtcgatcccatgctccatcactccctcccatgccctcctgccctttgtccacgctcgtcatcgtagtcgcgtcgcccatgacgtgtggccaggcacctctgatggtcctccatccacgctgaggccgtcgttgtgaccccaagagccttttgttgcttcctcgagctctccaaacctcagtctagccccgtcgcagtactctgccctcgtcggcgcttagcatgccaccattctttgtcaccatccatcctcaccgcctcaatcccctcggtaaggcttcggtcatgcccgccgttaccctagcttcctcctgagcccttccctggttgtattggcccccgaagcgccgtatcagccaacttcggcgaggtgctggtcgcgtgccgccgcgcgccgtgtcttc

SEQ ID NO: 48595 - DNA, 453 bp, Zea Mays
tagtttcatgatttttagtccaaataggaaattatagagtatttaaatagccaaaagccttgcttctggatttttagagaataaataataaatccaaaattcactaaacttttagggtaaactctaaatagtatttagaggccttgggtaaagtttggtatggattggaccatgtttgatacttagaacccaaaaccctagcccctgccctatgaacttcaatattgactctggaaaccctaagttctcggagatccgtgaagaaaagttgtattcaagaccttagataataagcttttattgtctttgcatcttcatgagaactacatgagcattcattattatagttggctatatttagaaaacgaagaggaagtagaggttgaagagacaaggacttcatcaccaccaccacctgaggaacatcaggcaggcaactgtttctattttgat

SEQ ID NO: 48596 - DNA, 371 bp, Zea Mays
cgtgagtctgtcccgggaggacatcgacatggagggcgagctggcggcggattacaccaactacacggtgcagatcccgcccacgcccgacaaccaaccgatgatggacccggcgtccgtggccatgaaggccgaggagcagtacgtctccaactcgctcttcaccggcgggttcaacagcgtcacgcgcgcccacctcatggacaaggtcatcgagtccgaggtgacgcacccgcagatggccggctccaagggctcccgctgcgccatgcccgcctgcgacggcaaggtcatgcgcaatgagcgcggcgaggacatcgacccctgcgagtgcagattcaagatctgccgcgactgctacctggacgcac

SEQ ID NO: 48597 - DNA, 929 bp, Zea Mays
ccccggcttgtagttatgcttaaagtttgtaaattttagatttgccttttcaccccccctctaggcgactttcaaaggggtgcgacaggagtcctcatgaagtgcatttcctcggtcactgggaagcaactattagatgaggtccacgccggatagtgtggaatacacgcagcatccaggactctggttgggaaagtcttcaggtctagtttctattggccaacaacaaagagtgatgcagccgagttagtccaaagatgtgaagcttgccaattcttgtcaaagcaacaacacttaccggcacagcaactacagaccatacccgtaacatggccatttgcgtgttgggaactggagatgattggacccttcaagaaagctcagagaggctatactcacgtgctagtcgccatcgataaattcaccaaatggatagtacaaacccattgcttctctaacttcagccaaggcagtggaattcatacaagacataatattcaggtttgggataccaaatagcatcataactcacctgggatccaacttcactagctctgaattctttgatttctgcgaacaacggagcatccagatcaagtatgcatcagtagcacacccaagagctaatggccaggtggaaagagctaatggtatgatactggaagcactcaggaagaaagttttcaacaagaatgaaaagttcgcaagaaagtggattagagagttaccttatgtggtttggagcttaagaactcaacccagtcgagctctgcatggaaataccctcttcttcatggtctatggttctgaggcagtactacctgccgacctcaggtttggagcaccaaggctggtattcgaaagcatagctgaagcagaagctaccaggctagaggatattgatgtgctggaggaagagcgattaaaca

SEQ ID NO: 48598 - DNA, 389 bp, Zea Mays
gcggaagcgggagcagtggaagcaagagtagtggagtggtggatggctcgagtgcggcaggagctggcgaagtgggaggtggagtggagactgggtcggaaggagtggagcgagcagtggaggagcaagtccgagacgcgaggcgacgaactcggtagacgatctgatcagaggaaatcctcaattgccctccctacttagcctgatctgctgcaagcgctgcacgagcagctctgtctagacgcctcatcttttagccctcttgttgctcaagatagacagtcttgcccttgacctgtctgaaggggcgaggagggtcttcgtcatctcctgcccctaaaggtgtgacattctttgtcctcaccatcctgaattggctgctgcaagat

SEQ ID NO: 48599 - DNA, 282 bp, Zea Mays
ttcacggcggcggagaccggtttggggagaactcaaaattcgtggattcaggcgaatgatcgaggctgattcgtggtggctggatagtttactgccctatggagcttgcggcgctctcaatttataggcgtattgagcgacggtgatgaattcggccgaggggtgctggcggccggagaggggaggcgagctcagtgtgtgggaaaagtgactttcgccgtggcagttgctccggtgatcgccggacatgcatccagtgagtcaccgtgatgaagtctagcg

SEQ ID NO: 48600 - DNA, 533 bp, Zea Mays
ggatattaaatctcacccgtgggtaatccgttggatatccgaaattaaccattagtccattattgccggcccacacatggacactaatgaacaaatcaccagtccaccaatgtccattgagcccaggcgccagcccaccaaagcaacattcagcccaccaaagcaccaagccaccagcccaccctaatccctaattccccatccggccatcccctcaatcggtcaatccccaggcaggttgcagccacccggacgcctcacgcctggagccagcatcctgtcgtgcgtccgccgccggacccctacgcaccgtcacccaggcaagccacccacgccgtcgccggcccccgtcgcgcccctggctccctgtgcatgatcctccctatatctgtgttgcgtctgtcgtgccccaggtgacccacgtcactcgtcagcctgccctgcgcagctgcgctgagctccgccctactctgagccacgggagcacggcgtgccgcccttcaggttcgccgttcgcgattgtgcccctgcca

SEQ ID NO: 48601 - DNA, 982 bp, Zea Mays
ggagagcggaagagtagttcttcttgttatgagttgttcaatcgattgtagataactttgggagccaactcaaatcgatcgcaagcaagagaactagagaagtgagagggagaaagaaaactcacaaagatggtgatcaacacaaagacacatgtgatatgtttcccgaggttcaactcgaagactgtacgtccccgttgaggaggccacaaaggacgagtctcatttaacccttttcctctcacacggtcatgaaggtcggttgagtattctcaatatcttagggacaccaagtcccgcaaggatctccacacgaagaatggagtctcttgcctcactttacaatcaaagagaatgagaaaaggagtgagaatgaaaactcgaatcaagaacacaagaattcgcaactttcaattgcacaagcagctaagtctctcaaacacaaatcgatcaaatgcggtgcatcgactttgaatgtttggagaggttgcacttaatgtgtagtatgttagattgagtcttatgtttttaatgtgctagttggggcggtatttgtagcccccaaccaccaaaagagccattggagttatggggcaaaacgttgtctgcgcactggtgcacgaacggtgttgttccggtgccccatcaaaccatgaataatgatgttgcatgtaaccgttctgctcttgtcagccgacgttggaggctatcagacagtctggtgcctcaccggaccagtccggtgccctagctccaataatgtcattttacatgctctatgcgaacttggtccggatagccaccgagacggtccggtgcgcaagcagcgaaatggccaagtctgcccccctgctcggatggtctggtgtgccactggaccagttcggtgcctctagctgcaccccaaatttcattttttgtccaattcttctccaaatcttttttgactgactttgaggatgttcctatgacttagacaaac

SEQ ID NO: 48602 - DNA, 514 bp, Zea Mays
ctcctttcttcaagtgttgtgctgataatgaggccataagtatatggaacaagaaccccttgaagatggaagtgggcaatgtcaatagcaagcaccttgtgttagctttgaaggtaaagggaaatgaggcagaaggtcctttcaccttttatatatttgaattaaagatgattcttctcacagtttgttctcctgtgaaggtcaagagtgtccttgatccatgcgatgatgacaatgttaacagcgaaggtgatggcatgactgtggataatgagtctgatcatgatgatgacttttctgacactgaggtgaagaacaaacagatcgatactatgatatattactagtgcatggcattaatttagcaatctattgtgttcctaacataaacatacttaactctatacctatataacttatgctctttttacctgaagtgttgcttcacattatctttgattgtgttaggttcatccaccaaaggcggatcattacatcatagctcctaatggta

SEQ ID NO: 48603 - DNA, 795 bp, Zea Mays
ctggacatgattgggcccttcaagaaatctcaagggggatatacacacatactagttgccattgacaaattcacaaagtggatagaatacaaactcatcgcctctttgacctcaacaacggcagtggagttcattcaggaaataatgttcaggtttggaatacctaaaaacatcattacagacctgggatctaatttcaccagttcagagttctttgacttctacgagtagaggagcatccagatcaagtatgcatcagtggcacacccaagagctaatgggcacgtggaaagagccaatgggatgatactcgacacactcaggaaaaaggtgtttgacaaaagcgagaagcttgcgggaaaatggatcagggaactaccatatgtggtctggagcctgcaaacccagtgtaaccaatctttacatggaaacaccccattcttcatggtgtatagatcggaggcagtgttaccagcagatctgatctttggagcacccagattaacatttgaaagcatagccgaagcagaagcaactaggttggaggacatcgacatattagaagaacggctgaatgtggtcattcagtcgaccagataccagcagaccctgaggcgctatcacgacaaagcagtacaacatcgatccttcgcagtgggagatttggtcctccgccgagtgctgacgggggagggacgacacaaattgtcaccaccatgggaaggaccattcatcgctgtagaggttacatggccaggatcctaccggctcactcaaacggatggcaccgaagta

SEQ ID NO: 48604 - DNA, 443 bp, Zea Mays
cgcgaggatgaatttggggcactgttctaccctatcgccgtacccacttgcgtcgcgcgacatagctacgtgaccgccaccgtcgtgccgccgtttatcacggttatgacacgccttcggtcgattcacctcgttgtcacaagccgtgaagactcggtagtgaccgctttagaccttaaaccagtgagcgccacgttagcaactccggtgaaacttcctcctttctcaccgtgagaacttcccagtccaaattcgccctcctcgcggccgtcctctataaattgatgcctcggcctattccgtctacttgttacgaacctagtgaaccactcctcgcgcccgatcgtccactgtagcgccctaattcggaatttcccccaaatccgttctccgcaccaccgtgagcaccccctccgtcgacccaccgtccggtccctccaccc

SEQ ID NO: 48605 - DNA, 529 bp, Zea Mays
cttttctccaatttccgagggtttctccttggcaggctctgaaggcccagcttcggcgctagcctggctcattgtagctttggcttcggtcagttttgtttcggtttcaatttgcacttttgaagccttggcaatttacccaggagtagagcttgaagcctttaccgtctccagcacatctagtacactggccatcctttttcttttcggggttgccgcaagacctttttgtgccgtcgcactgatatttccgccgaagaacttaaaatctccaacctttttgcttcttcagtttttggttcttcggccttatctctgtcagcctttggttcagttatctcggctgatggcgccttcggtatggtagccggttcttcagccttctatgtaggaggagtgggctcctttggagcagcagctgaagaagtttccccgccaaaatcaggcaccacggccggctcaatgtagcatggccgatgggtaagaaccttcaacttcttgctcttcggtgcaggctcatctaaagtag

SEQ ID NO: 48606 - DNA, 710 bp, Zea Mays
gcgcaagtgagaatgagagggggagggaaaggagaactggtacagaatgctcctagctctcttgccagcctttgtaactagtcacccccttttatagttcaaggggagctccctttacagagagatggttcatttgaagtagagcgagatctgctatctacgagagttttctataacgtagctcttctaacgtcgttttttgacacgcgcataagtgcatgactagtatggtgggttgctctgccatgtcctgttggtgggctactatagagactctggtgcttagagactggtgttgaggctcctccgtagtggaactcggctagtcccacgtcatagagttggtggactttaagggtcagacatgatgatgcctcgtcccgttgatggagactctccatcaatcccccaatgtgttgtggtgtcagttaaggcggtatttgggggtgacgtgcctcatcgtggctggcgtgggtcaaccatgtttgcctcgttttcatgctaagcaggtaaaagccatgcgcctgccagaagcgtgacgggggtcgtggagctagggtccacatatgcactccccccgttgtgtgtctccacgtctccgccctcgcaaagttgctcggcgggagttggtcgggtcgggtttgcctcgtagagttgctcgatgatggttggtcagattgggtctgcctcacagagttgattggtggggg

SEQ ID NO: 48607 - DNA, 376 bp, Zea Mays
cggacacttcacgacgccgtgaataccgtgtttctgacggtccaagcccaacgaagcattatgtgaagcagtcttcaactactccgacttgatgggatcgccaccagaccactgaatcagctcctcacaaattgggagtcacacatccgtcgtcttcttcagatagcaaggtggcgtcgctacgcgcttatcgtcgcgctcgtggtctctgtcagtattgtgctgaaaagtgggaaaagggacataaatgtgccaactctgtccagttacatgctatccaagaactatgggagttgctgcgtcctgaatctcctgaacctgaggacacttttgaagacactgctgaacagtttatggtcctattatctcatgaagc

SEQ ID NO: 48608 - DNA, 550 bp, Zea Mays
caatggaagcctttttctttgtccaagtccaccttttccctttcaatctacctttgagactacatcaacacaattcaagcaaacatataagtctcaaagggccaaattgtaacatatccccctagagatatgcatcaatgcacaaggacttgtgaggtctgggtatgacattctacaacttgagcaccaagacaagcaataaagtacaataaagattaacaatatgattaaaaggcataaagacacatgtatcttatagatcaatctatgttccgcgaatctaagacattaagtctgttaccctccctcgtttcttgcctagcaaattagataagataagacttatctcttgcttgcgtgtattacattgcaactaccacaagcgcttcctcccctctttgttgtcatcgtatattaaccccaacttcacatatcttttctcgtctccgcctcccttacccagattgttctacaccgccatataggatattccgttgggcgagtcgccatagaggacattgagcaggccaatctactggcctccaactca

SEQ ID NO: 48609 - DNA, 1140 bp, Zea Mays
caaagtcattctctagatctcccacagacaccatcccctcaagcaccctaaccaagcccaggaatgatttattgggtttttagagctattcttagaaaattgcgacacatagaaacccaacccatctggtgccataccaactatgggcacgattactttgcttttcttgggccaaacacatctattggtcacatgtgtctccttatggcatatatcacaccacaaggcttttgaaaatttcctagcatgatgcccttcctccccacacctttggcagaagaaacagcgcccaaaatccaaatcacccgatcccggagcagcagtgtgagcagggttacctgaggtgttgccttcacctgaggacgatccttggttttcacctttgatctccatttttccttgagggggcctcaagcaccaactcaagttgtgatttcgcccccaagctagggagggttggcacatctcattggagctctagtggtctcatttcgggtttcttcccttctgctccattgcacggggaggattgcgtctcgcgtcgttaatgcccaccatgggtcagatctcgttcgcaggacgagggtgtaatgggatatcacgccacccgccgcagaagctttgtttctcactggtgggaaggttccataggcgggataggaaggcagtgaggtggggggagggggagagcgagaaccatctaggttagcggagaaccctatgtctccctggagagattccacctgagggatgagggaagtatctagagggggcgagacctcgggttggaccgtcttcatctcaacacggctcgaaatcggctccactccggatgtccaactacgccatttgtaggggccagaatggttggcccatccttgtttccactctgcaccacaactgggccaaaaaaccgagacgaggaggagacaaagccgacaacagacctgagatcgggatttgcttcccgccttccttgtttcagaattttggtgttcagcaacgggagagaggagagggaggccgggacgatgagaccgaacatggacgcgaggaggacgacgccataagcttcagtgttacatgctatggcgacatcatacatatcccaaacaatttgtattcgacacaagttttagg

SEQ ID NO: 48610 - DNA, 315 bp, Zea Mays
tgaaaatgagcttgacacaactaaaagggaagtgcattgctcaaccttctcaagataaccgtgaccacatggtgaagaagcttgagacgggaacaaccgtggcatgcactaaaacccttgaggaaaatgtcaaggatttaagaattgccaagaggaagaagcaaaagatgaaattcaatacatcctccaaaagcctctaccacgcctctacaaaaggtaacatccaaggtaatgatcaagccacacttcacattaagaggtgtagtgaatgctttgaaaaggggcacttgattaggtcttgtccctacattaaaa

SEQ ID NO: 48611 - DNA, 1158 bp, Zea Mays
aaaatcagcttaactcaaatgataacttgcagatcttcattgagtcaatcacaaacataccagaaccatccctaatccactcccctccaaacagaaacaggtgtgccatatcaccagtagtgcgggggtcagacaatttaggtgtaaatgcaaataaaaatattatctcgactggtaaacgatcgagtggcaggttggcagcaaaacaaaaattaaagattgggggcagccggatgccatctccaaagcgcaggaaattctcattgcaaagttaaataattctgcagccatacaatacaaatgttcaagtgcttccacctccaataatcatgtaaatttgactgaacagattgaaagcctcttcgcaaaacccctcaataaggagcagatggaggcaattatggagctggcaaatcaaggcaaggggaagaaaggaagtaggtccaggggcagcaaggtgtcgccactcaaagcccccatcatcgaggttgttccagaaatatgagctgagcgtcctgttcagctaccagtggttctagtctttttttatgtatcccaagttaactctcccttgctcgtgccagggggcagagcaagatgtcctgaaggttcttttgcttcactgttggtcgtcgcatggtagttggtggtcctggaggtggttttcgaatcattggatcattgtacctctgtatcttactattttcagtttggaacttttgtgtgcctcatgggacatatgtatcttactgttggtgaacaagcttgccagtctgcatcaaatgttagctatgttatattctttatgtggcaatgtctgttcgagtagaggagggttcatcttttaatgaatacaaactgttgtattttatcttggaatgtgagaggtttgaatgctcgtgctaagcgtgaaagtgtgaggcaaacaattctttctaccagcgcaactattatttgtctccaagagacaaaaattatgagttggactaaagatttattaaaggaaactgtgggttgcaagcttgcaaagcagactgtacacttaccctctttaggagcatcgggtggaattcttattgcttgtgacgaagactattttgatattgctccaattacttacacttcaatctactcaatatcagttagggtcaattccag

SEQ ID NO: 48612 - DNA, 361 bp, Zea Mays
tataaattgtcctctccatgcaatggacagtttctccacttttaatgcatgcaatatatactccatgccataccagatatctcctccccttagctaatagacaactaaggtcattgacaatgggacgacgaatacacttcgtcttgaaacatgcaataaaacctctacagaatagttcaagacactctaagaaataattgttccctattttgatgtactcatcgatgaagtcagcaatgctaccgtacctaagcatgagtagggcagctgtgcacttttggtaggggagaaaccgttgtggttgagtgcattggttcaaagagtgaagtaggtagagtgctcacccaacctcgccaagatg

SEQ ID NO: 48613 - DNA, 424 bp, Zea Mays
cgcggacaggaaaatgtggccacaatgaagggaataaaagtgtcgtggtgcacaaccgcgacacattcactcaaacgcgcgtcatgtgtgagtatgtagtagtggttttgacttttctttggtggacagataaccttgataatgcgtacaactgtgtcgatgagcgtggatggagttccgatcctctcgatctcttttttctccagaccgtttctgcatgcggatcctacaccacgaatccatgatataaaaataataacacggaaggaaaggagcatggatgccagcagtgctttctgcgatagctaggacggggacgcgccgtgatcgcgggggcgctctccattgccgctttgctgccacccataacggaatctttatttctctcatacctaccgtggtggtgcaccttttccgctttgtg

SEQ ID NO: 48614 - DNA, 1225 bp, Zea Mays
gctgagagcccaaagcagtctaaattcttgtgtccttatgcctttttcgaggcaattactatagggagtgatccctacagttttcattcctctaggaaaatatttatagtttatagagaggaggggagatagttctatgtactgagtgtttacatctattgcagccaatgtctgatgctatccgccatcgagggctttacgctataacatatgagattcatttctgcttcaaacatgttcttgcaggtagctgttgtaggcggaatagcttcaaaaatccagttatttctacatctcgagatacaccaggacatggtgattatggcttccattttcaatggttttgtcatttgccacctcatcctccgcattgctaatgatgtttggggtatggggggtgatactcacaagttgccagcatcggcgtgcgtagttacaccttaggaacaagtggctaacaatttcttctctttgcaagatacaatttttataggtgtatgattccaattcgatactccttctgagcagtgatctagtatttagcatgtcctttaaaagtagccaaaagaagaccttgtgctttggttggcatttcgatttccatagccagcgatatatcggatagaccgtttcatggccaatcatgtgcttataggctttctgcgacgagtactgctgcgatccccacatgtactaccaacggtctagagtatttgtgatctggtgtttctattgggcctccccaagcagcataagttgttgaaatgcttccgcggacatgaggatgtggaatatctctacggggtgtcctagagtttttgcctggaacatggttatatgtttatttactacaaacaacattagtttagggtacgtttgtgcatgcacctggctatcccatctatcaattcatagctgaatggattgcccgtcctccacatcgacttaggcaatctccttgaaagtgttgagtgtttttaggatacccttcaaccagaacgacccaacccttttggaaaacggcagcatctcatccttataatggttgtcctagacaatattcacccacaggatatccatcctgttaaacgttttgtgaaggtttttcatgaggagcgcttcattttgctttggcaggtcaagcagacccattcctccctgctgctttggcctacacgctagggcccacgctgcttgtggtggctttttcacgtttatgtctgcc

SEQ ID NO: 48615 - DNA, 535 bp, Zea Mays
tgttgctgcacctgggccgtgctcctgccgtcttcccgcgcctcatcaatagccttggatgctgccggtgtgctgacagagtagcacctcaaacagcagcacacacacacaacacctttggctggaggtagaagagggagtgagcacagaacatagcacgagcacacctctgcatgtgcagcaactgaactgccttccattgtcaagcaagctgacacgcgcacacacacaactctagctaccaacaaggtacactagtaccactatagccactatttggcactattgccatgatgctacagtagatagaaggacagcagaattgacctattgtctaactcctgctgcagcaaaagatcaggagcaaacatcagattatctgttcctcttggctaagtagatgattcccaacttcacggttaaaattagactgctcgatagtgatggtttgcactgtgctatcttgatgatgatggtgatcattatctagtaatgttatatgttttgttgtcagttcttgctgtttataatcatg

SEQ ID NO: 48616 - DNA, 1118 bp, Zea Mays
gtgcccatctcctatcctgcctggatcttctctctctcgtgagatttctaggtagctatccttcatttatgatcttatcagctgctatctactcctacttagcttttcactcactgatgcagtacttaggtcaagatggtgcagacgaagaatgtctcagcgccagggggaggagacgacgaggaccctccttgccccttcaggcaggtcaaggggaagactgtttaccttgagcagcaggagggctagaagaagcgtcgtatgaacagagccgctcgtgcagcacttgcagcagcagcggcagcagagcaggcagagtggggaggacagttgcagatctcctctaatcagattgacgacatattttgtcgcctcgcatctcggcctcactccactactccctccacacctccgccatagtgtatactccacctcccacttcaccagctcctgtctagagtcatccaccacttccgctatacccaccacctccaccactccatcctccactattccccctcccgctcccatttctgctccgcccattccaccacctcgctttagggagcgtgacaagactgaggtgcgaccccgagctactgatccccatctgctcgaccttcaacgtgccactgtaacccgggtacgtcggctcagacacgtacccgtggagtcctggttgccagctcagatggacccagcagcggtggctctctttagtactaggactcaggaatccttctttcaagcacaactgtcagctcagatcgccttgtgagcgcaccaacttttggatttaccagcttttctgctagcagctggtgccgattcagaggttcatctcacttatctgccaggattgctttctctgatgaccgcgagtggcagatatattgaggagtaggtcagagtgttttatgctacagtgtggattgaccctgaccatcagtggatgtggttccgcatcgagagagaggatgtcactttgcatgccagccagattcacaactctttggatttctagagtcatcgactcagctccacagtctgtgctacggcacctcggatcctcctcgtcgccctcacggcggagttgcacctgctacagctcacgtcgc

SEQ ID NO: 48617 - DNA, 423 bp, Zea Mays
catcgagtggggcctcgggcgaatcatgattcaaccccgctcaatctcgaggaacgcgtcttctgatttttcggtactcatgtgttaggtatgtttaggggcacaatccgggtacccctaattatgatactcgacagtaccacttggtaaacctcccactttgatggtgaggattattcgtagtacttgggacattgttgagacaggaacgaagatccccgatgaggatgacaatgactacaatcatgtggaggtgcaagaactcacccatcacaactcccaagctaccacgatattgcttgcttctctatgcaaggaagaatataacaaggtgaatggcttggagagcactgaggacaaatgggacacattgaagacagtgcacgagggcaataggatgaccaaagtcaccaagatggagcc

SEQ ID NO: 48618 - DNA, 332 bp, Zea Mays
aatagagctagctgattcaatcctacattgttgaatgcagtaataccaaataagaaaggaacttttacagagtgagagcttgtcacttggacaaacaaaacatatcgagaccaagcggtgtgtgaaagtgaaaccgacagacacatagctaacgaggaacagtggtagcgattccccggcatgattagcatttcaaagtcaccgccaaaatgcagttgagaccgccaaaaatcccaagaagaaattggataagcacagcggagagatggcaatagtcaattttctttgtgaagacggcatcactgccagcaggccgtcatgatcggcggggg

SEQ ID NO: 48619 - DNA, 573 bp, Zea Mays
agaacatgcacataatgtcaaaaactgctgaaaatatgtttggagaatggatctataaatttaaaaataaaagcagaaatcttatcgtggtgggctgcagtgcgatcctttggaccctctagagggttagaaatggtgtttgttttaatggtaaaaatacagtttacactgatgctattttcttcatgtgctacttttgtatgaatgattgggctctgatccatacaaagatggaaggaaggacacctgtgaccggttaaagattttttcaacaaaaaacttggatggagaatggtgacgtctttgtggcactatctggtgttgttctggtttaaattctccctggtttaaacagtttgtagcgaggttagctgtaacccgctggggtgtgatcttccccatgtaataaagtctgacttagctagaattgaccatgagtggttgggtgtattttcctttttagaatggtttttctgtttaggattaattccgcttgctttcttcggttgacagtcttctaagtcgtagttttttggtggatatatgttggtcatgtatgaaactcgtttccta

SEQ ID NO: 48620 - DNA, 374 bp, Zea Mays
gtacaagttaactgatgggtagaaattacatgtgtgggtatgagtaagattctatacctgcgagagtaacccgacgggtagaattttattttgatggatacgagcataaatcaatactatccgatggttatataccttttgcgatccctagtccacgacattcatcatctacgcctccgtgctcgatccccatgaccccattcttgccgacaatgccaacaccgaatcgcatggccccacaaggagcgcattgtgcactcatgccaccatgtgggatgtggccacaagccagcgtgcacgagcgaggcacctaagaagcactcatacgccattggccagtgcaaggtaaagatatatgcagcaccgtagtaggt

SEQ ID NO: 48621 - DNA, 541 bp, Zea Mays
cggcgctaaaacgctacacaagtgggctgttgtatgtacttgtactttactccgtagaggaaggggataaagattgtatcgtcgtactagctctagtatgtatgtggcagcgcgcggtacctttgattctttctttttgtcttcacatgactagcagtagtagccagcttgttgaacttgacgttgttcaaccatggctgtgatgtgaccctcacaaacacgtcagagcaagcaaaagatgcggtcatcaactcgctttccaaactgatgcgtactggatccgcgcgcagggccaggatctccactccactccattgcaggtgccagtctttacttcacatgatcctcatggaaacagatcctctgcggtacgtcttctgtggatgtagcccacgccggagtcactgcccgcgtgcccgtctccggccccacgcgcagcgactacgtccgcctaagaagagggagagatacatgaataccgtatgtgtttttgttattagagaagctggaggcggtgggtctcctataagtaccgccgcgg

SEQ ID NO: 48622 - DNA, 523 bp, Zea Mays
aaactctcgtgatagcaagtcggaggtccccaattgcatcatgtacgccatggctagcgatctttggaggctccgtcggccaagtggggtgcctgatctgggccaccagatcataggggccccaccccatatacatacacggatacatgatatgtacatatgtagtgtaggtcacaggcaccggacttaagcagaggcgcaaggctcacatgactcgccacacacgggacacggggcctggacgcgtaacacgaatgcaaatacgctgaaacacgaacacaaatcttgcttatgcaaaaggcaaaagcaaaacacaatacgctaggggctacgatagtagcaggtagccgccgccgcaccctgcatccctacctgcatccgcctcacgccgtcaacccgtcaagcgtcgcgagtgagcgcgactgcgacacgccgatcaacgattgccgacgctgagacactgttacacctcttccagaccctgaagtttcagtaaacgcaattcagcgttccaagggtccaa

SEQ ID NO: 48623 - DNA, 603 bp, Zea Mays
ctcccttgtaacgttgtgtgccttcccttttatagctcaagggaggcacatacaaggatgctgagccccgacatgtgggcccaggaacataacagaaggaatatattataagagtaactaacgcctatgcaatctcgtggcgccctgatgtccgcagtccacacaatattgacacgcagcggctgcttccttggtgacgtacgcgtaatgatgagcgtagtgcacgcggcagtatgggcgtaccatctgccaatggaatggacaggtacgccgcatgcggaacggactggtcgccgcctgccagcggaatggacaggtctcattaaatgtggaggcggcacatcgcctgccagcggaatggacaaggctcattaaatgcggaggcggcacatcgcctgccagtggaatggacaggtgacgcaccttatcctcaataaatgcagaggccgcatagccaagaggccttacgtcaggctccgcccgttggtttacgtcacgtacaccatgccacgtggcagcatcggggctccgcctgggcggggagcagaagcgtaaatgataaggtccggacacgtgtcggctccggacccccgcctggccttg

SEQ ID NO: 48624 - DNA, 789 bp, Zea Mays
taccctcgcgtgcgacactccacgcaaaagtcgcctaagggtgcagccggactagcacaacaagtgcgcaaaatcgaagtcttcctcaaaaagactatccgtgcaaaagccgcccaagggagcagccggactagcacaacaagtgcgcaaaatcgaagtcttcctcaaaaagactatccgtgcaaaagccgcctaagggtgcagccggactagcacaacaagtgcgcaaaatcaaagtcttcatcaaaagactatccgctcaaaagtcgccaaagggtgcaaccggactagcacaacaaatgcgcaaaaccgaagtcttcctcaaaagactatccgtgcaaaagtctacaccaagaaactgtccgcgcaaagaccgactacaggcgcagccagaccgacataataaacgtgctagaccaagcgcgcaacgcccctatgaacatagccggatgcgcgaaggcgcacaacctcatcatacaaactatagttacatatgtacagcgagggcatcacaccttacataggttcaaccttcggaatgattccatctacctatagttaaatagcactatcctaagctcctcaccctcaaaaagacttcgcaactccccctcaccccaaccggcgaggacaacaattcccgcttgtcagccctgcccacacgaagccgaccgccatccacttcactcactctacgcttcgccaccgcccttcgccgcctacgcccagcactcggaccaggcaaaacttcagcatccgtaacatgcggagaagcctccgccgtagcca

SEQ ID NO: 48625 - DNA, 691 bp, Zea Mays
ccccacctctccttcccctccgcgctcggcttggcccacaaatttggaaatgcacccacaaatttggaagccgcggcaatggcacccgatttggctatggcgtcgctgatttggaaatcgcacaatctacgtcgccgatttggaaagcacgatctcggtaccgcaatcacaacaactatcccccaaatgtcgcgcccacccacgtccaggtgagtctgcgctggtccttcattttcatgtgtgtgccaacatcttcatgttcagtagattctcagtttggttcttctctttttggttcagctgatttaggagggtccaagcagggagcctactcctcatttgcccctgttcagaggtataaattttcactagcttctctagcagttcatgattatgcataaccatgttcttgcctgttcgaacctagatatacaattttcttatgtgctagcggttcctgctggtacactttttttcgagttgttgctaatctatgtttatgtattagttcattgtgtgtttatttctgctttgctttcttaacgatgtagaaatacacttgctctattccaattcaagtctatcctacctttttatgctttctctagcagttcatgattatgcataaccatgttcttgcctgttcgaacctagatatacaattttcttatgtgctagcggttcctgctgg

SEQ ID NO: 48626 - DNA, 410 bp, Zea Mays
agggaaagcttaaacgagggagagaaggagatgaactgaccggaataaggctggccgcggtgaggttgggtttcgggtggcggagaattgatttggggcgaattcaaaattcgcgagctcgggcgaacaattgctagcaatacgtggtgactgggtgggtgatgatgttgtgaagctctctgcggggtcaatttataggaggagcgagtggtggtgagcaatttggtcgagccgtgctggcggccggagatgaagaagaacgcgggtgcggtgaattcgtgtccactgccgtggcaacctccccggcgacgatgggacagcaatagggagtcatggcgacgcggtggaaagtctcggacacgtggcgcaaggccgtgcgacggcggttcaccggcgtagttatccgcggc

SEQ ID NO: 48627 - DNA, 609 bp, Zea Mays
acaagatctaggaaggtaggtggaaggatagaacagcgggtcgatggaggaggtgttcatggcggcgcagagagtggatttgggggaaattccaaattagggcgctatagtggacgattgggcacgaggagtggttcactgggtttgtaacaagtaggcggaacaggccgaggcatcaatttatagaggacggtcatgaggagggcgaatttggacggggaagagtgcgcggtgagaagggggaagagtcaccgaagtttgctaatgtggcgttcactggtttacggtctacggtggtcactatcgagtcttcacggcttgcgacgagtggtgagatgacttaaggcatgtcacaatcgagctagatggcggcacaacgacgacagggcaaaacaatgccccaagttcatccccttcgcgagatttttcaccctacgtagttatctgcactccaccgggcacgaatcgcaacggcggcgaggatcatggcgtgggatcaccggcggcggtgcatttaacctagcgatcttcatcaggttactgtaccattgtgaactcccttcagggcgcctaacagagcaagtttcagagcgttttactccaaaaatt

SEQ ID NO: 48628 - DNA, 498 bp, Zea Mays
gagaaccctcgtttatggatttcacgttgtcaatcttacttttatatgtatggtgtggatccggatgtatgggtgagggtggcgtctatgcatatgacaccccctatggcttgttggtttcaagcggttcaataccactatatggaggtgccttggtctttgtttaataagttgttgcttgaaagatttgggaagaaccagcatcaggcactgtcaaggcacctgttctgcatccgacaaaccggttcagtctctgattacattgatcgtttttgtaccttaaaagattagttgtttgcgtatgaagtggttcatgacccactgtatttcacaacacgatttgtggatgggttacatgaggatgtgtgtgctgtagtgatgatgcacatgccatgtgatttagacacagcctgtactttggctcttttacaggaggaagtatatgacataggtcatcataaagatttccacaaattcagtacacctccttggaccaag

SEQ ID NO: 48629 - DNA, 759 bp, Zea Mays
ttgttacaaaattatcaccaaagttctaactaatagattggcccgctgcattacctctgtgattagtgaccttcagtatggatttatcaaagggagatatatcatggatggtgtcctttctcttcatgagattgttcatgaagtaaaacggaggaaacaaaatggggtaattttcaaagttgattttgaaaaagcttacgacaaggttaattggaattttcttcataatatgatgattaagaaaggctttggtgataagtggagtgattgggttttgaaaactgtgaaaggaggtaaagttgctatccgaactaatgatgtggtaggaccctactttaaaactcataagggtgtgcgccaaggtgatcctttttcccctctcctttttaatgtgtctgctgatggtcttgcttgtctgattcaaaaagctaaagatgaaggtattatcaaaggtcttattcctcatattatttctggtggctgctgctgtttacaatatgccgatgacactatttttctgtttcaagatgatttggaaaatgctagaaacctgaagtttattctctgtatctttgaacagatgtctggccttaagattaattttcataaaagtgaaattatttgtttgggaaatgcttgtaacagagaacatctgtatgctgacatctttacctgtcctcccagtggtctccctatgaaatatttaggggttccaattgataacaagaaactgtgcaaatctttgtgggatcccataat

SEQ ID NO: 48630 - DNA, 389 bp, Zea Mays
cttgctaaggcaattgggataatctgcggtggaggaggatgctgatgcgtagggttgggtggaaaaaaatgatcggtgacaagttatggtgatggggagagatggaagaggttgccgtaggcacacagcaaggaaagtgagctcattgcctcagcggagaagaaaataggaggtaaaagctggaggatgactgctgaatgtccattgaacggctcaaaatatcgggtggtagttgtaaacccccttgtcgagagatacacacacaccaaaatgagtgtacttgcttgcactagagcccgtcagcctggtccggggcaggacagacaccacacgtccttcttgtaagaggatcggatgccaaaaaccatgtggaaatcggagacgtactg

SEQ ID NO: 48631 - DNA, 452 bp, Zea Mays
gccacactaagccataatggctcttccaccgctgctgtccggcaaaccatcacattctgtgacgcgggacgtcgagcaactcctgacttggggcactccggtcccatgtgacaaaatcccccattcccattcagccattcctatcgtgcaagctatcacacactccggacgttgggcccacattgcagactacgggcgcccacatgacagccaccattagttttgcacacatcggacccacgtctgctcgcgcaaaaagttgcctcaatttgacactggcaggagcatttgaccacgattgctttctctgaagaaggaagacttataagccggtagaagctatgttggctggccggcatggtcataaaaatgtgcaagccgtgacgacgacataggtcgtgtgggttgtgtttctttggtgcggcccaagtagctgccagaaggccgcacgc

SEQ ID NO: 48632 - DNA, 561 bp, Zea Mays
gctctgagtgaagatgtaaatgtgataatgtggaagaataacttaatattttggcaactaccttattaggcaattttagatgtttgccactcaatcggcgtaatgcaaaatacaaagaatctttgtgttaacatacttacatatgggaaggacaaagatacacttgaatcatgggaggacttgaaagctatgaaataatgagagggtctgcacctggaagagagggatgcaggacgacactatctaggtcatcctgatatactctcagtaagaatgataaggacaatatgtttgaatgcttcaatagtatcaaagtcccaactgactacattaatgtaaaaaggctgataaataagcaggagaagaaatttgtgcacataaagtctcatgactgtcatgtgttaatgacacaactgctttcgatcgtgctaaggggtgtcctttctatcaatgttacaaaaacaatcacaaatctatgcactttcttgaatgtggtgtcatagaaagtaattgatccatgaagcctaaataagctacataacgacgttatgcaatgccttg

SEQ ID NO: 48633 - DNA, 275 bp, Zea Mays
gtggaacacattatgtacagcagataaggcttcgggtagttgaagtcgatacgccactggcccatatctttcaagaatgaggaaaggaccaatatatcgcggtgcaagtttccctttaaccccgaaacgtgatacgcccttcattggtgagacctttaggtagacatagtctcccaccagaaaatataagggcatccgtcgtttgtctgcataacttttctgacgagcttgagctttcttcaaattatgagttattttccgaaccttttcttcgg

SEQ ID NO: 48634 - DNA, 427 bp, Zea Mays
cccaaacgtcgctttcgcggcggatgaacagcgacttggcggtgctcgtgtccgcaagctcctgaggaaggaaaacaagatgtcacaaagaatgccctggtcacgcaaggtgtacgtctaaatccttacctggaaaaccctgggaacgtcccaagaaaggatttccatggtcgactgaagcgacctcatcgccaccttggtatgctcacggaagctatcccgagacttctcctccaacgttaagggagaggaggggctccgaggtgtcacggctctagaaccggagcggctacccacaccactcattgggattgagctgcgtaggggtaaggtcgctgctccccaggacaggccatggttctgcgcgcccctccaccgaggcgttgagtccccctacagtcgatgcatcgggcaccaccgccatcga

SEQ ID NO: 48635 - DNA, 843 bp, Zea Mays
caaccatgacgctgctagccaagttgttgcagctacctccattaatgatcaaacgacaagaacactccttaatgacacactttgtttgaaacaacgtatgtcctgattctgctttgccttctccatttgtgcactaagcacacgctgtacaatgaggctctcataatgctctgcatcatcttcaccaatctgttcttcagttggttccttagtgcctgcatcatcagccgcaagcaaagcaagtgtagcttcatccaaatcactagcagaggaatacccaccatcgtcttttaccaccaaaacatgctgttaggacaatcacgctgcacgtgtccatagcccttgcatcgataacatagaacatctcttgttctacctgtggaggctactgaagagccactacctgctggtttctgggcagatttggttgctgaatttgtggaagatgcacgtggtttgtcgccggaggaaggtggtggtgctggtcgactcagcgagggagttggtgttggtgtacggcgggtcatggacgtagtcgtgcgctgctgccatggtgtagattttcctgtagaaacattagaccttgcattagcacgtcgtccctgcacttccctttcagctttgcaagcaagatgaaacaatcgggttacgttagcataatctttataagcaaggatgtcctgaatttccctatttaacccgcccaaaaatctagccacagcagattcctcaccctcctctatgttacaacgcaacatacccatttgtaattcctgataataatcttctacacttttagtaccctgtctcaattgttgcaacttgtttaacatatcatgtgca

SEQ ID NO: 48636 - DNA, 458 bp, Zea Mays
actgagattgtatgtgcccaaaaatagtgttggagttttcaagacacaacgaggaccatgtagaacactttctaaatctatggggtacctagtcttggcatcacagggaactccattaacaaagttgactagtcactagattcaacgagtagcatggtgagagggcctggctcaaggggaccgatgcctagaggggcaactgtcttggactttgggggcacccatagactatatctccacctccatgggctcactcagctcactcttaagagctatagcctctcctacttttgggtccgagttggtgcgggatttggtagaagccaagttctactgccattcactagggactcggacactataagaggtcttgagcattcatgagaaattatagcagttatgaggggcttacaacattcactaagggtgatcttaaatgtctagagacatggatgttc

SEQ ID NO: 48637 - DNA, 835 bp, Zea Mays
gataatacttgtaactttcaagccgataatgataggttttagaataatgtgtagtggcaccatgttactgtatgttattaaatataccaaaattagttgtgtgatcctgtgtgtgccatttttctgacatgaatcgtaattgtggctgcaattgtaactgatagtacaacagagcattgcttcgataaaactgtagcagtgtttaaaataatttttaatttttttgcattatgttctgtgggcgaggaaaaactgaacagagaacacccactaccgcctgtcccttgcatccctgcctattttccaaagcccaagtcaaatctgaaacctgaaattaatgatagtgggtttagtttgcaaggactagctagctgttcaattcatcacaattacagatattgattcacaaatgtaggaagcaaaacgtgctagctccgaattcagtctcaaatgtgatttattcacacatctatcccacaagatttgactaatcattttcacccgcacgcgtggggcatcctctcccttccccgcaacacggcgcccgtagcaccttccatcgtcgcccgtgggaacttggccccgacatcgtttgcctctgtcgcaatcccctcccttccccaaatctcggcgccttccatcataaaattgttgttgtgcagtgaagaaatggccttattcttgtgttaaaactgatcatgagagggttcgtgggagaatcttagtataatctgattgttaatgcaatgctctcttctttagtaccactgatcgagatatttaggaaaggggactattttcagtttagcgaggggggctctctggcactggaggc

SEQ ID NO: 48638 - DNA, 563 bp, Zea Mays
cggtgagacctcttcggcgattgaagccaaaggacctgctcttacgcagaggattgaagagccggctgcaatgccgaaggctgacaaaattgaagaaccgagaaccgaagggacgaaaacatcagaagttctaagcccttcggcaggagtggaggcgccgaagacacaaaaagatctagcagcaacccccaagagaaaaaggatggctagtgtattagatgtgctggagacgataaaaacttcaagctctactccaggaaaaatttgttaaagcttcgaaaatacagattgaaaccaagacaaagctgaccgaagccgaagctatattgagccaggccaacgccgaagctgggccttcagagcccgccaaggagaaatccttggaaaccggagaaaaacagcgaaagaagaagctgtagaacagattctgcctgaaaaagctgccactcctactcccgaagcgccttccgaagctcttgattatattattcgacacgcttcaggaaaaagattatctgaagaagaaatttttgaagctaaacactacgcccgagaactgaagt

SEQ ID NO: 48639 - DNA, 648 bp, Zea Mays
gttatataaatgaaatgacaccaaaaggtatttttggcatgtgagtatattaaacgcaagggatttcaggtatctcgaactactaacaaaaaggttaagtcaccttatccattcctccctagtggactgagtattggttgatcagcaattttggcgttaccaatatgctacaacccttgttttgatggtctcctcagcaaaagaaaagcttccaatattgatcaacttccaaatttggacatgggctccccttctattgaattggacgtcagtttcatactgcatgaatacatgcaacacacacgcacagttatgctgagtagctgctcactggctgatttaaatccctgcacgcaacgtgtgccaacagtgggtgtacacgaatggaaataaaacttctgtaagatacaatgcttcattaatatgtgcgattattgcactgcggggaggacacttctgtccatgctctttgtaggcagagcttatttgtccatttttggagggagaactatggtatgatttaagattcagtggcctgcataaactgtaatctatagatgttgaagccttagttaaattattgtttattgtttctcatttttagggagatgatgatgatgatcttgatatggtgtttactgtgtcctt

SEQ ID NO: 48640 - DNA, 728 bp, Zea Mays
ctttttggtggaaaaaggtgccttacaaccttaacctatgtttggaaagttctctcgtgcaatttggctaaatttcccatggtctttattttattttgagaaatgatgtggcataatgatgtgtgatgttttacttgagtggacataaacaccatctcggtataccttgaataaagggattataggaaacctggtatcacaaaaggtcattagctagcccaataacgtcttcatcaactagttgtactcgaataccctctcgtgtgattacaatgccctcaatatcatagaaacgtcatttgaggtttaaaaggcaatctattgttttgaattctttatattccaactttttagcaaatgtatggtggaaaaaaattgccttacaaccttaacctatgtatggacagttcactcacgcaatttggctaaattttccatggtctttattttattttattttgagaaatgatgtggcataatgatgtgcggtgttttacttgagtggacataaacaccatctaggtatgccttgaatagagaggattataggaaacctggtatcacaaaaggtcattatctagcccaacaatgtcttcatccactagttgtactctaataccctctcgtccgaatacaatgcccttgatatcagggaaacatcatttgtggtttaaaagttgatctattgtattgaattatttatattccaactttttatcatctgtatg

SEQ ID NO: 48641 - DNA, 379 bp, Zea Mays
caggtttctggtgtttggcttttgttcgttggcaggtgtcacacggggccacataatgtgctatctcattcttcatccctctccaccagtatctagttttgaggtctaggtacatcttggtggttcctgggtggatggagtaggctgagttgtgagcttcattgagcaggacttctcgtgcctccccttttggtacacacagatggttcttgaaccaaaggactccttgttcatctgtcctgaggtccagaagttgttctttgtgagctttttccataagtctcgttgtctccgtgtctaggcgttgagccttgcatatgaggtcttatagcattgtcttgacttctaagctaccgttgtctcccagacatgaattcag

SEQ ID NO: 48642 - DNA, 720 bp, Zea Mays
aggagaatagacatcaacgtaatcaattcctggaatctgactaaaaccttttgcaactagccttgatttatagcgcggaggctcttttggagtcataccttcttttcttttgaagatccatttgcacttaactgccttttttccaggaggcagtcgaactagttcccaagtgccattcttctcgagagactccatctcttcatgcatagcaccaatccacttttcagtatcaatagacaatataacttctgagtaatttaatggttcttgaacattatcaacctcttcagcaatatccaaagcaaaagcaacattgcactcttgaatcagtcttttgggccaaactatcttcctcctagctcgaccttcagcaagagattgaggatgagactccacaacaggtgacgaggcactgataggagatgaattttcagcaggttcaatagatggtggagcatgatcatcaacatcccccacgtgctccacctgaacactgatagactcaaaattctggttagtagcactggtagatacagccaaagtgaacatagcaaattcattgaacacaacgttcctactataaaatgccttcggtgtatcaggagtccacaatttatatgctttaacaccagatccataacccaagaaaacacccttaattgctctaggctccagtttaccattatcaacatgtgcatatgtagtacaaccaaacacttt

SEQ ID NO: 48643 - DNA, 455 bp, Zea Mays
caaccaccaaaactaattgtgggaaaaggttaactatatttcctttccagtaagtaacccattatttgaaccccggggtaaaaatgagaataacctggcacgttgatgcctcacacctcgatgaaacagtgcaccactacggttgcttaaaaggacactagcacgactgcacgagtaatacattgtccactatattctttggtttacagctcctttttctctagaaccgtgacagccacgtgactgtttgaatgtgtcagtcatgaccacagaccccggatctcagatggtggagaccgcagacaccggccaggctaggcgagtccctagtccgagctctactttttgtgtcggtactacagagcagccgcagcgtcgaaagaaatattcacctttcgagatgaatgcgacaaaaacaaaccgcaccggcctttttgccacgacatggtcattcg

SEQ ID NO: 48644 - DNA, 1180 bp, Zea Mays
gtagccagacaaaagcacaataagtgtgcgacatcacccacagggtgcgaagtcttcacggaaagacgcgtccgagcaaaagtcgcctaagggtgcagccgaacaaaagcacaataagtgcgcgacatcacccacagggtgcaaagtcttcacggaaagacacgtctgagcaaaagtcgcctaagggtgcagccgaacaaaagcacaataagtgtgcgacatcacccacagggtgcgaagtcttcacggaaagacacgtccaagcaaaagccatcaaagggtgcagccggacaaaagcataagtgcgcgtcaccatcgacagggtgcgaagtcacctacaaaagcaactcccaaaacagatatcgcctaggggcgcaaccgataattaaagtgtcgcgcagtcatccttacgacacaaacgcgattacaaatcgaagccaactcgcaataagcacaacatacaacgtgcaatcacaaataaacaacaaacgaagggctcaacggcaccatcgcacaataatatgaatcacggttgttaccctcacaactctgttacaaatcgaagccaactcgcaataagcacaacatacaacgtgcaatcacaaataaacaacaaacgaagggctcaacggcaccatcacgcaataatatgaatcacggttgttaccctcacaactctattgcgaagaggaggagggcagcgctttcactcactatcgcaacaagagcagtgagggcaacaaaaatgtcacataggctccgccttcggaataagacccacctcccagaaattaaacaacatcatccttaactcttccccctcaaacaggtcccgcaagtccccctctccaatgcacgttccaaacatcgaggaaagtagctcgcgctgaccaccctgatccagtcaaagatgagacctttccatacccattcggcgacgtcttccacttcgtgatgtctcaccggtgctctgtttcgacacaaccacccttcgcctccgtgagtcttcagcctttgcctcggccgaggtagccagcgcttcgcgaggagtagatcatagcagagactccgacgcggccaaatccaacgcaacaaaataatctgagtcctcctcagaagattcctcaacccacgagaaaggactcccaaattcctccccgtccgaggaccatgacccaag

SEQ ID NO: 48645 - DNA, 677 bp, Zea Mays
ccgaactcctctacggatggcgagttctatttcatttaactcgagggtcctatttgcaaagcgcaagccgaaggggtagctcgcgctaacagtcgtccaatcaacatccgacgataaggattagaagtctgttcgaacgaacaggtattcactctgggccctcagatcctggatctacgtttacgatttaatgaagtccgatgcacgcgccgatcgtccgatcccgatcggacgttccccactcactaccttcattggtatccttgttcaatctagatcgttggttcacagatcaaccatccagatcttcgctaactagcctgagccgctgatcaaatctagctgtgcataatcaaaccaacggcgcacacattatcttctccccccaacgcgactacccagaaacacggcgtcgcgacgagtcagacggtggtgtcgtccccggtgactacccaacccacagaatcaacgaaacatactagctattacctagtgcaatcgaaagaggggaaagaggcgaacgcaaccgtccaggactcaccggtgattatgtagcgcagatcgccgcccacagtgtgatgcggatccgcagcgccggcgagaaatcaccgatggagtagcaaatttgaagccgagccctgccccaggtaagcttccaccgcgtccactgatgcccc

SEQ ID NO: 48646 - DNA, 493 bp, Zea Mays
gaggaaactcatatcttcgcaacctatggtggaatcgaccactagatcaatgtgcggggggtggatcttttgtgcatgccttgtttatgtcggtgtaatcgatgcacattctccatttcccgcttttctttcgaaccaacatggggttggctagccactcagggtggtgaaccgctctgatgaaactagctacgagaagcttgccaatctcttccccaatggctttgcacatttcttcgtcgaagtggcacaaccgctactttaacggtttagatctaggattgatccgtaaagagtgctcgacgacctccctcagaatgccattcatgtcggagggtttctagacaaaaatgtccttttcaatgtggaggaagtccacgagcgcactttcctatttttgagagaggttggccccgatgcgcactacccgtccgtcgatgcactcaaggtccaggggcagttcctttatgtcatctgttgccttgaaggttgt

SEQ ID NO: 48647 - DNA, 413 bp, Zea Mays
gtttccactgatttgtatagcagtgacaaattagttttcttgggtctttatctctctaattcatgaccgaatcacctcaagttttgaacaagatttgtatagtgtagatcaagtaaaatattttctacactgaccaagacccgattccaaacagaaacagccaaaacgacctcccaatatcgacactattacaggtgccacgtgttcgtaagtttgcacattgggaagaacttggtcgccatgtgcagggtcagctaggattggccatcgcccctatcctccaatggtggtgacgcttgcggctttataagcacatcgtgctcttctcagcactccatcgactgcactcgctccctctcagccctcctctcctcccctaccaactggccctccatagcttgattcaactgcgg

SEQ ID NO: 48648 - DNA, 323 bp, Zea Mays
ggctttgcgagtatgttgaaactaaatgtatttaagggtacacattattgctaaaattgcctaaacatggttgatgttaatggagaaacactgaagtatggttatttgtcgcctatcattcttcaagtttctcattcacctaattggtgggttgacacatgggtcaacattcatatttgtgctaatatttctttgttttcttcttatcaggccatgagaacttcgatcctccttgttggcggggaatggtccctcagtaaggaagaatttaattattggtttgttgctatatcaagatggccacaaacttggttttagtccaa

SEQ ID NO: 48649 - DNA, 650 bp, Zea Mays
gtgggttacagtggtctacgggccccaatctgatgcatacaagctcttgtttcttcaggaattgagggcccttgcttcccaggagcacgagaggtggctagtccttggatattttaatttcatttaccaggcttcagacaagaacaatctaaacctaaatatgcgcctcatgggttcattcaaatccaccatagaggacatccaccttaaggaacttcgtctgaatggccgccaattcacctagagcaatgtgcaggttgaaccaaccatgaaaagaattgataaattcttctgcacgcctggttgggagcttctcttcccaacctgctacatccactccctaccctccctcatgtcggaccacacccctctgctcttacaaggggagataatacgcaaaacaaacaactccttctgcttcgagaacttctaggcacgcatggatggattcaaataagcattctattcggcttcaaataagccgttaccctctgtccagcaaccactcttgcgcctgcacatcaaactggcatggacgaccaaggccatcgaagcttggaggagagtaaaagtagaagacacaaaacttcaactggccatagtcaaggaagtgattcttcgcttagaaactgctcaggaagtgtgcactc

SEQ ID NO: 48650 - DNA, 528 bp, Zea Mays
gttggttggttctttgagagtgtggttgggcgaatcctcgattcaggttgccggttaaagacggtggttggttttgagttttatttgtcaggttgcactagttattgctgcttgcagcaagttatcttggcttcttcgaagctagttatctgaagattgatcttacgtcgtgaagatcgggcatcgtgacacatcagtttccctatttgagcttgtttatggacaggaaacaatttttcctgtggaggtaagcctaaatgatgttaggttcgtcaggcagaacgatctaaccgtcgatgattattataattcaatgatggacaatattgatgaagtaaccgacaagagattgatagctctaggggagatagagaaagataagatcatggtcaccaaagcctacgacaagaagatcaagcctaagtcattctaggtaggagacccggtgtggaagaccatcttgccaccgaggagcagagaccggaagttcggaaaatggtcgccaagctggaaaaacccttacaagat

SEQ ID NO: 48651 - DNA, 541 bp, Zea Mays
cgggaaacagcttcatctaaaatagcttcgaccattttagtgatttcttcctctctctttgcttctgggtcggccgttggctcgaagggctctagggaaggagatagctcaactgcgatagaaaacgtaaataagttcgaagtcgcaaaaataaaacataaagttagaagttattaagcaatacctatcctcttttctaattctgcagttttttcagctgccttcatcgcttcttttgcatcatgagaatctttttcactcttttttattatctcgtgctccatctttcggccgccattctaccagatgtcagtaaagaattttccgcccactaagctggcttcggccgaagggtcttttgtatcttcaatacttaaactagcttcgacttgagccaaagttttcacatggtcacagcctgatttctccaaaatagccacgattcctcgggcacctgagaaagcgcagatatccccgcgaccactcaaaacttcctcaaaagcttcagcttcgttgctgatccaatcaatcgggccttcag

SEQ ID NO: 48652 - DNA, 622 bp, Zea Mays
actaattcggaagaacagtcgacgttacagagtaagtggggggagtagcgatattccttctccagccctgtctgctcttgttggtctgcaagaattatccatagcaaattttgatcaggctctcgaggatgttgttcctgaagatctgctgtctgagccaactgatggtgatatgatggacgtctgctctgacattctggatgtgggattagaggtatcccgggcagcgtctcgtgcctcgtcgaccttggaaggcggtcttcagagccaagaggttggtcaaggttattcaattcccatggaggtgactgagagtccttcagccttagaggtggctgttgcggagaacccagtcctcaaggatggtgcctgtggttgctcagcccccgagggtgttgccggtaatgatccggctcgggtgggtagcacaagctgcaacctagcccccgagggtgttgccggtggtgatccagctccgatgggcaatgcgggctccccttctcatacctccatggatgtccgtgtcgggtcttctccaccacattatgatgtcatagtaacagcacatgcttcaaatgaggaagtcgccttagagatcggcgcaccggatgctagagttctg

SEQ ID NO: 48653 - DNA, 610 bp, Zea Mays
caacattcaaggttgtctgcgcaaagcattgatgcttaggttatgtagagtggcacccatttgaacatcggctgcaagatggtcgtgctagccactgtaggccatcagactaatttttttgctttgttaccaagttttagcttggtttgattgtgaggattggaactaggtttgttagacaatagacatggtcatcgtttcttagcttggatggattgtaatgaacatctctatgtatgaggaatgactgaactgggaaatcaagcttgaaaagagcctctatggctcaagctatttctccaccctgtcccaacactgccagactgaaaacaatgcacatcacaagcccatcacaagcacataacagactaacagaacatccgagaaacactgccagactaaaacagatagctttggttacaagtaggaacatcctaggaacatcccgaggaacataacatactaaaggaacatcccaagaacatcccagaagcataaaacaggtagctgaatagatagtcattacatcccataaacaagcagatggtcatgactaaaacagatagatagtcttgacataaacacaagcacatcacagaagtcttgacat

SEQ ID NO: 48654 - DNA, 429 bp, Zea Mays
aaagttaagccattgatcagctcggctgaaggttatcgcgtgctctgaccaccgataaggagctagggcactggtgatggccaccaggacctaccggccgttgagcttttgttgccttttgttttcttgcaccctaagacctctgaagatgacgttgacctccctgtcaatgcgcgagaaagctccaagcctccacccctcccttcttcctgttgctaaggctgcttaggtttgtcaggctctcctcgttgcggggaggcggtagcggctggaatggtcggccgtgcccgacggagtgcttgaagtctctgcagttctgcagggtgtggcacatgtccttgtggtacggacactgggagtcaaggatttcatccagtgtccgtacccctctacggggtgtgccgcgggcccgagcggcaagtggcccgg

SEQ ID NO: 48655 - DNA, 560 bp, Zea Mays
cacaagtgatgttgacaggtatgttgtaataaatggctcatatttattatggcacgtactatatgatatcatattggcttgcataatgctatgtaaatttatctatttcagatcaagaccttgctatgccaatcacactaggcagagtattcccaaacacaatacatcgattctatttgtggcatgtgcaaaacaggtatatgccccacttgaatgaattgtatgcaagatttgagatggatttcaaaacaaggttccaatctataatacatcatccattgaatgaaatggagttagaggctgcctggcaaatgatgctaaatgatttccagctacacgaggacaacacccttgccagattatatgaaatacgcaaagattgggtacctgcatttttcaaaggagactattgtggtcttatggtctctacacaacgaagcgagagcatgaacaagctggtgaagagtgcccacgtggatgcaaacacaccgcttcatcaatttgcaaagcaaatgatgaagctcctgcatagtaggaagatgaaagaggccaaagaggca

SEQ ID NO: 48656 - DNA, 585 bp, Zea Mays
ctcgatgtaatagacgcatggtgggggttccacaatggccagtttgatcaatcaatcaatcgggatgcatgtgatccgtgccaaatctagaacaaaattgtggagggtgtatttagtcttgtgaatgcataataatttttttctaaggatatatacataatgaaattttaactaggaatccgtttgcatgcattgcctgcctgtggcctgtgggttgcagttgcagtgcagttgggacaagaaacaagtggatcggaggaagacgaagatgcacatgtgtggccgtcagtacgtcctactactctgcaatctgcatacatccaatcgatgcagctcacactcacacacccagtgtacgtctcgatctctcacagatggatctccacccagtcgtgacggatacagttaaaattgaggcggcgggggcagagcggtggctaggccgggttttgtggggcgcccgagttatccagtgcgagtccaatatggatattgttagttatttgatcatgttttcttaatatctaaagatttgggttgttcttatactttcaatatcatctcttctaacaaacgctattgttt

SEQ ID NO: 48657 - DNA, 534 bp, Zea Mays
gattcatgaagaaggccggtgcatttgtcaaaccaaaagacatcacagtgaactcatacaacccatacttggtaatgaatgtcgtcttcagaatgtttgaaggtcgaatcctgagctggtgataacctgacctcagatctatctttgagaacacgttggctcctctcaactggtcgaacagatcttctattctgggcaaggggtacttgttcttgattgtgacctcatttagagctcgataatcgatacacatccttctggtgccatctttcttctccacaaataggacaggggtggaccaaggcaaggtgcttggccggatgtatcctttccctgacagctcatcaatctgcttcttgagttcaaccaattcaggtccaaatactctgtaagctctcttaaagatgggggcggttccaggaagaagctctatagcaaactcaactttttgctcaggtggcatacctggtaggtcctttgggaacacatctgggtactcgaacacaaccttgataatctcaagtgggtctgctt

SEQ ID NO: 48658 - DNA, 759 bp, Zea Mays
agagggaactccactactctcaccactggcgatgaactgccgactgtttttccgagtcaaaggaacctcattttcttcctcctcgacatccacattggcaacacaagcagcacccccattggggtcagcaacagatggggcacccacattgggatcagtagcggattgggtacacccattggggtcagcgtcagtaagtccagtcgcaggcacttcttcagtagcaggaaccgaggtaccagcgtcctgatcaaaactggatacttgccggaggcgtcttcttttcttcttttgctcatcagcagaaggatcaggctgattggttcggcaagggcgcctcgggcgagcacggacaggcttctgaacatccaaagtcgtatcagcttctgggaggggcgccattaccaacgcgccagcaggagcagcgttggaagaatcctcagctagcagatcaagcatagcacttatctccgcatcactagggttcaggggcacctcaaaatgaacctgccgttcgtcatcaggaatctccccaagtgaggcatccaaagcactaacttcttcagcagagggtcgcactctaaggcccaaactgccatcagtaatgggtggattcgacacgaaaagggtgaaggctttgggaggaggcaagttccaggccgagtacgccactggagcaccaacatttgacaccttgcccctgaggatcatttcaagtcggctcaccaagtctgcagaagggattctcctgttggtaac

SEQ ID NO: 48659 - DNA, 398 bp, Zea Mays
ttactgtcttttgagaccctttcctattctattgttaagtcgctatctttttggtaatttgtactctcttggtcttggtatgctcgtaccattggaatcttgcatactcttatttttatatgtgcttacctttatatcccaatatctgtttgagacatttcagttaacatgcccttgaccacccttgtttcttaatgatccatgagcagtcattctactttgcatatccttggtgatctcgttgtctccttgtaactccactcggtaatgaatctttacttcaacccttctgttggaaccttacctttcttacccttgattgttttctccactttgtcgtttcgcgagtcttgccttaactatatcctttgttatgcttttaattattatcatatgca

SEQ ID NO: 48660 - DNA, 896 bp, Zea Mays
ggcttctacaacttcctacggacgagtttctgttgaaatatgtggaaaaaaaacaagaagggctttggtaagtattcgttgcattaggttataaattttagcatagacactgataatgcaatgctgactagttcagatattctagttacttagctgtgtagagtgtgactatgagactgtagttcagtagttgtaacagagtgcctggattcctggaattctttttggtgttcagtattcaggatgtgttttactgcgtattttaatttgttccacatcacaattttttccctctaaaatccttggattaaaatatccggttcttcagcattgatcaatgtgcagcccttgttctcctgtagtgtttttccctgcatttaaaacaccagtggttaaatttgctctagcaatcgtacatgcggaatggagatgaaaatgatgaaatatgacaggtacttatgatgaggcctttgctttggtactcctggtgcagctttctttaagttgtgccgagaagcttgtttagatctctgtgaatgccaaatttattgatttctgattcactccgttccactaagaaaactatggaccgtggaatcttttgattgagcaatcacatagtgcttgctaactatttctagccctttgatacttttgcatgtgtgttactgagacatcctatcttggttttgcgaccattaaaatatgcaaatcttaccccataagtgacaaacgttgcctggttatctgtcatggtaactatatttttgacatcgccgagaaatgatatgtaccttactcatctgacttgtcccttacacttacacccaccacatttgatcaaaccgaatgtttactacctttgaggttggcggcatgagtgtgtcacatataaa

SEQ ID NO: 48661 - DNA, 426 bp, Zea Mays
tcggctgatatgtgtttatattgattttggacgatttttatcatcgtgattctcatataagcgggtttgacagcacacaacaacttctggtggctagaatcagcaaaaaagagccctatatctcttctttggccaccgcgagaactagatcttttaatattcagtatgttatgatcttgataacctgaagcttattgccctgcttacagagcataatttgtaggactggattaatcctgagttaggttcatggctgtagtatgaatttgttaagggtggcaccgagacttatgtaccctgtcagcccttatctaccccaaatgtttcggtgtatattctttattctcagcctaccccaaatgtttcggtgtatattctttattctcagcctgccagttcggcgtcagtggcttttttatagacttt

SEQ ID NO: 48662 - DNA, 469 bp, Zea Mays
actgccgtggtaatctccttgccagagagcacgaaacatggtgacagcgcggatcacggtgcgagggtcacaggcggcgaggggagctgaatctgtgatcttattcagtcactgtaccatggtgatcaccatcagagcatctgacagagcaagtttcagggcccagatctcaaatttttatgtgataacttgtttatcctcctatgacaaagttgttgatctataattcaactttgatcttgttatagtaaccacacccagatactcactggatcattctcaaaagagctcccaaagttcatcccaagtcactgtcagtaaaaattcagactctgagttgactgacatccagactttagggctatttatctccaaatttagtatgacaccaaggtttatttacttaagaaaagttatgctcctatagtagctctataatcttgatttgttgacctagggcaaattattt

SEQ ID NO: 48663 - DNA, 356 bp, Zea Mays
aaatgattcatgggtcgcgatgaatgagatctcctatcaatctaatggtgatggtgattgtgaaagagagggatatcgagggagttttgtaggggcacctccgttgccttatataaccggctagagagatatctctttacagatcgtgaaagcttatcttggtctatctacttctatttctatcacgcaccgactcttatgatgtctggttgcttcctcctaagttatctttcgagtaactcgccattcggttgtgcgcaaaacatgctctcggatcatcagcaatcctcttgacgacgggtgcgtacaaatagtagccttgtgccacgttattagggattgcctccatctccgag

SEQ ID NO: 48664 - DNA, 315 bp, Zea Mays
ataaattcgagcaaggcgcaaacggtacccgtggtcgtgctcagcgtcgggcgaggcagagttttgtgcccgagggcaggtctgttcttctgtcgtattagatgtctcgtcaggggatgccaggcggcgtgcgtgcaaagcggcgtatgtgtaatcatgctgttgggcttagacaagaccgcggtcttgttgccgctgtacacctgtagcgctgtgcggggtaggtatgtgcattgaatgcggttgtcccctgttggccttcagacacgccttgtctttgttgcctgaggcgggttcaggcagaacggagtttgc

SEQ ID NO: 48665 - DNA, 353 bp, Zea Mays
gcaacatctaatcttcaccgttcaatcccagatcgacggtaatcgagttatcttctttccccagacatggattacggtggaggaacaccaaccgtggcagcgccatggtcgaactacgccatccatcgattcctagccctacgcttcgatctgagatatgctatacataaacgatacataggcgaactagatgagggcttccttaccgttgctcatgcggcacaggtccccgcccatggcgataggcggcacggcagtggcgaggaattccggtgaagaatttatgtcgccccgatggtcgatccattccaccgagcccacggtcgacaccaccacccacgagcgacgctccc

SEQ ID NO: 48666 - DNA, 661 bp, Zea Mays
ctacacccactccggtcctgtgacgcggacattggcacaacgctcacgcgttccaggcttgcgacgctggggctgcttctgtgggtgatcagatactgacgcctggctggtaacattccggctcccttgaaatcctgcttggcaccaggaaaacattgatgcaaagcttcaagatcttcccaggtggccaggtcggaaggtaagccggaccactgcacaaggccttgctgtacgagacggttgcctttggtaagtcctcgcgtctgaaggatttgaacaggaacactgaattcaggtaaatctagaggcagagttgctggagcagggcctttgtaacctgctgccagtttcagttgtgatacgtggaccaccgggtggatcttactggagataggcaggtccaaacgatatgcaaccttaccaacccgagctgtgactttgtatgggccaaaatacttaaaactcagcttatgatgaactcgcagcgagagaaatgactgcacatagggctggagtttcatgtacacccaatcaccgatggcaaacgagcgctcagacctgtttttgtcggcctgacgatgcatcctgagttgggctcgaaccaagtgctgatgaaccaattcttgcatttgggagcgctcctgtaaccaatcagacagtg

SEQ ID NO: 48667 - DNA, 370 bp, Zea Mays
cgactatgatccagtgagaatctacctagggttgctataacaaagttgtagagctattatagaggaacaactttgctgcagagatctggatgtgttgccatagaaatttggaagaaatttggccctaaaccttggctgtcagacacactgaatcagagttaccatggtacagtagcctgatcgggttcagtaaacctcaccgccgacgaccgatcctccgccgcgattcgtgtcatcggcgtatggattcatgctcgtggcagatggataacatcgtggggtaagaaaatcttcgccgccggtgagctggacgccactccggctagccgcggtacctctccccttgctcaccgcccctcggacaaggatt

SEQ ID NO: 48668 - DNA, 724 bp, Zea Mays
ccacctagatggtggtcgctatgtaaaggagaagggttttgccggcgaggtcaagaatacctttattagttcgagggcctcctaggcttctgtggtttaagagaaatggttggtcttcctaaggagtttataaaggggcatcccattttctccgagcctgaagacaaattgtcttagcacgacgacacatctgattagctgttgcacccctttgtgattttggatggcgccatgcgttgaatggtctctatcttctcctgttggcttctattcctcagtcagaggccatgacgcctaggagcttacccttaggaaccccgaagacgcactttttagggttcagcttgattcagaaccttcataggttggcaaacttctcttctaggtcggcaatgaggtcgtaggatttctttgtcttcacgacgatgtcatcgatgtagacttctacgttgtgcccgacttagttggtgaagcactggagcatgcaacgctggtatgtggcttcggtgttctgtaggctaaagggcatggagacgtagtagaacgttccgaagggggtgatgaaggtggtggtgtgtcgaccgccttgttacatggagatctggtgatagcacgagtaggcatctaggaatgaaaggagcttgcacccggtggtggagtctacgacctggtcgatgcgtgggagagggaaagcatctttaggacatgccttgttgaggctcat

SEQ ID NO: 48669 - DNA, 710 bp, Zea Mays
gcctcgagcacgtggttgtttctttctgcccgagttctagctcttgctgagaagccaaacatgcgaatctagccataatacttttgtgagatcccttctctacacctagggctacctagttcatgtgagttccaagggaagatcgggtctggtttgggagatatggtggcgccaagtcaggggtgtcagcactgttcaacccgagacaaaactagtgtcaacccatgtcaaacggttctggtttggcttcaaaattttcaggggtgtgccttgggtaatttggctcctttttgtcaattggaccttgtggatttggtgccatcaactaagtgaacatctctgatctttagaagagggctgatttttttacttagagaaaatttgggttgctctatagtgctctccacttgggggctgaatttgggggttttgtgggacctttttggaataattcccttactatttcttgtagatatataaatgtacttcaactttggtaaaaggtttaagtcatgaattggtcatttgcatagttttcccactatccaatgcttgggggtctaatggctcaagaggggggttctagggtttgagcatcttttttccaaggtgaagatacatggaaagctagggtattccttctatcttgatcattacttaattaatccatggtttctaaagttttggtgccccttctccccacttaaaca

SEQ ID NO: 48670 - DNA, 531 bp, Zea Mays
acttggattactttgcggccttggatgtggcagcggtggagtcttcgccgcgcgctgcgaatgctgaagttgtgcctggtccgagcgctgggcgcaggcggcgaagagcggttgcgaagcgtagagtgagtgaggtggacggcagtcggcttcgtgtggacggggctggcaagcaggagttgttgtcctcgccggccattgcgagtgtaggtgagggtgagttgcgaagtctttttgagggtgaggagcttaggataatgctatttaactatagggagatggggatcattccgaaggttgaaccgatgtaaggtgtgatgccctcgctgtacatatgtaattgtaatttgtatgatgaggttatgcgcctgcgctgtgcttgtaaaggagttgtgtgcttggtctagtatgtttattatgccggtccggtgcgcctgtggtcggtcctggcgcgggcagtttggtgtagggtttagcatgggtagacttttgtggaagacttcgaatttgcgcacttgttgtggtagtccg

SEQ ID NO: 48671 - DNA, 395 bp, Zea Mays
gtctcagatattggcacttgtctcaatcatctctagggacttggggacttctcctctcccgctgtgcttgtaaacccctactacagacaccacagtgcgagtaatataagtctctgctggaagtaggatcttgtgttgaccgaaccaggataattgtttgtgtcttctcgcacaacatctagagtcggtcacgcgacacatttactggttggttaaccacccacggtccaaacaccgacaatgtggatattcatttagataatctatcggagtgtatttttttataaaaatatctatttatatagattagaaacaatatagaaattatcttttagctgctcttaatacctatttgtttcaacttataaattatccatattataatttattaagat

SEQ ID NO: 48672 - DNA, 556 bp, Zea Mays
aaaaaagatcagcaggagagtgaaaagatccgggggggttgaatcggggctttgccctgccgtgcccacttgcaggcgatgtggccgagcggcggtcattttggtggctgtcgacttcctcggttgcgccacgctagggagcaattcaccatgttagcgtaaccgtgtagatggcaagttaccccttcgtgagctattgtgccactacacgccacgaagcatagaccagtgaaagatctcaccgccgccgtgaacgttctcatcccaaattcacgaagcacatgagtgatcactataaattgagttccctccctgtttcgccttcttgttacgtgcccagtgcaccactcctcacctcaattcatccaccatagcccgagaatcccgagttttcccaaaatcggtcaccgacgccgccgcaacacacctcgccatggccagcccttctcatgttagatcatgtccctctgagccatgttttagcatcctctagtgcgagtgaatcacacaagcttaagtgattgaacgctagttaagttgggcatcgagaacatcg

SEQ ID NO: 48673 - DNA, 360 bp, Zea Mays
tcaccctcaaccccgaagcggtacacaccgggtttaatcgcagccgttgacgccccatccgatggcctacttacatcgtctaccttccatcgaccagcgtttcctaaaacaggggtcggcggcgaagccatcaccggcggggctaatccccggcttaggtggaccctacctcaattcaacgaccctacttgttgcattaatgaaggtgaacgcgggtgagggtttcgcatcaggaattacctgcgcaagtgagcagtccacggggagggttggttccgcccccgattcgcactcaggtgaagaattcacttcgattcgggatcgttcggctcgattcgagggcacgaacagaattctcgg

SEQ ID NO: 48674 - DNA, 446 bp, Zea Mays
ctttttttttccggccggatggaggggtacgtgttttgtcgctgcagtacatgcggacatgacaacacgggcccaccgcgtgctatgtatcgatctcctctctgtggtagtaggagtacatacacggcagctcttgctgcctgctagctagcccgagtttattgctgtgttttttattaacctttcctgttcgtgaaaatgggtcgtgtacaatacacagcagtcagtcagtcacacagcggcagccagccggatgtgtatgcatcgagatgctttgaaccaggaacagcatgcgacggctcctgttcgccatgggccctgtcaggagaggcacgttagccagtaacagtggactgccgtgcatcatctactgtacccgacctaacatggggaacaaagcttcttcttccgagcagtttacacaaaactatgatactatatttatt

SEQ ID NO: 48675 - DNA, 840 bp, Zea Mays
gaataatgtaattggttcattagtgaagacttatgtcgatcctcttgctagtcgacccgcgtcattgacattcgttccatcatctgttgtgtcagctactagagatagagagaggagttggcctgtccctaggccagggcttgttggcccttccttacacctaacatgggcacttattgatgatcactaatggttacaagtggagtaggaactcgctcctgcaaagaactatgaggcatctctggtagaaacactacgcttggcaatccctccgtctccccgatgcacttaatgacgcatgttctatcagggagcaggggtcgcacacaagggtagttagggccatgagggccaggcagcctccattcacaagggatagtccttggtgcttgtcagggagctaggatccgagtcgagtccgagcagaaggcgtcaaagataagatcttcactgccattgaccatccctacaaattctaggtcatcgatcgttggaaatggtcatgggctatgagggcggcaatcgcccctcgttgtgttgtgaaggtgcaatgggaacaccatggggttgccattgaagtcatcagggtaggttaacccttcctcgacgaactacgacgtcaagctcaagtaggaagagaagaaggcccatagatcatcataggatgggtcgggcccatgtgaatcgtgattgtacctcgtatctcttcgcccatggagggtgaggttgtatctcgccccgtgtcttgcttctatgggggtaagtcggaggccaccaagggcctttgtgacggtatcaaggctctcgaacggagggcgttgggcttacagggtcttgacc

SEQ ID NO: 48676 - DNA, 373 bp, Zea Mays
ggctactaagccggccaattgtgacgatggtgacctgatgacaaacgactgataccttgtagtgggaaacctggccaattagccactttcacttgccgatctagagcctagacgcgggtgctagtgcttgttggctatgctcgtgccatataggagatagagggaaacaccatacatacaaagacgagccaatgactaacaggtagcgtgtgccaaatatcgaacgactagaattaggacgcatgttgggacgagaccggtgtcatgatgtgcgtgtgtccgatggagacttttagtcttttgtcatctttaaggatgacactaaataaccaatcatagatagctgagtcattaacataacattttatgtggc

SEQ ID NO: 48677 - DNA, 400 bp, Zea Mays
ccacgatcgacaagatcgccgttgacatgttctaggcaagagcacttcagacgaggtcggcaagaaaaggctattatagtattatattaacaaacatacgtagataaagaagtgtagcttgaacgcaaagcagtagtgcgtatctttttaggtgtagaagctgaaagatcatcattttggaacgtttgacccgtgtttttcaactacgcgctgaaaaccaaatgcgatcgacgacgttttcggcgaggacagaaggttcaggagctcgtgtacgtctatagctcctgcgtcaaggaaaaggctcccccttgcccaactttgcaccccaatgagctgtaggctctgtgttgacggttgaccctgcatgcatgtcattgtcaactttaaaagtatagtatct

SEQ ID NO: 48678 - DNA, 554 bp, Zea Mays
tggtaggcatgtatatatgtgtccactatagacctatcacaagcttcggtgcgggggaaatagattttcagatcgaagggagtaaatgctaagtcagataagtttaattggacgggttcagacgaatgagctaaatgagacagaaagcatgtttctatgcaggattagttaggagaacttagtcggggcacaagaaattgatcagaacaagaaactcagtactcatggtggataatactagcaagctttattcatataagcggaagtagtattacagaagaagatccagttcattatgaaccgaccctgcagaataccccttctaccactactcctactcactaccactacatcctactactacattacactatactaatatctaagccggtggtgccttgccatcggtgttgccgccctcgcctccgccactgtcgtccttgccgctaccgccattactgttgtcatccttgcctccctcgtcgtcgccgtcgtagccaccctcgtccgctctatcgttgtcctccttctcggagtcgtcctcctcggagccc

SEQ ID NO: 48679 - DNA, 550 bp, Zea Mays
tgaatttgtaaaaagcataactcctaaacggttggacttatgcctgtcaaattttaacaccagcaagataataaagttatctaccacttttctatagcacatatctacagaaaatacaatttagtacatcgaacatacagcacaactaaaatagtgcgtgcagtccaaaacaacaatcaataaatttcagctcatatataattcaagaattgccgcattctagagacttgaatcattctagcactttaccatttcttagagttaaattaattaaatgaggactaacaagtagacttacaaattttatccaaatcatttagtgcactaaaattaccacattcatttaacaaacgcattcatcacaatcatcaaatccggcatatatttatatcgaagcgcttttcacccactagtccgcattttaacttagacaccacatgagcactactaatttttacccgcgaccataaccacatgcatttagactacaactagcaattcatcgtgaccacgaacttaacccaaaaccatttaacaggttggtcaatca

SEQ ID NO: 48680 - DNA, 443 bp, Zea Mays
tggtggcttgccttcaatagtgattaatgaaatcacgagtcacggcacgaaaaaagtgcaacatactggagttaatccgcagtctggtgtttctctcgctcagcctcagcagatagcccacgtggtggatggtggcctgccttcaacagcgattgatgaaatcatgatcacgacaccaaacaagtgtaacatactgaagtcaacccacagtctggtgcttctcatgctcaagcctcagcaggtagcccacgtggataaagtgatgaactaagccctatgtttatcccaaatttgattctatattttcttaattaactcaaggatcagcacagttgtgtgcttgtgtatatctacaaatcatggttaagcagaaagtaagacacagacactttattctttttgccacaagattgaaggtacattttgtggtgtgcaagggtaaa

SEQ ID NO: 48681 - DNA, 477 bp, Zea Mays
ctcgctccgaaatcaccgaaactaggtcattttttttgttttcgctactaagcgaaaaaggaattttggaccggtttaaactagattccgattcaaagtataaaattacaagagtcaaattttggttaacaaaacgaaattcggtttaccctaaacgaaattgtgaacactgattggaacagatgaaagttgagcaataatactagcacccaagccaaagcgaaactccaaaactgcggagggcgtgtgagcctagcaatttcgctgtttgtcgatcttcctgcagctctcctcattgtccaaattttaagcaaagcacacacacacccacatcaccatcaccatcatgtcctctctctcctgcaccctcctcccgcctcgctgctctctctctcgtcttccttcatcgttcctcacctcactccatacaacgctcgaacacatcatcatcatcaaatatatatacacacactcagg

SEQ ID NO: 48682 - DNA, 816 bp, Zea Mays
gcccggccagctgctgcgggctcgagaccgatcagatcatcatatgcaacgccagtgcaagttgatctgatgccctcgctcgatcagcaggcgccctgggacgggctcatgcactgaacttcgccgacacccagctagctctagctagtagtcagtcgtctcctcataataatattatgatgattatccaggggcaaataatatatctatagtgtatcataatttgtaactgtcgtctcctcataataacttagtctaatatacagcagtatatttttttattatataccatcagtgaccggtttttaactgtggactcctttttccaactatactcaactgagaggagagacgggaaagtaattcattgttccatactttttagggttccaaggcatgcatggtcaaaaattaaagtgtggctctagatgcacatgcatggatctgtctctaaattttaagcataaactatagtaccttgacaagccaaccattttgggtggctgtgtgacaacacatcaggctgggatggcctacgttatcaccactgccgccggaaggttcaacttgcacaccccccaggtgaattattgtctctgtcctttgctaatggtcatgtgcagtcgagcatctatataaagaggagggaggggggcgatccaggagcgacacaagtccccagtggtagtaggagctagcactggagctgatagatcgaagaggagagagagagagagagagatagagagggaaaatgtacatggagtgctgtcggtaacagatagagagagggagagggagaaactatgatatttc

SEQ ID NO: 48683 - DNA, 375 bp, Zea Mays
gtcaattggagaccttggctttggtggggattgttggaattaggcccactagtgtgtggcccaattcaataaggaagccaaggtggtgtgtagagatgacacaggactttagtcccatattgcccatctagataggagagaaccagcttatatgtgggagtgttccctactcttcacatgagacaaataaagggttatggaggctgccacacgcgcgcgctcgctcgcgtttctcgttatttatcgtgtgactagtgatttgcgacgatgtgcgatcgcgtcgtgacgtgctctaaacggcagtttaatttttgcctttgtttatttgattatcaaatatcacacctagattgccatgtcaaccaagagtaattg

SEQ ID NO: 48684 - DNA, 328 bp, Zea Mays
gggatactacgccagaaccatctgtatcgagatgaacgatccagattagatagaggatacccgttcggttgggtacaacgagcgttgtttgatccagatcggttggatgagaatcgatgtaggatactttgaatatggcacgttaatgttagatctgacggctaaccttgcgtaccgcttcgatggggccgtgatctaacgtgggacgtcggatccgatcggatggcggtgatcactcgataccgcttcagccatgtcctttttactaaagagaccctgaagattttgggtattaacccaccgtccactggcagcgcatagtaatttc

SEQ ID NO: 48685 - DNA, 398 bp, Zea Mays
tcgccacacccatgggcgcaagcggggacaagctgagcatgacaccaggctccgacgcaagaacctgcttctccatcggaacctactgcccgacttcgctcgagccctgaacacgccgagtgaagtcgacggagccctggcttagatcgccaacggcctactttcgtgcaccccggacacaaaaggctatcggcagatccttacccgggcagcgaaccatcttcttcccccactcatccggaaaacgacatgcgctgagtcatcaacagtcggtgagacgcatggagcaacatcaaccaggttatcatcgggagcaggagttacctccaggacatatcgactaactcagatggatggtactccgatagggaactaattgaacattgagcacctcaata

SEQ ID NO: 48686 - DNA, 360 bp, Zea Mays
cttcagtaaatatgtcttgactcaggcatagtactttttattgtgcatgcttcggactcttcacatgcatcacgctgttgctgcgcttggcggtgtccttctagctgctgattgtgagtcaaggttggtgccatgggtggtggtggaggtagcagggtcgatgcggcttgagagtggcttgccgaagcaaccgatgttgtgggttgctggttgcccacatactcgagaatgtatggagaataacacgaaacagtatgcacgacctgctttggctgattctgccttgcttcggcttcagctatctccttttgcttttggatcgtgacttggcacgtccttgttgtatgtactttatcctcc

SEQ ID NO: 48687 - DNA, 529 bp, Zea Mays
ctctgatgatgaccaactctctgatgaccaactctgtcgaccaactctgcgagacggaccgaatggccaactctccaatgatgaccaactctcggacgatgaccaactcttgaatgatgaccaactctctgatgatgaccatctcttcggtgatgacaaactatcggatgatgaccaactcttcaatgaccaactatgccgaccaactctacgagacgatctggatgaccaactcttcgatgatgaccaactctcggatgatgaccaactctttgaggatgaccaactcttcgatgatgaccaactctcgaatgatgaccaactctctggtgatgaccaactctccgatgatgaccaactctttaatgaccaactccaatgaccaactatgaagaccaactctccaccaatcaactccggccgaccaattctccatcgagcaacctggcgaggcaaagatctaagtccaacgctactaatccacgtcagttatgatgagacgcgtcaccataaagccatgcccggttat

SEQ ID NO: 48688 - DNA, 377 bp, Zea Mays
actttaaattgaccctcccctcactccgcctctctgttacacgctcaacccaccctcagttagcccttttcatcaactatagcccaagttctccggaatctcccaaaaattgatcaccattgtcgccgtgaggtgcttcaccgtggtcggagctcctcaggttagctcaatcctctctaacctgtgtctaagaatctctagtatccctaattgcttgtaaccccaaccgattgaactctaccatagtattttgatgagaacacttcctcgccgtccttatgcgccattgtggccctccttagcgtggtcggttaattctatcttctttctggtcctttcagctgttattaaagtagtctcatgtgctactgaggctt

SEQ ID NO: 48689 - DNA, 443 bp, Zea Mays
aaggtcttctcacctcttgatcatctatgtatgccttaattcatatactccgaaataatctttactgttagctatgattctttttatcaaaactatcttcaagtgcatctaacaacaattcattcaaatattttgttaaagcaggaaatgacacctactttactctctatgtacatcgtgcgcggggcgtgcgtcatatactagtttgtaacaaatctcttgctgcccttttgaaaacaaacaagtttgattttaaaaaacgaatcaatggtctcttgaggatgagatacttttgagtaactgatgctactatacatatttttacagcttaaaacattaatatgttcatctcatgcatgcttggccccttggagatcagcttttggtgtagggcactccaagggcggtgatttcaacgatatatgttaaggctgtccttaata

SEQ ID NO: 48690 - DNA, 1031 bp, Zea Mays
ttaagggttgcgcggattgggtgttcgctatcggctaagtcgtcaagtattgtttctctctcacacacacttcgtccggccaaccttccgccttttatagaccaaggcggaggttggttacatatggcttctcttggaagggatcgctgtggagtggttctccctcggtaaacgccttcacgtatgttgttatctgttccgcataactccctatcgactgttggagtgctggtaaagtgtgtccacgacgggagtctaagtgtcatcattactccgcatgtctatctatgcctgtgtcagcccctagctttcatagactgtcttcctgccttccttatgtcatcttgtctgttacgtaggacgttggaggactccggtctaggggccataggtcatgagcagggctcaagcgtaggtctagagcgggaggcagaccaattctctcacatgccatgactcaacgtcggacatagttaatgagagttgccctttggttagaagcggagtccattcgagtggttccctgacgctttgtctgaccctgtgcctgggctatgctttgcccaaccccgtgcgtggtgcgggtgttggaacaaaggtcgaacattacgtcgatcagcaccacgaaggtcggtcccctcgccctaactaatcatgcttgagcgcaaggacaaggatattcagagccttcgtcgagcacaactacagtgggcccttcggccaagcaactaacaccgattgtagctaagactaacgcccaggcgaccaccgggccttgaggacttcgccctttacttctcttagaggatgcccggtataggcaacgtccccgagaggagcgagggagcccaagacacgatggctacaagacgacgaaggctctaggaaaggagatatgtccgagtcacctgtccactatgggggctcccgatacgggcccatctgttagtgtagccaaagggtaaaattgtgagtgaatgtgttcgttgtatgttacagtgttgtaattaccccgttacatgggatatttg

SEQ ID NO: 48691 - DNA, 372 bp, Zea Mays
gtctagttctctgaggatgatgacgacgacgacgaaggcgacaaggacaccgacaagggagctggcgacaccggcggttccattagcagtgatggcgacagcgacagtgatgacgacgatgactgggaggacgacgacgacggtaatgacaatggtggcggtgaggacggcatggatcccccgtgcaagtgtcgtaaactcgagtaggtcataccactagtgacagttagcattttttatcagccgatagattggcttagggaagaactggcccttttctataaaaactttgtttgtttaataatcgtccattaattactgatggtgtatgaggcgatctcgtgagagtcgatgtcaacacatcagtttctc

SEQ ID NO: 48692 - DNA, 348 bp, Zea Mays
taatgtgaagaagcgaacaaagaaaacaatggtgagtaaatgagtggacgatagaaggataaaaaaatataaagaggtggaccaacgtagacctagaacctagtgtgttcgggagaaggcttatgcctaaggtccggatttaatataaactattgtcttagtgtgttttcaagaagatacctttgaaccatatgtctaaatcaaaaggtttgactggctttccatcagtaaaagacaagctgaaggagtaagatgagacaaagtttaaacatgattgaaccaccttcgaatacagtgacaaggaagttacgaaggaggaggaaaagacgtacatgacacttcttcccc

SEQ ID NO: 48693 - DNA, 842 bp, Zea Mays
gcaaaatggaacaatagtgtgtctcaccttttcaagacgttggagcagagctgtcttgaactgcctaacgccacggccgatggagttctgatccagccggtgtgccttctcaaatgcatagaaccgacctaatttcacaacgaaactatgtatcaagatgaaggcagcaaaaaggttaacaattagcatctagtcttaattcaagtccattatccaagtcttaattccagtaactatacactattctagtcaaaccgatcatgggcaccatatagtacggtttaaacaaaacaaaattgttataaaactccacagaccgaatccataacaatggagtgtgaggaaaactgggcacaaacttggatacgatttaaatctgaggagaactagagatagagactgggtagcagcaatagcaggaaaatcggattagagaaacagagttggagggagaacaaacaggggatcggatgggcgtcagagttcggggagcaagaagagtatgtagcctttgtgcttcatgttcgtcgatgccccatttgctatgtcagccgctacgtcttgtagtgccagtgccagtcctttgttcccatgggccgaaagcccgcttacctagcccatctgtatgcttgcgtattctgaggcccagcccagtacataacataaatgtacacacctatttatcaaagtctgtattccagtaacaccaatctgactggaaacaattgatgcatattgcaaataatctgtgttctgaaagacaaaattgcccccgaaacaaacaattgatgcttattgcaattgatgcttattatatacggttggtcatatagaaaacgagc

SEQ ID NO: 48694 - DNA, 605 bp, Zea Mays
ctcgatcgatttgagaaattggtcttgttaatttttgcttgtctgggagttttgggcttgttcccgagcttggaagatttgatagtgatattgaggatttcttgattactaatggacttttctagcaccacctcatgatctaagacttcctatcccttcctagattctctatgttcatagattatcaccttttccaatagtgaaatcagcttgtcccaacccaatcaagatgtctggattatttatttctagacttttagccatggaaggtgttttgttgcaaggtaaagtatgtgctctccatcatgcacaacttgcatttctaattttgcctcatttgacttcctaaatcgatgattagattcatgcaaaccgatttgggaggcataacatgaagccttaggcattgggaccatgttggatgagtttatagagtcgaacaacattgtaatatgaggcaattaagcatgcactacttctgtcccaggtttgaggggtacataccaaattctctgtgtagtgtatgtagcaacaaaaagcatagttctaacttcttttaaattggctctactagtttcaagcacctaggaggccaattcaagtag

SEQ ID NO: 48695 - DNA, 327 bp, Zea Mays
aaagttctaaattatctgaagcccttaaaatgcttcgggacacctgctctggctttgtggctcgatgctcccttcatttgcgcgagatttttagttcagtcggggcaatgtcaggagaagagaaatattctaccgatgatattccgaaggcgcttgagtttgtagaaaaagaaatcaatgaatttaacgaagtgatggaggggcacagagatttttgtgcgctagtgtccgcccgaggaacaactaatataattgcaaaagctgggtgtaagcatttgagagatgtcaacaagcccaccttcactatctccccagctgaccttgaga

SEQ ID NO: 48696 - DNA, 524 bp, Zea Mays
gccgccattgcttttgtcgtcagccagcttcgcaccgaggtggatctttgaggtccaacggtgcttcctcagggtgcttcgtccgtggcctttgagaacctgatccagggatacgatgaagccaccggcgggatcatccactacaacatatgtagccttttgtgacgaatttcccacgacaatgaagatttttgtcattggctattttgttttatgacatattttttgtggcaagataacattataatgaatttaggcaagtgtcactaatagcattgaaaaaatgtcataacactagccaatcgcagtattgtgatgaatttcttgttgtcatgaggtactactagccacagccagccatttttccagatttttccacatgacattcgtaacactaaaccaaactttctcttcaacagttgccatgattgtcctactcgtcaccaccgcccctgccatccacgtcggcgccactggaccagatgttctcctcgtcgctaccctagccgtccgcctcatcgcca

SEQ ID NO: 48697 - DNA, 848 bp, Zea Mays
ttctgacttgggaacacctgagtttgcacaggaggtctgatcccggggtccgggtgaccaaagggatagctaggggtgtagagggtatgccatgcttctccacaaacttagcggctataaatgaatgagatgctcctgaatcaaaaagcacagaagcgggagtaaattcaacaaggaactcaccgagcactactcccggggcttgctgggcttcttgagcgtcgacgtggttgacccgggccctgtcctggtactgagtcctgctctgctggctattggaaggaagcgccttggaggtaggtgccgacggaatcttggggccattcaccgagttggagtaggttggtcccggtgtcttcaactgagggcagttgttcttgaagtgactggggtccccgcagtgccaacaggcgtttgctggcggctggttgcttgcaacggagggtgcctgatgggagctctgactctgctgactgtagcgtgatggagagggtcccgattgcttattgaagcttggacccctgggtggaagcccaaagggtcgagctctctggtgacgttcttgctgttgcgctcggaggacctggaatttcctcttgatgtgccctttttcttcctcttttgctctttccacttgaatagctttgttggagaggtgagagaagctgtggaagtcttggctggcaagaatggtcttaagctcgggtcttaatcctctcaggaaacgggccatctttctggactcggtgctgacatcctcaggcgcgtagcgggccagctctgtgaacttgtgcacatactcactgactgttctcccgccttgagttagctcccggaactcatcctcc

SEQ ID NO: 48698 - DNA, 555 bp, Zea Mays
cttttccgtagttcatcatcaccactttatcacaaaatggaaatgtatccttgggcttgcacattttgactactattgaggtgacattgaaaggaaacagacaattatacatacattgttagatatgctctaagtaacacatggcaagtataggaacaaggagatattattcatgacacgcttgcacagttatgttccatatccagctacgcaacaaatttcttgatgttaatgttatcaaagtagaattagacggaaacaacaaagatggtacaatagtctctggacacaaggtacttctgaaacctaaaaagtgaaaaatcataacgtttcctcccatataaatatgtaagtttctgttttcagtatcctatagtcctgataggatctggtactactgcagacaacaatcaagcagttaccggctgaatgctagcatatgaacaaaactaaatattcgctttcaatgtaagcacatcttgaaatgatggatatgggaccagaagactggatcacgctattcagtgcccatagagatgcacaccttcatattgc

SEQ ID NO: 48699 - DNA, 579 bp, Zea Mays
ccttgtcgtgatagcgccttagagtctgctggtaccgtgccgattgaattactgcattcagccgttcttcttcaagtatatcaacgtcctccagcctggtggcctcggcttctgctatgctttcaaagatcaaccttggcgccccgaacttgagatcggcgggtagcactgcctccgacccatagaccatgaagaaaggagtgtttccatgcagagctcggctaggttgggttcttaggctccaaacgacataaggcaattcccttatccactttcctgcgaatttttcattcttatcgaagacctttttcctgagtgcctccagtatcattccgttggctcgctcaacctgccctttggctcttgaatgtgctacagatgcatacttgatctgaatgcttttttgctcgcagaagtggaagaattctgaacttgtgaagttggatcctaggtcagttatgatgttgtttggtatcccgaatctgaatattatatcttgtatgaattccacggctttagctgaggtcaaagaagcgatgggcttgaactctatccatttagtgaatttgtcgatcgcta

SEQ ID NO: 48700 - DNA, 815 bp, Zea Mays
gttattttgcctcgtggtcagttgatgattgtcgcgacatttattgtctgtaatgctctctgtctgttatgcttgtatcgtaacttggagttttcgaatcattcctccgtttgccttatctgtgaagtcaattcctctggaatagtagctgagtaactcgggcatcatatcgtcgcttttagaggtgatggccgagttattattgtcaacatttacgcttctgaagtagcgtccaaatgatgacgaagccacatcaacgttttagaattaacgttggaatgactgatgaccacgtcggcgcttttagaggtaacagtcgagtgacttatgacgacgtcggcgttttagagataactgccgagtgactgaagacgacatcagtgttttagagataactgctgagtgactgaagacgacatcgcgttttagagataactgccgagtgactgatggtaacgtcggcgttttagaaataacaaccgagttagaacgggttgcgtcggccactttgaagataatagccgagtgatgatgtggcacaccggcgttttagaaataactgtcaggtgatgacatggcacgtcggtgttttagaagtaaccaccgggtgatgactgggcgctttttggaaacggtatccgacccgggaaaaccccatatgtactgcgctttcggccgcctctgctttccgtgccctagttcttgctttcctgcctccagaccctctgtgtccttttgcaattcggctcccgccctgctcgctggtggagttgagatggcgcccaagcgaaaggcctcgagctcgtccgctgctg

SEQ ID NO: 48701 - DNA, 570 bp, Zea Mays
taagttgtaaggtagaaacataggctaacctcatatgcctatagaaaaagaatgataactgccagttatttattttatgaataataaataaaaaaataagtaaataagcatagaagatgacgaagatttaggattcaaggttacttacattagcaaacgcattgctgagttgttgcagcaagcccaccagggagcgcctaacgttgtgtggcttcactggcaagtagaaaccatttactgaagtgataacgtgtagaagcttcccgttgcaaaccttcaactggccacataatgaaaaactcctttattacacgtatgcccatacccacacacacctaaattggctaccacaagattgcaatttaactcagaagtgcaaatcaaattgaatagctactacaccaatgcgaacgaactccaattttgctagcgcatccaaatgtgtggttgaatttcacttagcaagctgaaaaccaaacagctacataatacccccaattttatcgtctgtattcactgtgtgcattaaacacatatttcctgcaccatgttaaatccacagaatgcaaa

SEQ ID NO: 48702 - DNA, 455 bp, Zea Mays
tccgtttgtgaaaatataggagtgctgtatggtcgatggcgtgcgcgacggtggagcagcacggcgtagtggcgggaggaggccgtggccgcgccaaccattcacttgggactgtcgtgcaagctgcccatccctgcgctcttgctgaagtcctgtgttgcagctgctcagctgtatgcttgtgacgagcatgtggtgctgggggccggcggggcacataatttcaagcaagcagatgaggatctacaaccaggagggtgtatccatccatgaattctagtccaacacccgagcatttaaccaaactagcacctttgatttcatcctgtgtctggcacgattcgtgctctggatcgtgttcgtcttccctaacaacagctgggtccggtgagctgaggtttgggtttgggggttttcaccagaggttgcacaggattagagtggtggtagaagac

SEQ ID NO: 48703 - DNA, 385 bp, Zea Mays
caagtctggttcaaggacaacatctgtcacttcaatggttcgatcgggaacccgaagacacttcttcaattgtgacacgtgaaatacattatgcacggcagacaatgtttcggggagctgcagtcgatacgccactggtccacattgctcaagtatagggaatggaccaatataccgaggtgcaagctttcccttaatcccgaaacgtgatacacccttcattggtgaaactttcaagtagacataatctcctacgagaaagcataagggttgtcgtcgttggtctgcacaactcttttgacgagtttgggctttcttcatattaaaaattattttctgaaccttttcttcagtctctttcaccatatcaggcctgaagaagtat

SEQ ID NO: 48704 - DNA, 282 bp, Zea Mays
aaaaattgttgctcggtgcttgacatcatgttgacagtgccctgagaagaggaagaagtcactggctcccatctgagcttcccattgggattcctcctacacaccacatccttgtggtcttggctgcagatagagcacctaccactccactgacactcggcacggcgatgcacttcaccacaacggaaacacactagccccagcccgggcttatgaaccgcccgatacctctgagtactccctcctgaagtacctgattcagagggtttgccatagtagggg

SEQ ID NO: 48705 - DNA, 430 bp, Zea Mays
gctggatcccatccttctgatgataaacaacaacaatgctttagcgccgacgaactaattcccttcaattttggtttccttcacttttctcgtcgaatttctcggtgcgatcggtgcatagccggaaatgtacttggatatgtttttagcgggtgaacgctttctaaacatgcaccgaacttcggttcatgatctcgatcgacgaccagctttgtctccccggtctcggtccggtagcttttctctactatattaaagcaacagttttgacggtcatcctgtgtcatgtttttacaaagaaccccttgcatttcatagaaatctacccaccgtctctcctcccgtaacaactcccatctccgtcgcatctgagtgcccgacttcctcgtatggataggcgcctccacctcgcatcctcctaccatccctt

SEQ ID NO: 48706 - DNA, 443 bp, Zea Mays
ttctatacttcagggtagtggatattgatacagctcaccatgctatcatcagaatacttaggctcatgaagttcatggaaatatcccattatacttatctagtactcaaaatgctaatacataatggagtaatcaccatcaaaggcaacttgaagcagtctaacacttgtgacaaagaaggttgcagcctcatcgattcataggtgatgttgccaaagtgtgataacttgaaagaaacccttaagcaaataaaacctgaagaaggaaaagttatagatcttgagctgccatagaagaaagcatcatcagtaactccatagaccgagtcggcgagtccaaactcacaaagcaagtctagttagactcccataacttggctaaggtcacatacatcggggctaacttggaccctaaatagaaactcgcggtcaccaactttcttc

SEQ ID NO: 48707 - DNA, 938 bp, Zea Mays
cgaggctatttgacagtgggaactagtaagaggggggcctctagcctcttcaagctttcttttctgcatcttttacatccttcttacgaacaaaatctcactaattaatctctttatgtttcccttgtccatgcaactgacacaggacctcgggagaactgaagggatgaaaaggtggtcgagccaccaaccagaacacccttcctaaggaagccaaacaaacaccgggagcgtccgacctcataaggcctcatactcatatttcctttagggggccaaaaactcatggcaaaatggatgtggattctggggttcgaaaggctgatccacaagggctcatggccacctcaataaaaattagagcgaggggcagtaggtgccgggcacagtggcgactaggaccctaatgcacaaagcgctaagggtgtcaccagcttgtgtttgagtcctagaaaggtctgactcatggtttattgtgaagacagacagcgagccatcgggtccggtcgcacggagtcagcaactatatgagtcagtgcatgggagtatgaggatggtccccagtggacccgcgctgggatcatgtgaaaggaaccaggcctcactcagatcacccatttgcaactcaccgagctccattgctagcccatcgaggaaagcgtggtttggctcacctcccctcatcaccatgaaagggatgtgcgggggagggtaaaacaaaaagacgggacgaccccctagacaaatctttgcgtcgagtagagactcaggggctcgtcttagaagggtatggtgaatgggagaaagttgcacaaaaagtgcaccttagaccaagagcaatactaagatcgtccgggatatgaggtacccaaggacgatacacattacgaaaataatcaagccacaaaacgaagctacggaagatcatgaattatttc

SEQ ID NO: 48708 - DNA, 515 bp, Zea Mays
ctttattgaagggtttccaaaggttggtggcaagtcaatagttctaacaatggttgatcggttctctaagtatgggcattttattgctttggggcatccatattcagctgcatcagttgcaaaggccttctttgatgaaattgtcaaacttcatggtttgccatgctcgatagtcagtgaccgggacacggttttcacttgccatttctgaactgaactgtttaccatggctggagttaagttacagatgagcttgacattccacccacaatctgatggtcagtcagaagttgttaacaaaataatcaccatgtatcttcattgtctagctgggaccgtcctaaatcatggctgaaatagttaccatgggcagaatttttctataattcatcatatcaatcgacactgaaatgttctccattcaaggttgtctatggacaggaccctcctccgatggtctcctatcaagcaggggactcaaaggtggctgcgattgacgcccagttgcaggacag

SEQ ID NO: 48709 - DNA, 565 bp, Zea Mays
gcctcggctataggcaccttcggcactacagtcgattcttcagcacttcgagtggcgggagccgctggttctgctttggcaacggaagatgtctcctcacataattttggcattgtggccgtttcaatgtatctaggcctgtgggtcaaaactttgatcttcttgcccttcggtgcgacaggaatggccaaagtggcagctttcctcttttttccttgcctccgtgaaggatagcaataattaggatatatgaaaccaatcgcatcaaaaactctgttcaatcttttcttgatccgacccccgaaggctgaagacaaagcatcgtcttcagctttggtatatgccccaagcaactcatcgctagcagcctcaatacttttcagccagtcgtcatttggttcgtcaaaccggtctctaaatctgaaggtgtattccaggcgaactaatccaccttcgctggacccgataacagtctcctttggtgtttcccagctatccacaagtggccataccctgtaagctatgtgttcttggatcaggtcccgtgtaccaatgaaagcacaga

SEQ ID NO: 48710 - DNA, 739 bp, Zea Mays
cttgcagcatgaatcctttcatgagtggtttatgttgcatgtaagtataaggataattcttaccaaatttcttttgagattattttgcacacacattaatagtggcatttcaatcccacaggtggaggaaatgtgtggggaagcacaagatgagattaaaattttagctaaatcaccaatgacggttgcaaataagtatagtagctataacatgaatgggttcaactttcacacagcatcatatgatgagggtagacctattcaaaatagtggggttgttgtggttgcggagtcaacaatctttaacaagggcagcaacgataacattattataggaaagaaaacctattttggtattatcaaggaaattattgaactaaactatcatcataaaggaaatgtggtgctcttcaaatgtgattgggttgacaaccgtgtgcaagacaaatgggtcaaaactgatcagttaggcatcacaactgtgaactttaagcatttattcaatacaggtgacaaattatctgacgagcctttcattttagcatcacaagcagttcaagtgtactatgttccagatccaattgatactgagtgggctgctgttgttcactctaaaccaagagatgtgtttgaattggataatttggataatgagcataccgattttgataatggtgtatttgttccattagttgatctgaatgcaaatgtaactgttgatattgttaatggtattgtc

SEQ ID NO: 48711 - DNA, 464 bp, Zea Mays
ctggctcctcccgtcttcagccgaaccacccccaagatactaagatactctagggttcgtcggggcgaatcggactctgctaccctggtatggattcgtcgagatctttgggcttctaaggagtttggtatagaggattgcttcccggttggtgccaatgatcgctggtctgatccacctcataaactcaagtggtgaagagcgtgaaactttctctcaagtggtgaaggagatggcgtctcgtggtagaggaaatagggggttcaggcctcgtccttcatatggagattggagtagctggggttcgtggaatcactaccaattccaaacgccacaaaatttgtttcatcatcctcccccacctcctcctccatatggattttaccctcaacctcttccaaatatttttcacccaagaccacatcaacagcagtatccaagagacttcagatctgatctgcgac

SEQ ID NO: 48712 - DNA, 784 bp, Zea Mays
atcaacacctcattacaattagacatgatatgtccattataacataactaccgagcggttcagataactaactacgacactaacacattagcgattgtatctctaaatgtactcatgtctaactcatctgatgtgctagtactactctcacggattttcaaagaacggatcctaaaaccagatctagttaaaaattcattgtcatactaatggcatctgaaattagatcctgcaatacaaatgtatgtttaccggacattaatacaaaactcaaacattgagtacgatgtctgctctacttcggcgtgcggggaagtgcgggtctgcttggcttcttggcgaagcagtaccgaggtgactattttttgctaccgttgcgaacgggcttccttccgatgcgcttacgacgcccacgacacgagaagcgcctaagtgtgttatatgtgggaccaagtactagtgagataaattactatttttattcttctattatctgtacgtcatgtagctatttgagaaaaccatcgtgaacgcccttaaaaccgagaggagggtagctatctgactttttcggttttctctcataaagcagagcagagcagagaacagaagcaacgaattggttggagggggtggtcaagattcggtcaaaagtgaagcgaagcaaagcaaaggcacggaggacagtggcgactgactggccatggccagtgaaatgatgagtgactgagagatggctgctcatgcagggctagggcgaaaacgaccgggtgagccactgtgg

SEQ ID NO: 48713 - DNA, 557 bp, Zea Mays
aaataattgcatagtgtttttgcatcattggattctaagtactttgtgcgctcacgcccaatctcattattgcaatccatctttgtaaatggcactttgtcggctcctccataaaactccttcatgaattcatacacctgggcaggcctcattccagcctcccgtatgtgcccaattagctttctatctgcttctataacacgtcgttgggaccttaggtttttcttcttatttggactagcaagataatgattgtgctccaatacaaccttttgcaccgaccaaatcccttctttactaacactgaactgaatacgagcaccgcatcctgtccttgtaacgcccttcgagggctcgacttttgcatatccttcacaactgcaaacgagatgtttctgatatacactaccatccgaccggtgccttgtcgtactctttctaatgctgaatccaagcacaccagcatagtcgttgtacatgtcataagcttttttctctgaatcaaaagacattccaacttctggagcaatcaaaatatgactgattttatcattcac

SEQ ID NO: 48714 - DNA, 361 bp, Zea Mays
tcagaggaaaggcaactgaagtcggcaaggctagcacgaaagcactcgataagcccaagcacagatcacagacagtccagcacgaagtctgctcgcgaggccgacacacgcacacactagcagctcctttcatcgccttccagcacggaaggtctttcacagtcccagcagcgcaagcatccacatatgaaattcaaaactcgtatcaacgcataggacacacatgtgacctcagtctcttcaaattttaattctcttgctatcagctctcgcttgatttgcgagcttcgtgatatacacaagtgcttgttgaatgtttgaagagaagatgtctgaggagaagaaggttgtggaccccgct

SEQ ID NO: 48715 - DNA, 395 bp, Zea Mays
tttctaacgaagcgtactgctctaggacgtacaaaaaagcgcttgagagaacggatgccgatgacgcgcgtgactgaacagtgtatagggagcgagagacttgccgtcagatataacgcatgcatggcatcctctaaattttagaggaccttttagagtctcttgttggagggataaaggatctgacaaacctctatatttagaggacaggagcttttacaggacactgctggagccagccttatgctcacatccgtgctctcactccaaccttacagtcgctggcgtgtggggacgactcgtccttgctcgggttgttgcgatttgcgagatgagcgcgcgtaacataatcatatgcatcccagtgggaccctctcaggctcgccgatgccctg

SEQ ID NO: 48716 - DNA, 404 bp, Zea Mays
tgatctttgtacagtttggttaccaagcaaaattatttctaaatttgtttgtgttgcaatgacagtctcatatttaactccactcaacaaaatactgttgttttggtctatagaagctttttgtcacttggtaatgctgttttggtctatagaagctttttgatatgccattatatccactttgctacgatctcctatgcttgtgatttgcctgttcggagatcctattttacaaatcaagtaattcagactattcttggtatgctattatttccacttttcattcagtgactaaacctgccgagactgaagcaaggagggacagagcaaaaaactctcttgagaactgggcatccaatcagaaagtaagttatagatagataccttagtttgatgtacatagg

SEQ ID NO: 48717 - DNA, 511 bp, Zea Mays
atttattgctatgcattagtgcaaaacaataaaatcattgacatacacaatttgatgagaagagaaaataatgatgacacactgattctacatttggattatctcaagaccggagacaccaaaacttggtgacaatgttgagccacacgcccactcttgaggatcacctctaaattatctcaagacctaaggatagaatcaaaccccgcactgacttgtgatgatcaccttcggattatctcaagacttggtcatagagtcaaaccctgtgctaacttttgaggataacctctggattatctcaagacttggtgataaagtcgatccacatgctgactgaggaaaatcacttgcagattatctcaaaacttggtgacagatttaagccccgtgccgactcctaaggatcacctccagattatctcaagactttgtgacaaagttgagatctgtgccgactcctaaggattactaacaaattatctcaaataccaaatgagtgggtcaagcc

SEQ ID NO: 48718 - DNA, 618 bp, Zea Mays
ggcgtcattgtggtgagatggagagtggtcgtcttcgtgtggacgggactggtaagcgggaattgttgtcctcgccggctggggctagtgtgggtgaaggggagctgcaaaatctttttgagggtgaggaattgaggataatgctgttcaactacagagagatgggtatcatcccgaaggttgagccaatgtaatatgtgatgccctcgctgtgtgtatgaaccataattttgtatgatgaagctgcgtgccttcgttgatcaggtcgcgcccgtaggcggcttctgtatggggtcttttggaaaagacttcgattttgcgtacctattattccggctgcacccgtaggcgacttttgcgcggagtgtcgcatgcgagggtggccagcgctgcccctcgcggtgacttcgatgtggtcgaatgtcgaagaccgttgatgcggtctttttcgacatattgttttagtttttgcgggggatttttgcgtgtatattacatggctccgcctcattaaaaacctcacccccgggaggaaaaagagtgcgggccggaatgatactgtttggtgaattacaagggcgtgttagccctgaggattcaaacaaaaaatttacggag

SEQ ID NO: 48719 - DNA, 363 bp, Zea Mays
atttgtttaccctgattaaaatgatgggctagggtgtttatcatttttgcagtgtggttctggtggttacaagtccactggatttttattaacaattttgggtctgattttataacttcaataattgttttctagttggaaaaatgctaaataaaatatttcactttgaatctgttctggactaggagtccctttatttttcctagattctctgttacttaagtagactaggaaaaataatttcatccactggtcattaatttctaaggcctttctgattttcctaagttttgggcaaaaatggcttttaatagatatccccacgaaatttttcaatactggggttcttactatttttaaaca

SEQ ID NO: 48720 - DNA, 359 bp, Zea Mays
gcaaagcaagattgtattacgcctacacaaatactaggaaaaatcctctacatgtaattggattttatgcccatccttttatgtgccaccgaatagcatttaaaagatatttttgtatatgtatgacatgtgggccagtggcatacaagtgattggtataatttctgatggcatacaggggattgtccccaaatactaacactactttactcaatgacagagagagccaatgaggtagtaactagggatggcaacaggacgcgtcggggctggggagtgctcctcgtccctactctgatcctcgaaacataatccatatctgggccttgaaatacttaacacagcggacctgattccca

SEQ ID NO: 48721 - DNA, 807 bp, Zea Mays
agacagatgacggaagtggaaacaacaagtcagatcaccatgttagtggaaacaacaagtcagatcaccatgttatgtttggagggaatttattccagtcggtatcttgctctggttctggccatgaacagcctcgccacgccatctggttccatcagccctttccttattggatgagcaggctcgttcgctttcagaggtgacagcaggtttgctcctgtgaccctttccagaatatcatgactcgcggattgagatctcgtgatggttcatggttgcgagtactgcgcgcccggccggctcccatgttgttggttcggtcctcgcgatcacaggcgtgcagaagagtgtcatctcagatttaagcaagctcctgactggaacggcttgaggcgatctgctagcctttcgtcggggatcattgtttggtggtatgtcataattgctccccggacttagcatgctttgtgtagtgtagggtctgctagatctcctttgtaggctgttccctcgatttaaaaggtggcggcaggcatgttaatggcaggatgattagccattcaatatatgattggaaaggcccaaccgcaccgcgcataactgtacatccaggacgcacagtgtcattcgctgctgcgttgtgcattccggcttcagttctggcaaagatcgcgcttaacgtcgactgctgcggaatctgctcgtcttgaacaggtaactcttgagcagcgggcaagatgggtctcctgtgttacatgcgcatcactgcatcatcaggtacgcggtttgctgtttaaatttgcgatg

SEQ ID NO: 48722 - DNA, 1133 bp, Zea Mays
gccgattgctccgttagtagggtatagtggtcaccccgagttaagtaagcgtgcaggttgacagtgaacaatttgagtgcctttgaagtctttttattgatgataaatttcccagtttacagaatacattgtcgtcccaatagcttttgagatatagctaggggtaaaacttcctgagatgttctatgttccatgagttcccaatttctgtgtcgtccatttgagtgagactatatgatccaggccgagtgactttagctactatgaatggtccttcccatagtggtgacagtttgtgccgtctctcccccgtaagaattcgccggaggacgaggtctcccactgcgaaggatcgatgtcgtatggccttgtcgtgatagcgcctcagagtttgctaataccgggcagaatgaatcaccgtgttcaatcgttcttcttctagtatatcaacatcctccagtctgctagcctcatcttctgctatgttttcaaagatcaacctcggtgccccaaacttgagatcagtgggtagcactgcctccgaaccgtagaccatgaagaaatgagtatttccatgcagagctcggctaggttgagttcttaggctccaaacaacatacggcaactctctaatccactttcctgcgaacttctcattcttgttgaaaactttctttctgagtgcttccaatatcatctcgttggctctttctacctgcccgttggctcttgggtgcgccaccgaggcatatttgatctgaatgcttttttgttcgcggaaatcaaaaaactctgagcttgtgaaattggatcccaggtcggttatgatgctatttggtattccgaacctgaatattatgtcttgtatgaattccaccgccttagctgaggttagagaagcaatgggtttgaactctatccatttagtgaatttatcaatagcaaccagtacatgagtgtatcctccttgagcttttttgaagggtccaattatatccagtccccagcatgcgaacggccaggttacagctatggtttacagttgctgcgctggtagatgctcctgttttgacaagtactggtaggcttcgcacctctggactaactcggttgcatcactctttactgttggc

SEQ ID NO: 48723 - DNA, 696 bp, Zea Mays
gttaggatcagataaagcatgtccaacatctcggggctcaaaagtagcaacaaaagctgagtgagcaaaatgagaaatgtgttgtgacctagagcgagtgactcgctcatgaagcttcccaatcatctgctgaggtgggtgacgacgctgaatatgttgtggagcctcccttgaggaagtggcctcccctcaacattagcttcaactcctctagtctcagcaggagctggctcgagcggaccccaagtggtggaaggagtggggtcgggtcagtcagccgtagtagtggaagcaggctcgactggggcggccggtggagttggctcgagagcaacctaatcggcgtcatcatgctcctcctccataaagatggtctttcccatctaatctggacctgcacgctcaaagacaggggatggacaaggtgcagtctcatcaaatgtaacctcacaagtctccataatgcagttagtctctaggttaagaacacgataagcatgagaatgtaatgcataacccagaaaaactccattagaagactgggactcaaacttgtccagattaccttgttttagcacaaagcatctgcagccaaataccctaaaatgactgaccttgggtggccgtccaaatcgtagctcataagaagttttgttcagaaaagcccgaagaacgatgcgattggacacatggaaa

SEQ ID NO: 48724 - DNA, 684 bp, Zea Mays
cgaatctcattgatagaactgtcttgctctttcatcttcatcacatcatcttcatgggctttttttacttgttccttatatttttagattcggctaaattctcttttagagatgttattttggtttcttattcttccaaggaatttcttccaaggaatttcgaagtctcgtaacttcatcctaaagcttcaacaactcatcatcctccttttcttgctaaattttttaaagccttgcttagcataagcctctgtattaaagccacgaaggtaaaataacttagttgcatataattttcttctgaagttaaacaaaaaagaaagagagggaggaccttttttaccttgatacttgtatgcaaaactatgggaaagtttttgtttttttattttgctgagtcaatctttgatctctaggaacccgatgcttccagtaatattcttcataatctttgactcatcatcattgggcacgcacattaacattttatctcccccaccaaatagcatagccctaggactgtagcccacagctttggcattatcctccaactctaaggctttctcttcacttagctcttctccgccaagatgtcttaagaaaaatccaagctcatccatctcttcactagtagattgggtgggttcgactttatctatccccagggaaaaacttggctcttcc

SEQ ID NO: 48725 - DNA, 1013 bp, Zea Mays
gctgcttgcgctacccacccgagccggatcaccaccggcaacaccctcgggggctgggtaaccgcttgcaccatcctggaggaccgagttctccgcaacagccacctctaaggctgaaggactctcggtcacctccatgggaattgaacaaccttgaccagcctcttggccccgaagactgcactccaaggtcgacgaggcacgatacgctgctcgggataactctaatcccacatctggaatgtcagagcaaacgtccatcataccaccgtccgtgggctcggatagcaaatcttcaggaataacatcctcgagagcctgatcaaaatttgctagggataattcttgcagaccaatgagagcagacaaagctggagaaggaatatgactactctccccactgactatgtaacgccgactattcttctgaattaaggggatttcctcctcttcttcttcgtcctcgtcaacaatacgaacaatacccccattggggtcagctctggcaggatcacacccattgggatcagctctggcaggatcacacccattgggatcagcatcgtcaaggtcacacccattgggttcagcatcatcaaggtcacacccattggggtcaacatcagtagggtcacacccattggggttagctccagtaaaaagttccactagtacttcttcagcagcaggagcagaagggccagcaccctggtccaaacacgacactcaccgaagccgtctctttttcttcttcccctcggtaggagcagttggatgactggcctggcgaaggcgtttcgggcgagtactatcagatttctgagcattcaaggcttttccaggctctgggataggcgcaatagctattgtttcagcagggaccgagtcagaagaatcttcagccaacatgtccagcatagcacttatctctgcatcgctcgggtttataggcatctcaaagtgaacttgcctctcatcattgggaagatcaccaagtgaagcaaccaaagcct

SEQ ID NO: 48726 - DNA, 888 bp, Zea Mays
catgattattgaagaacttgtgcaaaaacttcaaaagcaaagccttgttgtgcgtctccaatctgaccactccaaggcccccatttttttagtctgagtaaacatgctccaagcagccagagctggtttcttcgagttgacgtcatttcctctccatagacaatgtttccgataagaatcaatcttcttgaccgtggcaaccggaattttcagggtgcacatcagaaaggtcgggagagctgagaacaccgagttaacaagctctaacctaccggcctgggagaggagagcagaagtacaggacaatctcttctcaatcctatgaatgagcggtaaaaagtggtagattttaggctttgacagaccaagcggaacaccaaggtaggtgaagggaattgaacccgtctgacagttgaatgttctggctagaatctccattttagctgagcaaacattgatggggtacatacttgatttattatagttcaccttgagccccatcgatgttgcaaaagagttaagaacgactctgagaaaaaaataattgtctagggcaagcttccattatcaataatgtgtcatcagcatattgaacgatcggaaaatcttgaccacagttcgcggcgaggggcaacttgagcaggttttgttgacgcgctttattgatgatgctctgaagcagatccgccgcaaggacaaaaaggagaggcgagagggggtctccctgtctaaccccgcgcttgcaatggaaagttttccctgggacgccattaaggaggaccgaggacgtaccagactgaagaatatccctaatccagctcatccacctgggcccaaaacctctatgcgacagcacctgaagaatcagctcatgctcaagtgtatcaa

SEQ ID NO: 48727 - DNA, 418 bp, Zea Mays
gtttactattgtgctaagtcactgacagattgcagataagccctccatgttctatttcttcgcagtgggaggtccacgacaacggccgcacggaggatgaactccggtgaggttgtgccggcgaatttaagcaacggctggtgctcccgagcggcgtacaccggattaaaccctccctgaacgattcccctaacttaatttcacgattggtaagctatcacgccctgtccacgtgaaccgcgaacgatgaggacaatggtacgtgttcccggtgatccctgacggtccggttcaattaaagggttcaaggggtttgcggggtacctacggaggctagaacaagcggcagagggacttgagctcacctgaatcgagctggccacggtgaggtcttcttcgcggtggcggagaaccaaat

SEQ ID NO: 48728 - DNA, 1258 bp, Zea Mays
cgaaccaaagattaggatttgctgtcaaattttaaaattataacaaattagcagagaatcataataattgaatattgatgcaaacaataactatataatagtaccactaatggaggaaaaaatagtaagattggagcacactgttatgaaaagccaaaaaggaatgtgtaatgagatgtaccttggtcaattagttttttcctgtggacatatgtagaagctaacaaagcccgtgtttccaaaccaaagattaatatttactatcaaataaaaaataacaaaacagtaaacagtcaatgcacggacgtttatgtgctaaactaataaggtactatagatactaaatgaacgttgtgtttagaggtaatgtagcaaacttgtgaaaatgttttcagtaaatgtaccaaacaatagatagttatataaagaagaagcacgtatataaatagttttgcaaagaacaaatacataatagtaccaccactggagagaaatagttaaattggaggacactgttaggaaaaggaatgcgtaatgaaatataccttgattaggcaacctttttttccctgagaaaatatgtagaagtttatgaagcccgtatttccaaaacaaagattagaatttactggcaaattaaaatgaatgaaaaagtaagcaacgaatgattctatgttgaggtaccatgaacatcttgtttacaggaaatgtagctaccacatgtattgtttagagtaactgtagcaagcatagatctatacacaatacgacacgaaaaaatcagtatcactacacaccaaaagatgctctcggatgaaatataactaaagttcaagagcctgaggatggtatagctaacttttttgtgacccaccgccattaacaatatggaagcagataaagctcctacgcgacagatacttgcgatgaaaatttatcaagtgcgagcagttctacagacctccgatagagaaaaggcatccggcgaggacactcggatgtacggagctccaatggggaaaagacatttagaaaaggcatatgtacttgtgaaccctaacggcgaggacacttgaatgtacgtagctctgataggggaaaatacatttgtacctgtctgaaccatcgaggagataacgaagcattcggagaagcagtggaggtttcagcaagcgttggcccggatggtctccgtcgacggcggcgacgattatgcggcgaagcagagacaacgctgcggcggatggcaacgacgtag

SEQ ID NO: 48729 - DNA, 379 bp, Zea Mays
cggagggagtaatttctattggctagatcacgtgatcaattgaaattaaccaatttaacaattaccaccatggagggagtaagagtggagcttattcgatagtgaattgttaagacgtagaaatttatcattcatgcatcatctttgccaaccattggtattgtaaggtgtccatgcaacatgtgtcgaaattatctatatcatgacaagataaaggtgccaatggatatttgtcagtttggtttcatgccaagttattagatgtggctgcaccatagcgagtcatgacatcaacattatcagcacctagtaaaggatatacctctactgtcaagacacgcttaagggtcccgatgtaggagattgactttcaggctca

SEQ ID NO: 48730 - DNA, 925 bp, Zea Mays
gccggtattttttttacaaagctaaagtttaggaaagtttaatccgtataatctcttcagtaacgtttttttagacggaggtaataattcggtgggcgaacttttgaagagatcggccccggcggtaaagtaatttggaagggctaattgactaaataagggcatctctgatgaggtggtagaatgccctcaatgcgcctgtaaacaagaactgtcacagcttgctcaggcagatcaattgcgatgttgagtgggcctcactacagaatcagaaatgacatgcatgtgggctccattctgtatcaggcgtagacgaaccaccggccccgcatgggtcgttagcccatgactctataaataagagcccaaaatcacgtcgtccccaaagttcgtgtacctcaaaggaaacatgtgtaatttttatttaatttgagcatccgtcattaccaatggaaaatccacgttcattcttacaagtcgtgttagaaacaaagtgatatccttgactggtaaatgttaggaagttctagctttccaatgatatccatacgaattgagatttggctaaagcagtatgcatacatgtatattggtatagtcacttttatcaaggaaaaatacttctacacatacagttcatcttgagcggctaagaaagtgaataccaaaccaggatatacatgccccttgttttttggaaacctcatcagaatataaacatggattacaatgcttaaatattaaacttctctccaggctaccactgtttgcccctcctctaccttatgccaagctccatttccgatcttgagtggcaggctttactactatttatgttatcatagtaatctctactagtccctccgtttcaaagctctatatttttatgtctatatttatatagatgataataaatctagacata

SEQ ID NO: 48731 - DNA, 290 bp, Zea Mays
ctttaactcaatccgacctgacgtttaaataggttgtacttcgtcggaagaagagggttcaccgcgaaggatgatgaagacaccatgccttcaatcttcaatggctctatataccctataaaatatcgaaggcgacggatcggaatctatgcaccgatgtccaaacttgggtctactaccctgtgtcttgacaattcaaaatgaatacgaaagatgtgtagtacactgtatttcctcactgataatttttatttctgcagaaggagcaagaggttgtgctgggagaagac

SEQ ID NO: 48732 - DNA, 654 bp, Zea Mays
gatttatggaaggtacctcaagttatagttttccagggcacaaattggtaggaaccgtagcggcagctagcggcggctatagagcacaggggcacaaaccttcctggtataagcaataggtaagcgccagacgatgaaacaaggaggggctgcaatgcaatgcggcttgcaacctaatctagggctagcgtggcgagagttcacacaaggcggctagcgagggcaaatcgagtaatgtggtgtctcaacttgtaatctaggaaaggtggatgggatagcggcggaaacaaataacagcgaaggagcggttgaactacgattacgacacgacctaaaccagcaacaagactcgaacacggacacaaattcaacaaagcaatctgaaacgaaattgcaaggctaaacagggttataggacagcggaaattttttttgtatggaaattatctggagttatagaatgaaaaaacctaaactaaactagggtaagcctgatggtaatacctgagtctttgaataccacttgataggaacggggtgcccgatcttccgtcaggtgaagataactattgatttggtggagatgtcacacagacgatccgacttccaatcaacacgactagaaccccgcaatcgcagcaccacttctcctct

SEQ ID NO: 48733 - DNA, 589 bp, Zea Mays
cgaaattctccgtgccgccagcccaatatttctagcattcgaaacattttgggacaccctatacgctgcattttgggcccgtcagcttctaagctgaatactgatgctagagatttcttgaaaacaataacgttgtgttaactacctacagattgaattgcggaagggagaagggagttgtgagatcggagggagctggggacgaacggaagaggacaagtttactcggagtatctcgttaagtacaagcaatgtgagcacggggcttagaaaagggttgggactgtaaacaatctggtacgctaaatataacattttcaatcctccgaaaaccgtccaacaacatctgctacttcttcgctaaaatatagcgcttgtctttcatccgctacatttaccgatttactgtgcgtcctctatccatcgaatcctccagcccactgtcgaagggaggacgagcgcctcgacgccggtcgtcggagttttggattggcactcgtcggggacgttgaacacacacacgaatcgtcggagacgagaagtagcacacacggcaaatcgtaggagatgcgaagcagctcgcgcgacg

SEQ ID NO: 48734 - DNA, 360 bp, Zea Mays
aagtgaatactgatctgaagaaaaagaattgttttatgaggggacttaatgacaggcttcaacggaaaatggcaacatgtctggatcttacctacagtagggttgtcagtacagcactggcagtagaagccaaaaatgccgggcatggaaaatcaaaggggtttggaggtgaaaggtcaaatcaagggcgtgagaagagaaccaggttggtgatccgaccttttaatcaaaattgttcttcgccttgcccactttcctatcccttcaagcagcctgttttcattcgtcccactactgcccccgctcctaccaatcagccgagtgccccaggtactcgtttccctgccctccctagttctt

SEQ ID NO: 48735 - DNA, 477 bp, Zea Mays
gcaagtttagagcttcgtcgggggaggaaattggaatatctcaatatctccctcaaggacagcattaagggatggcgtcttgagtggttcatcgtggaaaatcacggcaaatccctccccctcggttagggaggcaaccagacgttcgtacacccatctaggtagagtctcccactttttcagaaataaccgaggccaaagtgctacttgctgaaatctgcttgttgaaggataggggtatgactgttgaggccgtggtcgctgactttgtcttcaagaacattcaacccttgaaggacagagtttatcccgcttatttgtataccggcatcaatgattccacccgggccacaaacagacagattcccgatgaggacttgctgagccgattggatatgattctgaggggcagggtctcgaatgctggtgctcccttagcttactctgcgtggaacctgcctcaaataggctattctc

SEQ ID NO: 48736 - DNA, 727 bp, Zea Mays
caagagttcagctcttctcggtcctagtctgaggctctgaggcctgagctggagcctgttcagaaatgggattgcctccaatgaatttgaagaagtggcctggatcgaagtaccagctaacgtactacgggagagcaaagtcctgcaattgcagtgccgatttgctgctcatctgaaacattgtactacgggagcccatcagtaccggcggcggaagaacgaacacaacgacaagcatgcaagctaggaacgaactagtcttatgccgtgggcggggcccgccggcagagaaaaattaaggctaaacattccgctacagaatgttacagcagtaagtgtacatcgcaagggacaaaggtggcgcgagactaaacaaattaaggcaaccaccagcaattccatcaattaacaactctatagcatgctttcgtacgcagagagtgacggttagtgatccgctgtaggctcacatggggattggctgcatttgtggaatgatcaggaccaacggcggcatgcatggcgtgcagagacacgcatcacggccgccggccggctggctggctggctagtggctagagattcagaagacgctggcaagatctagtcgtgtctggcagataactaagcatcgatcccacaaccactgcccatcattggccgaccagctcgtttcgatccagtcattgtctcgattaattgttttcgtgcgagcaggttggcagga

SEQ ID NO: 48737 - DNA, 612 bp, Zea Mays
catgaacatacctgtagagagctagccacggtgagatcactcacgacggagttttgactgatttgggggaaatcccaaattggagtgtctagtggacgatctgaggcacgggctggtgtgttgggtgcgtgactacctagcggagctgatggccgctcaatttataggacccaagggcggtggctcttgaatttggaatggcgcactagtggccggagaggaagaaggtcactggtggctcagtcgtgtcgttcaccgatgtagcggttcagagattgtaatcctaggtgtgccacggttactaccgcgcagtaatgagtcacggcatggcataactaaggtcgccggagtttccacgacaacaccggcggtccggccacgtcgcatggctacaggcgcggttgataaacttcaccccgcgacccaatccgctcctcatctgatcttttcaccctcccggtactatcctgcccgaatccagcaggaatcgtcgcgatcaccgtgaatccttgcgcaaaggtcaccagcggtgagggggactgaatcctgagatctttttcagctactgtacaatggaatcctcattcagagcgcctgacagaccaatttgca

SEQ ID NO: 48738 - DNA, 313 bp, Zea Mays
tgcgcaccacgtgccttagcgctggctctcgtcacgatgaatcatgcggtgcatgtccggtgatcaccggagttactgccacaccataggacacgtaaccgcgcgccaaggttcctctccagctccggccgccagcacggcccgaccgaattgatcaccaccgcccgtcctccctataaattgagcctgtgcctagctccgcaaggtcatcagctacccagccaccaagaattgctagcaatcgatcaccagtgtgcccggattccttgtttcccccaaatcctttctccgccaccgtgaagatccgttcgcc

SEQ ID NO: 48739 - DNA, 640 bp, Zea Mays
gtgagaatagactagttgaaatgtatttatacaacgcaattggccaactatctgttaaaataactctatgctaaactcacaggcgttggattacccaatgcctggccgttggatcatctgcctcggtccgacgatactcaatggtcatagtgatctagttgtctcagatatagccatcaagagtgtattataagggtgtatggtctgactaaccatcgtcggaccagtttgaggttctcgaaacctctcaaacctctcagttcaatatttggtcaacatagtctactcctatatgtattcttcctcaggtgtcagccatcacaattggttcttcggcttctctagtccctcggttcaagcctcatcgttcgtccttcatcgctcccgatccatatgcataaatctgcttgacttcaccttcgccatcaccatcgatcatcgtctctatgctccataccggcgtatggtacgccaagacatgttgcacaataccacactttcgccatggttactctccaatctcaaccgacgccgatcaactctttgacaatagctcatcatactttaaatattatggacaaataaactacgtttgcaaaaagaatgcagcccaagcaataatcagggtaatgttacagaa

SEQ ID NO: 48740 - DNA, 714 bp, Zea Mays
ccaatgcaagcctataaagcgcctcactctctctactctttttgagtttccaccactcccaaatgagcaccaccctatttccttctccactcatggcaatcctctacatcattgaactcatgcattgcacttgtgcccttgtcatttggtcccttcttgtctcctcttgttttattctcacattgctacgtaaaaatttgaaggatgatcaggtaaaaggtatgggaggggctggatgacaagggtacaagcatgcatggtgcttgagctcaatgtcatcaagtgttgggcgatggtccatgagatgagaagttgcatcctatttattgggcggtgggttagcatagaaagagtaaagaggtgcatgctacaaatggacctataagaaaatatgtgtacataggctagcctagtatgacacaatgtctaaacaccctagaagaccatgcaggagatcacattattagatactctaaaaactgtaatattagattttatagttgacggggttattatcgttgcagaaaccttctagggaccgcctttgcagacaaggagtcgagaggtgcgctgctgctgcggttgtccctccagaacgtgactctgtgtacatggccgctctgcagacgcacaacaatcagttaaacattaaagccagatcatgtggatcatcctgtgctggttgtactgatcggctccttgagctgattttta

SEQ ID NO: 48741 - DNA, 309 bp, Zea Mays
gttgtattggtcatcaaacaccaaaagcaaactattaatgggtcaggatctattttccttacactctctcccttttggtgacaacacaaccaaagcaagaaaataacatataccaaaattacaatacaattttcttgttagaatgttgtgcaaaggcaagatcatttgttactaatatataatttggatgcattaaagctagatgatacttaccttgcccttaacaatgtcccctttgtgtggccttgtggacttaagtctacgcctaactccataattcacttcctctctttcttggatcctttgtcc

SEQ ID NO: 48742 - DNA, 550 bp, Zea Mays
taaagttggtctgtcaggtcaactgagtagactgcgccatggtacagtaacctgaacatgatcccaggttcacccccctcgccgccgatgaatccacgccgtgatcgtcgctgccgttacgattcgcgctcactagtgaccagatagcgcttcggggcaaaagatcttcgcctggggataactccggtagctggccgtcgtacccccatgccttgcggccagcgcagatcagttcaccggcgttggctgctagtcgatcgcctgccacgtgctacagcgttagaccacgtcgctgtgaattgcgtctcgcatgcacgctgatcgccggtgtactgccacggtgaaagccactaacccgagcaccagtaacctcctattcctccgaccgccgcgcgtcttcgtccaaatcctcggccaccgcttagcgatcctataaattgatggtccggtctgttgcgtcatgttatcatgaagccaacgcacccacgcttgcctccaattgtccaccagagaccgcgaattgctcacttcccccaaactgagtttccgc

SEQ ID NO: 48743 - DNA, 568 bp, Zea Mays
cgctacaaagacccccccttaagctataaaagggcgtggaaactttctttctacacataagcccaccagatgtaacatgctctacttcaatactacaatcaacactatacaggactagggctttggcctgagctagtataacctagtgtctcaattctttgctcggatctccatggtccaccattcgaagtgagttcacgcttgcatccccactgaacaaaaatctattgtcccccagtttccaaaaccatgacagttggcacacctggtaggggaccgcaagcatgcaaaaaacgactttttcactttgatggccagctacttagcagaaaaaaggatctaccaggagcattacaagggagcatccaccgaaagcgagaccttcactcccaggagcatccgctaggagccagacctttactccagggagccagatcacctttgtctctgtcaacttccttgcccaggataccagcaaactccgcctcatcagccacaaccggtccaatgccacaggcctatggcccaggcgttccacccaaaccaaggcggagaaatggtgcctcaa

SEQ ID NO: 48744 - DNA, 358 bp, Zea Mays
gcaagagccttcttcttccttgcaggaatctagatctcgcccttgggagggaccctgttagggaggagatcttaaggtgctctgaggtcggcagataggttaggataaccacgtgtggataagtaccgtcaccctgagttaatctgattgcggaccgtcacgaaccgtccgagttacatggtcaaactgtccgcccgtgtccaagtgctaaatatgatgcttaacaatattcagttagattctctctttctttctctctattgtggcaccactacagtctatttccatatcgaccatcctcaggtagaaaggtcctccaaatccagaaaaaggacggatattgttttttagtaaatgc

SEQ ID NO: 48745 - DNA, 1075 bp, Zea Mays
ggagtgtaaagcgtaaccaagaaaaacaccattaaaagactgtgactcaaacttgtccaaattaccctacttcaacacaaaccatctacaaacaaacaccctaaaatggataaccttgggttcctgtccaaatcgcaactcataagaggttttgtttagaaaatcacggagaaagatgtgattggacacttggcaagcaatgttgatcgcttcggcccaaaaatgcctaggagtcctatgctcatcaagcatcatcctggcatctcaaaaagggtctgattcttgcgttcaataatgtcattctactgaggcacatgtagagaggtaaactaatgctcgagtcccaaaggaacacaaaaggtctcaaaatgactattcttgaattttgtgccattgccattgcgaatcgctctcatggcattcttaggaaactcattttgtaatcgaagaatcaaatctcaagcatgagtaaaagcctcatcctttgccttcataaagaacacccaagaatagtgagagaagtcgtcaatgatcataagcacataccacatcccccgaaagatcaaacctgagtttgaccaacattgtccatatgaagcaactcactagattgcttggtcatcactatggtgaccggaaaatgtgaagcagcaaccatcaagctatgacaataagggtgacagacaagatctttctcaaatttcaatttggacaatccttggatgaggtcaagtaagctcaaatgacacaaaagatcgaagctcaaatggcctagcctcctatgccacttccaaatcagagaggaagatcctaccaagagacatcaagagggaccgatcaaatgagaaaaattagctcgaaaactcatccaaatggagaaatctgacaaacgtgatctccctttgcatcccaaacacaagaaagacccctcttaaagcgcacttcatagccatcctcaaggagttatgaaacagaaagcatattgaaatgcaagtttgaaaccatagcgacatccttgagtacaaacctctcgttcactcgaacaaagccacgagagacaaccttacctcttgac

SEQ ID NO: 48746 - DNA, 417 bp, Zea Mays
gcaatatctgctaccatgtaccatctagtgtgaggagctcgagtaaccatttgttaagcaatgctctatttttagtgtcaagatcatatattcctagaccaccttagcctttgggttgacaaactagactccacttggcgagatgatatttttatgttcatctccttatggataaaacctggagcaaaagtagtccaacatttttagtacaccccttggtatagcacaaaaggatggtacattgaatgtctactgagcattgaatttgtcattgtcttttgacctcctattgagagttttttaccttttcagcagttgagttgtttctctaattgctcctcaaattttctctaatccaagtttcttaatattttaaagtgaattgaaatgtctaaataagttcaccaccctttgaac

SEQ ID NO: 48747 - DNA, 494 bp, Zea Mays
ggcaaccgacagatgggcctagagacaagagaacagcggaggaaagctccgggagggtcggggtaactccagcgaggaatcccagccgtggggaggggcaatcgagtgcgctaaggctcagactcgctctgacgagggtagggaagtgctatgggccaacataggggcacgggacggggccaattggccagtcaccgtgcggggcacggcgaaccggtgcagatgaactccagcgagggaaaattagctaagatcaggtgtgaataaggaaaaccaagcatgggaacgagtttctcacctcggggtggagctcggagtggcttggctcagcttctgatgggctggatggccgacactgtggggggtagatatcccccggggtccactcgggggcgaaaactctgctcggggcgacatgctagttgctcctcattgatgtctcgctgtgggctggacaaagggaaacagcaaaaacgggctgacctaggagtgcg

SEQ ID NO: 48748 - DNA, 636 bp, Zea Mays
ggcaattcttcctccgtcgatctctctgtctcatggcagtggacatctccctggcgcacgtgaagacccaacgtcctatgcatctgggtgcggtagtatgagggcacacttatatgcaggtttgaatcgaattccgatgggattagctaggccgtgatgctcggatttctgttgcgcgcgcgcgattcctgcggagtccgtgctttgcggcttggtgaggacgacgtacctgaagcgtggtcccacgggtcagtcggtgagggcggcgtgtgtgagaatgagaacaaggccccaggatgaccacgacggcgcgacaaggaacgaccttgcacgatgattagtagggagatgggccggctaagttcaatttggtccaatgaacagattagtgttctttttttttcttttcttttcctattttatattttcatttctcatttcaaccctaagtttgattctgaatttcaaacatgtattagatgcatcaaacagaaatctcagcatgacaatgcaggtatatttatttatactgattcctttgttcatgccacaaaacatataattcaataaagtatagtttatgtataatgtctcatcacatatatgctttaatgaaatgatttgtattgcacaaat

SEQ ID NO: 48749 - DNA, 757 bp, Zea Mays
cggacatgtataagtcgaattccatatatttcttgtgcctgatgctgctaatcagatgtcagacatgtacaagtctaatatattttagtattccatttatggagactaaaccctgataggcgatcatggtttgagagtttcaaattacttaccattacatcaaattgaccacattctaaaactgattgactgtaggtttgttgctcatcttacctaccttgtaagagacataggctctgatatgactattttttttaacctttgcagtggatctgtacatgcattttttttgctaaatgcgttgttcatgagatcgctaatgcacctgggatttattgcttccagttttaacctttatcttttgaacaagtttgtattattagttggctgacataaagttgtcctgtggcaggatcactaggaaaaaggtgtggttctccatccacggagcgttgtcagattgtaagcaagcacaagctagtgcctgccagacaaacaagttttcatatttatctccatcatggatgtttcttttgaatattcacatggatgatatgtatagtttaatcacctgctacaaatcgtttgctactacaaggcgtgcaaagtgcgtccaatgctctactgtatagaaaccaatgatgtctactatatagaaatcaatgctctactatatagaaaccgtggcagagcatgggcacctaactaataattgatcaagatttcttcgctttctccatatacttttcaagatgtg

SEQ ID NO: 48750 - DNA, 590 bp, Zea Mays
aaataatgctattgtgctagcacacaggggggatgtaattctctaaaacaagaaatactaatgtaatatttaacttacaggaaaagtctagctagtctggcttgcccgatggtaagacaaggaagcaacccgctgctaaagagttatgatgttctacaaaaagttggtggtgtagtggcccgaggtgaagtactagactttgggaatatgatgagccaagttggaaggatgtgcctaaactggtagtttgttattaaagttccacactttcatcttttaggagaaacttgacataggaagcacaacaatatcataaagtttgtttctgggagatgctactcaaccaataatttcatgtggcaacaagttgctcctaggtcagcacaagcctactcccacttcgtatgtcatgcttttgttagttgttacacatgattcggtgagcgtgctgcagggcatgttttatataccatgtcatgcatcatcataatatttgtgggactctcactatctttctttgcactcctgctcttcatagggctagccattcctcttatcatctatcctctttctgacaacaacgttttttc

SEQ ID NO: 48751 - DNA, 702 bp, Zea Mays
cgccgattcgccaccccacccactcagcccaccaccccctgcgcactccgttcaagtaatcaaccaatgctaggggtttggagatctctcgctgattcgtctgccgttgcattctcctcgggtgcggcggttgtgtgtgccgccgccgcgctatctgtatctttccggtgccgaatcataggtagcctttatgtttccaccatggctccctccctccgtccgctgggatgttgggaagcataatgctagaatattactccaccaatcgcacacacaacatgccaatgtcaaagatgctatctgcctatccctatcctaccgtagcaatggcaatccttaaaaccggaagcacatcgatgtttacgacgaaaccgcagaacatcgacaggttttctttgttccatcgtcagcgcaacacgtctatacgggagagatggaaggaggggaagaggtggagaaagagggcaacatgtcgcagttggctggcgttcagtttcttctctcgaacgaaggaaaggtgagaggaatcatagtgtgtgtgtgtttttgtttctgctgtgctacttctcataaggaaatgatttcttgtttgtgaaaaaaaaaacaggaagtacctctatcatccatcgaagagaggacggcctgcatctgcctcttcttctcggctcactggtgcaggccatgcaggagcttcaccccgac

SEQ ID NO: 48752 - DNA, 645 bp, Zea Mays
ccatttaggcatgaataacgacttcaataggccagctggtttcatgtgaatagctttgactctacaacagctatcacatctcgcaacatatgctgcaatctccttcatttttgtccaccgaaattttgaatttaaatcacagtacattttggtactaccaggatgaatagatagtttgggctggtgagcttcatctaaaatcttggttctaagctcttgatcctttggtacgacaagacgttcgtcaaaccacaaaacacctctttcatcaagtttgaaggggctatcgagttcgctcttcatcgttttctttatgtgaaacatgcctttatcggatttctgcttttggatgatctaatcttccagtgaacaacgaacctgaatgttgagtagcactgatgggtgtaacaaattaaatccatcttctaggagtggttgaggactgtagaaatgtgacttctgacttaaggcgtccgccacaacattagccttccccggatgatagtgcacttgcaaattgtagtccttgatcaactcgagcaatctgtgctgcctcatcttaagctcaggttgagtgaaaatgtacttcaggcttttgtgatcagtgaagatattgcacgcattcccaagtaggtagtgcctcca

SEQ ID NO: 48753 - DNA, 739 bp, Zea Mays
ctttagaagccgatgagtgggtaagagtaatggagcagaagttcgggttgattcgctgcatagagacgcataagccattatttgctgcacaacataaagagggcctgccagtacttggtgggcaaattttgtagcaattcaaccggctggacactagatcacttgggaggaattcaagctagcattccatgagcactatgctccagaaggtgtgctccatatgaaacaagaagagtttatcaggttaaagcaaggaggagatactgtaatgaagtatctcaacaaattcaaccatttgtctcggtatgccatcgaccaagtgaatactgatctgaagaaaaagaattgctttatgaggggacttaatgacatgctttagcagaaaatggcaacctgcttggaccttacatacagtagagctgtcagtactgcactggcagtggaagccaaaaatgtcgggcatggtaaatcaaaggggttgggaggtgaaaggtcaaatcaagggccggaaaagagaaccaggttggtgatccgaccttttaatcagaatcgttcttcatctcgcccaccttcctatcccttcaagcagcctgtttttattcgtcccactactgcccccgctcctaccaattagtcgagtgcccctggtactcgtttccctactctccctagttcttccactagttgcttcaactgtggaaagtccggacactttatcaaggactgtccatacccgaag

SEQ ID NO: 48754 - DNA, 753 bp, Zea Mays
gtgaatagttgtggagtaatgttcgtaattacatctgcatatatatatatatagacaaatagaattcatgagataactaaataacttagattatcctccattaaagtgtatatattttaaatagatccttcttaccttaaaagattctttcttactttaatggatccctcttatcttaaaggactctctcttatcttaaaatgatccatcctatcttaaaagatactctcttaccttaatagacccatctcatctaggaaggattctcatcttatcctaatagatctaactaatcttaaaagattctaccatgatctttgagatttatcttgttctaataagcatacttacctccaccactttgcttatctcataatggtgtagaccaacttaaacataattataagagctaacccaacccatagagtcatgatgaatgatataatcaatctattctcacctaacatcaaacagacttttgatctacatcatgtggtttacctcatccatatctatcttaaccatatttcccaaccccgataatatacaccaacctcgaaacaatgagaccaagaccggaggagaaaagatcaatatcgacaaagaaggatatatcggtccaagtaaatctcgagatgaatcaggacttaaacattttggagaaagtcttttccttgccataatctttcttacctcaacctgttcagtttatatcccacataaatagtagctggatacctaagctctcccaat

SEQ ID NO: 48755 - DNA, 770 bp, Zea Mays
tgaacaagtcctcaccgagcaagtccccgtcgagcaagtctgtgaggcgagacgaccgaccaagtccccgccaagcgggtccgcaaggaaggaatctaggccaacgctgtcggcccacgacgcccgcaacaagacacaacatcaccaaaccacgtctagaccatacatatagtaccaaaaggtctatggcagacacgatggaacaccccccgcatgcgcccacggatataccctcactgactcgcggggccggtcaactccagtcgtggagaccttggcaccggagtctctacagtggcccatacaccggaaaggatgatacaaaaccccatactgggcgtatacctatgcgtgcttgacagtgacgcaaggggtatgacggaagatgaaacagtactggacacaaccctgaaccatgtcgtaagcccactttttgcgggacacgccaggtaccataacgttgacaccgagcaagctacagggactcgtataccagacggacaagatggaatgccatactaggggacgatagcgcacgaccctacgaaccatgtcaggaggacttcgccatccgaaggcagcaagtcgagctccctccgagtaaaatatgaattcccactgtaaagtccacctttgagctataaaagggtagggaaactttctttcgacacacaagcacacctggtataacacgcctcaaaaaaatactatggtcagtactacactggactagggtgaatgcctgaaccagtataaactccgtgtctcag

SEQ ID NO: 48756 - DNA, 621 bp, Zea Mays
agtggagcagaatggaggagggtgttttgattcagttcagtagctgaaaccagatttagtgtttcttttgtcaggcattggagttctcttctgtctgatctaaggagttttaagttaagacctctgtagtaaagtgttagagggtgggtttatgaacaattctccttaagtttggtttccctgttgctgttagaaactgtgagatccaagaggttagaaactgtgagtcccaagagggtaacagatgggatgcagtttggacagtgggcaataggttcagttagtgcagtgcgaagtggatttctaaaaaatgattttaccactgttgtgccttgttgtttctggtcgaagggagtaagtggatgggcattggcatttgtgggtaggataagtattgagtactcaaatacctgaagctaaagagatttaaagtctatccacacagatgactcacctgttgtgtgcttcctatcaaaacaccagcgcccctttagcttttacctcacggtggcttgatcctgcgtgtacttgggtgctggggctgtgtgtccatgtgcatgaaatatttggactcaacacatgcgtcgtgataaggacaacagtagcagagcctccttgctc

SEQ ID NO: 48757 - DNA, 647 bp, Zea Mays
cccaaagtttgcgatagaaaccgaatcagacggtcaattttaccaagtctaaacccaccagctggtggacacgttcaaactatttgatttttgtaatcagaaaattataacgttcggatggttcctcccactagcacagaagaaaataacacctctttctatattccgtggcaattttatatgtgcccaaaaaaattatacataagcacccaatgcgtgcattcacagaccacaaactctcggtccgcaatgattgcaacgttgcaattgcttatcgttcatctgtcttgcattcgccgtctacccaatgccaatgttctaagccagaggcctgaggtccatgataagaatggaagccattgacgggttgcttgcaagtcttctcttgcttgcgcgtaaacacaacacagcatacatgcgttccacaaacctactctttccataacacatcatccaccaaagaacttatatactctctccacaaggatccaatccatcttggttattcgtccccacgatggcgtccaagaaccaagttgatctcgagtcccagaagcccatgccgacgcacgccgtcgttgcatcggctcccgcagcttccgtgccggcttcttctggtacaggctccgtcgttgctggcatctccg

SEQ ID NO: 48758 - DNA, 461 bp, Zea Mays
gtgaattcgaggtctgatgtgcatattgtgcttgggggcaagaagatcaaagctgcaatcgggtttggccaaaaatatgaagtggccaccgacgagcaaaatcaccaagcattgcactttctgcggcaccatctctcgtctacactcaagaatgagtacatgtcagagagaaagtcaagcaacctctgaaatgcattgcaacaacgttttgagaggttcaagtacacagtcttgtcccaagcaccgcaagactggacgcacagcaagattggactcaccttagatatattgactttaaaaccttgggagaatacaatgcagcactgcaccgaatatgcaccaaattatctcttcatggtaaggtgatcacagatgaggagaagattgaaaaaaaaacttatattttttccacccaaacgccatccaatatgtccgcaactatcgacaagacacatacaaac

SEQ ID NO: 48759 - DNA, 429 bp, Zea Mays
gtcgaagtagtgggagcaggcaggcgaagcgtgtagaggggcctggggctgtcacactgagtgagaagggtcctagtggcaagatccttcatagaaataccaaacaggtcaaactccatggaacaagagttgtcagtagtgaactaacgtatggaaagaaaattttgaatgatgtggggggcaacaaggacgttggttaagcggaaaggaccgagaaggaccgtgtcacctactgaggtgacgggaagggcggacccgttttcgacaatgatggaagagggaagagaggggtgggcgggggaggtggaagatagaatacctgcgtccgaggtggtgtggtaggaggcaccggaatccgccacccagtcagagactgaggtgggcgaggccagcatcatcgtggagaaggagctggcgagggactgcgcg

SEQ ID NO: 48760 - DNA, 422 bp, Zea Mays
cttttcatcattttcttcttcacttgaagaagacccgcttgatgactcaatgtcagtgagccagtcaccaacaatgtatgcctttccatttttcttcttatggaatctttttgcttcccatctcttgaagaatttcttttcctttttcacatcatcactgtcatcatctttcttgcccttgaacttgttcttcttgggcttgttgcattaatgagcaagttgacctagttctccacaattatagcagtccatttcagagatgggctttcttttactagagaagaacttcttctttcttgagtcaaactcgatgccttatctattgagtttcttcaacattttggtggtctttctcaccatcaaagtaatgttagcatcaagatcatcatcacttgaggtatcctccttaatttgcacttttg

SEQ ID NO: 48761 - DNA, 351 bp, Zea Mays
ctgcagtctttctctttttcccttgccctcgtagcgggtaatggtaatcagggtatacgaagccaatcgcatcaaataccctattcaatctattcttgccccgacccccgaaagctacagacaaagcattatctttggccttggagtatgccccaagtagctcatcactggtagcttcaatacacttcagccagtcattgtctggctcatcaaacttctccctaaatctgaaggtatacttcaatcggaccagaccaccctcactggactcggcggtggtctccttcggcatatcctagctctccacaagcggccaaaccctgaaggctacatgctcttgaatcaaatccc

SEQ ID NO: 48762 - DNA, 749 bp, Zea Mays
ggggggacccttcggtctagttgcagatgattcagaagttggagcgtgcagaatttgctaatccagtttgggatgggtgggtgtgcggcgcaccaccgcacgttggttgtatagcctcgctggcagtcaggcgcgctatctctagcacatcctctattttattccaaattttaaacttcactacactagcggctgtcgacactcgacagtaggcaagtgtcagtgtccttggatctgggaacgggaccctgggaaaactagcatttcttgtagtctggggagccagcaataggaaggatggctcttgcgcagatagccgggccgggccgggccacttgtttgcgcttggtgtccgtacccaccggccaccgcaccgcgcagatcgccagaagtttgctgcttcctagcaaggtcaacttgtccctccagtcattggcctcagcaactactagtacatactacgtacatgttaccccgtgtagtttctggcccaaacatgcaatctaagatagcgattggtttcagagtatgatagaacggaactgtttcgcttataatttattgttgtttagattaattccgtatataatagagccgctctaaaaaaaattacgcttaagtgttgaattatctagcttcccttccagacggaccgtttatcctaactgccttcgaaaccaaacacaacctaagttacgcttcgggttgactcacttttttggcttgccaatgaacgacgtatgcatttt

SEQ ID NO: 48763 - DNA, 382 bp, Zea Mays
cgaccacccctttgtccaggcgctcgcgtcggggtctgatagtgtgcacggaactgacgcggcaggcaacaggcagcagggatggttgccgatgggggtggattgggtgctctagttcctgaggccgttcgttgttctctgtgttatggaagggagacactgtatttgcgagggatttgatcggtgcactggccgcaacagccgtggcaacatggaaggatggtgtcgtgatcccccttctgaagatgctccaagacaacatgttgcatttcggccgcggggacgatcaggtatctgtgtggtctaatgttcaaggattatatattctcttactcctaatgatgctgacatgttgtagttggcaattatgtgagctgttgtg

SEQ ID NO: 48764 - DNA, 523 bp, Zea Mays
taatctagtgtgagtcacttaacaagttagcactagtgaaataaactagatcctactcctataaaccttgttctcccctcatgcacttaaacctaaattagtgcaactcaaccatgagcagaagagctaaccatagagtcatgatgaatgatataatctatctatccccacctaacatcaaacaaacttttaacctacatcatgtagactatctcatcttgataagattctatcttacctttggatactcaccatatacgactagttacaccaatttggacataaatcaaagattaagccctgctaaagaatcttcatatcataaatagctactaacctatgcattctgcttaccaaatacttttcattgcaaagctatcctacaatatgcttctaactctcatggtcaataccaggaaggaaagattatcaggcaacagcaaacaagaatgaatccttcaaatcctccaccggttggaatcgatcaagtggttgccacccaaatgatgctaatacaacaaat

SEQ ID NO: 48765 - DNA, 1023 bp, Zea Mays
ctgggcactgcaattctggttatcacgcgttctgaataaggaatccgatggtacagtgctatacaaatatcccaggttcagagaacctcaccgctggtgagccatgcgtccggattcacgccagccgctgtgattcgtgcccatcgcaagtggataacagagaggagtaaaaatcttgacgctcgaattagctcgggcttgctcaccgttgtgcctgccgtacccacttggaccacggctggccgggatcgtcctcgctggcattagccacttaacgatcgtgcgccacacgtcttggaagtctagcacgtcacaatgaatcggtgttacaagcctatccatcgcctgagaactggccacggtgaaagccacaaattcattgcgccagtaacctcccctctccccggtcgccaacgcttcacctccaaattaagtgccaccgccattgagtgatataaactgaagcctcagggagctccgctaggaaattacgcgtccaacgcaccagcacttgcctccaattgtccaccagagccgcccaattgcccatttcccccaaattggtctaaataccaccgcgtgagcacctcgccgtggccagcgtgctacaggtccattcatgtcctctgctctcttgttgcagtacccttatgtgcccctgatgcttctcgacccgaccgactaagctagaacccattagattaccaagaacactttgaattgtccccggattgcgcggtcaccgtgagcagagaagttgggagctcgaaccgtgcaattgatcgaggggaaatgattgttagatgttgaattaggtatcaaccaagttagagaaccggccattgcgtgacttggccagtacaggctcgccagagctcggtttgccgtcgttctgcatcgtggacttggcgcagtgaagaaatagaaatataggggggttttgtgagttgtcagtgactcagtgattagtacgttagactcttttcaagttgtttaaaattccaggggcctttgcgcaaagtt

SEQ ID NO: 48766 - DNA, 434 bp, Zea Mays
acaactcaggcgtttatcatcaagggcaaaggagacggtgacaaaggagacaaacgtccctaacctagccttcaaagcatgcatggtctacaatagaccaacagttcttgggttcctactttcatttatgaccaaagatgtcctctcctatgtcacagtgtgtcgaactgccgcagaaacttgaaagtgaaagggaaatggtctttaccatattctctaattgattttggtgcttgatgaccataacaaccttgtggactaacttgtttgcctaatctatgattcacaggtgcagaaatccactcaactcggttctaagacagaaatagctcaaaaccaaccatagaggggcataacttggaaaacataaaggttacctagtttcatactctggacaagtttcttacacccctaggaacctatttgacacatca

SEQ ID NO: 48767 - DNA, 746 bp, Zea Mays
ccccgtagtccaacccaccctctgcctcttgtgcagtcatgcaagcacatataactaagaatgtagctaatatcacttttgttacaattgtactagtaaaatgcccgtcggggtgtgctcatcgtgtcaccgtcctcgcacatcctagtggagagccagcgcacacccctcgctgctcgctataggaggtactcgtcgtgctgtcgtcctcgcgccatcttcgatgccgaagaggcaatacattgaggatttcaacatcgtttctgtccactcccagaccatcccatgcaaccacgtcttcttcatcctatagatcaatgatcacttcatgatggtggcaccctctccaccgcgtccccgtcctgccctgttcctacgctgatgttagaccgctccaccgcagatccataacctcaagacgattgagggagtgcagtaggcggaccacaccagcagtcgcgccacaggtagcctaataggccacccaactcgtctgctcctacttagccacctagcgccgcatcgtgaccgcatggctcacaccatctccatgtggcccgcagagctcccatgctcgccacccccgtcacatgttacctatctggtgtaggcttgtatccatggagttcctgtgcagccaccaacatcgacgtcgttgagggagatcgtgtgtgtgtgtggggggggggcgtcgggtttgtccaggcaacgcgagcatggggctagggcgatggcggcgttgaccg

SEQ ID NO: 48768 - DNA, 278 bp, Zea Mays
atctcacttaaataaaatcgtggtcgtagatctaagatcggatggctgaggcttcgtactgtttcgttaaacctagatctaatcttgcacgtccaaattggatcgtgcggttcagacgcgcccgtaccccttcggtggccgatttgctaaagagtccctcaaattagtagaaatcaacccgcagtccatccggcttgactctgtgtcttaggaaaatatatgtagaggcccctgttgttatctatttttgtgcgcgagatccagagagcagtgaaaat

SEQ ID NO: 48769 - DNA, 644 bp, Zea Mays
gtgacggaggggaaacaacacctagaggagacatcggcgccacctgcacaacggtggaatgtgaggggagaaacatgagatcctggtgccctgctggctcatgctcatcaagatcttcaaccacaagtcccaaactcttaccatgattttttagtgcggccaataattgttattccgacgtgtctttgtttcgctctaatctctgttgagatattctgtgctatgctcacggtggattgtttggtgattgcgtagggtagggagagatacggtgtcgcaaggctggaaccatctctgcatctgattgatgagccaaccccgtgttgggtctgttcaagcctttcaatgtgctgttgttgcgggttgggtggtgacggatgccttcaatattatcctgaagggctcgactacattgaggtaagcatagcatgttgttttatcccacattgtgtatgatatgatacatagcagattccatgatcccatcaatatccatcgattctgatctatgttgtggcttgtaactaatgcgagctaagttgtatgcaatgcacctgcacaacgactatagtcttcataattgtagcatcccttgcattgacaaacaaggaaaatttctactctatccaacctagcctaagaga

SEQ ID NO: 48770 - DNA, 503 bp, Zea Mays
aaagcgttcacgccgagcaaaacgcccaactacacctatcaaggagaagaagaaaaagaggcggcttcggcgactgtcgtgcttgggtcaggatgccggcccttctgtgccagttcctgatgatatcctaacagaaactgttcctgaagttgatgccaagggttgtgttcatgcacaggctgtcgtctgcctatttgacgaggacgaagaggaagaagaagaagtcccgctgatccacaagaacagccggtactatagaggtagcgagtggggtagtgatattccttctccagctctgtcggcccttgtcagtcttcaggggctttcaatatcagactttgatcaagtactggaggaagttgtccccgaagacatgctatcagagccacctacagatgatatcccggccgtctgttcagaggtcccagacggtgggctttccttgcttgattccgctgggcaagacgtaacccgagcggtgtctttcacatcgttgactttgg

SEQ ID NO: 48771 - DNA, 457 bp, Zea Mays
gaaggcgcacaaccttatcatacaaattatggttacatacacacagcgagggcatcacatattacattggctcaaccttcggattgatacccatttccctgtagttgaatagcattatcctcatctcctcaccctcaaaaagatttcgcagctccccttcacccacactagccccagctggcgaggacaacaattcccgtttaccagtcccgtccacgcgaagacgaccactctccatctcaccacaatgacgcctgccacttcgcgacaattcactcactctctgtttcgccactgcccttcgccacctacgcccagtactcgcacccggaagatcctcagcacccaccacacgcggcgaagtctccgccacagccacgtccaacgccgcaaaataatccaagatttgtcagtagcaatcgaactcctagaatcattagactcaaaacacttagac

SEQ ID NO: 48772 - DNA, 706 bp, Zea Mays
catatggactcagaagtaacatgtacattctattttttacattagttaatagatgtgtgttgtaattctacacaaccattccctactgatttgtatggtaacacaatttgtttcaatcacattagttcgtgtaaatatgaaagctcacaaatacgagtctagttccatgaacgtaacagaactatgttggcaacttgtttgggaactaaaaataaaccacactcctccatattagcttcaatcaaggtaccaagtattgcctttctggatgaaatttaacctcatttgcctatagaccaacaagatttggcacattgcacgaactaatcaacaacagtggccagattgtcgcatatgaggcaagcaaatcacacatcaatgtatggggaatagagatctcaagatggagaaattaaccattcgctcattcgatgcttcttgtgggctccaacgacacaaacctcacgatgacgacggccgtggaaatctttgtgctctgggtctgacctgaacaaaccgtctggcgcccggtggagcctctctcctcgtcgatgtacttcaggtccattcgcagcaccgctctaggacctcaaccgatgacgttcttcgccaccactgcctagatgctggtaatgaccagatctaggaagcgctctgattccatgacgtgaaccctatactactagggtgacctagcctctttgct

SEQ ID NO: 48773 - DNA, 589 bp, Zea Mays
tttattcacatttcatatacttatgactatgtgactaatacgtgctcacctcttctgtcatttcagtgatttcgcctgctcgcttgcacatctcctgtcctacctggatcttttctctctcgagaagttcccaggtagctatcactctatttgatgacttatctactgctctctactctcgcttatcttttcactctatcttgcagcagtcagttcaggatggtgagggcaaagaacgtcacaccatcaggggaggagatgacgaggaccctccttgccccttcatacaggtcaagggcaagaccgtctatcttgagcagcaagagggcaggaagaaaagtcgcctggaccgagccgcacgtgcagcggcatcagcaacaacagatcaggctgagaagggagaccagctctagatttcttctgatcagattgcctatcgagtttgtcgcctcgcgtctcggcctcgctccactgctcccccactccttccgccatagtctccactccacctcccacttcgctagctcttgtcgctcacgagccatccaccacacccgctatgtccaccacctccaccactccaacttct

SEQ ID NO: 48774 - DNA, 725 bp, Zea Mays
gcggcggcgggagttgcgtctttctcggtgtactcgttcatcaggagtttctcccacttccgaagcttcgtcccgagatacgggttgcgccgggtcccgttctccggctttgtgatgccgcctcacattccggcgtttgtttctccgtcgctgggcatcacgctggggaggttcctacccttacatggtcggctcatcgttggggatgggaattgactctaatctcgcctgaatgaagaggaggtcggggtagaaaggagcaggtatggcggtgtgcttcttcccatcctcctttgagggcggaggtgctgggaagattgctcgctgtgtctttctttcccagcatgggacattcacttcctttctccgagtgatccgcgcccactccttagtgggtgaggtggacaacggagttcttcgggtcagagaggccccgactgactgcccttcatcctctgagggctcttgagccctggcttgcaagggatcatcttcccctgagctgcgagaaggggcgtggcttgcaaactcgcttaagcttctctcaggatttctgaggtgggtctcttctcaggtgtatctgctacacggtgcagagttccctctatgtccgctatgcatgagatggttccgaagtagaacatagctcctaggctgagggcgatcttgttcttgaagtcaatggccatggagttagctttgatcaacgacatgcctcctacctg

SEQ ID NO: 48775 - DNA, 304 bp, Zea Mays
caccgtgtctaggagctagccatatgtggcaagaagatgtctttgcttcctcatattttccatttggctgttagagggagccgcggctgcgaaacattacttccatttcctgccgtgtctagcctgtttggcaagaaaaaccgtcttaatcgtatcgtttttttccagtttgcggttagaccattagaggattcctgcactatgtccttttgtttaaccaaattttttcggcaattgaggtagtgcatttcgcctctctttctaatgttcaggaagactgcttcttgatagaccaagatctatg

SEQ ID NO: 48776 - DNA, 969 bp, Zea Mays
aaaaagttttcaatttttcaatacattttgtcatactaaatggatcattgttggggtcacatttctctattttcctttgtgtaagctaaagttgtctctctgtgagatctttgtagacctctagctcttctcgtcgtaaagcaatcaactcatccattgaagtctcattgtttctcttacatttcttgggacagccctccctaggtgcttgtgcctccctctcagctatttccttaaatttctcagcttgtgcctcctgctcagcttgtgcctctttctcagctattgcatcttgttcagcatgttgatccatgctagctgaaaacagattgtaattgtgtgtctccctgtcagccattgatctatattgactatgtgtaatatcatcttgaaaaaagttagtccatgcaacatccgaagcatgtaatgttgggcttggagtactcaaacaatttgtcctctccaaaacctcaaattcagatttagataccttctctgaagttcgcctacaatgtttccccccggctactttacctgcacacagacaagcaacttattgtaaatcttatgcatgtcatcacaacatactttttcttaaaaaaatctaagcatttagatagatagaacagtatcgttataaatctcattgagatcatcgtagtaggggaacgatttgtccttaaatttctgcaaattttccggcagctcgctccatttttcatctattgtagtaaccatcttcaagtttggatcccaaccaaaaccactctttaacaagagtagtgccaccacattgtaatctttcttgagcctctgttctctatccttcaattgagatacaacaaatttggttgatgtgaatttctcattcatacgatctgctattgcattccaaccttcttttaccccaatcattttgaccacgatatctaggtgaattgaactctctaagagtgctcacaaaaaaac

SEQ ID NO: 48777 - DNA, 398 bp, Zea Mays
gagtttgaataaagttatgattattttaagataagtagtgtggaaaagggtttatagccatggaatggtggtggatggagggatcaacacaagagagaaaataatatatgatctaaaccagcaacaagatattagcctaggacataaactcaacgtagtggactttgaaactgaattatgcaaaggtcgaggtgcgaaaggctctacgacaagaaaaaacgagtatggcaatgaactatgggacaaatccataacccatgaagtagggggtaattgtgaatatctaattacatacttgaagcgctgatactacttcataggtatatggataccgatctttcattgagttcaataaaactatcaatttgttggagagcaacacaccgatttgacttcag

SEQ ID NO: 48778 - DNA, 582 bp, Zea Mays
caatactgaaaacagcagagaaacacttactagttactaatactacaagtcccagataccacacaacacacattaccacccaattacctaaagaagatcttcatctaactgaaattcatcacatgcagttccccttccacctgattcttgttcgccttcatcgccatcatcattcatttgttttgctgtctcttgttcttgttcatcttcagcaggagaattatcatcttcttcacgtatgtattgagctatagctgatgcatttctgggtcattttctggttctaacataggtttgtgtctgagtttgagaggaggaaccagcagtagtagcagtcctaggcaaatttcagccgcggagaccctaacttgcacctagagcttcatccacaacatcccaaatgttatcaccatcagattcttcttcaacccattcattttgccacgtaaactcttcaagcaacagtggattgcttctctttctcttggaacatagctctcttatatttgtgaacctaatatctatcttcctgttgtagcttacataggccaatttatttagtatcttgtgctccagtctgtt

SEQ ID NO: 48779 - DNA, 498 bp, Zea Mays
tccttagatttccatctatataaaatgtcaaagagcagagtccgtatgagtcttgagcatcaaatttggtgtagcctaatcctggagtttgaagtagagtcgaaattgagttaggcttggactcccacatgagtatacatcctacctgattctctttgactctttgtcattttccaaatccttgttggtcctccaaggttcctaataaaaaacatgtgcttcaccaatcataaggttagaaaaacaattgattatgaaattcaattgatgtgctcatgcttctataactggactttgcaatgtatctaataaagtgatgtcctcattactattgtggttctttacaatgatagaagctcagttttgtactagcaaattagatatagagacatgatgtttatcagcatgcaacaaaatcaaaagaaaaactcacaaatgtaaggaggattagtaggaaccttagggggttcttgataccttggtaaaaataaatgacgc

SEQ ID NO: 48780 - DNA, 331 bp, Zea Mays
gtggcggccaagaaggggcaaaagggggaaagggccaccactagggtttctttgagggagaaaagaaacgacgccacaaatgactctgacttagcatccaacggcccacaatccttttcccacatccacgcaccgaagatcaacctttggcaacattttttgggatattacactctacccccttaaaaagaattcgtcctcgaattcgaccactccaaacaaatcatccaaggtaccccatatagcacaaccattcaaaacatgggtccattattggtcttaattaacacaagaacttctacctcagactaattgtctaaggaaactacac

SEQ ID NO: 48781 - DNA, 498 bp, Zea Mays
tctagagtcactgacactttacagaaacctcccccatgttctatttcttcgcaggttgaggtccacgacggtggacagcgcatggccgagctccggcgagcttacaccagccgattcacttaatgaccggcaccctactttggccaagaccgaattcaagacccaccgatcgtttcccctcactcaatttcactaatgagactctaaatcatcctgtccacggagacagcgcggacaatggatgaacatgggcgttctcggtgatccagggcggtctagttcaattgaattggtcgaggagcttgaggaggacttaaggatgctagaacaaaagagcagggagtacgagcagacctggaatacgctgaccgcggtgagggatcttttacggtggcggagaacagatttggggagaatgagaaattagcgagctctggtgaacaattggaggcacgacttggtggcttggtgcgtgattaccctacggactcgatggtg

SEQ ID NO: 48782 - DNA, 664 bp, Zea Mays
ggcccaccagtcggtccctgttctccgcgcacctctgatggctggcgtgtgggacctccgtggcagtggaaatctccattaccgccggattcgcaacagcttcgccgaagtccttggacgcgacggagtctcagtggatagcactgggtagttgagaactgacgtgcgctgacctcgccctcgtccctagtcatggcaataaagggataaggacggcgcagcggccggcgacgagcaccagccttcagctagcctccatggccttctagctcaggtaccttcgctcctcacgctcctcgcgctcccctgcccctggtcttctcgtttcttcaagcatggacctcgctctcctggactttcggtcgggtttggccttcgaggattccctcaggctcaatttggcttcttcggtttgtcctgctcgcccccgtcttcgatcgtctttctggctggtggtttcttttggcagatgcatcttcaagttgaacccggattctgttggtcacctcctccaggcggcccttggcgggttcgcgtctggctttgaggtgcttcagctcgctgaccgggtttttcggttttcggtttcttcgatggctgtgggtttccatatctacaattctagatgcattgatcgtaaggaattcagagccttcttcaacct

SEQ ID NO: 48783 - DNA, 748 bp, Zea Mays
ctgtgagcgagggtgtggctcgcagactcgcttcatcttctctcgaaattcccgaggagggtcttttcttgggtggatctgctacacggtgcagattcccctctttgtgcgctatgcacaagatggttccgaagcagaacataactcctaggctgagggttatcttgttcttgaagatgatggccatggagttagctttgatcaaagacacaccacctacctggcgcgccagctgtcagtgtttagtgttcgaccgcacagccgagggtaccctcgtggtgcttttgggtaggacggtgtcgtagatcgtaactcgatggttcgcgctgagggcacgaggaaaggaaagagtcgggcaattttctgtaggttcgggcccctttgaggagcgtaataccctacttcctgtggtggctttgtatgtgtggtgtgtttacaagtggtgtctatcaaatggacaggtgctaatgagatgaaaatgatggggatccccctaggccttttatgcacgaccgtatggcactccctgcgcacatgctgatcacacttttccagcttatctcctaactaatagcgaagaaactttacttatcccgaggaaaactcgacagctcaattccgagctatccctggcgtttgaggacgtcgggcgcgggaaaaacgaacagattccatgagatcatgcccaatccgcgaacaattcgaacgtgagcccatcgccttcttgggtcggcccattttaactgta

SEQ ID NO: 48784 - DNA, 504 bp, Zea Mays
gttctgcgcgcccgacatcctgaaccgccggcgatagctcgggcgtgggaacgcggcatttcctcgagataatggaagactgttcgctactaattaggggataagtagggagatagtaatcaactcttatgcggggagccctctctggttgtgtatataaggcaggagacacccctaccattttcatctaatccacaacccatcatattagcagtcacaacctataaacccatacataaaactactacaagaagtagggtattacgcttctcaaagcggcccaaatctgcataagcttgtgtgtttccctctcgtgcaacagcacgaaccatcgagtcacaatctacgacatcgtcctacccaaaagcaccatgagggtaaccccgggtgtgcagtcgaacacaaacaccgacagctggcgtgctaggtcgggggtgcatcgtcgattaacactgactccatggccgtcgttttcaagagcaagatcaccttcagctcaagagc

SEQ ID NO: 48785 - DNA, 675 bp, Zea Mays
gcataacgtgcacaactagtcgacccatcatggtgcgcagatctcatcttctagtttagaggtggccacatgtttttctccaactattaatcctagtggcaaaaggaagcccttgttgatgagtgactagatctatgatgtcatcgcgattgagtgatcttagttgtggctcgaatggatgaccatagcttgaggttggcatcattaatgacaagagccttcgagacgctcttcttcttcttgctactatttaccaacttcaccatcgtgacattacagatggaacttggggatgacggagttggaggctaagaaaactactaggtcctaggatgcaaagtggaaagcacaaaaactagaaatcatcggcatagggaagacgaagagacccttaatcacttgcttatataactaggatctagatgggatgggctacgaatggaccctatcacctgacatattaacatattgggtataactggatggcccaaattcttggtttgatttattggtcccatcgacacaaagtgagggatactttcagagggttgtcaatatgactcttaaaccatgggcactcgagtgctatgtaaaaaattttaatgtctaagtgagctcagagtacatgtttaggagcatgccctattaggaatacaaaaatgaaccagataaaat

SEQ ID NO: 48786 - DNA, 574 bp, Zea Mays
gcttatccattgaagtattttcccaaagttaactaaaaggttaatataaattttgctatggatttgaactattttcttaactaaataatatgatgagatgttttacataaatcatacttcattataatttttgtggcatggacaaaggataaatataaataaacatataatttatacttgcatggtcatgctgagaattctatttggtacatcaaatatatgtttgaaaattcagaatcaaacttaggattgaaatgggaaatgaaaatatgaaataaaaatagaaaaaagggtgaataaggaaccaaaccgggcctcacttcttggcccactccctcattcccttttctcgccagcccaccacgccctgcctctggctgcgggacccacatggcggtggctccaactggagtaagcgcgcgcgacattggcttgtatcaccgaccggtgggccgtgcatgtcagctccatcccttccaccgaatccccaaccaaatgcgcgagatcctctcaaggccgtccgcaagttctggctcggctctgcgtccgtgcccctggatgtcactggcacgcg

SEQ ID NO: 48787 - DNA, 473 bp, Zea Mays
accatagccttcaggtatcttcacccatgaaaaaggttctaaaagccaattttcccctcttgagccattaaaccccaaacattggattaaagggaaaattatgcaaatgaccaattcatgaattaaaccctttaccaaagttgaagtacattaataaatctacaaaatgtagtaagggaagtattacaaaaaggcccaacaaaaacctcaaatcaaacccccaagtggagagcacactagagccatccatttttctctaagtccaaaatcagccctaacctaaagatcttaagtgttcacccctttgttggctccaaaaccacttgatccaaataacaaaaagtagccagattacccaaggcacacccctgaaaaatttgaaacccaaccagggtaatttgacatggtttggcatctgttttgtcgcgtggtgaacagtgcagacagacaagacttggcgccaccaaatcttc

SEQ ID NO: 48788 - DNA, 1330 bp, Zea Mays
cactgactgggtggtcgtctccgatacctcgttccataccactatggacattggtatccttcttccaccattgttggcaatggttctgttcttccagtcacctccatcaacgactcaaatctttttggtccttttcgtcttcgcaatgttcttgttgctcctgacaacattcggaaccttctatctattcgtcaattgactactgacatttcctgttctacggagtttgaccctttcggtttgttcatgaaggatcttgccacttggagtcttctcgcacggtgtgacagctttggcccctatacacccttcaccttcctgggtccactacatctttggcagcctcacatgttttgaccactacaacttcgtccactacttggcatcgttgtcttggccatccggatcctgatgttatgtccaagttgtctagtagttctgtcatctcttgtagttgaggcccccatgagtctatgccatgcctgtcagctgggttgtcatattaggctcgcttttcctcattcaggttgtgcgcccttttgatctcattcaccgtgatttatggatatctcttgttctgagtgtctcaggctataaatattaccttgtgattcttgatgatggctctcattacatgtggatttttctgttgcgcttgaagtccgatatgtccccccatgctttctcatttctttgcctgggtgtccactcagttcggtagcacctgccaagccattcagtgtgataactggacagactttgacaacttttctcgtgccatcttcctcaatcgtggcgtccatattcagatgtcatgcccctacacttctccctagaacagcaaggctgagcgcatgattcgcactaccaacaacatcatacgcttcctgctcttacaagtctcgattcatgttcggttctaggctaaggctctctacattgccaactacctgcttaatcgtctgcctattgaggcgatctgtgctctcacccctcactttgccttatttggctcacttctacctatgaacatcttcacgtcttcggatgtgcttgctatcccaaccttttcaccactgctcataagcttgcccacggttcgacaagttgtgtctttcttgggtactcccatgatcacaaagggtactagtatgtcgatctttccaccaaccaccttttaatctctcatgttgtcttagacgaggcttcctttcttttctctgcttccccctccacctctgttcctaaattggattcccttttcgcgaattgtcgtgtggactcccctatacaaccccacttgttttttcctctgcaggctcattctccg

SEQ ID NO: 48789 - DNA, 931 bp, Zea Mays
atttctccccacaacgataacaaaggccattcaccatgcggtattccttcaattgtttggccttccaaagttccccttggaattaatttgtatccttggtgttgagggtaggattcccctttgctgcattaaatcttttgttgcccatcggttgtctggcctgccaaccttcatacttcatagccagctgagcagccatcgacacagtttgagggaactgaacctccacatttacccttaactcatgtttgagacccaacacaaattgggttaccaggaatgtttcactgatagccttctcaaacagtctaatgtggtacaccagcatatcgaaatgacttttatattctaagatagatccattctgtcgaagggtcaacacttccagcatcttatcataatgagtatttgcctcaaactcctctagaacagcccccttaaattggttccagtgtagtacacccaatgtatcgcgcgaggcttgaaaccatagggttgccttcccttttaggtgcatagacgatgttgcacaaaccttcaaccctgcagggatctggtacatctcaaaatatgattcacaattatccatccatacacttgcttcctctccatcaaagaatgggaaatccaacttgggcaaccagttcttcctcccttccatgtccatcgctaaatcatttctagcatccatacccaaactgctactcccatcctccacggttgtaggtattctaggaggtacctgagtatttcttagctggatcggaggaggcccaatcaacccatcaccagttgccttcatccctctaattgcgcttgataccgtggtcgccaatcgattttggtcctgagaaacttgagtcagcgacttcatagacaggtccatcttcgtctgcaggtattgaatcaacttctctccctccatttgtct

SEQ ID NO: 48790 - DNA, 461 bp, Zea Mays
cggcaagttgcggcatggagaatgcagtgcgtccgtacggccgcgggcccatgcatccgggttccaatgagtgccatgctactgctgatactcctgtttctacgattgggaggttggggtagggtgggggagggtcccacgctttccctgggcctcctgctgtcgttctccctccccttcgaggctagacaaatggataggatcaaggagggatagcccggatatacggcccatgatgttttatacgctttccttttagtagatacgataaacttttacgtactgtttttttgttatgacccatgaagcagctcagctacagacgcgcgggtaggagtagagtaggaccgaacgaagggatttcatttcattctcgatatctctcctgggttcctttcggtttcccgaaatttcagaaaggcacagattcaaagttgggtctggacggttggcgcagcctc

SEQ ID NO: 48791 - DNA, 534 bp, Zea Mays
cgaagctcatgatatagagttctgaactcgcacaacgataaagactcaggcactggtcgacttcatattagagtggactgagcaccaggtcctggatagcctagaagtcgctaaaatatggagaatgtactttgatggctcgctgagactgcaaggagcaggggcagggattctctttatcgctcccagaggtgaacaactcaagtatgcactccagatcttgttttcagcatccaataacgccgcagagtatgaggcgctggtccatggactaagcatcgttgtttcactcgacatcaagagattaatggtgtacgacgactcactggtggtcataagccaagtaaacaaagactgggattgctcgactgattcaatgaacaaatattgtgcagtgttgcggaagctgaaggacaaattcgaaggattagaattccaccatgtggaaagaaatcgcaatgcagcggctgacgcactatcaaagctgggatccagtcgggcccaagttccacctagggttttcgtccaagaaat

SEQ ID NO: 48792 - DNA, 399 bp, Zea Mays
gagccaacaggatgatactcgatgcactcaggaagaaagtatttgacaagagcaaaaagtttgcaggaaaatggatcagagaactatcatatgtggtttggatcctgcgaacccaaccaagtcgggccctgcatggaaacactttgttcatggtatatggatcagaagtagtgttgccagctgatttgatctttggagcacccaggctaacatttgaaggtataggtgaagcagaagcaaccagactgtaagatgttgatatattagaggaagaacgtatgaatgttgtcatccaatcggctaagtaccagcaaactatgaggtgctaccacaacaagccagtgcagcaccgatccttcgcaataggggacctagtgctccgccgggtgttaacgtgag

SEQ ID NO: 48793 - DNA, 418 bp, Zea Mays
gcggcactccatgggtggtggtggggatgagacctctcgttggtttgctcgctagagtttgaaggctatggacgtgaagaccaggggaatcgcatgggggattagtggcgtgagatacagaggtcagcggtttccaactgcgtcgcgtggcgtgagatgtggagatcaggatgcagaggtcgcgagcgaaaggctatggacgtggagaagactagtggatcacgtaggggattgacgacatgagatgcggaggtcggggacgcggtggttgaggttgtgacaatgtggttggggttgccgcgtcgaatcggggaggcaacgcacgaaacacacgaccgtcgactgttgaaactggttcgttatattagtagagatagagacttacattttagttttttctcaatagcttcatttcaaa

SEQ ID NO: 48794 - DNA, 556 bp, Zea Mays
atgtcatccatcctatcttaaaagattctaacatgccataataatatatatcctaccctggtaaatctatctaacctaaactagtctaatctagatcatatctattctaatatgttctaatctagtgtgagttacttaatgctggtacaaaggaaaaggccatacccataattcacttaagcctaaatttggtgacttagatcaactcggtcatatacaaccacttgacctatatactaggttacataacctatcccacccatctagaagcagacgaccaaacccgattctgactaatctcattaaactcatagccatctactaaactagctgctctacctacgtgttacatacaaatctatcttaacctcttgtcccaaaacccggatggagacactaaagagcaagaaggaagagatcaacctcatcaaggaagaagagaagtcaaactcaatcttcacatgcattaccacccaacacgaatgttcttcctcaccataaacttccttacccctggctattcttgccctaacctatccatctcttatatcctaca

SEQ ID NO: 48795 - DNA, 462 bp, Zea Mays
tggccagtctcaagatgtctccatttgaagctttatatggcaggaagtgtagaacccctctatattgggatcggactggtgaaagacagatctttgggcctgaaattattcaagaggtagaagaacaagtccgtatgatccgggagaacttgaggatagcacagactcgacagaagagctatgctgataatcaaagaagaccactggagtttgaagagggtgaccacgtgtacttaaaggtatcacaattcgtggaatgaggagacttagagttaaaggcaagctatcccctcgctttattggacccttcaaaatccttaagcgagttggggagatggcctaccagcttgagtacctgatcatctgtctaatgtacatgatgtattccacgtacctcaactcaagaagtgtctctgtgtcccggaagaacagttgccaatggaagaacttagtgtgcaaaga

SEQ ID NO: 48796 - DNA, 610 bp, Zea Mays
cgagattatgattgaccagacggaattgagcttgtggtgttttgatatagcagctatcttgttgagctggtaagtcaaattgttgtatgatcagatgggtacgttcaacattttcttgcggtggcaagaaacgccaatgcattagattggagttctacacctagtggaaacggtgtgtgttaggcgtgttaggatctgttgaaatttcgaaggaaaacagggcgtgttaggatctgttgaaatttcgaaggaaaacaggacaacatggttagtttctttgcttcagaggagaaaatggaataaggatcttttattcttgtcaatgatatatgaattacctccattaggaacatgaacataccgactgacaagcggaaatgggcggccacgacttcctacctccgttattggctttcattgtgcgagagaggttcgctggtagtttatttaaatcttgtatatccgccagctagatctctcgaactagtaattggagtgcttttatttcaggttaaaatctaattctcggtgaaaacaatcaataatgttaccaaacacttcagcggcggttgaaggaatcggtcttttacacttcgatcgcacaatcctg

SEQ ID NO: 48797 - DNA, 616 bp, Zea Mays
caaaactcttcatagtagtcttcatcttgtgtccttgttctgggtagtgatgtggttcatgtattctgtgcatagatacgtgattcataaatgaaagcatagatacatgattcatcatcccacttttgtgatgtggttcatgcattctgtgcattatatccctacaatatactactctttaaatatctctcactattttattacaacattcactcccaccgaaatactcttatatgcatgatattatatacatggtagttcatgtttttccccacccactggaatactcagtctgcaccgaaatactcttatatgcaatgtcaatccatattgcaaccaccagttttatagtttgataagatattggaggcaaacaaatcattttgtcgtaaaaaataggatgttaatcaattgttcatatgtaagaaatgacaagatgtcgttcctattatgatcgtttgtaacccgggatcaccccctgtgacgagtaagccaacctccatatcatcacggtagtgtattgtaacccactggggattccacctctgcttctttaacttcgacgtcgaccgtaatcaccaattagttaagtctgaatttcctcagggtcgcacac

SEQ ID NO: 48798 - DNA, 278 bp, Zea Mays
accccgccccatccgtgcgcaaaaaatcgacacaagctgacaataccaagagctgattacacaagctgactgcttcctctgtagcagcaaggtttataagttgctaccgcaacctttggctggccgatatggtacattatatttgcgctgcggtacgaggcccatctatcaattaaattccataaaggcccatctaggaaaaaccctagagacttcatccccgcaggtagtcacgcggcggctctcctccccgcaggcagtcgcgtggcggcctcatc

SEQ ID NO: 48799 - DNA, 372 bp, Zea Mays
tcctgatgcctaccatgcataaagtgtatcatgatgatgaaggtgttcaatttgttgacaaaggttcattctcgtgtgagagagtaggggtgagtggaagtttagaagtgagcacatgtggatatcgatctatataagtgttcggccatggctttagcttatctattcctttctatcctttaaacttcaatctttaatttttttgagagaaacttcaagctttaattagctagaggcacaagtaatataggactagctagttaaatttcgtccttgctgttgtacgatcagtgatcattcaatttactttccacatggctgtctggaacaaagcaaattaaatgctgcccctatttccatgcacagttggtg

SEQ ID NO: 48800 - DNA, 547 bp, Zea Mays
cgaaaccagtcgatggtggagatggctaggtgtatgctgaaaagcaaaggaatgccacagaagtattggggagaagcagtcacaacagcagtgtatctgctaaatagatctccaacaaaaagtgtccaaggtaaaacaccttacgaagcttggcatggcacaaaaccccgagttgatcacctaagaacttttggctgtattgctcatgtgaagaaggtaggacctaggatcagcaaactgacagacagatccacaaggatggtaatgttgggatatgaaccaggaacaaaaggttactgactagttgatccagtttcagaacaagtgcatattagtcgagatgtaatatttgaagaggatggtgtttggaattggagcagtgatgacagcagactacctactgaaacttcgacagaaatgttcagagtcgattttcagaacactgtagaaaatcctgaaatgcaacagccagccatatcaggtgaatgtagtgaaaattcagggggtgtagacctgccaccatcacctccattgccttcagggggtg

SEQ ID NO: 48801 - DNA, 403 bp, Zea Mays
ttttcgagcttcgtgatatacacaagtggttgttgcatgtctgaagagaagaagatgtctgaggagaagaaagttgtggacccttttcttgctgggttttacgaatctatggcaaaaacaaatacagagaagatcacaaaggaaataatggcggatttgtctgaagattctgacgatagcgatgactatgatgtggaaagtggggatgaagattctgaagaccgaccctggcggccaagccataccatcttcggaaagtcgaccattaaacaaagtcaaattgatgccatgaagggaagatacttccgtgacatgtctattgtgagggttggaggggacagcaccgcccctgctcctgaagaaaatgaggttgttgtctacagaagctttatgaaggtgggtc

SEQ ID NO: 48802 - DNA, 971 bp, Zea Mays
gccaggtgtgaccccctgttctgcgcaccgtggatagcccagcgcgtagacgcggacggtccgggacacaactggacaatccgagcaggtcaagcggacggtctggcagcacctaagagcagcgacgaccacataccttcaaatctcgatgaccaaaaataggtacgtgaaagagatacacgtttaaggcatctggtcgactggtcagagccggcccgacctttgatcatttattatctaaataggtgaaaaagaagactgagccatgtgaccggctagcaaagcgaccttgctcacctacccaaaggtaagatccattgggtcatctcactaatcagaggagtcagcacatcacgatattcattcaagacccattgtacctacatggacacctccacctccatacccacttgtgtcatatcagtatgcatacctaccatcaccttatatcccaaatcaaatgttgggcatgccaccatattcatatgtgatgccacagtgccccgcttgggggcaccccaaacttctgtatttgataggttggcaccaccagtgcaagatcgattgagtgcacgtcaatctggtcaccaggcgtaggtccagcaagattgtcggacttctcggccacaaaggccaaccaatccagtagggggcatagagagtaaatgtctacatgcaccaaaagaacgacaaaaggagacatcataaaaataggcacaatagatgtcgtcatacagaggaataatgaagggtccatcaagactgacacagtctcaaaagcgcaaattgcaacgcctgagagcaagaaaaagaggtggaaaaatatttaatgatacacatccgcagtactcaccaccacaaaagaggtggagactaaaggccatcgaatcaaatcaaacggccacaaaaacagaggacaaaacaatagctacacaactgcacttagtgaaggatgtacaggattatgttcc

SEQ ID NO: 48803 - DNA, 1064 bp, Zea Mays
atcagtctggcgtgcagttcaacgctgtagtacttacggcaaatccaaagtatgaaaactacttggacaatttgtcgcactggaaagagcatagttcaaacgtttgtatagagaagacaagcttttgctatctgtttttactcggtttgtgaacagtagagacaacatcttgtcaggtgtgcgaagaccggtgaagattttcatctagctacggagtagtagacaaatcctaaagctgacgaaccctaggtccaacaagaaggcagtgggggaacaaacgacaaccgacataacttgtattatttggttaaaaggaaacttaagagtccgttggtttggttcagctttttgaatcaaattcgctgccataaatctaaatctcaatcaaccgggtataatggcataatagatttataaaaatctacatatttctctatttcaatcaagaatcacctcttaccccagatttttctagatttttgtgaggtatgttacaaaatatcaatgctcttataaaatccacagttcacagttatttcaaccaaacatattttagattcctcgtaaccgtcaactaggagcaagcagcagcttcttatagcttacagctaaaatcagatttccagtaatccacgttgaaccaaacagacccaaaaccacaattcaatcatcagttcacaactgcgtacccgttttcgggaggaacaggaggagaaaaaaaaacaaaacgcaatattgatgaaagcactagatctactacgacatagcgctcctgaaatccgtcgtctggactctgtagagacaatggctgtggcattagaggacacaatgaccgctaactgtactacagaaaagagcaatccaacagccaacttgaaaatatgacaatgtactacagtaagggccagctcaacttgaaggtcctatagcaaggtggtatggtatctccgtgaagctgctgctaaaatgcatttttttcaattatcttttgttttccttctatactacagttgggctccgctccgcagctgaccgtgaacggctcagctcaacaacaagctctc

SEQ ID NO: 48804 - DNA, 318 bp, Zea Mays
gtaacacttctctaatgaatccgaccacgaccaagcgagctagctctgcacggatggcttctctcttgtcgggcgtgaaacgatgtaatttttgtcggatcggcctcgcctgggggtagaccttcagtttgtgctcggccagttctctcgggactcccggcatatccgcaggctgccatgcgaatacgtctcggttatcttgcagaaactggatgagcgtgccttcctatttgtcatccaggctggaaatgatgatggcagtcttgtactcatcggcgaacccaaggttgattctcttagtttcttcagtcgaccgct

SEQ ID NO: 48805 - DNA, 482 bp, Zea Mays
tctaacggaagaaggacgacacaaattgtcaccgctatgggaagggccattcatggtatcggaagccactcggccaggatcatatcgacttactcaaatggatggcacagaagtggggaattcatggaatatagagcatctcaagaagttttatccttagcaagacttcaaaagctatcggagcaatgttgtactctgtaattggaaaatacgtcatcgataaaagatttcattctcaaaggcattcaaactattggttatcaattgacttcgatttgattatacttggaatcaacacacttactcgacttagggtgacctctataccgtactaacagagaaatcagcttaagtcggcaatgacttaagacggtgcaacatgctcgcgcttactcgacttagggtgaccactataccctactaacggagcaatcggcttaagtcggcaatgacctaagatggtagaacatgctcgcgcttac

SEQ ID NO: 48806 - DNA, 1085 bp, Zea Mays
ggacggtgcagattagatcggtataatcccgaaccggtacgcagcgtggggcatcagattaagatcctacggctagggttttatgaagatgtgatctaatcctgcgcgttcatctgcaaatcaacggccaccgatcaaccatcgccagatccgatcggagccataaatccaagatccaacggcgcgcgcacgctcttcctcctccgacaaccagcgaaggtggagcagaggcccgcggcggagctcaccggcgagcatggccgaacggcaccaaagcacccatatcaccaacaaaaacggctacacgatgcggacgtcctagtgaacagtactagttcgacataccaggatttagggcacggacgaagcctgcccacggagacgcgtgacccgcggcggccatggagctgcggcaagcaatcccgggccaacagtggacttccacccgattaaccccccaagcaaccttgccagggccctgaacgtcgcggtgccggccttcggggaggtcgattcccaccaccggcgaggatccgcagcggcgaccggcttctagtttctctcactggtcctctcgctctccgcgctctgacgtcctctgcgctccatggatgatggggcaaggtagggccgacggaagtgtttttataccccaagaacggatagagtccgagcgcggatcaaggaatcggatctgcagccccgcggtgaattcgttgttttagttacggagctcgtgtgcgcaatctgttggagcttgcggccggggaagatgacaagtagggcccacccgccatactcagcgaattctcacggagcgaacgagcaatggcctgccagcagggccagtctgtcagcgcaaggagcatcagcgcgcggtggggcttggtgggctgcgtggatgggaagctgactgggccgagaagtgtggcggccggcccaatttggtttggttccttttattcttttctttttatcctctattttcttttctatatttccaagttcaatttgaattcgaatttgaattcaaacttgtgcctattttattctcaattcatgttgtggaatttagaataccaact

SEQ ID NO: 48807 - DNA, 288 bp, Zea Mays
atagaggacgtggcgaaggggatgaggacggcgtagaaaattcaggtgctgattatgctgctgacaccgaagttgaggatcgaggccagcgacgtctacgtcgtaaccgtcaaggtatgggtggacagcgtcgacatgaggtacataacaatgacattgctatcagtaataaaaaatttaagataccctcttttgatggtaaatatgatccggatgcttatcttacttgggagatggatgttgaacaaaagtttacttgtcatgattttcctaaaaatgcatgtgtta

SEQ ID NO: 48808 - DNA, 579 bp, Zea Mays
aatttacttacaaatcagaaatttccctctttcattgaatcaggtgcaccgagagttaggttttggatgaggagatacataacctgtggtcactaaaaacaccaacaaaacgttcataaagcctttgagatgcactgcgcgtagtgagcaggcacagcatgatcttctgcagttcagcaaccaactcaatggaagtcacacttccatattctgaagctatatgcgctagagatcagatgcaagtgagtagccaatgccgttttctggtaataccattttagcaagttaatccaaacatgatacatagaaacgagcactgaagcttaaccgccaggagcgacctttttcgtcctagtactagaaaataaagatcgcgcggtgttagccgtcatgctccctgtagattggtttaattggtgtccctctcgtaccaaccgattccatcctagcgacatcatatcggtagggagcggaagaggacggcgtgggtaccgaccaatcaagagaggagagaacgacacgttgattccccgatagcatcctccctgtccggatgagcgcgccggtgcgatctccccg

SEQ ID NO: 48809 - DNA, 658 bp, Zea Mays
gtggcagatggtatccttacctgaagtttcaggatcgagttccaacactgatgaacctccaaagttgaatacaatggtgctatctcaagctgcagttgcagggatgtctactcctcgcactatgcgctttgtgggccatgttgatgggatagatgttctagccttactgggttctggcagctctcatacatttctcagctcaatggttgcagctcattcaagtggctaatggtactcaactttcttgtgattcggaagtggtaaatgcagtatggtctattggaggaaggccatttacctctactctgaaggtgttgccgttatctacttatgatctcataattggtatggactggctggaagctcatagtccaatgttggttaattggtcccataagtggctaactattcccttccagaataatataattactcttcatggtattgcttcttcagtcatgaccaactcagtggtgcaagtgtgcaacttgctggaattgtctgagaagaaacacaatattctctcccaactaccagatgcaattcaggctctagtccaacagttctcttcagtctttgagattcctaaaggcatgcctcctgtgcaggattgtgaccatcagattccattgttgccaagagccaggcctatccaaat

SEQ ID NO: 48810 - DNA, 589 bp, Zea Mays
gtaaaatgaccatcatggtttagcgctcacaaggacattcactggttgcattgtgctttgaggcacataggaaaatgtgtgtgtttatattggtagtaaagtgcacggcatcaggccaatgctgccaagcaaagatttttatatgcagagatgtatagtccagctcgtttttatcactgcccatggtttacccaattactcataccgttctgaaattgggtatcgatttatgcaacatttttaggtattatatttttgagatagaactattaacaataatcaattatttgtgatgtaagttgccagcgggacaaacttttctcctcatgttatataccaacttgttctataaagcgtaatgtcgttctcttaattgttcagcaaaaaagaagctttggaatagaacatacaacgccaagaatttattttatttggggaaatcatctgattcctaagctttcgacaaagcaaatggagataactgtttggcaagagcaaataaataccaatatccgtctgggactagtcttcaacaacagataatactgctcccatacgaaggagtcatcatgactagggagaatgcaac

SEQ ID NO: 48811 - DNA, 610 bp, Zea Mays
gtttttcttgcaaaagttgctcaaatgatagcaaaaatactttgtgagcaactcaattgatatagaatcaagcacaagcaagagaactaagagagaggggacatgaaaaacaaatcacaataagaaatcaacacaaagaacactggctttttgtttcccatggttcgacccaaaagacctacgccccaattgaggagtccattaagtacgagtcttttttaactctttccctctctcaaattgtcacttagaccggatgagttttcttctcttttcaaaggccaccaagtccccgcaaggacctccacataaagattggagtctcttgctagctctttacaatttagaatgagaataaaggtgagaaataaactcaagaacataagaatcaaatgcaacaagctaaaatgaatcaccccacaaggcactctaagatttctagttcaatcacgttgaatgtggcacttgggaggagttgaatgtgttggatatgttgcaagaaattaatgagagtttggtgaagctcttgtgtgtcttgaatgctaattgaggggtatttatagccccaaccaccaaatatggccgttgaaaaagttgaccaaaactgcac

SEQ ID NO: 48812 - DNA, 1370 bp, Zea Mays
tttctataatttactaggaattccctaagtccagaagaaaaagaaaaaggaaaagatgctacaggattgggctgaatctggcccgagtcggcccattcactggcgaaaaatcgcccgcgcgcgcccgcactgccgatcttgcgaaaagatccttgtcgttttaaataacttgaacagcgtccaacgagctattccctgtgtcactgacaccttacaaaaatccccatccagttctgtttcttctctaacccgacccctagaccacgacacgctcaccgtcgaccatcccgttgctcggaccggccaagaacagcggcggctacccaaacaagttgctgggtaagcattaccgacctgaggcgaccctagaacaagctctaatttgattaatccggaccaggatgtgcctgaccacggtcgtagcagacaccgaacaccaatcaagatgttcggttgattaggtgaagtcaagctcaatgggctgagcagatgacgatcacaaacacgtgtgggtgctaaaacacggacaaaaagagtgagggcggacctggaagcagctagccatgatgaagtggttcaaggcggcgcagtcgaccaaattgggggaagaaggaaattctccggctatggtggctaattgaaggcgggaatgggtgctttggcttcgtgataacatggcgcaacaaacctggccatcaatttataggagcgctaagcggtggtgtcaaattttgcaaggggagaccggcgaccgaaaggagaggtgagtcaccggcgtaaactatcgtggcgctccccggggtaatgcctccggtgacgaactgacctcctacgaatatctactgtgacatggtagatcttctaagcacgtcgcgcggctacaatcaccggcgaactccgacgaggacaccattgtccactgcaaggcaagtgtcacggtgaacagtccggcaataagtctctctcccttccctgatttgagatctttccttgcccacggttatccgcaagtcacggcgcacggatcgcgatgattgacgtcaatcgcggcggagggtcaccggcggtgagatgcgctgtatctgagatatttctgctactgtaccatgggattgctcatcagaacaattgacagagcataacttgggcagattttcttcaatttctatgtggcaacttgccaatctctctgtaagaaaattctagcccttcaatccagctacaatcttgttatgggaaccatgctcaaacactcactagatcatggttggatcctggctcaaagattgcccaatctcactgttagtctgaattcagaccaagggcagtctgacagcccgactttgggctcatttaactccaaacttttc

SEQ ID NO: 48813 - DNA, 386 bp, Zea Mays
aagcctattttcatcaatgcaggcacgagcatcgaccttagcctgatttgataatatcccataagagagaaactgattgggttgcccaggcttataatgaaattgatagcaatagtagtcttgcattgtcatatggactcttgaatttgcctgtctattttgtatcccgctatacataacaccaatttggaaacctcgttctccatatggaaataggagtggatattgaagggccatataagccggatgtaacgctgaaatacgtttcaattcagaatttctggtttctatgataatgtcccgtttgaaggtttcgagggagaaatcaccgataagaagcatggctaaatcatcagttgttggcatgtcatattgcacaggatctc

SEQ ID NO: 48814 - DNA, 593 bp, Zea Mays
ctaggaaacaagaggtgtgacttgtaacaggctggtgggctaagcccaaaagaaatttgcctccatctacatatttacacaaagaaaaaacatgaatgacaagttgtggaccatggtggttggacaaggccagaggaggcacgacactatcggccgctaatgcacgagtctgcgcggttgggagctagatgtggcatggagtggtcaaagaccatatgtgggcctaagacgaccaaacataggtcatggcatgggccagcgcggtccaaagcgaccaaaggtggcatgacgcgaccgatgttggttaggggcgaataggcacatgccatggtgcaaccaacacgactggcatgggccaaagacgttcaggtgtagctcgaggtgtcatggagtgactggtgactaggcacagagtagtgcgagtgtgtgactgggagcggtcgaaggccatggcatgggttatcgggcgtgaacagtgaggtgagtagtgaaagttgtctagaggggggtgaataggcgaaacctaaaatttataacctaaaacacaaacttcaaccctagttttattagaacaagaataagaacactcgaag

SEQ ID NO: 48815 - DNA, 999 bp, Zea Mays
ataacctagggtagtgacaatatggaagcaagccttgagcccttgaggatcctagatggtctatctatgtcgttttgcatgccttcctggcatgcaacaaacatctgctacttggagtctgtgggaggagaatggtcttcacaaacaccggttatcgggagtagatgccatcagcgaggtggtatccttgttgtaattatgcccattcatcataaaattcacatttggtgcttctcccttgagcacgtcagtgaataacaacaattggttcagcatgttaacgtcgttgtttgaccctaccaaaaaacatgtcaaatccataagtcacacgaggcaactgtctcgagtatgatggtcagagatcaaatgtcaccactagtaaacttatcttttaatccaacacaccactaataaacttatcttttaatcaaatgtcaccactagtaaacttatcttttaatcgggttggccactgcctccctgttggacatgtcaggtcgggtttatttgggttgggttagattttttggctttgggctgggttttttcgggtggatcgtgttttgggtcaaaaatctaggctcgtacctggtacgtagattattgcgggtcaaaactatggcatgtatccagttcatggattattatgggtaaaaaaaactatggctcatactctcttgttgcattggtcgtgttgggtcgggttttttgtcgggtcggatcaagttggtcgggtcgagtagcccatgcttaggtctactcccaatcataccagaaaatcatctatcctccccttcgctaaaacacacctaaagtcgtcaaaggcgagacaacgactgtactcctcaccaaaacataaaatgacacccctacaaaaaaaaattaagtcactctaagactgagcttttcaccattttgatatactcgtcgctggagtcagcaacgctatcgtaagcaagcatgcgcaggaagtggctcatttttggtaaagagagaaac

SEQ ID NO: 48816 - DNA, 382 bp, Zea Mays
gcgctatccctgctgcacccttaggcgacttctgcacgaatagtcttcgcggaagactacgattttttcgcacttgttgtgctagtccggctgcacccttaggcgacttttgcacggattgtcgcacgcgagggtagctagcgctgggcctcgcggtgactttgtattggtcgaatgtcaaagaccgtcggcgcggtcttttttcgacgtagatttttgcgggggatttttcacttgtatattacatgactccgcctcgttaaaaacctcaccccccgagaggaaaagagtgcgggccggaataaaattgtttttgcaaactacaagggcgaatcggccctgatgagtcaaacaaaaaatttgcggagattgtcgatgttcc

SEQ ID NO: 48817 - DNA, 834 bp, Zea Mays
cattactcggtttagccttcgtttcggttgggtgccaaaggcgacagtcatcagttggttctctttcttcgtattattgccaagaatctcgttgcacatagtttcgatcatctctagccattcagtgcacggtttcttgaattgcttctcaaatttaaagcgataggggagccggactagttcatatttctttccccttctttcttcttcaacatcccccaaccgctagaggtcggaaaagttttgtttgccaagttctcttgtactaaatccctggtgctgatttcggcagccaccactctgaattcaacctcggccagctggcatgtggagccaagttgcatatggaacaacaaccttgtcattccgaatcttaatcacatagggctcataaccatggtcatcaatttctccctcttcttctcatcagccttcacgtagaaccactcatttgtccaccctgttggccacttgagccgatcaccggggctctggtgtccttttggtacacgaagttatagcacccaaagtttttgtgaaggccatccgccctagccttcatctgatagtgcaattcgtgcactcggcagaaaccttcggcattagcactgatgccttggcttcggagagcccatatgtaaacacttaacctagcaatgacatttggcgttagctgatgaaggtatatttcaaacttcttcaaaacctctcctatgatgtcatatagagggaaccgaagccttctctgaagaagcttttaaagacaacaacttcatcctccttcggctccggaatcacctcctcgccagcaagacgaataagcttactctcagc

SEQ ID NO: 48818 - DNA, 749 bp, Zea Mays
cagacatgttcgtctgggcattcaccatctgggcaactaatgtcatagatgttgacgtagatggtcccaccgggcgtgccagaatgtgttgctgcccgaaacccaccagcgagagacgaccgatgacacgatgagctgggaggctcctgggactatttttgggtcccagtccctcagaaaaatggtctggattctggcgtacggccgggcttcaaggtttgcctggcatgccacctgatctatactcgatctggaaggtgtcgatgtgctccgaaaaggttccctgcatacacagacacatgcaaacatcagtctgagccgtgttcggctccgtaggtcatatcgactgtaaagagccaatcgctctccccgtgctcgcatcggatccgtgcctcaataacacatagagtcgatggctctcaagaaagtgttccatccataccgagtaggccagacccactaaggctaatgcttcaccacatgaccagagcatcctacatgcaactgggacttgcgatcatgatgagtgcctgaacgttggttagattcagaggcctaagaaccggcgcaagccgaccactagagcaatccctgccccaaaccgatgaaggttcgaagttgttcccaaggggcatgcagagctacgattcaatcgtctaatcaacggcggcataaatttagcttacttcgaagctatctctacaatgaagtgttcctttgtattgtgtgaaaagaagggaaggtgtttc

SEQ ID NO: 48819 - DNA, 1267 bp, Zea Mays
gcgttattggatgctgggaacaagagctggagtgcatacttgagttgttcacctccaggagcgataaagagaatccctgcccctgctccttgcagtcccagcgagccatcaaagtacatcctccatatttcagtgacttctaggctgtccgagacctggtgttcaatccactctgatatgaagtcgaccagtgcctgagtttttattgctgtgcgggatcgaaactctatcatgagctccgagctcgcatgcccacttgatcgttctcccaacagcttccttgttgtggaggatatcgcctattggaaatcctgtgactactatgactttgtgttcatcaaactagtgccggaccttgagagcagttagaagtacaacatacaatagcttctgaacttgagggtaccttatctttgagggtccgaggacttcgctgatgaagtaaaccgaatgctgcaatgggtatgcatgccctttcttctgcccgctcgactactaacgtggtgcttaccatgtgactcgtgcaggaaatatataacatcaaatgttctgccggctgaccggacgtagctcggcgtggtggcttgagtactggcagagtggttaagaacgtcttcagcgcatctagagcctcctgtgcttctatggtccactaaaatttgtccactttgttgagcaatttatagaatggcattcctttctcgccaagccttgatatgaatctgcttagcgctgccatgaatccagtgagcctttgtacctttttatgtgaccgtggcggttccatcctcataatggcctcaatcttctctggatttgcttctattccctgatgactgacaataaacctgagtagcttttcgactggtactccgaatgcacatttttctagatttagcttccaccggcagcgtcttaagctgttgaagacttgttgcagatccttaatgaagttttctgtcttgataaccacatcatcaacataagcctccactcgcttgccccagtgatcggctaggcatgtctggatggccctttggtaagttgctcaacgttcttgaggccaaacgacatggcggtatagcaaaaggatccaaatggtgtgatgaacgcagtcttctcctcgtcttcctttgccagactaatctgatgatacccggagtagcagtctaggaagaagagcatagagcagtcgagggtcaaatcaactacctgatctatcctaggaagtctgaagggatccttcgggcagtgcttattgagatcg

SEQ ID NO: 48820 - DNA, 543 bp, Zea Mays
aaacgatgcagtctacaatacaaaacaatattttgcacaactatatgcatgatctaatggagatagaccgtctttccgtcaaataaaagagacaccaacgtctcttatccgtgtgtcctatgttagcttttaggatctaattgtgtccatctacttagtaatatgagacataatcaaatagagagcttatctaatccatctcaatatagacacataatcacacagagtaaagtgaggatcaagacataccatgcatcttgcccttgattaagggcaaggttggtgatttgggtagcgtcgtgggaggctcacgtgcatgtgtcttgattcggtggatgaggtgcatcctgtgggggatgaacttggttgtcgctgccaccttgatatccctgtagtggagggttcacgtctggtgtcattggatcgccgtggttctctaacgccatgagttggagctcttccggtcactgcaagcgctagatatccatcaaatcatatgttgtggggctatggtttttgcaggcaagtcacgttggcagccac

SEQ ID NO: 48821 - DNA, 669 bp, Zea Mays
tcccaacaaacatcaaacaaacttttgatctacatcatgtagtatatcttgtccatatctatcttaaccatattccccaactccgatgatatacactaacctcgaatcaatgagaccaagaccggagaaggaaaagatcaaccacgtcaaggaaggagagaagtcaaactcgatcttcagatgcattaccactcaatatagagttcttcctcatcataaactttcttaccccatgttattcttgctctaacctatccatctcttatcccacataataagtggctagatacctatactttcctaatcacccataaaggattattataaaaaggggactcctaaaaattttaaaataatgggaaactaaaagctaatttacataccaatctctctataagcccttttctaactaatctcgaggacgagattatttttaaggggggtagaatttgtaaagcccaaaatttgcatcagaagaaaataaataataaatagtagaagaagaaaagaacatgaatacataacaatgagaagaataaaaaaaaactaataataataacattgtaaacgatataagttatattcacattagtgtgaatttagacacttggaaatttgaagatcaaaacatggatttgaaaagaattgagaaagataattatgataatc

SEQ ID NO: 48822 - DNA, 315 bp, Zea Mays
gggggtgaagtacggcggccttagccgtagctcaatccggtaccggatttttaccaggtcaagcttatctgttgtacacggtgcacgaatcgcaacaagagatcgaccaccggcgacagctcaccggcgacgagcaagccgcgctggcaacctgatccactttggtctactataccatggcgagacctcatcagagcacctgacagatcatgtttaggtcacattttctctaaaatttgcatgtgaacttcatcaaacctctgtaccaaagttgtagagctatagttaatcttaaactttgccacaatgcttacc

SEQ ID NO: 48823 - DNA, 389 bp, Zea Mays
aaactgcaacccttttgacctctttgagatgatcacgaactgtctggccacctggcccagacggttcgcgacaccgacactcagcccacttttcaaaacacgcttttaaaaaagcttttaacttgcaaactcggaagcggtgttagtactcatgcacatgcaacatctataagctctatgaggcactaagtttcatataagaaattgtcattgatccctcttaatagtacgactgtcgagcctgctaacccggtcaattttcttctctaaacaccttgtgaccgacaaaagtaaaatcctacataatacctttgcctttatccgttccataaccaatgtcgaagttttcaagactttcaatcacgctcctgtttatgtggtccaacctg

SEQ ID NO: 48824 - DNA, 789 bp, Zea Mays
gcgccggggagtgggccagctggtaccgtggctttaggccgacggttatggccgcccgccatgcccgtgaggtagagggagtggggctgacggggtgggcctggtcaccagtctcacaggaacgccccagcgtactacgagcgactgcaaagcgggtcccctttgtcaggatcacgagacgtggttgaggcggtcgcattggggtgtcgcggagagtacacgagggactgacctcctggtgtgagaccctgtttggttttggtaattgattgacaacttatatggactaataagtgtttatgttgagatacacaggtgattagtccacaggtacactagtgtgagttattttagccatggtggtgatgtggcttagtgatattgagatgctcaactagtgtgataaaggagctcattgcatatgaagacatgacatggtggcatgttgctatatggagaagatcaagagatatggcttggtttcgatggaccgagtggctagtgtgaagggcaagtcaaaggctcatgtgtgagggaccacgtggcggtgaagcaagagcaaggacttagcaccaatggacataaagcaacggtgaagagcaagctatgttgagattgatgaaccaagaaggttatgtgataacatggagtggatcatatcattatagaattatcaagtcatgtgttgatctgggatattgatcaagtggcttgatgatgatggtggaggaacttcatgctatggacaaatggtaaaaggtatcatggttggctacacttatggatgcc

SEQ ID NO: 48825 - DNA, 688 bp, Zea Mays
ggcggctagccgcggctctcgcccctatataagacgtcgttgccgcgtacgtttcccggtcgaactaccgcaaagccgggggttcctccattgtgtctctgttccgccagtgcagagtaacgcgttcgggtggacaagtcgcaagtcttcgaagcattgctgggcagggagacctccggggtgaaccgcaatcgctcgtcggtgtgtgcatcggcctcacacccgcgcctcgtcgtggatcggtcgctgcacgtcgtctctgtaggtatgagctgcccctacctactcaccatagctcgattgaggttttgatcacgaatagccgaagtttcgtggttaggaatgcggtattgtgtttccccggtgatggtgcgctgtcgcggcacccctgtttcgccgccggagtctggtctgggtgggggaatagttttcggccgttggatatcctttgaatggctgtgatcaagtcaaccataccgctttgtcgaaacatatggtagccgaagatctctgatcgtagggctgggcttgatcaaagacgcggatggttgggggccattgatttctaatcttgcggctcgcaacgcataccggtccggctggcgagtcttctaatctaggccacgggatcagatcagtcggctcatgatcaccgataccctttcggtcgtggtctttttcataagag

SEQ ID NO: 48826 - DNA, 820 bp, Zea Mays
gtggggtgtctcaactttttgacggctttgttagcttacacaattgatgccttcctcaaatttacaaatgctgccactcccatcccattcgtccccaccactgtgcagtccgtgcaggcagggatggagcagtgagcaaatgaaaagagccaatcctttccatgtctcccttatttattcccttagaaagtttgtccagcatccatcactacaacgcaaaggggtgcccacctgggcagtgcaaaggttaggctcacttgttcgcatggacacatgcacggacttcagattattcaaaagcctcgctaatttggtttggatggtcatcaggtttatcactaactagcttttacttctcttctagatacagacagagcagtacttctttgcaatgcagtgctctcaatagctatccgtaaaatgacaactaaacaaaatattggttctaaaaacattcagttatcagttgtgttggtcttgaaagttcagttttgtttggtggtatgtccataatttctatacttatctatgctacttatggatgactatcctgtctagattcagtgacataaacaaaaagatgaagtgggccaataatatcgaattgttcacttaattagttcatgttcttacatttaaagcctcttcaaatttgctacatggatccacatccctacggtctttttcttctctgttgcctaattcatgcatggacttaagtggtacaagtaagaaaaaatgttgtactatagtaattaaaactgaagttcagttcgagcttgaatgaggttggacaggttttaagactccaggaccacag

SEQ ID NO: 48827 - DNA, 1030 bp, Zea Mays
tgtaagggtaataagtttgctatagggattaagccttggtcccatgaaaaatttggagttaaatgagcccaaagtcgagctgtcagactgccctaagtctgaattcagactgacaatgggattggatgaacttagggctcaattctaagcaagatcccgtgactttttgtgggtgcacaatgtagcaaagttggagctggtctattaggctacaactttgctgcagagcattgatctagttaccatataaaatcgggaggaaagttcgccccaaacatggtctgatagactgactgaagaagaatctgatggtaaagtgaccagaacaatctattggttcagtgaactgtccgccggcgaccccgcgcgtggattcatgccggtgaggtgattcatgctcaccggcgcctggataatgttccgcggtgaaaagatcttctcccccctggatgagcttaaggcactgtttgttcggccgtcgtgtccaccctaccccatcgccttgaatcaaccctcgccagagttagaaacctcacggtcttgtgccacgtgccttagcactttaaccatgccgccgtgactcatactgaactatccagagatcaccgttgaggttgccatggttacagccactaatctcgtgcgccggtgactcctttcttctccgaccgccagcgcgccaatccaaaattggaggccaccgctcaagcacactataaattgagcgcaccgcgggtccgtagggtagtcatgcaccaagccaccatgccgtgcctccaattgttcaccagagctcgccaattccgaatttcccccaattctgctttgcgccaccgtgaaagagacctcgccgtggctagctcgtctcaggtccgctcataacctctaccctttcatttcagtgttctgatgtgtccttgatgctccccgaccctgccaatcggactaggcccccttagatcaccgagaacgcgttcgattgtccgtggtgcccgctgccaccgtggacagagcgtgttagaactccgtt

SEQ ID NO: 48828 - DNA, 418 bp, Zea Mays
agggagatgatttgaacaaatttaagagctcaggcggtgaggtgtctgattttttagagtccgagaagaagaagaaaagagactactaatgtttaagaatacataataagaaagaaaaaatgattaacaaattgaaggtttgacatgtgtcccgtgccagttgtacagtaggatgtggtggctaatttgggctcgtgggtgggcctggcctttaaagtgcgagttgggccgctagctaactaactttagcttcagcgcatgcgaaaaggtcttcgatgacgagttcatcaaagatggcacgctcaatctgcctcccaacagcgtgaacgtcgtggtgcagcacctccgcccacatgcacctccggacctcatacgccgccatgccttagtatcgtctgcactccattgtcacacccga

SEQ ID NO: 48829 - DNA, 593 bp, Zea Mays
gaaaatgctaaaagaaagcataacgaaatggacatttgcttttaaaaacattgcaagcaatgattataattaataaaaggcacttttttgcaaaaggtttaaatatcttaaaggaacaccgacaacaaaagtacagacctagcctttgaggtaggagacttcatctaccttaggtatcacctatccaagggttaaccaggttcaaagtaaaaggaaagttttcacccagatacattgagcccttcaaaatcttagaacaaaaaggtgaggcagcataccagttggagctattcgaaagtctagttgatgtgcacgatgtgttccacatgtcatgactcaagaagttcttgagagtgcgagaggagcaactacaaatggaacacccatggacgtcaaagaggatctgacatgcacagagcagccagtcaagattctggagactgctaaaagatatacccgaaggaaggtgataaaatgtgtaaggttaggtggagtaaccacacagtacatgagcccacctggtaaagagtcgatgaacttcgatccaactaatctgacatctttgctagcttgacctaaaatctcaggatgag

SEQ ID NO: 48830 - DNA, 699 bp, Zea Mays
aacgaaacatcatttagagaaaaagcaaaaaaatagaagtgcataactataattgtgtgttcttcaaaataaatatgtttgtggcaaaaccctctttctagcaaaacccttgggcaaccaaccttgccttgtttctcactactaacccatcctcactgtgtttgtttttgaaaacccatttgataccaatgggatggcaatttgaaggaggtggcaccaaaacccaaacctgatttctctcaaagtttccaagcttctcatgcataacattgacctagttaggatcagataaagcatgtccaacatcccagggctcaaaagaggcaacaaaagctaagtgagcaaaatgagaaatctgttgtgacctagagcgagtgacttgctcgtgaagctccccggtcatctactgaggagggtgacaacgctaaatgtgttgtggagcctctatcgcggaagtggccaccccctcaacaacagcctgaccacctcgaagctcagcaggctcaggctcgactggaccccaagtcatagaagacatgatgtctggtccatcagtcgaagtagtgtaagcagagtcaactagggaagcccatggagtcggctcaagatcaccccaatcggtgtcgtcgtgctcctcctccacaaagatggtctatcccatctaatctggatctgcaggctcaaaggaaggggatggac

SEQ ID NO: 48831 - DNA, 590 bp, Zea Mays
ctttgctatagggattaagccttggtcacatgaaaaaattggagtaaaatgagcccaaagatgggctgccacactgccctaagtctgaatttagactaagagtgtgtttgagcaatctttgagctgggcttcaggcatgatctagtcattgtttggctatcattgctatagcaagaatgtagctggatagtagaacaacaactttgttaaagatatattagcaagttaccacatgagaatttgagatccgagccctacaaaatggtctgtcagacactctaatggtaaccaccatggtacagtgactgaacaagatcactagttcagcccccctgtcaccggtgactgttgcaccgtgatttgcgccgtcgtcgtgattcgtgcgccgtgacttgcggataacggtgggcgggtaaagatcttggcgcctggatcgactcgggctcggtcacagctaagctccacatacccacttgctcgtcgatcggtcgagatagacctcgccgccgttggccgacttaccactgtgcgcacgtgctaaagcactgaaccacgtcgcagtgaatctagccatgcattcccggtgatcc

SEQ ID NO: 48832 - DNA, 286 bp, Zea Mays
aatatttctgggattgtaacatgttcccttcaaacggtaccaactttaaatcgacttgacttactctctcatccttggaccctagaacaaaattaggcaaatgattaaatatgcacaataaaccaaatcaaactacattagaaatcaatgtgaggcaataacacatgaatagatggtcaattcacatttcaaatttacctatcctattgaatttagtaaatttacaaatgcctaaatcatataattggaaataattcaagagcagggcgtccatcgacaccctttg

SEQ ID NO: 48833 - DNA, 480 bp, Zea Mays
ggaatttctagcacgcttcacatgagtggactacacggtttgctgcgcacatgatggctggccagtagaacccttggcacaagaccttggcatcaagggctctagggcccgagtgagaacaacagatgcatttgtggccctcttggagaagtttgatgtcttcaacctctttaatgcacttgagcaagggttggttgagtccctttctatatagctacacgtgtattattgtgaactaacgactttagtgttttaaccttttggccttgacttaatcgatggggtggtagtgaccctgcaggtacaaagttatgggtgctctccaatcttcggtcatgattaagttaatgattctttggcctttgagatcttctgtgattttcagaccttcggggtttcttaccacgggtgtgcctatcgtatgaaagaatacatccgagggcatgggatcaccctttgttgttgcctttgctagcatgt

SEQ ID NO: 48834 - DNA, 471 bp, Zea Mays
gcttccaaaaccattctaggcccaaaactgaggcgcggcccagtactgttccccttacgcacgacccacttttctctcagcacagcccaagtgaatgggtcggcatcgacacccttggcccacttgtcggtctccccacgctcgcgaaacagacgacgtgcacgctgatctgaggaaacactaacaaaccgggcccacacgtcggtcactcaagtgcgcgcacaagtttcaaccgctggcgcgtggggctcgtccgtcggatgggtcatccccttcacgggaccggtgtcaaccgaacacgacaatggcgggcgctttgcaggggggagggggtcatttgggtggtgctgagggataaagcttgaacccgtggtcgtcgtgcccttcctcctccatcgtgtgcccgtaatctttccccaacaacatcagctgaacaccggtcttcaccatcgagtgggtccgccggaccgc

SEQ ID NO: 48835 - DNA, 540 bp, Zea Mays
ctcacgcatacataaccaggggtgattactatacccttctaatggagcaatcagtttaagtcggaaaccccttaagtcggtgcgacatgctcacgcatacataaccatgggtgattactataccctactaacagagcaatcagcttaagtcggaaatgccttaaatcggtgcacatgctcatgcatacataaccaggggtgattactatgccctactaacagaacaatcagcttaagtcggaaacgccttaagtcggtgcagcatgctcatgcatacacgactaagggtgatttctacacccaaccagcgtagcaatagcttaagtcagaaacaccttaagccgaggcgacgtgatcaattataaaaatgacacttcaatgaaaaaggtttctctattgagcaaatcaatgtttattttcactacacaattactgtgcaggagcatcctcgcaaggaaccttatcaataggactgtcagaggaagaaggtttactcgtattaaccgatgcagcaagcacgtcagccgcaatgtcatcaag

SEQ ID NO: 48836 - DNA, 536 bp, Zea Mays
cgagatttggtgcaagaatatttggctaacaaaaccattccaacatctggtgggtggggaatgccgaacaagaaggatgaagggaaaattttgaacttgttcggttgccataccggttcaagtttcagaacactttcagcggcccctgtgccgaatggttggaaatgatagagacaatgtgcaatgagatccttggaaactatacgaagaaagatgatcaattgatgatagctaccttcggtactcggaaaaaatgaaagctaaaccgggtaatggacgcccttggcttcgagtacctgaactatgaaaggcttgacgaagaagctaggggagcgaagaaaaagaggattgtaagcattttgaaaaggcaagcaatctgatccattgaaaaagacaagcagagggctccctcgaagaaacagaaaatttcagaggatctgaagctttcggctcccaagaagcgaaagtcctcaactctcgcccctatcgaggcgaaggtacaaaattcactagagaagattgctggaacctctttg

SEQ ID NO: 48837 - DNA, 439 bp, Zea Mays
aacagatcttctattctgggcaaggggtacttgttcttgattgtgacctcattcagagctcgataatcaatacacattcttctggtgccatctttcttctccacgaatagaacaggggcggcccaaggcgaggtgcttggccggatgtaacctttctctgacagctcgtcgatctgcttcttaagctcaaccaactctggtccagatactctgtaagctctcttaaagatgggggcggtgccaggaagaagctctatagcaaactcaacttttcgctctggtggcatacctggtaagtcctttgggaacacatctgggaactcggacacaaccttgataatttcaagtggatctgcttcactgctattaacaaccatctgataacaacttcctttctttggctcaggcgagactaactcggtcaccacttcgtttccta

SEQ ID NO: 48838 - DNA, 805 bp, Zea Mays
gattcttgcgtgtatattacatggctctgcctcattaaaaacctcagcccctgtgaggaaaagagtgcgggccggaataatactgtttggttaattacaagggcgtgttagccctgaggattcaaacataaaatttatggagattatcaatattccaggaatgctctaagtcttcgccggatggcgttgtgagcctgtacgcactgggggacgccttcgtcttgacgatgaaaggaccctcccactttggctccagcttgccccgtgactctgtccgagttgtccggacgagtatgaggtccccttcgttgaattctcttgggacgactgtgtggtcgcgccatgcttttgtttgagcttggtactttgttgagggcctgcagggcgaagacacggtctccgtcgatgaggtccttggaagttggttcgtctacgtcggggacggctgagtgcttgtccgcgtgacccatgctttattttcttgcggggtcatggcctccgatccattatagcaggtggaaggaagtgacccagtcgcccggcactcggtcgtgttcagcgcccagactgcttcaggtagcaggtcggcccatttgcccttcttgtcgtcaagaagcattttcttgatggctatgaaaattttgccgttggcgcgctccatgacaccgttagattgtgggtgatatactgaggcaaaggcaagcttggtgccaatggaaaagcagaagtctttgaagtcctggctgtcaaattgtttgccgttgtcaactgtgagctcggacgggactccgaatcgacagacaat

SEQ ID NO: 48839 - DNA, 297 bp, Zea Mays
tagaatggttcggtgaagcgttgtgcgaagcatgatggtcatttgatgtcaccgattgattttgcatagaaaagagattgtctgtgagataagacaaatatatgtcatacatgagtaaaacttccatactcattggagtagaaaatcgaggaggatgtgacagtgcaggtggagcgaacaacgcagctagcggaggtacacccgttgtgacgtgcatgtattgaagaatctccatcataatttgctgcctggcaaagcgagtcacgcgctcggcctcccgattggccctcatcctcg

SEQ ID NO: 48840 - DNA, 311 bp, Zea Mays
caagttctagtggatcgcagaagcacaggaagctcttgaagcattgaaaaagttcttgaccacgccaccagtactgaagccgccacgccgagccacaccaaatcagccggtagaagatctattgttatacatctcctgcacgactcacatggtgagcaccgcgttagtagtcgagcaggcagaagaaggacacacatatccaatacagcatctggtctacttcatcagcgaagttctgggaccctctaaaaaagtatccccaagttcaaaaattactgtacgcggtacttctaaccgctcgcaaactccgc

SEQ ID NO: 48841 - DNA, 788 bp, Zea Mays
caagtgctaaaatagctcatgtggtacacttaatatgcaaaatttcttgcaggacatattgcccacaaatattgattcaactacatctaaaactctatttatttacggaaagggtgcacgaatgataaagctacaatcaattagagaaaaggatatatataaaaaacttagacacacaaacctaaaattgccaaatgaacagccacacgagtagttctctattttgtaaaccaagtctgtttgtgtttcagagaggtgtggtgttcatatttgagtgctcagagagttgtcttccatcttatactcgagcatcgcaagatttgggcggggctggcgcgtataatgggaagtacacgagcatcgcaagatccgggcggggctggcgcgtagaatgggaagaatgagatggcggggtggtcctgcacttgcgatgggatgcgggccgatggtggtcctgtgcactggatagcgacgaggggattggattgcgattccttccatggcgacaaggcatggatttcgtttggggtgcagaggatatgggtggggcatccgcggtgcatgggaagaatgattgggcagggtggtcctacgcgtgcgggtcgtcggcgatgggatacctgcgtgctggattgctaagaggcgtggatagcggcgaggggatgtgtttccttgtgtggcagtgacatgatttttccttccatggccgattgtggctaggaccatgcagatgcagggatagtgggggagggcgtgcacggggaagaagggagacactaacatgtggg

SEQ ID NO: 48842 - DNA, 278 bp, Zea Mays
ggtcttccggttgtggactctcctagatgctccacattgtctccactattgagtttctggccaaaacatcgtagacctcgttacctccagagcacaatagtggttacactacaaatatgatcggtatgatcttgcaagacttacaagctccactcgatacaactattttaatgatgtgctcaaatgtcaaggggtaagaggtgtttattcctcacttctaatcactacataaaacctagagcaagcgttaatgatagcagtctaactaactatgacac

SEQ ID NO: 48843 - DNA, 1135 bp, Zea Mays
caatgtcggtggcaacgattaggtcgttgagccactgcttgagggcagcaacgtcaggtacggtgacatgacgaggaggggtggtggctgcccgcaatggagcggcgaccctgagggttgtggccagggggcggcaaaggatctaggctcggattgccatgttagacaaaggaaggtatatgttgtagcaaaagatgatgtcttgcattgaacccttcagcgacttatatagagtatatgacataggagataggcaacccatggatacacatgacagtattgaaacacaatatctagacaaccaaatatactctaacatatatgacagtctactagacacaatatctagactaccaaatacaatctaacagatgcatttaacatcaggttcttaaaatagtaaagtgattcacctatacagtcatcacatctatgttgaagatggagaatctaccaatacgagaattgcatagcaacctagaaacaatcaatcagagctcattctagaattcatgatagaacatttagcatcctgatattgattatgcttgttcgactcagctatgagtagctaatactatccctaacttcttttcaaatttctaggaaaagacagagttcgaagttctaaacatcttgtttttcttcagcacaattcacaaaaattaggcctggttgtgctcaattcctatgcaggttgaatatgaggttcaaaagccttgaggacatgaatatttaggagcaggcctatgtttaactgatataaacactgaaacactatattaaattatttagtaaacaagcgaatgcacatgctgacatcaaccatggtcagggcatctgaccctgtaactgacgtgtggtatccttcagaatagctacactacagattaaccaatactaaaatattgaatgtggtcgtaagttaatttgtggcatacacaacttctatgataaggaggtgattagaactatagaagcttacagaataacttttatcagatgtttacattaaacaaaatgaatcctcgcaattggcagggcagtaaacaatatgattttctttatgtgggcagaaaactgatgtttaaactaatgttcataactgcagagttaacagatatggaaaatccag

SEQ ID NO: 48844 - DNA, 749 bp, Zea Mays
ggaaaggggaactcgcgccaccgcggtcggttctcaccttgaccgccgttccaaccccgaagaccagctcggagaaagcgcagacctcgggggaaaagcacagaggcgcctaagggctctggggtcacctggtgtcacctcaattgctcaccggggtttggattccgccgcaggaccgcctcatcgcgtggtcattccctcccggtgcccgatctgaggtaagaaaccatacaagccgttcgccttgtcctgctccgcgtgttcctcaattcggttgcgagtttggggcactggacgcgccagcacggtactccggtgatggcgctgccgcggggaaagctctgcgctgtcgtctgcgtgtagtcgggtggagacgatggtcttcggaccgtttatctcgcaggaacggtcaggattagattaactgggtaccggttcgtctgatgatcggtgtccgttggatcgaccgtgggtggcacagattggatctggggatacccccttcaacgattgatcctgggtcgttgatcgaaacatccatggcccgggttagattagtggcgtgagagcatctaaaccgtggattcataatctgggggctgttatcgcatacccgttcggatttatggcgttatgatcgtggccgttggttcagatctgacgatccatatccactgataccccttcgacccgtacaaattgctaaagagcccctcggcttgttccgaataaacccaccgtcctccgcc

SEQ ID NO: 48845 - DNA, 331 bp, Zea Mays
gaaaacaacaagaataacaacaacggtggctgctagcacaacctggtggtgttgtagaaaaaattgtggatttataggtggctactaaaacaatagtcccaaggaatagctagtaccacgtcagccacaacaagttgaataaacgttccacaatggtgctgtgctggtagtagtccaaaccgtaatatagacgcgagccgttacacaaatgatatcaccaaatactcaaaacaacaagctaacttataaaattgtgaaacggtggcacacaaactgtctttgttttgttgcacttggaattttatctcccaatattcttactacgattttt

SEQ ID NO: 48846 - DNA, 588 bp, Zea Mays
tcgaggcatgtcaggacaatccacaatcccaatgccaacgatgatagggccattaatgcacagagcagtctgcacggctcacagttcttcgggcatgcaacaaacatcttacagaccaccagccccgagaggtagcggggggagaagctttggcggaggaaggtgtggtaatcagcccaggaaattgttctacctgttctgtggcgaggacaagggacacacaatgaggacgtgtcaagtcacgatccaaaagcaaaaggaaattgcttaactcgaggcatgatagaatcagccgaagcaggtcctgtatactgcttcgtgctactctccatatatcccggaatacgtaggcaatcaatagcatacgacttctgctgcttcagcaagtcactctcaagctttctgggctcagttaccaccacccccaccactggtgcctgccccaagtcatgatcagcagctagaagggcatcttcggcctccgcaacaatgtgacctaaaggagtagtccaaagatcgcacagttaacagtactgtgcccgagtcaaggcatatctactgaagatggcacaatgttttggccaaaag

SEQ ID NO: 48847 - DNA, 344 bp, Zea Mays
gcgtctgtgtgctctgttctgtattgtatcctgactctctgtcttactcgcctttatatctgcacttcaatacttatctgtggtataagctttatctaaagtgcaggacattttgagacaggatcttctattccgttgcaacctactcgaagggtcttctcactccactgcgtactaagtctttgagtagagtaagaatttaagttttaaagtgataagttttattcgcctattcaccccccctctaggcgacatccagatcctgtccccgggtcaaagggaacattcagtaagtcatgttcttatgtagtgatccttgatgcaccataactattcttaactcg

SEQ ID NO: 48848 - DNA, 643 bp, Zea Mays
gtgcgcacatttgcactaggacattcaccttcaaggtgtgttactgctggaacatctgaaaggaagcgtgttgcattctcttcagtaacttgctggtgcaagcgtccccgcttagctgatactgaatcatccaattttctcccccttttcctaggatggggagtatgagtagagtccataccctgcagaggtatctccactctctccggtgcatttgccgcaagaatatgtgacttcgacactcctcttatatcagtaaaggcatttggcatattatttgctaagttttgcaggtgtattattcgttgaacttcaagttcagtttctctagtgcgtgggtcaagcgattggatgctactagcactccattctatttctcggcactatttattagtaaggtacaatcctccccctaatgccgggaaatgctcttcatcgaagatgctatcagcataccgagccgtgaacagatccccagttctaggctctaaatatttgagtatggacagagattcataaccaacatagacccccaacttccggtgaggtcccatagatgtacgctggggcactaccgcagtccacggtccacgccgaccacgcactgcgcaaggcaagtagcctccctcttggatcaatcgtg

SEQ ID NO: 48849 - DNA, 407 bp, Zea Mays
aacaatttctaggttcaatttacttagatcatcacataagttggtggtataggattccatcgttaaacaatgtcaatgtgccttgtgactcaatgtgttggccaccacattagcttttccatggtggtaatgcacttccagatcataattttttatcagttccaatcatctttgttgcctcatgtttagatcagcctaggtgaaggtatacctaaggctcttattgtcggtgtagatgttgttgttgtaatgggctcccataaggtaatgcctccagacctttaaggcatgtgctacagctgctaactctaggtcatgagttggataattttgcttatgaggttggactgctcgtgaaggataagcaataactctgttgtcttgcattagaacacaaccatacctag

SEQ ID NO: 48850 - DNA, 1114 bp, Zea Mays
gtgccgtccatgtgggtgagccggtaggatcccggtcatgtgacttttgcgacaatgaatggtccttcccacggcggtgacatcttgtgtcatccctcccccgttagcacgcgacagaggaccaagtctcctactgcgaaggatcgatgccgcaccgctttgtcgtggtagcacctcagcgtctgctggtatctggctgactgaattaccacatttagtcgttcttcctctagtacatcgatgtccttagcctggttgcttctgcttcggctatgctttcgaacattaatctgggcgctccgaagaccagatctgctggtagcactgcttccgatccatacaccatgaagaatggggtgtttccgtgtaaagctcggcttggctgggttcgcaagctccagactacatatgacagttccctgatccatttccctgtgagcttcgcgctcttgtcgaacaccttttcctgagtgcatcaagtatcatctcgttggctctttccacctgcccattagctcttaggtgtgccactgatgcatacttgatctagatgctcctctgctcgcagaagtcaaagaactccgaactagtgaagttagatcctaggtcggtgatgatgctgttaggtattccaaacctgaaaattatttcctgaatgaactccactgcctttgctgaggtcaaagaagcgattggcttgtattctatccactttgtaaatttgtcgatggcaaccagtatgtgagtatatcctccttgagctttcttgaagggctcgatcatgtctagcccccagcatgcaaacagccaggtcataataatagtctgcaactattgtgcaggtagatgctgctactttgatagaaattggcacgcctcgcacttctagactaactcggctgcatcattcttcgctatcggccagtagaaaccggatctgaaagcctttcccaccagaatctgtgacgctgcatgtacaccacattgcccaacatgaatctcatctaacagctgcctcctagtagctgagtggatgcactccatggggaccccacctgcacctcttctgtatagcaggccccctatgatggtatagtggcccgactgtctcgtg

SEQ ID NO: 48851 - DNA, 649 bp, Zea Mays
catttcacaacaaacaatgtaatagtttacatacacacagcagagggccaccggccacattgcacaaataaatatctaccgcattttgctgccctccctcttaatcgcgagccaggggagggcagcgtcttcgctcactaccgcgatacaagagcgagggcagcatacgcgctacattggctcaaccttcgggataaggcctgcctcacgaaaattaaacaacatcatcttcaactcctcaccctaaaaagatttcatagatccccctccccaatacacgacccagacgacgaggacaacaaatctcgttggccactccgatctacccgtagacgggttcattccatccccatctgatgacgtctaccacttcgtgacatctcgccatcactatgcttcaacaccactcttcgatggcggtgctccacggacctcgccccagccgggggatcagacgcctcgcgcacttccagtagcggcacagcctccgctgcggccacatccaacgcagcaaaataatccaaatcctcgtctggagactcttcagtccacaaaaacaggctcccaaactcccccacatccgatgaccaagacccagtttccgaaccagacatattttcattaacaggcattgcattcgcagccgcca

SEQ ID NO: 48852 - DNA, 580 bp, Zea Mays
gtgttttggtaattaatgacaactgattgtggactaacaattcttggagaaataagaatgcaggactggaccacaggaaacagtaaagtctttgggacttataaccattgattatggatcaagtgaatgcaaaggtaaaacataggttttttactttgctgatcaccaggtgtttagagaagaaattgaccggattaataggataggcagtcgtactattaagaggggtcaatgaacttgattggtgtaaaacttagtgcctcgtagagcataaacggtagcatttgcatgagggctaacaacgcttcaggtttcaaaatataaattcttttgaactagcgcaaaatcttttttctctatggtcggtggaccgtccgggccagaaggtcggaccgcccgtgactctgccagagaagtctgctggcagtctgtctctgtctcccttcgtggaccgttcgggccaggaggccggaccgtccgcataagctgaactgagtttgggcagggacaatgtgtttttgtgtccttacactacagaccatctggggtttttagccggacggcaacaggtccatgtgtg

SEQ ID NO: 48853 - DNA, 575 bp, Zea Mays
ttcgtcagtcggtccacaataacccaaatcgaatcatgatgacgagaggtgttgggcagacccacgatgaaatccatgctgatgtcatcccatttccacgaaggtatagacaggggctgcaaagctccagctgatttcaagtggctggcctttatcctctgacaggtgtcacattctgatacatactaggctatctctctcttcattctggtccaccaatacaagggcttcagatcatggtacattttggtgcttcccggatgcatagagaatttggagagatgggcttcatccaagattttattcttgagatccttgttcttaggaatcaccaatctgcttttaaaccataatataccctttccatcttggcggaaacatttatacttctcagtcttctgatggagattctccttgataatttgcactcccttgtcaatgagctaggccatgatgatctggtcttgcaaagctggctcaatggaaatgtgagtcaaagcacaagaaggaatcacttcaatctggatcttgctcaactcatcacacaaggtgttaatacgagaatccatcataac

SEQ ID NO: 48854 - DNA, 550 bp, Zea Mays
acctggtgaggtccaccctcataaacctggtctccagcatccatcgcctaactcttataaatccagttttgaaggaagaatttgctctcagttcaatccttttcctgctttaatctacatatattgtttcctctaacccccacatggttcctaacttctgttgtgatcatgtaactagattgtcgcttagtttgggccccctttggtgttggacgaggatcgaactactagggacctctagctaggggaaaggaccatgttctcgaaggtggtccagagctgggtagccgtttagcctggttctgtaccataagcctacaccctccaccactctagaactgttgtcctaatatatcaaactgggtccctaaaggtctgaaccttgaccaaacttaagggttggttcctaaaactctgctcggcaggctctaactacatgattcgaaagattgagcacaacaaagtaggagccttgagggtacaatactaagtgttgatcttgagttgtgttcaggatcaatttatggcttgatcacggtttcagaaatgc

SEQ ID NO: 48855 - DNA, 398 bp, Zea Mays
tcaagatcttggcggctaacacattcatcgaagtctgtagggatccttgcttcttcgtcgtcgtctgccatcgaaacacaaaaataggaaacaaacggtgaaggttatccctaataatctcactacacgctcctctcgggtggaacacaggaacacgcgctaatgtatcttaccaagctcttacaagtgtgacgaaatacaagcaaagaatggtacaatcggaggttggttcgtgatacttaccaagaggtagtgaaaccgcgattgcaaggtcaaatctgtattgatcagaagatatagtatgtggagctgtaggacagacacaatatgtatgtgaatgtggaacaaaatcgagtgcagattagcaaagttcaataagtgtccaaagcacaaatcac

SEQ ID NO: 48856 - DNA, 588 bp, Zea Mays
ttgattgggcattgaccatatagcagatgtccatgtatatttctttctcccttcttgattttgagttgtcctcgactcaaagtcgttggtgtctgcaaaaggtgttgatgtagtgcttggtgtcatccaaccttgctccccttcttgaagttgaccctgttgttgtaaaagataaaaagagggacaagtggaactagaggtgatatggttaggtttaacacagccctctaattgatcatattgtttcatgacaaaatgagatttcatatttgaacaaatatatactcgatgtaccatatattctcctttccaattatatcttccaataacatggtatgtatgtttagataaacatggtaaatcagcactaaaagaaagtttctcctctaaataatttagattacataaaagatcaaattcaatgtagcccaaagtatttaaagaagataacaatttcagctcatcatgcacactagttataggattgaatgttctaatttttgcacaattaataggatcagaagcaacaacatcaagttcgttctctagttgtggcatagaaataatagtattatcatcacacatctc

SEQ ID NO: 48857 - DNA, 826 bp, Zea Mays
aagttttagttacagtaacaccaggggtgttacatgtgtcgtccatctgagtaagcgataggattccggccgtgtgacctatgctacgatgaacggtcctttgcatggtggtgacaactcgtgtcgtccctccccggttagtactcggcggaggaccaagtctcccactgcaaaggatcggtgccgcacagctttgtcatggtagcgcctcaaggtctgctggtacctagccgactgggttactgcgtttagtcgtttctcctccagcacatcaatgtcttctagcccggttgtctctgcctcagctatcctctcgaaggttagcctaggcgccccaaagatcaaatcggcaggcagcactgcctccgaccatacaccataaagaatggtgtatttccatgcagagctcggctaggctgtgttcgtaggctctagaccacgtatggcagctctctaatccacttccctgcaagcttttcgcttttgtcgaataccttttttctgagtgcatccagtatcagtctgttggctctttccacctagccattagctcttggatgtgccaatgatgcatacttaatttggatgcttctttgctcacagaaatcgaagaactccgagctggtgaagttggatcctaggtcagtgatgatgctattcggtatttcgaacctaaacactatctcctggataaactccactacttttgctgaggtcaaggaagcaattggcttgtactctatccattttgtgaacttgtcaatggcaaccagtatatgagtataacctccttgagctttcttgaaaggtctgatcatgtccagcc

SEQ ID NO: 48858 - DNA, 790 bp, Zea Mays
gtccagatggtttattgaaacttggtcccctaggtggaagcccaaagggtcgagctctctggtgacgttcttgctgttgagctcgaagaacttggaatttccttttgaggtgccctttctcttcctcttttgccctttccacttggatggatttgttggagaggtgagagaagttgaggaagtcttcgctggtgaggatggtcttaagctcgggtcttagtcctcttaggaaacgggccatcttcctggactcggtgccgacatcgtcaggcgcgtaacgggccaactctgtgaacttgtgcacatactcactgactgttctcccgccttgagttagctctcggaattcatcctccttgagttgaactatcccttggggtacatggttctcacggaaggctgtttcgaattctgcccaggtagcatctctgacggcttcactaaaggtgtcccaccatgctaaagccattcctgaaagctgatgagcagccagttggacacgctgattttcggggcatctgatggcttccagcttcctcttgatcgtgcgaagccagtcatctgcatcgaggggattgctggaccccacgaacgtgggaggcttgagtctcaaaaaatctcccatcctgtcctgtggccttccaccacctgggcgctggttttccagacttctagtgaggacctcaatgagtcgggtttgattggctagaacttgggctaggtctagtggtaggtccggagctgcggggaggtgggtctcactcccttctccgccagcttctccttcggc

SEQ ID NO: 48859 - DNA, 470 bp, Zea Mays
cttgattaggaggattagaaatgaactcagaaaaggggctttgtggaggaagattccagacagaataagataaaggagcaccaacatttgaaatcttgcctctcagcatcaagtcaattcggctcagtatgtcctcctcaggaatctgtctgttggtaatttaggtagggtcattgatcccaatatacagataagccgagtaaatcctatctttcagaggttgaatatttttttaagacaaaatcagcaacaacagcatcatcactcaagccttagtctttcaatgcacatatttcagaaaccagcactctggactcagctagctctgaatctgtaggggcctctgtccagctgggcgttcggacgtcaggctgcctccctgatcagggagggagagatttgtcgtggttctccatggtaaaccattcaaggcgtcaccccttaatactgtccttcaaaggcatatcgag

SEQ ID NO: 48860 - DNA, 417 bp, Zea Mays
gccgaagttgagaatcttcagaagaaacttgccgaagctaatgaaaattttgaacttgcaaaagtaaagcaagagataagtgaatggtcgaatgttaggattgaaaagaatgttgaggagcttcatgaatccaaggagagatgctttgagaaatccttggattgcgtaagaaaattgaaaaccagctttgccaaggtgggtgcgtattcttctaaagaaaagttcattcgaggtgatcccgaggggtcattgattggataggtgaagaagacgaagcctttgaggagatccttagtgatcacggtgatatttgtgccttcgccagcgctcgaggggttgcagcaattctggagaaggctggttgtgaccatgttaaagctacagcccagaccgaaaccgccttctccacagacgaca

SEQ ID NO: 48861 - DNA, 281 bp, Zea Mays
ttcgtctcgaagtcaacgctggacccttcggtgatcatgtggatgactccgcgatatggctgatcggcgaagtcttcctgctttggcgctggtgggtgattctggtggtgtgggttttgggtgatgcggaggcggaggcggggtgggaggacttgtacttcctgatgatgctgatatgcgtggttgggtgggtgctggatatggacgttgttgtatggttgatgttggtgataagtgtgcgcgacaactctttgattgtcggctggttgcgcccgagacat

SEQ ID NO: 48862 - DNA, 448 bp, Zea Mays
gctgttgtgcacatagccgaaggttagtgtcatgctcattttcccaagtgctgcaacttgctatcctccaaagccacatactgggtttatgcttcatgcaacttgtcttcgggctcttgcagctacttgaaggctttagtgaagatgatattcactgcactgcctatatccactaggacattatcaaccacaaacattttatattacaagatatcatcatgtcataagtgtgtgggtaatccttaggctaatgttcttcttaagagaatgttatcagtacatgagaccaccttgacctgatatatggtccttgtactcctgcatgttgtagcattctttatgcttccttcttctatttcttattgtttttggctcggagctagacccctccataatagggagtattagttgaccttgactctttggaaatacatcgaagatggtgtaa

SEQ ID NO: 48863 - DNA, 1806 bp, Zea Mays
cagcatcatgttccaggcatgacaaccgccggagtcgccttttcttcctcttctcctcaataggtgcagttggatggttcactcggcgtgaacgtttccgacgagcaccctctggtgtctgaatttcctcgtcttcgccaaactcttgcctagtcacaattgtcgtcggctcagtgcgggcagagttagatgattctccggccagcaggctaagaatagcatccatttcagcatcatcggtagtggacgccatctcaaagtgagtttgcttctcagccttgggaagattctggaggggagcaattaaggcctcaatgtcctctgaggagggtcgcactctatggcccgggctaccatctcgaacaggaagattggagacaaagccagagaagggactatgcagaggcaggttccatgcagagtaagataagggaggaccagcattcgaaatcctgcccctcaatatcatgtcaagtcgccctagcaagtcctcattggggatttgcatgttagtgacccgggtagaatcgttgacgctagtgtacaagtaagctaggtagactatgtccattaaagtttgaatgttcttgaagacaaagtcagcaaccacggcttcggcagtcagacctttgtccttcagcgagcaaatttcggcaagcagcaccttggccacctctgaataagtgggggactccacccagctgggcgtgcgaacgtctggttgcctccctgatcgagggggagggatttgttgtgattctccatggtgaaccactcgaggcaacatcccttgatgctgtccttgagagggatatcaaggtattccactttcctccccccgcgaagctccaaactagcaccaccaacaagctgatgctgccctccagccatgccgggtcaacagtggtaaaggtacctccagagtccaaagtgggggaggattccaagaaaggccttgcataggtgtacgaaaatgacaacttgaataatggagttagggtttaaatgtgtaagatttaaatcgtagaagtcgaggagaccgcagaaaaagggagaaacgggaagagcaagtccgcggatgaggaacagcacataaacaacggtctcgtgggtgtcctctgtcggaacagtgagcccgcgccagatccgccaagaacacagttctttcggcggcaaaaccccagtctccacaagatgcaaaagatctgatttagaaattatggacatgtgattaccagcgaatggaagctggctgttgggaacgataggtggaatgatcggaacgagcgggctcaagaattcagaaagcggagaagcagcagaggaaaagtaagatttagggttcagaactcaagaaggcacgtcaacatgtgtataagttggctccttaggtcaggcattacctctaaagtgctagatcacaattcggaaaagtaaagaccacaatcgccattcgggcattacctctaaaatgccgtcactgtcaagcacacagacaaactttcaagcgcacgaataaaaagcaagcatcggtgattaagtggagtaacttcatccttcattcgtaataggggaagtaacacaaactcgaagctgactgattatgagtcagcctcttttacccctggtcactgcagtacattacattacatcaccttactacttacactacactacgctactaacttaacttacactactttattctgctacttactactactactactatttatactaatatttaaaccagtggcattgtgccactagccttgccgctgccaccgtcgcccttgccgccactgc

SEQ ID NO: 48864 - DNA, 397 bp, Zea Mays
atttttctttattgttcatttttttggtgctacaattgattgagtgcaaccatagaaaaaggattgatcttttgggtccaaatagcgtctacatgcaatttcaccatcttaccaccaaacaacttaaggaccgatggtccatagcaactgtaagatcaccctctttaacacatgtacaactgatgtgcaaggggtgcatgtacaacccaatgtggaggaaatcatttggaagtggacaaccaatggaatttactccacatgttcggcatacatgattcattaagggtatgtttgggagtgagggaatattcaaggggattttaacccctttaggactggtttggtgacattgaatagcaaggggattactcccccatggatcccctcatgatccctg

SEQ ID NO: 48865 - DNA, 864 bp, Zea Mays
ctgactacaaatgctatagtcaggcttagcgtgtatatgtaggctttacgaagtcaaggaaaaagtgctaatgccgaaggattcttaagggtccatgagcttcattatcagaccaaagcaagggcagatggtgtaataaaaacttcggctgctacaattctgcatatcagaaagacacaaagactccagtgattggttatcgcaccaagtggcctaccggttggaaaatgaatggttttatgtaaaagctgatgagaagaaaagggagaaactcatgagcatggtgatgtgtcccttgaagttaagcttcagcatgacgaggccattgtgcaacatggaactcggctccccatgacaattagctgaagtagaattcagagtcgtggcagaacacattaatacccgagatttggtgcaagaatatttgactaacaaaacttttccaacatctggtgggtggggaatgcagaagaggaaggatgaaggaaaaaatttgagctttttcggttgtcataccgattcaagtttcagaatactttcaacagcccctgtgccgaatggttggaaatgatagagacaatgtgcaatgagatccttggacactatacgaagaaagaggatcaattgatgacagctgcctttggtactcggaagaaatgaaggctgaaccggataatggacgcccttggcttcgagtacccaaattatgaaaggcttgacgaagaagtggggggagcggagaaaaagaggattgtaagcattttgaaaagtcaagcaatcaaacctattgaaaaagacaagcaaagggttgtttccaagaaacagaaaatttcagcggagctgaagtttttggctcccaaaaag

SEQ ID NO: 48866 - DNA, 696 bp, Zea Mays
gtgagcctacaccggccgattcacgcaacgaccggtgatctacttcggcacagacctaattcaagccctaataagcgtttcccctcaaccaatttcactatcggagctcgaacacgcactgtgcacggtgaccgtatgatcaacggacattctaacacgttcccagcgatctaaggtagcttagctcaattgagttggtgaaggagtatcaggggcacacaagaacactaaaacgaaagggcagagggtatgagcggacctgagacgagctgaccacggtgaggtcacaccgctcggtgttcttgagtgatttgggggaaatcccaaattggggagctctagtggatgattcgaggcacgggttgctacactggttgcacaactacttagcggagtaggcggggtcaacaatttatagcaggcttgagcggtggccagtgaatttgagagagacacgcggcggccggagaagaagaaggttactggcgcgcacgattggtggcaattaccgtggcaagctccccggcgaccaccggacgagctaacgtgagtcacgacggtgaagttaatgtgccaaggcacgtggcacaaggctgcgaagtggctatctccggcaaacccatccaaatcgaccgtggtctgctcgggtacggtggccggagtaaaatagtggtcgaagtgtatccacagtgtgat

SEQ ID NO: 48867 - DNA, 1208 bp, Zea Mays
gagcaaaactcgactgcctactgagactaaaaacaactccaaaaccactaggcccaaactaatccaatagagcaccaacaagctctctcactaaataagcgacctgatctgtattcttctgttgatttctgaagatcctgttgtttctttctaaccataagctccaccaaaagtagatcagaagcccgtcgaaatttttcctagattgcctattacagagacctcttagattcctccaccaatcatacaacgactctgatgtctggtttcctcccaggaaagaacagttcccccatatcaatattttgttccacacctctctactgaaagggcaatctttgcataaatgggttaccgtctctagtgctgagttacaaagacaacaaactgggttgcactgccaatgtcttttctgaaggttgtcagcagtcagcactttattatgcaaaagagtccacgcaaaaaaaacgacatttaggttcagtttttgctttccaaatggggtcaattttcattgtgcaataatttgctgcaaattggatcttataagcgctgcttgcactatagtcaccatcttccatccatctccaagaaatggagtcttctagatcattgagctcgtgtgtactattgatggcctgccaaaggccgagcaattccttgaattcttctgcaccatcgtagggagagcgtaactggatccaacggttgtttctcagggcctggaaagtcgaaatgttcttccttttttctttgttgaaaagacttggtgcaatgtttttttgtgcttgaccatggatccaactagatttccagaatacagcagtttttcattacccaccttcacacaagtggaagcgttgaaaagatcttcatctgattcatcacatggcagctgcaaattcacccatgctttgtctttggccttccatcgaaaccatagccatcttagtcttaaagccctcgcaaaacgattcaggtctagaatgcccaatccccctttgcactttggcaagcaagtagtagaccagttgatcaaacagtgacccccgttgcatgattcaggattacttcctttctagaggaaacttcttcttatcttatcaatttttttcaatagccatttttgagccgggaagaccgtcagatgataaataggttgcgcggataacacagatttaactaatgtctctctacctgcctttgag

SEQ ID NO: 48868 - DNA, 552 bp, Zea Mays
tctaggtggtttattctaatctaggatctccaattactcgtgcgtacgtagtgtctggatgccggacactgattgctaatacctctgaccttccggatcaaaagaacacgggctgcgtgcagcctttttcaatgtattgattaatgaacagttgtgcatatatgctaagcttgctgatgagtgagcgaggggggtcacacggaaaacatttgggcaggtgggcctcagttgccacaatctccatgatggcctgcctcgtagcaatgtctccgcttgattgactccatcccccatcagagatcgtcgtagcattcagcagcatcgatgctgaaacaatcatggcctttcgttggtctcccgcagggcccttgtgatcgaatcaacgtcacacaacgccccgccggcgaacagttgccggtcctttttctgtcttatcgtgaactgctgtgtggggagtgggggctgagaagagatggcaggggaaaaaaacagctggaggttcgctcgagctcacctgggccagactaatcatacagtgctatgtttttttta

SEQ ID NO: 48869 - DNA, 1151 bp, Zea Mays
catatattagtgttgcgctgcgatgattgaagtgcctcgagtgcacgccacaatatggttgcatgtgagacagggttgggtgcctgatgcgtttagtaaaaacccatcggtgtcactgatgttaagttgaggtttatttgcgcgtggaaagtaataatatgtctaatacttagagctcttagtcgttagtagaaattgtttgggcttatgtagagaggtgatgacatgccgtaagtagtcatcacttcctctataattataagtcgagtctatacgcgttaggcgttccttaaattgtgatttgcaaataagtgtattttgtgtagtgtggatcgattgtgaatgcatgtgtcgcaagaaaagaattagtgcgcatataggcgatgaatgggtgtgatgagatgatgacatgctttcatagtcatcatgtcatctgttggtgacctaactgaaggtcgtagagaaaggtcgattgcctgtgtgttattattgtcaccttgtggttctgtatgaattgcaatgtgaagtagtaggctccgtatgtgatgctagatgtctaggtagacgttcgagaattgtggtgctcggaccgtcgtgatgaaggttaagtcggttgatgccgcttaagtagttaaaatgattaatagaataagcatggggttaaaactagaaactagtgttctcgcacccgtttgggatgttgtagcccaatttcgcctggttatggtcgcgggtaaaaatttgtagtgctcatgtggtgtctaagttaaaatgcgaactagtgggtgaaaagcgattcgatataagtatatgccggatttgatgattgtggtgaatgcgtttgttaactgaatgtggtaattttagtgcactaaatgatttggataaaatttgtaagtctacttgtagtcctcgtttaattaattcaactctatcaattgtcaaagcgttagaacaattcgagcatctagaacgccgcaattcttgaattatatagaagctaaaatgtattgattgctgttttgggctgcacgcactgttttcggtgtgctgtatgtttgatgaactaaattgtgttttctgtagatatgtgctatagaaaagtggtagataacttgattatcttgctggtgttaaaatttgacaggcat

SEQ ID NO: 48870 - DNA, 798 bp, Zea Mays
gcctgctgcaaggagaagcaggagaacgaagtcggctcatcgaggctagcaaccgaaggcaacgtacgcgccgtggtgcgggaaatggtgctgggaagtgggaacgaacgcgctggatcggggactggacgcaccatcggccaggatcaatattgaaagtgcgacaaaactggacattgggccagagacaggcgttccaagcccaagaatatcgaggctcacatagtccggatgagccgagtcaacaaaatcggagggcggagtgcagtagaccgtcttagaaagaatgtcatgcaggaaagcattcttaacgtcgagctgatgaattgtcaatttctagagagagccaagttggagacgatatagatgatggtgggcttgacgaccgaactgaaagtctcgtcgaagtcgacgccaggacgctgggtgaagccacgaaggacctagcgagctttataccgatccaaggtaccgtcagataggagcttgtgcttgaatatccatttgctggtgacgatgtgggcgctcggcgaccgagaaacgagagtctaggtgttgttgtggacgaatgcctagaactcctcatccaccgccacgtgccagtgcaggttgtcgagggcgtgacgatatgtcgagggcaatgacctagagcagtcgaggctgagcgaagccactctttgcacgagtgcgcatcaagtgaatgttgacgatgggcatagttggtacgacaccgtaggggagaggtacaggtatagatatccaaacgggccacccggtacggacccagcccgaacccgt

SEQ ID NO: 48871 - DNA, 657 bp, Zea Mays
gagggttattattgtggaaggacccccgaccaccttgtgtcgagcagttgaacgcccgaccaccaccacgtccgcgaccgaatccgctacgtgatggtccaccacgggcacgaccatggcttgtggcattcactggtgatccagaagaatcataactgtgtagattaacacgagtttcaaaagcaaaaaattgggcaactagttcgcttacggtggtaggctcggtcttggcgagaactgagttcaccaccgaatcattttcttcgtcgagtcgtgctagtatgtaatcgaccaattcttcttcttgtagaggacggccaacagcggccatctcatcaccgagtgcatgcatcttggcagtgtactcggtggccttcattgcacccttctttgtggttggcggtgcaaggcgtgtgttgacagcacgcgcacaagtctgggatgtgaagagcacttcaatggtgctctatgcttctgctgcagaactcttggacgccacctgcatccaaatgtccttgaacacacatgcgagcaagtaggtgagaacctgctgatctgtagcgatctagtcttcatattctgaatttgcagtcctgatgagattgccgtcaacatctttgatttctacttcttctgctggctttatcttcttccctg

SEQ ID NO: 48872 - DNA, 446 bp, Zea Mays
accaaacaaaccattagagatttaaaacttggaaacgactaatatgcaagcagttaggtgcaagcgtccaagtaagccgccttggtccattagatttagatccaaccgtagatgtatgatggtttgtttgttttttataaaactacacgagatggtggtgaaaggatttatgtgctaaacatgaaatacgattggatccagatccaatggaccaagagagctgcttacacacttccatctaagatcgtcttgcattttgttgttgctttaactaatactagtcgagtgcccgtgcgttgcaacgacaaacaaaatattcgataaaatattagtgcacaacgattacacaaaaaataccacatattatcgatcttaatcttataaattctctggcaacatccaatacataatttcagtgggaggacacgaggaggtggcgtggggag

SEQ ID NO: 48873 - DNA, 648 bp, Zea Mays
cactgccagggtgtcccatgagggagacgaaactgaagtgactgagacagcacctatatcagaagtgatgaggcgctcaggtctagttgtgcaagagggaggtactgtcgaaggtacctccaatgccgaagctgaacaaactgaggctgaagtcgggagtgacaacgaaagtgaagagggcaatagcattctatgcccaaccaaacctagtcacattgaatttggaaaatccacagtgaaagcagaggacctggttggtgatgaagaagctaggttattttggagaaaatgaagatggactgattcgctttgctggagaagaagtaattccagagccgagggaatatgaggttattgtgttccagagcttcttcagggtggggcttcagttccccctttacgatatgataggggaggttttgaagatatttgagatatatcttcatcagctgaccccgaacgctattgttaggcttagcgtttacatatgggttctccaaagccaaggaaaaagcgccaatgccgaagggttctgtcgcgtgcacgaacttcattatcagacgaaggacagagccaatggtttgcaccagaactttgggcgctataattttgcatatcggaaggataccgaggcccccatgattggct

SEQ ID NO: 48874 - DNA, 777 bp, Zea Mays
aaaagccgcctaagggtgcagccggaatagcacaataagtgcgcaaaaatcgaagtcttttcctaaaaagactctccatgcaaaagccgcctaagggtgcagccggaatagcacaataagtgcgcaaaaatcgaagtcttttcctaaaagactctccgtgcaaaagtcgcctaaggctacagccgaaatagcacaataagtgcgcaaaatcgaagtcttttcctaaaagactctccgtacaaaagttgcctaagggtgcagccggaatagcacaataagtgcgcaaaatcgtgcatcaatcgaagtctttcatttaaagacactccgcgcaaaagtcgcccatgggtgcagccggatcaacgaaggcgtgcagccacatcatacaaattacagttacatacactcagcgagggcatcatatactacagtggctcaaccttcgggatgatacccatctccctgtaattgaacagcattatcctcaattcctcaccctcaaaaagatttcgcagctccccttcacctatgctcgccccaatcggcgaggacaacaattctctttaccagtccggtccacgcaaagacggccacgctccatcccaatatgatgacgcctaccacttcgcgaaaattcactcactctttgtttcgccaccgcccttcgccgcctatacccagtactcgcacccgggagacccccggaaccctccacacgcggcgaaggctccgctgcagccacatctaatgctgcaaaataatccaagccttcatccgaag

SEQ ID NO: 48875 - DNA, 642 bp, Zea Mays
cgtcagacgccagggcatctctccttcaaatacaagacttagctttattgcggacactccccttggtgtataaatagggcagtggtccctccacgggacggagagaggcacatcgatgaactctcgcactctcactctgtctgagatattgacacttgcctcaatcatctctagggacttggggacttcccctctcccactgtgcttgtaaactcctactacaagcaccacagtgcgagtaatacaagcctcatcctctctgctggaagtagggccttgagtagcccgaaccaggataatcacttgtgtcatcttgcacaccatctagagccacccatgtggcacatttactggttggttagggacccatggtccaaacaccgacagttgtgtcatggtgaagcaacttcgtgtggagcatgtggccgtcagatgcatatcctaggagttggtccattttgcccctggttaagtggatgagctctatgtatctaggggtagtttagactagtgaaataacccccctataaataggtgggagggttgttgtgtatagctatctcttcgataatctctttgactagctcattaggcacttgtttagaaaaccctagtttccttctctaggttgcagtattttag

SEQ ID NO: 48876 - DNA, 560 bp, Zea Mays
gagttgacaatgctagaccttcctgagcacgtatttctcctcgggtgctacatgatcttctagcgtccttatctagtcactttatctcatctaatcagaacataggccttgatgtaggttgtggcatagcctggtatgctgtcgtgcatacagtgtaacgggcggtgtcgtctagtcttcttcgtccatctcttcatgcctcggtaacacacagagaacaatatgagtcataatgaaaggcgcccaaacgacacaataggtcaatgcccaatgtctcggtaacgtgcgggtaacagtaaaaggtcgcatgcacttaatgtaggggatacactacctgctactcatgcaggcaagtatgcgtcacatttgtactgaatgctagtgggccctgtgtgagaggcctttgttaggcaccgtctggtggcttatgctaagggtgtctagccatgtgttagcatcggacccctgcctaggagaggggcagacctagggataagtggtgacactatttcccaagcctttcctgactatgggcttgagccatacccgtgggagtccgg

SEQ ID NO: 48877 - DNA, 388 bp, Zea Mays
ctgtcctccatgactattccccaatcctttgcccactatctggccctctggtgctcggtgttgtaccccttgaccagatcaagtctggggagggctgctagattttagagagagaagggcggaaggagcgagcgagccattgttccctaaagcttgcgaggcttcccatcacgattctttgcaggggatggaactgcccactatcaggatcaagttactgtataaccaagcgagaggcatagaaagggagatgaatgctagatgttctgaactagaagtgaacaaggcaaatgagatgactgagggataggtgtgtttattgtgtagttgaggatgctcccgcagcgtcccatctttttcttttccactcaggatgggccaaccagag

SEQ ID NO: 48878 - DNA, 374 bp, Zea Mays
tgaatgtggccaaaccggtcatttcatagcggattgtcctaacaaaaaggaacaagaagccaagaaggaatacaagaaggacaagttcaaaagggaggcaagaccaagggacatttcaagaagaagaaatatggtcaagcccatattggtgaagaatggaactccgatgaagagagttctagctccgaagaagaggaagtggtggcaaatgttgccatccaatctacttcaagctcgcaactcttcaccaacctacaagacgactcctacactccaacttgcctcatggcaaaaggagataaggtaactttatttagtaatgattttcaaaatgatgatgatgatgaacaaattgctatgaaaaataaaatgat

SEQ ID NO: 48879 - DNA, 442 bp, Zea Mays
gttgggggtttggtcagggggaggacgacatgttgtgggcggtcggtaaacggatcggcggtccagaacatatcacggtgtagaagaaatctgagtcactggatcaatcacaggcggtgcagattagatggcagtgtactgtttcgtttggttagatcagggtcattgattcggtgatgaacggctcagaactgtattgcccatcggacgttggatccaaatctgacggccagagcgggtcacatatcctagggcgcttagatctaatcgtgacttttggtttgcgatcgaacgactgatatcaacctataccccttcgatcggtggttttgcaaagtagaccttgcgaaaaatagaaataaacccgtagtcctggcaactgaggatctgagtcttgggacttttatggagtagaccctgaacatcctgttaatagcgcgcg

SEQ ID NO: 48880 - DNA, 441 bp, Zea Mays
cacggtgaaagccactaatctcgtgcgctagtgacccctttcttctccgaccgccaccacgccaaaccaaattcactgggccactgcttagcaccactataaattgtcggcacggtctgctgcgttaagttatcaccaagcctgagcactcgctcctgcctccgattagccaccacaactctccaatttcccatttcccccaaatctgttttccgccaccgtgaaagaggcctcgtcgtggacagctcgtctcaggttcgttcatgccctctattcacttgtttcagtgctctgatatgctcctgatactctctgacccagccaattaagctaggacccataggatcaccggggacgcatttgattgtccgtggtgcccgctgtcaccgtggacagagcgagttcgagctttgttagtgaaattaattgaggggaaactct

SEQ ID NO: 48881 - DNA, 1220 bp, Zea Mays
gcggagcacgcctgcgttttcctgagagaggctgcttggctcctgtacgaccctggtgcatcggacactgatccaggaagcaagggcgaaattcctggctgacttcaaggtggacagatctggcttcgctccgacctactacgaatacccccaatgtaagtagcaccaacgaactccaatctcttaaagcttacatagacgaacaacgagagcagatgcaacgtatcgtaggggatatacaaaatgatcataaaagcctagtgcgtgcgcttgataagtctactattgcaaatcttccttcgcacgaggttgaactgagggaatacacacgtaattcatcggctacaggttgtcacgaccagtcacaacccctttatgggatgccaataaacatgtaccttgggcaacaacagcctcccacgcacatcggcgataaatttgccgatctgcgcatgtccggaccgtccgcacgtgagcgctgaccgtctgggccagcggcggccgatcccatttttagaagcgaattaccgaggtctgcacccaagccgccacataccgtgcaaaccctagataacccattcggaccatccacgtatgatgccagacagtccaaatataatgtcgaacggtccgaccacatggtcggacagtccgcgcacggagccggacggtccgcgtatttaaccggacggtctggcacaaagttttttgagaaggatggatatccaacttcgtattcgtcccagctagactccccatttcaccatacgacacaccagcaccataatataatctaccaaacccgtgagagtgagtactttccgggccccagaaggccagaaaggaatggccagtcctatgagcctcatagggcatgtattaacgcgccgcaaaacccaaaccaatgaggaggaaaacaacataccaacatccaaacaaactcacccatattggaccaaagagccggtggtctcccaccagctgccatcgatatagtaagagaggaaatagctggggcgttccgagataagctcggagttagtatagtccccggggggcattcatatcggataccttataatagccagtttgaccgtctcccatacccacaggggaccagaatacccgaattcgcaaagttttcgggtgaccaaggaaagagcacacatgagcacatagaccagttcttagcacaattaggagaattggccgacaccgaa

SEQ ID NO: 48882 - DNA, 718 bp, Zea Mays
attttacccatcttacaaacctttttaagatgacccattttaccatagttgtagcaaatgtgatgctcattcttacatggcccttgctgggtaatggtcatccttagagatgcacaatcttaattcttcatgtgaggacatgaagtgatcaagcgatcttcatcattgcatccgaagcatctcctaactccttgattgtccatgtgcgaacgtgaaacaatcaagtgtcatgtctcctaccatctaaagcatctcctttttttgttcttgggagacatggagacattgttagtgcaaacaacatgaagaattgaatttttacctttgtccttattcatgccatttggttgctgcttcgttgctccaggaacttcctttttgtagagcttggtgcacgctacggttcttcccttctcaagcttcttcaccatttgtttcatggatatcttgaggaggtcgagcatgacactttcacataaatttctttatgttccttctaagcctttcgattttctccatgagcctgttttcttttgaaactgaaatcggttgctcaatcggagattggcttacataggagcaacaggggttagcacatggtaatttttttctaaatgagcacatgtgcatgagtgatgttggcaagtatttaaactagtaataacaacctcatgagtcatctttaacatgatacgatcatctaataaatttttatgtg

SEQ ID NO: 48883 - DNA, 450 bp, Zea Mays
aaagccaaatgaacaggctcattcgatggagtaaaaacatgaaggtcaaatctccatcaactttgcacacgcgtaaaggtcgagatgtgtcggggaaagatcctcggcgccctatggcccataagtcaggagaaggacgatggaaggttccacctcggaaggactctcccccgaatagtcctgaggcatcaagcccggggtcgggtaaggcagagcctaaacgggaggttgggcgaaccgagaggaagctactcgagtggattccacaatcggcctaggactgacccaccataaatgattgatcgtattaactgccactagcgccaagccacgacaggggagtcggttctccttcccctcatgccctacgagctcctaggcctacgacccactcatgacctaccgagccaaggcttgagtaccctagcaatctataaggccctcaacatg

SEQ ID NO: 48884 - DNA, 489 bp, Zea Mays
tcggcagcacctcccctgcacggggaggtttccaaaacctgcaaataaaagtatcagcattatggccgacacacagatatacaaacgacacgatggccgccaatcatatctaatcggcatccatatccaccatcacattatatagaaactattttactaaacatatccatcatcacattatatgattttattcacagtaatggtgaaatcacgtgcactcctaacacattttggggcctactttctaaatgaattttggggaaacaaataaaccaaacctaaacaattatttaatatcctaatcaattacaaatacaaacataaacaatacaaaataaacaatctactctactacattatacaattacaaatatcattcacatcacattatatatttagcaaataccattcacaattacaaacaaataaactaaagtttacatcaccttgacttgcagggaggcgcgtgggcgacctggtggcggcggc

SEQ ID NO: 48885 - DNA, 522 bp, Zea Mays
caagcatagtcagcagtgttgcgtatgtgagatactggaaggtaaagtcagtgaagataaatttggtacaaacaagagctagcgcacattgcgtagaagtaattcaatctaacaggatacagcagggggggtggatttccatctatgaaggaaaccttgtatattattcaatacattcattttgtgtacttactgggacatcacaggctcgaactggctacaatgcacaacttgcatagctaccaaagattggagccagtgagccacagaaactataaatggtgttttcgttttttaccgtcatcgatacatttccgtttggattaagttcgttttcgtcgtcccgcacatacatcccacgtatgacctcatttccgataatttttcgatctagaatacgttttcgaattaaaccataaaaatgaaaacgagaaaggatttatcccgacagattccgcctgtttacatccctacccatttcagcttccaaggcaccatcatctccgatttctggcacaaggt

SEQ ID NO: 48886 - DNA, 744 bp, Zea Mays
aaatgtaagtacaagagtgatagggtgatataccgatgctgggcaagagatgaagatcaatcactcgaaggtgatgagcacaatgaaatccaatgaaccaaggagacgagatgacacaagattttctcccgaggttcacttgcttgccggcaagctacgtccccgttgtgtggaccaacaccccatggttaggtggctaataggcattgcacacaagcctagtccaacacttggacaccacaagaacctaccgccgagtgaggtaactcaatgacacgagcaatttactagagctaccttgcggcactccgctggggaaggtacaatacccctcacaaatccaccggagccggccacgaacaatctccacctcatgccggacctcctccgctactccaagccttctaggtggtggcaaccaccaagagtaacaagaaatcccgcagccaacacgatctctagatgctcaaactcaacacaaatgcacttggatcactcccaaactcacaagtgatgatcaacacatgaactagatgagtgggagagagtggaatatgctcacaaggtgtatcaacaagatagagagccaagagggccagccaagcccatgccatggtctatttataaacccctcaacacaatccaaccattactcactttaacagagcaaccggaccatcaaccggaccgccactcagggcagccggaccaatcacccggggtctggttgctatcctttttgaa

SEQ ID NO: 48887 - DNA, 451 bp, Zea Mays
ctaccatcctcagaatgatggacaaactgaaaggactaatcaagtattagaggacgtgttgagagcttgtgcccttcagcatggtagtagttgggacaagagtctagcttatgctgagttctcatataataatagttaccaggccagtctgaaaatgtcaccgttcgaggctctatatgacaagaagtgcaggactcctctatattaggaccagaccggaggaagtcagttatttggacctgaacttattcaagaggcaaaagaacaagtatgtataatcacgaagaacttgagggtagctcaaaccaggcaagagagctacgctgataatagaagaagaccactagagtttgaggaaggtgatcatgtgtacctcaagatgtcaccactttgtggaatgaggagatttaaagtcaagggcaaattgtcacctcactttattagaccattc

SEQ ID NO: 48888 - DNA, 1020 bp, Zea Mays
ctattatcgggaggccggccctgtaccagttcatggccattgcccattatgggtacttggtcctcaagatgtcgtcccccgctgggatcctcaccgtgcagggcgaccgcaccgccgcactagcagccgtcgagaagctacacaccctggcggccgagatcactcggtcagacgatggaggaagaggccccagtaccaaggcaccctccaaggcgccgaaagtacaaccgaccggggcagacggcggatccgcaaagaccatccaggtcggcgcgaacccctcccagaccacccgtatcgcaagggatctgggagaaaaataggaactcgcgctcgtcgccttcctccaagcaaatgccgacgtcttcgcttgggagccgtcgcagatgcctgggatccctagggaggtgatcgagcaccagctaaaggtttacccagacgccaggccggtaagccagaagccacgaaggcagtccgtggaacggcaggacttcatccgagaagaggttccgaagctgttgcatgctggctttattgaagaagttcatcatcccgtgtggctggccaacccagtcgtcgtgccgaaggccaacgggaagctacggatgtgcatcgactacaccagcctgaataaggcatgccccaaagacccgtatccactgtcgcgtatagatcagattgtggactctacttcggggtgcgatctcttatccttcttggacgcttactctggtttccaccaaatccggatggctaaggaggataggaagcataccgcttttgtaacagtagatggactatactgttatgttgtaatgccctacggtctgaggaatgccttgccaacctttgttcgggcaatgagcaagacattcggggacctgatccgggataaggtggaaatttacgtcgatgacatcgtagtcaagactagggaaaggtcggctataatggaagacctagccctggttttcggcaagctgcgggcaacccgcaccaagctgaacccggagaaatgca

SEQ ID NO: 48889 - DNA, 1204 bp, Zea Mays
ataaaataagaaatattatggcgaacggtagaaatattattcaaattggaatttagtgtgataatgggaaaatctgaagtctaaagtaagaatttaaatttgtttgaatctagaaatttgaacttgagtaggaaaattggaagaaaagaaataagaaaatagaaagaaagaaaagaaaaagggacagaacactgttgggcccgcggatcccttttctcggcccatttcacctggtctactgcgcggcccaactcccctaacccacgccgacgctgacttgggggccccgcatgtcattccgttcctctttcctcctcactgaaacaagcgagcatggagatcggtcgttgaatcggccacacatttttttccccttccgaaccggatactgcgctgtgattaagcctgtcagcgtttcttcctccatgaaaccaaaaagaagcatgccgccatccgcgcaactgaaatctgtttctgcgccgcacatctaccaacctccccgcggactcgagctgagccgtacgcccatatctgaaccaccatgccggctctatcttcttccccatgactgtcgctaacggaaaccgtgaaatctgccgcgatcagggtgttccggtcatcctctcgggacatatattggcggggccatagacctctttccccatcctagtaggagctagcatagcgttgcctcgacaaatcgctgggcttcatcaccatacacggagagaaaaaaacggggcccccatctactgtaaaccccgccgtggtggccgttcgaagcatgcagcaggggtaggatgtaccacgtgcacgtgaggctcgtgcttggtgaaaccgcgggatgcgctccgccgcctcgtctgtccatggggggaaaagttagagcttgcgcagagaatggaggaaggatgtgacgaggtccgccgtggactgattttcgtccacgcccgtgccagggcttcgattgtgaccaggtagcttcgtagtgtcgtggggaagcgattcctaccactgaatcgtcgtgtgggtgaccggagctaggccaatggctcgacggagcaattggcgccgctgtggatcgctccgcgccgtggccgagggccaccccaactccaaccactggtaagccacctcgattcagatcactcggatttcctccttgcgttgcaccgacctcgagagcgaatagggtagtggatag

SEQ ID NO: 48890 - DNA, 427 bp, Zea Mays
gaagcatacatgtatcgatccttcccttgcttccattgtttgccttcttttccattgatttgtaattttgctagataaaactccaccaaatccagagtggtcaggctctagctaaacacgtactttgtcacctaattcagaattttttgacaggacatcaaggagcaaggtcattttgccactataatctgttttcatataagtattcttatctaaaagttcctcccgccggttgctttcatacaataaatatgaaaaagacacaaaaagtgtaatcagaaccaaatgcttagtttttcatgcaaagtattccacccattagtgctttcatataagtattctcatctaaaagttccttccaccatttgctttcctacaataaataaatcatgaaattactacaataagttctgggatgagcaaagtt

SEQ ID NO: 48891 - DNA, 704 bp, Zea Mays
aacaactaaccattccttatgaaagatatgaaaatattggagtaggatacattattattcacatttatgaatgatttgtttaacgggcatatgtatttattaaaaatatctattgagatcaggatttttaagtcgttgtcctttttctattgtcatggctctgaacctctaactctagactgcaggccaccaaattctgttctccttggtcttgcatccttgttgtcatctaagtgcggtgttggaagccagtgcgggcgcaagtgaggtagcgacatggctctttggatgccaccccatgaacgcacactatgggttaccttgtggcaattgtagcggtggacatggcaccgacatccaatttagtggccgataattctcactgacgatctagtagcttctgcctctttgtttctatatcctatgttagaataccaatttagggtttgggggtttccccatgtaattactctctcaccccctgtgtaatgggcccgacccagttaactcaaatcgactaatacaacacccaaacctaacaaacggttaggatttccattctccaacttggtaccagagccaacttactcttcccctccctcccacccatacaactgccacctcccagcacacactgacttcctctcccaagctggcaactcctccctcttgtcatcatctcctacaggcggcgccgtcctaga

SEQ ID NO: 48892 - DNA, 635 bp, Zea Mays
ctccctctctcgttacgattggatcaaacataaaatggaacgatttcaccctggaatctatactggaaccgctccgcttgtgaaatctggcatgaactgctccgctcccatggttgtccaaccaaaccgagctttagtgcaatagttggcactaaaagaagggtcgaactgttgaagagtgcattatagaaggatttaaataatccttcgcgagcgcgcgcgcacccacccacgagcgagtgcgagtttctctccatgtgtgtgacatggggatcggacagtgtcaacgtcgcccaataaagctatacatctgatatctcatgtgacctgatgcatgattcgatgccggatcaaacataatccttgtgatggacgaggatggtacagccaatgcaactaccagagatgctcgaaccactggatctcacgctcggtgtgtcacctgactctttcaaaatgctcgctttccatggttctgtttgcacagcgacagcgggagaccccttaggcccttatgccaagacgcgttttaagcttttgcgttgattaatagtgtgtggtttcacttgctcaatcatattgacagtcaaggagcaaagcagtaagtagtacttaggaagaggaatgcatgcgtg

SEQ ID NO: 48893 - DNA, 1018 bp, Zea Mays
gttcattctaaattttcctagagtttcttaaagaaaaacgccacggtcgatgaatgtgggtcgtctaggaccgcataatctcaaaccaacagattggattgatctggccgaagtggtactcagatctaatcccgatcgccccatagaagatcaacggtcccactaatctcctctgtctccgaccaagaataccagtgtcactctcatcgccattatagcgccatggctggcatccgaacaaccaacccttaggagccccatttttgttcaaacaactgctaagcgaagttaggagtatgacgaattatacgaaggacttcttaccgatgatcatgctatgatgccctcggtcctcggtgtctagcggctccttgtccgacgagatctagtccctgcgtcgctggtcgtcctctgctcttgaaactgacgtccatacgtccaacgcgctccggcgaagcacactggtacccccagatgcccaaccgcccatagcaacccaatttcccgcacggcggatctctctcccgctctactcggcggcgcagcgatggtgctctctggattgctcggtttgataggatgagggggtcgcatgcttcatatatactcgtggggcaaatccttggggtggatatgcatgacaacaaatcccaactaaacagtggatgcactgctgctcattgtcaaacaagtacacaagcaactccaggagatgaagtagtccacatagcctaacccatcatacagtggtgtagccaggccagaatcgaagcctaggtatcaccattgggaggggaggggcagtgaagcgttgtggatagggatgagaccaccactagtctacacatctactattttgcatctagcccccttatttcctcaaattatcctatgaacacccttcttccacattcccaaaatgtagaggcagtggaggaatggactagtagattcatgtcttggcgggccatggcagcctcaccggggagcactatgggccttttctggtagagccacg

SEQ ID NO: 48894 - DNA, 867 bp, Zea Mays
tagatgcacatgggcaaacagaaactaccggaggggcaattactccaccagcagcattgaggacgccgggggttgatgatcacagcacaccagatgcgtcgaggatggccataaatcaaggaggacagaagctgactactatgcaaactattggtgagcatgaacaggacacaccagtgattctgcagagacatgtaaatactttataactattttggattttcattaatgtagattagattgtatacgatagaaaaattgaattgagggtaatatcaccacactcctaatccatttgtttcataaatcttaaaaaagatgtatataatacaacaaaaacttgcctcggattggcgatcgagctgaggtacaactgaatagcatgtctcggtcgagcttcgaaactaaaaaaaatgtaagtgaaaattgaactggaccatgagtttgtattgcaaacaatggtactcaaaactaagcacatatatttgacataaatttgtcataaaatacacttgtttaaatatgaataacttacttcacaatatccgaaaggttcaaccccatggcgtgtcttcctcttgtcagctttagtcaatgcttttatgatattcttatcaaagaattttatgcgaggtgtactaaatttattttgaggggcagtggctgcatgcaggtgatccaggtaatacaactacagaacaaatttcaatgtgcaagggctatgtaagtaaacataacaaacatcataaaatatgatatatcatgccccacaaaaaaacaatgagctagctaaaaaaattgcaatatatgtacataagacaaactctatacttacaaggacaacaattgagcatccgtatatcgtca

SEQ ID NO: 48895 - DNA, 687 bp, Zea Mays
ggtagcgtttgatcgaccaagtcagtgagcaactggagactatgaggatgctagaacacaaactagagggggctaaacataccggaggggctctagccacggcgaagcttctcatggcggcgatggtgaccaactccagggaaacccgaagcgtacgagctatggtggatgagaggggctgtctgagggtgggttggacgcgtaacagagaggtggagcaaggggaacactctatctaaaggagctgattgcttgcttcgcgaatttgggatgagagtgcctacgacagtgatgagatattctcactgggctcgttcaccgtggcgcgcatgtagctcaatgatttgggtacttgtttcaccgtctgccacgctcgctatgacagggtgaagcaaagctacgcgtggcacatcatgggcgaccaacggatcaggatggtggtaattccaccacgacaccgggcaagtgggcattgcgggtcgaccgactccgtgcccaagttctcccctcgccgatcttttcacctccagtaatatctactccaatcccagcacacatctccacggtgagctcgaatcgtggagcgagatcaccggcgacgatggggatgaagcagatcttgttcagttactgttcatgctgaacgccccatctcggcttatcttacagcccgacgttaggggcaat

SEQ ID NO: 48896 - DNA, 1354 bp, Zea Mays
ctgagttgtactgggcttacaccggtcagcaatggaatacgatggtcgcactcgcgtgggggaggaagaccctgtggaacttcaaatatatcagcatattgagtgagtagttgctgcagttctgcgggcaacttgtgaacaatggcttgatccttgtcagtgagggattccaaggaagatacctccataacagtacactgcatgtcctgaacccccataccacacaatttgatagtagagccttggtacggtataatcagccacttatcttcctagtgtacccacatagggttgtgggaactcaaccagtccatacctaagatgaggtcgtagtgagtgagctgaataatcttcaagcttgatgagaaggcatactcattgaggtaccatgtgacattagtcaattcatggtcactgggtaattaggagccattggccacctgtacgcgaagtgaagctggtaagggagtccaattgggcaattgcgaagcaactcggtggctgataaatgaagtagagctgcccgaatccaagagtaccaacatatccataccaccaatgtggctaataaaccgcatggtcttgggggtatctgcactgagaacagcagcctgcgacatatgtaacagaagcaactcttcagctgtaacatcagtaacaggttcctcatcttccggtaactgaaaggactgccacatttcttcgaccaggtgtaactgcacggtgtcagggcacttgtgacctcgattatattggagtccacatttgtaacaaagtcctttggccttccgatatgcatataatgtagccaatttgtcctcggactgagcttgtcgagaaggaatggcagcaggcgcatgatccaacttgagggaatgagttgctttactgtcatgtgtaaggttggtgcctgaggccgctggtttgctgaatgttcttggagtgaacttgccctcccgctgtcgggtaccctcgcgcacctcctcctgcaactgagcaagaacataggcagtatcgagatctcatgggcgttgcactaacacaatagagcatacatcatcacgcaacccatcgacaaacttagtgatatagtaaagtgggtcagcatggggttgataagcctttaactggtcaactagttgtgcaaattgttcaatataatcagagacactggaatattgacggatgtgcaggagttgtctaagaagagtttcgtgctggtttttgccaaatctctcacgaattaatagcccaaactcgtgccaagtgacctggtgaaggctgtgttcgatcgactgtaaccatctggctgcaggaccggtgaaactcattgtggctacttcaatccagacgg

SEQ ID NO: 48897 - DNA, 639 bp, Zea Mays
gtggtctaattcaatcagatggttttgagggcaacaggggacatgagggaggcgagaacatcccacggaagagcacgagctaacctgtagacgtctggccacgacgaggtgttcacgggtgcgaaaaaccaatttggggagaaagagaaactagagagctatggtggctaatcagaggcaggagcgggtgctctggcttcgtgattatctaacagagctagcggtgtgcttaatttatagcgttcaagagcggtggcttccaattttggaatggcgcgctggcggtcagagaggaagaagatcactggtggcttaatcgtggcgttcaacagtgtagcggttctgatagggtaagcctaggtgtgccacggttactaccacgtagtgaagagtcacggcgtggcataactgaggtcgccggagtgtccacgacgacactggcggtccgaccacgtcgcaacggctacaagcacagtgataagcttcccctgcgaccacatctgcttccccgcgagatcttttacctccccgtggatatccattgcgtgcccggcacaaatcacgacgatcggcacgaatccggacgcgtggatcaccggcggcgaggggggctgaaccctgggatatttcagtgtactg

SEQ ID NO: 48898 - DNA, 841 bp, Zea Mays
atggaatgcaaaacttgacagtgaactgatgaagcttggttttgtgagaaatccactagagcatgctgtttacaggaggtcagatagagatggttttctgctagtaggtgtttatgttgatgaccttataattacaggctcaaacaaagcaagcatagaattgttcaagcaggagatgaaagggaagttcagtatgagtgacttgggattactcagttattacttggggatacaagttaatcagcaggcaggaatgacaaagctgtgtcagagctcgtacactctgaaaattctggagcaagccggcatgaaggggtgtaatccttgtgctgtgcccatggagaatagattgaagttgagcaagaatgacaagacacccgctgttgacaaaaccaagtataggagcatcattggaagtcttcggtatttggttaatacaaggccagatatagcatatgcagtgggcattgttagcaggtatatggaagagcctagagcaagtcattgggctgctgtcaaacaaatattgagatatcttgcaggcaccgtacagtttgggtgtgtgtacaagagtcagggctcaactgaacttgtaggttacagtgacagtgatctggtcggcgatgttgacgacaggaggagcaccagtgggtgtgtgtttctgttgggatcaagcttagtgacatgggcatcacagaaacaacgggtggtggccctatcatcatgtgaggctgaatatattgcaagtgcgaatgcagcgtgtcaagggatctggcttagccggcttctgggagaactactgaacatccaggctccaacagtcaaacttctagtggataac

SEQ ID NO: 48899 - DNA, 955 bp, Zea Mays
tttgaggcttttagatcatctatttgcctctggagcaggagaggattccactgcagcaaggacaaaacctgatcgggaacaggggcaccacaagatctcaattgggccgacacagagtttagaacattctacaaacacaaaagttagcaaaggagtctgtttgacgacataagtaaagcagggcaaaggtcagcacacctaaacgttagaaaggaacaaagaaaatcctagagccgaaggcatcggcatgctatcagacggtggagcactgacagaagcaatattgagagcagactcgagccccaagggaggatcagagctcacgcccaaggcaacacttagagagacctcagctccgatagcaggtagcggattcccaacattcgggtcactgacctctaaagtgaccggaccgacaagagcaataggaggacttgtcaccactagttcctcagattgaaccagtggcaatctggcatgaacgtccatggaagcagacgaggaggagccgagctcggcaccctagggagctgggtcgtcctcagcagcaccctcggaggctgggttatcctcagtggcaccctcggaagctgaagcaccctcgatcgtacccacagaagctgggtaaccctggcctgcaatgtcaggagccgatgtgttcccatgaactaggccgcccttaaaggtcgaagaagcgtgagaaactgtctggattattacttgcctgactggattactagctgaggggatgtcatctgggacctctatacggatggtagcaccttcagctttaggaagctccaataaaagatctttacggataatctcctccagtgcatggtcaatggcagacattgtcaacctctggagactaaccagtcctgatagagcttgaattgggacgtcgtcgctatttttgctacgactgttcttacgaatcaaagggggaacttcc

SEQ ID NO: 48900 - DNA, 568 bp, Zea Mays
gcccgcaatcgtgcgcgcaataatggcggacgccttgcggggggtttgttgcggggacatagggaggataaagccgaaccctgtgaatgccttcccctttattccccaccgaacgaccttggtttagctcccacgccgtaatttgccgtcgtgacaaaggaagccacgggtgaccttggcgaacttgtgcctaggggtaatcgtgagcgaggagccgaggacctcacgtaattgtcgctggactctaactctcgcggtcgagccgccgcgcagcgagggcgagcttcctctgagcctaatcaccggtaaaatcaccgtccctgcccttgttgttctattggcttcgttttgcaccggctaggataagtaaaggaccacccgagcgcgcaattgggttactccggcgggaaaccaccgtgagcgcggggcggcgtcgccggggtgttttgggggaaagaaccacggccattggatcaaccgtgaatcacacgacggatggctcacattagaatgtcgtaccggttagctggggttgatctcgggcgttaggtgggaatccaagggtcgc

SEQ ID NO: 48901 - DNA, 636 bp, Zea Mays
ctaatattatgtttttgttgcaaattgaaatgcctgatggacatatagtgaagttatgatagcctgtttaactcgcacaggagctcacccaggtacgttcccctgtcacggtctcgtcgtgtgttatttgcttttgcacctcgtctgtcgatctctgatgggaggaggcggtggcgctagccagtaccaattctacggcggcctccaggcacaaccggaggtgggcgccgctagggtggtctttctggtgagtcccaaacgctcctgtgctcatgtcatgtgatgcctgtgtgccatccacctgtttggctgtttgttgtattggctcaatgtaaaacaggattgagttctgttgctttagctttactgttttttttgttaggttgtatttaagccagaagtaaggaatagtctctattgtctctggatttttcccttattaaattatgaccatatttgctgaagcaatctcttggtttcttttggcaggcgttcgtagtcagagtttacaacacgtagagggtagagtacgaactgagcttgaaatctagaggtagttttgttttattagatttctgaggccaacgccttggtcacgtccctgtactgaaataccacttgtggtggtggtgttca

SEQ ID NO: 48902 - DNA, 918 bp, Zea Mays
cttaggtgctaaaaatataatctaagtgaggtgcttctaatcaaacaaagtgtatgcatatgatgagaaaacctagggaagattagggagagataaataggggggttagattagggttccaaacctcgggttggaaatctgggatgttacaaacctaccccacttaaaggaatctcgccctcgagattcagacggggctcaagaaaaggtaagggtattccctcctcagagagtcctcactttcccaggtagcttcctcttctccttctctgctccactgaactttacaaagtcttacttctgagttgcgggtctttcagactgctgagtcaagaatctttattggcttttcccggtactggagatctttttgaatctgaattgtctctgcctcaatgtggttttctggtacttgcaggcacttatggagctgggacacatgaaacacattgtgaatatctgacatggattctggtaattcaaggcggtatgctgcgggtcccactctgccaatgacgggataggggccgacgaatcgcggtgctagctttcctttcatttggaaccttttgaccccacgcatcggggagaccttgaggtatatgaagtctccttcctcaaatctgagttctctccgtctattgtctgcataacttttctgtcgactctgagcttcaagtaacctcttgcggatcagggcaactttctcttcggcctctttaaaaaggcgggtccttccagtgtcctttcccctacattggaccacattaggggggtctggcactttcgtccatacaatgcttcgaacggtgacatcttgatactggcctgatggctgttgttatatgagaattcggcatacagcaaactggactcccagtttttgtcgaatgtcaacacacaggctcttaataaatc

SEQ ID NO: 48903 - DNA, 876 bp, Zea Mays
ccaccgtcaccctcggtgagccatccctcttcttcgtaccttcttctctgctcttggatgattccgaggttgggcgcgtaactatgggggtggaacagactcagctagggctgctaccgtgttggccacactgccgccgggttgtgagagagagaggagtcatgatttggtggaaggtagccgccgcgccggtgttgggcatggcgatcggtgtccggcatgtgagtgatgaggaagaagggttccgagccattggtgttgagatttacggcctagattgggagtgggtcttctagccgcgtgcccgggtctgggggagaagcggggaccatggatctctgtgtgaacggtcgagatcatatcaagcatacccctttgcctcatcaaaacggagttgttgatcttggatccgtccgccgggtgcgctcgcgatggtacattaattaggggatgttagattgggacccgagggacatgatcgaatctcgagtaattaaacctcgaccgccaatctctccatctacggtccagaataatgcgtacccttcggcctcggattagtgcaaaagggcccctgactttgtctctatttcacccgcaatccactactatacaaagaccattacatatatgtccacatctttgcagaattaaccttaggctttttggaacctcaacccaccatcctaggttaacaactttacatccgagccctcccatttacactagtaattacacacaagtcccgattttctcacaaacagatccatgaacatatatttctaatacaaaaccaaaccaaatcttataaaattcagaactttggcattacaactccgatttaatccattcaaattgcattagattcatatttgt

SEQ ID NO: 48904 - DNA, 417 bp, Zea Mays
gctagggagcagtgttcatcatgattcattcaaagcttaaaatctggcagttaggtaatctgatgctggtggcggccgggggtggtgtgagaggagagtggggggagaggagagatttcttccagtcatcatatgctcagctcagcaggatcggaagaaggctggcggagtcagatatctatgtctcgagaagagaatcaaatgacgacgagatgcttggaaaagaagaaatcttgttattatgcgcttgtaacagttcctgattagcgttaccaatgttctcaagtttggtacttgaaaacagggagcgccgccactgtgcaatcccaacccaaattccaattccgatccatcatatcgcatcacatcacaccaatccaattgtcatctcaactctgaagcaaattttgttttttc

SEQ ID NO: 48905 - DNA, 700 bp, Zea Mays
gggcgccttcgtggggaggtttgcatcggcgcaggggaaattgtccgtcgacctgggagttcgccgtcgggtcaaggtttgtcgcggccagggtctcctacttcgcgagtgcaggtaacgcttctcccgttgaatcaaggtactaatagcaccgggtaatagccattgatgccgggtttgggtctcggcatgggctggaatgcctcgtcggtgtgggctctcacggaatcaccaccccgtgcccccgtcagcgccttgtagggagtgattcacgaaattggttctgcaatcctgattgttcagtcgcgctctttgctttgttccatgtgcgtcgaagtcgggcttcggggagagattttcgtgcccaccggtcatggcgccgccgtcgaagctcggtcaccgccgtgcgcagggcgttcagcgggtgcgcgtgcgtcggggttgcgtgggctgttgatcgggaaatccacggtcacggttagatgagcgcataccctttcatgagagtgcatccgtgccgttgatcgggccgcggacgaatctgatggggcctaggcatgggaagttgccatccgtggatctcggatcctacggtggactgagcgtatcggttagatgtggcccatgtctaatctaagcgcttgaactaggatacaacggctcagattgatccataccccttcggctcgaccgtttcgca

SEQ ID NO: 48906 - DNA, 1926 bp, Zea Mays
gcgcaagccattaatgcgtcgtggtccaagggattttaggttatgagtgctctgtggcccaaggggtttgtaggtcatgagtgggaagcgcatcggtgcctccgccgtggctcgttgccaagcgcagttaatacgatcggtcacttataacggatcggtctcagaccaaacacttgatccactcgagtggtttcccttcggcgcgcccggtcccatgtcaggttccaccacacccgaccccaagctcggtgttgcgaggttcatctacgaatgggtgtctctagggtagacattatctatctccttcagctaaccaacgggccccagttgccagaggccttttcctagtgcgcttgctgaccgatgggccctaggggctgaggatattatccttgacaatagcctctgaggggagagtgtctccctttgggggctggtgaagggtcggacgacgctttattctttcgccttttaagtgatcgtggtgtttattcctcctcgagactcgagctgctttcatggcgacttgtcgtccctcgaggtggagtctggcgcttcacccctttataagtctcgggtggtcgctcgcttgttggtcaccctcggcctcctttttttctccggtctcttccctaagtgcggcttacgaccgggtcggtcgacggattacgggacactgggatatcgcgctccgtgggccatgaggtgaggtaggtttcttccatcgggttcccacaaccccctcctcaggcttgatatttttatcccttctccttccgttgtagagtggtcaccatcgattaggaggtcgtgtcgctacccgtcgagccgctacggtcgagctccttatatcctctatctccctctcactctccctcttcctcaggcgtctacagggagttgcaacaccccctgcatggcgcaataggttgtcatggccaaggacgagtcgcttcgcacgcagctttacgaagccatcaatcgtgtcgttggtaaggcagttgccctccgaccttttactggcttcattgcctcattttcttaccgtgtttgtctgtcttggcagccttggggccaagctagagaagttgcatcgtcgcctgggtcagcttctagactacattagggcacgtggcacttccctggtcgagtgccttgacaatgcctcgtgttgcatccgggacattgccgatttcggcgttcatcggggagtcgcggtggcgctgcttatgagggagatctgctccagctgtcgtcttcgggacatcgtcaatcctccttcatccattttaggtgaaaggctagaagacatgctcgaaggttacgatgagatggttagtcgtgtcgtgcttagggtgtcgactcattacatcgcgcatgacgcatgttgatctgtatcgtacctcggcgttgcctccctaaaataaaaaaataaacttcgttcccggcttttcatgtcatagggcccttgagtctctcccccttttctatgtgagcttttccaagtacattccctctttaaaggcaagggagggagccgcgagctaccttgtctgtggatctccttattagtcatcgcctccctttgcccatggatcagagcaaacctcctagggggattgttcgaggaaatggtacgaccaacccacccttatctcggggtttcctcttatccctcttctggttactcctcgatttgctctttagggtgatgatcacctcttccgaggctcgaaggtgttatggccccatgtcctagacgtccgcctcgccgacccctttcgggtagacaacagacaaccttctgagggatttaggcgcgactcgcatagatttggagacaacaaatggtgatgtctgatgtcttcggttgcgacttgcaactcttaacgatccaggggcaggtagtctttcttgatccgacct

SEQ ID NO: 48907 - DNA, 284 bp, Zea Mays
cagttcatctccttctctccctcgtttaagctttcccttaagtctatgatgcttgccgacccacataatcgagctaggagccctttggtcactgggaacacgtaccaattgtcctcatcgtccgcggttcacgtggacagagcttgatagcttaccaattgtgaaattgatttaggggaatcgttcggggagggttcaatccggtgtatgtcgctcgagagcaccggtcgtagcgtaaatccgccagtacaatctcaccggagttcgttccccgcgctgccgcc

SEQ ID NO: 48908 - DNA, 472 bp, Zea Mays
tatccaagtgagatttgtccagtccttcatagggtgtggtctcggcgagtactccactagggggactcgacccgttgggggcatctcatttagtccttccttattctatcccgtattggccctctggtcagtctgatcaatcgaatggggccccgtagccacccgtcaaccgggtttccatacgagaatgtgaggtacgaccttggacgtgggacctagcaaatgacctatgggccagtcatctggcttgcaactcgctgggagcttgctcggcccacctatcactctacgtggggaggttatagtggatttcagtatttacctagtgcgaggcggttgtgatggtagtgcggtaaaaacagaatcatcattcagcgtgggcggctttgatgggacgtgaaatagcatacttactttatcgtgtgcgggtggcgtgacagtgtggtcaaccgctctgatcaccggtgacacc

SEQ ID NO: 48909 - DNA, 525 bp, Zea Mays
caaccaggtccctgccgagcaagtctgtaaggcggggtgaccgaccaggtcctcgtcgagcaagtctgcgaggcaggggaaccgaccaggtccccaccaagcaagtccgtgaggcagggttaccaccaaggtccatgccaagcaagtccgtggggcagggcgcccgatcaggtcttcgtcgagcaagtccatgaggcgaggcaaccgattaggtccccgccgagcaagtccgcgtggtggggcgatggactaggtgcccgccaaaaaaattagtgaggcagaaacccaagtcaaacgtcgtgagtccacgccaactgagacaagacatgtcaccctaggtcgtggttagacatgtgaacgggaggccaagggcgcgttgagtgaccgctattgacatgaccacacctcctcaagtacagcatcaggcacacctctactgcctcaaggggccgaatgaccctattcatggaggaactgagcatcgaagcttctacagtgacccgaataccgcattatgtggagcaa

SEQ ID NO: 48910 - DNA, 306 bp, Zea Mays
tgtgaacctcctgcggtttgtttgcgtgtcggtttttcatcatcgcactggaattggaaatgaacgaaaagcttcactgaagaaggcggcgtttatcctgcttctcgtggagtttttaacatgtgttgtccctggccaactgtaaggcaaaacgttgaaggtgtgatactgaatatgacgatcaatccgatatgcatgagcaatttggatgtgtgtttttgtgaattctcatgcgtatgcttgaaacatgtgtctggtagtatttgagcatgtgtgcccactcttttgtggattatcatgtgtatg

SEQ ID NO: 48911 - DNA, 690 bp, Zea Mays
cttcgggggcatgagtctcgatcttttccggagcaatttgctctgtcaccttttcttcaggtgcggcaggctctgtctcgatgggcactaaaggcccagcttcggtttcagcttgaacttgtgtagcttcggcttctacttgcttagtttcagtttcggcctacgatttggcttcagttggagcaactttctttgcaggagcagggctcagtgcctttgtagtctccagtacaacatctagcatgttagccattctcctcctcttgggagttacggcagaacttttttgcaccttcggcaaacctgccgctcccggtagactaaggatttctggcatttttgtcactctttccacctgtggctcagccttggctagcccaactgtagttatctttggtactacactcgactctacagtgctctgcataattgaaacaatttcttttgctttggcagctgaagaagtaccttcgccaaattcaggtatcacggctggttcaatgcgacgcggccggtgagtcagaaccttcatcttcttgcccttcggttcagctgtgatagctgaagcagcaatctttcccgaagcagcaatctttctcttcatcccttgccctcgcagcgggtagcaatagtcagggtatacaaagccaatagcatcaaataccctgttcaatcttttcttattccgac

SEQ ID NO: 48912 - DNA, 488 bp, Zea Mays
ccaagcaccagtatcaactgtgaactgacctcacctcagacaatgtgggcatgtggcttgttagcacgatcagcggtgactcagagtcttcagaaggtaaagaccaagacatgtcttgagcgcaattgtgaccatgatcacgacaggaatggttaatggccgctgggatgctgcatcattcaaaacttgtcagttatttctcagaccagcttaacttgacgcgcagcaaatctcggtgtttggtgcaggaaccttcatctgagattctcagatcagctttcgttacacgcaaaagaagatcctagctagtgccaacaagaagcggatatatagaaccctgattgctttagaaatgatctgctcaacacacacacatagtatactactataccagtgaccagtggcaataatatatccatgtaggaatccattggcatgttccagccggccactgaattttcttcacaccagtagcagtaggtggcaat

SEQ ID NO: 48913 - DNA, 677 bp, Zea Mays
ccaccagaattgatgtagcagttggtgagtgtgatgtctgttcaacagatgaccactccacagctgcaaataattctagcagctcaaccgtcggcttccaccgattgtacaaccgtcccaagctctagcgcgtcaacgggaaataaggtctattatccagttgatgacataacaaggcctgtgacatgcacactagttatgagatatggtattaacaataatcgcacgaagaaagtaggaacatgcattgtgatcccaggacgcaagtttcatggaagcgacatactagatgattattgcagggtagaagtgacgacggtcgtacaaggatccgaggatgacatgctagacatccctgggcccgaaggaatcgagacacttggacaagccatcaaaaatttcatcctttggcctcgaagggatgtcgaattggttgatccaccaacaccgttgtcttctcatccccaaccatctccgcctcctcaaactttagtacctgtacatccatcatcacctccacaatcttcccatgctgctcctcatcctctttctaatccattgtctccccacaagcatcaacatttaggacaccaccaccttctccacaaccatcaagggattcacaacaatcaaagaaatctaaattccctgtaccaatattggtgtccacattcgat

SEQ ID NO: 48914 - DNA, 732 bp, Zea Mays
gatttaacctggtctagtttaattgactgggccgataagcacccatagcacacaagggtgcgagaacaaaagaaatgagggtatgaacagacctagggacggtggtccacgacgcgatggctcacgacggaacggagagtggattgagggaaatccgaaattagagctcggtggtagacgatctgaggcacgagcgggtgcactggcttcatcacaacccaacggagctagtagtacccccaatttatagtgtccaagagtggtggcggctattttttgcgatggcgtgttggcggccggagaggagaagtcactagcgcgagtgctatcgtggctttcaccgtggcaaggcctccggcgatggacgggcttgctacaagggttcactgcgacgtgttaaacctcccaggcacgtggcgcacgattggtaagcggccaacgccggtgaagatcattccggccggccgtagaccaagtgggtatggtgaactcaatagtgaccgagtccgagccaatccgggcgctaagatcttttattcccctcagttatccactttgcgcggggcacgaatcgcggcgaggtggaacgcacctaagatctacttcagttactgtataatggccatcttcatcagtgtgtctgtcagagtgaattgagaggcttcattctgcatttttcatgtggtgagctattaatccatctgcaccaaagttgtagctctataaaccagc

SEQ ID NO: 48915 - DNA, 408 bp, Zea Mays
gttcaaaacctttcagttgatatgcccttgatcacccttgcttcttgatggtccatgagcgactattctatctcacacatccttgatgatctcaccattttctcataactaccctcagtaataatttctattacttcaaccattctgttgggaccttacctatctcacccttgattgtcttatccccttcgccacttcgagagtctttccttaactgcaaccttggttatgctttcacgatcatcatctttacccttgtcgcctcaatatcttaccatcaagcttatattatacttgtcctctaaaaaccttctctcttccatctcaattttagagttgtattttacctattttcccttggtagtatcttcttcctcgtcgcttgtgagttttcaagtccatccattg

SEQ ID NO: 48916 - DNA, 314 bp, Zea Mays
catcatgctaagaattatactaataacattttcccccttagaaagatgctgccacgcacaaggctaacggcacgcaagtcaactggaccaattggagtgccccggcatcaactggcccctcgacatgaaagcagtagcagtgggagtaatgaccccataggagatcttgaagcccgagtgagacgacttcaagcagcgctgcaacacaggaccgatgcttgggtcgcagacggggatagaataaatgaactaagaagggacatctgtcacctgcaggatcagcttgctgatcgggacttagcacttgactgggc

SEQ ID NO: 48917 - DNA, 890 bp, Zea Mays
gggtcagagagcttcaccagaggtcagggaagacataggcgcgaggaatttgaaaatggctcaccagatagctcggttcatgcgctgtggtgggtgaccgaagtccggcgagggcgattctactcctccggtgaggcaatgcctcggctcaagcttgggaaagcttcaccgcttcacggggaagtagtccaggggctacggagaggcttggggtcatcgggaagggctggccacggtggtcgtgctcgggcagtgatggcgggtggtggagagcttgctggagttggagtttttgctcggggcatgaggcggagtgaagagcaaaccgttgtgcacatgaggtacttataggcgtcctcggacatggctggacgcaggcatgggggacaagagccgaccttgcgcagcgtgcgcgtagagggcagccagtgcatggccgagcgcttgagcacatgatcgaacacgtggaagtgtgattctgcccgagttcaaacgcctgttggccgacctaaacgtgcatatcttgccaaggatcttgtgtagcgtctcttcactatgccaaggtcttcctgtcgtgtgtgagtcctgagtgaagatatggcctgggtgagaagatattgtggcgtgaagatagctctgtcagcactgtccaaacagagacaaaacctatgtcaaatcgtgtcaaacgattttggtttgatttcaaacttctccagagtgttcctagggtattttggcgccactttgatatttggactttatgcgttcgagctttggaagatagggaacacatctgaactttgggaaagggttctgaaattcagatttctgaatttctgaattttcccatagggccttagttcatgggctgatttggggattttggaaaa

SEQ ID NO: 48918 - DNA, 428 bp, Zea Mays
aggacatattgttactgatggtggaattaaagtagacccaggaaagataagcgaaatactaaattggaagcaaccaaaggatgcgtccaagatcagaagttttcgtggattggcaggatactacagaagattcattgaaggtttttccaagctagtgaaacctcttacctcactacttgagaaaggtaaagagtttaagtgggatgaagcatgctagaaatgttttgaagaactcaagaagagattaaccacttcaccaatattggtaatgccagacattcacaagggatttgatgtgtattgcgatgcatcacacctttgacttggatgtgtgctaatgcaagaaggaaaagcaatagcttatgcctcaagacagttgagaaagcatgagaagaattatcctacgcatgacttggaactagttgccg

SEQ ID NO: 48919 - DNA, 1776 bp, Zea Mays
gccggtgcaaggacctaggcggactggctcgactgagaagaggttgtgtcggtaggagcaacccccgtaggtggtgccgccgatgcaaccatgggggctatagaatgagtacctacaagtaaaagacgtgttccgatgggtgaaggcatcggatccgtctcagacaaaaaatcaaaatcattagttcgagggggcaaggctgcgaaagggaagcaagtctcatcaaagacaacatgacgagatgttaagacccgatttgtggatagatctagacagcgataacctttatgctcagtagaataccctagaaaaacacacctagtagaacggggagcaagcttatgcggcgcggtggcagagaggttcggatagcaagcacatccaaagactcgaagctgcgcatatgtgggaggtgtgttgtatagggcagcaaagggacaagaggcgtggacagttttagtgggaaggcaattgagaagataagtggttgtatgaagagcatctacccaatagcgaggaggcatggacgcctagagcagcaaggtgcggatcatattgttggtggtgcggagcatgcgttcggctttaccgttctgcgacgatgtataggggcaagacatacgaagtttcacaccattggtgagaaataaggtccgggtagaggagttgtcaaactcccgaccattatcacattggacttacttgatcgtgcgcccaaactgagtatgggcataagagaaaaaatgagagatggttgaaaaggtgtcagatttgaggcacagaggaaaagtccaagaataatgtgaaaaatcaccaaggataaccaaatagtatttaaacccggagacactgatgacaggtgaggtccacaaatcacaatgaaaacactgagtagcacgcgacatggactacgcaaacggaagtctggtgtgccgacctaactggcaagcatggcatataggtacatgtttgggcttattacaagaaacaacagcaatactagaaagcttagcaagcacgtcagggccaggatgaccaagatgttggtgccatagggacgcaggagcagtaacagcagcaagggcgtagtgtgtagtggctggaggagcacgtgcagtaggaagactgatggtgtatagtggcccagagctattgcacctaaggattgtgttcctggaattgagatccttcacagaaaggccaaacaggtcaaattccatggaacaattattattagtcgtaaactgacagatagaaagaagattcttaatggtatcaggtgtaacaagaacattgttaagataaaactggccagaaagcactgtatctcctacagaggtgaccgacagactagacccgttgccaacaacgatggatgaaggaatggtagaggtgggagaacgaaagcgggagatgttaccagagtccgaggtcatatggttggaggcccggagtcagcaatccactcggtgatggattggggctgctgaagagtcatcgtgttgaaggaagaggccagcgactgctgatcccaggcaccctgccacgggttccagggtgattgggcagcttgttgttgctggtgcgcaccataagtagcctgtgcctgatgttgtagctgatgttgctgctgggtagcatacagctgcgctgaaatcgggatgggcgccagtggggtggtatgctgggatagacccacgggctggcccagagcagtgaggaacacctgttgctgttgggggcgagggggctgctgcagttcacccatattcggac

SEQ ID NO: 48920 - DNA, 472 bp, Zea Mays
ctagagaaggcggcagagcagttgaaagccctgagtccaccatgcgcaacggaactgccgaagccatcaaagatccctgcaacaactccaaggaaaaggagaatggccagcgtgctagacgctgttatggaatctgtgaagacagcaactgctgcttctgctgaagcgcctagcacaaaaggtgaaatttcaaagaaatctaacgatactggcatggcgtaaactgtttctgaggctggaccctcagtttctgccgaagcaataccttcagaaattgcaccactaatcctggaaaaagagggtgcccctgagaaatccatgtctcctgctcctggagcacctactgaagagctggagttcattgtgcaacatggttcagggaagcaattatcggaggagcagattgccgaagcaagacaatatgccaaggatctgaagtacccccaaggatccttggtgtacagtggtaatg

SEQ ID NO: 48921 - DNA, 493 bp, Zea Mays
agacattccatcaaccaaggcctgtgattgaagacaaataagtatgagaaaagtaatctaccaagaagagcaataaaaagcaaacaattgactcacctgaagattggagaagaacaaaggtaaacccaaatcagagggagtgatgtcatggctcgacggaggagtatcagtaggaacaatttgaagagcgttgtcaggagtaagctcaaccccatcagcagatactagacctcttgcatctagctcgtcggcctccaaggcgacttgtttgtttgaagtcacagaagattgcatccccatcgccccatcggaccaaggtggagacgacccaacatggacgtccatggagatgtgggaaggagagctcacctaaacaccctcgggggctgggttgcagctcgcgccacccactagagctggatcattaccaacaacaccctcgggggctgggttgcagcttgcgctacccaccaaagccgaatcactatcggcg

SEQ ID NO: 48922 - DNA, 403 bp, Zea Mays
gccactggcccacaaggcgcaccctccccctcgtcgttgccttgcccagctctataaactcgggcaccgcatcaccaactaccctttgcatccgcctgtttctaggagtcaaacgcgagcacctctgccgtcatccatcctggttgagagagatcggtgaggaaggagggaccgggcgccaccatcgctatacgcgagccggggtcgtcctatcgtagaaaccaagactactacgtcgtcatctttggtaaggcctctttgagctttgcctttttcctgggaacattgtagcatcgagttcggggatgtgccgtgggttgtattatcgctccgccatggaggccgagtgagtcctcggcgttcggccgttttgcggcggccgcttctccgccggaggcgtccc

SEQ ID NO: 48923 - DNA, 527 bp, Zea Mays
tttggtaccatctttcttctccacgaacaagacaagagcggcccaaggcgaagtgcttggccggatgtaacctttctctgacagttcatcaatctgctccttgagctcaaccaactctggtccggatattctgtaagctctcttaaagataggggcggttccaggaagaagctctatagcaaactcaactttccgctctggtggcatacctggtaagtcctttggaaacacatctgggaactcggacacaaccttgatactctcgattgggtctgcttcactgctatcgacagccatctggtaacaactttctttctttggctcaggcgggactaactcggtcaccacctcctctcctagtggggacaccaacttgattgttctcttatcacaactgataactgcctgatacttatctagccaattcatccctaggatgacatctattccctgagtacccattactataaggttggcgggaaacggtatcccccttatttccacacatacattcaaacaaatgctat

SEQ ID NO: 48924 - DNA, 901 bp, Zea Mays
cagaatcttactattacgaagtgttttttattaacatttgttgcatcatagaatcgcatcatcctgcatcataactccgtatcattcatcatcttgcatcattccaaatagcgacaaagaagggaaattgctccttcgtccataatggtttgtgacaccccagtgtcacttagggttcttccttaagctaaccccaacctattatcacatgcaatctcaatgaaggaataaacattaaaaacgagaacaaagatttatgttgagtcttcttaaaccctccttaaacttgtcatgattcctaaggaaggaaaactctcaaaccctaattaatcctaactgaaccatttaagcataaagggtaaatgggagaaaaccttgggagaaaaatacaaattttggagaaaaccaaattacaaagttttagttcactaattaactaacaaagcatagtaaggaagttttgccttttgaactttttaaaatccccaaaacagcccctaaactaatgcacttgggggaaattcagaaatctgaatttcagccccctcccaaagatcaatctcgttctctatttatcaaaactcaaatcaaacaagtacaaatatcaaagttgtgccaaattcccttgaacatgccctagaaaagtttgaactcaaaccaatttcatttgacacagttttggcgtagttttacctcgggactcaaccttgtgacactgccacctttgtgacaggacaactctctgtacactgccccaaactgctcgacttccacacacaaacaaaaaagctctgtcaggggagcaaatcttctgcagtgatcatgcccaaattcgcgaagatcttcaacctatgggcgcttgaactcgggcagaagcaaaaagccacgtgttcgatcgctt

SEQ ID NO: 48925 - DNA, 353 bp, Zea Mays
ttgataactacccatacgtgcaaactggatggatggctaaactaacattttttatagccaagtatggtatgcagtggtagagataggcacacatgtattttgttttggaactattaatgcttttctagttgtgctgtataaattctaatgggaaaatagaaacaagatttgcaatttcacggtgtattagtgctattgtagtctttagaacatgaacaagctcaccagttcatggcacaacgatgcagatccatactaattgatggaataaatccgatcgtaaatctaagcacacatataccttgtagggacggttcttgatgatgatgaagtcgttcttgcagacgttgctg

SEQ ID NO: 48926 - DNA, 1453 bp, Zea Mays
cgttggtggatttgcgcagagagccctggcgttttgaaattttttaaagagtccatcccactattcctctgtctcgctgacacttgcagaaacacccttgcgcttttctctcttcacaacctccagtccacgacggtgaacggcggggaaccgagctccggtgagcttgtaccggccgatttactcgatgactggcattctactttggcagagaccgaattcaagtcttaatgagtgtttcccctcaactaatttcaccaatggtgctctaacacgccctgtccacggtgacagcgggcactacgggcaatcgagcgcgttcccggcgatctaaggggtcctagtccaattggcagggtcgaggagcatcaggagaacccaaggatgtcgaaacaagataacagggggcaagaacagacctgggattcgctgaccacggtgagggctcaaggcacggtgttcttggttgatttgggggaaatcccaaattggagagctctggtggacgatcagaggtgagagctggttaactggatgcacaattacatagcggagcaggcgggggcggcaatttataggttccaacagcggtggcgtccaatttcatgaagatgcgctggtggccggagatgaaaggggttactggcgctcgggattagtggcatttaccttggcaacctcatcggcgatgaccagacatgctagagcgagtcactatgatgaagtactgcgtctaggcacgtgtcatctgagcggcagacggctaactccggtgaacttatccatagcggccgtggcacgctcgtgtacggtggccggagtagaatagtggccggagtttatctcccgcgcgatatttcttaccgaggagcgcttatctgagttcggtcgggcgtgaatcgcgatgccgacgcggatctgagcgcaagatcaccggcagcgaggtctctgagttggcgtcctgatcaatgctctataccatcgcgcagctctatcagtcagcctgacagaccattttgtagggctcgaatcacgatttttcatgtgatgacttgctaatctaccagtaaaaaattgttgcctgatgatccagctacaatcttactacagcagttactcccaaattcttactagatcatgctcgaatcccagctcaaagatggctcaatcacactgtcagtctgaattaagactcaaggcagtctgacagctcgactttgggcacatttttatccaaatttttcatgtgaccatggtttaattcctgtagcaaagttgctctccttacatagctttataaaattgatgtgttgacctagggcaaaatcttcataatttggaagatatggggctccaaagttgaaccaattccactgaatttcagacttaatagagttcaaatggggctttttgcaaataggtccaaatctcagggtttaagttgcaaatccac

SEQ ID NO: 48927 - DNA, 440 bp, Zea Mays
tcaaggtagaccccggtaaaataagttaaatactaaattggaaacaacccacatatgtgtccaagatcaggagttttcttggattagcaggatactacagaagatttatcgaaggcttctccaaaatagtgaaaccccttacttcactgttggagaaaagtaaagaatttaagtgggatgaagcatgccagaaatgttttgaggaattaaaggaaaggctaaccactgcaccagtgttaattatgcctaatattcacaaaggatttgacgtgtattgcgatgcatcacatctaggacttggatgtgtgttaatgcaacaaggaaaagtaatttcctatgcctcaaggcagttacggaagcatgaaaagaattatcctacgcatgatctggaattagctactgtagtgcacgctttgaagatttggaggcactacatgatt

SEQ ID NO: 48928 - DNA, 443 bp, Zea Mays
aaatctatctgggtcctacagtcaggggtaccataatcgaagcgaccacggggcgacgaacggtaagggtgctgaatcccgacaggggcgggagaaccaccatccaaatagtggcgtgttgcacactcagcacgcaataacgcaacctccgcccgaaccttgcccaacttgtcaagggcgtggtctagctcggtgttgagcatgacgaccaagttgaccaaactgttcagcctcggattgccctctccaacgggtgagagaatcacacttacaacactgccgatcgcacgacgagggtagtacttcaggtccaggccatcaactaccccgctgaacaatgagcaatactgagaaagtgcacgttgtgctacatcttgcatggtggcctcggcagtatccctctcagtgatagaatagtctctgagaaggcctctgcaccccag

SEQ ID NO: 48929 - DNA, 446 bp, Zea Mays
aactacccctaaatacatagagtttatccactcaatcatagcaaaatggactaacttttgatacattgatatgtcggccacactctcttcaaaaaacggtttcaccttgatgcactccttatgatgacgccacatgactcctctaatttcctttggaaccataccaccgaattttaaggcctaaactcgatgaagctcgtgaaactatcgctagatggttttaaggctcaaccaccaaatttccgtcggtagagtactccgtagatatcatccacgtcatggacacatggcgtgcctcttcaaccacgtcggcaataagatccactccttcatgtccttgcgtctgttggtgtccctaggtgtaagccacccaagctaatcatctgccttctctagtctctcagtcaagacacatcactcgttcttcaccgctcttggtctatcgg

SEQ ID NO: 48930 - DNA, 694 bp, Zea Mays
acgactttgatttgattcttaggttgcaaaatgagtttcccaagaatgccatgagagctatttgcagtgacaatggcgcataattcaaaaatactcattttgagacatttttgcttatttgggactcgagcatcagttttcctctctgtatgtgcctcagcagaatggcatattgaacacaagaatcaaacccttgttgagatggcgaggacgattcttgatgagcataggactcataagcgcttttgtgccaaagtggtcaacattgtctgccatgtgtcgaaccacatctttctttgatctttcttgaacaagacttcatatgagttgcggtttgggcggccacccaaagttagtcattttagggtgtttggctacatatgctttacgcagaaacagattaatttggacaaatctaagtctcggtcttctgatggggttttcttgggttatgcattacattctcgtgcttatcgtgttcttaacctagagagtaactgcattatggagacttgtgaggttacattcgatgatactgcaccttatccatctcctttctttgagcttgtaggtcaaaatcagatgggatataaaccatctttgtggaggagcacgacgccgccgattaggttgatctcgagctaattccactagctgcccagtcgagcctgcttccactacttcggctaacgca

SEQ ID NO: 48931 - DNA, 348 bp, Zea Mays
ctcggccaaggaaaacatgttttcatgtatgtatttgactctgttcatccgtcatacatagaagctttacttccctctcatttcttttttattatctcgtgaactgttccggttgtaccttttgacctttttggtctttaggctgcccgcactgggcgacggtaaaagctactggaaaatttttacagttcactgaagactgcagcgggcgacgctacgcctactccattctctctctcttacctttcctacgccaaatacagcgttcgtctggtccctgcgctaaaccgagcgttcgtctctctcctacccactccagtgtttgtctggtctggtcctctgggttgg

SEQ ID NO: 48932 - DNA, 292 bp, Zea Mays
ccctccattttagatagccccttctgtgatcccacagaactcaacatttctggttccatatggcgcaacatctcttcgcaatcaaattcttgaaaattttgattggcatccacagaatccactttaccttccactttatctaaaattccgacaactctctcgtcattaccaggcacttcacatggatccaactcaccatgttatgtccatatcgtgtaattgtttttaaaccatcttttcaacagatgtgattggattactcctgtatctctccaagctaccttattatcac

SEQ ID NO: 48933 - DNA, 498 bp, Zea Mays
tgaccgaggcattgacccctcataaaagaaagaacaaggaacgacaacgtgggaggaggagcattttagccaaaagcgcacatgagactacttgttagacgacctaattacccaactgatcattttgacaacacagctacgctagatggacccattttgacatattcgatgagagatgacctattttataaagcatcatcataaagtaacccattttcacaaattcctcccatagcaatatctgctctctttgcgcacttgtggagtcctgtcttaccatcttggctccatcatgccacgcggttccctatgtgccatgctgtcaaccaaacaacacacccaatattccttgcactagaaccgttgattgcatcatagttgttattgttggtcctcgagtaaacaacaccttatatgtaagatgctctggcaaagttgttgacaattttaacatctaacctatgtatgaaacaacatggaaaactgatgctttttaac

SEQ ID NO: 48934 - DNA, 4852 bp, Zea Mays
cgcccgtggccaacggcggtgagtaccgcggcgtgagggtgctcggcggtgctcaccctccgaccaacttggaacacaagtttgtggagcaggtatttctatttttcttttctgttcgtctctctccacgaggttcaccttatacaagtcttaacagaaagccctacggcctgacagtggaccaacattattacaaatacgtaaacgacaatgaaacacgtattacacttatgccgtaactccggtgatggttggcgccggtgttacatcaccccctcctggaatggaagcttggccccaagcgcttgaatcagggaaacgagcttgcatcaccgtccagtcttcccatgtagccgaatcagctggaagtccttgccattgcaccagcacttgtacaatagccgcgccacctttcttgaccagtcggcgttggagaatgcattgaggctgcaggtccctttgagtaagatcaggtatcttgggaaagtcagcatatactggagagtagtcagcagtatagggcttcaattgggaaacatgaaaaacagggtgcaccaagctcccagccggtaactccagtttataagctgccacgccaatcttctgaagtattttataaggaccaaagtatttgaaggccaatttaggaaagggtcgactggccacagaggattgggtgtaaggttgcagtttcagaagtaccatctccccttctgcaaactgccgatcaatacgcttcttatcagcttgaagtttgatacgagtttgtgcagccagcaagttgtgtttcaataattccagatgaagatccctttccttgatcagtgagggaagatcagtagtggaaacatcagccagcacaggaaaagaaggtaatttcggttcatatccatacaatgccttgaatggggagcattgcaaggatgagtgatacgaagagttgtaccacagctcggccagaggcagccatgccttccacttggctggagagttgtagatagtgcaacgcaaatacatctccagacattgattaacgcgttcggtttggccatccgtctgtgggtgatatgctgtactgactaacagctttgtgtccaacagtttgaacagccctttccaaaaggcactagtgaaaatccggtcacgatccgagacaatagaagcaggcacaccatggagtttaaccacatgagtgagcacggctgaagcaacttgattggcagtgaaagggtgacgtagaggaataaaatgggcgtacttagtgagacgatccaccaccaccaaaatgcaattgaagccatcagagcgaggaagaccttcaataaaatcgagagagatgtcttgccacacaccttcaggaataggaagcggctgcaataatccagctggatgagacttttcatgtttggcatgttggcaagtaggacactgcttaacaaaagaatcaacatcctgtttgagccctttccagacaaacattcgtttgattcggtggtaagtcgcatcaataccagagtgacccccaagagcactagtgtgacaagcagcaatgagtttggtcttcaaagcagagttatgaccgatccaaatcagtgtaccaagccggatcacaccatcaaccaaggaataaccatcagcatttggactgtgcacagcaagctgctgcaataaatgttgggctgcagaatccgtagcataggagttaataacctcttgaagccacaagggttgtacagaagaaatggcatgcaccgacatgtggtgattgacgcgggatagagcatctgcagcaatattttcagaacccttcttaaacacaatcttgaaatggagacccaacagtttactcatggctttcttttggagctcggaatgtaagtgttgagcatccagataacacaaactctgatggtctgttcgaatgatgaactcttggcgttgtaaatattgcctccagcgatccactgccataatgagggccaagaattctttgtcatagatagacaaatacttatgtctgtcgcccaaagccttgctcataaaggctactggctggcccttttgcataagaacagcaccaataccgacagcacaagcatcagtctctaacacaaaaacctcattgaaatcaggtaatgccaacactggggtacaagacatagcctgtttaagagccataaaagcctgttgtgccgcagtatcccactgaaattgctgttttctcagaagattagtcaatggtttagccaacaatccgtaattcttgacaaatttgcgatagtagccagtaagacccaaaaacccacgtaactcagtcacattagaaggtggcggccaatcctgcatggctgagattttagctgggtcagtagcaaccccattttctgaaatgatgtgacccaaataatgaagctggtgttgagcgaaggtacacttggagggcttgacaaaaaatttgtggtgtcgaagcacatcgaatacctgctgcagatggtgcacatgcaagtcaagagcggggctatataccaaaatatcgtccaagaaaaccataacaaatttgcggagaaagggttccagaatatgattcatcacacactgaaaggtggctggtgcattcgtgagaccgaagggcattacacggaactgatagtgtccgtgatgtgtcttgaatgctgtcttatgttcatctgctggtaacatacgaatctgatggaacccagcccggaaatcaatactagaaaagtaacgagtaccagcaagttcatccaaaatttcatcaatgatgggcataggaaatgtgttcttaaccgtcaggctgttcaatttcctgtagtcgacacaaaagcgccaactaccatctttcttttgcactaagagcaccggggaggcaaacggacttgtactgggtacaattaagccagctgccaacaattccttgacctgtcgttcaatctcgtctttatgtaacggtgaataccgataaggtcttgagttgacaggtcgagaatctggaaacaaggaaatagcatgatcgtactctcgctgaggtggtaactcaagtgattccccaaaaatgtcctgataatcttgaagcaaccgagccactggctgtggaacatccgtaagtggaaagctagacatagtattaagtatggccactgaccaaatatcattgcccttgctccatttcagaaattgttcagcaggcaactcttgaagatgaagctggggttgagaaacacccttaagagtaaccactacccccatatcctggaaggttagagacttagcattccaatcacaaagcatgggactatgagatttcaaccaatcaaaacccaaaatagcatcataagcactgaggtccaaaactctcatatcatgcgtgaatgtgtgacctgctgtccaccactgcatatgtttcaccacagcatcagaaattagtgtatctccattagcaaccttgactgtcagcggagataaagcagtaataggtaaatgaaggcggttcacaaacgaagaattgacaaaactgtgggagctacccgagtcaatcagaataaggaatacttgattgcccaccaatgcacgaacgcgcatggaatcagcagattcagtaccggctagagcgtgtaaagacaactggcaaagatcttggactaagacatcttccatctccaactgattgagagtttcttcagtcagggtctgatccaagtcattcaccgccagtgcatgcacctgagccttaggccgcttcagacaatgatctgcatgagtagcatcatatttctccccacagaaataacaaagtccattagcccggcgataatccctcaactgtctttccctccacaagccagaggatgaggcagtagacgatttgtcagatttaggagtggaagaatgatatctgggtgtaaaaggtctagctgaatgcactgaggacctctgtaaagactgctgctggagtttggccaagaaactagcccgagcaacagttgcgggagcttgggaatgaaccacccttttaatatcctccttgagacctttcacataatgagaagtaaagaacagatcatccaaatgtgggttatgcatggccacctgatactgtaaagaggcaaaactttgagtataatcctcaacagtaccctcctgtcgaaactcaagtaactcatccaaagctgtgtgatagtcataggtaccaaactgatcaagtactgcactcttaagtctaggccaggctacaaacccatgctgtaatttgaaaacctggtaccacttggcagcatttccctccagatgtaaagagacagatgaagttttcagatcatcactcacattatatatgcgaaagtattcctcacacttgtcaatccagatcttaggatgtagaccatcgaaacgtggaaacgacattttgggaatggaggattgctgttggtatacctgatcatcatggtggtgacgaccctcagggcgcagccggtgatgaggatgacgcggacgcccggtaggcgcagaagcgaaccagttctcttcctctgcatcggatctgttggagactggagaagaaactgcatccatcttcatttgccacatggtgaggcgcgccacagcgtcacccgtagccttgagttgctgggacaagagaatttgatcctgggtactctggttcatcgccttcgctgtgagatcaatctgagccgccatctgctgttgcgaggtgtccatggaacggatctgcgcaaacagcagatcgagactctcctgcatcttgttcaaccggacgtcctccttgtgtgtcgcgtccgccatagcgtcgaggagcagctgggtctgcttcgac

SEQ ID NO: 48935 - DNA, 798 bp, Zea Mays
gttgccgcttccagcgccgtttccgtggctaccaacggagggaccaccggtgagctgtggcatggtgccaagcacgcccgcagtgggtttgctggaggagggacgacttccggtggaaaggagggccgtagagggtgtcttcaccttgtcgttgagagtaagctcctcaaggagcagatcattgcagactttgttgaacgtcgggaagggcgtctggcgcttggtgaaggacgccaggtgcgcgaaccgttcgttcaggccacgaagagcagcgaaaacgagggtccgatcgggaacaggttcactgaggctgcccagttggtcggccatggacttgagacggcggcaataatcagagatggagagatcaccttgcgcgaacgtccgaaactcagtgtcgaggaggagggtgcgtgcctccttgttgccaagaaacacgtcctctagaagaagccatacagcgcggctggtgggttggtggttgatgtcgctggaggtcatgacaatctcaaggaggttgggagagacggtgcccaacagccaagagacgacgacgcaatccaggcgatgccaaggagcgaatccggatggacttcgtcggagaggacgtagttggtgagagagtatttgccgagggtgatgatgtggagtccgcgccacttgggataggccgtggatccgacgtcgagggtcagcggaacaagagacttgatgttggtgagggcgacgacctgagcgtgcagattggcgatgagaagggcgtcggctttgtcttcgcgacggcggcgttctgcggcc

SEQ ID NO: 48936 - DNA, 319 bp, Zea Mays
atcctcctggccttccatcaacatcgtggtggtcggaccaccaccttctcctgggggaacctattgactcccctggggttgttgtgccaccctcttggcgaccagcaccatgctcaccgcctcggaagccgctgcaatgtacaagtacaacggctctggagctaccaatattggcagcgacataaggtgctgcttcaactcttgaaaggcacgttctgcctctttggtccaagagaatggaccggacttccgcaacagcttgaagaaaggcagtgccctctcagccagtcttgagatgaagcgactaagggcggctagg

SEQ ID NO: 48937 - DNA, 434 bp, Zea Mays
aaataagtggtttgttcttatcgacttactggcatcacgataaaaggataaaatatcacctttcttgagattcttctccttgataaagacagaccaacccttggtcaggacataggtcttgctattattccagaggcaaaagcggaagcgccagactaaccctgtggaggtgtcctcaaaattgaggaaaatgtcatctccaccactctttacctctgaaatcataggaaagaacccctctgcacattgccttggtatcagtagacgatttagtttaccaacatcgcttggagttaaaaccttgctgaacaagtactccaagtgaacaaccttcctggcccttttgctttcttcacatagatctaaagctccatgaccattggtcatgccaaattgaaaaactggtacagacttggatgaccagggagagacat

SEQ ID NO: 48938 - DNA, 551 bp, Zea Mays
gtgtcgtcttgcgtcatgcacgagggatggttaattccgatccagtacaagaaacagatgagccaatgaaccaaatgcctcgaacaacagccatccactacgtatctgtcgtccatgctttgcatcgaaaggccatcaaccgtctctatctcgttcccaactggtctagctctcgcgaaacagtacacacccaccttcgtatggagctacaataaaatgctcaccaatgactcgtcacaagcgcgcgacggtcttgtagctcctcactcatgaggaagcacttctcctagccgctagcaatgacttgtgacacttcatctctcttttctgccacgactctcgtaacgatggtgttgatcgtgctcatcggcgacagcaacaccatgtgccacgtcgtgcggcatcttgatcacgccccgcccccgtcgctcttttcgccgtcccggacattcctgtcgtgccgaagccgctgatcatgcccatggccacccttccactaatgctcgcatgggagtcgtgtcacagatccatgtggtgcctaacaccgtcgt

SEQ ID NO: 48939 - DNA, 957 bp, Zea Mays
taaagaggttaaggctactttaccaaaagtctggatccaattcacaggcattccaaatgacatgatggaattcttgctaatttgggcggttggatctattttgggggtaacaaaaactgttgatatgaagtttaccaaccaatatggtatttgtcgtcttcaagtgatggtgttggaccctttgctgatcccgcagttcattgaggtggtgattggtgaatgtttatttgagctgcaatttcgggttgaagaaaacatggatggtgacagcccagttccagtggatatggatgactttagctgtggggaagacgaaaataagtcggatcaattagaggatgtggttcgtgggggtaattctctgccccctaataatagtgctccagatagtggcaaatctgtttcaaagggtgctggtaatgatggtaatactggtaaaaagggagcggcgcatgatgttattagctcggtagtccagtatgctgatttgggtttgggtatgcaaggtgttgatcatgctggtaatcccactcaagctgttgtgccagcaacctcgtcgtgtatggctgtttcggtgccgtgtactccggatgtggcagctatggctgctgttccagaagcaactatggggctaaccgagtcaggcaggagcaaaagaagaaacaggagcgggaatggggacagcatgcaaagagcttcaaagttgaaggctgctcgcaatttagatgcggtcctctctacaggtaattccatacgcagcctaccttatgttcttattcctgatgaagtagtgcagcggttaacttctttaggttttgtttgtgggaataatgataaatcttgggacaaattcctagagttgttaaccaataagctgagtggtgagtctggtagtttcgtagatgccaagtcagttgctttagagagagaggaaaaagagaggttagaggatcagga

SEQ ID NO: 48940 - DNA, 585 bp, Zea Mays
atcaaaacgttttggggcccaactaaatgagtagtatatttgagactcaaagaagtgcggccctataccattcacgctcctttctaacctccacagatatttcagacttcttcatcgccaagtgcaaacatctgctcctgacccggtggcactcgaccacctgttcccatctcgtgcttgcttccatctcgacaccgtggaagcccttgcccttgttcgtcctcttgcctccctagcctctccttgctcccctcctcctgatctacttcgtgcctgagatggatccaacattgaaggtcgtcatcccaagctcacgttcgtcattgaggcctcacctatcatctcagccgttttgcatgtcagccatcacctcaagcaccatcgtctatcagggatgcctacaagtatatgctagtttttgttcttatagattccaaattttagtgctgggcatggctgaatattgaaagtccatggggtcttcatatgtgtgcatatgtgctagatgagtaatgaattgaacagtaacatgcagatatattgttatttatgtacaagaattagttcagccttaaaatccataga

SEQ ID NO: 48941 - DNA, 781 bp, Zea Mays
atttcagcagctatttttggctttcctctgatctctatcgatatcttccttctatcttgatacattcattgcgtatactgtacggatgtgactgcttgggaaaatctattgaaaatttctggacgtcctcgcccaatgggtgtaatcctgctgaagttgaccccaatgggtgtaatcctgctgaagctgaacccaatgggtgtaatcctactgaagctgaacccaatgggtgtaatcctgttgatactgaccccaatgggtgtgatcctgcaccatcctttgtccgcattttttatgaagacgaagaagaagaagttccactaatccacaagaatattccttctttagctctgtctgctctggttagccttcaggatttatctataatagattttgactagacccttaaggatgtcattcctgaggatatgctgtcggagccgcctgatggtgatatgatggatgttggctcttaccttctagatgtgggattggaggtgtcccgggcagcatctcgcgtgtcgtcgaccttggaaggcggccttcgatgccaagaggttggtcaatattgcccgactcccatggaggtgactgaggatccttcagccttagaggtggctgttgtagaaaacccagcccccaagggtggtgctggcggttacccagcccccgagggtgttgctagtaatgatccggctcgggtgggtagcgcaggctgcaacccagcccccgagggtgttgccggtagtgatccggctccagtgggcagtgcgagctctcc

SEQ ID NO: 48942 - DNA, 1373 bp, Zea Mays
gtgcataccactggtagggcgcaacgcggcgagccgcgctaagccccgggctacaaaggccaggagtcgacatagcctaaacgatggcctgggacccatgcagccctgtgttgtccaccacaataaatacgagacatcgaagcgaccctagggcccacaagaacgtgtggctttactccaggtaagaatgtttggttttacctttgccttatggctccttcctaagaaaaccattgttgaccgacctctctctcgacctataaaagggagggattggtcccctagcaaagggagagttcacttggattcgcaccctaactaggactccactctatagcttctaagctccacttccaccctaatgaagagacttgggagcctctcctccctctctcgcccgcttgtaacccctactatgagttttatcatcaatggtgtcggtagagcaattcgtcgatgactggaagtagggacgttctgcatgaccggtataaatcttgcgcccaccgtgcacaccctacggagcccgaaatgcgcacagtaaatttacttgtcggagcgaggttcaaaacaccgatagttggtgtgccacgtagggggcttgcgcgttccgcagcgaagttctccaagctccggatgactagagacgacagcagtgcagtctggactcctaggacgaccatccgtttcaagagtctggacttcgtcgtcaataaagaataagaagagatgacgagggcctcagaagttgtgtctcccttgacgagtgacctgtccgatgtagccagaagtctcggcgacctcccactcgaccccctcaggagaaatgggtcacaaagctcactatgacccactcattccgagatcgtgggggtactagaccccgtccgggactcgttcctagacatactcctgtcgagatcgggggatgtaatcacgtccccacctagcgaggcaatctgcaaccctgaccaggaatgcctcgcagccaataccacgggagatcatttttcccatgcgggaagctcagatggagcctcacccagcatcatggtgcgcgccacgacagctgaacccgcttcccaaggaaccgccatcaggcccgagcctttcgcggagcagccaatgccccgcagcaagaggataagaaagcccacggtggagaacgacacgactacaccaagtggcggggtgacggcacaccatgatgataaacgtctgtcgtcgtctagtctatggcaggggcacggcgttgtgtttccctcgggtgagccaaaacgtcgcggctattgcggtgcttctggacaagcgccccaaggcatatactccaaacgaatggaaaacccaccaagagattcaggatcttctcggcc

SEQ ID NO: 48943 - DNA, 1441 bp, Zea Mays
gcttgatgttcctggcgtcaagtggtgatgtcctcttctcattactcagctcaatgtcccataacttgaggtagcatttgccagctaaccagtgcacggaagggggatgggtccttcgatcggccgaaggcgatcccatcaaaagactcatggcgtttgttcgaggcagagtagaggacgacaagcctgctacctctaatctcgcgtactttggttagtcataccatatcgctgatagggtcgacaataggtggggactgaccttacattgatcgagttttttgtgttccctcgagttgcactaaccgcacttaccgaggtcgtgctagcagccaatcctagcgaggcaaaaggtcctctcccccgtggccttttgtctttctgaggtttgggtctccatccagacagtgccgctttgcataggaattctctaagtaactcacaatccttataggcatgttagactgagtggcgatggtttagacatggggcttcaaagagttttttgaagtggtcaggggtttccctggttggaggccttgttcccgtctggcttactgtagccgccaacacatcggtttgctattgtctgcctctccttccttttgcgttgaactggtcgtcgatgccctcatccaaccctttatcatgcccagccttccgtttgtgacgaccgtagatggccctcacagcgtcctctcctaatgcatggccggtcgtgatgtcaaaaagctcctttgccatccacgaggtcttctgtcctagcttatgcaccagggttttgtcggttgtccccaactagagaccagggctcgattccccaacgtactttgcgatggtaggggtcctatagtgccacggtacagacatccataggatatgatgatcgaaaccttgaggccccgatggctgggcttgggcttcggtcctcgttggggtcaaatcgacccctgcagtgccgactgtattgatggtcatcatccggccccatccattcatcctcgccgctccccagatcaggcatggttcacgctcccacacacattttcgggttcctatgggatggggtccatttcgggtccgcttcaggcttgagtagttttcccactagggcgtcgttggatggcgctctggtcagcccccggctcccgatgctgcagcgcgggaccttcggcttgcagccatatggtgagacgaagcgagcttttgtgtttctaggtgggtcttgggaatttttgtcttaggaagctcactcaagagtatttcagcagccgcgatgttccggcgcgtttgagggaaacgtggtggtccgaccttgccgtgggtcggatggtgtagggtgcgagctacttcgatgcgtgtttgccaaacgccccgttgtagcttttctgttcgccattgaggcaacaatcatttcctagcaaggcaacctcgcttgctc

SEQ ID NO: 48944 - DNA, 469 bp, Zea Mays
atcagatggctattgatagcaaagagccagatccactcgagattatcaaagtggtgtccgaattcccaaatgtgttcccggaagacttaccaggtatgccaccagagcggaaagttgagtttgctatagagcttcttcctggcaccacccccatttctaaaagagcctatagagtatctggaccagagttagttgaacttaagaagcagattgatgagctatcagagaaaggttatataaggccaagcaccttgccttgggccgcccctgtcctgttcgtgaagaaagatggcaccagaaggatgtgtttggattatcaagctctgaatgaggtcaaaatcaagaacaagtatcccttgcctagaatagaagatctgttcgaccagttgagaggagccagcgtgttctcaaagatagatctgaggtcaggttatcatcagctcaggattcgaccttcagacattctgaa

SEQ ID NO: 48945 - DNA, 975 bp, Zea Mays
ttcttaagtttaacactgtataatgctctatttttctcgtctcgatttggggctaggattccttctggtattttcatatagatatctgtatccaagtttccataaatattagatgccacaagatccattagtttcattttttaaatttaatttcactgccaatgagatcaagtatctaaaggtaattcctcccatgactgcagagtaagtttcttcataatcaactccagggcgctgagtgaaaccttgagcgactagccttgctttgtaccttgatatttcattattttcatttctctttcggacaaatacccacttataacctacagggtgtatgtggcatggtgtgcggcttacgggcccaaacacctctcttttgtctagagaaattaattccgcggtaattgcctttttccatttatcccaatccggtcttttcttgcactctgcgatagatgtcggttctgggtcatgatcaatgattgaggcaactttctttgcgaaatatatgtctatgttggttgttgctctgttcatgcattctccagttaatacatagtttatggctatttcatcatgggatgctgattgcatttcttcttgtgtttcactactacttcttgttgcgggagcaagttcctttagtttttcatcgcctttgtgtgtgcacatgtttgggttggcgatttcttctacggaaaggttcaagtccgaaatgcttatcttcatatgttccttcccggtgctaggtctcatctggctccccttcttgctttggggcatttttgtgatcggctgtggcaagtcgtcttgccctcttttcttcggacgtctccgagtacttggggtttgagaagccagagttcatgtccttttgttatgaggcctcttaacaggatcggctataccttcaattttatttggtatttcaaccctctctggtgcattccgtgcaggaacatgtgacttaaccac

SEQ ID NO: 48946 - DNA, 647 bp, Zea Mays
gctcatcacacatttttttgcaacacaagtttttttctagcacatgctcacaattcagcaacggctcatgccacattttttgtagcacaagttcacaatgcagcacatgttttttgcaagttccagtacaagtccatcattcacaatagtacacgacttgttcaccattcacaatattacgatccaacacaaattcatcatatgacacaagtttacaatctagcacaagttcatcattcactcaagcacaagttcatcgttcacaatattacatgacttgttcaccgttcacaatagtacaatccagcacaagattatcaagcagtccaacggcgaaacaagttcatcatacactacaacacaagtttcctacttgcaattgtagttcatcacaaagaacaacacaacaataaataacatagaagatagaagcataaaaggctctagtcacatcaataattttgcccaaattttcattcattttcttcacgcaccaagttgatctaggcagtcatatctgtcctcattgccaacatctcccttgagctgctcttccaccatgtcccttccaccatcttgacataattgttcatccacatgaaaaagttatattttttgagaacctaaaccactaaaataaacaaaat

SEQ ID NO: 48947 - DNA, 324 bp, Zea Mays
ccatgatcaatgcgatttcctgattgatttgcaacgtctacaaggggcttgaggctataaataaatcccctcctcgaccccaaagagtacaagtagcaaacaagtgtagaacaagtgcatacccattatctatccctctcttatgtaattctctatagataagcgttggcgtgtttccaagccaaaagagagaggcgtgatgctgctgcaaagagctagagtgatcttgagcaaagtgtgtgcattgtgttcatctaccgaatagcaactagaggaaggagctgaaatagactccaagctaggtggataactcaaacgtgcatg

SEQ ID NO: 48948 - DNA, 1040 bp, Zea Mays
atccaaccaagccaccgaatcgctggatttcgtcgtggggggaagctcggtggaggtgtgtgcgccgcctcggtgaattcgcattggcgcccgcgtcgggttccttggacggggcagggagcttcgtttcgtcttcctgtggctgttgatcgccttcgagggagaaggggaccactcgcttggtggtaattcctcaccggaatttcatcgccgtcacataatcgcactgctccgtgagcagtcgactctactgctcggcgtccggtatgaacgcagcctttgcattctccgttaccctctcttgatttgtactcgctccgtaccccgataggacacctagatgcgggacctgggctcaccgtcggggcgccgccgcggctgaaatcacgtcaccgtggtatgagttgggagatagaagaaggctaggcgtcgtcggtttagtagtcaacggtgcagatcaatctaggaagtagcctttcgcagggggcgatctggtccattagatcataaatggacagccgcgaagtgatcctaacgttttaaatccaaaccgtcgatgtccgatctcgcggctgcgattgcataccggttcagtgtaatgtggctctaatctggagcgtagatcttagatcgggcggtcagaaacgctcgatacccccttcgcggtgcacttttgcataagagcccctcggtaagtaggaaatagaacccgccgtccaccctcactgcgctctgtgtctatagatttttaccgctgggcccctggacttcccagatattgacgcccagtccagagtagattaaaaatagagaaatgatattagaaattcgtttttaatacaaaaacaattctagaaacttgtttattccatagaaaattcatttttgctccaaattgaaccattctaatttctaaaattttgtaataatattctctatcatttagtatcactgttttgacatgaactcagttagaaaattaatttatcatctaatcctattttaatcacattaaacattaggaaattcataacttgaac

SEQ ID NO: 48949 - DNA, 525 bp, Zea Mays
acttcttatagtgaccttcaacattgatattccaccctttgagcatttgtttcagacgcttaattttcaatttccaaacatcaatgctatggtttgccctcaccgggagggaccaattatctatcactattttgtgaaaatctggtctaagtctctagcacaactcatatttaaaatctttacacacggtgggtatagcatcagtccgaagacacaaaggagcatgatccgaaaaagacctattcagaacatggacactaatgttgttataagcaagatcccattcagggctagccaagaatctatccaatttttcaaacgtaggatcactatgattattagaccaagtatacaacctatttttcaattcaaattccattaggccatgttgatcaataatactgttaaaaagagagctccacttgctaaaaccacctggtttatttttttcttcagctttccttataatattgaaatcaccaccaatgagcaagggaacctgacttctcaaacagaacgccgaca

SEQ ID NO: 48950 - DNA, 633 bp, Zea Mays
ccggttcaggcggttgttgtggaactatgtgaactaactggcaacaagcgccagctcctcatccctaaggctctccacctactccttcgggatggtcaacaaagaagacaaagcaaacatagcatgtgaagtgttagaagaagagccacctatagacactagggccatggtaggtgcactaggggtctcaatcatgccccgggtctagtagtcaatctgtgtggacttgagcttgctgaaaagctcatccatagtgtgagtctcatagttgggcgactcgaggatcgttgataccttcacctcccaaaccctccgatttagagcatgtagtaacttgagtgctctctcatgattgtcatagggcaattgcgccttgtttcatgcatcttcttcaccattgactagaagcaagaaaacaaagtgtcaatggtctatccagtcaactaaacaaagttctcatactctcgttggtacatctcaaagagtctggttttgaaatgatcgttaccctcatgaatttatccagggtagtctagaacttgtgagtcgtacccaagtgtccaactctctcaaacttcacaagcgagagacatgagaactgtaacaccctaaatttggggggtataatttttc

SEQ ID NO: 48951 - DNA, 544 bp, Zea Mays
ctgtgtggatatgacttcttcagaaaatcttttgaaaattcttggcaacacacccaatgggtgtgcccaaggggtgtcttggtacgcagagtgtttaccacactgtcctggagtagtaatttgaggtgatcgcagggtgtaatcatattgcttgagcaattgaccttggtccaaacggtgtcatgttacgcgaagcagcgcctgttgcctgactcattttcaggcggtttgaattgcttattgaatacttgcgactgttcggcgagcgtggtaggaagtggacagtcacccccgacctctataaatagcctgcttgccccgttgttctcttcactcatccttcgatcgtctgttgttttcttctttttcactctctccttctccaaccaaccatgggtagaggcaggaggggtcgtggttggcctcgccgcgctgacggcaaacgcaagcgtgccccgagtcacccctcggaggactttggggactcggagtacttggaggaagcctcctccgagtctgaccgctcgcctgctctggcttctcc

SEQ ID NO: 48952 - DNA, 466 bp, Zea Mays
gcgcaatcgagaactggaggaggtctgctgcggagggtggcggccggcgctcgagagcataccggaaggcagcgatctctagcatgcacgtacgacagcgcctggcatcggtcgttcagatgtctagctctagcttgtggaagtcactggatcagtgacggtcgtgcctacactacactggagtacacaagatactttttgggaataagcgtaagcaaaacatgtgtgtgctgggtataacattatatacacatatatatagagagaaagatagtattggtaggagttttgagatagggattctcttcatcttttcttgctgcctacgtgtgcttgtaaagaagaggtaaagatgatcctggaaatcaagcaagtcctttatgcatgtatactatatactatgtgtcctaatcagtgattcagtcatcacagttacaatcccaagggatccatatatatatataag

SEQ ID NO: 48953 - DNA, 280 bp, Zea Mays
ggacgaatgaaaacaggttgtttaaatggataggagggtggacgaggcgaagaacgattctgattgaaaggtcggattaccagccttgttcgcttctcaggtccctgattgaacctgtcacctccaaatcccttggattttccttggcctatattcttggcttctactgccaacgccgtgctgacagccctgctgtatgtaagatctaggcaggtggccattttccattggagccggtcgttgagtcctctcatgaagcaattcttctttttcaggtcag

SEQ ID NO: 48954 - DNA, 535 bp, Zea Mays
ctggcggcaaaattgaagatgccagagagatggtcaccgccagcacttcttttgttcatgctgaggcgggaccttaggaaactgctctagaaagtcttgtggaagagagccttccaagaaaaccctcgtcacctgctcccgaagcaccttccaagattggtttgaattttattgttcgacatgcttcgggaaaacgattgtcgatagagcaagttgccgaaactaagcattatgctaagtagctgaagtacccctagggatctttgatttacggaggagataatgatgatgatttcctctactgtctacctgacggtaaggagatcaatgtttgccgtgaaatgatggacaacatggggtattcaaagcttgaactcggcctgtctacgatgtctaaggatcagcttgcagatagccttgcctacaacagcctgaaggtttgtatactttggtttgtcatttcacaattgttgttatgataaacaaattatgtgatatttcttattgtcgttatatgttcactcttcgtttttca

SEQ ID NO: 48955 - DNA, 423 bp, Zea Mays
taaacacccagggcctaggccaacccctgcttgaggtggttaggctaaatcgaaatgtatcattggaccaaggtttttttgttatcgaaagtacatgactcgttataggtagcatgcactatataaaccaaggcaggatcaacactgaaatcaacgttttcgtcatcctagctagttgccacacaagaaaaggctcatcatgtttctcgttgcacctgtagattaattccaacggttcgacaccggagactaccgacgacgctcctcctcaagggtctaatgtgcatcaagaaagggaaactcatcaagaggaaggaactcgagcccgtaggcgtatggtactatggctagtgtccacctcggtcatgaagatatggttcccccatccacctctttctgcacactcacacgcagtacacaacc

SEQ ID NO: 48956 - DNA, 1236 bp, Zea Mays
ctgcagtagaggggtgaccaagcctatggtgccacaatgacgatgacacctttgcaacaccaggggcctgcttattggatgatgactcactggaggatagcttgatgggatagaggccagcctcgcacttgcctctatggagtgtttgctttgtctcctgttcttttataagaaaatgttcaggatgaaactcaacaaagacattgttgtctcgggtgagacgattaatagaaactagacttttgttagcacttggaacatgaagaatatttctgagatgaattttatgcgaaggggactgcaaagtactatgaccaacatgtgagatctccatacctgagtcgttggctgcatgcacctgctcacctccgtgatacttatcatgaatggtcatcttgttcaactctccagtgatgtggtcggtggcacctgaatccatgtaccagttggtgtccaccccgtagttggttgatgcagcagatgcagatttttgtggacgattgtcgttgtagcgctcatcgaatcgattgtagcacttctaggcagggtgccccttgatgccacagatctggcacttgacaccatcctggtactcggggaaaggagttcgagtacctgtgcgaccgcccttggggccacggttgaagcctccacgaccaccattagggcggccaccacttccttgatttggcttgaagttgttgcgattccccttcgcagcaacgttggcggatgactggcttccaccgcttctcatctccaccctctgctcatgactcaccagttggctgtacatttccccaatagagattggctgagtcctattactcacgcccgtgacgatcgagtcatactcagggtcatttagcccggtgaggatgtaggctacaagttgatcgtcttcaattcttttgccgaccgatgccatgtcatcagccaagctcttcattttcatgaagtactcattcatggtggagctcaccttcgtcgtcgttgccagcgccatgcgtgtggagatcagacgcgcacggctttgagaggcgaacatctcttcgatgtgcgcccatgcagatgttgctgtcaccttcatggagacttgagcagcgaagtcccgtccaagattagacaggagataactcaggaccgtctggtcctttgctacccaggatgagtactctagattgaccaccagagggtcaccttccttcgcatcggccttcgccgggaggaaccgat

SEQ ID NO: 48957 - DNA, 528 bp, Zea Mays
ctacaagtttgctacagatggattggcaagttcttgcacaaaaaattcgagatctaggcattgcaattcggtctgtcacgcactctgaatcagggtttcgatggtacagtgtaaagatcatatcgccagaatcagtttatcacgccgccggtgaccacacgctcggattcgcgcccgacgctacgattcgtgctcaaagaagtaccgattgttgctcggggtagtaaatatcatcgtgtggatgaaattgagccactgttcactctggtcgccgtgtccgcctagctcacggccgcttcggaatcatcctcgctggtgatagccacctcgcgaccttgctccatgtgccttggtgtcttaccacatcgcagtagctcgcgttatgcatatccggtgatcatcggtgagctcgccatggtaaaagccaccaattgcttgtgccagagcacccgcttctctccggccgccgctcatggatcctataaattgagcacacccttggctccgctgggtattcaagcacccaac

SEQ ID NO: 48958 - DNA, 467 bp, Zea Mays
tatagacaacaactaacctaaactgagcctatcccgatttaccgaggatcatatgcttaccgatacaagattcctacccttataaatcgggtttgacatgtttataaagtatcatcttatctcctaatttaataggatctttgttatcatagtattctagggacatccttgcgcaagaggatcttcatcggacatgtgggctgagttcgtatgttactcgccatgtccagggacccacatggcatagccttctttattggatgattagagaatatcatgttatatatctttaacacttcttggaatatcctaatatgattacatagtccaagctgttgacaagatataggacatgtttgtgtcaatttttttttgaaaatttagttgtacggagaatctgaatgtagggagaatttgagtaccatgggaattacgtgcggagaaagttaaaatggaccataaggttt

SEQ ID NO: 48959 - DNA, 459 bp, Zea Mays
tcaggcttccccacagacaggactgtgggttaatttgtgaatattacggggtctcttttataaaaacacacggtgaaggggtatcctccgatttcagccattggatcagatccaaaggccgaggttagatcgtggtcttcctaaaggctacgctctgatcaccgctggatccaaaatcaacggtagaaaccgaagccgatccgaacccacacactggccatccgatgccgcatcgacgcccaggattttaaaaaggcagtgaccaacctcgcccatgcgatcgcagatcaacgacccaggctccaatccctaactcctctaatcgggactgttcccctagaatcaaacggccaccggtgcgtcttcctaccccagttcgagcagagcgccggtgccctgccccaaccgcgatggtgccatggccgcgacaccgagcctcgacgcccgacaaccccgaac

SEQ ID NO: 48960 - DNA, 480 bp, Zea Mays
gcggagtaaagatcttggcaccggataggctccgaaccggtcactggtgggttcaccgtacccacttggcctacggccgatcgagatgatcctcgccgtcgttggccacttaccgaccgtgcgccacgtacctaggggctttaacacgtcgcagtaaaccattgaagcaagtccgtcaatcgccgaaggccttgccacggtgaaagccacgatcacccgcgccagtgcatttctcctctctccggccgccagcgcgccttctcaaaattagatgccaccaccgtaggactctataaattgatgccccattgagttctgctaggtatttacgcatccaaagcaccagctctcgcctccgattgttcaccatagcctctcaatttctcttttcccccaaatctgttttccgcgtcaccgtgaacacctcgctgtggccagctctctgcaggttagttcaagcttcttggcttgatgttctcg

SEQ ID NO: 48961 - DNA, 797 bp, Zea Mays
acaactttgctgcagaactttaagtatgttaccatagagaattgtgagcaaattgggcctaaatactggctgtcagacactctgaataggtattctccatggtacagtgcacagattaggacgacagcgcgggcgactcgacgccggtgacccctcgccgtgattcacgccaccgctgtaggattcacgtcgccgatgacccgataaggccgccaggtaaaagccatcccctagagataactccggtgactcaccgtgactgcccttctgctttgcggctgtagccgataagctcaccgtcaactgccgcctcccggccgtgcgtcgcgtggctcaacccttccaccgcgtcgctgtaactcgctactgctgtcaaatcaacgccggtgaggttgccacggcgtaggacactaattcgcgtgcgccagtgttcttctccacctccgaccgccgcgcgtcttgctcgaaattcacggccaccacccgctagcactataaattgacccctccctgaactccgtagggtagtaagctgtccagccaccacgaattagccgcagtcgttcactggaatccgcgaatttggaattctccccaaaacccactctccgccaccgtgaagaacaacccgccgcggccaacgcaaatcagggtcaatcctgtcgttgtttgtgttgttcgtacattcttgtatgaccacgatgctcactgccccacttaattgaattatctcgccaccaatcgccgggaacacaaccgtatagccgccatgatcacggccaccgtggccagagcta

SEQ ID NO: 48962 - DNA, 410 bp, Zea Mays
gccttagctgtgacaagaggactgtgaagttagtgtccttattaggagaggaagtgttagtggagttggtcttgtctggaccaaggaaaggtagttgtaaccagatcactgctcatattgaggaaatcgagccatcagaagctatcaaagtagtatcagaatttccagacgtgtttcccaaggatttaccaggcatgccacctgaaaggaaagttgaatttgccatagagcttatacctggtaccacccttatttccaagagagcctatcgagtgtccaggccagaattggtggaactcaagaagcagattgatgagttgttagagaagggctacatcagaccaagtacctcaccttgggccaccctagtgttatttgtggagaagaaagatgggacaaagaggatgtgc

SEQ ID NO: 48963 - DNA, 1795 bp, Zea Mays
aaggaattaggtagaatgagaacgtaaagttgatgtttgtagaattatcatgaaggctagtttgataatatacaaccccttttattttaaatatgatattttcatgaaaattgctagacaaagctccacatggtgggttgtatcaatgtaacaattgacttatattcagatttggagggagcacttgttaccaaaatgaaccaccagactattttgagtggttatgtcaatacttgtccaggatcatgatgacactaagcaaaagggagataaaaaggttttgttccaatatatacacaaaattatataatggaaagtgtccccgtgggacactcatcttatagaaatttcagcagtggatgaacaaattgaagtacctagactagctcagtgttagttctaagcagtggtctaaaatcattagcaatagaggggttaagaaagaaagacctgctttgccttcaatgtgttctcaatgagttggtgcaggtcattaacatgcgctgaaactgcttcattgaaagatgaaaccataacttcaagtatactgtaaattcctgccaactgtgtggcaaacttttgcagttgggataacctagatctcatcgtttctaatccagacctatctaagatatcgttaaggttagtgacttaacagattagcagtaccactccctcaacatgtgtggccctgaacacatgaaaaacgaaacataaaaaaaagcatgtaactgaatctagggtcgattgaacatttttggatacagatcacaccaatctcagtaatgagcacattaacagccctcttgcaccagtccttgatgaccacctcatccaaaagaaaagccagaagtggatcacttgacacagcattctcatccaaacaaacatctgtgatatctggtgaatatgttaagaaaataacagaaagaagatgtgatatagaaatgcataagcagcctcctgaagaggatacagtggcaaataagggaagtaagattgttctgtactgcaacatcgaacaatgaatgcagctgctggacatccatgctaactggattgccatggtcttccttttcctgaaacctttcatcgtgctgcttagaaataaggccctcttccaggcacttgtagtaaagacgtagctgaaccctgtttccattgtccggtattggactcctgcaaattgggcagacgtcgcatctttggctgcattcagcacataatgaggcatggccacatgagttaagcacatgatgcacatagcggccacagctactcaagtctctagttgcacggcagcgctcaattctggcctccttgcatagctcaatgagatcaatggatgccaactgctccaaagcattctgccaacggcccaacagaaatagtcttttcagcaactaatatcaaaaatttactccatatagacaacattttatcacttgatttgaggccacatggggctcactcaaataccaaaaaaatacttgtatttcgtagccgctaaactataattgacgccatggaaactgctaaatggggggtacaaaagaagaagaaaaaatgctacagttacttaagctcacagacgagttgtgcacgcagccgcgcacacacaaacaaaggtttgtcatgatttgaatctcatacacctctagtcctctactttcaagtatgggctcttatgtgcgtatttctgttggactgcagaataaagaacatatggggtaggtgccttgcctccagaacataaactagccccttcaaacaaggttccgtcctcccaaaagag

SEQ ID NO: 48964 - DNA, 393 bp, Zea Mays
atcttggactatgtttctatcaactcatttgaacataggatattgcgcttctacgttccaaacctctataaccaaagtgatcaaagcttagggactcaaataacacaacatgccaaattcaaggacccaaatgactccaacatgatacaccatgtcaacatctagtttgaataaacccggttttgtatagccaagttagagtacgttgatgcattttactttatcgaaaagtagaaataaactagtagtgtaaaggtaaaccaatagtgttcggttctaagtttttaaaaaataccgacgattaaattttttataggatctcctggaataggatggtaacgtagagggggagtgaacatgcttgtaaaagtttaactcgaaactctatcatcg

SEQ ID NO: 48965 - DNA, 598 bp, Zea Mays
accgggcgcactaatacagagaagtgcaggggtttaaatcacaatttacctaagactcagactaacccacatgcggactgcgggttgaataacagagatgctaggggctcttatgttaaactgacaggccgaaggggtatcgtgggatgctagtcgtccgatcttaaatggagcacccagattagatcgagaacaccactgaacgggtacgcgatcgcggtcgttggatttgagataaacgtcgcggatttaaagtaacggaaaccagccctgtgcatccaaatccgatcgcacggctcacgttggacacccccgaaccggtatactactcctaatcgtagccgtccatgcgacgatccacggcgagggctattcccccaatcccggtcacaacacccagcggcgccctgcttctccccaccgcagagctcgccggagcacggcgaaactacgcagacaagccctaggtcctaatccacagtgcgcaatacgtaataaaggacctggcgaactcagggagggagtcctcaccagacatcgatgcccgagcggcgctggccacgacagagtgcggttcggcggcaatgttgcatgtcgg

SEQ ID NO: 48966 - DNA, 1207 bp, Zea Mays
tggcctatcgtcgcgggagcgggaagggactggtgattaacaaaatgtaacggctcagctcagctggggattagtagatcaggtcagctgaatgaaggccaaaatggcttggaagtcgcgccacacccactcttcgatcagcactcgtacacgacccctctttctctctctctctctgccaggcaacttccaagctgttatgttctctccagcacttgtgtggaagagaacagccgcctccggtcatccgccgtccaggtgtgcgcgcgtgctggcggtcgggagctcgtggtcgttccgtcatgccgcctattgccggccgtgccgacaaaaagggttaggagggccgggcaggggatgccagaatctacattgcaactgagtgtcatcgatcggacatcggtgggggggagcgggtggtactctgtctgtctctgcctgctacgacctcctgccgtactgcaaaaccatgaggtggtggtggttagctgctgacatgtccggcaccaccgacggcgaggcggcagcagcgtcgccctggcaccagatgccgtcccggacatgctgcagggtcaggaacgctgggagctgtcgccctcggcacgtgatctccacctgcacggattcacgcaacgcaacgcaacgcttcgtcagttcttcagtaacttcacattgttagctcggtgctgtcatcagaaattaacaaactcaaacacttgcatttgcatcccctagctttattctgaaattactccacaggcacatagcacaagcaaacgcactactgaaaaaaaactgcaacggctactactactccatgcatgctcacgctctccctgtcctgcagatggctacaacgcccagacaaacaagtggtgcctgacgctgatgtctgactcccctgttagtttgcgatagtagcaaatgcattgcattatactcccccacagccacatgagtgagatgcccagacaacctactactactgcatgcatgcatcatgtacggttttatccgagaggaactagatagatagagcaaactaaacgtgcttgcaaaagcacagatctcaaggggcttatgggtccgggcccaaagcgcattattcaaattaccaggcacagatctgagatgcaaaaccgtatgtgtatgtatgtaactatttttcaccgccggccatgtacgcccctcatttgtttaattaaac

SEQ ID NO: 48967 - DNA, 321 bp, Zea Mays
ccaaaaccaaacagggtctcacaacgtgttgctaatagttcccactggtattgaatgtggtgcagctcattcagccaatagcaactgtgcttgagcgagtgcgtcggatgagagtgagttgtcgcgagacgtttgcctcacgctctctcttcgtttctctgctccatgtagatattcgtccctctgcagccggttattaaacttgctccgaacagatgagatcagagttattctcaaacatggaccggagacgccgtcgttttcagtttggactagtgccttaggtcctttcaaagataggattatcaccttgcatctctg

SEQ ID NO: 48968 - DNA, 435 bp, Zea Mays
gccagatcggacaccaagtctgataccacttgttatcgccttggcgatgaagaagcagaagacaggcaggaaggaaagaacacggataggcaaaggagcagactgactctgttctggtatatttcctgtctatctttccattacacgcttgctttatattcctgtatagctatggcctaaggcccattactctatccattctgctcccttgacacggagattaggcctacgaatgcgacgacccaccatttgaacgccatcccttggttcctttcctcctgcgccctcttcaccttgtgctggcgccagtaggtctctgacaggtgtgttcctccttctgatggaaacagagcaacggcagcgctcgcgctcactagccatggtggagcaactccagtgagccccgatcctagtcttcgttgcactatctcttac

SEQ ID NO: 48969 - DNA, 541 bp, Zea Mays
gggtactgcaccgcctactacagatgtgactggtccaagtagtacgaggtttaaacagatggcagctgaagagaaaggttcctccaagccagctctagcggagggcaagggtaaggggcctactatgattgaagaggccaagaaggcaattgaagatgatacaccgcttggagaagaaccatgacttgggtggttgaagatatagggttcaacatgctgcgggaaaagtcatgggtgcgaagtagctggtcgaagctatcagttttgctaaacaactttgaacgctttggggcctactatctttgggggtgggatagacgattacttgtattgctgcctagacaacatggaaattgaagtatgctgctagatggtggataatattgatttcttgaagctggaggccatgctctcaaccatgttcttcgaagactttttctgattgcttggcttacatgcatcttaaggtaatttatgttgattttttcttttgagcatcaggttggcttgatggaataacttatttatcttttctcttttt

SEQ ID NO: 48970 - DNA, 362 bp, Zea Mays
acaattttctttggagtcgtgcttgaagactttattgtctccaaaacatccagcacattaaccatcctttttcttttgggggtcattgctggacccttttggctctttggtgcttcaatttttgctgaaggacttaaaatttcatatgtccttgtttctgtagccttcggttcttctattttcttcatttctggcattatgattggctcttcaacattcggtaggggagtcggctccttggcttcggtggccgaagaggtttcaccagcatattcaggcactgtggccggttcaatatatcgtggccggtgagtaagaacctttatctttttcctctccagcgctggctcactggggatggc

SEQ ID NO: 48971 - DNA, 495 bp, Zea Mays
tgcggctgctcgtccgggccctggaactaccttctcacctatgtcggcgtcgaaggggacacagtggaatcactatcgagtaggttcggggcgagcatggatgccatcgagactgccaatgccatggccggccccgaccccatcaccgcgggaaaggtgtactacatcccactcaactcaggtcagtcttcccaacgtttgcgatcattttggacaaatgtttctctttcttgaattcgttgtgaaaagactggtagttcctttcgtctcaaagtttgttgggttgttgcaattgcaagcacgggtctctaatgatcgcaaataattgctcgtttatgaagtacggatcctctgatttattggtctgggcttgtgaggcgtaccacggaattcacattttatatcttgtggctgccctggcaattaccaactgtctcaggaccataccgtggacacggtgaatgatcgtgtcaaaattgtacgctaaatgtgttc

SEQ ID NO: 48972 - DNA, 808 bp, Zea Mays
ccaagccccaccgaggaggccaactaggcgaagcggccgaacaagtccccgtcgagcaagtttgcgaggtgaagctaccaatcaagtctttgtgcccatgaggtggagacatgagcccagtgatgcgaaccagtgcccatcacaacaagacgcgtcatcaccacgccacaccctgaacgtgcgcacactacacaagacaagtcctagggagaccttagtataggagtctcaacagtagctcgcacatcgaaaaagacgagacaatacaccataccaagcgtatgtatcgcatacgatgggaggagatacagggcgtacaacagatggaaccacgccacgtacgatcgcatcccgggacagactcgcgagacccgccacatactaccaccaggacgtcagcaacaaactcgctataggaactggcatgagggacatcaccatatcaagggtacgtccacccagaggaaaggggacccaattcgttagaccatatgttgagtgcccattaaaccatgatctagagtccgacgtttcacaatgactactatgttagcactagtcgttgtcggtcattgaggcgtgccttcatatcatttagtctgacactagtcgtcggaccagttcaatgactctttctcctcacatgaacatttcttgtgaccactggactccatcttcggtggtctgacgcccttgcacatgctcactctgatgctccttcgagcatgaacattgggaccgtatggtccatcacctaatttactatgagtttgatggtctggcgctcttatgagcatgtacaatggaa

SEQ ID NO: 48973 - DNA, 842 bp, Zea Mays
gcaaccttcagttccgggtcatcttcgggacgataatccttaatctcctcatgtggaagagcatcttccaaagagaaaggcagcgatgagccagttaaatgaaagagttttatgtaaggagttggaaccaataccttcaagcttcttcaatctttgtgcctctctgatggccgcaaccttcttcgcaaccctttccgcctacaatgtaaggaagtattaatagcaacatagtattaataatgtacatcttttttccaccaacatttcaaatgttggcaaactactttttccccagtcctgacgcttcaatagacggattcctcacttcatcaagagagatggagaagtcaggcttactgacagcctaaacatgatcacaactagctttttcaaggaccgaagcaatgttttgggcactgatccatgaagaatagtcgtctttagctaaaaggatccctttaaacgcgtcaacttctccatcaatccatgcaacggcaccagcagcatcaccatcaatatagcttttcacgcttgtgttggcaccaacagaagcgaataagtctttcagctatttccaagcgcccctcttcctcagtaattccctaacaatttttccccaacaactttttcgaaacgctactcattagcacatttcttttgagctttgtaattccccaacaattttttccatgcccgccttttcctcagtaaggatctatttcttaaccttttctaattcgaagttcactcttgcttcaactcattcctcctccaaattttcaacttcagcctgatgtgttgcaagattgttcttcatctcgtctttgagctcttcaaggcgc

SEQ ID NO: 48974 - DNA, 744 bp, Zea Mays
tgccggcgcgcggtactccggcgaggacaccgctgcgctaggcgcttcgttgcccagcgtccatcgtgaggagggaggcggtgttctaaccattggatcatcgttggtcggatgagatgagaacacgtgggtgttagcgtattagccttagatcccagagtatacggtcgagattggatccacggaacgattcggcctgggcgattctaggcgttggatcacgatcgtgcgtgtccgaggcgatcgcggggtattttaaatctgaaccgtagaatcaggatcctacggtcaccgtaccctgccggttcagtattccgccgatctaatccgggcccttgaccgctgatccaacggtccacatgtcatcataccccttcagcatggtaaaactccatatagcccccaactttctttagatttaaacccgccgtcccgcgcagggtaaaggttaatacgattaggtcctgaaaattgcacagagcaccctgggagacttcaaaatattgtccgctatccacagttcattgaattaactaaaacaatttcgagataatgattattagtataaaaataattccaataacttgtaaaatccataactcctttgttctaactccgaattgatctgttcaagttgtgttagattcgtataaatatttactacgcattaacaacattggttataccatatcttatacttttatagttagatatttatttaacctatgtttactagagtgactc

SEQ ID NO: 48975 - DNA, 484 bp, Zea Mays
cgaaggactggaaaaagacaaaatcttaatttcattggtaaacaaagttaaagaagacgaagctaacttcaaggctcaggccgaagcccaaaaaaccaaaatggaagaccttcggagacaactggccgaagctaaggaaaagtgtgcgctcgcacaggctaatcaagaaatcagtgaatattggaaaaattatctagagaaaaatgttgaagaacttcacaaatccaaggaaaggtgtttcgagaaatccttggattgtgtgaagaaattgaaaactagcttcgccaaagtgggtgcttactctactgaagaaaactttatatgaggtgaccccgagggcatcgttgaatggataagtggagaagctgaagccttcgaagaaattttgagtgatcgcggggatgtttgcacgttttccggtacacggggaatttcagccatcttggagaaggctagatgtgatcatgttaaaaccatggcccag

SEQ ID NO: 48976 - DNA, 863 bp, Zea Mays
cctcttgcggggtggggacacaactatggtagggacttgggcttcgggtggatttcttccttcgagttgagctttgagggctgcaatcatggcatgtgcttcttcaagttctccatgtacccttgagacatctagggtagtgttgtccaggtcagtgttaagacctgccaccacaccaacatgggtgttgaggcgatattctccagcttcacctgaaacgacactagtttggatttctccacgaaaacgtagaggaagatgtttgtacatcgtatcgtgcagctgttgtcgataaggctgagagaccacagagctcttctagcagcattattgaccgaagtagcataggtagacagtggcgttagagactcatgggtagatagagtccgaaaacctctgtctcttgcatccatcaccatgatatgcacgcgagtgatgtagtaacaagcccggggaggctcggacactcggcttgtgtcatatagaggtcggatgtaggttcccagcgcatgcagtacatcctatagcaggtttgggaagtgtcccgtctcaaacattgaagtgtaatgctcggtgatagaccatatcccaacgaagttgtcctcctgctcatcgttggcttcttcattgttgatttcctatttttcttcttcttcatcatcatcctctccaccatcactagaatcatccggatcgtcgcctccgggagtaggggcttgggctactggtgttggtggtgtcaaagatgaagctccaactgcaaaggcttgtgactctaacaacaggttgggtgtcaccaaaatctcctctaagttgtcctctagaataactccattctccacacgaaagtggtgaatatccac

SEQ ID NO: 48977 - DNA, 719 bp, Zea Mays
accctaaactcgttcgaaattcctttcacaggagctgaagagcaaaaaactcatggcaagaaaactatgaattctagagttcgaaggttgacccgcgaagggctcgcgaccgctccatcaaaaaaatgagtaagggatagccagagacgagcacattagcagccaaaaccctgatgtgtgaagcgttaagggcatcatcagctcgtgttcgaatcctaggaaagtttgattcatggtttatcgcggatagaggcaacaaaccatctgtcctggtcgaataggatcgacaactatatgagtcggtgtctgggagtatgaggacggtccccagcggaccccaagcttggatcctgctcctgctaaaggagctaaggcctcactcggattgcccgcttgtaactcaccgagcgccattgctagcccatcaaggaaagtgtggtatggctcacctctcttcatacccgcgaaggggatgcacgggggagagtaaacccaaaaagatgaggcaagcccccagatggacctctgcatcgagtaggggctcgacccgcacgggtatgacagattgacaaaagttgcatgaatggcacccccagacccacagagggctcaaagataggtagggcctggggggccagaacccataccccgtcatagccaaagttacacacaaagttctggacaaaagcaaatcgtgggattacaaatgcgtagttatt

SEQ ID NO: 48978 - DNA, 1276 bp, Zea Mays
ctcggtcaacaactcatgagggcagacaacaaatcattcaaaaagaagagaaaacagagggaatggaagagcaccttcttcctcctcaacctattctgagatcctatccactctcgatctctattgtggctgctcacgctctcgggtgatctcgccggtgagctacgggtgtgacagtggtataagaggcagttatcctcgacattggtgtggcggcaacgtagttgtggcaggggtggtgctccccaccccatcctaaccctagctggcggcattgcaggccccactcgccgacaacgcacttctccggcctcgatccggtcagcggtgcatcttcttcggcctccccgcacgcaaacgtgggcacacacagatcaggtggaggcgtgcagatcaggcgcgcggtggctacgggctattacaatgaagtgattggaaattcggcggcgttggcggtggagtgaaatctatggtgtaggcgacgacgttgggttttggagtgacactggtagcagctcgggccaggatatggcaaggctcatttcctctccgagattgagggcgatggatggattggagttgagtattcctacatgtagcatggggggtttgatactggggacccaaaggtgccatggaatttgaggccacaggaggaaaatgtgatgcatgttgtggcaggaggcatacccaccaagagtttgacggtttgtctgattcggagtcatgaggagattatggtgagtggtgatgacagttacttcttgcaacagggcctggtggtacctgatgcctgttaggtgttcgtgggaatgtcataggaagtaagtgcagataaggaattagatgaactaccttatgttgatgttgtttgggatgaggaacctctagatatagaaacaattgttggtgaggattgggtctatgcagatcaaaagtaggtgcctatctttgcttcagtgatgtgggatagtgtaggacaggaagggcctgatgttgcatcttctgttgatgtggcctgggatgcagatttgcaattagctcaagggactgaggagatgatgtgcaaataggtttcattggaggcatcaattttgtgggaggaaatgtatcaaggtggagagaacttgccattatttctagatttcgacgtgtttgctgtaggaaaggctattgaggacaacaaggtcgtgtgggatgaagagttgctacaagaggttgactcacatgacagtatactgatactagtagttaagggagagtgtctgagtgtcat

SEQ ID NO: 48979 - DNA, 495 bp, Zea Mays
gggataggggattcaagactctgtctgctcatgagtccctgacaccgctatccacctacactgcctcgttcagtgatgctaccagacggaccctgtggtctctcagccacacctaccggcagcagctgcatgacacgaggttcaggcatcttcctctatgtctgagtggagggagccagaccagcatcgttccaggtggagctagtgaggagtgcctcaacaccctagctggtgtggtggccggactcaacaccgacctggacagtgccaccctggatctctctagggtgcacttagagctggaggatgcccatgctaggattgcagccctggaagcccaacttcaaggataggatccgcctgaagctcaggtccccgccatggcgttgtctcctccccgcaagaggcttcgctatggggagcccggatccgtcactaggctgctctagggattttaagtttatgttgtaataagttagttctcgcatcagacaa

SEQ ID NO: 48980 - DNA, 619 bp, Zea Mays
cttcggaggacgaaggcccccaacacttggcttatcgcttgcaattgccggattccatggcaggggtacacccggtttttcatgtctatatgctgaggaagttcttgcgggatccgaaccatcagatcgagatggaaccaattgctgtgcaacaggatctgactctggagtgtcatccggtgcgtatcttggaatcctcggagcgtgttttgaggaagagatcaatcaagtatgttacggtcttgtggtctaatcagtctgagcacgaggctacgtgggaacttgaggagctaatgcggcagaaatatcccgaactttttgttgtgggtgagtgttgttgattctttaaccttttcttttgttgttccgatagaagcgtcaaaattcgaggtcgaattctttttaagggggtagagtgtgatacccggtttgctaagaagagaagttggagtttattctttctgtgttttgttttgttttgcttctctttcgggtagtgcgctttagggatttggaaatttgggaagcattcaccagtataacaaatttgggaagcattcaccagtataacagtagaatggttggtcgggagctgtcgtgcaagcgagttgggccgtgg

SEQ ID NO: 48981 - DNA, 513 bp, Zea Mays
agaacgaaattggggcgctacggtggctaatcgaaggtgagggctgatgctctagcttcgtaacaacctagcggagaaagctggggcatcatattatagaaactttgggtggcggctccgaatttgaaagggaaacgctggcagccggagagaaggggaagtcactggcgcgagctaccgtggcggtcactgaggcaatgcttcaggcgatggacacgcttcttattctagttcactgcgacgtggtaaatcttcgagccccgtggcatccgagtggcaggcggcaaactctagcgaggtcaccaggatcggccgcagggcaagtgggtatggggccaactcacgatctcatccacggtgaagatcttttcactgccgatcataatccgcacaccagagagcacagaatcatggcggctggcgtgaatccaggcgcggaggtcaccgacggcgaggtgcattgcatccgtgatattttcagacactgtacaatcgggatcttcttcagagcgc

SEQ ID NO: 48982 - DNA, 500 bp, Zea Mays
taatacatcatgattatttctttgctcacttaaaatagattcataccgttggaccaaattcccatgagagtactttagctcctcatgttctttggtcatcttctccaggctgtcgttggttttgatgagaatctcctctagcctgagaagcgtctcgccttgttccttgttccttctcaacagcttaatcaagagcactttgtcttctttgtcgagatgggtgtagaaacggcgaatctcctcttccacatcgtcggtctcattttccctatcattattatcagtggaagcaaaacaagaaaatgtaccttgtgatgatgtagactcctcatcctcatattcttcctcatcatcacttttgtctccaccatcattgttagcaataagacatttattactagtggaagacaaacctgttgatgaggtggattcatcgtttggttgccatcgttcttgttcttctcccttggacaagttagtatcaccagaagtagtgcata

SEQ ID NO: 48983 - DNA, 743 bp, Zea Mays
aaactttgaatctaaggcatcaaacaagcaggggggggggacaagctaaatttattgaatcacgaattacctaaaggaaaatgaaatccctcttgaactcctccttttccttcctccctttcttcttctcaccaaacctccatggaaggccaaccgagctcctgctttctttgggacaacagcacaagagggggagggataaccagcagcaagaagaggagggggaggagcgaccagcagagaggagaggaggtcagctgtagagagggaagaaggggggcgactgcatgaaaggagggaaggggggctagggtttagggggaggaaaagaaacgatgcctcagatgacttctgacttagcatccaacggcccacaaccctttcccacatccatgcaccgaaggtccagtttttgttaacatttttttatctaggatgttacacagacaaaggcaactaggtgccttcacaacaatttcggctgttacaacttcgcttatcgaagaggtgcaatgtttccagctcttgcatactgaagagagtggttttacatgaagaatgatttgaatgagcatattgatataaaagaatcatccagactcctattgtcacatgcttcggatataaaaaaccaacatggtatatcaacttcaaagctcaggctgatatatatagttgctttcaatgctatttgtacacacattgggacaagggatcttgtttgggagtttttagtatttaaa

SEQ ID NO: 48984 - DNA, 330 bp, Zea Mays
tttggaaaccctagtctagaaccacctaaactaatcacaattgagcttcaaattgggtcccatttactgaattttctttttagtaaactaaaccccattcagtcaccagcactccaacagtccctctttagtcaatgttttctccattttttgtgtaggatcatatccatcacccttaaagacatttgtacccaacttatggtttttaactactctataggaaccatagtccaaagtttctttgattagccacaattgagcccccaaaaacagcacaaacactgaaattcagacttaacttactattcaccatctgatacttcagaaatt

SEQ ID NO: 48985 - DNA, 335 bp, Zea Mays
catagtttgattgtaaacactcgattcttgttttttttaaactattaaataaatatggagatcatggagaatccatttgtctaccatacaatgtcagtgtcaatgcaaccctagctaatactacagatgcggccttggggagggggggttgcctcccttccctcctgcggacgatcactagcccagggattatgatgatcatggggaaagggatcggagggattctcttcctcgacgttcgggcactccccttgatgagcggcggtcggtccatctccggttaggaccacaaccgccacaagggagaggagtctcgcgtgccactggggagtcgg

SEQ ID NO: 48986 - DNA, 361 bp, Zea Mays
ccaatccactacgctagtgaaattccccctcctcggaccgccgcgcgtcatcgttccaattcccggccaccgctcttgcttagtataaattgagccctccataagctccgcaagatcatcacgcaccacaccacccagtattgcctccaatctcgcaaccgagagcttgaatttcgaatttcccccaaatctgctctaacccaccgcaagaacaccctcgctgtggcgagtgcgattcaggtcagctcatatcatctgatccctcgtttaagtgttctcatgtgcccgtgatgctcgtcgacccacccaattgaactagaaacccaccaatgactgggaacgcgttcaactgtccgcgacg

SEQ ID NO: 48987 - DNA, 654 bp, Zea Mays
gtttagccttcctctaccttgaatcttcatctctctttagctctacgtcgactagaggagtcttgggtggcctgccggaggcgagatctaggtctactgttaagaagacgaccctctgtgccatcacagatcggttgagccccaggcgtggattgtttgaacgtacgcacagaaggagccactcctccgcccaggtcgcggaccgttcgagccagggccatggaccattcgctcctctgtagagaaaaccaccaggcggtccatctctggtgtttggcgcctagatcggcatcaataagggcggatcctcacgttgcacggggagcaacttccgtaaccattctcactcagagcttttattgagcttcttcttaatataataccgtgggggtgttcctaccgaccaagttcttttatactctctctgttgcgaatctaattttccctccaaaagtcataggtggacattgctgcaaacccctgctagtaacataaaccattctcgccattagatacccaaagaacatatgatcaataaattccaaattgcttcaaatacagcatgtcagacttccaccccatgccctattctttagtgtcattgatgattgcaactggttatactatatctgctaaatggtttttgcttgattg

SEQ ID NO: 48988 - DNA, 594 bp, Zea Mays
acattgatctttattctaggatgatccagactatgtattacaaggcacaagaaaataaattcatatttgatgcaaagagttggcggaaggttgtatgaaacagcaaagacgagccagcatgagtacgacagtgcaattatattgaaaggcaagaaaccatctgttaccaaactaatgcagccatttcttgcttcggctaacaaagctagaatcaaaggcatatagtgccttccatgcatctgtatcatttgggtgtgccatggcattgggattgtcaggtacacattctttgtgccatctcatgtgtctggctgtatttttgagataaacaaatgtttcaaccaatgtataagaggcatgtaacgaagctgcttatgtgctacctcgatcattatggtcacaccatcatcgttgacaacctctacgaatctagactcaccacatattatgcacttcttctcattcatggtctctttctagaaaagcgtatagttattgtcacaaacatcattttttgtagtgcatactgagactcgagagaaacttcttatactagtacatgtcctttggcatcttatgattctttggaagtac

SEQ ID NO: 48989 - DNA, 466 bp, Zea Mays
catttaaaacatcgtccgaaggatgggacaccacttgcagacccaactcggtatcgtcatattgtgggtagtcttgtttatctcaccatcaccagacctaatatagctcatgttgttcatatgttgagccaatttgtatcaacaccaacttcagttaattatggtcatttgcttcgtgtgctgcgatatttacacaggacaagatccagatgtttactctatgcgtctgatagcccactttagcttcatgtgtattctgatgccacttgggcaagtgattctgttgaccgttattctattcaatgttattgtattctccttggatcatctctcattacctggaaatccaagaagcaagcggccatatctcattctagtgctaaagccgaacttcgggcccttgctactaccactgctgaaattatttggttgcgctggctcttggctgatcttggtgtctcttgtg

SEQ ID NO: 48990 - DNA, 793 bp, Zea Mays
ttggtttaggacttctccagggactcttttccaaaaagggctggccgaaggggtatgttttgatttcggccgctggattagaaataggcggtacatattagatcggatatccggcgaatcggtacgtgatcccgaccacccgacccgagatggacgcatcggatttaaaacaactggattgagtcccgagcgccagattcgaatcggacagccgtgatcccttttgatcgaatgggtatcccttcaccaaatcacagtcgtccattcatggatccacgggtagaggcattcttctcacttcctatcaccggcggcgaggacgcccccaggatccgacggcggcgccattgtcgtgcgcaattatctagcgtgtgaggacctaagactctcattcgaacgactctacatgacgctaggaggttatagaatccgatcagaggccttaccagggactgggagtggcagaggtcgctggccacggagaatggtgggtccacggtggagtgtgcacgacgacgagaaattccttccctgcagtcaacgaatcgcgcccgccgagggcaccacaagcaccggaatgccccaacgaaggccccgaccgccaaccgaggcgaaagcgacgaccaggtcgcgtattcacggtggcggcggcactctctcccctggtctctgattcttgtcggcggtggtctattgcgtgagtcagagtggttgcacacgggggaaagaaagcggtgcacgatcccttttgtaatcccgagcgagctgggtccgaatgtcgagttggagagga

SEQ ID NO: 48991 - DNA, 894 bp, Zea Mays
aaagactagtaaagattttgtccctatctgaaaccaaagacttgggagtaccatgcagtttcacaatgttgtccagaaatacttgagccactatagctgctgaaaaaggatgtttcaatgcaaagaaatgaggtgacttagtgaaatgatccaccaccaccaaaattgtatcatagccttcagacttaggtaatccctcaatgaaatccatcgtcaaatcctgccaagcaccttgtggaatgggtaaaggatgaagaagtccagaggaatgctttcttttagtcttagcatgctgacaaatgtcacactgactgacatactccaagaaatcacccttaaatcccttccaccaaaacattctctttagtctatgataagtggcttggcctcctgagtgccctcccatagcactatcatgcatagcagaaatgagtttggttttgagggcagaattattggccacccaaatcaaccaattcttccttatattaccctgatgtaaagaaaacccatgttcatcaggaatgtgaatggccaactgacccaacaactcttgagcttggacatcagaaacaaaagaattcaatacatcctgaatccaaagaggctgaacctgcatgatagtttgcattaccatagcatgtcccactcgagataaggcatcaagagctatattctctttgcctttttgatacaccaccctgaactggagccccataagcttagctaccttcttttgtcattcagatagcaatgtttgatcatccaagaagctgagagccttatggtcagtcttgatgatgaattttgcatgctgtaaatattgtctccacttagaaacatccaacagtaatgctagaaattctttctcatatatggataacaactgaatct

SEQ ID NO: 48992 - DNA, 923 bp, Zea Mays
ccaatttgaccaatcttgagtttgtcattttgtagcttctgtggatatctcatggatcatgttgctttagaaaatcccaaaaaaaatctggcctgtataccaatgggtgcgcccaatgggtgtgtatgctatcttgtctcaaaatagtaacctaacgcgacatggtgtagtaatgagcctgagcggttggtattactcttctccgatgctgtgttacgccaatgggtgtcagtgactttctttttcttggaaatttacatgactcttgaaggctttgcgactcttgaaggttagtttatgtagaacttttcccctatatgtgatatcaatgttttaaaaatatatcttgaggatagtgaggagtatctaagtgcttggcaacatggagtacctaagtgggaaaccctataacatagtcattgttgtcgatgtagccatgtgcccccatgtcacctcatacgagcaactcggacagctccccaaccccagtcatcgccctttcctctacctcattgcgctttatggtgctggtaatgtacattgaagcaagccagcagggcttgttccttctccgcttactcattccctctcgaccatggcggtggctcaaaccaatagatttggtgcccatgcgaccaaatctaaggccatagcaactggatggtgtgtccaagccaaaggcggcaccttgggtagtggccatggtgcaagtgatgatgttagtctagggcaacaatatcagagccctagcggctggattcagcgccctaaggcagggggtgttgccggtggtggtaggacatgtgcctcatggtagctggcggtggaggtcaacaatgacaccagtgagtgctagagtcgatgatagccatggcgtgcgatgttcttacgcatggcgtgcgatctttctttttgtatttatt

SEQ ID NO: 48993 - DNA, 700 bp, Zea Mays
ctcaatgttgcttgccaaagcatgctagcaggccaaacaagcaatatttggaaaatgttgcactcaaaatcaatgtcaaggtctgaacaatacatatattttttacattatgtttttttattttggttctttcctgcatgaatgtaacgattcctttcgtcgagcaggttggtgggcgtaacacggttcttgagtgagcctttgcacacaatggtataccctttgtctctgaagtcccaacaatcatctttggcgcagatgtcacacacccccccactaggagaggactttgcatcatccatttctgttgttagtttcttcttaatcaatcataattcagttgtatgatcttcttataatatgatattcatgctcgtaatttggtgcaatctgaactatgcaaaaataagttatcatgttgctaacttcaaacattcaaattgtgcaggtggtggcatcaatggactggcctgaaatcactaagtacagaggtctggtttctgctcaaccacattgacaagagataatagaagatttatttactgtcagtaaagatccacagatggggcacaaagttaatggtggcatgatcaggtaaggtttttttattgaaatgcatataacaaattttcttagactgtgacatttcagctatgcatctatcatcgtctttgttgatgtgtattaattttatttttat

SEQ ID NO: 48994 - DNA, 327 bp, Zea Mays
gttgatcagtcaattctgaacgttcgcttggttcgtcaagctctttctcttggaacatgtacagtcgggtgaaaatgacgtcgttaggcgagcgaggtgatgtaaagcgggtgcagataaccaccccggacgacacaggataatatataggataggatatatacgtgcaccgaccgaacagttagtttgatcagcacggcagcggatcagagcgctcaacggcgacgagctggaatgattaccttttccgatcgctcgcatcgtactgatccgtattccagattatcgaagccagaattcagaaggatgtttgcttctgactctctc

SEQ ID NO: 48995 - DNA, 938 bp, Zea Mays
gtggaatgagctttatgcgcatgaccgggtgtaccaccaggtgtgagggttgcatgtcagtgagccattggatgcactgctatgtgccaatccgaatcaaattgcttgaaacaagatcgtggttgtggccccaccagcgggttcgtaacctctcccgaggtgagaccgggggccactgtcagtaccctgaaattggggtaccctctcctactatgccaaaggcagatacccacatggctacatgtaaccacatactaaggaactgagtagccaggcccatggaaccaaacccatgtagggaccattggccttgggacccgcacttcgattgaggataggtccggtgtcgccacgtgtcccaggggtggaactgctcagtgactactgctatgtgtccgaacccctaggggcgagtcctggaactccatgtgtgtcgtccggatccccgcaggcgggtcccggaaaaccacatgtcccacaggcctaggtcttcaagccaacatgcactcttggccccactctccgctcagatagaggtccgaagccgccatgtgacgtcggcgcgtggcacaagccttcagctggaagtaagctcgctcgcccgcatttaatgcaagcgaatgaggtgtgccttgttgtgcatagggcatgtgtaggcttttgtcaggctacgcgaacctaaatgaccgttctgcacgttatcgagacagacagtcgtgtcacagcaccgcacgcatggcccgcagagtaagtcacatgataccaaggcagacggttgtgtcttagcgtcgctcgcatgtgccgcgcccaccatgacctattgctggattgggcagtaaacctctacgacaatgaccggaggcgacaactcaagtccatcgtcataactcctgtgcttgtcaacctagtgaaccatcccaatcctctgggactcaaat

SEQ ID NO: 48996 - DNA, 355 bp, Zea Mays
gggttatagactgggtcttgtctagtcggatagttagaagaaccagagctacttgagctacagattccatcttggacaggaaatgaaatcgaacgacgccgaccacttattgtctcccgctgtgaatgaggtgcatcatagtaagaatcttgtgtggaatgggtgaactgacttcctccagtggacctccaatctcatgcaccactccctcctgtactaatccctcatgcaccatataatccagcggcgaagcgggcagtaaaccactcctagccggtggtttacggcgcgtagccgctagtaaaaggcgaggcggtgacggtttttgcgtgtgcggtagcaatgggtctgtggg

SEQ ID NO: 48997 - DNA, 608 bp, Zea Mays
aaaattaggtggttccaaacatgcccttacttgttgacagcagaggagcaggggtatatgatcaataaaggccatcgtgttaacttaagcagattgcaccgcacagcacaagtcaggtagaactccaactacttaatcagattaagggtcgcttccttttcttccttcaatcaaagggctgaccaggtagatgctatagttgcctctggacacaccaaataatttagttttcttttctaattggaggctacctcctgtagagcgggaaatgccagttgcaaaaggtacagctacttattaccagcttatgttaatttttagaccaatcatcttatgttaattaggactcgcatgaatgccgtttagttgcgtgtacgtgcagtggttcgtaatctaatattggtaactttaatatgatttttatacaaagcgaattgcaatatctcttgctcgaagtgctcacgaaacggtcgcttcgctagctgtccatctgaatattctgtacattggttgatcatcagatggaatctgcatttaaagggatgggtagcctggctccagagtccacactgcatgctccatgcgcacacaatacaagtgcataaaca

SEQ ID NO: 48998 - DNA, 729 bp, Zea Mays
atagcgaggtattctattggagcgtcttcgagcatcgtgagtttgggattcagtcaacaagctttaatcaacattgatttgtaccatgcgcaatgcatatgcttgcacaattgcttgggttagcaacaagtagagatatcctcacaagagttatcgggaggaagatatctaaaggccattgataattaagttggtttataattgttattttaggacaaaagaattagcatggttcgaaggattgtgatctttgtcccgtgaccctcatgccattaatcttcagtgcacgaaacaagagataggcgctggacaaaagctttagttgacaaagagcttcactagaatacttcatttgataggcagagaactgagagttgatatcaccaaagaagctggcaagcgaagctcggcaacgaaaggaatgtagcggtaaaaggatgaacgacaagatcttcatctaagaacggcatcaaaagaaatctttgctaagggaagatgtgcatggcacattagtacatggaaatgatagaaatatacatctttgaatatgtaacgtttctatgtaagatagaggggtaatactataattttatataaaactatataggaactcgacttctataaataggtgaatgacgtaactagattagttgctcattcaagcaactcatgctcgataccaactcgagccaaaagagagcattcagaagtatatatctattgctgaag

SEQ ID NO: 48999 - DNA, 673 bp, Zea Mays
gttcctattattgttattattattattaccattaaattcacaagcaattgaactccaacatgatgcaccattctttcatttagtataattattagtagtcaagattgacccatgatttgaaatatgcaaaaaaatgagaataacaacacaagtggtcaaatgaaccttttatatttctcatttcttgtacattctattactctcactatttgggtattacaggctggcccagctcgacgggtactcctcgtggggggaggtggtagcggttggaacggtcgaccatgcccgacaaagttctcaatgtcctggtagtttcgtatagtgtggcgcatatccttgtggtatgggcactaggagtcgaggatctcatccagtgtccaaactccaccacatggtgcgtcgcgggcccgagtacccagtggcccagtggcatgcacctcttcccggggcctcttgtcacgacgcttttctggctactggttcatgtccttcctgggtgctgggagtatgggctttgcacccccaatgagatcttgggctcgctcatacatggtgatgtagatgtccgcctcccgaaatagtagttccgaggtgatgggctccttctgaaggatggctcggacgaaagccgagtcgttggatcctggatcacgactgcctccacgacttc

SEQ ID NO: 49000 - DNA, 614 bp, Zea Mays
cggacatggcactataccttgtcccgttagtgaccattttgtaatgttgtcagctatcagtggcactggactcgtccggtgcacaccagacatcgcattgttcactgccacatcagcagaccactagacttccccttctaaccgttgggtatactgtaggtctgatggcacactagactggtaaggtgcaccccttctgctgaattccatttacaccttctctgtgtgtagagtatggtgagtggtccagtggcacaccagactgatccggtgcaccaatctgccaaagccccaaaaattacatctatgtgtgcccgatccggtgcacatcagacctgttacgagaggtccggtgcactctcaagtacctagatttaatccattttggacacaactttctaggcttcaatattgtcttggacactttgatgacttagacaaacatatcttgagcccatttaaacactcttaagtcatagatcttgatcttttaattccttccttatactttctcatacttaactctatttgacccctggaatactaaattctacatctgatctttgaaatgttccaatatgttactatgactttttaggacttatctaaacact

SEQ ID NO: 49001 - DNA, 761 bp, Zea Mays
gaccgtcgcaagaagttgtacgtcatgtacggcgggagctgggaacttacgtcccgcaggaacgtcaagtccctatgccgtgaggtcctgtcggcaactccaggggtcccaaaggctgccccacatcaatgatggaggagcaccaccatctccttcggggcacccgactaccccgacaacatcgcaggggccggcatactgccacttatcaccgcccctgtcatcgccaacatgtgactacaccatgtgttgattgacggcagggcaggcctcaacgtcatcagccatgctgcgttcaagcagctgcaaatcctagggtcccgtctaggaccctcacgcctattctccagagtgggcccacagccggtgtatccccttgggagcatcgcactcccggttacgttcgaaactgaggagaacttccgcacggacaacgtcgttttcgacgttgcgaaagtcaacctccccttcaatgccatcattggcaggccggccctgtaccggttcatggccattgcccattacgggtatttggtcctcaagatgccatccccgactggggtcctcatcgtgcaaggcgaccgtaccgccgcacttgcagccgtagagaagctacacgccctggtggcagagactgcacgcccagccgacggagagaggaatccctcaacctccggtaccaaggcatcaaaggtacgaccgtctgaagtggatggtgtccccatcaaagccatccggcttgctgcggattccactcagac

SEQ ID NO: 49002 - DNA, 618 bp, Zea Mays
ctaaaatctccccattcgtcgatgtagtgtcgcggcagatgccggagccactgcagcgcatcctgccctcggacaatgggcaggtacgctatcatgacatcatccattgccccagcgccccaggcggcggtcatatagactgccaaccagcctcccgggtcttgcttgggctcgtacttgtcgacattggaaactttgaagtttggaggccactagatcgcttggattcatggggtgagtgtggagactacgcacgtcccctatcctctgatcggtgatcgtattgtcggtctttaggaggcgagagagcaacacatcgcctcaatcgtcatggggctgggctgctggtggaagctaccgctgactcggtcctcgttgcacagctgcgagctggtgctccgtggtcccaaccatactcctctcgatgccttatctcgttctcatgtcggcgatcgcatgaagcgctgatgttgcttcgcatgtctcaccgtctgttgatggcgtgacgtaggtcagtcaatgggtgggcgagaggtagaaggtgattttccgcctgggtgagcacttgtcgatagcccttcgcgtctagggtgcgtggcaggccattggcaatctaca

SEQ ID NO: 49003 - DNA, 766 bp, Zea Mays
ctgtttttccgagtcaaaggaacttcatcctcttcctcctcgtcgtctacattagcaacacagacagcacccccattgggatcagcaacagatggagcacccacgttgggatcagcaacagatggagcccccacgttgggatcagcaacagatggagcacccacattgggatcagcagcagattgggtacacccattggggtcagcgtcaataaattcagtcacagacacttcttcagcagcaggaaccgaggtaccaacgtcccgatccaaactggatactcgccggagacgtctctttttctttttctgctcatcagcagaaggatcacggtgattggctcagcaagggcgcctcgggcgagtactggcaagcttctgagtatccaaggttgtatcagcctctgggaggggcgccactaccaatgcctcagtaggagcagcatcagaagagtcctcagccagcaaatcaagcatagcgcttatctctgcatcactagggttcaggggcacctcaaaatggacctgccgttcatcatcaggaatctccccgagcgaggcaaccaaggcactaacttcttcagcagagggccgcactctaaggcccaaactgccatcagtgacaggtggattcgacacgaaaaaagtgaaggctttgggaggaggcaagttccaggctgagtatgccactggggcaccaacatttgacactttgcctctaaggatcatctcaagtcggttcaccaagtccacagagggaattcttc

SEQ ID NO: 49004 - DNA, 451 bp, Zea Mays
tgggcgcaccgtttcatggataggggttagccatgagattcatggtggccgagcattcatgaaaatgtagtcgggtgtgtgaatcggacggggttcaccatagggcgcgttcgccggtgttcttctgccgctctgggtgcgcgccgccgtgtcgtgcgcagggaggtagtacaagcatgccatgaccattggatcttgatcctgcggtcaccggatcacgtgggtgaagacctaatctgagccacacatcttcaatcctacggtcggaatcggatgccgattcgttattgtggccgatctaatcgtagcccttggtgtatgatccagtggcccataatgcaccataccctttcggcccgcaccatttgcataagagcccctctgtttctacggattaaacccgcggtccagcgcagatagatccgagtctacggattttagtagattgccc

SEQ ID NO: 49005 - DNA, 403 bp, Zea Mays
ctaatgtggagtcatgttcacctgagacaagcttgtacaagatgagatactgttacaaggatagacttgtttagtgagcctgcaaggatgcaacgaaggatcttgtcatgggagagattgtagacatattcacgataagcaaccgcaaattggtggagttggggttgtagttactgtgccaggttggcgtggtggtcccatatccataaccataataagggcatgcccgcacataggtgactagaggagtcaagaggttctcggttgatgatatcatcaaagaaacaccatgctcgctcatggcctcccgtgacagacatatgaagaaacagattgaggtggacatgggaatggcaatcctaggccacgtatacgagaacaatcctatcccatatattgcagg

SEQ ID NO: 49006 - DNA, 584 bp, Zea Mays
gtaggatcctggtcgtgtgaactctgcgacgatgaatggtccttcacacggtggtgataatttgtgtcgtccctcccccgtcagcactcagcggaggaccaagtctcccacagcgaaggatcaatgccgcatcgctttgtcatggtagcgcctcagggtctactggtatctggccgactgaattaccacatttagctgttcttcctccagtacatcgatgtcctcgagcctggttgcttctgcttcggctatgctttcaaatgttaatctgggtgctccaaagatcagatctactagtaccagtgcctccgatccatacaccatgaagaatggggtgtttctgtgcaaagctctgaaccatttccctgcgagcttctcgcttttatcaaacacctttttcctgagtgcatcgagtatcatcctgttggctctttccacctgcccattagctcttgggtgtgccactgatgcatacttgatctggatgttcctctgctcgcagaagtcaaagaactccgagctggtgaagttagatcccaggttgttgatgatgctattaggttttccaaacctgaacattattt

SEQ ID NO: 49007 - DNA, 277 bp, Zea Mays
tgatggggcctgagccatttagtatgatatagttggtagccgatgtagcctttgaacttaataatacttcatggtacacatcatgtgcacatgtggggctgcaagatcgatgcataaactatgtggttgacttgagtaccctatggcctaagatgtggcaacaacacacttgttagggtctgtaatatcacatatcacacatttaatgtgttgcgcctaagaattgtctgataagcttaagttttggacttatcatcatgtcttttatatgtggggc

SEQ ID NO: 49008 - DNA, 422 bp, Zea Mays
gccgaccgtctgtcttttccacacactagattttagggttttcctgttaggctgtcaaaaaaccctttatgtgagaaaaaaatatttcatgagtaagcatgccatgtcaactaaatcgagtggatattgtgaattgtgaactttgagtatgtgaacttgtgatttttatgaacttgttataatgtgaacttgttatattatgaacttgtgatctttgtaaactttttatattataaatttgtgatccttgtgaacttgttatattgtgaacttgttatatcatgaactgtgaacttgtggtatttgtgatgttttgtcaattttgctttattgtgaagtttgatatgtttaccgatcgtatttagatttcgaccgttaccggtgtattttccgcaccgaactttcgtttccgatgtttccga

SEQ ID NO: 49009 - DNA, 1055 bp, Zea Mays
tatttatatgattttccttattatccggactgcacatcaatttacagagaaggcaagggccacggcacaattaaacccaagactcagacaaccctggctatgaactgcgggttggtttcttaataactgaggggctcttacgcaagaatggcacgacgaagaggtatcacgggatctggaccgcacgatctgtttcacacgctcacgattagatctatatcatattgaaccggtacaggatcgccaccgtccatttacagatcaacagcctgggttttattgaagagcgccctgattccagccactagatcccgatcggagggtcccgatcgcacacgagaaactctacatctaggatctaatctgtccgtccgttggtcgatcaatggctggtcgtcattctcctaccacagtccgagctgggtgacgatgcctaggtcatcttctacccctggcagcacccacgcggcggtgagtgagctgtgagcaggtgctccgccaacctagtaccagtgcacgctaccctcctatggcaagcgctacgtagagcggatagcaaatcaaaacaaaggttctctacacttaccagagatcacgtcgcggagatcgacaatcatggcgggaggcggtttggcggtggtccgaggactccgacgaatagttcatcaggaatggggcagcgtttcccacggtgacacgagcgacagctccctcacacacaagcggacaccatcggcaaggatccatggcggctgcagcccactgctcctcttctctctcccgtactcacgttcggcagcgaggccgagcacgtacacaggcaccccggcgaccaaacagagtgcccagtcaagaccttggagacgacgaatcacgcgaccgatggaagaagtagccagcaccgagcgactgagggccagtggccatggatcagggagtggcacgacggagcgcagatttgtgaatccacagcactaccgacgagggaggagatggataaaaatgcactgccgccagcaggggctggacgaggcgcgaggcgagctcgggaggat

SEQ ID NO: 49010 - DNA, 911 bp, Zea Mays
aaaacagcaattaatacatttcagcttctatacaattcaagaatttccgcattttagagacttgacttactctaacttatatcaagacatacttaagcatagtgacacaatagatgatgtgacggctacgtagtcatgccatcacttcaccacacatcgcaaacatagactaattcaattcatacttcacatggcaatttataccgagtcgcagagtaacaagattaacacataggtaagcgacatttcttcacgactttcggctaagtcaccaaacagacgacatgatgactacgaaggcatgtcaccatttcatcacacacattcatctcctatatgcgcactaatccatttcttgcgacatatgcacttaaaatcaatccacactacacaaagtacacttatctcttatttatgcgtagacttaacacctttcgggataaagcgtcactataaacaccttacacataattgctttgggaacttattagttcactcaaaaacatctattcaagtcataaacacaatcatacacttatttgtgaagcacaatttaaggaacgcctaacgcgtatagactcgacttataattatagaggaagtgatgactacttatggcatgtcatcacatctctacttaagccgagacaatttctacctacaacgaccaaacatttatatcgaacacactttatttccccctgtctcgcatacaaccatattatggcgtgcacccgagacacttcgatcaacgtagcataaactactagtatatgaactccgacactcatgtcttaacaatacatcctccacgcaaactagcatcctctaaactacccgtcacatcaataaatatactccctatattgtcaccaatcccatcacatcgtataaaacaaatacacttttct

SEQ ID NO: 49011 - DNA, 535 bp, Zea Mays
ttgcataggtatttccaccaaggaccagacttcattctgggtaaagttattgagttcctcttgcattgctactatccaatctggatctccagtgcttcttctaccctaagttaccaagaatgttatccactggatggtctctttagatactttgaacaactcgaggatggggcaccaaaggttgatgttgaattgacccgtcatcctcttgctcaagaggaactccaccatccaccacttcttcatgctctaccacacttggcaattcttatggttgtatggcttcctcaagagttggatgacttgaggttgatgggtttacctggatggaggattcatcacccaccacccttgtactcccatcaaatatctcattggttatccaaatcattccttcatcatcatccttctcttgaggctttacttcaccaattgcaagcttcttgatggctttacaaggtagctcctcatttcctgcagcatcaccagaaacatgcccttgcgagccattagattcatcaaatgtcacatctac

SEQ ID NO: 49012 - DNA, 417 bp, Zea Mays
taaacctttatttctccattgcaccatttatgggcgtgcaaatggagaacaacagggttattatggcaaaatttcgtttgcactcgttgttcgtcataaatcattgctctatcggtcactcatgggtgggtttaggacctatcttttcctataggtgtagtgaaacgattgatatgcatttagtaccgggaaaaaattatgaatcacatgttttattgttttagcatcaaatatggtgggtgaggactgtcaatgaatgtatgaaggttggtgtatgaatgacccatggaggagtggataagaaagatagagtattttattgatcgtgcttttgctctatcaagaaccggcatggatgtgcggtgtccatgtagtatgtgtcttgtttgtagatgtcaagacaaaagaactctttcg

SEQ ID NO: 49013 - DNA, 1097 bp, Zea Mays
actcgtggaatgcacatgtgcttattcgatgaacttcaagtcctttggtacctcatcttattcctttttgggtctgtatgggtctttattcctttatagggattatcaaactttggtgtttaacacagactttatttcttctggaaaggttccatcaaggaactataatctcatctaggagatattctctctacataggagagtgatcattcatcgggaatgtattatctagtacgagatttatatgttgcatatttataattcaaagatatgagtcctcgtaggatctcatgcggatcttcagattcctattaactgcatattttaattcatgccatttgccagatatattacatagtggaacagtgtttattcaacacacatgtgggatgggtctcttacaagaccacttgaaccatcgtattgaccacactatatttcaatagtgcccataaatgtccgaacttcaagctcgtgactttcattttgcgattattggttcaacctcgattgcatttatcattgacccgataagagagcttacaacactcatgcatatgactttgttttggatccgtttgcaatctagagaggcaatataggtgtcgacatatttgtctcccacatctaataatgatctctatcattcccaaaacgaaagattcattgttccgtattcccagcacaatgatatcacgcgcattgctaggaacttcatcatcaagatgaacctctttgtgaggcaaatcaccagcagggcgagttcatcggaggagagttattatagaccacgtgaatctgcaatcagaacatatgctttgactaagaccaacggatcatattcgtaggcgtccccgaggatagatcaaatgccaataagtcaaatgtggatattatattaatctcgggtatatccacatctacatcaggtagaagcattcagaccaatatggttactcctcaacgatttctagcaaactccatatacacaggagtacacactgaacgataggttcagtttggcttttgtgcgtttaataaaatattgaggcattatactatatgggcattcctccccctaatgccgagatgttcta

SEQ ID NO: 49014 - DNA, 525 bp, Zea Mays
ctcactgctgccagctatcgccaaactggcaacctccccatccccaaccttcactctaggcccagtaacaacaaaaccctaatccccatcctcctcctgaaccatcacctgaatccctaaccctaactggagtgtcaccaacacctggagcatccacaaatccctatccccataccaaacccctaacccaagtcctaaactctaaccctaactggactgttcccatagccctgatcaagtgatcattgtcatcgccagaatcaaagatttatctcgttcttacttcctgcatgcaattcttacttgattccttatcttacttccgtcattcgattttttggctaatctagcttccgactgagctgtctttccaaatcaaaggaacttttgcagcaaagcataaaaacgagccccctcattttagacgtacaaaaaagttatatctagcataaagaagataaacagggaagctcagctagtaccatagttattaagatgataaggcgagttaacggtgagcccccc

SEQ ID NO: 49015 - DNA, 499 bp, Zea Mays
gttattttattatatatataatttttagcttagtataataaaactctagggaggctttgattgttgcatttatgccactgcatagtgtttatgagtgcgaaatgttattagaacagattaaaatatctcgagggtattcccaagagttgttggaattctcggaacgtttctttgggtagtaaatatgaatttcagtttttattctaatattatttaaatatctaaaatttagcatttgcgaagaactataaaattctagaaactcgataatatatgtatatatttttctttcgtcgagttcgttctagatctcatgtccttttcgcggtgtcgttaaaacatcactcctcgcaatcggcgtgtcgctcgcgtctactcctatctacccttcttgcctcgtctcgatgcgcaatgcccatatgctgtgcctgcaaccgcctttttccctcacccattcctttcgctgtaatcctagacccatgtgtcaacttcatctttt

SEQ ID NO: 49016 - DNA, 905 bp, Zea Mays
ttaccaaagagctatgcaaacatgcatagccgaccattggggaaagcgagtagaagagttgatgatgcagtcatcaagacagaaaactcagacatcttcatcgaggatttgcaataggtgttcaacagcttgaggtgctaccgatggaaactgaacccagagaagtgcgtattcagagtaccggctggaaagctacatggatttatcgtcagccatcgaggaaaagaagcaaatccggaaaaaatgaagccattatgagaatggagccaccgcgatcatagaagaaagtacaaaggcccaccggatgtatggcagcgctgagtagattgatatcaaggcttggttgcgggttggttattggattttgcgggggctcctttgcatattatcccagccgaaggggtatgaactaatctgtgttgtccgatctggtttcaacggcacatattagaagttatctaaaccaaacggttatgtaatctgagccacccaatgagcaatcgacgacccagatttaaaattgcagatctaatcctacgcgcccgatctagatcggacgaccccgatcgcatcagtccactcgacacctggattcgatctcgatcgccaaacgcatatcctacggcggatgccatctctcaccccaaccactcgattagatcagacggtcggcaaccttcttccaaatccctcacccaccaccgtacccggacagcggcggcgatgtaggctccaacggtggcgccattatcggcgatgcgcgccctaatgcccggtcacccaatcatgcatacatgaagctcttcacaatactggtaccgaagcgaacgtacggagggaggactcaccgcagattgcatagcgtcatgtcctgcccatggcggtcggtagctccatggcgagga

SEQ ID NO: 49017 - DNA, 514 bp, Zea Mays
gggggctgggtcatcctcggccccacccttgggggctggatcatcctcagcaccaccctcgggggctggattgtccctagcggcacccttagaagctgaagcaccttcggtcgtacccaaaggagtcgggtgaccttggccggcaacaccaagggccagcatgtcctcgtgagctaaaccgccctctaaggtcgacgaagcgtgaaaaactgttcgggctacctcttgcccgataggaccaccaaccaaagggacgtcgttagggacctctgcacgggcgacaaaactttcaacctcaggaggctccgataagaggtctttagggataatttattctaatgcatggtcaatggcagacattgtcaacccctgaagactaacgagtcctgataaagcctgcattggaatgtcactgctcatgctgctgcggctgttctttcgaattaaggggatttcttcttcttcctccttttcatcctcatcaagcacgcgaacaccaactctgacaccgtca

SEQ ID NO: 49018 - DNA, 582 bp, Zea Mays
gctccgtggacttagttcagtaaagccctacctctctccccgaatttagtagacctcgccgtgtgttactgcgttccatattccgggtgctagccaggtctgtcgcgcgctgtccttgcccttaccggtgaccacgctaccgacatcccacctccaccatggtcagcctagcacgatttatttatatgctttaagcttagtgttctagtacttgcatagggcagtgaagcttatggacatgtctgtttttttgtcccgtagcgagtcgattggaacgccgccacgacgccgttgatctttgccgtgagccactccatcatcgaccgttctgtttgcgctctccccggtcatgtttgcgtgagcaccgttggtggggtgacttgctagtccttcccgtgccctccccttgaactctactgtgccggcctcacctggatacctctcaacggacccaatttttactggaaccgtggtcagggcatggtgatcttgttatcgcttgttccttgggtccaaatgggccgccgtcgtggataacatgttcttagcgtagactcgactagcgtcccagtcgtattccac

SEQ ID NO: 49019 - DNA, 422 bp, Zea Mays
atgagatcaagtagtacagagatgcaaggtgggtgacccctccagaagccttatggaggatatacgactttgagcttagtcagaactctccacctgtgatgtagctgcagctccatcttccaaacatgcacatggtggcgtttcatgagcggcaaatggtccagcgagtcgtaaatcgtccaggtgctgataggtcaatgctcacagcatattttgaggcaaataggctacacgaagaggctcggggcatcctatatcgtgacttccctgagtggttcacttggcagagtggtaagggcaaagtatggcaacggaggaaacgagatacgagtggacaagtcggtagaatagtctctgctcatccagccgagggggagcgctactatctccgtgttctcctaaaccatgtgactggcgccacc

SEQ ID NO: 49020 - DNA, 373 bp, Zea Mays
gagaaatctaatggtacagtgtctgcagaaagatcttcagatacatccccctcaccgccggtgaccctcgcgccgtgatccgtgctgccgccatgattcgtgccctctggcgtggagataatcatggcagagtaaagatcttggcaccggataggtttggacccggtcgctggtaagctcgccgtacccacttggactgtggctggccgagatgatcctcatcggcgttagccgcttaacgatcgtgcgccacacatcttggaagcttagcacgtcgtagtgaacctgtgtagcaagcccgtccatcgccagaggacttgtcacggtgagagccacgttttcacctacaccagtgaccttccctctctccggc

SEQ ID NO: 49021 - DNA, 731 bp, Zea Mays
gaacagccagggcatcggtttgtgtgtcacaatcacaaacacaaaagcagccacacgactaactctttaagaccgatagagaaatcgtaggggcaagatataggaagaggctatacctggttggtcgccactgtgtttgatgagggagtggaggaggagcacgagcataatgacccaagaggcgacgacgagagatgcggttgtgcatgtcgaccgaccactcacgcacaggtcgaagacgcagcctcgcttgcttcactagtttgccctcgtatgtagcgtcacccccactcgtgtagtcacgtgtcgcctcgcttctaggcacgtggtgtgtacactgcacatcccgtgatgccatggccagaaactggatagggtggggaagagtcgattggaagccgtagaacggacatgatgtcgtggagaagaaagatcgtagagttgcgcagccgaaaggctaccctaatgttaggcccatgcagattccatttgggcaacatccgcccctgctcgagatcgtcgtcttccccacacaggcttcatccatgcccagccgcatccgccgaccaagccccagccggcgcccctttacgatgtcgagcatgaaggagaagtgaccgacatggacacgaaggtttcaggaggggaggttattgaaagttggctagagggggggtgaataggcaagttaaaactttttcaacaaaaactagaagcaaactgggtgaaac

SEQ ID NO: 49022 - DNA, 381 bp, Zea Mays
aacggtaccttcggcattatagccggatcttcaaccttctgcgtaggaggaatgggctcttttggttcagcagctgaagaagtctccccgccaaactcaggcaccacggccggttcaatataacgttgccggtgggtaagggctttcaactttttgctcttcggcgcaggctcatctggagtggccgaagcagcagttttcctcttcttgccccgtccccgcagtgggtagcagtagtcggggtaaacaaaaccaatggcatcaaaaactctgttcaatatttttttccccggcccccgaaggatgtggataatgcattatcttctactttggaatatggcccaaggagttcatcgcttgtagcttcgatacatttcagtc

SEQ ID NO: 49023 - DNA, 729 bp, Zea Mays
ctgggtctaacgtcggtgcacagcctcatcaacagcatgactgtgccacatagcaaaaaacctcgctatgtcgttggccagacgcacaaacagacctcgaccctaacccatgccctgacctcttcctcgatcgccacgatccatcggacgagaggcggcagcagcacgagaggaggtctcatggagaggaggctaaggtggtggctcattagaggatgcaggacctcctgacctagctggagcccgcttggaccttgctgctggattactggaatcaacccagtaaggaacatagcgggagtgcttgactggcttctcatattgaacctgggtgacaacttcaatcatcttcatgataaagggtgcatgaagacaacccttcaatggtgaccaagatgcctaaagaatttcttcctagattatatcaaagacattaattttgccagtgctggtaggagtcataagcatgagaagaacttgactctccccaaggacgttcgtctggttgctgcccttaggaagaatcatcatgctagataatgagttgaggtaccgatattacctatgcatattagaggtaatccagtattccctcccatttgaggtgtgcaccacttccttatcctctcgcctgggtagacggatatcatgaactctaaggttccttcccctgatatcttcgtcagagaaatcaaggatatgagcaaaatgacgataactgactttgtg

SEQ ID NO: 49024 - DNA, 576 bp, Zea Mays
cttactggcaacaccacaaataattaattattgttataagttctctctcaaaattattatacctaaaaatgttgcataaatcgatacccaatttcagaacggtatgagtaattgggtaaaccatgggcaatgataaaacgagctggactatacatttctgcacataaaaatctctgcttggcagcattggcctgatgccgtgcactttactaccaatataaacacacatatttttcctatgtgcctcaaagcacaatacaaccagtgaatgtccttgtgagcgctagaccctaatggtcattttacttgttgatctgaagtcaactaatggctccaaccgatgaatgatatgcatgagcccctgaaggatccttatggataaaatagtgttgtgcatattagtctaaatcataatgattgactatgcatttggtaataataacaataagttggtagaattgtaactacgaagcaacttgttgttgtgtgtctcgctggatgttgagactaacccttcatgttaaaggacaaatatgtagtattcatgccactacattaatctaagtccaaagctca

SEQ ID NO: 49025 - DNA, 277 bp, Zea Mays
attttggggtggttcggatcctggccatctgttcaagacgaagattttttctaaaaagtggttcagccgaggctaactaccgaagcacgggtggatgggaagcttcggaggcacatgaaattttggcagcgtgtaggtgagggcagtaaatgagatctacactcaccccctaggctgcttttatactaaaaaccccacgcgaagcgacactagtcactaaaaatattccttcacatcacctgtggcttctcccccgccgattcgacttctggaccgc

SEQ ID NO: 49026 - DNA, 769 bp, Zea Mays
tgggttgggcgcgtaacaaagagatggaatcgggagtgccttcaatttaaaggtcccggtcaggcttatcacgaactttgattggggatcagttcacggcggcctggatattttacggtgacttgctcaccgtggcgcgcgaggaggaattggttcgtggggggtggggtaactgactgcttgccacgacctttacgacgtggagaatgcatggttgcgtggcacagccgagtgaaatggcgagctccggtgatatcaacttggtcgaccgtgcgggcaagtgggtatgacggccgaaccagttagcgaccgagttcaccccaccactgatcttttcacccttccctagtgttatccattccttactgagcacgaatctcccaggcgaaactcggatcccagcgcgagttcaccggcgacgggtgcactgcaccggcgatcttctttagaccactgttcattctgaatctcccttcgaagtcgcctcacaacgcatgtttgagccacttttactcctggctctaggcagtaacacacctaccttcctttgacaaagttgtactccaatatatggtctccaaccttgtcacagtgacccaagccttaactccactggattagtcacaacttggctccaaaattgatccaatgtcactgatcatccaattttcagattgttttagtctgacagcccaactttggtgatgttttacactgtgttccatatggttctagggctaagtcccttacataactttatactactata

SEQ ID NO: 49027 - DNA, 303 bp, Zea Mays
ccgacagcaaagagtgatgccgccaagttagtccagagatgtgaagcttgccagttcttgtcaaagcaacaacatttgccagcacagcagctgcagaccatacctgtaacatggccatttgcatgctgggggctggacatgattggaaccttcaagaaagctcagggaggctatactcacgtgttggttgccattgacaagttcaccaaatggatagagtacaagtctattgcttctttaacctcagccaaggcagtggagttcatacaagacataatattcaggttcgagataccaaatagc

SEQ ID NO: 49028 - DNA, 535 bp, Zea Mays
cttcaaccttttcagacgcaatttgctctgtcgccttttcttcaacaacagcaggctctgtctcagtgggctctgaaggcctagcttcggtttcagcttgaattgttgtagcttcgactcctacttgcttcgtttcagctccgggttgtgctttggaagcttcggcaatttttcttgaaggagcaggactcaaggtttttgctgtttctaacacaacatctaacacatttgccattcttctcctcttaggagtttcggcagaacccttttgtgccttcggcactgttacctctgttgaagggctcaaaatctctggcatttttgttatttcttcaatttttgacccttcagccttatccttatcagctttcgtctcaactagctcaaccaaaggtaacttcggcattacaaccggctcttcagtcctctgcgcaggaaaaacaatttcttttgttttgacagccgtagaggccccttcaccaaattcaggtatcacgaccggttcgatgtaacacgaccggtgagtcagaacctt

SEQ ID NO: 49029 - DNA, 792 bp, Zea Mays
aatcgggtgtgacagaatctacagcaacaaccacccaacccacgacgctaggcccatccttttgcctctctgagatcctcgtcatcgatggtagggtggacgatgatgacatctccaatgacgagcccacctaagagggagaagatccgcaatagtgttgcaacatccagtgtcatcatatcaccgatgaattgacccaactcaatcggtctggcacaatgaagagtctgaggctggcaaaatcctgggcaagcaagatctttgccaacattggaacacatgatggaggagacaccatggcacctaagagcatgaacacgaggctacatgcgagcgtgagctggagcttcccgagcatagtcacgggcgcccacacggtccacttcctacctcacacaacttgatgccagactttgtcaggaccatgcagacctcgagtcaagccagctgtgtgctcgctcagatcgcgaacgacctctctaactcacctgatgaggaaataaatcggcaaatccacactcaagcggcgaaccatctcctacctgtggcccacatctctcctgctgatggggacacgcaccacgacatcaactatcaccacgacgcaacacaacattgaggaatcatgcgcgtgatgtcagaggagtatgatcagaaccacaacatgccacgactaggggtcgacaactggcctcagtgaacagcctcgtggctcatcgcttcatccatgagaggctaggcgacctccatccctagttgtcaccttgacaccaccgaggacgctatgaaaat

SEQ ID NO: 49030 - DNA, 1061 bp, Zea Mays
ctttggttcttttatcatataacaacttttcttgacattcagatattgaaatagcacaactcattgtatctatagtcttattaacagcattcaagttccacttgctgaatataacctagatttgttagttttcttcagggttcagaacctcgacttagttttatgttctgcataagcagaagggcttgcaacttaagaactagtaggtgctttcaagtttggtactccacttatcattaagttttgcataccagcatttgtcattaagaaattactgtgatttgccataaagataagagttggttaaaaggaatatgatggaacattactgttgattattttagtatggaatatggattgtatttttattggaacattcagtgcctggtcttcggttggcctcttgtgctagttgataagttaaacaaaatgacagattgcatttcttgtgttgcagacaagatcaaaagagtttacggggtctatagttttctttcttcattcaaatactatttattgttgtgtttaagagaaaccgtactaccagatgtctgagtggttacaacctattgtgtgtaactcatatatagagcaccgacacattcttgttactcgaatagtgcaaaactatgaaagcttggatatctgtttataagcagtaacttgcaggacaaggggctgtagattttagatgcttattttacagctattgtataaccagttcgctgctgcatctcacaaatcaacttcagtgttataaagttgtatttattgatatcgattaatcacaattagttgtcctagtcagtatcctgaacttgactaggggctacgacctgattaggctgattagttttctggtagtctgattcattgtcgacttctgatgattagtcggatgactagtgggtggaagaatagaaaaaatggaattgctgggcagtttaggacatgggctacatctgggatggtttacggcaattggcctcatgtttttcagcccaatttgcaaccctacatgcagccaccactctggagttgtctccatgcttgatttgcac

SEQ ID NO: 49031 - DNA, 2125 bp, Zea Mays
ctgcttcagacgctaaaaagccatttcagctgctggtgtccacttaaaagcccctttctgtagtaacttcgtgagtggccgagcaatgatcccatacccttgcacaaagcgcctgtagtaccctgtcaaccccagaaagcctctcaaatccgtgacattctgtgggtgcggccacttgagcatagcgtcggttttctgagggtcagtagccacgccctcacccgatataatatgacccaaataaatcagctcctttttaccaaacacacatttcttcgctttgagatagaatttgtggtcccttaaagcagcaaagaccaacctgagatgctccaaatgagaaggccaagtggaactataaatcaatatatcatcaataaagaccataacaaatttccgaaggaaaggagctaacaccaaattcatcgcacactggaatgtagctggagcgttagtaagtccgaaaggcatgactcgaaattgataatggccctggtgagttttaaacgcagtcttaaactcttcagagggtcccatgcgaatctgatgataccccgaagtcatgtccagactggtaaagaactgagtaccagcaagctcatccaaaatctcctcgaccaccggcattggaaaccgattcttgatagtcatatcatttaacttacggtaatccacacagaaccgccacgtaccgtccttcttttgcactaaaaggaccggagacgcaaatgggctcacactgggggtgatcagtcctgacttcaataacgcagcaacttgcttctcaatctccgtcttatgatgaggagaatatttgtagggtcgagcattgaccggaatagctccagggagcaaaggaatatgatggtcaaatggtcgagatggaggcaattcagttggtgtaacaaaaatgtcactgaattcccccaacaacacctgcaattctggatgaatctcattgctattctccgcacgtacctcctccaacaatgcaaacacctagatatcatttcctcgcagccacttctccacctatagagtagacacttcctccaccacctgctgttgtaccatattgcccaccaactgaacgtccacccctttgtccacaaaggtaatcaccttagcatcccaatcacaattcatcggactgtgtcgacgcaaccaatcatagcccaaaatagcatcataggcacctagccccaacaccctcatatcactctgatatgtatgcccattagcccaccattccaatgatcgtaccatcgtatcactatacataatctccccattagccacccgcaccttagctgatgaacaaggatacactggcagccccatgcgatcaaccaactgcttgctaatgaaacttgtagagctccccgaatcaaccaacaccaacatcacctgattttgcaataaggctcgcacagccatacattcctcatttgtggtcccagtcaaagcattaagtgacaacataaaattctcctcttcccctttctcctcctgcgcaatctgtgtcaacgtttgctccgagagggtcatactcaaatcctcggcagtgagggcatgcaattgcatctggacttttttgggacagcgagcttgatggccaggttcaaacttgtcaccacaagtatagcacagaccattctgcctcctatactccttcaccaatctctccttagacaactcaggtaaggaagtagacccactagtgtcagacctggacacagcactccccaggcgacctggattgaccagcttgaaggatttctgtcgttgtttgtcgaaaatgccttgttggatcctggctaacaacgctgctcgttccaccgaagctggcaaatgagacttaacgggtccttgcagctcttgcttcaaccccttaatgaaatgggccacatacaaagtctcatctaaatcatgattatggacagaagttgcataccgcgcctcatcaaacacctttttgtactcctccacagatccggtctgcctaatttccaacaaggactgcatagcctgtgaatactcctccgacccaaacttcagcatcaccgcttcacaaaattcctcccaggaacacggaccatactgaattttgaaaatctgaaaccac

SEQ ID NO: 49032 - DNA, 549 bp, Zea Mays
gcgggagagccgctggggctgcatggggtggggacacggcataaggatgggcacaaggatgtacaccaggggttagagagcgtgagaccttgctgctggagccgacatgttgtgaggaggcaatgacagagtcgagaagctgttgtggagccatggaggcactaccagaggcgagaagttgccgaggctcgtggcgcaattgcgggatcgtggaggcccggggctgctgagaaagtggcagctgcagatggggaagtggcggcacagggcgatgtcgccgacataggggcgatgcgatgtgacaacgtagggaaaaggacatggacaggtggctataccggcatagagcacagagggaaaaaacgtgtggacacgagcagtttttgactgtctgcgcccgcgtcgttaggccgtagaaccctaacttaagagagccaagtgaagtcgttgaaagttaagctcaacttcttagagcgaggcgaggccgtcgaaagttaagctcaattttcgagagccagtcgaggccgtcagaagttattagcttccgac

SEQ ID NO: 49033 - DNA, 957 bp, Zea Mays
gttttgcacatgccacaaacacaattgatgtattgtgtttgggaatactctgcctagtgcgattggcatagtagggtcttgatctgaaatagataaatttacataacattaggcaagtcaatatgatatcatataggacgtgtctaataaatacgagccatttgttaaaacatacctgtcaacatcactcgtggtccgtcacatcccatgcatgttttgaatgtattgaagacccactcgaatgtatcaactgtctcgtctcctagtaaagcaaacccaaatattgtgcattgtaggtggtggttcgagccaacaaacatgcctaatggcttatcatacatattagtcttatgtgtagtatcaaaggtaactgcatcaccaaaatcaatgtactcggcttgctggctagcatgggaccaaaatatgcttaaaatcttcccttctttgtccagttgaaagtcagaaaaaaattgtggattatctttcttgcataatgaaaaaaagataatagcttcgacacatcatttgcatttctttccctttgccatgctttcttcctgtcaaaaaatgtaatgattaagcactacatatttttaacacatttcgattgtttcggtaatatataataccataattgtcaatgcataatacacttacaggttactcatgtcctgcacggttattggaacgttttctggaccaccatgcatttctgaaacaaaatccataatgcaatgttgtggaatcctgctttcttgcatcgcactaaggaactccatataatcacgatcatgagttttgttgcattgcaattgccctttttctgtatctttcttcaagaattcatgattatgctcatagtttaccagatcaattctgacggaaataacattctctttagcatcatcgtatatttttttaagtttcatcccagccttgcactgtgttcgttttgaa

SEQ ID NO: 49034 - DNA, 374 bp, Zea Mays
tggtatcagagctagtagctcatatttggaacttttggcttaatgttgagccgacgctagattaagtgagacaaatatatacccataagacacctcacttcaattccactgactaatgagcacttggacgtcaactatatggtcaaggcccaatcaatcatagagtcccaagctcaaggggagtcaaagtcaagtttattcgcggatctggttcggactacaggagcgggttccacaaaaatggacgcccaggccacatatggactccatttttgatgttttagatacctttagaaagctaaggagataagttttccaaccaactggtcccacatcaaaatatgcttggagttgatgggaatcgtcgtaacaag

SEQ ID NO: 49035 - DNA, 370 bp, Zea Mays
acttaaacttcaacgaacacgcgttggaaaagtttggaaattgtccacgacttttgtaataaagttgcacccaaatttatctttatagccctcaactctgcatgacctacagctaaactcagcctgagatactgcacattaggcattcggcttatatccggacaaccacctctctcaatctatttaacagacaattacaagtatatacccatttaaaaggtactgagaagaactaaaagttttgcttaaagggaattcccaaatttgagctctgaaactatcaaaacacggtcgatgtattggtggttattacgacacctaaagttcagacacaacggtgcaacaacttcaaagcagcctaactccaatt

SEQ ID NO: 49036 - DNA, 597 bp, Zea Mays
caccatgtacgcggccgcctcggcgtcggcattgaggacgcagaagcctggccacttgacgcggtcggctgtgtcggcaccggcgccatcgttgccgtattccaggtataagatggtctgggtggtatcctcgacgaccttgttcttgttccacgcgacctagccgctggggctgaccacgtgactgagatacgacttgatgaaggcaacgtgggagaagttcctgtacgggcggccgaggtaggtctccacgtcgtcgaggtccatgcccgacaccgcttccatggtgcacatgtggaatgagaagtcggactcgcggcttgcgtttttccagccctgggccgtcagcacattatgcttgccttttggtgggcggcgcaccaggagcgggcagctctagaacatggcctgggcattgccaaatacaaagtccacggtgccccagatcgaggtctgcaggtagaattggatcccgttctccacgtacaaggtgtcctcatgaccttcaatgctgcaccggtagacaaccgacttgttcgaatttgaccgtagcgccacggcctaccgccttccggccctgtcatgtttctgattgtt

SEQ ID NO: 49037 - DNA, 398 bp, Zea Mays
ccagttgcaaatgttgcaaatgcaagtcgaaggtagggctgtagatgagtatatcatcaataaaaaccaaggcaaatttacgcagaaaaggagtcaaaatagaattcattgcgcactgaaaagtggcaggtgcgttggtcaattcaaatggcattactttaaactgaaaatgaccactctgtgttttaaaagctgttttaaattcctccccctccttcatacgaacttgatgataacccgccctcaagtccagacttgtaaagtatttggtgccatgcaattcatctaagatttaatccaccactggcataggaaattgattcttcactgtaagctcattaagcttgcgataatccacacagaaacgccatgacccatcctttttctgcacaagcaac

SEQ ID NO: 49038 - DNA, 444 bp, Zea Mays
tgacaatcccccgttagaccatcggccatagtccaatgagacacaacggtcatcattactgtcataatgacctcactgtgtcagatatagtcgttagagtgtactgcataagcgtatggcctgactatcccccgtcggaccgtaggccatagtccaatgagacacaacagtcataattacggtcataataacctcactgtgtcagatatagtcgttagagtgtactgcatgagcgtatggtctaacaatcccttgttggactagtttgacactcatagaacctctatagtcacttactaaaggccatcaaatcgagaccaattgtcttatggttaccctattcacagggtctaacaccactgcaagaagaacactagatgatatagttgcacattttggtccagcgctttcaaaacctctttggcatgtttttgcataccattg

SEQ ID NO: 49039 - DNA, 391 bp, Zea Mays
ctaaaaaatactattttcttggtttcgcacatcacaaagctaacacaacattgcgatgctaaaagcttacgaagttctttacattacacattccccagtcttctttcataaccttattagcaactttgttacaaatttgcaatacaacatcatctaatgtcttgttaatattcccaatgatagttaacgcttctttcagctccacgtcgtcatctttggcaataacatgctctttagtttcatgcagaagagcatcttttctagagtcttatcagatgtatgcatgtaatcggggcaaaagtttcagttaaggtttagagttggtaccttcaagttccttcttcctttgggcctcgctaattactttggcttcccaggcagcgttttccac

SEQ ID NO: 49040 - DNA, 296 bp, Zea Mays
agataacatgtatgtcatgttttatatgttctttccctagttgattgtgatataggaattccatagacattgatacatatgccctctgttaaacttgtgttgggatgcttttgtgtgataaatagaagaactaatgaaaagccgtagcaaattaaataaacgctcgtacttatggggtcgtatttgtgttgcgtaaatatacaaaatgtttgtcgtcttttagtggtgttaaatgttgtgcgctcgatgatatgtagttagctaacgctagtgtgtggttgcttatgaggtctcac

SEQ ID NO: 49041 - DNA, 834 bp, Zea Mays
cgtcactaacactatataaatcgtacctgtgtcgtgctgaagcactaccatcctaccgtgctttgtgctggtccatttagcacgacccacttgactatctatagttctagtatatatataccgtagtacttagtatgtatacgtatatgctctttgtatatatgaggcgttctgcgtgatcctttcaccagctggtagtgcgtgcacgcatgctctaatttacaccccgggttagcataatataatggcgacactatgtttgatcgcctgtttgcatgttctcttttatggaaaaaactggtctcgagaaagttgttgccaccgctgaccaatggacaaaagtttggatggcagagaaaaacatgatcttagaccatctccaactattccctccacaattgtcctcctatgtatgtaatttctgttatattttactacaccatcttaaaagatacttccctctacattcaggacgtctctaatcattcactctaaccaactctcctatatattataattcagttatttaacgattttttgtcggtttttaaagttttaaaaatcatagactattcatactgtcataatacatattgttttcaggttacaataattaaaagaggtcaatatcataataaaatagactaattaaagtatggaaagtattggaactcaccccatacggatcggacgagctgttggagccgtttttcccccaaagtacactgaaggtggaggtggacgagctatacggttcaacgttggaggtggtcttaccgttccttttagcttgagttgcattagaacctaataaacaaggtacatgatgccaca

SEQ ID NO: 49042 - DNA, 564 bp, Zea Mays
ccgtgccgccacaacaattacatcgcgccaaccaggtaaaaactaaaacacattccaacttagcacacagagtgaggggtggaccgagcgaactctcagtgagtcgcaagctaggtgatcgggccataggtcatttgctcggcaccacatccaaggtcgtactacaaattctcctgcagaaacccagctcatggggtggcacggtcgcccctctggttggccatgccgacaagagcggcagattaggattgaataaagaaggacttaataagatgcccccagcgagtcgaacacccccagcgggatctctctccgagacctaacctgttggagggtggttaggcctcacttagatatcctgcttatagctcgacgtcctccctcatgcgccgactaggttggaggaggaaagcactctcgttgaaaggaagacttcgaaaagaagccaacctgtgtgcagcaaaaaagaaagaagtagtgacccaaaggattgcccttgaagagaatgacccagcgttacagcagatgggctcagacctgacacgggataccatcaactgtgta

SEQ ID NO: 49043 - DNA, 332 bp, Zea Mays
aaatgaagaccccaagcctcatcaaggcattagaagctagttgatgaagatatatgccaaacttcttcagcacccccacaaccatcttgtggagcaagaattgaagcccaaccttcactaagcttcagaacacaaacacttcatcttttttgggccgaggggtaatatcttccctaccaagtctaactatagatatatcactgatgtagttggtactcttcaaaacctcaatatggctcttcacgatggttgatttgccaaagcaaaactggcttagtttcgatggatgatcttcgtcgttgtcttcttcaagctcaaattcctcgctacta

SEQ ID NO: 49044 - DNA, 942 bp, Zea Mays
ctttgttgtgacattcggagcataagccaaatctagctactagcacttctagcttgcagcaatataataccatagatagttacatctgctaagctctccattaaaattttgcttgcaggatccaaagacggggaactggtggttgcaagtgggaaaagatcttctgggctactggccgtcatccctcttcaccaacctggcgagcagtgcctccaacatccagtggggcggcgaggtatactcgcctgacgcgggccaaacatccacacagatgggcagtggacatctccccgaggaagggctcgggaaagccagttacatccggaacatccaagtggtcgatgcgtccaacactcttctgtcgccaagtggtggtctgggtctgttcgcttcacgacccaactgctataatgtgctcaatggtgctgctggtaacagctttggcacctacatctactatggggggccagggaggaaccctaactgccagtagtagtcaaattgaacgtttcctggagtgcaagcatagctctctctcctttacttaattacacgtgaagaagatataccataccggccccttacagcaactagaatgtgttatggcttactgatggcccaataggtatagttacagggcatatagttacacatgcaataatgcgctgcgagatctctgcgcgcaatggtcaattgtttccggacatacatcggaaagaagtgtcaagaacaagctttacaagcttgcgacaaatgtaatcatgcttcaccatatgtttggaatatagaatttattcgcagcttccatcaatcatcgctgttatcacaagtcactctccaaacacccaaacataccacctcaacctagcgcgccgttctaccacttcaatagggaaaattagtgccatcaaattgacaagacctagagctacctatcctaac

SEQ ID NO: 49045 - DNA, 411 bp, Zea Mays
aagctcgaccgattgaatgctaccttgctaggtcgacgggaacaactctgcctgtcctcggtattcgctgtcatcgtggacgggggggattccgggtcatattagctcaattagtacatggactcggatcgtctgggatggggatgatgatctgatactcggttttggcggtcgtcgccgtttgaagcgagtcccagcaaggggtggccggtggacgaacgcaccgtcgatgaggacctaggttgtgaagaaagggaaacagaggggcttaagtgcaatggttagagaaacatatgaatagtgctcagggattctttactagttatttaaaaggctagggcctctgcgcaagtttgccagcgcgggcgcgcgcgtattctcctgttcgcgggctggcttgggccagatttg

SEQ ID NO: 49046 - DNA, 499 bp, Zea Mays
taacaagttcaacaactcgtcgatcaagctgctcataggatgtcgccgcagagtcctggtattttttaaaagcttcagtcatcgcgcgcatcatctccttcaattccagctgaaagacacactcatcgtcgttaagcttaagcccattatccttgtccatttgattctttggtcctgtcattgttagcacaaaacagagacaaaaaggcagcaaacaatgtgaaccatacaactatctctcagggtggtggtggaggtggtgtaatacaaattatgaagcgtcttacccccctcttacaacgttcttaccagcactgcaggtggcaaatggtgaccggtgtgactgtccaacgagcgtgggtgtgattgcaaaggagtacctattctgctcgagagaaaactggagctatgggaaggctgactaaatatatatatatatatgtggcacacaagtcagtaacagatagcaatgctgaataagtgttccaagtactcgtcc

SEQ ID NO: 49047 - DNA, 450 bp, Zea Mays
ccctctttctcgagtgcttgggcccgcttgaccatgtgtcaatcggtaccaacaatatcgtatctagtatggcggaggataatcgttggatgtatgatggttggaagaagagaggtataggtcgtcgggcattagttagtgggtcccactttctcccattacgtctattagcgagtctaatggacgatggatgctttcgggcgtcgaaattgccttatttccgacatgttaaaggccgagagacagctatcatcggatgtaaggctaaagccatcaggaataggttattttcgacgatttagaccttatttccaagggtttgggccgtcgaaaatttctcgttttacttttgtgaatcaaagggatacctctaacgagttctgaataatcacaaaattccactttgtttccatcacaatttgtagaagtatttaccgaaggggttggccc

SEQ ID NO: 49048 - DNA, 282 bp, Zea Mays
cccactacaccctcatagggggcacactgtacagaagaggtgcgacgagagtcctcatgaagtgcattaacttggccattgggaagcagctattggatgaaatacacaccgagcagagcggagtacatgcagcatccagaactctggtcgggaaggttttcagatctggtttctattggccaacaacgaagagtgatgctgccgagttagtccagagatgtgaagcttgccaattcttatcaaagcaacaacatttacctgcacaacagctgcagactattc

SEQ ID NO: 49049 - DNA, 310 bp, Zea Mays
agaaggcgaaaaggggtgaacccagtcgccctacactcagtcgtgttcagcgcccagaccacttcaggtaacaaatcggcccacttgcccttttttcgtcgaggagcatcttcttgacagctgtgaaaattttgccatttgcacgttccacaactccgttggattgcgggtggtataccgaggcgaaggcaagcttggtgccgatggagaagcagaaatccttgaagtcttggctgtcaaactgcttgccattgtcatctgtgagttcggacggtactccgaagcgacaaacaatgttttgccagaagaa

SEQ ID NO: 49050 - DNA, 412 bp, Zea Mays
aaacccggtccccaaggatggcgccagcatttacccagcccccgagggtgttgccggtaatgatccggctcgggtgggcagcgcgagctatgacccagcctccgagggtgtccgagcgggttccccttctcatacttccatggatgtgcacgtcgggtcttcttctccacattctgattgcatggcagcagtacgtgcttcgggtcaggaagtcgccttagaggccggcgcacctaatgctagagttttgattcctgctggtgatgctgagttggtccccaatgctgctctgcatattgcctcgattggtaatccttcgtcaagtcaccaactgatttcccatgatttggcttccttcgttcttctccaatctccaggtaatttggattttcctgatctgactatactccgg

SEQ ID NO: 49051 - DNA, 613 bp, Zea Mays
ctctcacgttgcctcggtatttacgatcaaaactgaggattttgcgctcaaaactaaagatcttgctctcgaacctggagtacgtctactagtgtaccacataccattttttcgcgtgcacagtgtaaagggaatctcttggtttatggtgtcagtgactgcctaaaaaaatcaaattctctaatcaactcccttaattaaatccccaaatcaaaatcacttgatttatggtggcctcaaggacgcggggctgttgtttgggagggaatcaacatttatgttatatctaacactatttatgctcaaatttgaagatttttacgatcatgaatataacacataagggttatcaacgtctctcgcgttggctcggtatgtacggtcaaaattagggatttttacgctcgaaactgaagatttttacgcatgccatttttttgcatgcacaataaaaagggatcccttgatttatggcatctatgactgccataaaaaatcaatctcctaatcaactctcacaaatatgtcataaaaataggaaccacatgcatacgacttctcgtatctaccataaaaatagaaactagaatgcatgcgtctggtgagagaacac

SEQ ID NO: 49052 - DNA, 803 bp, Zea Mays
tgaccacttcatgtggaggtcatgtgcgcggagggcgtcaaggacgagcatgaatctacagaagggtagaaggacgtcattcatgagcgtctagaacatgaccgatgcattgaagaggtcgaagggcatgacgaggaactcaatgggtgtggtgggtatgaaacaccgtcttctcgatgtcctcaagatgcatccgcacttggtgatagccgaattgcaagtctagcttggtgaggtacttagcaccatggaggtcatcgaggaattcattgaccacaaggatggggaacttgtcatgggatgtcttgtcgtttaacatgcggtaatcaatgcagaacctccaggagccctctgccttcttgactagcaccaccggtgtcgagaatggagaagtgcttggccggatgatgccctgctctagcatggcagtgcagtgccgctcaagctcatccttttgcaggtgttggcatgtatggatgatcactatgtggtcctgagcagcaggtgggtccaatgatcgtagggccacatcggtggcatcctgcagtgctcgtcgaagatcacgtcgtactgctagagtaggcagtccagccacggctattggtggtcattggcaatggagcggagcaccggtaatgtgtcatcgcgaggggagcccacaccattatagaggatggagggatcaacccctcaaaatgccatgtagagggcctcaaagtcccataggatgggtcccaaggtttagtgatagtcgatgcctaggacaaggtcgaacccacctaagtcgatgtaaaagtagctgg

SEQ ID NO: 49053 - DNA, 333 bp, Zea Mays
ctgaagccttctatcaggcatgcactgggagcctttccgttggtggacttccgtactacggtggagcaggcactgggtgtggagatgcaacaccagtataccatggagtcgcagaagtcttcgggtgttgatcagcctcgtggccaggacgcgaggaggggcaacacgggaggtcccgcccacaagaggggcaagtctcagcatcagcgccaccatccttatcgtggcaaatcttctgactcgggtacttcgggaggaagtactcagaggtttcgggctgttcctaagcccgggctggggctggtgtgtttccgctgtggtgatgcgcatcgc

SEQ ID NO: 49054 - DNA, 496 bp, Zea Mays
ttctagttccctgtggatacggcacggtgtcgaatcgatggctataaggcttccgatacgattgccctgtacctgacacacttacaccgagtttgtccctaaacaccccatctacttcgtctctgatcctctccgccatgtctggcgaccatccattgagtttgtgggtggaaatctcaggttgcctgacatcactatgtcggctttcctcccagggatgtttgaggtgtgtgttaggtgtcctattaatgtcaccagctcctgccctatacctctcaggctctcttgtggccgaacagtattcaaccctatgtccatgaggtggtatggtatgattataatgcgttgctggtggggcaccataatgttgctgcgatgaatgtggaaaatgtgcatattgcgcagctctcggctctgcgtacgcatatccagacggtctagcgtaagaggccggatggtccgcgacctgtccaaacgacccgaaggtatatccgga

SEQ ID NO: 49055 - DNA, 1034 bp, Zea Mays
gtcacgcatcgggcgcatgggtctctttggtgcacgtgatcgcattggccagacgtgcatggcaaacagatcttcctctgttcttcatgtagatttcctagccaactgtgcccctaactcgtctaatcaaggtagagtgcagtattaggttacgtcataggatgaagtgttattaaccgtcatacccttaactcgtctaattaaggcagggtgcaggagtaggttgcagcataggctgaaatgcttccgtgtgtagggatgctctggcgacgttgtcctgttttctccgcctgtcaccctttgccttggttcctcgcatgctacaatgggggccatgatggcaggcgcccacgaggcacagagagtcaacggtcctgccttggtaacgcgcgagccactatgtggtgcatgcatttctgtggcagcgctcgcctctcaaatgggcaggtataggtcttatccatagttaatgctgaggcacattgtactgtggatgtcgataccgggttttcccaacggcccatgctacgtgtcgcaggatacgtgacaacgtcgagctgtccctaatgaggagggcagcggtcagcattgctctacctggtgtcagctccttttcgacccttgctcggtgatctgcaaaaaagacgtccttgcacatggccttgttatggcgctcaatggtgtatatatgggttttgttccagtcgctttcaattttcagcattttatttcggagcctcgccgagaagggtctcagtacttgttccttggccaggatgaggtctagggcttttggggccagccctaggttccacaacagccatcctaggatggtggagtgtgcaagcttaggttgctggaccaggctaagcggttacacggctccggccaccactgagaatgtgctcctctccccctgaacttaaccctttgccacccgggccctacccgttccaagggatgatcccgaaatcgggtggtaaagttgaaacataatctaggtttcatgaatgtattttggaaaatcactccac

SEQ ID NO: 49056 - DNA, 534 bp, Zea Mays
caaattcccgcaactctgacttgtcctcttcagacaattcttggccgcccaggtgccgaagatcgaaatatttttcgcccgaaggactagcatcaatttccctttctttgcttggcgctgcgaccatttcttcctctatagccacatctttaaccacatctgatatgagcctatcaatatctaaaattgttgtttcggcttcattagtgttttttacttcggcaacagcatcagcttcggcctcgtagcagtcattattttagccgctaaggctgaaggcggtgtttgctcgacggcttgcatcacgttaactattcgttgtttcattttcccttcaaccttctcctttgcagccgaaggttgttctttcttctgtaaaaattgtgtcagttctgatcctagaggacttagcagcttgaagtgcggggaatcagtcattacctttaaaatttctactacttcgacaacagagggcattgaaggagcttcttctcctatctcatccaccttcggctcagcagagggcgtcatgtc

SEQ ID NO: 49057 - DNA, 530 bp, Zea Mays
tgaaaagatccccgatccatgggcccatcgatcagtaagggcactgggaagagacctctgacaactagggcccatcggtcagtaggaggaggaagaaaatatctgtcctggaagcactcgcccccagacggaccccgaggcactgagcccagggtcgggcatggcggagctagaaaggggggccgaacgaaccaaaggaaaaccacttgagtggatctggcctgagactgacgcgtcataagtgacaggctgcattaactatgcctggcgccgacccgtggtagagaaactagtccgcctcccactcatgacctacgagtccctcgggctgcagcgcactcatgacctacgaacccctcgaactacggtgcactcatagcgcgcgcccccaccggcctacgacgctttcatggcctatcggggctaggcctgagtgcgcaggccgtctacagggcacaacgagacaagccgcgccaagacccaggctatgaaggccaggagtcgacatagcttgaagaatagcgaccgag

SEQ ID NO: 49058 - DNA, 301 bp, Zea Mays
cgagctgtcggtagatgatctagtggctaggatgggccaataccccttggtcgtgcgcgatttgctaatgagccctggatttttagggaatcaaccccccgtaccgcgcagggtaaaggttaatacgattaggtctagaaatatgcacagagcaccttggaagtcttcaaaatattgtctgcagtacagattgatcagggtattcaaaacaaataaaagaaaatgaatataggtatagaaataagtctactaatcttgtaaaatccatatcttctttgttttagctccgaattaattcatt

SEQ ID NO: 49059 - DNA, 634 bp, Zea Mays
gagagtcttcgatcatgtcattcccctcattcctagtgctattccagtgaactcaagaccttatcgttactctccatttcataagactgaaatagaacatcaagtggaagaattgctgacatccgatttgattgaacctagtgtcagtccattcgcctctccggtgttgcttgtgcagaaaaaggatgggtcatggcgtttctatgtggattatcgcaagcttaatgatcttacagtgaagaatcgatttcctatgccagtggtggatgaaatcttagatgaattgcatggcaccaaatactttacaagtctggacttgagggatggttatcaccaagttcgtatggaggagggtgaggaatttaaaatagcttttaaacacacagtagtcattttgagtttaaagtgatgccatctgggttgaccaacgcacctgccacttttcagtgcgcaatgaattctattttgactccttttctgcgtaaatttgccttggtctttattgatgatatactcatctacgaccctacctttcaattgcacttgcaacacttgcaactagtgttagacacacttagggaacattagttttatttgaagcagtctacgtgccagtttgcacagcagacactca

SEQ ID NO: 49060 - DNA, 308 bp, Zea Mays
ctacgtcgtaaccgtcaaggtatgggtggacaacgtccacatgaggtacataacaatgacattgctttcagtaagataaaatttaagataccctcttttgatggtaaatatgatccggatgcttatcttacttcggagatggctgttgaacaaaagtttacttgtcatgattttcctaaaaatgcatgtgttagggctgcaactagtgaattcactgattttgcttctgtttggtggatagaacatggcaagaaaaatcctcataacatgccacaaacttgggatgctttgaaactgatcatgaggac

SEQ ID NO: 49061 - DNA, 655 bp, Zea Mays
ctactgcatcattagaaaccacctgcattccattttttcaaatattgtatcacaaaaaatgcatgaaaatcattcttctttttgtaccatataatctatattgaataaacaaatccaacaatacatacacaccacacattgggtttattgcactgttgttttcaatacggtctttgcatactagacccccatcagtcacttcatcctcctgcaacattggaaattctatgattttagtcatgttatgtaatttgtttatcatacatatacaaaacatttgcaacaataacatttacctcattatcttcatcatcactagctgtgtaaccatcgtcatatctgttgtctggttacagacgtgagagcataacgacaagctcaactttcaagtatgttttaatgagtgatgaactctaccgctaaatggtcagcgacgtcctacttaaatgcttgggcccaggtgatgctatattagccatggtcgaagtacatgaggggatttgtggtactcgtcaatcgactcaaaagatgaagtggttatagcgaagatttggcttctattggcctaacatgatagctggttgtttcaattactacaaagaatgccaagtatgtcagaaacttggtgacttacagttggtcactgcagccgaat

SEQ ID NO: 49062 - DNA, 447 bp, Zea Mays
cgaggttttacgtgctttcattggtaaatttgtggtggtatattttgatgatattcttatctatagtaagtctcatgatgatcatattgaacatttacgtgttgtttttgatgttttacgtgatgcacatttatttgttaacctttagaagtacaccttcagcacctatcgtgtgtcttttcttggatatgttgtgacatcgcagggcattgagatggatgaggcaaaactgttgccatcacgagctggccacttccaaccacggtcatgcaggttcgaagttttcttggtcttgcaggattctataggcgatttgtgcgggatttcagcaccattgcaacacctctccacgagttgacaaagaatggagtgtcgtttcgttggggaccatcacaacaacaagcttttgatgccctcaagtcgaagctcacacaagcaccactgctg

SEQ ID NO: 49063 - DNA, 551 bp, Zea Mays
tcctatgactttgagaatgttcaacttgtctaagttgtagattcataactttagctcttcttcaatttagatttcctgtttaaactcaaaacgaacgccaaaacacacttttgctatatatatgtttctagtatatcgtaagtgctcaagaatgtttctcagggcagttagaagctatccaaatgtataaaccagtcatagctgaccttttccatgttttgcccatctctggcctcgtttgagttcagtattggatttcaaacccgaaatggaaatgtgctagatagccattatacctatttggtgattaagtgtccaacacaccaacatgcactaactagtttgatatgagtatgagttgatgtctacttgaaggcaaactaaaggaacctagcccaaatgagctaaagtggatgccaaaagtgcaaatttgggtaaaacaatataaacatgaggtttgagtgttttaataagttgcataggcctattacaatgtttctagcgcttgcatttggtctctaactccttgtggagcaaaaagtgcattttga

SEQ ID NO: 49064 - DNA, 693 bp, Zea Mays
attttaatagagaacatgatgacaacgttcatgcgtgtccttgtgccttgatgaggcattgaagttgtgctggtatgagaacaagcattgcaactaatatgtatcaaacagactgcagtctctcagattctcagcatcgtcgcagctccatcgtggcgttcagcttccttgggccctatttcaagtagaacattgacaaccaccacctgatgctgatgctggaccaccaatgtgaaattttgctgcaatggcacctgtggaaaacttagctttgggtttttgctaggacaaagaatttgcgaaacacactaaaatatcactcaaatcgattcacggaacataaggtcgggctggggcgaggatgtggaggtagcattcgatggctttaacatgctaccgttgactccacaaatggttggttgatcgaaagctacatgttaaagaaatgactgaaggttaggaaacattcgctaatcagtctgagcttacccgtgacgactgtgctcctaaccctccccttccatcttccccagaccaacgatggagcgcaactccggttcgcacacgggtactacatgcagcatcaccgtgcaccttagttctcggctccacggacaccatcgtcttcgtctttgatgtgtacttcaccctaccacactgaactgatcgtcctttgtatgggcctaatccaaa

SEQ ID NO: 49065 - DNA, 424 bp, Zea Mays
gccgtctggtgtataatcggcggaaaagatcaaatcccgcattcctattcgctgcggggaatttcagccgttgatcttgcaacctacggtggatattagacgtaggcatacccattcattccttagatctgcgtcgttgatttggttggttgcggctcggattagatcgcgggcttattaaaatccagggcattggatcgagattgagcggttctgcgaggtctgtgggattcaaaatgcactagatctaattcgaatcattgggcgctgatccaacggcttagatggcctcgtaccccttcgcggatacaatttgccaaagagtccctggaatactactgaataaacccgccgtcctcaactggggcgcctctgtgtctcgatttttttagtttagccccagaaattctctgttatcgtcgcc

SEQ ID NO: 49066 - DNA, 506 bp, Zea Mays
gcttcttcagtcgtcttccattttgatgctgaaaattcaggtgcaatcgtcccctcaatattcttctcaggcaccatgtcagcaataattttatcaatctctgataaagttgtcccgaggggaccaccactactttcggcttgttgaagcgcttcagtatctttgttagcaatagagggggcaatcctcttttgaattgtcggtgggggtatcgagaacgaccctcatcacagtcatcatacaacgcttcttctgggtgtttcccccaccaagtgccgaaggacctttttctgtttctgcttcggtagtttccctagcatccttcttctttagatgtaataagcttgttagctctgattctagagagcttagcatggcggaagggaatggttcagtcattacctccaggatctctgttaccccaatagatgttttcgaaggagttttgatagagcgcttcagaggagaagacttatcttattcatcacgactcgactccacaatat

SEQ ID NO: 49067 - DNA, 307 bp, Zea Mays
aacaagtgtgaaaaatcgaagtcttcagcgaagactatccgtgcaaaagtcgcctaagggtgcagccggactagcacaacaagtgcgaaaaatcgaagtctttcgtgaagactatccgtgcaaaggtcgcctaagggtgcagccggaccaggcacaacaagtgcgaaaaagactacaccaaactatccacgcaaagaccgactacatacgcgccagaccgacataacaaatacaccttcgtgagcatagccgaatgcacgaaggcacacaacctcatcatacaagccattatatatgtacaaacgag

SEQ ID NO: 49068 - DNA, 771 bp, Zea Mays
gctggacctgctctttagtgacatacttcttttcatctttttggggctggtctcctggatcggccttattttttccacgtagcccggtgcctcgcaggtcccaccatgttgttgtcgcacgagaagacctgatccacacactctaccatgctgactcttgggaatggctgaatatcgaccttcatgcagaaccaccctaggatcagccgacccttctcaatagccgattggatttgtcgtcggggttctttggaatcattggcagcaagtgtgaatgagttgttccacttgcagtatggtctcccttgtagctcttgcgcagaggggaacttgtgatcctcgggcaacttcaactgcttgtccttcatgtcaaataattgctcggtgttgctcacatcataatcaaacactttcgttggcccttgttgcttcacccacttgcaagagacgggattttccccctgagcccattgggccatcacaacgtcctgttcatctgcattgtctttagctccaaccatacgcacatggtgcatgaacatgtcctaaagtttctcttgatataactctaggagatgttgctcataagttgtaagcttctacactaggtgcaccaaggatctgagttcaagctggaaagccagatctttgattggctttgcgaggccgagtgttgctagcttgatggcctccttcttagtgatgcggtctcacacccggttttaaaaggcaaacccaatgtgaatcatgtatgtgttaggatcagaaatt

SEQ ID NO: 49069 - DNA, 272 bp, Zea Mays
gcaatgttcagtccatgaatcagagcttcatattcggctgcattattagaggctggaaataacaactggagggcatatctgaggtgctcgcctcgaggtgcggtaaagaggatccccgcgcctgctccctgcagctttaacaagccatcaaaatacattcgccatacttttgcagtttctgggttatctggtacttgttgttcggtccattctgatacgaaatcaaccaatgcttgagttttgatggcagtgcgaggtcgaaattcaatgtc

SEQ ID NO: 49070 - DNA, 548 bp, Zea Mays
ttcacctgcgcctgggaagtggtccgcagccgcaattggaaggaagcaccagcggactgggtgaattactcgtcggaactgtgctcgcgccgtccttccgcctctcgccgtggcgcggctcctccacctcgccattgtcggtaataagcacttccctatgttcgtcacactctcaattgcgcttagcacctaggtaatcgtagtttggcgctcggattcgccagtaggggtcactggcgtgtgctgccgccgggaggctgggtgcgccgccgtgactcggtctggaacggagaagaacggttctgaccgtcagatcctaggtggacggtcgagatcataacgtgtcgataccccttcgatccattgaatcgtgtccgtcgatgaccggatcgacgaacctctatgtgtaccgattcgataagagactagatctaatctaggccattgcaccggaatcctgcggctgatatcgcgtcgcacctcttcggcttgcgtagattgcaattaaaaacccctgcactttacataatccaacccgccgtcctcgg

SEQ ID NO: 49071 - DNA, 772 bp, Zea Mays
aaaagccctcactcaattggatgggttcgaccttaatcgatgcttgttcacagtcagggcggcgcaagcgctccagtgagcgcgttctgagcaaccaaatgcgggagcgcctaaattgaagctagggtgagtttcattgattcaccataggtcgggtacacacacgaatttagacagaacgggggtggaagagtgggtcgacgtgagtgtgcgctcggaggtgttctgcgacggcgagatgatgttctcgatgccctatcgtggtagcgttcaatcggttgggctgacgagctatgataacgtttaaggatgctaaaacatggcaccgaaggggatgaacagacctggaaagggctgaacatggcaagatgcctcatggcggcgcaagtgacccgatttgagggaaatccgttgactgtgggctatggtgcagggcagaggctaattgtgggtggtatgtgcgtgtaatagagaggcggagcgagggtagtgctcaatttaaaggaaccgtcaacgtgctttgccaatttgggccgaagacgataatggcagcgatgggatattccacaggacgagctcgtcgtgtcgtccgctggtacaacgactcaaggactgtaattccaggcttaccacgattatagctacgtggtgaaagggtcacgatgtggcacaatagcggagaacggcggcccctatggcaatgatcgtccggccacgtcgctgtgcaagtgggtacggcgaattgagctgtaacagtgcccaagctcatccc

SEQ ID NO: 49072 - DNA, 583 bp, Zea Mays
gagagcaattttttggcatttctctcaatgactcttctatcattctagtcaagaacccaagtcactcaagatcaacacattcatttctaagcattagagcaacactccagagagatccaagcacccaaatttgcaaaaataacctagagaaagttgtgctgcaagttgtgtgcttatgttcttgattctttagtgttgttgtgttcttgtgtgcattcttttgtcctcttgctttcattcgagttctaattcccattcattgtgtatggctagcaagagtctccaatctctatggagtatcttgttagaagaaacatcaaatcaaaggaaccaagggatcaagttgatcgttggatcacttgagaaggtcaagagagacctagttcggtgggacacctcaacgaggacgtaagttcttcgaagccgaactttggtaaaaaaagatgtgtcttgtgttctttactttctacaatttgttcttcatctctcttgctctaagttcttaatatatctttacttgtgatattgctcttatattatattaattccacaatcaagaagagcatcaagtgcaagaacttcc

SEQ ID NO: 49073 - DNA, 427 bp, Zea Mays
ctccactgtcatgtattatggacagttatacatattttagaagcaaaatacaggttggtgagggcaacaatggccaaggctcatctcgcaacataaatgaccaggatctcaaaatttctaagtccgccactagagctcttcatttgcttactagtatggtgtccgtgcgttgcaacggaacacaaactattcgttaaatgcttattacctgtgcatatctatgttcttgaagcggcatggtagagtgggtacctcatttaaacaagatatatctatgtgaggtaattgttgggaacatgtttattaatctctacaacaccaactatttagtatggtgcccaatgcagattaggacgtggtagaatggttacctcatttaaacaaattattcgttaaatgcttattacctgttaatatctagaacgac

SEQ ID NO: 49074 - DNA, 288 bp, Zea Mays
atcaaacacgtttttgatctacatcatgtagtctacctcatacatatctatcttaaccatattccccaaccccgatgatatacactaacctcgaatcaatgagaccaagaccggagaagaaaagatcaacatcaacaagggaggatataacagtcaaagcgaatctcgagatgtatcaagatttaaacatttcagatgaagtcttttccttgtcataatctttcttacctcaacctatccaacttatagtctacataataagcagctggaaaactatgctctcctaac

SEQ ID NO: 49075 - DNA, 617 bp, Zea Mays
ggaaaatgaaagaatcaaaggaggcattggtgagcaaggtatgtcgtgtttgttagcaataacggtttgcatacatttatgtaaataatttgtttaattatgatagtaatgtgttataggcaccaaggacaacagatacattatataggttcgaagtgagagtctctagagcatacaccagagctgttatgaatagatttgaggaatcaatgaaatacgccactgcatacaaaatattaaaggacccagacggatgtaataatgaatggatcgtacagcatacaaaacggtctaataaaattgtgtggggacaacatcaattcaagataacagcagacatagaagctggggagtatacatgcgagtgcaaacagtgggaacatataggtttgtacgtattatgttggttagcataaaaaatttgcatactagagaattttatgattgtagtacgaattaatgtatatttttgaaataatggttcgttttcatgttttcaggtctattgtgtgttcatcttttaagagccttcatgcatcttcaagttgaaaagataccttcaaagtatatattgcaaaggtacactgtctcatcaagaaaagatgttccgtttgaaa

SEQ ID NO: 49076 - DNA, 651 bp, Zea Mays
caacaagtgcacaaaatcgaagtcttcttcaaaaagactatccgtgcaaaagtcgcctaagggtgcagccggactagcacaacaagtgcgcaaaatcaaagtcttcttcaaaaagactatccgtgcaaaagtcgcctaagggtgcagccggactagcacaacaagtgcgcaaaatcgaagtcttcttcaaaaagactatccacgcaaaagtcgcctaagggtgcagccggactagctcaacaagcgcaccaaaacgcaaagcgttacatccgtgcaaaagtctacaccaagaaactgtccgcgcacagaccaactacaaggcacagccggaccaacatatgaaatgtgatagaccaagcgcacaatgcccccatggacatagccggatgcgcgaaggcgtacaacctcattatacaaaccatatgtacacacgtacagcgagggcatcaaaccttacattggttcgaccttcggaatgattcccatctccctatagttgaatagcattatcctaagctcctcaccctcaaaaagacttcgcaactccccctcacctacactcgctccaaccggcgaggatagcaattcccgcttgccagccctgcccacacgaagtcgaccgccatccacctcactcaccctacgcttcgc

SEQ ID NO: 49077 - DNA, 524 bp, Zea Mays
ataacttcggtagttctgccactaatggagggctcaacagctttggttgttcttctgttgttttctctgctttcggctcttttaccgcatcagcacttgtttcggctggcatggcaaggacaacttcagcattctcaataaacttcacttcctccaacgtgggcaccacagctgtctgttctgaagattgtaccttcggcctacaggtcaggaccttggccctcttcggctttggcgcaccagaagaggtcgatgtggcaaattttcgttttcctcctagttttgagcaggaaaatagttatcgagataaacaaacccaataacatcaaagactctatttaatcttatttttcctcgagcaccaaaggcaacggtctgtcttcgagtaggctcccagtagctcatcactggttgcctcaatagcatctagccaattgtcatttggttcgtcaaacatgcttctgtagcagaaggtgtatgaaaggtaaaccaaaccaccttggctggagccagcagcagtttcc

SEQ ID NO: 49078 - DNA, 756 bp, Zea Mays
acctcgaatcaatggaggtctagaagatgtactttgacggtcactgaagctacaaggagcaagggccagaatcctcttcatcgccgatggaggagatcagctcaagtacgcgttgcaacttttatttccagcttccaacaatgcagcagagtatgaagccttgatacatgggctcaacattgctgtatcactcgacatcaagagactaatggtatacagagactccctagttgtcatcagctaggtcaacaaggattgggactactccaccaattcaataagcaattactgtgtcgcggttaggaagattgaagataaattcgaaggcttggagttccaccacatagaaagagattgcaatgcagcagcagatactctaccaaagctaggatcgagccgtgcacaagctccaccaggcatctttgtctaggagatacaatagtcgagtatcacatcatgaccaatggaggaatgcaaggtagtggagtagacagaaccagacccaaatgactggaggatgccatttatcagatatatcaagaacgaggaggaaccgaatgataaggccgctgccgagcgcactgtgagatagtcggcccactatatagtcataggagaagtcttgtacaagagaggggttgttggagtcttcatgaaatgcatcgattcaagcgtcaggaggcgtttgcaggaagaaattcatgcagggcaatgtggagtacatgcaacatctatgactcttgtgggaaggccttc

SEQ ID NO: 49079 - DNA, 567 bp, Zea Mays
ccgctggcgcgtcttccctccgtcggcgacccggcggtgaaactgctgccgggccggctgctgtgcatgttcctgcattaggggagaaaggaaacgtgcgcaagtgcgctagaaaaaaggaaacttccgtggcaccacttgcatgtcgtgtttcctcccatctctggttgcatgcaagtagagagaaaacatctgcaccactcgcatggtcgtgtgtcgccgtttggttggctcatgatttcacgtttcgcgttctagcgcccatacgagattaaactggccccacactggatcctaggattttctgcagctgaggttccggggccctctgtgtggtccatcgtatggttagccttcgaccaatagaatcgtgccacttagtttaaatcagagaaacactagttattcaatatatatgttgcgttgcgagtccgtctcgacttgtttcagtcgtagcgacttcgtaataacctcgattacgtattagtaatatcattcggccgcaacacatgttttcgttaattatgtagttaatccgaggtttatttgaacatcattttaattaaa

SEQ ID NO: 49080 - DNA, 426 bp, Zea Mays
cagcagcctttggaggtcagggcaagaaaagattaaagagggtatttgatgctattggcttcgtatgccctgattaccactacccgttgcgagggcaagagaaacagaggaagattgccgcttcggtcaccctcgctgagccgaagagcaaaaaggtgaaggttctgacccaccggccgcgttatattaaactggatgtagtatctaaatttggcgtagagtcctctttagctaccgaagcaaaacaaactgttccgattatgcagagcgctgaagagtcgattgtagtgccgaaggtgcctacagtcgagccaaccttatctaaagatgataaggccgaagagctacagtcggaagaaacaatgaaaatgccagaaattctgagcccttcaacggaggcaaaactgtcgaaggtacaaaaagctt

SEQ ID NO: 49081 - DNA, 442 bp, Zea Mays
gaaggtggcaaggggggcgctttgtggttatctctctacatcttgtggaccgattgtatctccatgtcgctcgactcatttatgagttgtccaccaccgcgcccaccacaacccagtcgactccccaaacgatgcccacctttggcggctagaggtatcccctcagaccacctccctcgactcctccggcatcactctagctgctgctcctactactgccatgacacttggtcccctcctagaccttgtggattggtgggtaggattagcagtcacttcttaactcgtttagcacgatgaccctgattcctcctgccctcaccgactaggtgtccaactccattgcctcctaccaaaccactaaccactgaacatcggtatacattcttcttcccatcctgctcacccatctcatccttcctcttatcattgtcagcaatgg

SEQ ID NO: 49082 - DNA, 592 bp, Zea Mays
gggcccagagcaagcagcggccttcgagtctctcaaacaacatctgtctgacctggcgaccctaacaagtccagacccagcactccccctcctcctatacatcgtggcctcacacagcgcagtcagcgcgacgctggtccaagaaaaggaaagggatgacaaggttcagcaatgcccagtgtactccgtctctgaagtcctcacgagttctgaatgcaacatgactgaactttagaaaatatcatacgcagtcatcatggcttcgcgcaagctaagacattacttcgaggcatacaagatttgtgtcactttcgacaggggccttggggagctgctcagaaatctggaagcatccacaagaatagcaaagtgggcagcggaactttcagggtacaatatcactttcgagcccagaacagcaatcaaatcataaatcctggcagatttcatcgtagactggacaagacgtgtggggctgcaataggaagacgcagaaatggtctggactatccactgcgatggcgcatggtgtcacgcaggagcaggagctgcaccgatcatcacatcacctgtcggagtcaaatacagatac

SEQ ID NO: 49083 - DNA, 1467 bp, Zea Mays
catgtgatagcaggtatagtcaatacacacaaggtcattacctcttcttacgatttacaattctgggtattacaaatcctaccccccttacaaaaaatctcgtcctcgagatttaggaagaactagggaaaagatgaggaaaatctatgcgaagctcttcttgtctctcccaagtagcttcatcttcaccatggtgactccattgtactttgcacatctttatcaccttatttcttgttactcgagtcaaagtgtcaaggattttgatagggtattccgtataagtcaaatcatcttgaacactaagatcctccattggcagctccttaggcaccctgaggcacttcttaagttgtgacacgtggaagacatcatgtacatccgcaagatgatcgagtagttctagctgatatgccacttctcccactcgcattaaaatcaagaaaggtccaataaagcgaggggataactttcctttaactttaaatctcctcataccccggattggtgacaccttcagatacacgtgatcaccctccttaaactcaagcagtcttctccgggtatcagcatagctcttctgccttgattgtgcaattctcaaattctcccttatcattcaaacttgttcttctgcctcttgtataagttcaggcccaaagaactgtctttctccagtctgatcccaatatagaggagtcctacattttctgccatatagagcctcaaatggtgacatcttcagactggcctggtaactattattgtatgagaactctgcatatggtaggctcttatcccaactgccaccatgtttaagagcataagctcttaacatatcctccagcacttggttagtcctctcggtctgcccatcagtttggggatggtaggctgaactaaaattcaactgtgtatccaagctctcatgcaacttcttccaaaaccgagaagtaaactgtgatcctcggtctgacacgatcttcttaggcactccatgtagacaaactatccgtgtcatatacaattctgctagcttggctcccgtgtaattagttctcaccagtataaaatgatccacttttatcaatctgtccacaattacccagatagagtcatatccagcaggtgtgcggggtagtccaacaatgaaatccatgccaatttcttcccatttccactcgggtatcttaagcgggtgcaatggtccagctggtctttgatgttcggctttgaccctttgacacacatcacacttagccacgtgtgcagcaacatctcttttcaatccataccaccagtatttctgcttcaaatcctgatacatcttagtgctactagggtggatagagtaatcatatacattagcttctttcaatatagtctcacgaaggctatcaatctccataacacatatctgatccttgaaccatatagtaccttgctcatcctccgtgaattctggac

SEQ ID NO: 49084 - DNA, 595 bp, Zea Mays
caacaatcctctcagagcacattcctcccaccaactccaagaggggtaagtggaggttgaggcttcgggggcacgttcaatgcaccctaaagatattttgtctgttttgtggtgagaataaaggacacacaacaaggactttccaccacactatccgcaagcaaaaagagattgcttcagtgaccgctcaatcatctcagccaaaaggagatgtttagtacatcttcatattgttcaccttatattccataatacgtcaaacctcaaccctaggatcctaggctgcattagccttcggtttcaaatgcttcgagcaaccatgtgatgagcgcatgttcaccctctgtctccttcattccagggccacctccctatgattaggtccctactggtcatcccatgttcctattacgaaacatgcagtagcgagacaaaaggcagggctccaaagcttgcaccatcaacaatatggtcctggagctgaagcatatatactgagaccacaaggggttgggtacgcaaacccgaagttaccaagacatactttcacatgcccttgtttatttacatttacttgctaactttcttcccttcg

SEQ ID NO: 49085 - DNA, 509 bp, Zea Mays
acctcattctactattttactggtgaatgcttcccaaaaattccaaaccccaaaaatgcaccacccgaaagagaaacaacaaaagaaaacaaagcaaaaatgacctccaacttatcttctttgcaaactgggtatcacatgcaaccttatggtgggatttaagatattacatatacattcacacactagcatgtaagataatagatgtacaaaggtaatacaatagttcatggaatgacacacctttgttttatgccacatgttctccatcatgatcatcaattttcaacttagtgttttgacaggattgacattatttttgcacaaagcaagatgattttcattcatgcccatcagtcttcattacgacatggattgagtaaatttagcatgccaaagagaaacttatcctcttcaaaaaatcaagagaaacccattctcttcaaagaactacacaagttcactaaaagaaaatgttagtatttaacgacacaggatatagaatgagc

SEQ ID NO: 49086 - DNA, 474 bp, Zea Mays
caccagatgaagctacagatagaactatttgtttgcgactacgtaggaatgttatgatggaattccataaatatgttttccctgtaccgccataacccaacacgaaatagaagcctgctttgtttgccaaaacattttctgtaatagtcttgaatgcatgcaactggtcaatatttaatcttgatgtcaacattgtggattcagtttgcataatggaaatgtcatatgatagttcatcatcaataaagcgatttgaattcactaaacaaggtgagtcagatctagttggtaaattgaaatcctgtattcgacttcctcttctgctgaataatgtagtgagttcttctatcagctgattttttagggcctcatcactcatttgataggctggatgatttagtatttgtctcgcgttgtcctgaatatcatcagccagtaacgtccagactttttcaaagaaagtaaattcatcac

SEQ ID NO: 49087 - DNA, 533 bp, Zea Mays
atgatattgtttgttgagtatgcataaaactaacctgtcagggaagatcctccgcttttatcctctttgtcacaacctttctgagaactcttgtatggcttccagaaacattacgcttcttaacagctggcataaagtcatcgtcatcagaatccagttctactgtttcattgatcaaagtttgactgtcaacatttgaacgatttcccacaatttgacttggattggactgttctgcgcacgaaatgtcaacgctggaacacccctggcttgactgaattattatacgtttgggattattcggaggacgatccacgtgcttcatgtttttagtcaaatctgcatgcataatacacaaaactataaacataaatctattggatatgcggatgtattgattgtgaggtatgattgaataaattcagttcatgcattcttaaattaacctaaatgttttcaatagcaagcataaagcaatctggaatttttgcataatacttataatagtggtaataaacctcattaaacatttc

SEQ ID NO: 49088 - DNA, 537 bp, Zea Mays
taaacacttaacctaacgatagcattaggggtcaactgatgaaggtaaatcccaaacttcttcagtacaacgacaatcatcctgtttagggggaatcttaaaccagctttaagaaaacttttgaagactactacctcattctttcctggctttgggatagtttcttctccaccaaaacgaattaattccttcttggcttcactaaaataacccagcttcatcattttaggaagatcagcttcagagatggtggactttccaaagtccagatgactaggtttacttggcatcccgcaactgtaatcatcttcggaaccaatttcttcaacatcagcttgttctgctccggcggcaggtgcatcctctgatgttgctagcccagatcgcctcattgcttcggaaattggaacagtttcagtggcttcagtctcatctccttcgcgatcaaccctggcagtggagcgcactctagccatttgattatgaatttcttgaagttttttgaaattaataacctttttttctgaagctcttctt

SEQ ID NO: 49089 - DNA, 463 bp, Zea Mays
tcacatgtctttcaagatttgacaccccctatcacaatgacatacggggtcactgagtgatttacatgtgggccaggatgtcaaatctcgaaaagcatgcgaattaggtggccagcgcaatgcattggtggtgataaaatgtgacacttaatgcaaacttgaataagggtggtgtaaaatggagggtgggctactgggctgagatgaacaaactggttcctgggtaggagctggacgaaggattgttgattccttacatgcttgcaaactttaggctaggcagacaaatctgtcctgctttagaaaatccctgagcaagacttgttgctattggaacattaggatgtctcccgtatacggaaattagatcacattattggagtagaactactttgtgaagtctttgttttgcctatttgtacaaatggcaaaggtgaatatttgagcgacatattcatatttt

SEQ ID NO: 49090 - DNA, 1604 bp, Zea Mays
gcgaggcaagaaaagactaaacagagtttttgatgttattggttttgtatacccagattatagctatccctcgcgaaaggagggaaaaagagaaaaaaatgccacttcggccatttctgctgcgccgaaaggcaaaaagatcaaggtttttacgcaccggcctagatacattgaaacagccagggtgccgaagcttgttgaagggacaccttccaccgctaagccaggacaacctgctcctaccagttccaaggaagaatcgactgaagtgccggaaataatagggcaggagaaaatcgaatcgatcggagcgccgaagcattctgccgaagccactgaaaaagcggctgaagtgccagagctaggagaatcgacaggattacaaaaaatcctgagcccgccaccagagctggagttgccgaaggtgcccagagctcctgcaataactcctaagaggaggaggatggctagtgtgctggacgctgtcttagagtcgacaagggcgtcaactcctgctcctgcaaaggagactgccgaagctgctatagctcgcgttgaagccgaagctgggccctcactgcccattgaaatagagcctattggaactgggcagagtattgaacaaggaccttcagacgtcggtctagctcaggagaaagaagatgcactcgagaaggttgaatctcctactctcgaagcatctactgaagagcttgactttattatctgacatgcttcgggtaaaaagttgtcggaagaggaaattgcggaagccaaacactatgctcgggaactgaagtacccaaaaggggccttggtgtataatggcaccaacgaagatgactttctatattgcctcccggacaacaaggaaatatctgtttgccgagagatggcaaaaaacataggatttccgaagctcaaagttggcctttctgctatgtcgaaggatgacctcgcagacaaccttgcttacaatagtctgaaggtatagaagttatggacttataagcatattatttttgtgtcttttactcttgtgctgatcctttgtctcccccctttttgtagggcttaattctaagcaacgctttgagagcacagaagaatgctgaggatgaaagctgccaaatagcccttggtaaccttcggtcggaggttatcaaactgaggaatgaagccgcagagaaggataaaattttactttccttggtagacagggtaaagattagcgaagccaatcttgctgcacagtctgaagctcatagagctgaagttgaagatttaaagagaaagcttgtagaaaagaacgaggattttgaagtcgctaaagcaaaacaagaaataagtgaatggactagcacaagactacaaaataatgtagatgagcttcgggaatcgaaggagaggtactacaaataatccttggattgtgctaaaaagctgaaatatagttttgcaaagggggtgcctactcatctgagcagaaatttatcagaggcgatcctaaaggaaccatcgaatggatcggcgaagaagctgaagcctttgatgagatacttagtgatcgtggtgatttttgcaccttcaccggtgctaaaggg

SEQ ID NO: 49091 - DNA, 606 bp, Zea Mays
gacggctctacctcatcggcgactcgggtaaaaactcctacaaccagactcgccttcataccagtttcgctttcggctatgtcttggcgtgtggggagcactagggctgctgatccataatttcccggcgagttgtgcggctgtggttgggtggcgccgccgtcgcccgtgaccagaggatgatgacaagtcgtggaccgtcgatcgcggggtgaacaactaagattagatgagcgcttaacctttcgcgactttcgttctggtccgttgatctggatcggacggatagaaacaaatctaggataataaaatcctacctgtcgtatttgcatccaacgattctatacgcgtaccgcttcgcggccgtgcagacctaatccacaccactcgcgcgagatctgacagccaagatcagcgcgtaccccttcgcaatgggcactttgctaaagagccctcgggaaacgcagaaaccaacccgccgtccatatttaggtgtgtctgagtcttaagacaatttgcgtagagacccctgctgttatctaattttggtgctcaatccagagaatggaaaatcagaataaatgaattagaaaacgcatttttaat

SEQ ID NO: 49092 - DNA, 843 bp, Zea Mays
ccaaatcaaacaatacaattttcgaaatctgttctgacagtggacagaacacaacaaccattttttaaaattcataactcttaaactatcaggcctatggttatgaaattttaacacaagaaagataataaagttatctacaactcttctatatgaagtttctacagaaaacataatttagtttattaaacatgcagcacgacaaaaacagtgcgtgcagcccaaaacaacaactaataaatttcagctcctatttacttcaagaattgccatgttctagagacttgaattactctaacactttaccatttgttagagttaaaacaatcaaatgaggaccaacaagtcgacttataaattttatccatgtcattttgtgcgctagaattaccacacaattaacaaatgtatctaccacaataatcgaacccggtatatgtgtgtatatcgatgcgctcttcacacattaatttgcattttacttagacatcacatgagcactactacttttcatctgcgaccataaccatacacatttagaccacaacaagcaattcatcgtgattacgaacttaatcaaagccatctaacaattcggctaactagagaaacgacatagcccgctatacaacattcaagtcacataaaacaccatattttatgagatctaacatgtcgagcattaattttacaacataagcaattcaacctctaccctgcttgaccgaacctattggctaacatatcttaaacaccctatccattcttcacatttctaaacctattgcacgacataaacaatttcgatacacatttataacatcatcacacattaccccaact

SEQ ID NO: 49093 - DNA, 414 bp, Zea Mays
cggttctagagaacggacacacgtcccatggggtggtccagagctgtgtagccacttagcctagtcccataccctaagcctacacgctccaccactctgcgacgggtgccctattatttggagctgtgatctaaggggcccggacacacgggttggcttcccggtctaaatcctatatgttctattgcgtgaatcaaaggataaaagataccagttagtgggtcatatgggtgtactactaaagcttcctagccaaggctgtgtgcaggtccaggtcccagtcgagactacctcctgggggccaggtcaccaattctttcttaagtatactagcatccagcctcgacacgtcgagcctacatcccaggggggccaagtaccagggagaagttggtaacgacacacacaacaaag

SEQ ID NO: 49094 - DNA, 741 bp, Zea Mays
taaaatatcttttgagactccattaatataagacaaacccaagataggtctggtttgatgccaccttggcatctccaaacaggcacctacaagctgagtgttttacgcacgaatcacctggctctccctaagatggcgtaagggcatggctgacttgggcagcatgacctcgacatcacgcgcgctctcaaccaggccggtcgcatagtgctcagtggttgagataaggctcttatcctacatctttattgtgagaggcaacaatgcgatcaaaaggtgtcagtgtagtcacacctaaggtcacacgcgtacccatgagcactatgttatgtgtctataacgcctaccaactgaactcaacgacatggatcgtcattgtagccacgcctgaggccatagatgtacttgctggcacaatatagtgtatgtggctactgtgggtaccaattacaccattgtccatggcgtaggctctcatatctggcactatggcatatcacactcaccattataacatacaacaggcatatgttgcgtaccatacaataactacgataagatagtaatagttctcactctcataaataggaccctccaccaaggatgtaactctctctcctctcttgtgctataaaaggaagtgtagagtaacataaaaatccccgccaacatcacgaaggtcatgattaggattgttcctaacttgctagcgcagtcatcatttgaatatgtatgcttcgt

SEQ ID NO: 49095 - DNA, 740 bp, Zea Mays
cgaggttgttcttgtagcttgttgcaatccaaaataaattaagtacatgggttcactttgctcatgaacaaactcatatgctaccactagtttcaatcaacgaaaataaccaatagtggtagaacatgaatttaagtctttcatttaatatgcatgatactattaagtatgtactatatgcactaaccacatactagtagggatgatatgatcatgcacatcacaatgatacctttgctatgttggagtagagaatagtcaagattatttcgatttagctctccaatagcaatgtgaagtccaactgaatagcttggtgaagaccatttatcaataggaaatccattcttcaccagtatgaagttgagaacccatttaagatcaaatgcacaattgaacgttgtagttcacatgcatttgttccttcaataccacttgtatatgagagaattatgagtttgcccgaaatataggaatatcacttgtaaggatgataccacttgttgagatattggtccagaaaattcctttgtttatgcaagactgctactcacggacggtccgcagtgggagcttggacggtccgtggcctgatctctcggactgtctgtggcctaggaccggacggtccgagacctggaacttgcactccattgagctgactgttaatttctcaatagttgaattttaaaataggatcattgctcatttatgaactttatgactgcaccaagcattag

SEQ ID NO: 49096 - DNA, 394 bp, Zea Mays
gtaaacatcagattcactactaaaaattgatattgaaaatatagaaaaattgttgcccttttggtccaaagatatgcagctcttggtacgtttttttttctttttctttttatttatgcaactaagtctacagtggcaacagagaagggttaaaaacacgagctttcactcgtttgatatatatggagaggactttaggtattgactaatgactagaaagacttctttctgtctgcatgaaaggcggcatacaacagcggaaaaagcaacccctagttatcaaatatacatggacattcttgcaatcagcaactaacacccaactatcagctacactaacgtgtgtgccccgagcctcaggcagcctccatctgggaatagatctgctcaagcc

SEQ ID NO: 49097 - DNA, 490 bp, Zea Mays
gggactagcgatagtggtggtaggagtggcggaggctacgggtgtgatggaagttgtgggtgtagctgcggtgcaggaaagctctggagtagtggaagtggtaggggtaggagtgcaagcggagctgaggctagtggagcagaagttggtggagtaggtgaggggtctaggacagccgggggagtgcgcagacgagaagactgttgttgtatctaaatggaagttgatcagcaccaatgtgaatttgccctccctactttgctcgctctgctgctgcaagcattgctcgagtagctctatccaacatgcgattttcttgcctccttgctgctctaggtagactgccttgctgcctagtagggcaaggtgggtcctaatcatcacctccacctgacggacccatgttcttgacatgggccatactaacactaaactgagtccaactctgaaactaccaatagctgactacccacacattgcccactcacgc

SEQ ID NO: 49098 - DNA, 467 bp, Zea Mays
gtgagatccacatggagcttacagttgagcttctctgcatcttctgctcgggcaatcatctgacggtggtgccgagccaagaaatcatactgcgcatccagggtgagcaggtatgcagtgaggtacacgactgtggggtcgtcctcaagcagctgctgctcttccaaggcacgcatcctggccatccaagcgggacggtctctctgaaagggcggaaagaatctgagcggagtgttggccacttcttcttcgtagatctgacacagggccctcaatgccttacgagcgacgacttggcaggtgtctttgaatctgtgtccagcagcagtgacactccattccacatggtgtggactggatccaatgtatacagtcacgacacacttctctgtgccatgctcgacaaactcacgaccatcatactctggctggctcctgattccgaggcgaactgtgcatgctctcag

SEQ ID NO: 49099 - DNA, 316 bp, Zea Mays
ttaatgtaattagaaattttctacattggatcaattgccacgcagaaaaacataaccaagttgagcatctgatcccctctttctttttctctatctccccaatacttgtaatatttgactagcattcttttgcccattgcactgcacaatttgtcttcagacttgcaccattctcgtaacaaaaccaaaacatcagcaatctcatggaaataggtgtgagatatgggatgacttgtggcagaaacacgtagggctagttcataaaagtgctcaagaaattctgccatctttctagctttttgccaatcagctttat

SEQ ID NO: 49100 - DNA, 413 bp, Zea Mays
ctttgataggaattggcatgcttcacacttctggactaactcggcagcatcgcttttcgtcgttggccaatagaaatcggatctgaaagccttcccaaccagagtccttgacgttgcatgtattccacactacccggcatggatttcgtcccacaattgcttcccagcaaccgaatgaatgcatttcatgtggactcctgccacacctcttctgtacaataggccccctatgatggtgtagtgcgtcgactgcctcgtgatgcgttctgttgcagccttgtcatccggctcttcttcattttttatatatctgatgataggctctctccagtcgttagggtccgactctggttggctcaaggtgttgcactcttctgcctgacctaagaggatgtttggttgtgatatttctt

SEQ ID NO: 49101 - DNA, 1623 bp, Zea Mays
cacgaggaaaacatgcctaatatttgatcataaccaaccagagatggcaacttgaagttagtctaaaagttcactccaccacaataccattgacaacctggtataacatgtttgctcatcaaatacctaccatcactcacctttacccttaggggtgtctacaactgcaagagttgcatcccttttaccactccagccgtgttcactcatgaaactagttgaactgcctgaatcaaccaggaccaaaacttgttggcaatgaatagatgcccacagactaattgttctattgtcctcacttccactgacaacggcaacaaagatagccagaactccctcttccgttgatgcctcagactgttccttagtctcctctttctcatcctcattcacctcctcattgactgttatcgcccacatttcttcgaccaaatgcaagggaacactactggaacaacaatgattgtagccccacttctctccacattaaaaacataaacccttagctcttctatatgcctttaatgcagtgagtttattttcttctgccatatgtccagtaactgttgtcttacgatgttctccatatggggtaaacccacgacttacagggactgctactaaatttactcccactgaattaggcttccctagtggttttgaatacccactcatctccacccttctattttccctttttccagtgtgcatcaacacaacctcttgcaacatggctggagaacaggtggtgtccaaatcaactggacgttgaatcaccacaaatgacttaatatcatccttcagcccatccacaaaccgagcagtaatcatagctagggttaattgtccctcatgtgctagcaaccgatgcattaaaatgtcaaactgctcaatatactctgctacaatattattttggtaaatatgataaaaatgtcgaataagcatgttgtgctgacctctaccaaaccgattgttcaaatgcaaacaaaattcctcccaattcatgcttataatatgatgttccatagattgcaaccaaaatactgctgggccctcgaagtacattattgcaaatctaatccacatatctctagccacaacatagaaatcaaaataagtctcacatctatgtttccacagttttggattggaaccatcaaaattaggaaaactcatattaggcaccaatgatcctgatccctgagaccaattacccactgattggttcagcaccgatccccaattgcaaggtgcatgggggttctaggattcgtacctccaaatgacgagaacagacgtgatccttccatgttcgccccggcttctgatgggaatgtcccactgaatgtagggagccttagggcaacgaaatctcaagaggtggaatctcctgcagcaccgctccaccaagccctccttgctcctccacgggttggttgatcatcgacctcttgctgagatactccacctgaccctgaatccttcagctcccccgcaatcaggttcatcttcgcttccacctccggcttccacttctgaatttccccttgctcaacaatcacacccttcatcgttgactccatactcctgatcaaactctgcaccaactccatacgcctg

SEQ ID NO: 49102 - DNA, 654 bp, Zea Mays
tcttatgccaacgacatcttgtcaacatattagagtgtcgtaatttattatgctatttaacataaatacaattcttatgatgcataaactcttacatgttcaactcttactaaagcatttgatgcaccaggctcacacccagttttatcacccacgatttcatcaccaatgtcctgcaacacagacttattctaatacaataaacattaccagcaatgttacaataaaaatttattcaaattagtgatgtaacacataattttcttacattttgatcaaattgttcagtttggtcgcctaatctcataaccccagcaaatacacccacctcctgcactcaataataatacaatagattattaattacttagtatatatatatgaaatcaagtagatcaaagttcacccatcacctaattttcatcacaatcaatatcgtcgtcgttgtcatcacaccctatatcaggttctattcttgagaaaactcggaccagttcgtctaatgtatcaagtgccttttcatatcctactttggacatacttgcatgacgaacaaccttcattgttttcgttagcaacattttttgtctatatgatttggtaatcccatcttttcctttagaatttttatctgatctctcaaatggaacgtcc

SEQ ID NO: 49103 - DNA, 416 bp, Zea Mays
gcgaccatggtggcatagttgacgccgacgtaagggtaacgccacgccgtcgggtcttcttcaatctctgatgccctcctctcttcccatcagactgttgcagtttcacatgcagtgagtagttccacctttattcattacatcgttgtctgcaaatttaaagtcctgttcatagatgtattcattctcgagtctcattccctcattttttggcttactaagtggtgactgcaaccgaccgactcctattaataattattgattccctttcatcgacgccggccatgatcgaagttgttcccctttgacctctcaacaatgttgtttggtgaacaatgttgtaagaacaaatgttgttgttagtgactatctacttgtttggtgaacttgttatcagccatacaaataggttgttg

SEQ ID NO: 49104 - DNA, 788 bp, Zea Mays
aatcttcttacattgatcaatcattttatcaaaatcagaagctaggtcacccaataatcttcttctgaaggttaaggtctgaaaatcagaagagaacaccttctccaccgtgatgtttttatcataaactacatcgaacagtctagggtatctagacgactggggcacaatgtcacaccaaatattattccaaaagctcgaactcttgccatttcgcacaacctttttaaaatgtttgtaaaacgaatctctcacatcaaggatgtctttcaaaaagtgagaatcattttgtcttttttcactgaaatgataggcatccccttaacatatttttttataatgttctgccacaaaccattcgaattctccaaattccaaatccatttggctaagagcgcatcattcattttgttcaagttcaacacatcaagaccaccttggtctttaggtgaatagactaaatcccaatcggccaaatgatttttttactatggccaccttgccataataatgtttttctataaatgtcaatattcccgattatagcttttggagctttgtacatagaaagcatatacagaggaacattagttatactactattgatcaaaattaagtgaaccccaaactaaggaacctccccttccaagaatcaagtttattctccaccttctcgaccatgggcgcccacaaggctttactaagctttttattatcaatcgggacccccaaatacttcataggaagattgttagtcgggcaagtgaaaatatcagcataacaatttt

SEQ ID NO: 49105 - DNA, 575 bp, Zea Mays
gagggcaccacacactacatcggctcaaccttcggaatgatgcccgcctccctataattgaacaacattatttttaattcctcaccctcaaaaagatcccgcagatccccttcaccaatactcgtcccaatcggcgaagacagtagatcttgtttgccaaaccgatccactcgaaggcgggtccgctccacccccatccgacggcgcctaccacttcgcgacatctcaccaacactatgcttcaaaaccacttttcgtcgccgtcgttcgatcctcgcgctggggagatcagacacctcgccaacctccaaccgcggcgaggactccgccgcggccgcatctaatgcaacaaaataatccaaatcttcacccgacgactcttcgctctaggaaaacgtactcccaaactcatcatcaaacgaaaaagactcagattcagaaccagacacactataatcagcaggcactacggtagcggccaccacaaaattcgtatcgtcagcaagggttgtctgcgcaggcccacacgtcggaacctgcgcagcaactgagttttagtatcacaaaaacaaaat

SEQ ID NO: 49106 - DNA, 515 bp, Zea Mays
gtggcgatagttttggccgttggatcaggattgcgcgatcgcgattagctatagggcgacgtctcggccatagttcatcctggccgtggatcagtcagtggacggcttcgattaaatcgcctggtacccctttgactcattaaatcatagccatagattgcgagataaacggtggatccggtttcattaactcggggccaacagatcttgatccaatgctcctggttacctacccattcaacttctaatctgggcgcttgatgagtgatcctgcggctcggatcgtccaataccccttcgccgtgcgcttctttcaaaagagaccctgagaaattgacaaaacaacccgccgtccgtgccctgtgtaaagtatttatatctgtgccctggaaattcataaaacagcccccgagttttcggaaaatagtggccgccatccagagtctgggaatttcaggaaataaaatctaaaatgattttcaggatagaaataaatatgataaacttagaaaatt

SEQ ID NO: 49107 - DNA, 352 bp, Zea Mays
tgagtggtgacgttgccacagtgcagtcgcaacatcctgaggttggcagggtaacttggctcatggtggggcattcatttagttgtgattgtgacaagtgactggcgggtgctcaggcgggtgcacgaggtcttgccggagtggctttctgcactgaggtatcacttcaaggtctgcaacctgacactttaatatagcagcttggtgtgcacgacaaggctgtatcagggcatagggtgtaggtggggcttgctaggatgcacaaaagccaaggcggctagaggcaggcttacgatttctttacgcatgtgttttgccacaggtggtagtgggctccctctgcctagtgtgc

SEQ ID NO: 49108 - DNA, 870 bp, Zea Mays
cgcaccccttctgctccccctccgtaagcagccctctgtcctccctctctctctctcttttctctgtcagttaggtagtgaactccaccctcttgcaaatccttccaatctctgtgaaatccgatgaattcctttgtgaaatgtgttcccctatgtgccttaagcatccttgcaggttcctagctccttcgggagggcattcccacctcaaatggccatttccctaaaaccctagatccccgcacaccacgtgctcggtgaaatgcccaaaccagccaaacttgctccaattgaacccaaatttttcaggcaccttcaccacacttccagtaacctacttgccaaatttcacgccaatccgagatcccaggcttaaatttcatcaaaattcccgttttgcgcgatcgtttccgagccgagtgtccaaaaccctatttcttcgcctaaattcaaaccaagcacacacttcactcatattgacctatataaatccattcgtgaagtatcggctcaatcccatatcgtttcgtgcctcaatttgaattccaatcatcctatgtctctatttgtctgtcaaacgtcgttttcacggcttttgacttatcgatcgccccgtctcgtgccatatctctttgtgtatgtatttattcacatttcatatgcttatgactatgtgactaatacgtgctcacctcttctgtcatttcagtgaccgtgtgtgatcgtgtgccgtctcccgtcctgcctggatcgtcacctctcgtgtgagccttccaggtagacatctcactctttgctaaatctatcggtcacgtttgctctgtgcttagtgtctctatctcatttgcagaccttagttcaggatgccgc

SEQ ID NO: 49109 - DNA, 600 bp, Zea Mays
ccatattctactagatttcaattagtgtagtggtttgactctaagcatgaacatacaaactaaaacagtcatactcacaggagtgaaaatcgaggtggaggtgcatttggagtgaatagcgaaggtggtggagctacaccgttgcgggctgtatgtaacgaagaatttcctccgttttatgttgctcggatctcaccctcgcatccaactccaaacattgccttctctcttcttccagttgggtctgcaatatttcacccacatgttacaataatgcatagaaaatatataatatcaatgaacaacgaatatagcatgaacaacctagaattccctcctctcttcttccagttgggtctgcaatatttcactcaaatgttaaaataatgtatagaaaataaaaattttaatgaacgacgaatatagcatgaacaacttggagtacatgtatctaatggtgactaaagccctctcctaaagtttagtctggggtgcctaaaagtgactaaattggcatttttttacttcatcttccctctcccttcttctccacttcctattaaatgggatagtgcagtctttatgcatagtaatcaattc

SEQ ID NO: 49110 - DNA, 815 bp, Zea Mays
gattagctagtgtctaagttcatatggtgcttagcttgaccatatggtgctcatgacaagagaaagatttcaaaaaaacctaagtctaaaccattcgggtgttctaagccaaaactgaaacatgaaaaccaaagacaaatcagaccttatcatcatatgggctaattaaacaagttgaagatcataaaaatgtctatcaaagatagtaagaaagtttcatcaaaacagaccttaatcaaccacaaatcaatcaccaaccgaaagaaccctagggggagaaaattcagaattgtctctaagtcccccaaaccgaattcaaaacttaccatgttcacctagctccttaactcaaactcaaatggtccaatggacaagtttgcgcctaatcacctcagacatgtcctcgaggaagttgacacgaaacccagcccgtttgacatgcttggcacacgcttttgtcgcgacccgaggggctgtgacagacacgacttggcactgccaaagctcctagcccgacgtgtatctcaccttggaactcacatagaaaagcaagatcttggtgcaaggacgagatcctacatggaaccctcactgagataggcactctagggcagctaaacagacgcttgaacttgggcagacgcaatcctccacttgttcgacctatcctaggcgcgctctgaccgcacagcgcatgccacaagcgtcgaacgacttggccgcgtgctccaccccgcgcccatgcccgaaacctcccctataagaagcccgacccttggcctttcccttctgcacgtccaaatccttccaccgac

SEQ ID NO: 49111 - DNA, 596 bp, Zea Mays
gtctattgtgcatttactttattgtgatttcttattcacttgtgttattgctccaaagtttaatacatatctcaaaggagcaatcaagtagttctcctctctctctccatctctactcacaacgatttggctttagttttcactaacacttgttataaaccaagttcgtgtttttagagttgatttttgcaggatcacctattcaccccctctaggtgctttcaaagggactatagttctggtgtttgctactgagctaagtcgtccagtattgttgctctattgtgcctctccctcggtctaggccaactctccccttttatagactaaggagagggtcggttacaagtggcttctcttgaaaggtttcattgccctgtggtaaaaacgaggtgttctaccctcggtaaaggtccgtccgtcagtattcaccctcgttgtctgagttctctaactgtgctcttttaagtcagtcgggatgacgtgtataggcggtgggggacccaagcgtcattattactcctcctgttccatgtcgacccctggccttcgtggcctgacccttggcgctcctagtcgtgttgtgggctccgtag

SEQ ID NO: 49112 - DNA, 456 bp, Zea Mays
tgcatacaggaattacagtatggactctggatctcgcagttcggagaagtctaggccaaagcttggaccgtcttcctcctcagagtccagacatcccgaggggaaaggaagaccgacgtacaatccggtgacggagctggcgtcaaagcttggccagaaggggatggggttgaacacggatggttctcccccgcccttgatacgtcctgccaagaagtgattggctcctcccgacctgcaagtgggaggtctggtgtggctggctcatcctacctaatggtttggggagttggaacttcccatgctataggaggaggcaccaggagagttgatttggggggtgtcggctttgccggtggtactccgggcatgatactgacgttggctaggtcctcgaaagggagtctgcgtcatcggtcggtctaggagcctcaccagggcatggggcgccatggg

SEQ ID NO: 49113 - DNA, 383 bp, Zea Mays
aacggattcttcctacgatggttcgaggctatgtccctgggcacatctggctagcgctttcagagttgagttatttcttccatcagctttgtgcaaaagggttatcttggatcgtggttgcagacatggaaagattggcacatgtgttactgtgtaagcttgagaagatatttccacccggcttcttcaatccaatgtagcatttgatttttcatctcccctataaggcacgaatggggggcccgtgcagggacattggtgctatccaatcgagagatgtctaaagactattcgaaagaaatgtagaaataaatgcaaaatcgaggcttccattgcagaggcatacattctagaggaggtgtcaaacttgacaacttattatg

SEQ ID NO: 49114 - DNA, 688 bp, Zea Mays
aacggtaatactgaataagcctctgttgtcggaccaccagcagctaagtggactttttaagatctatctcgtaagcattgcgaagccaagcgatccttccttcttttgtctgcaagtttgcgaaaatatctctatactttttctcagtcaatagatgagtggcaaacaaatgtatttggctgccttctggtgatccatcatccataacttgttgcaactgctttttaatctcaagtcgaacagggtcattgtcagcagaggtaatggacttgttagtagtcattgaacgcgactcaaaagcctccactagtcttctcatgtactcttccctcgaatcttttttcttctttggtttaggggaatcatggcgcatcttacgcttcccactagcatttgtgcaggggtcaggggtgctgttttcatccccacctaaagtggcttcgaaatgatcatcagatgatgaattagcatcctcgacgccaggaaccagggttctttcatttgtgcagacaatgggtccaaacataaccttgagctcatcctcattctctaggggggctgttttgaacataatacgacctggcattgcctgcgcgaacatggtagttcctagtttgagatggccaaatactattgttagtctacaaaaaaagatctacttacttcattttgcttggcccaccactca

SEQ ID NO: 49115 - DNA, 457 bp, Zea Mays
tttcccgatcgagtcctgctcatactgtcacgcatcactgcgctccggcctccggccacgtagtcctatcccggatcgggcccgacacaacggatctactaccaggagtgtgtacaccgtctgtgtacgatagcaggcggcgccaagtttcgttggattgcatcagccatcattgtcagcagcaggcggtgttgccggccgactcgtgagggcaaggccctccagattacctcctcgctctttccaaccagtcctgaaggctacgactttttgtgagaggtcgtacccccaattgaaagggtttcatcgttacaaaagaaatatccaagtcaaccgatgcgatttgtcaacccgttaaaaaataccggtaccagtaccacagctcagctcagccggccaagtcaacgccgtcggcaagggcgcaccacgcacgacgcaaaaaccagcgatggtggac

SEQ ID NO: 49116 - DNA, 393 bp, Zea Mays
aagaactccaacatcaacaaggcggaggagatctgattctgagacaacagacatatggttacctacaaacggcaactagctgttggggtcgatgggaggaatgactaccacagcagaattttggttcttccgcttgggcgccatcacaatctcaccggcggattgaacaaaggagaaattagagggaaacagaggaatggtttgaggcggaaatgtgaagctagggctcagaactcagaggcgtgcagcgatgtgttataaatggagttttcccgggttgggcaccgtttctaaaaaagtgccaagtcatcactcggggaaaacgagaattccgacatgactcggctgttacctctgaaacaccgacgtcatcaagcaccactcggcagttac

SEQ ID NO: 49117 - DNA, 552 bp, Zea Mays
atcgggggcgacatgctcacgaacaaagtgatgtgtcatgcagtatgcaatgacatgatgggcagcgatgaacatgacgcaaacaagtagtcacatgatgggtcgctcacgtatatggacatactatgcagagagcatggacaaggcgagcgacaacgaacacgacatagacagggagtcacatgatgggtggctcttatgggtataagtgtcgtgcagggcgtgtcaacagggcaggtgatgacaaaaacaacgcagacagggagtcacgcgatgggtcgctcgtaggagtggacgtgtcatggaggatgtgtcgacatggcgggtatcaatgaacctaacactaatagggagttatgtgatgtgtcattcttgggaatggacatgtcatgcaggacacatcaatatggtagacaatgataaacatgaaatactccttcaataatccatcgatgaggccatgcaagtcgagcttgagctcattgttgataaattaacggcattgagtggtgttgctaaccttctttctcaccttcaccaagacgagctctg

SEQ ID NO: 49118 - DNA, 1478 bp, Zea Mays
ctaggagtcaaacgcgagcacctctgccgtcatccatcctggttgagagagatcggtgaggaaggagggaccgggcgccaccatcgctatacgcgagccgaggtcgtcctatcatagaaaccaagactactacgtcgtcatctttggtaaggcctctttgagctttgcctttttcctgggaacattgtagcatcgagttcggggatgtgccgtgggttgtattatcgctccgccatggaggccgagcgagtcctcggcgttcggccattttgcggcggccgcttctccgccggaggcgtccccgtcggcctccaccgtggtgtcgcatggtgtcgtatattgaattatgacggagagaggcgaggaaggaagaaatcgacgagggggttggattggactgcgactgttgttgattctctcttgcacgcggcggtcctcctccagagtccagacccaatcccaaatccctaatcctacaaagggatcccaaatccggcgtccagtccagtccaacctgtagtagatatcccctccggcttggctgtccgtccttgccccaattccgattgaccagagaggagttggatcagggagcattggaatggccgccgccgcataggatggatctggattcctccggctgctgctcggttggtcccgtggatgctgtgattcgaggacgcggctagagattcggtaccgatggtggcacgaatttcgcacggtggcagatttgacgcgcgttcgcccatttttgcgggtggggttgggtccgcattgctgcattgacgcatatgtgtcaccctcattttagctggtttgctacattgcagccacgtacgcttagatatggtacaacgatagcacagtggtttgtgtggaacacatttggctgaagttactcactgatcaaaacctgaaaggttcgcctatggacttttatgcttgttcagttatttttagcaatgaatgaacccagcttgcagtgccataatatgtagtaggtctaattgcagcaccgctctgacagctctgtgtgagtaccgctaattactgcaaagcaagtctttcttgttgagctctcagcaactcatgggcacactttttagacaaggttatctggtgaatatgataggcagacagctgtaaacactccttatggaaatggtgtgctcctcacgaagtcaaaacttatcgacggtgtatccgaaggatgatggatgtattttattttgttggagttgtgaccatttgcatgttcatactattctaatagttttaaagtggtccatgacattcttttcactgaattgtggttagcaagcaatctgcgccaccttccctagcacttcactctatctccacacattcagtatgtaacttgtccagattcaaaacatcagccccctgtaacagatctgaaaaacaagccaaattggtgatataaataagttaatttgtgttaccctttgaaaagt

SEQ ID NO: 49119 - DNA, 307 bp, Zea Mays
gtggacttgtaagccaaatatttgattttggacttatttgcaaaagagtcacatttgaactcttttgactaagtctaatttcattgtattgtgctcatctttgtgaccttgtaacttctaaacaaaggagattttgccctaggtcaccacaccaaatttgaagatctatcaaaggagaacaactttgcttaaggttgcaagctcacttgttgagaaaaatccagagatatttaagcctgaagtcaggctgtcagactggtttggtctgaattttcacactaacagtgaattaccaccaacttcaaac

SEQ ID NO: 49120 - DNA, 549 bp, Zea Mays
aacacctcggcacccctcaattgttcaaatagaacctcaatacggggaagtgggcatttattcttgattgtcacttgattcaaagcgcgataatccacacttagccgcttgcttttatccttcttctcaacaaacaatactggagaagcccatggagacctactaggcctaatgaaacccttagccagcagatcatccaattgccgcttcaattcaacctgctcctttggggccatccgatacggggccttataaataggctacgtacccgggatcagcttgatctcaaaagctgcatcgcgctccggaggaatgcctggaagctctgccggaaacacatcagcaaagtcgcacaccacacggatgtcctgtactcgcaatgcagcctcaccctccaccaccatggagaaaaagattcccgacttccttgacaggcgatccggaagcaattgcgccaacaaggataacatgtactttggggaacttcccaagaataccacctccctacccgacagcgcctgcaataacactgtcttccaaaaacaggat

SEQ ID NO: 49121 - DNA, 678 bp, Zea Mays
atcgaaggttgccgagggctatcacgcatctttcatcttcaacattcttctgcgccctcaaagcgttgctaagaattaagccctgcaagaagatagaatcagcataagttcatcacttttgtaccttcagactattgtatgcaaggctgtctgcaaggtcatcttttgacatggcggagaggccagcttcaagcttcggaaatcccatatttttggccatctcccggcagacggatatttctttgttgtccgggagacagtataggaaatcatttttgtccgtgtcgttgaacactaaggcccccttcgggtatttcagttcccgggcatagtgtttggcttctgcaattttttcttcggatagtctttttcccgaagcatgtcgaacaataaagtcaagatcctcggacggtgcttcgggagcaggagatttagcttttttggccacatccttctccacagccacgctagtatctggaaattcttgttcggctctctgctcagttgtggcaggctctgcctccacaggcactgcgggcctagcttcggttttagcacgaactttagcagtttcggcaacctttttcataggggcaggagtcagcgcctttgttgtctccatgacagtgtccagcatgcttgccattctcctcctcttgggagttattacagaagttt

SEQ ID NO: 49122 - DNA, 914 bp, Zea Mays
attttgagatcgtgcttctgcgagggaaccttcggctatttgcagcaggatgtctttttcttttagagaaccttcaagttccttgattttatcctctaagcccttaattatgactttgtttttttctatcttcagaatcctgctacattttcaatgccttacttaacaacatgctctgcaaaacaaaggtaaaattagaacactcaatcgaccatgaaggtaataaaaatttagacgaaggtagtaaaaatatagatgaaggtctcaccttgaagttggaataaaataggctaccgacaatgtgttgccgtcggtaacagctaatgttggtctccagcttcgggaatcaaacaatcttggatagagtgccgattatcttcgcccgacacggtcgctaatgcatcctaaaatttcctcatcaaccccaccgaagagtagaccccggctggtaaccacaagatatagcaagttctttcaattccaacttgtcttcctcagacagttcctgactgcccaagtgccgaaggtcaaaatccctctcgtccgaaggagtcttatcaatttcctttccttcatttggcaccgcggccatgttttcttctgcagctacatttgtttcctttgcaaacacatctgcaaccatatctgacacaagcctatcaaattctgacattgtggatgctagttcttcagcttcatcttcgccagcatcttcgacatctgtaggaattgccgcttttgttgccgaagctaaaggcagagtttgttcaattgcttgcattacattcacaattcgtcgtttcttttatccttcagccatctcttctgtagccgagggcgtttccttcctctataaaagttttgtcagttccaatcctagagggcttagcagcttgaatggcggagaatcagtc

SEQ ID NO: 49123 - DNA, 568 bp, Zea Mays
caaaagatgcctcccttgattgcagtgttgctgccaggcattccatctgttcagctagatccttctgaagttgtttcttctctaccagcaactcaagaatatgagctacgtcgagacaccactcattgaaggacacatccagactctgctatagctgctccacgtgcaacggaggtgcacgactgctgctacccgcctcgactgtatgggaagccatttgatgcttgggcacacctcgttgtccagtacacatgcggggcgtttggttaggaggagccattcttaatttttaaggaataaaaataaaataagagttcaaaggattagtaagattagtatgaataatttggaacccacacatagcttggcaaccatctagtttaggggggaaatttattaaaggagtgtatgttatgttgcatgcttcatttcctattcgcctctcaactaatgccaacatatagtgctaacatactctatggcggtggcaaatcctactcactccgaagttaactagtcgcaatttcttagggtttagtcactgtacctacagaaaatttcattacag

SEQ ID NO: 49124 - DNA, 724 bp, Zea Mays
ataagttatttttccttcttgcattagcacacatccaagtccaagatgtgatgcatcacaatacacatcaaatcgcttgtgaatgtctggcattaccaatattggtgcagtggttaaccttttcttgagttcctcaaaacaattctggcatgcttcatcccacttaaactctttacttttctctagtagtgaggtaagaggtttcactaatttggaaaagccatcaataaatcttctatagtatcctgccaatccaagaaaacttttgatcttggacgcatcctttggttgcttccaatttagtatttcgcttatctttcctgggtctactttaattccaccatcagtaataatatgtcctaagaaatcaacttccttcaaccaaaaatcacacttcgagaactttgcatacaattggttgtcacgaagcttttgtaggactagtcttaaatgatcttcatgtgttttttcattcggagagtatatcagtatgtcgtcaatgaatacgaccacaaactaatccagatattccatgaatactttattcatcaagttcataaagtatgctggtgcattagtcagtccaaacgacatgaccaaaaactcatataatccttatctcgtagtgaaggctgtcttgggtacatcttcttctcgaatctttaactgatgatatcccgatcttagatctatctttgagaatatcttagctcccttcatctga

SEQ ID NO: 49125 - DNA, 719 bp, Zea Mays
tccatgagactaaatggaagggttagaaggcaaaggaggtggatattatcagcttcaagatttggtatataggaacaactacaaataaaaaatagagtaggagttttgattagtaagagcttcaataacagtgtagtagatgtaacaaggcaaggagagagaattatattagtcaagattgtcatgagcaatttagtcttgaacataattattggtatgacccaagtacgacatgatgagagtgctgcgagacttttctcaatagagttaaatggcttggttagatctatacctactagtgaaaagcttttcataagatctcaatccgcctataggtacaacaaatacaagtttaaaggcaaacaatggagatttttggtatggtagtggaaatctagagggagagtaagacttggacttttttgtagcttttgaaatgttgatagccaacaaagagaaaatcccatttagtgatctatagtagtgaccaacactctagttagattgactttgttctcgcaagaaaagaggataaatgagcattcttggtttgcaaggtgttatgttgggagtgttttgttcctcacataagcttatgatggaagactttcatttttaggtgcatgcatgtagggataaacaagtccagattgcaaaaacaaagtggtagaaactgaaagaggagacgttagaagtcttcaaggaaatagtcatgaaag

SEQ ID NO: 49126 - DNA, 736 bp, Zea Mays
aaaaaattcaactgcaaaaattcggggcgttacacgcctgcacatatatgatgggattggctttcccttggccgctctcgccgcgccccatactaccgagggaaaccccaccaccgtccgattcatccatgaggaggaagctgagcaccgtcgtagtctcctcaccgcactacgcctagctatcactggtgaagatcaactgcagctgggaaatcctatgcggtggtgtcccagcgcatcgggtacggtgaatcggcctaattctgcgctggtgcccaactggaattgtggatccaccgctcgccgtggccagggctttctgcgacgcattgtggggtacgtacacgtccatcgtgtttaccttgcataggtcatcatgtagggctcttcaaatcaaagctttgcgtgtggtgtcgagttttgggatgttccggccatggcactaccgcgccgggtgaccgcgtcaccggtgggttgaacagctgtgggcaggggagagttttcctccatccgatcttggttgggcgatctagattagatggggatcggtgaatggttcggaccgtcgatctggccgcggtcggctcggattaggtaaaggaaacgcttctgcacggtggatctgagttgtctaatctagatcagacgagtacagtcatgtctcgagtatttaaaatctacaccgttgaaccctagatctacgactgtgatatgatcaaaggttaccctttcgtcg

SEQ ID NO: 49127 - DNA, 379 bp, Zea Mays
ctaggacctgccaagttataataatacagaagcaaaatgagatatctaaggccgaagcatgacagaatcagccaaagcaagtcctacatactgcttcatattattctccgtatattcctgagtatgtgggcaatcaacagccattttcacaacctacagttttagtagcttcggcaagccatctccagctgcatgggccttagcacaaccactggtcatggctccaacttcgtccaacaaccagcagcctaaagggcagcgccaaattcagcaacaacgtgatgcaagagaagagtctgaagctcggacagttaatagcactgttcaagtgtcgaggcacatctactgaagctacataggggctgggttaacattttca

SEQ ID NO: 49128 - DNA, 432 bp, Zea Mays
cttgaggcgctatcatgataaagttgtgcgacgccggtcctttgcagtgggagacttggttcttcgccgaattctaataggggaaggacggcacaagctgtcaccgctatgggaagggtcattcatcgtatcagaggtcactcgaccaggatcataccggcttactcaaatggatggcatggaagtggggaactcatggaacatagagcacctcagaaagttctatccctagaggcctcaaaaattctcgaagaaacattgtactctgtaatctggggacttcatcatcaataaagttttcgttttcaaaggcattcagactcttgacttacagctgacttcgattggattggacttgaaatcagcacgttacttgacttagggtgaccactataccctactaacggagcaatcagcttaagtcggtgtgac

SEQ ID NO: 49129 - DNA, 387 bp, Zea Mays
cgaccctcagccttgccctagcccctggacggcttccccgagaggcggagaagctttcccaagcttgagccgaggcattgcctcaccggagaagcgagcatgacctcactggacttcggccgaccgccaccgcgcgtataccaagtcactcagtgagtcttttcccaattcttcgcacccacaacaccgctgaccttcactgaagatccccgagcactttaatttaactctaccgccgtgagcaggccggagcatgcattgccggtgagcccgaccgcctgcgcacgcggccaacctatatccgaccaccaccgtcgatgatccgcacctcgatgtgatcgccagagaccctcggacctcacacgacaattagctggacctctaccg

SEQ ID NO: 49130 - DNA, 434 bp, Zea Mays
ctgctaccatgtatatgtgtgtggatgtgggtgggtgattatatacccagatgggatgggaacatcagagtctgtcaacgccgtgtacgcaaggtgctcggtgactccactgttcatgcttaccctggagcttaattgtttgggtcagctctctctgtgagcatgcttagtttgggccagcaagtaattaagctgacgcatgtgggtggtaatttgtgacttgcaatacgctgaggtctctgcagctgctcgcccacctcgtcgctgtcgccctgtccattttcttcttgttaatagcggctggagtgttgctgttggtggatgctcttccttccctggccctgctggtagttgatttgagtagcagtggcagtgtcaacagtttcctttgagaggtaggtgctgtgcattattgctcgtctggcatggtatgc

SEQ ID NO: 49131 - DNA, 757 bp, Zea Mays
gagactcctttaagggcgaaggctgtgacaccccagtgtcacctagggtttcttctcagagctaactcaaaatcattatcacatgtgaaccaaattgaggaaagaacatcaaaaattaagaacaaaggtttaagtaagtctttttcatcttaagaaattctccttaatcatgccatgcacctcaaggtaagaagaactcacaaaccctaaataatcctaagtgggccatttaagcacataaggggaattggagaaaagacttgggaaaaacacaaaattttgatatgaaccaaataacaaagttttagtgcactaaataacctacaaaatatagtaaggaagtttggccatttgaatttttcaaaatccccaaatcagcccatgaactaaggccctatgggaaaattcagaaatcataaatatgaatttcagaaccccttcccaagttcagatgtgttccctgttttccaaaactcgaatccataaagtccaaatataaaagtggcgccaaatttccttgaacatgctctggtgaagtttgaactcaaacaaaaacagtttgacatgattttggcgcagtttgttctcgggactcggctgtctgacacttgcaacttggcgacgttacaactccatgtccctagcctaaaaccgcgcaacatccacacacaatcgacaaagcacagtcaggggaacaaatccttcacagcgatcttgcccaaattcgcgaagatttgcgcccaatcggcgttagaac

SEQ ID NO: 49132 - DNA, 415 bp, Zea Mays
ggcctatcaactcgagttaccggatagtctatctgacgtgcacaatgtgttccatgtgtctcaacttaagaagtgtctccgtgcccctaaggaacagttaccaacggaagagctcggtgttcagggtgagttgacttacacgaagtacccgatcaagattttggatactttgactcgagtcacaagaaatatggttgttaagaaatgtaaagtgcaatggaaccatcatgaagaagatgaagctacataggaaggagaagaagagcttcgcatagattttccccaccttttctctagttcttcttaaatctcgaggacgagattctttttaaggggggtaggatttgtaatactcaaaagtgcaataatgagaatagagataatctcagtaatttgtgtcctctacttatcatca

SEQ ID NO: 49133 - DNA, 679 bp, Zea Mays
tttgataaatggagaagaaaaagtgaataaaggaaagggtaacaactgaattttatgtacagagcaaagaaatttttatacccataattcaaggtgttacagcagacttcaagggcacaatggtgtgcacccaagaagcagtctagatggccctcgcagtgagcacttcaatcgcacaaaagcgacttgtagcggacgcgaccacactcccgaaggatagcctaccaattctagctctagaagcgaccccaaccgcgacattgcagtcgactggagagaccaagaaggtcagccttggcctccctgacacatccaagtcggtcatcataagctccacccttcctcccaaataggaagacacgttttcagctcatacaggacaactaggacatgttcgcatggaggctagctgacatgcctgaggtcccaaaggagttggccaagtataagctcaaggtctaccctagcgcaaagtagtcaagcagaagttgtgtcgattcactcctgacaaaagataggtgatccatgcaaagcttgcacgactcctagctggtgggtttattagaaggttatgcatcccgagtggctggcaaatcccataatcgtactcaataataataaagtagactgatgtatgtgtgttgattataccgatctcaacaaacaagggatcccttca

SEQ ID NO: 49134 - DNA, 895 bp, Zea Mays
aacacaatggtggaaatgggccgacccaggaagccgatgggctcacacccggattattcgcagcttgggcgcgatcctgctgaaactactcgcttttcccgtggccaacgtcctcaaacgtcggggacagctcagaatggaggtgctgagttttcctcaagataagcaaagtctgtttgctattagctaggagataagctagaagagtgtgatcaacatgtgtgcagggagtgtcctatggtcgtatatataaggcctagggtggtccccatcattttcatcccattagcatctctccattcaggagacgccacttgtaaacaccccacacatacgaagccaccccaggaagtagggtattacgctcctcacgcggcctgaacctgcaaaaaatcgcccgactctctcttccttgtgcccctggcatgaaccatcgagttacaatctacgacaccgtcctacccaaaagcaccacgaggataccctgggtgtgcggtcggacactaaacaccgacaacaagtacgttgtcatgacgtcctcaatcgccccgatggcccgagcgacagtcgtgtagacggccaaccagtcgtccgggtcctgcttgggctcgtacttgtcgacattagagaccttgaagtttggtggccattgaattgcccagagccagggggaagggctgagaacccacacgtccccccgatcctaccagcgatattctcgcgcgtggtcgcgatgacgatccctaggaggcgagtgacgtcgtgtgtcatgccgcctctcccgggctgatcaacctagagcggggctgttcgtggaggctgttgtcgactcagttctaggggcacgcctacgcgccgatgctccatgatcttggtcgtactcttcctgctgcct

SEQ ID NO: 49135 - DNA, 544 bp, Zea Mays
cttcccagactcagaaagatgaagatccttggcttcatctctagtaggttgccggaaatcatgaatcttgatcttgtcgccagagatatcattgtcagaaaagccaagaatgtgagcaaatcgacgatagctcaccttataccaactaccttcaatgaagaagttcagataagggtagttgtaatgactctcctcgtcagctagctttatccacaaagttgagtagaattgagcaataacttcatcattccaatcatattggaatgtcatgatactcttcatctgtttcctttcacaggacctcaatgcctgtgtcatttctgggtccccaatggcttcacaaccttcccagttgatatagcgttgatgcaggataggttgatgcttcttggggagaatgacggaattatagaaatccacgtgatgaagtgtccaaaagcgatttccattgatcctggcatcacgaatgcgcaatacaggattttggaaacgaagatcctggaggagagcagagcctccactggcagtgaaatcagtgactggc

SEQ ID NO: 49136 - DNA, 491 bp, Zea Mays
tcctgccctgtttctggccgccagctctgcccaaccaaattgagcgccaccgtcgatgccctctataaattgatggccggggcagctgcgctatgtcatcgtgaagccttagcacccgctcccacccttaatcgttcacccgagctctggaatttcaaacttcacccaaactagtctccgccaccgcgaagaacagctcaaccgcgaccagcccaactcaggttagttccagtccctctgctgcttgttctagcatccttaggtaccccgcaaacccctcgacccctttaattgaactggatcgccagggatcaccgggaacgcactcatctgtctgccaccccctcggttcacgtggacagagcttggtagatcaccaaccgtgcgattaacttaggggaaatgctcggagtaggtctgatttggtgtccgccgctcgggaacgccagtacttgccccaaacggccgacctacgagctcaccggagctcg

SEQ ID NO: 49137 - DNA, 669 bp, Zea Mays
atgagtagtgcctgtaactttaacatctatttactcagtttacgttgaaagttggtataattgtgacacctgtttttagtcttattatgtataaattattatgcactaacattttattaaataattcgtatgccgtcgcaacgcgcgggcatgagactttatgcatatgttttttgcattgaaaatatattttcttcaagtttgcgattatgctacatttttctacttttacttcgactatatgtcaatgtgcgaccaaaaatatcgtgtttcatcaacttatgatgagtccactcaattgtttcttgaatatacttttttgtagaaccaaattgaattttacaaggtggaatattgattagaaaaaggtgggatgctgaccaggaaagcgctactcccttgtatgaactagctggtcgatgattttgtttcccatcctttttgttttcttgacatccatttgttcattagggagcacataggtggaatgatgattaatgtttctacatattaatgtattttattataacatgttgccgccgtaacaatgtatgggtatacagctagttaactattaagaaggtaacgtagaccacccctgtgccctcgcctccccctctgctccagtgtcccgtctcccgaagtcatccgcgacagctgccctgctac

SEQ ID NO: 49138 - DNA, 340 bp, Zea Mays
tgcgttgtcgaagttgggatctagtcgggcccaggctccgcctaggatcttcgtccaagaaataccacagccaagcatcctcacggaccaggtggaagaatgcaacgccttgagtcagccagaggcagatcccaacgactggagagagcctatcatcaggtacataaagaatgaagaagagccggatgacaaggccacggcagaatgcatcgcaaggcagtctgcccattacaccatcatagggggtttgccgtataggagaggcgcaggaggagtcttcatgaaatgcatccactcagccactaggagacaattgttagatgaaatccatgtcgagcag

SEQ ID NO: 49139 - DNA, 757 bp, Zea Mays
cttgagttgggccacctgtaatcttcatcaagtgatcaccaaactctcaatcgccatcaagttatgtaggtggcgctaatcattaagaataatggtaaggataacagactaatgttcatttaataattaagttttggtgtttgatgatcaccatagccatttgggctaaaattatttgctagtgtttttgttacagtttaaaggatgcaatgtagacatggacgaaggcaaagtaatgatcgagatgatcaacacatcagacaagacatttgtagactcattgaagacctataatatcattcaagtgttcaagacacgagatgaaagaaacccagacgaagagatgcaaagaaacagagaaaaatagactacttggtagcactatacgtgttcgatgaggcaccagataagataccagagagttgcattgtagtgaagaaatgacaacagaaatagagttcatcggacatattggtgtgcactagatggggctacacattataaggctatctctagcagtctccctatcacactccctatttcaaacctcactctgtaaacagtgcggtctacagtgcaaaatagtgttttgcacgcccatatacatgttccactagagatagcctaaggaaagcattgggctattggttgtcactatggtttgaccctccagcttcatcgttgatgttgaagatccactacttctaagatctaatgactcgctgctacctttgttgtggtacttacctcctcttta

SEQ ID NO: 49140 - DNA, 694 bp, Zea Mays
cgtagattggacaacaggagagacttcagcatcttgagcacgatcaagtttcgtaggccagagaacgtgggtggattcatggcacacatccatgctgttgcatcatgggcgtctgccgtctggtcgaggtgcacggacatcagggctgtctggttgctatgcgtccatggcggacaatagagccatcaaagatcagactgccgccaccaaggccgacgggcggaggcatggccatggcacaacgtggaaacgtggcttgaagaaaggatgcgggaggggctgtgtgtaaaatatttggcattcgttggatctgaattagaaggcctagatgttatatgtgtacatgtgcattgtctctccatgtgcaccggatattctcctttggacaaatatacatggcagaagcatataggacagaaaaaaaagaaacacaaattttcttaaattgttgatacgcatagctatcaatcaacaagtgaaacaataaaaaaaacacagctgcgaatgaatgcataaaaaattggaatgaagaaagtagaaaacaaaatgaacaatgtactactccgtatatatatggcgggctcggtcgctgtcctaattattttgatcagtactgtggcatgctgcactcgggcggcaccgtgccgttgtacctcttgccgtctgcgcagtagtcgtagatggtgtagccgag

SEQ ID NO: 49141 - DNA, 534 bp, Zea Mays
gatcttatgaagtcctccagctctagccttcgtctggtagtggagttcatgcacccgacaaaatccttcagcgttggcactcttcccttggcttcggagagcccatatatagacactaagtctaactatggcatttggggtgagttgatgaaggtagatctcaaacttctttaaaatttcaccaatcatgttgtatagagggaatcgaagacctgctctaaagaagctcttaaaaactacgacttcgttgttccttggttccggtttcacttcttccccagcaaaccgaactagttcgtcatcatgctttccaaaatatccttatttcttcattaaaaacagatcttccactttaactgtggattttccaaactcaatatggctaggtttgctcggacttaaaatgccatcatcatctttgttatctttgtcaacttcgacaatagttggatcagcttcggcaacaacaacaacttctattggaactggctctttttcttcttgtacaactaacccagaacgtttcatcatttc

SEQ ID NO: 49142 - DNA, 920 bp, Zea Mays
gtgctagcttggagatgcgtcgcgggaggaagactgagtatctcgaaatccctctcaaggacagtatccagggatggcgcttggagtggttcattgtcgagaattatggaaactctctcccctctcggtcgggaagacagccggacgttcgcaccccgagttggaccgagtcccccacggatcaggaggtagctgaggcaggtgctttgctagctgaagttgggttgctgaaggagaggggtctgactgctgaagctgtggttgctgattttgtcttcaagaatattcagccgttgaaagacagggcatacccggcttttctgtatcgaggcctagccgactcaactcgggttaccaacaggaaaattccttctgtggacttggtgaaccgacttgagatgatccttagaggcaaggtgtcaaatgttggtgccccagtggcatactcagcctggaacttgcctcctcccaaagccttcactctttttgtgtcgaatccacctgtcactgatggcagtttgggccttagagtgcgaccctctgctgaagaagttagcgccttggttgccttgctcgaggagattcctgatgatgaacggcaggtccattttgaggtgcctttgaatcctagtgatgcagagataagtgctatgcttgatttgctagctgaggactcttctgatgctgctcctgctggggcatcggtggtggcgcccctcccagaggctgatacgaccttggatattcagaagcctgccagtactcgcccgaggcgcccttgccgagctaatcaacctgatccttctgctgatgagcataaaaagaaaaagagacgcctccggcgagtatccagtttggatcgggatgttggtacttcggttcctgctgctgaagaagtgactgtgactgaatttattgac

SEQ ID NO: 49143 - DNA, 728 bp, Zea Mays
tgcacccgactttgtcccttaaaacccgggtgtgacattaagcaacacacccgcgagaggtcggccgaacccccaagcaagtgccttgggggctcaagggctactttcgtggtatcataattaggggtacccagattgtgcccctaaggatacctaacatctaagtactaagaaatctgaaaatgcgttccccgaggtcgggtaggtttaaatcatgattcgcccgaggccctcctcgatggtcactcaaaactacgtctcgcccgagcctatccacgggtgaagtctgcgactcgcccaagggcccccttttggaaagcgatttccatctcccccgagttcaaatcggacagaggacaacctcgagcctagccttagccaaagatctcaggaaccatgaagacatgcacattaaatacaatgatttggatatatgctccatgtgacaccgcattcaacagaggacgatgggacaatggtccatctactttcaccgactacaatgacgcacacccgcaaataccaaacactactcccccacttcggccactgttttcgaactaccccgcatgggacatgcaaatgtctaggaacaacctcactcttaggacaaaactctacctcccctgaagacgaccccagccccaggagaaaactctgtcgcatctgagctcggcctcggccaactatcctagcagtagccaccaactcccttcgaatcccgcagg

SEQ ID NO: 49144 - DNA, 424 bp, Zea Mays
ctgacacttcacaaaaagaccctccggtttctatctattcacgatttgaagtccacgacgccgttcatgcgtggccgtgctccggcgagcgccagaaccggccaaaaggggcaacggctagggtttttgagcagcagacaccaaattcaactcctaaggactctttcccccaatcaatttcatatttggtgatctgccaacctctgcccgcgaggacagtgcacgacgcggataggtgttcgtgttccaattaattcatggcagttaagttcaattggatggtttggagagcatcaaggacacatgagaatgttagaacaagcaacagagcaacatgaactgacctaatttgggctggccacggtgagacttgtttcacggtggcggagagcgaggttgggggaaattccgaattcaagttctc

SEQ ID NO: 49145 - DNA, 581 bp, Zea Mays
gatttagagattctacaggggctagtttacaaaattcctaggcatgtatgtaattactttgcacagggtgtggactccgggttcatatcaaaaaaacagagggacttttatgctaaagcgcatagccgaagcgttatccacatatctcatcagtccgatctaattccgacgttccagattaaatcagtgctcttgtgaatcggtacacaaccgagagcccatggattacggatcaacgtcccagagcatgccacgggtccccgactaatctgggccccaggatcgaacgcctacggtctagatttagtaatgaccactgtcgactatctcccgctcgatcccagatctatggtccagatactatgatgcgaaagggtacgttagttctaatcaggatcatccgtaaaccgactgacggccccggatccgtccctgccctccgccgagacaaagcacagcggcgatcgattctgcgaccggactccacatcggaggtggtcaccggcgaaccgagccccaaacctaactcccgattagcgcaacgtgcatggtgaatcaaggcgaaccgagtgggctgctcc

SEQ ID NO: 49146 - DNA, 667 bp, Zea Mays
ggccaccttggctggagccaacaacaatttctttcggcatctcccaatcattcacaagaggccacaccttgtaagcaatgtgctcttgtaccaaaactctggtaccaatctaagtgcatagtgtgttgaaagccattaaacacgcctgcacttcgttcccaattgcaatggacgaccttctaatgccgaagcgtgaccatatggatcgctgaataatgtccctcacatcttctctttcacttagatcattcttcacatagaaccattgcttcatccaagagctcgaccatttctttcgaaatgttggcacgggataacttgcctcagagcgaggctgtaacacccaaagatgttattgtattgctccttcctaattgcctttgtatggtaagataactcatgaatattatagaagcacctagcatatggcttcagtccttggctcctcatagcctaaatgaaaatccccactttaatcaaagctttgggagtaagttgatgaaggtatatttcaaacgtcttcagaacatcaaccaacatcttgtgtattggaaaatgaagcccaaccttcatgaagcttttaaaaactactacttcatctgcttcgggaaggggaacagtgctctctcccccaaccctcactatagatatatcatggaaatatttg

SEQ ID NO: 49147 - DNA, 307 bp, Zea Mays
gcagtgtcctctatattttgtcctctatatgtaaataccacatgttctttgcaaatatgtgcaaatatgcgcgaagccagaatccggctcaactcggataaatgcattttaggaataaaaaaggaagctaacccgaacaagataaaagcaataatggagatgcagactctgcaaacaatgaaagatgtatagaagctcacagacagaatcacaaccctcaaacagtttcatatctggttcagctgagtgcagcctccccttcctcaatcttttgcacttgtcagtccatcccccacctattctttgc

SEQ ID NO: 49148 - DNA, 365 bp, Zea Mays
ggcacatcacaggggttaggatactgagaataatactagtgctgtggtatttggccctgaaaggtgttaggaaaaacaccaaacatccttggtcccatgaggggataacgataaccacgataaggaaactgtggttcactggggaagtaagaaccaaagcctctgccatagggtccttagccatatggcacatgaccagcaccccgccgggcatgaccaccatgtggtctcactgcttcaggcctaacaacaatatgcaaagcatctctaggcctcacatgacgtctatgaactgtaggatcatgaacacaatcaaaggtgtggttcatgttccctctgctcaactcataaccctaccgctcatc

SEQ ID NO: 49149 - DNA, 946 bp, Zea Mays
ataccattgtattgttgttactcttggctgagctggtattctgaaggagttaatcaagattattgagtatatgatatgagacagaagccctcaaaatgagtaatgaagatgtggcacaaggattgggatccttcattggagcctgatgtacttgtttataacttggtgaggattgcctcttgcccttttatttttttctttttacctaatttcctatttgcagtaatattttccttaaaatatatttgtcttgtcccttgatgttgttggtgttcagtgcacatgttctgtcacagcagtggaaaggcgtattttgggtgttctagcaaatgagaattggtggtttaccatctgcagctacaggagcaacatttgggttggacatggaagtaagcttcattttttgtaaacaaaaaactacaaaccgactaaaagctttatgctgcttgcattgcagtcttgctgggttgtgttgttgctacttgttggagcgatactacatctgctaaggaggatgacagagtgtggtgaagtgctgcctggaatacgcatgtagtgtggtgagtggagacatgctgtgtgcactctacgaagcagggttgtgctgtatttttgaatcatttaaatatttggttcctttactcttatctttacaattgtgtgcctagcattggaatggacacaatatttaccttggtgtatgatgtgtcaatttttggcttgctatttcttttgatgctctttctagaggtttgaccattgtcgcgtctcatggtctccaagcccctctacaacagccccagtcaacccctccgctttcgtccagttcaattgacactttatttaaagttgcattgccatatacatcctccttttctattgtacggtgtcacaccatttatcctgttccatttgttattttctccacttattcagggcactactg

SEQ ID NO: 49150 - DNA, 296 bp, Zea Mays
cgaccacgaccacgtcgtcgaggacaaggcgcattccgtgtagactagatggtctggactctctgcgggtgcgtacgcatgtagatgctgtacagcgcgcatagcagactcgaaacccggaagcaaatacttacatttataaatctacgtgtatagaaacaacagtctaatctattggcaatcgggtactttggcccggcccaacacttcactctctgtccattggattggcacatcggaccgcccatcttaattctgatcttttatatttagttatgaaaacgccactataattt

SEQ ID NO: 49151 - DNA, 769 bp, Zea Mays
ccgagcctagtcagagataattcaccggtggccactgtgactcggtcatttccaccgccatatcatccatgcctcgctcctccctcactgtgtcccttctttacgtggtaaccatgcacggacggtgtaatccacggtcgtggatcgctagccagaccaccgcgcctttaaatagccccgcacccacggcgaggtattcacatcttcaccagtgaactcggttgaagcacaaatttgcggaatcctctccacctctcccaaaattggtagtgcacggtgaaaccatagtcctttgcgaccgtgtagccccaacttcccctcctaattccgcctagacccgttgcggcgccgtttttccccttttctgtcaccggcgagcgaaaatcctccgcgctccgtggccagctctgttcctgctctttttaatcgtgtttcagcacccatatacgctcgtgatactcatcggctccaccctccttgcttggccactctcaatcacccggaacacatgaacttgtgttcggtattccctgccaccgtggtcaggctaagccagtgccataactactcaattaaagctcgttctagggttttctcatgtccgtaatgcttgcctagtaattaatatgtgcagccaccgccaatcttggccggtccgagcagcagagtcgtcgacggtgagcacgccgtagttttggatcaatttggagaagaaatagaacttgagggatgtttttgtaagatgtcagtgactctaggaatagtccat

SEQ ID NO: 49152 - DNA, 495 bp, Zea Mays
caacgttgtggaacctggcaggtcccgcaaagtgggcttacggtgaggttcacggtcgtattcagtataacttcatcttccgtcataccccttgcgtcaccttccaacacgcgtaagcatactcctggtatggagtattgtcttgtcctttctagtgtatgggtcactatagagactttgatgctgaggtcctcgcaactggagttgaccggccccacgagtcagcgaggatatatccgaggatgcacacgaggtgtaccatcgtgtttgtcagataccttttggtattgtacgtacgatctcaacatgatttggtgatgacgcgtcttgtcgcgaccaacatggtccagcagcgttagcctaagttctttccttgtgggtccgcttggcgagaatttgatcgtttgctctgcctcacggacttgctcggcaggaatttggttgttctcctcgcctcgagtattttcttggcggagacttggtcgctagccccgc

SEQ ID NO: 49153 - DNA, 369 bp, Zea Mays
gtttagagcaaagggaggaggccgtcacagcgctccatgataagctgaaagcttataatacggtgctggagaaacagcgggataagcaggctgcggctaaggtgaagttgtagaagctgcagcaggagctcgccgatagggctagcgacattgctcgcgccgagggaagcttcccttgcgaaatgggcaactgatcttacccggcaggaggaggacctcgccttcagggaggagatgtgggcaaggcggaacaaactgctagatgagcttgagctcgaggcagaggagaggagaaagcgtttggaggagaaagtgcaggctatggaggagcaggtccgccagtttcgggcagcgcaagttgctcaggcg

SEQ ID NO: 49154 - DNA, 693 bp, Zea Mays
tccggcgcctggatcagatcctcggggcccgcctggaggcagagggcggcaagctctgtcgggaagtggttgaaaacgtcctgacatgcttccggagtcacgacccctccatatctttggcgccagtgatcgctagtccggtagtcgccacagaagacaccgcccgggagagtgtacaagacgccgtggagctggtggccgagcgtttccagcgtgatcctgccgacgacctgtagagacaaagcaggggttccgctgggaagcggttgtaataacttttgattttgtaagatattctaagaaccgctaatgaggtagcattggaacttaaacttatctgtatgttatttgtccttgctgtgtatagcgtcatcaacttccccttggtactcagcccccctaggaggtaggctcgacgtgtcgaggctggataccagtataccaaagataacattggtggtctggcccctaggaggtagtctctaagtttgagactacctacaactagactgggacctggacctgcacacagctttggctttgaagtgttaggagcacacccataggacccatcgtctggtatctgccatcctttgattcatgcaatacgacctgcagtttttagcctgggaagccaagccgtatgcctagaccgagaggatcacagttccaaatactaaggtacccgtcgca

SEQ ID NO: 49155 - DNA, 385 bp, Zea Mays
gtgactgcggcccagtctacttggacattgatgtcattgcataactcgaggaagggtgacttagtgaagttggtccaattgctggtgatgatggagcctgggaccttaaagcagtagacgaattctctaatgaagctggcagccttagaggaggtcgtgctaaccactagctttaccttgatccacttggtgaaatttttgttagcaacaagtaggtgagtaaaccctataggccttcataagagatcagaccatgtcgagctcccacatggcagatgcacaagtgctcggtatggtttggagggcttgtgcccgtagatgcattcgttgtgcctaaaactagcaaccttcgcactgcatcttgggatcaaccgttgtagtggcc

SEQ ID NO: 49156 - DNA, 598 bp, Zea Mays
attgccaaatagaatcatcgagatattttatgagtcatatgtgtgtatgctcgagtatcttgtcggaaagtgttttcactactgaatgccattattattttcctgttgttcgaattcaacagttgttatttttacagaagtaagtgcagtgcgatggttttgtaatttcttcttggcatagagatcgagtaaacgcaagcatgtcgtgccgatttaagttactatcgacttaaaccgacagctctgttagttgggtatagtggtcaccctgagttaagtaagcgcgagcatgtcacaccgtcttaagtcatcgccgacttaagtcgattgctccattagtagggtatagtggtcaccctgagttaagtaagcgcgagcatgtcacaccgccttaagtcatcgccgacttaagctgattgctccgttagtagggtatagtggtcaccctgagttaagtaagcgcgagcatgtcacaccgccttaagtcatcgccgacttaagccgattgcaccgttagtagggtatagtggtcaccctgagttaagtaagcgtgagcatatcacatcgccttaagtcatcgccgacttatgccgattgc

SEQ ID NO: 49157 - DNA, 452 bp, Zea Mays
gccctaaggcaccacatcaactttgtagctccatgaaaggggaacaattttgcttaagagtgtaagcaaggttgttatggagaaattggagataattaagtctaaagtctagctgtcaggctgttaaagtctgaatttcagactgacagtgtaattacagagactttgggcacgaattcgagcttgatttagtaggaatttacccatagctgctataacaaacttgtagctgaattcttggtctacaactttgatacaaagccttgggtatgttgtcacaaagaattaggagaaaatctgctctaaacttcgtctgtcaggcgctctgaagatccttcgccattgtatagtaccaggattggatcagagcaaccgcgcatctcaccgccgacgacctccgccgcgattcgtgccgccgccgttgcgatttacgccaccggtgacctaataag

SEQ ID NO: 49158 - DNA, 360 bp, Zea Mays
attgtatcttcagtgttatttgtgaactataaaagtgagacatgtaatgtatttgaaccatgaaaccgtgtcatgtgatgcatttgaaccactaattaaatgtgttattggacttgtgataactatttgaagactttttgctgaaaccaaatttcaaaatacacaatgaatttcaaactaaaaaaatcgaagtgtaggaataataaatcgacgtgtagaactgattagtcgacggtcgaataggagctagggttagggagatttttttctcttttcacttgaaatccttttaaaataccacagctagatgttgttattgaagttgtgataacagctgggacattttttgttcaattgttg

SEQ ID NO: 49159 - DNA, 543 bp, Zea Mays
tgagaaggtaaggaaacaatgcagatttgtaggtggagcagaacaattctctctcgtgaaaagtgtgtgttgttatgcatgatattgtacctctatttatagaggtggagtacagctttgtgaaaaatacaatcatgtccttcaaccgtatacatatgaactacaaaaatagctaggggtattgtcgtcatttcctgcacagacgtgctgagcaagccgtgaggatttcgtcttcttcctttgtcgaagcattcataccgcggaaccgaagctcattggttcgttttttatgcttatgtgtaaacattcgcaaacgaagataaccttcatcaactgctctattacacatgagaaatcaatataatgaggacattcagccaaagaaggcccccaacaataatgaaataggtaagcaacattagcttatcatattctttataactcttgtttgttgggtggcatccaatttcgtagttgccaacatcatgaccaagtttcaaatatgatttgatagcctcattaaggaaaccaacactatgcata

SEQ ID NO: 49160 - DNA, 1187 bp, Zea Mays
tgatgtcagtcctttgcatgcatgagagcaaatggctaaaactagagggtctcctatggccttacgaagttgttgcatgaaccaaatccaactatcttttgtctctgactctaagaaaccaaaagccactggaaacatccaattatgcccatcaacacttgtagctgaggggaggtgaccattccaacgaccatttagagctgtggaatccacacttaagtagggtctgcaaccttcacgaaaaccttcaagacaagggccaaaagcacaaaagaatctgctgaaatatattttcccatcttcaactgctacatcaaactcaatcactgagtctgtcataacctccaaagcagcttctctccatctaaatagtaatttgaagctatcctcccatgttccatacaactctctaagggccttctctttacctttccacactgtatcataagaaattgtgcaattgtgctgctcttgcaaggtattttgcaattcttttgctcccatatatggtttcttcgttaggattggaagtgctagggatgcaacccatgagctggtgggtgttgttgtttttcgacgaccactagaagtgcatgtgtgctgatccacgattactgtaacatgcacacaaaaaggtatcattgtgagcttccctaatttcatccacgatccagagtacattcaatgtgtgctaaaacattactcacaacgactatgggaggaccgacattctgtagccttgcattgattctccatggacaatcacctcctttacaataagctctatatctgaaaggtgagcttgactcaattcctaactcaaactcattatcgatcgcatactgcctcataagcagcctgaattctttcatatccttgtacaaactaccaatattcattattggattagatctgttgcaaacaaataccctttcttgtggtatgcaatcagtgcagggcaatgcagctgtttcatcatcaaattcatcgcttcggcggacaccaaatgatctactagtaaaagcatcttgcctttcagtagtttcacgttcatcttctgctagcaatcctaaccgatcatacatcattgactcagaggcagtctcttgttctccttcttcttcccatctatcatcaatctgtattgccctccaatcaatttctaaaacctgaaaccaaagggtaag

SEQ ID NO: 49161 - DNA, 820 bp, Zea Mays
cgccgcagccacccagtggaaactggaccagttggactgttggagacttggagtaggtctgagaggtgggcccacgcatcgtgtcgaaactcgaaagccaccaaagcggcaattcgttccagttcgcaaaaatttcaaaaaccagagcggcacgagcaggtgcgggtacctgccttctatgcttctagcccacacggcaacacctgcacacacagagaaagataaaaaataggagcaaacatcgcatcctgatcctccgccaggaccgccaccaaagctacgtcaggatggcggcggatccgagcaggcggcggccggagtaccatccggcggtgaacgacgtcctgttgacgctcaccaacgccagaggcaccctcgccgacgtgcagcgccgactcgaccttgagttccgcgccgcctaccctgaccatgtcagtattctcgtcgccctcatccctaaccgctcctttcgtcgctgacgggatcggcggcggcggttgcaggcgaatccggcgaagctggtggcgcgggtgaagcggttggaggaagaggcggccgcgctcaaggagatgtgccgcgacctcctcacccagaagcaggtatcctcttcccccctatgttttcaccaatccgcgccttacctgctgccgatgctgacaaccgtgctattttttttatttaagaatgagtttaattgattttggctcgacatttcgtttttatttccgtgttcgataattttttatacacgcgggataattaacgatttgccatggttaattatccctctacccgcaggagctgatcgaccagatccgcg

SEQ ID NO: 49162 - DNA, 479 bp, Zea Mays
ccttttgtgctaacaataggcagcatcacacaaatcagtataaactagttgacaccagtcaatatcagccatcagggccatgtttgaagtcattagtacctcattgttcgtaatgccccatgaagcagatggaaaaagaagtcgattgaataaaatcagagaaaagcatctgatttataactcatcatcattgccaagcactatcttgtcctaaagcttgacaacatcaaactcttctttaccaattttgagatcacgtctcagttttgcagcagcgtccacttcaccataccaatcagtaaactccctgccccctccagcacttggcaatcccaaaataagacgaaccgtctcttttgttatcttcagttccttgccagcccctgggcgtattgtcatgtcatgtggatccaacttatccatcaaccaccttatgagagatctgctctctaaggcatcagtacgcaaatcaaatatac

SEQ ID NO: 49163 - DNA, 794 bp, Zea Mays
ctaatcatccataggacacaacatatttggattataaatacggtttattttttagggcgttacaccttccctctcccgaccagcttgtactccctactgcaagcactataagtctcatcctccctctactggaagtagggctttctctagcccgaaccaggataaacgacatgtatcaccttacatcacccatctaggttagggcacacaacaacatttcactagtcggtgaggtcatcgggtcaaaacaccgacaccaacgtactcgagtcacctatcactcttagagttaagcgtcattcccaagaatgtgtgcaacaccaccaagtcattctagagagatccaatcacccatttgagttgagatattgatttagagagggtgtgctcttgtgatctgctttcttggtattgtgttgttgtgtttcttgctcttgtgtgagtgatattctattgtaaatgctatcaagagactctggacttttgtgtagtgcattgctaagactttgtctctatctagtggatctgaggactcaagttgatcggtggatcacttgggaaggtcgagagagacctagtccaatgagacacctcaatagggacgtaggttttttggagacgaacattggtaaataaatcacgtgcttcttgtgtttgtcactttttgttgtgatttgttcctctctctctccccttctaagttctcttgcctcgatttcattctaactcacttgtgttgctctctaatcttattttgcacttataggagcaacaagtgaaagcgaactcttttc

SEQ ID NO: 49164 - DNA, 566 bp, Zea Mays
cttgcataaatttcagtcctcagtccaacacactacaactgaaaacagaactcagagtgtccacagttatgtctgttgctaactcattcaagatcacccatctagtcgtcatcgctattatcatcaacaacatttgggatattgctctcgtcattatcactggcatattgtcgtcctgtttcatcttcttcgtcctcaaaataatcttcttcatccctttgtctatgtagatcttcaactacacttgcatctataatatcaacattttgtaccccaacagtattattgtttatatccacttcagtatgctgaatattagaagcaacacattcatcgtcttggtaagaaagcgacacacccattgggtatttcatcactacaattttcatcaacattccaaaggtgcatatgcgcaaatttttgaactacactccagctacctccatatttggtgtcatgcaaataaaaaaccatagtagcctgtggcgcaagaatgaaaggatcatttttgtaccaacaactagaacggttgatgcttttcaataatccatcatcttttattcttc

SEQ ID NO: 49165 - DNA, 588 bp, Zea Mays
cccggagaggcggcgagcaagactaagctactacctagggaggcatttggatcaagccggctggttttagatgtcaaacagaatgttaagcgtaatctggtgtgtgtggtcgtctggacaaggctggccaaatgacacgaggagggcactactactacgtactactacgagcctggcctctggctttagctctactgctccgaccccgtccccggctgacctagctagatgacaagcgaggcctgcctccccctctgtccggttgtccctctggcgttgtggtagtccgtagcacggtagcaggcttctgtgtattgctctctctccctcctcgtcctcacgtactagtacagctttcttctgtttcctatgctgctttgtttgtttccgactcggatattttttgcgcgagcggagtggatatggatgcaggcactgtagcaagggtggtgacaagcatcgtgttggaggagtgactgcggatttgggctgtgtctgcgtcgcggttcccaaggccggcacttaaaggccacaggacactggagggtgcggcatgaagcggaacgccgttgccgtctgcacttccgc

SEQ ID NO: 49166 - DNA, 272 bp, Zea Mays
tccaaatccaaacaaccgaagtttcttgttattttggcattccgccaccatatgtccagactctttacatttgtaacatagagggtcattcgggcagtcagcttgatgatgtccagattgtgagcaactgaagcatctaatctccttgaccagtccttcctggattttagaatccctgccctgctgcatcccaaatccgaaaacagaagacctccccctctatgtacatggttgagagccttgttccctatcacgattttcttggtttttgc

SEQ ID NO: 49167 - DNA, 433 bp, Zea Mays
gatgtcggttcgactcaacgggagctgtccgaataaacgagagtgctagcaatcacatgacgcagccaagttcgtacgacacaaataatgcgtcgtgttgccaggacgcagccaatgcatagttgatgccataacttagccgattaataacgcagcctggtcgacgtgtccgagtacccactatacaatttaatcactcatcgtgagtttaaaagctcaacacaatataaatatttagagcgatttaagaatgcacaatatatccttcatatctttctgctaattatttactacggaaataaaagcagaaaaataataccagatttaatccataaacataacacatctgatgtaaaaaaaatgttctcatgtttaagcacacatttttctattaattatttgcgactagaaataattaattaaagtagaaatc

SEQ ID NO: 49168 - DNA, 745 bp, Zea Mays
attttctaggattttagacttatttttatacccaaaattcatttaaaatttaatttctggaattttctaattctctagacaacgggcactaatttcagtaaagccagggttccatttgtgaagaaaaggactcggttgtaatgttatttgcattagacaggactgcgggttagttgtgtaagaggtcagggactctttagcaaaactgctatggctgaaggggtatcgatccatgtggaccgcacgatcacctttggatggcccggattaggttttgttaaaaatgaattagtatgctacgccagccattagatcagagatcgacagcccgagattgcccacgcagagatccgatcttacacgcccaatctgagatctacgacacccattttatgaacaaaagggtatatgtttggtctaatcccgatcgttggccagagatccaacggccatgcagcatcaccctgcctcccgccatgccggccggcggtggcgccatgactgggctcccctatcgccgcacccaatctcttaaacctcaatccaagagttgccaaacatagaggagaccacatggagtaaggttaggggcaaactaccaagacatggagtgcggagactcgagtccgcggtggcctacagttttgcggtagaggcgaggcgcccacgagaaatccccacacaaagggggatcagtcctgaactcggttgaatcctatgtgttcccaaagtaaagatggggacg

SEQ ID NO: 49169 - DNA, 558 bp, Zea Mays
cttcctttcctcgaggcatttgttttattggagtcttcttggtgattttttgcaggggctcagtctcatcaaggcctccctcctctccccgaggacgccgccatcaaggcagagaacaagcagaagagggagggggatgcagcgactatggtggcgtgcaagaagcatcaccaacaaaggaagattgagaagagggttgtgcatctggctcgtgccgggccaagggggcatgtccccatctactgacacggagtacatgacctccacggcccccggcgggatgtagcccttggcgttggtgggcgacaggtctcatccacgtgacttggagagcagctccagcgtcctggcctagaaggaagggcctgttgtgaatcctgttttgctcgacatgcctacatagcaccgtgaggagaggatggagactatggtgtcatccttcactcttatcgtgttagtagggtgctgcgatagagacatggggctagcagtgttgcctcgtccgtcactagttgtacctatggtgcgtcgcgaggaggtgaagccagcggcagtgcc

SEQ ID NO: 49170 - DNA, 423 bp, Zea Mays
gcggttctggctgagctgggcgcgagtgggcgagaaaactgcttcgtgggctctcttcggggaagatgaacaggggcaaggcgagatcgtggcggcgatttccatttgcaaggcaccagcgatagacgggcagcagcgcatcgtagccagcggccaggagcagcggcaaggcatggcgagcgtgctgagctgcggcgctgcaccgcggctaggccgcgcagagcgcagctgcgcagggacgagcatgggggagcgacgcgctgggctacgcagtggcgggcgtcgagatcggctgggatggcggaggatcgagagatgctggggtttttttatgcgcgaagttaggaaggggtggttgcagacttgcagttgcagcttcgtgcgttcggagtgggagaagcagttttctccacggaagcgcgg

SEQ ID NO: 49171 - DNA, 605 bp, Zea Mays
tggctccattgtactttgcacattttgatcactttgttccttgtaacctgtgtcaaagtatcaatggtcttgataggatactcagtgtaggttagatctccttgcacactaagttcttccattgtcaaccgttcctctaggacacgaatacatttcttaagttgagatacgtggaacacatcatgaacatcagatagatgatttggtagctcaagctggtaagccatctccccaactcgcttaagaattttgaagggtccaataaagcgaggggatagcttcctttaactttgaatcttctcattccatgaattggtgacacctttaggtatacgtgatcgccttcctcaaactccagtggtcttcttcggttatcagcatagctcttctgccgagtctgtgctatcctcaagttctctctgatcatccgaacttgttcttctacctcttgaataatttcagtcccgaagaactgcctctcaccagtctgatcccaatatagaggggttctgcactttctgccatataaagcttcaaatggagagatcttcagactggcttgataactgttattgtaagagaactctgcatatggtagactcttg

SEQ ID NO: 49172 - DNA, 433 bp, Zea Mays
gcgaggtcactgaaatgatagaagaggtgagcacgtattagtcacatagtcataagtatataaaatgtgaataaatacatacacagagaattatgacacagaaaacgagggatttgacgatagagaggtcaaatgacgcgaaaacggtgtttgaatgaggaatagtgccataggaggtttgaaattggaattgaggcatgaaatgacttgaaagtgagccgatacttcatggataggtttatatgggtaaatatgagtgaagtgtgcgcttggtttgattttaggcgaagaaagtggaatttgggcactcggctcggaatcaatgcctataaaggggaatttgtggaaatttggagcctggaatgttggattggcgtgaaatttggcgaatatgttactggaggtgtcatgaagttgcctgaaaaatttggga

SEQ ID NO: 49173 - DNA, 518 bp, Zea Mays
gtgatccgggtctgagaaggattccgttggaggagaaatagctggtaattggatcccatagattagtgcaagaagcgggcgatcacgtactggctgaggcactaaagctcctggtagaggtcgttggttttcggcgagaaaaatccgggcggaactctgatccacgttccgttctcggtagaagatgaactggtctaagcactccacacgacggagactcattggataatgccatctacgatctcatgatgaagcaaaattcggctagaggaataaagaaatggaaaaaaagcaaggggatgtgagctgccgtcagaaaaagataaattggctggaaaatccgacccaaccggccgaccaattcaccatttttttctaatttctattttttttctaatttctgtgtttttttattttagattcaagtcaattttcggttcacaaattcaaattcaagtttaagtttgacaaacctaaatgcacaagccataaaatcccagcatgatgcaaggtttatt

SEQ ID NO: 49174 - DNA, 562 bp, Zea Mays
caatcatcaaattcggcatatatgtatatctaagcgtttttcacccactagttcgcattttagcttagacaccacatgagcattactaaattttttttacccgcgactataatcatacgcatttagacgaccacaagcaattcatcgtgaccacgagcttaactaaagccatctaactagttgattaacctgagcaacaacctaggccgctatacaacatactcgtcggctagcctattattatcaaaatccgagacacaacatataccacaaaatttttataaacatacatattcacatgtattttcacacatccaccaaatcatacgacccgtaaaccacgaatctctaactcgaaaccatcatgtgcttacttcccaattcatgaacacataacgcgtattgaccctactcaagatatagaggaagcgatgactactttggcatgtcaccacctctctatataagccaaaacaatttctactatcgactaagagttctaagtattaatcacattattactttccacacgcaaataaacctcaacttaacaccagtgaca

SEQ ID NO: 49175 - DNA, 408 bp, Zea Mays
gtgatttgcttattgtcagtgcagatggttcttcagttgggcattgtgcttctagtgtctcaattggttgtgatatgagcttcaacattgattgggttcttgattctacttgttcttaccacatgtgtccgcatagagagtggtttgccacttatgagcctatgaatgggggctcaatttctatgggcaacaacacaagtgcaaagtggttggtatttgtacaatcagattcaggatgtttgatggcattatccgtactctcacatatgttcgccatgttgttgggttgaccaagaatttgatttcctttaaggcacttgatcggaaaggctataaatttgtgactcataaatatcagatcaaggtgtctaagggttccttgtgtgtgatgaaggccctcactactcc

SEQ ID NO: 49176 - DNA, 1005 bp, Zea Mays
aaagatcaaattcgctggtaacactgccttcgacccatataccatgaagaacggggtgtttccatgtaaagcccggcttggatgtgttcgcaggccccagaccacataggacagttctctgatccattttcctgcaagcttttcgctcttgtcgaacacatttttcttgagtgcatcaagtatcatctcgttggctctttccacctgcccattagctcttgggtgtgccactgatgcataattgatctggatgctcctctgctcgcagaaatcaaagaactctgagctagtgaagttagatcctaggtctatgatgctgctgttttgtatcccgaatctgaacattatctcttgaatgaatttcaccgcttttgctgaagtcaaagaggtgatgggtttgtactctatccattttgtgaacttatcaatggcaaccattatgtgagtatatcccccttgagctttcttgaatgacccaatcatgtctggcccccagcatgcaaacagacaagttacaggaatagtctgcaactgttgggcgggtaaatgctattgttttgataagaacttgcatgcttcacactgcatcattcttagttgttggccagtaaaacccgaacctaaaggctttccctactaatgtccttgatgctgcatgcacgccacattgccccacatgaatctcatctagcagctgccttctagtagccgagtgaaaacacttcatgaggactcctcctgcgcctcttctgtacagcagaccccctatgatggtatagtgggatgactgtctcgcaatgcgctctgctacggctttatcatctggttcttccttgttgcttatttatctgatgattggctctctccagtcattgagatctacttctgcctgacccagaacatgacactcctcaatctgctctatggtgacgcttggctggtgtatctcctggacgaacaccctaagtgtaacctgggcccaactagaccccagttttgacagtg

SEQ ID NO: 49177 - DNA, 677 bp, Zea Mays
gacaaataatttaactttccggcataaagtttaaagtttttttatttgaaacaagaatcttaaaaaaaatgaagatgcggcctggttcgggttctgaaatgtgctttcgataattgatacacacgattgacgatcctaaccctttccgtggtttgtagagcacaaagaattgcaaggggaaaaattgctttcccggaacaacagcccaacgaggcccagttgttctgtccgcatgggttcaaccgtacggcccatgagcagcggtgaccaataggcaattgtctcccggcacagcgagcgaatttccgcagccaccatccggttctctccgatcttgtccatccgaaaatcatgctcgatcagtgtgaactgcatgtgctcagaaactttaatagactagataaatagttttgtaaagttaaatttagttattattagaagaaaagtgtctcccttataccttagctctatgtctgcttcgttagccatacataattatgaatttagagaggtcttggactagtctactttttaaaaaaatctattttataagtagctaaatcagtaaatttagctaattttttaaagttgtgttgcccttcaccgggacgatgctaacatgcaaatctattttttatcttcatggttcttaccaaaactatgtttttaactgcaga

SEQ ID NO: 49178 - DNA, 325 bp, Zea Mays
gagacagagggagtagttgatggtaacttactggttacaccacctcctgctctactggggcctgtaatcgacgagatgagcataggggaggaaggagaacaaagggttcgacctccgatgtccaatattagctccagggagatggatacgcctcaaatactgcattcacatgtatgtccaattgttgtatttgattcttgattgattagattgttatgatcatattccatggtacaaacaacaatgtcaatgaattgcagaaaaaacattgatccaaacatagtgccaacagtagggatgactttcaaggatgttgatgatgcat

SEQ ID NO: 49179 - DNA, 4570 bp, Zea Mays
cgggacaggcgaacgagagagctgtggaggaccggttcatcgaatccttcaccaggaggcagcaggagaaggagagggctgcgtcggaggtggcaccggcactggctggtggtcaggggcgccctgcagctcgtgctggcaagggatgctcgggtcggggcaatcgtgctggcaagggatgctctcgtcggcccagtatggagattgagtatggtctctgcgctgtctccctggaccacgaggctgtcaagacatggatctatccaagtgagggggtttgagtttctacagcattttgccaataactgttctttgttctggttttcatgctgggattcagcttatgggtggagttgtcttggaaaatagacatctttagtgaatgctggcactttattagttaataatggcagccatcttgcttgaggatacattccagcagttcttgctggtactgaagtgtacaagatgcttgggaatgcggaaactgactctaaactttgttttgttaagcacttgagcagccatattaggtagacgattgcatcaggaaatcaagcaaaaaactataacataaggataagtggtttagtttgctggagtagcactgcacccatagaagcatgcacctcttttagttgaagcagatagagatggactaggagcttgtccaccctttgcaatatgtttttgttgtatcaaacaaatgtcatttttgaggatgttattgttgcaacttcttagcttggttatttggattttgggatatcttggcttgattattcatgtctttagaatgcaggttttactaggccttcacatgagttcccgaaccactgtcagggtttccacttttagttgcagattaagtattgagtgcactgtggttgtcgtattctttagtacaactggattacatgtttgttgctcacatggttgattctattgctccgcccattgcatctgctaacaactgttaaattgcactattttagtatagtggtatgagatggatatatgcattctactaaatgatatcttgattgtgaattgttaatgcgcaacacttcaattttttccagtttcttttatctgttgaaggaaatccttgattttttagcagtagctgcctaaacaccatagggaaacacccagatttcaacatggatgcacaaagtttcattcctcagatgcaaatgactagacgacattaagcgatttggaaaatagacaatggaaaattcctgtcaaagtttctgtttattttttctggataatggttattgttcagttcttatagaaccatgtttgcttcttaaatacactgcactagataactatgttgttatatgcaatccaagcagcacatcttgccttagtaatttattttggctatttttatacgcgctgcagctaatgtagaagtccgagagtaccagaagtatatggttgaaaaggctctgtttaccaatacgttaatagctttgccaactggacttggcaaaacttttattgctgcggtagtgatgtacaactactttcgatggtttcccgaaggtaatgtttcacattgcattgtaaccgttttcttctctgatgctgtattttatgaactttgtggaaattgcttgctgaaacattgtttttatttacaatggaaattcaggaaaaataatatttacctgcccttcacgtcctcttgttactcagcaaattgaggcatgtcacaatacagtgggaataccacaggtaccacaataaatctgctgttggtgattttcttatttttatttaggtagaagtctatttttggccatccaattattgcccgagtttgtttttggccatgcaactcaaaaactataaatccttggccactgaactatcaatactggacaaatgtggccagtttcaaagggcttttgtattttctgaaaatagtaaaagctggtttattttttaaatgataactaatttattttaaatcagaaaaacatgaaaacggcactgattttttttttaaaatataatgtgtctattggtgctgaaattggagttatttggattttatttttgccattcctagtgttttattgcttgcgcctgttatttttttaaatcaccattttgtgccatattaaacctagagatcaaacaagagaatccatactcaaaccaataatgttgattaaattaaccaaattatttttggaggctagcaatgctatactagttgcaatggtatatatctagtggagcacggcacctgcaaggttggtgtcattttccatatctttttgtttactcatagtgtattatggatttttaaggtcaatctcgggtataatatagtgcaaaacgatgatttaataagtaacgaacataactacgagcaataaaacacttgtaatggaaaaacaaataaattcaaatagagcaccaacaaatggattatattttataaatattttggtactggtttcatttttttctgatatcaattgaattggttattattatttttcaaataaatcaactttattgtcttcagaaaatacaaaagcacattcgaaacaaattgggtggccaaatttgtctaatcttgacagtttggcggtaaaaaattctacttttagagttccatggtccaaaacaaacttgagcaatagtatggtatctataaatctcatttttgctttgtgctgtacatttttctgtaatgcgctgcacatttttctctgccgcatgctggaaactaacatagttatgcattttcaggagtggataatagatatgaaaggagatcaatgcccttctattcgatcagttcactggaagtcaaagagagtgttctttgtcactccacaagttcttcagaatgatatacaatctggtgattatttgtaaacgtttctggaaatctttattgctagttccagttaattaaacttgacgctcagacaacaaaaataagaagaaaacaagctgtttccattgtccagaggttgtgatatattctttggttgttattgctaatccatcttgctatcagttgaaggtccgtttactatttttagaatgataactgaacacgaacttacttgaaaatcagcatttaagaactctatatagttggtttttttgttttatgttcatacttttgttatatgcttcaattttacttttattatttatatacattttttcattataaactttggttttaaaaggtatatgcatggtacaacaaatagtttgcttagtgatagatgaggctcatcgagcgtcaggaaattatgcatactgcatggttatccgagaggtatgtttcactgtcatgtactacactcatttgttttacctgcacttgaaatcctgttttgttgtcatcatttttttcattgtgatatcttttgattcattataatactctgtttagtcacaaataagtggtgttttggacattgacatggtttccaaacacaactttgactagtaccttttgttacaaaatgttataaaacatagaaaaagtataattatatgaatgcattttgtgacaagttactcagatcatttgaataatcgagtatccaaacttcacacatggaaaaagtaatatgcaatattgcaattggttcaggattgttgacttaagagctgagacatccccatatcgtcacttattgctgaccagagggaacaccagtcaactagttgtttgaatgctgtgcaacttggcttgatcagtctatattttctgtcacatttgcagttgttggcagctcgtgtgcctttaaggattttagctctaactgctacaccagggtgtaagtctctacattaaaatagacttacttgcacaattatgaaggcaccatctaagtttgcaaccttatcctacttgtggttcagccaagcattcagatatccaaagtgttatagacaatttaaacatttcggagctgatttattgtgatgaagaagattctagagtgaaccaatatgttaacacacgcaaagttgaacttgtgcaggtatgtgtgatttttttttggcaattcgttgttcctctgtgatgtaaaagtcgctggttccagtgtaggtcccttttggcagtgatgctactcaagtcgctgatatgcttttggatattatacgcccacatattaatcggttgcgtgatgctggtgtgattgaccatcgggactattcaaatgtatgtttatcatacctttaaaatcacaatcatccattccatgcatttgattataagaatgtttatccacttgtgacctgattatcgttagttgctcacatgatttcaccagtggacccaatttgaactgctgaaatttaaggataaattcaaggaagtacccccaccaaacatccatgaaatcgagagaggggaaattgaaagatcttttgtaattcttggcccactttgtcacacaaggaagttgcttttgagccatggaacccaatttgcacatgggtatcttgacaaacgattgaagggagggtattgtcttcacacttatgctacataaatgtacttttaaatttt

SEQ ID NO: 49180 - DNA, 908 bp, Zea Mays
agcattttcctcagtttttagattcctgtaaatattaagccttgtgtattttgtctttgatgtaaacccacaggggcacacccctaccttgtaagaacaacggtagaataagatcgtgaacaacttctatgtgtggagatgtccaagttttataggaaaacttggagtaaactgcaaaaattcagttttggtgcaatttgggatttgctgaaaataatgtcagttagctaactttgggctgttataacttttggcttctagacattttggtgctgctcactgtagcaaagttgtagggctaccttaggtgtacaaacttgtttaagttaattaaccctaaagccatatggaattaggagtaaaactggtcaaaggaggggctgacaggtttggatttcagacttagtgtaattgtccaagtctgaatttcagtgtgtgtggctcaactttggaactttgtggtgcctgatccatgtggttttggactgaggttgctgtagcaagtttgaagaccatatgttgttgtgcaagtttggttaaaggttatacccctaaagctaattggaacttggagaaaaggtgatccaaattggacctgtcagacttgtgatttctggacttagattcagaaattgaagtgcagtttcatcatttttagcaaacttcagatctctgttgtgataaacttctgatgttatggcctgcactctccatagcaaagtgttagagggtagtgtggtgagtaatttccattgaggttcatcgccttgagcttgtttagaaaggggagaaaatgctcctccaagtcgctcacattggtgtgctgaaccaaattcagctaggctaaattgatgagttcgctggtcctgccccaactttggtgctcgataactttatgtcacacccgg

SEQ ID NO: 49181 - DNA, 436 bp, Zea Mays
ggagaccctaattcctctaccaattgcgaagttctagctcaaaatatctctatccatggtgatggcgcaaattgaggacaacccgaggtgttcccggtgatctaacgtggtctagtacaattggctagaccgataagcatccatagcacaaaagggtgctgaaacgagggcaaggagggcatgaatggacctgtagacgtctggccacggcgagctctctcacgacggcgttctgaccgatttgggggaaatgagaaattgaggggctctggtggatgatccgaggcaagggctggtgcgttggatgcgtaaatacctagcgaaactcatgggggaagcaatttatagagttctacggcggtggcgtccaatttgaagaaatcgtgctggcgggcgagagagaggggtgagtcatcgtggcgatctaccgtggcgg

SEQ ID NO: 49182 - DNA, 634 bp, Zea Mays
caaggaccaggaacctttgaatcgattatttcaaaatcaactcaaagattgggggcttgtggggacagatattccccgggtccactcgggggcgaaaactccactcggggccacatgctagtcgccctgcagggacaccacatcgtgggcagggcaaaaagaacgatggacatgggctgacccaggaatgtgatgagcccacgcctggattactcgtggcttgggcgtgatcccgttgaagttgttcgcttttcccgtgcctgacatcctcaaacgtcggagaaagcttagagcggaagcaccggggtttcctcggggtagcgaagtttgttcgctactagctaggagataagctagaagagtgtgatcagcatgtacgcgggaagcaccctacggtcgtgtatataaggccaaaggggatccccatcattttcatatcattagcacctcaccacttggtagacaccacttataaacacctcccacttacaaagtcatcccaggaagtagggtattacgctcctcaagcggcccgaacctgttgaaactcgcttgactctcattttctcgtgcccacgacacgatccatcgagttacaatccacgacaccgtcctacccaaaagcaccacaagg

SEQ ID NO: 49183 - DNA, 377 bp, Zea Mays
gctactgccatatatattctgagattcgccatcacacgtcgtctctcgttgaatccctgcatggtaaaaactatatatataatctgatcatcagtcaaatacaactcgatctgtccagtcagttttacctgaccccacctcccttctgctggggataatgtatgtgttcatagatcgttttaggtgtacgtgagattcaatgtgtttcgtgaaaataaagctgaagacaaatttaaccacaagaatggtgcattgttgtcatgcattattcccagacccccacccgacacgcacacggcacacttactcctaatacataccagacataagcaaagcttcttccttaatttgctcctaaatccagctagtgctctagt

SEQ ID NO: 49184 - DNA, 985 bp, Zea Mays
ttatcctctttgcggctgagcggattaacacgccggcgaccgccgcctcccggccatgcgccgcgtggctctcgctttccaccgcaccaccgcgatttaccctcgctcttcgtggctcaccggagtaactgccacggcagtaaacaccaagccgctgcgccagtgttcttcttcctctccggccgccgcgcgtcttgctcgaaattcgcggccaccgcccgctagcactataaattgacctcgcccgtagctgcgccatgtagttgtgaagctgtagcacccgctcccaccctcgatcgtccaccagcacgcacgaatttctaatccccccaaatccattctccgccaccgtgaaacgtgcttcaccgtcgccagcctttttccggtcagtccaaccctccctctccctcgtttaagctctctcacctatctgcgatgcttgctggaccatccaattggactaggggccctctggtcgccgggaacatgactaacttgccgcgatggtcacgaccaccgtggccagagcaatccttgtcaccatttgtgaaattgggatgggggaaaggctcgggatggattcaattaggtgttagtcgctcgagaaccctagtcgttgccccaatcggtcggcgtaggtgctcgccggagctcggctgggcgtgaacgccgtcggggaccttcccgtgtgaggaaacagaagttggaggacccctgtgcaaagtggcagcgacagttttgaatagtgttcggactttctcagattattcaaaactctgggggacctctgcgcaaacctgccccgcgggcgcgggcgcgcgcgcctttctccctctgactgggccgcttgggccgaaaccagcccagaactattcactggttttcctttttcttttatttccagagccaaaacaattataaaaaatgtagaaaaatggtaaaattgtgaaaccaattttcctaggctccttattttccctagaat

SEQ ID NO: 49185 - DNA, 310 bp, Zea Mays
cgtcaatgggtcagggtgggctgaccagccgggcccagaggcagagacgcgggtgaggggggagagagaggggcggtcagatcccaatcgaagggctaggattagatctactcgggttaagtccaaaccatccgatctcggacggacgatcgagatctaacggtcaggggctagcttgggcgtggcggcgccgcttagccccgcggcgagagttcaccgaagacgtgaaggctggccatggcggggctctagtggcttagggaaagggtcagacatgttcagcgcgacacggtgaacacgactgtgggcg

SEQ ID NO: 49186 - DNA, 562 bp, Zea Mays
gtttgatgtgtaaaccagaagttgctcaccgatttatcagggacacacaaacatgacgcaagatgcagcagagttgcagggttttagttcaacatttccaataacgtgttgaattactgagatgagatgacgatacacaatttattataagaaatgggtgcagccaaaatataaaatgcaggaaaatcttcctattgcaatgctacagactcaaagctaacttgggaactctggaaaaaaaataccatgttgcaaagtagtgtacttctaaaatttatgccaccgacataaattacgtactgtttatcccgaatccacaggataaaagtttacttccaaaaaagcagattaaagtacacagaaacattatcgctaagcttgtcaacaacattagcagtataataatatttgtagtctaaaagctcaaagtgtctcccatactaacgaaggtgtgtttcctgttcaacaatgcaagcttcgcattgatctcttcaaggtgttacagtccgctgttacctggtactggtagcccctaggccgtgggattgtgggaagccaaaac

SEQ ID NO: 49187 - DNA, 397 bp, Zea Mays
gcctcgcgatccggcgacaacttcgaatctgtagtagtacgtaatgcggtggtccttgtcataaagtggtttttacgaggatctagtacgtagtagaaccaaacccagcaggtcttgacaagtgtacttgtcgacatcaggaacacaatcccacgaccgttgttaggtgcattcatgcataggcgtatttagtttgctgtctcatttaccacaatttgttacaactaagtttaaacagatttaattaagttagatatgtgtttggtttgtagccatagttgtgacaatatttttttccagctgtgtaggtcacattgacgatcgtcaatgacatgcaaaagtgtgctaagatttccttagacgtggcaaactgtggcgtatggtgtcggtgtttcga

SEQ ID NO: 49188 - DNA, 404 bp, Zea Mays
cacgaatgcggacaaggatcgacggtgtcgacggctcgctggagcagtgtgcggttgttgcacacggagcagccatggcgaggaggaatgagggtctagcggtgatgttggggagtggggtagggacgtgtgcatttatataggggctcgagcgagtgcgattgtcatcttcatcgcgggagggcggttgcgggagaaaggagatgacgtgtggaccgagacaaacatggcaacgtaggcattttgtgaagggtggtgtagttgatgggggttgacggggtagatagagatagaagacgcgagtggcatgacgttcgcgaagaggatagacggtttggtgatcttgcgaaaaggacacgagatctggaacatgcttgacgagaagaatatatatacattatata

SEQ ID NO: 49189 - DNA, 291 bp, Zea Mays
cttaagccggtaacagaaatcataccttgtgcttacctcttcctgtgcttacctcttccttcaaacttgaattttgcttacaatacttaaatacgtataggatgacgaaactggggccgaagctaaagagtaagaagacgaagccgaagccgaagctcaatagatgctgatgaagcttgaatagatagctgtagaaaaaactctaaaaacccttgtaataacctttgtaaagaacaatgtaattaatttttactttgtaaactttgtccataccttgtaatatattcttac

SEQ ID NO: 49190 - DNA, 495 bp, Zea Mays
aggactgacccaaaccataagtcaaagtatacttagctctttgggctcttctaggttctaactttgatacttctacacttcttgtgaccatgactccactttgagctagatcttgagccttataacttaacccataaaaccataagcattaccttaatggttgtaagacacatccatatatcacggtcttcaatgcatcaggactcttcttagcttgaccaaccttaaccccttgcaagaacatattattctatgttgccttaggcacctcagtcttcttgaccttgtcccttgttcttggtaccttgaagtccttcttgccttcatcctcagttcaattagctatctccaagtcatgtacattgagtcccacttagtcaatatccattcttcatcttgatttgtgatgtccacaaccataatcaactcatgcttttgaaccatcacacctttctccatgtgttgagccttgtaatattttcactaactacccgc

SEQ ID NO: 49191 - DNA, 1070 bp, Zea Mays
cgaggccgagcatgagcggcatctctgtctcgttctgggtgccctaaggaagaatcagttctatggcaagttgaagaagtgtgccttttggctatccgaagtggctttcctagggcacgtgattaataaacagggcattgcggttgatcccaagaatgttgcggctgtggtggagtggaggagaccctctagtgtctctgaaatccgatgtttcttggggctcgctggatattatcgtcgcttcgtaccaaatttttccagcattgctaagcctttgactagactcttggagaagggtgttctcttcgtctggtccggcgattgcgaggtcagttatcagacattgaagagcaagttggtggacgcccctatcctagctttgcctgagagcggtaagcgtttcacagtttatatggatgcttcgcatattggtcttggctgtgttttgatgcaggaaggcagagtgattgcttatggctcaaggtagttgaggaagcatgaggggaattacccaactcatgatcttgaattggcccacggtggtttttgctctaaagtcgtggaggcattatctttattgcgaggcttgtgacatttacaccgatcatataagtctcaagtatatttttactcagaaggagctgaatttgaggcagcgtcggtggcttgaattgattaaagattatgatttgtccattcattatcacccggggaaggctaatgtagtggctgatgcccttagcaggtccggggttccaaaagtggccttgccgttgatcgctgatttggaccgtttgggtatcgcattgtgttatgtcggcaccactagcgaggagactcggatgcttattcaatcctccctcatggagagagtgcatgcggctcagcagcaggatcgtctattgcaggaagctcgaaagagggttggtgatggtaaaccccgggagttcaccattgatgagaatgatttggttcgtttcaggggccgtctttgtgtgcctcagaaatcagaggtgaagatggatatcttgagagaagctcataaaacgccttacaccgttcaccctggc

SEQ ID NO: 49192 - DNA, 448 bp, Zea Mays
ggtaaacaaggtaaaagataatcagactagggtgttcagtttgcgtcggagtccctagggtttcaaaccatcacgaaatgcccttgggtactattcttatgtgtcactgacattacatttgagccctttcccttttcttcatttacaaccgcaagttctcgacaaacgccgcgtcgagcacatggctggcgtcctaagaacttactgtcggcagcccactcccgaggtgacgagccctccggctcttttccagggccttttcgaccccaaccccatgaacaatcgaattatcatgacttacggtccaagttacccggttcgtggtggacaccgaggtttgtcgggcttgggtttggaactacaacgcgacagaatttaattggtaggcacgacgagtaacaggaactcaccaggaacccggaacggcggtgggacagcttggacgaag

SEQ ID NO: 49193 - DNA, 474 bp, Zea Mays
ctcatagtggcattatgtacaattctcgagttgaaaacacacgcactatgtcctcgaattggtaggaagattgcaggttccaatttacatggctatttacattcttgctaggaaaagaatgaacaaactgaatgagcgaatgtgtaaactgaacattgctgaagcatgtgtttgctaccgctgaagtattgagcaatttaactggtgttatgtgattatcacacttgaagctttgataatagggggttcatgtatgaaactcagtgctgctagctttaagactcaactttggagcataagaccatgtacaacacagacgtttagcaggctcttagagtcagtttcattgttttccttgtgattgtggaactgagcacaagcgcattgcaggtgttgccccttgatgagttttttgatggctgccttgaaacttacatgctaggtggatgtctcccaagaacagtaattagctca

SEQ ID NO: 49194 - DNA, 400 bp, Zea Mays
catggatattctcgtgctcgactctaccatgaatatcatgtatccaactgtcatcaaccttttttcgagaagaggaacgccctgcccgcccccacctcccatactggatcgtcatcgcatcgtcggagatcctcctactggtgatcctcgtctgtcgccacagatacacatgaacaaaaccatcgggcagcacagaacttatctctgctccctgtccgcagtaggcctcggtctcctcgccccatccggtctaccatgtgcccgtctcggagaccacagcaaggtctgcgatggcgataagtttggtggcggtgtggatgggtactcccatagcagtggggtagcgggcggtagcacggaggaagctatggtcccaccgcacgagagtgtcacgtctcgc

SEQ ID NO: 49195 - DNA, 524 bp, Zea Mays
tggagatagcataaggttgttctgttgtaatggaattaaggggattggggaggatttaatcgactcctattcaaaattgaataggcgtgcctttgtatctctctcttctcctatttaatcctctttgatcctgttgtaaagccctgacgtggaaccgtttcactccaattaaaccaaaaacgcctttgcaaggaaaaaaatagtactaatgaagtacatccctttccactctaaaatgccaaactaataagcgtgtctttgtatctatctattctcctcctctccgtacctttcttgtgctaataaaaatagctgcacagcacattatgagttcatgacccattcatgaagcagtggcctgctctgcttttgcccccatgacctgtactcaatctgatcatgtacacctttccccaccttttgatttccctttccacccagaatacccaacaagttggagggaaaaaaacatctcatatatactacgtactccctcggtccgtgaccccaagtccagctgttgc

SEQ ID NO: 49196 - DNA, 778 bp, Zea Mays
cccgggttaagtaagcgtgagcatgttgcaccgccttaagtcgttgccgacttaagtcgattgctccgttagtagggcatagtggtcaccccgagttaagtaagaatgcaagtcaatcgtaaacgaactgagtatctttgaaacctcttttttattgatgacatatttccactttacagaatacatcgtcgtcccagcagttttgaaatacagctagggataaaactttctgaggtgttctatgttccaggagttcccaacttctgtgccatccatctgagtaagacgatacgatccgggtcgagtgacttctgctaccatgaagggtccttcccacaagggcgataacttgtgccatccctcccccgttagaattcggcggaggacgagatctcctactgagaaggatcgttgtcgcacagccttgtcgtgatagcgccttagagtctgctggtaccgtgctgattggattaccgcgtttagctgttcttcttcaagtacatcaatgtcctctagcctggtggcctcagcttctgttatgctttcgaagatcaaccttggcgccccaaacttgagatcagcgggtagcactgcctccgacccatagaccatgaagaaaggagtgtttccatgcagggctcggctaggttgggttcttaggctccaaacgacatagggcaatttccttatctactttcctgcgaatttttcattcttgtcgaagacctttttcctgagtgcctccagtatcatcccgttggctcgctcaacctgcccg

SEQ ID NO: 49197 - DNA, 591 bp, Zea Mays
ccgccacaggccaaggcgcagtttgtgcgccactctgaaagcccccacctgaacgcttgagacccaacgcaaagctcatcgtcagatataataatattctctctcttcccttcccttcccttcccttcccccttctttttctcttctccgttcaatcaagagagaggggaaaaagcatgctccgtttgccctcctctcctctgacaattgcttgtcctgtccaaatgcaattcctgacggatcgtgcacgccggggccggggcacaccaggcagtgagatcaaagcaaggcagacggacagacagcgcatctttgatgcatatgcggccgtgtgtccacctatctatcttaccttcacttcaaagcaagttttcgtgtgccggtaaagccagcatttgctcgtgtcgtgagacggtgctggtggtggtggtggggttccgagggaggagagaatccatccggtccaaggagcaagcaggcgaggagagggtgagaggaaacagcaagagaacaacagcaatgcaatgcgacgcatgcaatggccccggccccctttcgcttctctcgtctccttttttttttaatctcgaa

SEQ ID NO: 49198 - DNA, 276 bp, Zea Mays
gataattaagcacatgcattgtgttgaagacaaatttaaaattcaaattcaaattaatatatggacataagttaagtaatgtaatgtcaaacttgtgtgtattggggtataaagtttatatacatgcatgcttccggtatatagaggttgatgctaattttttagataaaatgatagttgaaaggatgagctggtagtatgctttttgtacagtgtacttgcacctgtccaaaattttctctcacccgcttctcttcatgcttctttctgggtcta

SEQ ID NO: 49199 - DNA, 559 bp, Zea Mays
cttactcagatggatggcactgaggtggggaactcatgaaatgtcgagcacctcaggaagttctacccttagtgatacctcaaaagtctcgagggaagttgtactctataaccaagaaggtttcgtcatcaataaagctttcatcttccaaaggcattcaaactcttgattgacaactgccttagattgggctcgactcgaaatcgacatgacatgacttagggatcactatgccctactaacggagcaatcggcttaagtcagaaatgccttaagtcagtgcgacatgctcatgcttacatgacttagggtgatcaatatgccctactaacggagcaattggcttaagtcgaaaaagccttaagtcggtgcgacatgctcatgcttacatgacttagggtgatcactatgcctactaacagagcaatcggctgaagtcagaaatgccttaagtcggtgcgacatgctcacgcttacatgacttagggtgatcactatgccctactaacggagcaatcggcttaagtcggaaacgccttaagtcgatgtgacatgctca

SEQ ID NO: 49200 - DNA, 800 bp, Zea Mays
actaattgcatgattttagcttgaaatctctctatccatggtgatagcgcaaactgaggataatgcaaggtgttcccgatgatctaacgtggtctagtccaattggctgggccgataagcatccatagcacacaagggtgctgaaacaagagcgaggagggtgtgaacggacctgcaaagagctggccacggcgcgacgttcacggtggcgtggaaacccgatttgggggaagagaggaattagagagctatggtggctaatcggaggaaggagtgggtgctctggcttcgtgattacctaacggagcttgtggtatgctcaatttatagtgtccaagggcggtggctcctaattttggaatggtgtgctagcggccagagagatggaagagtcactggcggctcagtcgtggcgcccgccggtgcaacagttctaaaatggcaagcctaggcgtgccacggttactactacgcggtaaagaactacgacgtggcataattgaggtcgccggagtaccacggcgacaccggcggtccgaccacgtcgcacggctacaggcgcggttgataagcttcacctcgcgaccaaatccactcccctgcgagatcattttacttccccgttgatatccactgtgcgcctagcacgaatcacggcgatcggtgcgaatcttggcgcaaggtcaccggcggcgagggggatgaatctaaagatcttttgcgcactgtaccatggccaacatcttcagttgttctgacagcgtgatttgtggagccttgttctccattttctatgtaac

SEQ ID NO: 49201 - DNA, 313 bp, Zea Mays
gaactttgcaatgtggcgcgtgtatgagcttgctcagtcactgctggaggaagcacaacatttagaagatctcgaagctggtccttcgctaccattatctgaatgtttcaataaccaatttactgaagatgaagatatgggtgacggggaatgggcactggatgatgtgaattctgaagagattgtggatcgtcagatgaagtagagtagtatgtgtggtgtggaatggttatctgtgtaagagttagatgtgtttgagttatctgatgtgaattttgaagagattgtggatcgtcagatgaagtagagtagt

SEQ ID NO: 49202 - DNA, 1031 bp, Zea Mays
cggcgatgttgttttaaaggcaaagcacacaataaaggtacacaatataaatgtggaagctagaagatgttagagatgcagccaagtctgatggttggcgttccaggacacgccctaggccctgtgcgtcctagcgagggtagcgggagggggaaaggaggagagagagggcgaaaggaggagaaggagatcttgccggccatggtagcccactggaggcggtgacataggggtggggacagaggaggggaagggaaagagaagaaactctagcttgatcccattgttgagcaccaaaagtgacgatcggatgatccgcatgtgtagcctggacaacccgcgattacattagctcttaggcaaaagtccctttccggcccgtgcttatccgttaattacatgggaatatgtcgggaagcgcctagaacgggtccagaccttctcctataaatataaaggggtacgaccgattgaggacatccacaatcgaatctatcgatacaatttacctatttacttcgttcgtcatttcattaggagtaggagtagtatagatctagtttaatcttcctcattctcaatcttcacatatcctcaactttacattgtttaggggcatcttgggtggactgcctacccaagataaccccaagatccttcctcctcgatgggtccctcctaggaggtaggagttgtgttgtttccttggttctctttctggaggaactcactgctatcttctgtgcacgtgcggacggtctagtgacctaccatggaccgttcagtgatcaaccatggactgtctagtgacctatcatgaatggtctcatgccttgcagagagattccctaaggtctcattccccgtgagcgggattttgggatcgtaagtgtttggtccaaaaaggcgccaacacacttttttggcaactctattggagtattcaggggatccacaaaatagtaggcagggaactatagcgtcttgttcaacgtgtcccatcaatgtatagtatgggggtatttataggt

SEQ ID NO: 49203 - DNA, 1064 bp, Zea Mays
ccgagcttggcctcggccaccaactacaccgcgaatcctgcgaatcccgcccggctgtagcgcacgtcaagggacggcttggctaacacctcggtaagacttccgcctcaaccaagcagaggctctgatctcgataagcgtagcagagaatctcgacgtcatcacgagccaggacactgacgcaccccgtaagcagcttttggcccataccccggcgctgttacaacaactacggcatgggcgacctctctcttggggacacgggcgcacgaacaaccccttggtctctgcattggctctctacgagaaatcagtaggcacgaatcaacaacacagttcgccgtcacatcggcctgcagacgacagggcatctctccctcggatacaacacccggcttcattgaggacactccccttcgtgtataaatagggcagtggtccctccatggaggccatccacaacacacgcagaagaacgctcactcctccactttgtcttagatattggcagttgcctcaatcatctttagggacttggggacttcccttttcccgtcgtgcttgtaaacccctaatacaggcaatacagtgcgagtaatataagcctcatcctctctgctgtaagtaaggccttgtgttgcccgaaccaggataactgcttgtgtcacctcgcacaccatctagagtcggccacgcgacacatttactagttggttaaggatccatggtccaaacgccgacagttggcgtgccaggtagaggcttgtcacgtgaaacactctccgttctcactagcactctagatggctggtttccaccacccactcaggcttgggatgacgattaggttcgggagtctagagttcatgtctctcgacatcgagtatgacatgatactcctcccacctatccctcttgagtgtccaagctcccgtcgtcacccttcttgccgcatgaggtagagacggagcaatcacgatcgtgccacctagggcactccgtgcactggaggagccaccgggatggatgacgcatcgagtccctctcaagggacttagccagcg

SEQ ID NO: 49204 - DNA, 921 bp, Zea Mays
ctaactttccatcgtgagagtctaatacagagccacccgcatcaaacacatcggctataaacgggtcacccttgacccagccatcatatggtatgcagatgcacgctttcgtgtcaccatcacagctgcaaccactaggcacgcgacaggtactggacgcggccggaccgtccgagcatcatctcagacagtccggttataccgcggaccgttcggcgtatttcgccggaccgtccgacccgatgcaggcccgcacacaaaacgctcaggtcgcaccgtacatggccggaccatcaaggtacaaccccgaacaattcggccccatcacggaccgtccggtgcatcacgccggaccgtctggatatgttgcggaccgtccgccatcttacgtcggaccgtccagatatggcatgaaccgaccgacgtattacgctggaccatccgactctacacgagtccacgcgcagactgcccaagtcgcgccatatatgactgatccgtccgggtacaaccctggaccattcggctcgatcgcggaccgtccagttctttacgacagacggtctgggtacgagactacccatttagcaccatatacgactggtcaatccggatataccttcggaccgtttggacaggtcgcggaccatccgacctcttacgctggaccatccggatatgcgtacgcagagccgagagctgcacaatacgcacagtttccacattcatcgcagcaacattatggtgccccaccagcaacacattataatcataccataccacctcatggacatagggctgaatactgttcggccacaagagagcctgagaggtatagggcaggagctggtgacattaataggacacctaacacacacctcaaacatcccttggaggaaagccgaccgagtgatgttaggc

SEQ ID NO: 49205 - DNA, 443 bp, Zea Mays
gaccagctacccccaaataggcctataaatatctccgtcctatagtgggatgggacaagcataatgagaagctacagttctccgcattttgtttcgttgtgcacttgtgctcacacctgtcacttgagtattagggtccacctgacagcgtagccatgtgttagtgcccaacattttgcacccaccattcatgcgacaaagacaacacccatgatgcctcccaagaaaagcacatgtgctagcccaccaccaaacgatgacgacgctaggactatccttgtcattaagaaagacaaagtagtcctcactgctagatcatcccccaccaactagcccgaaggccactatcgacccactaggcgaggacctcctcgcaaagcaaaagcagacaacagtctccactgcgcaagcaagcgaggtccataccaccagctcagaagact

SEQ ID NO: 49206 - DNA, 680 bp, Zea Mays
tgaaaaacttgatcacctttgcaagaacatttggatgtgcaacttgttcttcccccccttcacacatatttaggcttgcctatggggcctaagcagaccagtgtgttctggtgacacacacacaagctcatcctattttcaaatggctttggaatggaaccccccctcccctgacatagcaaacacaaggtgttcttttggctagctctaataaaagacggagtaagcacaaggaacatgtttactgaagaaaaacaatgatgacgcacctgctcttccactgtccctttgccaaagatcgttggaggttccaggacttccgcctttttgcagaccatctcacaaccactcagatcattggggtttggagaacattcgtaaacgcttccttcctggacatttccgtccttttgtgatggccccatctgggatggcatggaacgatgtcatcttcagaaacaagaacccaactaatgaagactgtaaaagaggtgttacggtggaattgattctgttgcttcattcacaggacagaaattcatcagaccactcccccttttgctggagattattgcctaactgtatgagccagctgaacagcactctggttctctggttgaggtcgtgttgtgtcagttagacgttaccctggtcgctttcttatcctgctttcccggttc

SEQ ID NO: 49207 - DNA, 590 bp, Zea Mays
cgaaccaaacaggccgtagaaaattcaccccagaatggagtcaggaatctgctgtaaaaagttgagctcaaacggagcaccgagcgaaaagttatgcccgttttatggaaggtacctcaagttatggttttccagggcacaaattggtaggaaccgtagcggcggctatagagcacaggggcacaaacctccttggtataagcaataggtaagtgccagatgatgaaacaaggaggggctgcaatgcaatgcgtcttgcaacctaatctagagctagcgtggcgagaattcacacaaggcggctagcgagggcaaatcgagtaatgtggggtctcgacttgtaatctgggtaaggtggatggactagcggcggaaacaaataacagcgatggagcggttgaactacgattacgacacgacctaaaccagcaagaagactcgaacacggacacaaattcaacaaagcaaactgaaacgaaattgcaaggctaaacagggttataggacagcggaatatatttttttgtatggcaattatctggagttataggatgaaaaacctaaactaaactagggtaagcctgacggta

SEQ ID NO: 49208 - DNA, 946 bp, Zea Mays
ggagataaccagatcttggatttgggttggtgggagagagggggacgcgacgagacggacgaagcagtagcggcggatgcagcacgctcagactcagctgaaatggagaaaatgttttcggatccgtgaccttgtgcacgcgtgcggctgagagcccgtgaagtgcggggaggagcccaaaccgggtggagttttaataactctgatagactatgtaggcttgaagttatatttaggagaagattataagcttaagtcaaagagcgagagaacgataaggacatcacttctttagatgcactcattaatccttcaaatgttatgcaaggtctaataacccgagtatgaatacgacaattaaatttatagataagcttgttcttagacgattgcttttatagttttgagaatggataactacctagtgatgttaacttgatcagataaattaaagaagattatgaagtacttggagaatggtgtaaaggtggggaaagactagcgacgaggttctgttcgaactcgatttcgagtctacatggatcttcagaatctaattaatggctttggttagagtttattctcatatttgatttgagtcaatgagaatcattaaatacatgtcaacgatgttttattttgaaaaaaagttaaaatatattatagtttgaaatcgatagggagcagtattttatacgacgaaatgaagtcgcctaattaagaatcactcccgtcaagtgcccgagagaagtcttcgttccgtttgctcagtccgcggaagaacagacaaaagagcgttcagatccaaagaagcaacaagccttttccgctgagagctcagaatcttcgtaagctagacaacagatcccagttaagcgaagcagttcgcgggtcgtcggtagcttcagcgcccggcgcccggcgagcagctacggcagctagcagg

SEQ ID NO: 49209 - DNA, 684 bp, Zea Mays
cggtggtatgcactggcaagaaatgagctgtcttggtcaatctatccacgatgacccaaatagaatcgtggtgtcgggaggtattgggcaatcccataatgaaatccatgcaaatatcctcccatttccacgaaggtatgggaaggcgctgtaaggtgcctgccaccttcaaatgactggccttgactctttggcaagtgtcgcattccgatatatacttagcaatttccctcttcattcgggtccactagtacaaggatctgagatcatggtacatcttgttactgcctgggtgcatggagaatttggaaaggtgagcttcatctattattttctttctgagctcggggttcttgggaacaaccaatcggtctccaaaccatagaattcctttgctgtcctgacggaaacatttgtatttgtccaccttctgttcgatcatttccttaatgacttgaacacccttgtcaccaatctgtgccctgactatttgctcatgtaaggtgggctccactgaaatataacttaaagcaccggaggaaacaacctctatgttcagcttgcacaactcatcacacagggtggtgatttttgcatccataatcacacagttgcactgggccttccgacttaaggcatctgccacaacattggctttgccaggatggtaatgcacttccaaat

SEQ ID NO: 49210 - DNA, 763 bp, Zea Mays
atttaattacaatcattcgacaaataatacacttcttgcacaaagaatttccaaaaagttttttctacaaatatcaacaaagggaaggcctctaaagtcttcggttaaggcctaacttcggttcgctaacctttgaagccatcaccctgaagaatgacgaagaaaagggtaatgaggaatctggtaaggaaaaatgtaaaataaaagaatagaggtaaagagttataccttgttgagtagattacgaacttcgtctccagccagctctcggccaccctttgcccaaatttgggtgataaatctgttgcctatgctttgagctttggctgggatatcaacaaggtccgatgccaaaaggttaaaatttggcctgttaacggcccttgcgtgattgctcccggctttaatgaaagtggcggccgtaccccgagaagccactagcgcatagaagtcaccatggccagtcatgacttcgtcgaggacatcaacctccttctcgatgcattcgagtgctccgggcacatcttcggtagtgaggctagcctcctcggatgcagctccaactgaattgaatatacttcttaatcgagcagtgcattggcttgcaaagttaaagcatttctctttaagagttctcagcgcttcactgagcttcatgctcttctcaggctcaaccttgagtgtcatgttcagagcttcagtttcacggttgaatcggttggagttttcttccaaaagtgtctgggcctctgttagctcctcg

SEQ ID NO: 49211 - DNA, 526 bp, Zea Mays
cgatcaactgcaagggtgtctcgtgagggtgaagagaccgaggtcactaagacaacgctaatttcagaagtgagggaacgatcaggactagttgtgacagagggagctattgacgaaggtactcttgatgccgaagccgaacaggttgttgttgaagaaaatgttgatgaagttgaggaagattacaatattttgatccccaaaaaacccagccatctagattttgagaaatctactgtgtccgaagatgacatgcccatgatgatgaagcttggctactttggggaagcttaaagaaaacttgtccgatttgctagagaagagactacccctgcaccgaagaatgatgaagtagtggtttttaagagcttcttcagagcaggactgcgatttcctctgaacgagatgataggggaggtgctaaagaattttgaaatatatcttcattagctgactcctaacgctatcgttaggctcagcgtattcatctgggccctctaaagccaggggatgaacccagatgccg

SEQ ID NO: 49212 - DNA, 586 bp, Zea Mays
tattcatgcatgaaatctagtatttattttctgcttttatttctatagtacatattagcagaaaattattaaaaatggttgtgaaggttatactatgtattttcatatcgctctaaatatttgtgttgcgttgagttttttaactcacgtcgagcgattaaattgtatagtgggtactcggacatgtcgatcaggctccattatgaatcaactgagttatgacatcggctatgcattggctgtgctctggcaacacgatgcagtatttgtgtcgtacgaacttggctgcgtcatgtgattgctatgtagcactctcgtttatttggacagctcccgttgagtcgaaccgccatcactgagtcgcgtatttttcacatgccctgtaggcactgtctatctgccatgatcattgagccacaattgcgtctgttgcgcacgttgcgtggacttatcgtgtaccccgattaccgagccataattgtgcatgttgcgcttattacgaaggcttgttgtgttgtcgtagtcctgatggtcgtacacgcgttgacgccaggtacactagagcttgtactcgcgtggattatgg

SEQ ID NO: 49213 - DNA, 434 bp, Zea Mays
cgtcgacatctggctaaaactcggccttgtaaatttttcctcaaacaaattcatttagaattcaatgaataaagttttcagttcaaaataatctcgaccttgtgttttatctgagaaatcgtgttcgaaggtaatgacgtggtctggtctattatttcttgctctactctaagcattcgggtagcagatgagtttatctggtctcagttatatcaaaagaaatctcctatgtagttggcaatatcattttggtttgaccaagttaaacctcatttttatcttgatactagattcaaatctgagaacacaaatatatatgtattagtgtgtaaaaaagaaataaaaaaggaaaatatctcagccgctcctatacttccaccgctttctccttgattatttcccctggccacgttggcttcctgggcatgtctctc

SEQ ID NO: 49214 - DNA, 601 bp, Zea Mays
aactttttagctttgatcacatattcaaaattatttgtgtattgcatatgtgaaccaatacttagataaataaattggcgaattttatactagtgtttttgtttgtgcattaaaaacctaaatttaaaatctcaactgcagatttgaactcaattttgaaattggatagaaaataggaaaaagaaaaatataaaaggaaaggtcatacctgcgcttgggctaatttcattcctttcggcccagttgccaaatcctgccatgcggcctatcacggtcgtccacacgcactgtggtgggtgctgacacccctacccaacgcgttagccgccccatcacatgcctcctctgttaaccactatcgcgtgggacccacagtacagccttcccctcgcgctagccacttccacgtgggaccacggtgtcagcgccgttctcgcccactacctcaacaaccatggcgacttatgtggagctgcggcgcgagtccgctggatccacaatgaatcaccgtgggactcgctcgggccacgataccgcatgggtcgtgatctctcggcggcataaagctcttcccaaccccacaaccgatctcgccttgcgt

SEQ ID NO: 49215 - DNA, 463 bp, Zea Mays
ctttgctatcggacctaaggcacatgacgacttgactgctaatgttgggcctagaaggactcatctctgcttctccaaagtgaaccactttgtagcattcaacgaggtacatggtgccggtccacctcccattcaagacttacgaacccctcgggctgcagagtactcatgacctatgagcccctcggactgtggtgcatttatggctcgcgcatccccccgccagtggtgcaatcatgacctatcgggactagcctgagtgtgcaggcccctggcagggcgcaacatgacgagccacgccaagccccaggctatgaaggccaggggttggcgtcgcttgaatgatggcgctcatgccccatgctgcccgcgtcgtccaccataaagaatatgagacaactaggtgaccacgagcacgcatggctttacccccgtgatagaacacccagttttaccatcaccc

SEQ ID NO: 49216 - DNA, 368 bp, Zea Mays
gctgaggtagttgtgttgtgtggtgggcctcaaatcccaattaggctatgaagattagattctaggtgagaaattgcaatgttttttttaatttactcctttggcttacagttctaagaaagctatgtgttttgtctttgtatcgttagtttcctcaagatagcttctagacttgaactgaacaaacttgcaatagtaatcagagtagcttcctcctgcactgaataagacaacactccctttgatgctgttgaggaacacccgcatgggagatcaacggtaactgtagccctatgtgtcaatggaacaccatcaccaatggatctacttgctggaacagaaagagagacgaccattgctgcaactac

SEQ ID NO: 49217 - DNA, 698 bp, Zea Mays
ggcccatctctcccaccagcacagccgagcgagcttgcctttgtcactgcttatgggccccactcaccggtctctgtcacgtatgcccaaatggcgcagcgagatgccctctgtcgtgtgggcctcacctgacaaaaccgttcttccccttcgtcctaatcagtgacatgcgtaacagaaaccacctagctcgctgggccgaggatcacgcaggcgatcgattccccctcccccatctgatacataaatagtgggtattacccctcgatcatgcacacaagagccaccgatagccgccattgtcagggaagaaacgccatgggggaatctggtgtcaccgcgcaggtgaagtgagctctcaccgtcgttctgcgaccttgagacaattcgggggccagggaagggttccgggtgttcgtacgggtatgtgacgtgtgtacacgggacaaccgggcctggagctcaatccatgtgcggtcaattgctcgccgtagtcgaaggggaaccacggctccatagggtgtcgtgggcagccgcaattttcacctcaaatgtcggtaatgaccttctccatcaattcatcttcccatgtagaccgtttaggatcaatcggatttgggaacttggctctagggtgtcggcttggccgactccggcggggcgccgccgtggggtgtcacgacgctgcgggagtcccg

SEQ ID NO: 49218 - DNA, 477 bp, Zea Mays
ttcgcttagtcccttgaagcccttttgttgctatcttcaccctatcaagttgttcttgagtcacatcatattgagcatccattgagagaatcatttcttcaatattgttgtcggtaccctggattaggggtaccccttaccacggtataaaggcatgatgcctgcgcagctacccttaaccgcgcagagaacaaccccaggggtatctcgtgagcagttaaggtggcgttcccggaggcaacgtcgtcggacccagaaggcacgggacccctgtacgcacaacccggacccccgaagtaaagcagcccggagcccttcggatagggttcgaaccccaccaagtaagctccggaccacccgtaacaaagaacccgggaggggaagtgtcgtgacctaggcatgggttcggtattgacgcgtgtctaggctctatccagagcacctccactccccactcggccaagggtctaatactgc

SEQ ID NO: 49219 - DNA, 650 bp, Zea Mays
cgaccacccagactggactgtccgagaatgtatatgcagaatagggtgttgcccacaacccatagtttttgcacccatcacagtagcactactctctctcccacatgcgacacatcaaagccatagcatgccaccacccatgcatgaggccgaatatttttcgatcccttaggagctagagagattcaccccgacagtaggatgtggtatctgtatataccttagggcatatactggatgccaactttgattgtcgtgggacagaagtccagtataatgataacagatcacttgagccccacatcccaaagaccggtgtgttaccatcaacaactatggataaagttcaggaggacatagccaggataagttagaatcagtgtgtctagcccagggcggtcctatcagaggccatacgacactcaatgggacaccgctccgtacctcctagggactagtgtgtcggatttctccaaattctcagaaaagggaaatagaggtagtcatgaacacataggccaattctagcacaattaggagaattggtcgacgtagaagcttttcgtgtacgcctattttcattatcccttactggcacaacaatcgcttggcctacatgttagatttagctgatctgccttgcctcctaa

SEQ ID NO: 49220 - DNA, 679 bp, Zea Mays
aaaaaacgctaggaacagcatgcacacagcaaagcagagctttccatggcacgaacatgtgcaaatatatataaataagacagctaagtaagttccaagcacacctcagttattgctatatttcttgttttcatgcttagaactctaatacaagcatcctaatttaatgcaggagtgtttcgtatgcgctatgagatgaagtattggttctgggcacctttggtggttttggcaatgaagaacagatggaaaggagtagatatttttcttaggataaggatcagagatactgcctacatgaattgtaaatggttgtccaagtgctcactcagcaggcttagcacagttgtccatgtttttccttctggctcaaggtcgtcgaggtacgaaccctcagcccgaccggccgacctcccttgcactatctcgctgcccacatagataacagtccatctctctatgtcggcgatcggggggccaagatcgtggcaacaggacaatcggatgagcagtctaccttctaagccttatacgtcaatagtgcctatttatcttttttgccagcctagaaaaaaagttcgagacttgtgagtcggctcgactcggagaggctcgtgaacctgaatgagtcttagccgagcctacttttttgctcactcaaacagtcagtcgaacccag

SEQ ID NO: 49221 - DNA, 716 bp, Zea Mays
caatggaccaagcttcaacaagccagctggacccactccatcacgtttcagtcagcagggtcaaagctcccttcaggcgccctccgttgtaagcaaccaacctccagccaatgcctgttggcactacggagaccctagtcactacaagaataattgtcctcagttgaaggcatccatgcctacttactctaactcggtgaatggccccaagagtgcctcagcacccacctccaaggcgccctcctccaacagccagcagagcaagactcggtatcatggcaaggcatgagtaaaccacgtcgacgcgcaagaagctcagcaaacctcgggattagtactcggtgagttcctagttgaatttactcctgctgttgtactttttgattcaggagcatctcattcattcatagccacacctaggaattcccttggccacccgaaccctagggtcggaccttctatgccatctcaaatgttcccaaatcgggattcttttaagtggggtagtgttcttggcagacttagctgtcttgccatcccacgaaattgatgtgatcttaggaatggattggttaaccaagcacaatggcatcataagttgcgcagataagaccgttcttctcactgaccaccaaggaaagttagtttcatgtcaggctcagccacccgcccaagatccaatggtgtttaacctagcagcagaaagcatatatgta

SEQ ID NO: 49222 - DNA, 287 bp, Zea Mays
ttggaggtggagatggccggctctggagagtcgtcggcgatggtaggagatggcgttcgtcttgatccagagacagagggagtagttgatggtaactcactggtcacaccacctcctgctctactgggtcctgtgatcgacgagatgagcataggggaagaaggagaacaaagggttcgacctcctatgtccaatattagctccagggagatggatacgcctcaaatactgcattcacatgtatgtccaattgttgtatttgattcttgattgattagattgttatg

SEQ ID NO: 49223 - DNA, 676 bp, Zea Mays
catttatttataaaagcgcgggtagaaaacggtaatcaatgggaaaactaatattaaaacattagtgaaacaaatatttaataaattatctaaaatatgagaaatggtgacacaacatttttaacgtgtagacaatgttaatacgaatctaacgcaatttggacgggaagaatcagatttgtaccacaaaagatatcgcatatttaatttatcacgaactagtggagacgtggcgcattcttatcggctgtgaaatttgccatacggatggctacaaggatcgtatgtgcagaaaatttgatgtagggcaggacgtgggccgttgctttcttctctaggcatgtacgcacgtcactctttctatttttttctgaaagcctgtaaccgcacgagcgtcttctctccttctccaaattccataggaacaataggaaagtgaagcagggggaaggagaagggccacccatggcgccttgttgccggtcaacaggaactgtgagcgctcacccactgcggcgccttagcgcacacagggaccaatggggagctatggctaggaccctgtaacaccccaggtgttaccaaggcaatggtttcatttaggcactgatgacttgttatcacattgtagcacctaaaattctattttgggaaatgacttccaataacaatttca

SEQ ID NO: 49224 - DNA, 498 bp, Zea Mays
tggaaatcctgtgactactatgactttgtggtcatcaaagtagtgacggagcttgcgagcggttagaagtaccgcgtatagcagtttctgaacttggggatacttcatttttcagggcccgagaacatcgctgatgaagtagaccgaatgctgcaccgggtatgtatgtccttcctccacccgctcgactactaatgcagtgcttaccacgtgagtcgtgcaggagatgtatagcaacagatcttctgctggctgatttggcgtggctcggcgtggtggcttgagtactggtggtgtattcatgtgcctctttggtccactgaaacttgtccacctttttgagcaatttgtagaatgacatgcctttctcgcctagccttgatatgaacctgctcagggctgccatgcatcccgtaagcctctgtacctttttctgtgatcgtggcactttcattctcatgatggccttgattttttctggattggcttcaattcctc

SEQ ID NO: 49225 - DNA, 874 bp, Zea Mays
cgatagagaagggaatcgcctggtaggggccgacgtagcgctcaccgatgcgagagggaggggggaactgttgccccttgtggatgaacagtaataggggaggggcgtcccgcgggagccgctgcggacagtctgaggtgggtaggcgtcgggtctgggttgctcgagtgccttccatcaatagcaagtatttctaggtggggctatttgggaaacaaccatcgtaggttggaggtctatctgctaaggtgcaatccaccgtaagtcgtcattctaagacacgaggatgcccgcttgtaaacaagaaccacttgcatcatagttgtcgtcctattctcatgaaaattaaatgcatgttgttattcaaatgattttttgtgacagttcgtactcacacaaaaaatattttatggtagtacaaatacattttcgaggctttctttaactctcacgaattattaatttttagtgaaaactatacgtggcatactggcaaaaagtggctttagctcttgaacactgaaaatggtactattcaggaactaacacactaagaaacattgttcattatctacggcatactgtatcgattaaaattttcatttccggtaaggctttatctgtaagttttttttctaaaatgggaatttttatcgctgcgatctgctactgctgataatgagcaacgtttatcagtatgtttctgataattaatattatttctagtatccaagagctaaagctactctttgttattgtgccacagataatttctccttatttttatgacagtggtaccgccatgaatatgtttccacaaacatagtgatgccttaatttccatggaggtggccgtcatttagatttgcagaag

SEQ ID NO: 49226 - DNA, 469 bp, Zea Mays
cccgatatggtctgcaagctcaacaagtcactctacggcctcaagcagccccctaggcttggtacagtcgctttgccactttcttgtgttcgcggggcttcgtcgaagccaagtcggacacgtccatgttcctcctccgtcatggcccggacattgtgtaccttctcctctacgtcgacgatattgcgctcaccgcctcctcccctgggctcctgtgtcgcatcatctcctgccttcagcaagaattcacgatgaaggacctaggggcgctccatcacttcctagggatcaccgtcgagcgtcgtcctcagggcctgttccttcaccagcacagtacaccgtcgacctcctcgagcgcgctggcatgcccgagtgtaagccatgcgcgaccccggtggacacgcagggcaaggtctccgccaccggcccccggtcgtcgatccgaccggctatcggagcatcgccgggg

SEQ ID NO: 49227 - DNA, 659 bp, Zea Mays
gttctctgcagctttcccttccatagatgtagataatttgttgcggtaccaatcttcactgacaaataagtttttcagtgcttggttatgcctatgcatgctagcaagtgtaagaaaggaggttgcaaaacgtgtaacagccggcctaaccaaatctccacccaactttgctctcatcatatcaagaattctcccatgcttatatataaacctagacactttttttgcatcattgatgcaagaactgaaatcctttattttaccaaggtcctcaagcaacaaatctaagcaatgggcggcacaaggggtccaaaacaaagttggtatcctctccattaaaatcctacctgctgccttgaagttagcaccattgtctgttacaacatgtaccacatattccttcccaatcatctcaatttgtttttcaagtaagtttgctaacataatgccatcagcaacctcactagaagcatccacagaatctagaaaaaaggtgcctgctggactgttggcaaggaaattgatgagatggcggtgtcattggtcagtccatccatcagacattagtgtgcaaccatactccttccaagattcctcatgctttttccttaattcatttgtcttcacaactgccctctcaagtacgggttccctcatgg

SEQ ID NO: 49228 - DNA, 310 bp, Zea Mays
ttctatcgcaacatgaagtctgtggatcgtccttcggctaatcctaaatgtgtaaccatcgagtcaagccaagaattcttcagtgttgagataccgcgttcggcctctactagagatcctccaaacacaaagcattctgttcatcgtcctgcaccgggcgagagaccatctgttattcatgaagccaatgaccaaactggatctggtgatgacgacgatgattttatggcacctacaaagaagtgtaatgctactggaagtcctatcaaaatcttacggaagacatgcacaaagaggatgaaagtagtcg

SEQ ID NO: 49229 - DNA, 561 bp, Zea Mays
cactcactgagctagccttctcaagcaaggctatcctagcgtctctctccgttagctcagtctgcaagctaggacaagcggtacacgcacctaacaagctagatctagatttcaactcatcgcgctcatttagcaaggtggtgtacttggtctgcaaagtttttgatgtttgacatgtgtagagcgcactcatcgcatttagtcttgtcaaacactacaactgaagctctagcagactcaagctccctaagcgtgctctcatacttgaatttaaaatctttcctatcatgagcagcaagcctaagcagtttatcctgattagccaaagtagtcgttagctcttctacctcagcggcgagatcatcggtggagtgggatacatcagaagcagagtcgttgccgatgtccttgttgtcgctggcactgaccgtgtcctcaccaagttccatggtgcagaggcctcccgtggtgtcgacgatgaagcacaggtcattgagcttgtcctcaacatgcctctcaacctcctcgtcgctcgaggaagaagaggactcctcgaagtca

SEQ ID NO: 49230 - DNA, 707 bp, Zea Mays
gttgatggtagcctgacctcagatctatcattgaaaacacactggctcctttcaactgatcgaataagtcttcaattctaggcaaggggtacctgttcttgatagtaacatcattcaaggatctgtagtcaatgcacatcctcttcgttccatcctttttctccacaaatagcactggggctgcccaaggcaaggtactcggtctgatgtaacctttctccgataactcatcaatctgcttcttgagttccaccaactctggtccggatactcgataggctctcttggaaataggggcggtgcctggaataagctctatggaaaattcaaccttcctttcaggtggcatacctggtaactcctcgggaaacacatctgggaattctgacactacattgatagcctccgatggtttaatctcctcaatatgagcggtgacttggtgacaactccctttccttggtcctgacaagaccaactctactaacacttcttctcctgatagggatactaacttcaccgttctcttatcacaactaagactaacttgatacttggttaaccaattcatccctaggatgacatctatagttgtatcctggttacccataattatcaaatcggcgaggagctctatcccccttatttgaacctttgcactagggcaaaatctatcagtttgggtccttccaccaactgaactaact

SEQ ID NO: 49231 - DNA, 718 bp, Zea Mays
taggtttaagatgatgcatagtagttttgttagatgaaggtttattcaacataatagcaaaaaatttatcactaatgtcatagtcatctataaccatttcaacacgtgcatctatgtttcacatatgtgcaacttctataggtcataaatcaagcaacatcttttataaaacccatcagagttgacaaaatgagcaactacactgatgtgatcctctttggccttaccagaccaaatattagcggatagtgcaatagatgaaatagattttacgaccttaatagttgtccatcatggtcattaaagagtccaactaaatctctagttgttgtttgcatagaggacttaataaacctaagattgtgatcgctagatccaaagacaaagggagcaaacgagggagcgcgactggcgcgagagatggcgagaggagagagggagatcgggagatgctaggaaaaagattaggtttggctcgagttccaggtcggggtggcagccgtcgggtatatactaacctgattgctactgggctgcccccttaaccagggacgggccatgcccacaccgtgtccagtttgcctgtccaagtacgatactgtgcacgtgtcgaatcaggtccggccgggtatgattccaatcagactgaaccgtgctcgtgtcggaccgctgcagagccgggccacatatcggccgcttgtccagtccatagaaaaat

SEQ ID NO: 49232 - DNA, 502 bp, Zea Mays
aaaagactagcccgcgacacaaagtcctccgaaacaaacgaatagctagcgctagagtcaaaaagagcatgggccacaaacgaatcaactgaaatcgtacctgccaccatgtctccttgctctctgccatccgcagcgggtagcacataagctccggaaatacccgcagaagaggaagctccagagtgaaattaacagaagaaccccactgagccgccgggtgaggcagacgcggagctccaaactgagatggcataggggtagtcggtgcaggagtaggagcaaccagatactaaggaaaaccctgcaccggcacgaactgagaagtcccaggcacataaaactgttgtggaggaagtggaactgaaaattgctgctcagcgcttgacatcatgttgacagtgcccttagaagaggaggaagtcactggctcccatctgagcttcccattgggattcctcctacacaccacatccttgtggtcttgactgcagattgaaca

SEQ ID NO: 49233 - DNA, 474 bp, Zea Mays
ttggcaactttcagcaaccagactcaccatcagcgagcaaactccatctgctgctggggcagggcccacggcatgagcagccatctcagccactcatcatttcactgtctccagtggccagtccagtttgtgctttgcttcgcttcgcttcacttcacttttgaccgaatcttgaccacccccctccaacgaattcgttgcttctgttgatctgttctgtgctcggctcacacagtcggagttctccctgtcctgtcagggacgcgtcacggcgtcagccttcactcacctcacctcacctcacctcacttcctcggcttcggctcctggaaaagtcagttcgctacgtacacaactcctgctcctagtactgtgtcatctccaacgattcaccccatatttcttcccacatctatactttctattaattttattatatcatccacatctatactttctatgatattttattat

SEQ ID NO: 49234 - DNA, 652 bp, Zea Mays
tgtagatggggtcagtgtttaggtgtccgatcgagtgcaacagctagcttcaactccattgcccgtcgatcgtcgtggagaaagatttggtggcgcgagctaattaaggcccgcagcgcacgtggatgattagattacctttgcgataagactaatcgagagggagagccgtgaattccgaagcaaaggcgcgtcgattttatcatcggccgcacgcgtggcgagtgaagcagatgtcaaaccacagcgtaatgccgagggcctaactccgatccggagttcttccctgctcttctctttaatttgtgtggctttaattcctccatggtgcaccactctacatggggcagtttcagacgcatcaccgccggccccgtgcagtggttcaatttctggcacatgacactagctagtcccatctccaaggtgagcacatgcgacggccgctccatgcatgtcgtcggtagcgtgcgtgcatggtaaggtaagctaagccattcgcgtggcttcctccagcagctcacatcagtagaatgacacggggagaaaaatgtggcagcgcgcgcttattaaagagtcaatctgcacaaagtcagatctttgccgaccagatcgtgtgcaaactgcgcaaatcacgcctcgccttttggcg

SEQ ID NO: 49235 - DNA, 1105 bp, Zea Mays
aaagtctgaagattgattaacagtgtgtaggatcaactttgggaccatgtggagcttggtttaatggatgtttggcaaaaacccctgtgacaaagttcaagctggattgataagctacaactttgatgtagagtgctgggttagtcaccacacaaaatttagagaaaattcgccccaaataagccctatcaagccaactgatgaaacctctgatggtacagtggcaaagaaaatctacagattccgtgaatctcgacgtcagtgaccctgcgccgtgattgttgccgatcgccacgattcgtgctttaggtctgtggattgagctcgacggtgaaaagatcacgccacggataggtccgggacactgtggtcgcgctgtccctcgaccacttcaccagcgacgtggccttacggccgtcatcggaatctgcattgttcacagcgattgcaccacgcctcaggcccttaaccacgtcgcaatagcttgggtcatctatatccggtgatcgccggagagccgccacggtagatgccaccaatcacttgcaccagtgatcccctctttcttcgactgccaccgtgcgagaccaaattcactggccactgcttagcgcccttataaattgatggaacggtttgctgcagtaagttatcaccaagccaaagcatccatccctgcctcgattagccaccatagctagagaatttccttcttcccccaaattggtcgactgcgccaccgtgaatcacctcatcgcggctagctgctcccatgtccgcagccaccctccgtgttcgtgtttcagcacccttgcatacttgtgatgcttgttgactcaactagctgagcttgacgacatccactcatcgagaacacctggatttggtctcggtgatcgctgtcatcgtggtcaggcaaatccagggccgaattaatccaattagagcctgttctagggtcgcctcaggtcggtaatacttgccccgtagttaatttgggcagtcgccgttgttcttggttggttcgagcaacggggtggtcggtggtgagcgcgccgtggctaggggatcgatttagagaagaaacagaaatcaagggacctct

SEQ ID NO: 49236 - DNA, 332 bp, Zea Mays
tttggaagagggttggttttggacttagaaaaattctgattttccttttatgctcaaccctttggtgaaccttttagggtttttatgaaacctttttggggtcacttccttactatttttggtagggtattaggtgtactacaaatgttataattggccgaagtcatgatcatgtggtttttatagccttatggtcatgcccacttatagtgctccaattgtccaaaggggtttgcattagggtttgggcatgtctctccactatatgtacatgataaagccaagtcatgattcctaagatgagttgcgcttacttaggatcttgatttcca

SEQ ID NO: 49237 - DNA, 676 bp, Zea Mays
aagaaactgaaagacagttttgcaaaggtgggtgcatactcatcggagcaaaaatttattcgaggcgatcccgaaggagttattcaatggatcggcgaagaagctaaagcttttgaagaattacttagtgatcgtggggattttttgccttcgctggcgcccgaggggttgcagcagttttggagaaaattggttgtgaacatgttaaagctgcagcccaggtagaagtcatcttctcccttgatgatacaaaggaatcttcagccgaagctactctgatgggtgggaaattttattccgatgtttggatgaagggcggccgtgagatagccgacgaagcaataaagaaaaatgaaaaagaatcccatgatgaccgagtagaggcaaaggaagttgaagaagctgccgaacgtgctttgattataggtacttctatttagtgcccttttgctttattattcgtttatggctttgaacccaaattatcatttactttgctatagctggcctttcgccacctccggagccattcaatcctgaggctgaccccgtcataaaagaagccttggatgtgatggaggtcgccaataccatcgttgacgaagttgttgacaagctactgaatgaagctgccgacagaatactaaaagaagactagatccttgttaactaggaa

SEQ ID NO: 49238 - DNA, 653 bp, Zea Mays
tcatggcaataatagagtaatcaaattgaaatgtgccaagaaatacttacaaccaatttaagcatttggattgccatatgtaagaaagaagattatgcaatcggttatatgataacctcaactttgatcatctttggtcttgatcttcaacttggagtaccaagataagtgccaaaatatttctcaacaaatatccttgtaccccttcactttccatgattatagatcaattaaaaaccaaactatggtctctcagacaacttatgtgatttatcctatatgagagccttccaatcaaagtgactttcaatatttcaaatacttgtcacttatgacagattctgtatactccaaagaaacattcataaattttgatgtacagatcctatgaccacgacaattggtggagatgtgctttaataagtctgctaacagctgtaaaaagttgagactcatttgacttcatatgtgctgccagccataacatctcccacggtaggtacatgctgaaaactgctgtgtttgtgctgacaagattgacttaatcaagaagttacacttatccaatgattatgaaatttgcacagactttgctttcatatgcatagagcaagtaaactgaatttcaagccaatccaaatagatttgatcac

SEQ ID NO: 49239 - DNA, 820 bp, Zea Mays
gaagggaattaacccaaaacactaagttcaccccttaagagcataggaagcaccaaacataagtgatcaaggaagcttatcaaatcgcctaatcacaaggtggaccattaacaaaagttgtagttcactaaacacttaacaaaagttattgaggtttggacaccaaaaaggcttgtcaaagatccctaatcatgtcaaatgtgtgtaagagagggaaaatcaggaaattcattaactcaaaatcaatcctacaacaaagaccacacatgttcactaagttataagccttaaaccaaagtgatccaattacaaaaagtgtgtcaaaatatctcaagtataccctacaaaaaatttcaacccaaggtgccaccgtttggcaatgccatgacattagatttccctcgggatggagcagctggatagatcagcctttcccctcccatatcttacacaccaatgaatcaaatctctcagcccccatacaaaagagttatcttaggatgtgaagaagacgccatgtacaaaaatcttgccgagatcaagcttggatttgtgacagcacacgtgagaaaacgagctcaagcaaatcggccatgtgtttgacactggctggcatgccagtgcgcagccaaaccagtgccccgtcgtgcaagcacctcgcgcgcctctaaagccaccctatggcctcagttgaacgcagcttgacccccaccatcatgcccaagcaacctgccacaggaaatcgtcgttcaatcgagctttgctgcctgccattctacccagagcacgaccaccgtggccagagctcattgtgcctccc

SEQ ID NO: 49240 - DNA, 451 bp, Zea Mays
ggcacggtgtctcaccgcggcgcggcaaaccgatttggaggaaaaactaaattctccggctatggtggccaatccgaggggaggggcagttctctgggttcgtaacaaactagcggaacaggcgggggggggggggcgtcaatttatagggaccaacagcggtggctccaaatttggacgaggttcggattatggtggcgtcgtggtgcatcactggagtccaccaaacgtggcgctcgtcggcacaatgactcagggcagtaactctaggcttgccacggttacgacgacgtggtaaagggatcactgcatggcgcacacgcgacgaacggcgtccacctcggtgatggccgctcggccacgtcgccggcaagtgggtacgacgactgagcagtatagtgccccaagttcatcccccccgtgagatcttttaccgccagccattatcagt

SEQ ID NO: 49241 - DNA, 476 bp, Zea Mays
aagactgcaaggtgggaccatggagcagcaagatggaactatcacaagagcacgactgaggggagtagtttcttcttcataacttgtcatgcatgtgtgcagaccaatagtccgtgttcatgggggcagaccccaccgggttatcatacacttatgcatcatttagttacaaaaaaggaaaaagactcgaccccttagtcttgctctatggatagaacttacagagatatttggcatcggggtaaggtactcctccagtcgtagctagatggttgcccctgggtcggtgcactcccgttaccttgaagggtccttcccagctgggggagagttgcagagcacctcttggtatggcacttgccgcggggctaagcctcgacccagggttcctatctgcatttgacacgggagcccttgtctctggctgtgatcacttatgcatgtacttgtctgcagcttggacccgtgggggttcg

SEQ ID NO: 49242 - DNA, 1211 bp, Zea Mays
gtttaactctgaaaaacagtgagattgggctgacatggagtccctgtatctcctgagccatggggattttgccataagtcactacaacaaaattgtagagctaccatagtagtctaagtttgattaattgattgatccctagagctatatggaaattggagaaaaatggactacaagtcgggctatcagtcataaggatactctgaacccagcttaacagtggtgctggtctgactttggagtcaagttaaagacgattcagtggggtcacccaaggtcactgtggtgaagttgaatactgtatataggagtataactttgttaaaataaggttggcttgttgttatgtgaaaacaaaagtaatggtgtctcgaagtggcgctgtcagtcggtctgatgggggaaggaatgcgattactgcatttggttatactgaatctaggattcagtgttattgagccaactttggcgtcgccgtgtgtttaatccatggagatcttcggtatggtcgttatacgaaagtgaaagaacgttgattaatgtaccactttgataaggaccgatttgtaagtcattacacgaattagggcgcaaagttcaaccgaactcgggctggcagacaaggtagcaatctaggtttagtgcacttcaccatggataagaatgccaccgctgccgtgttcattgctcggactcacgggcgtgggtaaaaatcttccaagacgtggcacatgtaaccatgaggtggcatcgtttgaccgaagcgtttcacctgggcgctcgtcgtggccttacccgcgcacaagctcgccagcacacatgaagatttttttgaaattctatccgattttggcaacctccctataaattgagcccaagtgcgacttccttaccaccttacgcacctgagtgctagcgcgagccgctcaacttgtgaagaaactcagtgaagctgttagcttcctctcgctgtcctcgactccgtcgtgaaagaccgctccatggccaggtcaaattgagcaaccattccttggattctatcccattcaaacttcctccggtgctatgggtgctcatcgatccatttaatttaatgctaccacctttaccacatcagaacagcccttcgacaccggaatactccatcatcagacatctcaacgtggatcgccctctcggtacttcgtccaggccatcccactaccatgccg

SEQ ID NO: 49243 - DNA, 629 bp, Zea Mays
aactttgagagagaaagaccctcaaaccctaataaaccctaagtaagccaagttaagcataaagggtaattgggagaagtcatggggcaaaatgcaaaattttagatatgatcaaattacaaagttttagttcatcaaataactaacaaatcatagtaagagagtttggccatttggtctttttaaaattcccaaatcagcccttgaaccatgaacccttggagaaattcagatttctgaatttctgaaattcagacctcttttcaaagatcaactgcgttctctgtttttcgaaactcaaaaccaggagatccaaatatcaaagttgtgccaaattcccttgaacacgccctggaaaagtttgaactcaaaccaaattcgtttgacacagttttggcgcagattgacctcgggaccacacattctgacactggcaccttggtgacgctacaactccctgtccctagcctaaaaccgcgcgacatccatacacaaaagacaaagcaaggtcaggtgaacaaatccttcacaacgatcttgcccaaattcgcgaagatttgcacccaaccagcgcttgaacttgggcagaggcaacaggcacacgtgttcgactgtggctaacacctccg

SEQ ID NO: 49244 - DNA, 529 bp, Zea Mays
tgcttttactactaaccgggacggcgggtttatttcataaaaccgcagggactcctttgaaaagctacagccgcgaaggggtatgatgggttctaagccatccgatccagacccaagggcccagatttaattagggcgagacccaaccggtaagctacgcccgcgcttggatcacgatcggacgacccagattcaatgaaatctaaactacccaccgccatccgatctatgatctaacagcaccgattcatcagggcgcgattcaatcttaaaccgcccatacctaaatctacggctgcgaccctgtcttcttccccatgcaacgcagcacagcggaagaacaggggctccgccctgagctcgccggcgcgatgcgcagaggcgtctctggtactctaattcatggaaggacaggtgcaatacgaaatatgaagcggtgcgaatgaacgaaggtaaaaaattaccggtgaatacatagcgctgatccccagccacgggaacacacggtaccacggcggagcttttattc

SEQ ID NO: 49245 - DNA, 629 bp, Zea Mays
aagagataacggagggagagaaggagaagtcgtcgttgttgaagaacaagttgtggcgcgccaccccttggtccttggagggtggccgtgaggaatcactggggcaagccacacgttcctagaggctagccgagcgtagggagcgatcagagtattgggcctcgctcgccggagttgaaaaagatcgagtgctaccctgtgccatggaccagatcggttgacaccttattcactggtaagacgcctcaacctagcttgccatggtctctgtattgtgtatttgtgttttgcggtgagggttgggtgtcgggttatcagatgattgtgcgtgccgacgatggcctccgtcttgtgctgcgcggtgtcgtcgtaccttggtgaagtgaggtgagagagatcaaagtggtcattgatcgtgaatcgtgcaatctagattaggtcataggataccccttcacgtcataaagtttgggccgtcgtgatcggatgcgacgactcgagatttgtcgaggagtggtcgtcgatcttcaatccgatgatccttgatttctaccggttcataagcacctagatttaatcgtgacccttgaagttagatcggacgactcatgattgccaatactgctttg

SEQ ID NO: 49246 - DNA, 352 bp, Zea Mays
attctttttccatggttttcagacctatgtatatgtttgtgtttgcagtcataagcacaagcagcacctctttgatctgcttataacatcactatcacagtcacaagcaacacctctttgagatcttaagattcattttctatttgatccgcttataacatgcttcttgggggcttgcagtttcagtgtggagttcaaagtgtttttctgatgtttgagtaacaaaactctgctgttggtagcttttgagctgtccacaaaaccatgaatcactatcttaatattgttgtttacttattccttctgattccctttttcttggttatgcattgctaaccgtaacgagacctcc

SEQ ID NO: 49247 - DNA, 547 bp, Zea Mays
tgacgacacttcctgagcaccctacatgcatgcgtatcagcctacgccgcaacctactcctgcgctttgcttcgactagacaaggcaagggcgcgacaagccagaagatctacgcgatgaccatatgaagatatctgttcttcacggaccgacgcttcactcactccatgtccaacagtagattgctgggcccacttggtggggctcgatcaccatgtatgcgcctcccttgggcaataagagggaggacacacattgtagaactcaatctggcagagagctaactcaggctttggacaacacatagacactcccaagcaacacaactcacaatagatgtagtgtattacgctccggcggcccaaaccactctaactcttgtgttctcgtgttctttcagctaatcacacaatccctagacccccttctcaacttggtctccgccacccggtcggaagattttctctccgacaatgtgtgctgtcagtgttcgaaaaaagacataaagttgaaaactagcaaaatatcttcaaggactacatcataa

SEQ ID NO: 49248 - DNA, 543 bp, Zea Mays
attcctcaaccaaatcatgcccgctgctcatgtgggcagcgcaccggagggccgcttcgtcctcatcatcctccgccacctcaaatggtgggaacgccacataacagtgggagcacattacggccgcggggagccctgggaggtcttcgactttgcttcccgaaacataaaaccaataatcccaccagttggcccacttgttgcgagcacagggaactaattccacgacttccgccgaagtcttttcggtcctcggcgtgaaggtgtacgatccaaactgtgcaatctcacttccaatctttctcttttgccagtgcagacagtaattcttggcgaagacctctacagaaggctggccatcgtacgaagtcaccgcctagacatacttcgccagggccaccacggcgttaggtgccaactggtggacctggacctcaaacctctgcaggacctccgccacgaaacgatgcgcagggaggcgaaggccggtgatgaagaatgcctcaaacatgactaacttgcccttaggctcgggaatctttt

SEQ ID NO: 49249 - DNA, 544 bp, Zea Mays
agtgtgaggaaagtttccagatcataaaggagaagctcacaacttagcctactccatccacccaggaaccaccaagatgcacctatacctcaaaaccagatactggtggagagggatgaagaaagagatagcacagtatgtggcccggtgtgacacttgccaatgaacgaaagccgagcaccagaagcctgcaggcctattgcaaccccttccagtgcccgaatggaagtgggaggagataggcatggattttgtaaccggactaccccggacgcaaaaagggaacgactctatctgggtaataatagaccatcttaccaaggtagcccacttcatcccagtgaaaactacctttggaggagccacccttgcatggatttatcttaaagagatagtaagactccatggcattccaaggaagatagtgccagacagaggaacccagttcacctccaaattttggacgagctttcagaaagttatgggcaccaagctagatttcagcaccgcctaataccctgagagcacctagaggggggggggt

SEQ ID NO: 49250 - DNA, 580 bp, Zea Mays
ccccaaacaaaattcggtggcaacaccaccactgaatttggagatggacaaggaaagcgagttcctcttgtctgccacctctctctctcacacacactcaagaggcagatgatgttggcatccactgctttttatcgaaaagaaagcgtggttaacctttttctctgccattcactacgatcgagcatgcatgatcacgttctagattctggaacaatgaatgtcgcaattctcatgggttaggtaaggttgagagttgaattaacagccaagaaagcaagcaagctcctgcctcaccaactaataaaccgccagtttcttcagaattcagatcatcatcatgtcatgcacgcagcacgctgccggtcaacgtacagtagcccaagaatttctaaaatattcgtgaaatggctgtacaaggaagagcaagtaggggggtaatccctaaaaaaacatactactactactagctcttgtgtgtcggcacggcgattctggcctttgccgccgtcgtcgtgtatgtaacttgtggtttgtgcgcgagcatgcacgcatgggattgcggtgagctcgatcggat

SEQ ID NO: 49251 - DNA, 400 bp, Zea Mays
agacaagaccaaaacattattgttaatgaccaataatgaaataagataaccactaactggtgaagcgaggataaattatacaaccaaggatatgagaaagttttttttaaggatacaaaatacaagggcattatcaagtagagagacaaagggttcaatatctcgaggtagatatcgtccaaggatgacaatacaatggcaagaaaacaaaactataagaattcaatagggagaaagcattatcaaggagaaaagtagagaggcaaaagtttaatatatcaaggtagatattgcctaaggatggcaatacaatgacaaggaaacaaaagtataagaagtcaagggttttatagcgatattatggattagaaaaccactataatataatataacatcgtcc

SEQ ID NO: 49252 - DNA, 563 bp, Zea Mays
cgacgtcgcacggaggaggcttgcacgccgacgaaggtagactggccggacggagcaaagactggtgctcccgaatggctgacactgaattgaacccctcccgtgcatttcccccaatttaatttcctcaatggctatttggcttgctttggccacggtgaccgcgcaccccgggaacaattcaaggtgttcccgatgatctacttcggcttagagtaattagttgggccgatgagttataggaacacacagggatgctagaacaagatcaaagacaacatgatcagacctgtggagagctgcccacggtgagcttggttttgcggcgttctcgaccgatttgggggtaatcccaaattggggagctgtggggaacaatcggagctaagagttggtttactggacgcacaattacctagcggaacaagctgaggcttcaatttataggctgctcgggcggtggtaatcaatttgggcaagatgtgctggcggtcggagagaaaaagggcattggtacttggaacagatggctttcaccgtggcggctcctccggcgatcatcg

SEQ ID NO: 49253 - DNA, 830 bp, Zea Mays
gggaatttccactaggtctaggttgctaatggcctcattgaactttagcattaggttaatatcacccccactagatttttattttccggcctacggattagattaaaatctccaacaatcaaccaaagtttatctgagggcatattgatattagaaaaccagtcgaggaagtccattttcccctgcggagtacatggcgcgtaaatgttcgtgataatccaggagtcatttgatgaattatagaaaaattccaccgaaagagcatattcgttctgaaaaataacagtgctcaccaattttgaactattccagacagtaatggatccacccgaattccccaccgaaggaataaaagcatatgaatcaaaggaattggggcagaaatttttaaggtaagccacatcaaagcattccttcttggtttcctgcaagcagataatatcacatctagattcccgaatcatacaacgaataccgttcaatttaacactggaattgatcccacgaacattatggcttaggacagaccagtcagagtaaataacaacattgtgattattcataaaggaaactttcaggttctttggcgaaagtaaacccaagcccaatcactgggtgggttatcagtcagtaaagtaaacccaagcccatctgcttctcagtcagttttttttctatttgtgtagttggcttgttccatgtgagtcctttgtgttcccatcttatactgaacttgtcatgattttgcttccttcttgtgcacaccctagttccagtagataataagcgcagccttttattgtggggattagcgccaaacagggagcatc

SEQ ID NO: 49254 - DNA, 579 bp, Zea Mays
gagagttgactaaaaccatagatgtagaattgcagacacattagagaagaaacaaatgaatgcatttggtttattgttcagtgtcgcaataacaaaacccagatgtagacacaaaaggcacctaacaaggatgagactatagtacatactaacaaaacttaaataaccaatatcattagtatgctaagcagatgatccaaaattgtttataagcaggaaaatggtttttatcatgataattaatggaccaaaaggtcatgcgatgttgaagacaggacaaaaaataagaagtaaaaacatacagcaaactaccgaccgacattcaggcagatgatgggatcaagttcatccgagttggttcaattttctgatccacttgggacttggtaattatcttcatttttgtgtatctgtgctaggacaggttgctttagatgtttgataatgtcctaacaacacaaggactgaagcttaagcaattcaaatatgaaaagtggataaaatgagtattgagcagcaagttcaattggtacctttctccaatagtttgcactatttggttgaacaggtaataaaaaa

SEQ ID NO: 49255 - DNA, 443 bp, Zea Mays
atcccgaacgctattgtcaggcccagcgtttacatctgggctctccgaagcaaaggaaagagcgataacgctgaagggttctgccgggtacatgagcttcattaccagacgaaggcaagggctgacggcctgcacaaaaacttcggatgctacaactttgcataccgaaaggatacgaaggccccgtgataggctaccacagcaagtggccaactggatggacgaacaaatggttttacgtgaaagcagacaagaagaaaagggaaaaacttatgagcatggtgatgagtccattgcgattaaacttcgacatgactcggcccctgtgcaatatgcagttggggtctccttgtcggctagctggagtggaattatgagcttgtctgtctgccttaccgtttcaagtttcaaaaaagatataaagaaccatgcaatgaatggtt

SEQ ID NO: 49256 - DNA, 531 bp, Zea Mays
aatgttattgatgtttgactagtgattgattggcagaacaataacataaacaaatagatatagagagacaacattctattgttgtttggttgctaaatgtgtacatttagctacatccgatgttgtttaagactttagatcacttgtcatttgaaaagagtcggtggttacaatggccaattgtgctataatttgtcacctaaatacacgaggatttaatttatatactaatgcatattaggctcgtcccatatttgtcaaatacggaataaatacgggttcaatccggaaaaaacgggatcccgcaaaaacggacggaataagccctctcccgtttccgtcccgtttccatatttttccgtaaatacggaaatggtcgggtcaaatgtagaaaacggtacgggtcgggacgggattttttccgtctgttttcaaccctaccgaggtctaggatatccaatcctctcaaggcttttggtgtgcacaccattgactaatttaccaagcagtggccaccattaaccttttctg

SEQ ID NO: 49257 - DNA, 1013 bp, Zea Mays
gggggctgttccttcctattattagttaccaaagtagtaggtccttcctattatcacccactaaattagtgggctgaaggctatatattcttgtaaaccacatatggaggaggcacgcaataaactatttcctaaccccttctctctcaagcctgcggttgaggagtttatcctcacccgagaagacagacgtcggctacgagctacgtagtcgtggtccggccagtcaggggtttgatgcccttaacaaccctaaaaccctaaacccaccgaccatccgatcctatgagtcgggagacacacgggtggtggtcgttgccaagaacatggaagaacgctaggaatttctcgctgacatccgcgctcgtctcgagcaagctcaggcatttcagaagcatcactttaacaagacccatcatgttgtttcgtacaaggtcgatgattgggtgctgctacgacttcgtcaacgcccggttgcgtcgctgccctaggccacctctggcaagctcaagccacgctacttcgggccctaccacatcaccgagatgatcaacgaggttgccatctgcctcgctctcccacctcaggctcgcctacacgacatgttccatgtgagcctcctgaagaagttccattgcgttccaccagaggctcccccgccacttccactggtccacaacgacgtcattactctagagccggaacgtgctgtccgtcgacgagtcgctcgtggcatcgagaaggtcctggtccactcgaagggctagtctgctgcatcggccacctgggaagatgtggtgtcgttccgcgccaagtatccaacatttcagctcggggacgagctacctctcggggaggggagagatagtttcctgttattagctcctaaattagtgggttgattccttcctattattagctcctagattggggggatgttccttcctattattagttaccaaagtagtaggtccttcctattatcagctcctaaattagtgggctgtcggcta

SEQ ID NO: 49258 - DNA, 337 bp, Zea Mays
ggatcatattccaaggcggaagacaatgcattatccacagccttcggaggccagggaaaaaagagattgaacagagtttttgattccattggtttcgtctaccccgactaccgctatccactgcgaggtcaaggaaagaagaggaaaaatgctacttcggccactccagacgagcctgcgccgaagggcaaaaagttaaaagtccttacccaccggccacgctatattgaaccgcccatggtgcctgagtttggtggggaggcttcttcagctgctgaaccaagagaacccattcctcctacgcagaaggctgaagagccggctataatgccgaagg

SEQ ID NO: 49259 - DNA, 904 bp, Zea Mays
gggcgcctgcctaaagaccactgattgcatagtggatagctatatggtcatcgaccgaaggtagctgtgattttagtaatagaaatttcttgtaatacgcccgaagggtttctttctcttactgcctatagagcgaaagctctgccaaggcatctgtctcgggtttgtacccttgaaaactgagcaagaactttttgtgaagcatcttccatgagtcgattaataatggtggcagccttgagtaccatgtgagagctgggccttcgagggctatgatgaataatttggccatggtggcgtcatctcccccaggcgatgctactgtgacttgatagctcatgatgttttgggttgggtctgcattatcgttatacttgggttagatgtctgctccaaagttttgaggccaggggaggcctagagctgtggtgcaagagggcttcgttcatcaaggtaattcaactcttagaaggttgtcgtcgcatgggggtaaggcatggggtcctgtcgctggtggaggggaccttcgcccagcatttctgcgatctgctgttctagttctcttgctttttgttcctcatctaggatcattagcctgaccttggcttgaaagttgatgcgctggcgcttagctgcgaggatttccttatgtttctataggtgactatttttatgtgaagtgcgcacaactttagttggtcctcagctaagatgcctaggacttcgctgtcctcatcatcatcttccagggggtgagcccggcagagggttttgggggaggtcttcagagctacacgtgcggatggtgccctcaggggtaggcgggttctccatgcaaggtcggttgttgttgactgctcgatccttgagggcctcatgagggacgttgccgacaagggctgcc

SEQ ID NO: 49260 - DNA, 1149 bp, Zea Mays
caaaaacaaatgtggattcctaaacctaaccatcttagcaatcctcttgacacttttcccaacatctttagtaatccccttcttagagcaccactgccacccaaagtgaatttatacccacaagagaactcgacctaagggagaggtgaggtaccactgcgagcattgccatagagatggtcacttggtagagttttgctttagaatgaagagagttgagctatagggttttgacatgagaagtaggaatatgtatcacactcttcatgatgtacatgtccctcctaattagaggccgactgctaggtctagaagtgctttgcctaaggttgctaggcctcaagtagtaagaccacacggtggttgagctcggcgggggctttgtttccatagttctaggccttgtggtggaggctttgttcccatagctctagcggatcatgacttccctctcatggagctcgctacccccctatgggaccggtgatgtttggcctccttctaacgtttttaggggcaaatgccacagtactagtgatctttatagtttactaaccccgatgatgtgccatttgtccaccctatgtccttcaattgatgcaggacgaagggctggaaaacatatggctcatggattttagttgttcccaccacatgactggaaacattatatggttatctagcctcgaccccatgatcaaaaaggagtacatcactttcggggaaaattctagaggtaaggttctctcccatggcactatttgcttgaatgagagttttgtttttaaggatgttgcaatgattttagtttacattttaatttgctttgttctcaaggcaggtggtggcggttggtagtagagagacgttggcatcgtaccttttgctagggttcgattggggacagagagtcatgtcattccaataagtagaggataaggataaggtcatagagatgaagcatgggtagaatagggcaatacaaaaaaaatgcgttgtgatgttgttgtgtccaaagctccaaaacgtgtattgtcacagttccaatttgtgaaaagttcaatggcacatgtgcagttttgagaagttcaatggcatatatctaaacgaagatatatagtagtattaacctatttgcatatggggaaa

SEQ ID NO: 49261 - DNA, 326 bp, Zea Mays
tagacatggcgcggtcggccggacctggtgtcgtgaggttgaagatgagcggtaaccgttgtatgctagatgaacgcatacgattaggtcgtcaaataacgtttcacttgaatcctatcgtcaccgtttgttggtgatcggaccactcctaggcagttttcgggcaggaaggatttatggccgtcggatgatatcggacgtgatcgggtcatgggtgatttcgggccttagatctcggatcctggggttaggatcgcaccctggatcataacgtgtgtacgtctaatctggatggatgaatcacgatccaacggctcggatcctag

SEQ ID NO: 49262 - DNA, 487 bp, Zea Mays
gtttagttcaattgcaaacttgcttgagtgaccaaaataatgcaaaaaactacagatgctgctgaactatgccgtgcacaaacaatattagaatgtatctcacctccagggattttctgaaataatggtacaaaaataacactggcaagaagcaaatacagtatgtcgaaaagtgaagcttcttcctcatttacctgaatagggaaatgacgagtgtaaggaaatttacatgcaagctaagtttcatcataacagttgaatatcattcgaagtacacaaaatgaaatcagaagatgagcaagttcagatgaggaaattgtacctcttgatgaggtaagagctctattagcttctttactctctgtggaatttgccgtatctcacgaactatgggctttgtcgtggaggttacctttccaatacttgtggcaatttcttgctgctgaaatagttgactcttctcagctctatttaagaagaaggccct

SEQ ID NO: 49263 - DNA, 719 bp, Zea Mays
ttgcagccgatgaggcctataggttttctttagtttgggcatcgtgtgacggaaaactagtaataacagatttatcaaacacacgttctagcctcctataatccccttgtggtaggaactcttggcctatcatgatattagaggcagttgcgtcatacgacccatggatttggcatgcatttttcgaaatgtctgggagtaacaacaacatcaatgttttacacaggtcgcctgttttcgacccactacaaaatggtattatgcccctggtacaatacacgattaacagtcacccatacaactttagatactatttagttgatgttatttacctagattggccaacttttgtgaaagctattcaacacccatggaaggagaaaaaatgcacttcactaggatgaaagacggttgtcgtaaagacatcgagagggcatttggtgcactattgcgaggtgggcagtgctatgaggtctagcatatgggtgggatcacagtcccctagttgaaatgatgactgcttgcatcataatgcataacatggtcgttaagggtgaaggggatcaagtagccaatgttgacttcatcgacgccggagtccctaacaatctatttattgatgttccaaaggactgtaatgaatggatgcataaccacctaaacatcactagaagggagacatacacgatattgtagcacgatcttgttgagcatctgtg

SEQ ID NO: 49264 - DNA, 545 bp, Zea Mays
tacatttccatgggaaagagggctctgccgggaggagacgaactgttgcacgccgccgtggtgagcacagagaggagcacgagggagagaggagaagggagcatacctggtaaccgaaggctcacacgatctggatctaggaaagtggatatctgcgttgggaagagggtttcagcattggagaaataggagaaggtacgtctgcgtacatatagaggaggggtgaggcgatgctgctatgtgcccgacgcattgggcgttgcgcgacgaggcaaggcaaaacgaggtgactgcgactgattttgagtcgatgtgtgcgtgtggaatagataacaatttagggaaaacggaaatgatccatggcctgaagtgtcagcgagaggagcatgtgaggtgattgtgtctacgcgatacggcgagtgcggggaggaggttgcacgcacagcattgcgtgacgagacgacacgaggtgagattgatggatgggttcagtgatctcgcgaaaaagtacacgagatctggaacagactcgacgagaagaagaa

SEQ ID NO: 49265 - DNA, 514 bp, Zea Mays
gccaaacgatgactggctaaaatgcatcgaagttacaagtgatgaactgcttggatcatattccaaggcagaagataatgcattatccacagccttcggaagtcggggaaataagagattgaacagagttttttgatgccattggcttcgtctaccctgactaccgctacccgctgcggggacaggggaagaagagaaaagctgctgctttggccgccccagctgagcctatgccaaaggctgtgggtaaaaagatgaaggtacttacccatcggccgcattacattgaaccggctgtgatacctgaacttggcgaagggacctcctcatctgccaagacaaaggaaatcattcctcttgtgcagaggactgaagagtcggctacaatgccgaaggtacctttggttaagctagctgaaccgaagtctgacaaagataaaactgaagggccaaaaattgtagagatgccaagaatgctagtagttttaagctcttcaatagagatgccaagaac

SEQ ID NO: 49266 - DNA, 982 bp, Zea Mays
caaaatcaaagccggtatgttgtacaacaactttcatacagacggattggtagcttcccatatgaaaatttgagaatgaagctccttaacttgctctgtcaggcgccctgaatgaagttcccatggtacaataacctgaattagatcaggtgcagtgaatctcaccaccgatgaactcatgccgcgattcgtgctcattggcgcgtcgataactgtgagaggtaaaaagatcggaagggaggaggatttggtcctggatgtgagcttatcggccgcactcgattgcctggcgacgtgtctgtgcggtcgatgtcaacgggggatgccggcaatctcagtcacgccacgtcataggccgttttaccacgtcgttgcgagtcatggagagtaactagtgactgtcgtaagaccttgccccagtacgcgccatggtgaactcactttagcaacaatatcccttcaccgtcatgatccaaatctcgttcaaaatttggagcaaccatgaccgacttctataaattgagcgcatcccttgctccgcccctttgtcacgaacccaacgcaactccaaccacgtcatgccatctatcgttgctcgtgaattctggttttctcccaattcggtctgccgtgccgccgtgagacaccttgccgaggccaaccatccacaggtcggtttgtgcttctctggtttgtgttctagcatccttaggttctcctcttgcttgtgaactcgatcaattgaacgctatcgcgcttggtcatcgagaacaactctgcatgtcctcggtattcgccgtcgtcgtggatgggggtgattctgggtcagattagctcaattagttcatggactaggatcgtcttggatcggggatgatgatccggtattcggtttcggtggtcgtcgccatttgaagcaagttccagcaaggggtggccgacgaacgaacgcgccgtcgacgaggacctatgtcgtgaagaa

SEQ ID NO: 49267 - DNA, 877 bp, Zea Mays
gccatgcaggggtcgatgccacaacaataataacagctctgtcaggcgccaagtacaagtatgccacacgcctcggttttgctctcgaaacagacaagtgtaccaataatatagcagagtacggagcagtcatcttaggactccacaagctaagagcactcgatgtcagaacatgcatagtgaaaactgactccaaactcgtcactggaaaaatcgagaaagacttcgtagctcgagaaccagtcctcttgcagtaccgatgaacagtgtgcagtctagaaaaacagttctagggcttcacgcttcagcacacagacaaacaaaaatgaggacgctgacgcgctagcgaaggcttctgccagaggatatcccatgccctcatatgtattcttccacatgatcgaaacctcttcgttaagagacaccgaaggcctaagaatcacaaaagacccaaccgaccaaagaatcgtaaatctcattatgaccgaagattggagggccccataaccctatacctgcaagggaaccatcacccctcagatcaagttgaggccaaaagaaagtcgtaggttcacaataatagaaggctagctttacaaaaaaggactcaaccaaccttagctcaaatacatcacagaaatggaaggcatcgagcgcctccgcgagatctacaaaggagtctgcggttgtcactcagaccccaaggccctcgccgccaaattcatgcgccaaggtttctactagccaacaatgtattgtgttcatgtgaggcatgctagaagttttcaccacgaatcgtggaactgccgcaccttacaagactaattactcacacatggcctctataaagttggggccttgatatagtcgaaccgct

SEQ ID NO: 49268 - DNA, 290 bp, Zea Mays
cacagaaccctgcactctggactgcgggttgaaatccaggaaacatagggtctctttaataaatttacctggccgaaggggtaggtttcgatcaggaccgcaggatcctaaatctaaggtcaggattagatcgctaacgtgatgaaacggtacgcgacacccaccgtccgatccaagatcaaccaccctcaacagatcataacccgcgagaccccgctacccctcggatctaacatctacggtctagatcaatcgcgcgaaagggtatatccctatatctaatctaagcc

SEQ ID NO: 49269 - DNA, 427 bp, Zea Mays
tcagtttatgaccagctactaggctatctattctgcctactaaattattccccttgcaaaactatcttaccatatgtctctagcctagatggttgataccagaaggggaggaggttgtagcacgaattcgtcgaagaagggttgtagctaatccggaaccagaaatgaatcctcctccgaatcccccgcctgctgatgacatggttgctgctcaaatgcgactactacaacaaatggccaacacgatgacggaaatgcaagaacagatctgtcaagaacgtcaagaaatgtgtcaagaatggtaggaacgacaacaactaccacctccaccaccaccagctccgcctagggataagcactaggagtttatgagtcacaaaccacctacattctctaactcctcagacccactacaagatgacgactg

SEQ ID NO: 49270 - DNA, 322 bp, Zea Mays
gttctttaaatcctttctgaaacttgaaatggtaaggcagacggacaaactcatacttttcccctcttctttcttctttgacattccccaaccgccagaagtcgggaatgttcagttcgccagatattcttgtatcaagtctctagttctgattgctcagccacaaccctgaactccacttcagctaggtggcatggagaccccaacttcatattgcataggggccaagtcatgccgaagtttaatctcagtggactcatcaccatgctcataagttttccccttttcttcttgtctgctttcacgtaaaaccattcgctcg

SEQ ID NO: 49271 - DNA, 664 bp, Zea Mays
aaacattgttattagggcttgcctcagaaaatatactattatttagagctttattgggttttctctagaacacattggcattgaatctgacttgtcgattagtttctttcaaagtgctccaaccattctgttgtgtgtccaagtacggtttcaaagtactgtggcagttagatgattggacgctgcatttaactctaataattaataaaagcaacgcataacaacccagtttactttcttaattagaagtacgctgactacccaaatcatatgtgtatcatattttttgaagggggcggtcaccaataagtactgttttgggcattggcatgtttttataacactattttgattaatggttttgtgatatatttatgaaaaatagattattgttaatttggaacagacatattgaatatcatttgggccacgggtacggtgttgtcactgaagccaaaactgacaccgggcaggattcgtcgacgtctgaacagttgtgatctgctacttgcaacggcacctagcacataacatgataaaagcaatacaaacacatataacatatgatacactggcggacacttcgtacctgaacctacataaatttttatatgctatttttctgttctactgcgcattgattttgtttgctaggaataggaaa

SEQ ID NO: 49272 - DNA, 353 bp, Zea Mays
cctcaagctggccctagcgaagaccctacagcggcgactgctctggttggtgaagactctgcagcggcggctgctccttcgcaggtggcggggtcacgttagggttgttgggtttaaggtttctttttgtgatactgaaggtcggttgctgcgcaggtttcgacgtctgggcctacacaagcaacccccgctgatgttgatactagtattttggcggctgcgaatgcaacgccctttaatggaatttgtctggttctgaaactgagtcatggtcctcggatggggatgattttgggagcccgctttcgtggattgaggagtcttatgaggaagatttagactactttgctgcg

SEQ ID NO: 49273 - DNA, 298 bp, Zea Mays
accactgcgtcagcttcaggaagaggaacagtactctctcctctagccctcactatggatatatcatggaaatatctgcccttcatcgcttcaattttcccttgcttaacagtggatttcccgaaaacaacatgacttggcctccatggtcgaacttcggcatcttagttctcactctcaatatcaaaactatcgttgtcgctggagtccccagacagtccagctaacatttcatcagtgattttctcaacgttggtcttctccatagcttcgtagaaaccagcaagcacgaggtcca

SEQ ID NO: 49274 - DNA, 481 bp, Zea Mays
ctagaagcatcaacagtgcacgactcagggagagataacaattggctaggacttagatggtcactggttgaatgccctggggagaaagtactaccttcctacatgggggttagctctcccaccccacgatgtaccttgccgagacgtcacctatcacagtccatggtgatcatgatcttgagcaccatcatctaagtcatcggtaggaggaccagaatgtgatcggagtcgttgagtcagaaggcaatggaaaaacaaatagtaattgggtaactcagagctgtggtttttctaacgttgccctcgacaacctgaacaggctcaacaatccacaaatctcttgcagcagggatatatgatggattagtacaccacacagagtacttgaagcaggacaaatattgtagcgccatagtatcctgatgcacttgatgaatccaaacaaatgggctaagaagacgttccatcgtgctagtttccc

SEQ ID NO: 49275 - DNA, 349 bp, Zea Mays
atcagcatcccgaatagcacaacgaatagcattccacttcacggtggagttaatccctctaacgttgtggctcaacacagaccactcccggaagttaacagtattgggattactcattgagtaaataagaagtttttgaggcagagcaatacccagaccagagggtaaagccagattcagtccacaagcaaaatattaacagaacattaaaacaagcacgcacaggtgctaaccaagtatccagaagacctgcatgagtcaaaagtaaaaccaatcccacccaaaagtttatggggcccactccagagcccagatctccccccgtccgcttattgtttgtcttgcttat

SEQ ID NO: 49276 - DNA, 839 bp, Zea Mays
cgaagcgtgaaattgccgaagctgaaagggatagagtttaggagattgttgaagaactttgtgagtcgaaagaagaatgcttctctaatgctgctaaatgttatgaaaaattaaagagcatgtttattagcatcggagccttctctagcgaagaggagttttcccacggtgatgctgccagagctataaaatggatcaaaggttagttgaggccatcgataaagtgtttactggccgagggaacttctatgcctacatggatgcacgcggagcagtttccctgcttgaaaaagctggctacgatcatgtgaaatacgttattaggccagacttcaaggtttctatggacgatattaaggaacctttagccggagctattgaaatgtggagaaatttttatgctgatatttggcttgctgatggcaggcagatggaggatgaagctggcagagataatgcaggaaaggttccttttgatctttaagtttgtagctttagctctttgtattgcatattcacacatagtgcttgctttgtaggttcatagagtagccaaggcggctaaagaagctagacctcctcgatggcgaccgagtgcaagccctcgactcactaaacaaatactaggtagcaacgaagacctgaagtgacaaagcaatcgtcccccaaagagttcgaagaaggagacctcgtcctcatccgaacgacaaggacggaagggaaaggcaggcttgaaccaaaataggaggggcccttcataataaaaaagaagactttgcccaattcatacaggatgataagcttgttcgcagtagaactcaaacactcctggaacatag

SEQ ID NO: 49277 - DNA, 702 bp, Zea Mays
attcccctagtacttgttttccttgaaattgcttgtgattagtgaattagtatttgtttctagcattgcattgttatctcatataagttgcttacttgttgtagttagcaaatttatatctcttgttgtattgattatatttctctagtgtctttgattttagtcaaaatcgtctattcactcccctctctagccggtgtcctagatactacacccacccctttataggtagctcctaatccttcacgcatgagagcatctccaccatgtttgagttcaagcgccactatcgattctctataatcctactagacatattaaatgtaaactccaaagatatcattaaaacatgcattagttaggtggtcgtacgttgctacgatttctaatgatgattataaagttgttgatgaggtgggcgttttgtcgaacaacatactcgtagttgtcgtagacgtcgtggccttgcctacacccaagatcgtggtgcacgtgctatagcccatcccagtggtcatcaaggaggttgcgatcaatgtagaggactcgaggtgagaaaagaggtattaaaaggtagaaaactacataatgttttctaaaatagatgcatcatatgctaattaaatataaaatgcatacagatttaccatctgaatgtcatgggacctaggtagagtgtcatgtcatctcgatgtctcgagt

SEQ ID NO: 49278 - DNA, 629 bp, Zea Mays
atcttgagatttgattcaagatgcacttgcctataacatttatccaactcggactaggtggaagctaccgaaggaggtgaagtcaaaggatgaagaatttgttacgttgctttcgattttaaggaacaatcttcgttcaaagctccttgggctggatggcttagattgatagaggaaaagtgcaatgagatttgtggaaattaccttactagagagcatgaagatatgttgtctgtctttggaagtcatgggaagcttcgacttagttacttattttttggaacctagcatggtattctcctataaatatgtacctatgggtgctaccatcaagcacaacaacaaccaatgcatctagcatctcctattcatgcctattgcgccgccacatacgctacttcatccctattgtcggcatgcagtagtgatctggagagcagtctctagaaccttcaccctagtgatcctgcaccgggagatggcgaataagatttttaggtagtgctctgtgtgaccgcttgatcgcgtccttgttgtcttcaaccttgtcgtcacatctcatctgcagcgcgtcgcgttggtgtctcacgtcgtcgtcaacaacaaaacaatattgaatgtcgttgtca

SEQ ID NO: 49279 - DNA, 481 bp, Zea Mays
aaacctcaaacggggacatcttcaaactggcctggtagctattattgtaggagaactccgcatacggtaaactcttatcccaactaccaacatgtttaagagcacaagctcttaacatatcttctagtacttggttggttctctcgatctgcccatcagtttgaagatggtaagccgaactaaaattcaaccttgtatccaagcactcatgcaacttcttccagtatcgagaagtaaactgtgatccctggtctgacacaatcttctttggcacaccatgtaagcatacaattcgtgccatgtacaactctgctagcttggctcctgaatacgtggtcttcactggaataaagtgggctactttagttagcctgtccataatcacccatatagagtcatacccagcagatgtgtggggtaatcccacaatgaagtccattccaatctctttccatttccactcaggtatcttacgcgggtg

SEQ ID NO: 49280 - DNA, 429 bp, Zea Mays
cttgtgttgcaccgctggaatcgtggagatccacgttcgctactcaaatcatcgtgagttttctcttgagtctacccctattcctcctcgttcatttgcgcccagattagctcatcggtaggtagttggtcgccggcaatttctcgacggagcaggggcctccgccgcgtgcggtgaactacatgggcacgagattctataccccgacctcgggcgggtgcactacccagtgattcgcggtgctctgcgcatagtgtagcaattgttagatggcaaaataatgccttccatcgctggtatgcatggctccggtgagctgttgccacagtggcgctatcctttgtcgcgtgggtacccagggtagaagaaagggtaggggaaagatgcctggccgttcgatggtagacatgtgcatgtgattgggttgcg

SEQ ID NO: 49281 - DNA, 882 bp, Zea Mays
cttacatgtttagtggcattgtttattctagatggacttctttggaggttctggtttatgttcatgtgcataatcattggcttagggtcatcagcataatacaagttgtagtttagatctaggatgttcctatagatggtttatcgtttatgtggccctagatttggttgacaacacgggtaattaatgtttgatctattgtagtgcatttgtatagagattccctgaaagtagcacaccctctctagatataggtcaagccaggtggcatgcctagagcccccacaaccgaagtcataattaggaggacaatcgcagcaacaacacacctccttactcgtagtgtattgtctactaggacaatctaccataggtttcctgtgatgataggtactcatggtggttatggaggaagccatggaggtcatgcaggggatcatggtataggctatggtgtcccttgggccaattggactaccatagaggagcttgggatccatctctcgctttgactggggaacaattgtagcaacaatagcaatggtaggagggcaaggtatgtgagacatcaaacaccacctcaactagccctagttataccaccattcactttggtaacttcatcaactatgcccgcttagacaaaggtactcaagcataggcacttgcatccacatatacacatgatatggatgggtcatagatcgaggagcatctaagggatacctaatttgtttaagacatacaatccatatacccactttgaaactaaatagttgatggtacgtcccaaacaatctaatgagtatggtcaatagagtgtacaccatccctttgcctatcatctattttgtctgttacatccttcctagtcaatctcct

SEQ ID NO: 49282 - DNA, 482 bp, Zea Mays
tgtctccagtgcatctagtacattgaccattcttttcctcttaggggtcgttgtaagacctttttgtgccttcggcactgtcacttccgccgaagatcttgtaacttctaatatctttgttccttcgacccctatctcttcaatattatcggccttcggctcagctaatttagctgaggatgccttcggcattgcagccggatcttcaatcttctgcacaggcacaggttctttggctttagtagccgaagaggtctcaccgcaaaattcgggcactgtggccggttcaatatagcgcggtcggtgagtaaggaccttcacctttctcctcttcggcgcgggctcactcggagcagctgaagtaacatccttcccagaagttgcactctttctcttctgcccttttggtgggtagcggtagtcaggatacaaaaacccgatggcatcaaaaaccctatttagtcatttctttttccgacttc

SEQ ID NO: 49283 - DNA, 951 bp, Zea Mays
ctcgcatggtgctcggataaatgttcgagtggaatgttgctttgtatagcaccactaatgcccacgtggtgttcaacaaaatgtcactacccatgaacggcccccgctctcgcctcatcgcgttatgaaggataagtaaactggtgagatgctccttgtgattttatttacagctcttgttagatgttgtagtgtgatggtcgtcagttttgtcgttgtgcacaagtttataagtaggtatgtgcacgagtatgttttggcgtagattgaaggttcgcggaggtataaattgtttgttaaaatgcttcgtcgtaaagcagtgtgttagttgtggtaaatttaataaagcttaaagcatgcttggtggcttctgcagtcggctaataagtctagtctttgataattatattttatgtattcatcgttgatgtaggttagagtgggttgaaaatacaaattatgcgacatgtgattggtgttttgaagacgagatgtgcgaataatcagtttggtgtttcactcgtctagtcgataaatgttgtcataaataattgtgctaaagtttggtcataagagtgcagtaggcacatggtgttggttggatgtgataagtagattggaagtgtgggtttgtctgagcactgtgttgtcgaacgtgtatgtcgaaatgcgttgtagtagtgattgcgttaagttgaacggaagtgtctcgagtacacgccgcaacatggttgtattcatgacaaggaggtgtaggttttactcaattagaagtttggttgatgtggctaggaaattgtttcggcttgggtagtgaagtggtgacgtgaccaagtagtcaccccccggttatgagtctagtctagatgtgttatgccttcactgtgatacccatcacatatgctaactggatgtatatgaaaaatgaaatagacacatcatatgatttag

SEQ ID NO: 49284 - DNA, 638 bp, Zea Mays
gggaaatgagcgattcgcggtctctggtggacaattgaagacaagcgttggtgctatggatgggtgattaccctatggagctcacggcatgctcaatttatagcaggcatgagcggtggccgtggaattggacgaagacgtgaggcggtcggaggaataggaggtaactggcatgtgtgattggtgtctattaccgtggcaagctttctggcgatcaccgtatacgcttaacacgactaactacgacgtggtgagatgctcgggcacgtggcgcaaggccgcgaagagtctatctccggcgaacctatccaaggcggccgcgacacgctcgggtacggcggccggagtaaaatagcggctggagttcatcccctggcgatatttcttacccccggtgctatccaattgatccaagcacgaatcaccacggcgatagcacgaatccacgcgtggctcatcgccgacgagggcactgagctagcaatctgagcagtgcactgtaccatcgcgcaactcattcagtcagccttacagcccaacttgcaaggcctggatcttaatttttcatgcagcgactccctaatccatctttaagaaagttgttgctctactatctagcttcaatcttactatatcag

SEQ ID NO: 49285 - DNA, 608 bp, Zea Mays
actttactttatcattttcatatgaggatttcagttatcttcgtataaaatgtttattagtttttgtaacttatttgcaatttttgagtgaaactagaatagtttatgaatttttaatattgtggtgttggttctacaatgtcctcgtgattagtaactttgaactgcatgatgtcaattttgtcggtttcctttcctatatttgatctatcatatacatgattatgtattgcttaatttatgtatttgttggatggttggacaattaatatcatcgggacgaactacccgacaattatccggtacctacccgagtagtatccgttctccatttcttacccgcccggattattacccggtcccgtcgtatatccgtcccgaatcttaactacccgtgtccggtcctgaattcgacagaaatacattagggtaggatacagattgaccctgtatccggctgtatccgtcccattgtcatccctacttgaagatggagctttatcccttgttggagatatcaattcaaccaacttgccaagaacttgttcaatcccttgattctctcacattcttactagcaacaactaaccttcgcttttctatttatg

SEQ ID NO: 49286 - DNA, 723 bp, Zea Mays
gtttagagttgtttgaaacttttatggatcttatttatagtttacttccaattattacttttgatacatatattcataatttgcacgagtgtctgaaggaccagtatgatactaattatgttgacttttttgaagtcaattgtgggttcataatacgatttttactggtgtaatttatattccgaccgtaaccggtatgttttccgtaccgaactttcgttagtgatgttttcaaattatcgatgttatttttgtttttggagttattgttttcgctttcgttcatgaaggaaaactatgaaaatgaaaatggttttagtgtttaccgtccgttttcatccctacttttggccccagtctccacgcacttgtcctactcccctgtactgaagctcgatggttagcaacacgtcgctatcctctctgctctctactgccgttgcctgaaggtgttgctattgccatgtgtcgcgccatgtgggtcatctccctctccctttgcgccaagtgcgatctctccttccgtggtgtgtgcagctgctacacgacatatgacacacagtcgacaccgttcgtgccacccctcttcgtccgcgtcacctctctccctttgcatcgcccctctccctccatgcctctgtttgctagcaatcggctgctatcacccaacaatcgactcctctcatcccctctgcctctattttgttaagctactgatccctc

SEQ ID NO: 49287 - DNA, 1148 bp, Zea Mays
tcattcgttggtgaaggtactaactgctaccaatcaaaggactatcaaggttaacgccttaacggttaacctacacattggactattgaagcagaactgacagcacagtaaacctcaattcacgagcacaccctcaaatgaatcctgcatggttttcattcagtaaccaggctggagaatgctctgaacatgctgtggtttcgagatgaacgtctactacagtgatcacgaaccgacgaacagtttccagaaactgagactgaacccgcgatgctgaactgaattcatgctgttctcttcagccttgtaggacaccgaaagcgatggagacgactacgatgaggacgattatgatacgactactacccggacagcgatcagcgacttgtatcacttcaaacccccttgctcaccagcaccgaacctttagtgagcggatcctccattcctccagcatttgctctgtctacatatgttcaagttcgattgtttaatgctggagtttcttctttacgacatactatctcatgtcaatgtgtttggcagcggcactaaacttgttgctatagaagtaaaatactctcggttcgttatcacagtataactttggtgattttgttacgatgtctagtgttagtctaccactttcttttcgagcttctccacgatattgcttctcttgtgagagcaaatatataataggaaacgtatctggtgcaaaccaatctctccccaaccaactgtttctagaaactgatcgaggctgaacccgcggtgctgaactgaatgcatgctgttcccttcagccttgtaggacaccgaaagcgacggagctccaaggtgcgaggacgattatgatacaactactaccaagacagtggattgtatgatcacttcatccccttgcattgcccaccaacaccaaacctctgcgttgcagcgccttcctcgattcctagctgatttgtgcgcaactgcgcatgcagaggcaaatcattgtgcagagacttgggacacatccttgcaaagtgtgttcagcaacttgtccacagaactacgtagtacgtacacgatttttttctgaaaattttcaaatgcggtgatcttcgtggtctgtccgtatcactgtccacagaactacattgttt

SEQ ID NO: 49288 - DNA, 842 bp, Zea Mays
ctttatttttggggatattttataactatttccctaaagcctttaggttttctcagtttgggttaggtcttacccctttaatccctatttagggttaagtcccctatctagggttctatttgcaaaacactaaaacaatacaacttgtttgaaatttttacctagtgaatgcactctaggtgtatcaaacatatgcaatgccaatgcttatgatgtcatgctcaagttttagttacagtaacaccaggggtgttacagctatcttcagaaggatccacggtatcagcttcggtttggtaggcggtaggctctgtcgctgcaaacaaatcttcaaccttcatctcagccacatctaatgaaggtgccaaggacacctcagggatagatcgctcctcgaccatttttaatggaaacgtggatgcttcgcaactgtctaatgctagttcggaggcagtgaaagggttcgaagcaagcttcgaaggcagaacaggctatagcaacaaatgagcgcaagcaacaaatgctgagctaaatgccaccgggcattgtcccttttatacgggcaactttaaaaatttaatcgttgcactctctaagcatcgaaccccactagtcaaaatggtcccatgttgattcataacaagcttcgggaaggtgtttttggaccttcggcgcaaggcctcccatttatgttttttgcgatctaagcatgttatgaaggaataaactcatcacgcaaggggctactattgggggcttgccttgtcaaagatcctcaaaacgtctttactctgctatatgcaaatgtgtttcagatatgcagtaaagggcagacgaagctg

SEQ ID NO: 49289 - DNA, 494 bp, Zea Mays
tccatgatagcttatcctcgagttgtgttggtggctatagctgtagatgtcgatgttcccctagagacacaagacttagaagatctccacctagacgtcagagttgcatgtataaaaatcatttggtcccattgcatattctggtgggtgtcgagatttgggagtggttgccgcaacgaccagcggaggtcgatgatggaatacggtggggctatgcaatgcgtgcttgcaaggaactccatgctcttctgcctgttagatggttgttgatccatgccacaccggcaagtcatcgaagtcgagataccctagaggtcggaagagttgcctcaagagtcgaaagaagagttgcccctagggtggaatagatgttctgatgcatgaagtgccccaaagaccggaacagatgctccgagggacaaaatagaaattctaggagccagggcgtagggccgacacaagaagtgctttagggtggtggaataggtgtccta

SEQ ID NO: 49290 - DNA, 416 bp, Zea Mays
gaactaccgctgctaactccagatcatgtgtgggataattttgctcatgaggtcggagtgctcttgatgcgtaggcaataactcgattgtcttgcatcaaaacacaacctagtctagtgcccgaagcatcacaatacacatcaaatgatttggtgttgtcaggctgcgctagcacgggtgctgttgtcagatgccgcctcaaggtgtgaaaggcatcttcacatttctgaccccaatcaaacttcactccctttttcaacaactcagtcattggcttagcaattctggagaagtcaggaatgaatcgtcgatagtatcttaccagtcccagaaaactccgaatctatcgaatggtggtagggggcttccaatccatcacctcttgcactttctcaggatcaactgctatcccgtcc

SEQ ID NO: 49291 - DNA, 770 bp, Zea Mays
ccatttaagacgaatgatccctttttggtcgttttcaatgcacgtttatttacttgttttaggtgagtaagaaaagaggatagtcctttggacgtgtgcatggcatgcatcggtataagaacaatgatcctttttgtcactttcatgcacatttattacctgttttaggtgacttagaaaagaggacggttctttagacttgtgcatgacatgtgttaatctaggaaaaatgatcctttttcggttgctttcaatgcatgtttatttactttctttaggtgactcagaaaagaggaggatcctttggatgtgcggacgacatgcatcgatctagtaacaatgatccctttccgatcgctttcaacgcacatttatgtacctgttttaggtgactcagaaaagaggacgttcagctcaagggagccgattagtgtgcagagtgattcatcaaacaggtcaatccatgaggtagcagagccgatcagatagttcaagctaggtggaacgcttggaaattggcagcctctagcacttagaggcacgacagccacctctagcaaaatgattcatgaatcaatttaagggagtcaatcagtgtgcagagtgattcatctaacaggtcatgccaggtggcaaagcccatcagacaggtcaagctaggtggcacagtcacgcggtaataacatagagaaacaagcgtggtgtgtctagtgcggtctccataagacttgttttttacatgtgaaggatcatgcacaccccatttttat

SEQ ID NO: 49292 - DNA, 1656 bp, Zea Mays
acctttctctccacttgtttatctgcagacatccatgcctttgatgtcataaaatcaatctgttgtatcaccaatacctgaaattcatacataaagatccttaatgagtaaatatattttggacgacaacacatgttttgaccaaactctcacaaaagtacagctcccaggaaaactttcgcaataataacacacattgtctcacaaaaaattaatactaacttcttaatgacctattcccttccagtcaacataaataaaaccaatcccaccaagtggaacttttaaaaagtgagttttaagatagtccactgtcgagaagaacaagtgattttggggaaactccttttctagagagtacttttgtgatgcattagttgcctaccaaaactttgattgatgaaggctatcatgttgtaattttgtcctaagtcaaaactcaagtggagagaaatcacaagcataacatacaaacaaaatagcttaagaatcttactttgtcaagaggtatttcctttagttgttggaccttcagttcaaccgagatctccttcatgtcagctaagtaacctttagctttaattgtgtccgggaattttcctttgtattttccagatacacacaaaggagagttcgctgaaaggtctggaatgtactcagaatccacctaaagaataaagaacgacaattagacaaccaaaaccagtactgctccagcaaaacctgcaggatctttcttaatataatgatacaaagctcccttgcgcgttctagataaaacatgcagaattatgactggccactaacccggcctaaaaagttgttatagtttcattatcgacaaatataatagttaccaaggactcataatctgaagaacacacaatggaaacttaaaaataatgaaaaacttatcatgccttatacagtacaagttttagtttatacatctgcatctccacaattaagcacactaaggtagttttatgaagtacataggtttattctgtccaaacagcatatccacattgcttggcaaggtgggctcaaccatctggaatcaggtaccaacttgacacaaaatggtaaagcattacagcatttgagggcatcatgaactttgaaaatgaaatttgtatcagccaagaaggtcaataaccaaggagtatagattgtactgccacaaggtcactgaaaaaagtataattactaatcaatcatgcacaaactcacttcgaattcatcaagatgtgtcaaagcatcaatggagatatttgccacaattgtactcgacgctctcctgaaccatttaagaatctgattctcgattgatgctggacaacagatacattaaaaaatctggttaagttaaaaccacatatttctgaaagattaaattcgtttattgaactctagatcaataatgtatacaataatatcatagaccttgtaacatgtaaaaacaagagcaaacacgaacagaacaaaatgagaacaaaaaagcttgctagctctgaagacccagaatacaaaacaagaaagttcaataattgtttttgggaccatgtcaaggataataatatatataggtatagatatacatatgtatatatgtgtgtacatatatatctctatctctactaatataaagtggca

SEQ ID NO: 49293 - DNA, 595 bp, Zea Mays
gttggtctattttagtaagcaattattctcgcaataactgtgattgattgtcacgttagcgttgtgattacgcggctgattaattgtctgtttgggccgtgcattgtgtatatattgagggtgagacgtcgtccctcaatacatactttctcctcattacaccaaagcgctgtccccttcttccccatcccgtcgtagacgtgtcatcggggttgggagagcaatatctctgaagcctacgtcccctcttgtccctgcacggggtaggggtcgtatcagatttttgggtagtgtcgtcgcgacggctcgctattcgtctgcttcatcttcgccgacgttgtcgtcctcactggtctgctacgtctactcttgcgatgttctagcgccgacaatcccactgtaagaatgtttatgcgtatatttattctatcactagcactagtatataaactgctcgtgagttatacatatacgaagcatgatcatgtttcttctattattattattattatcagaattaattttttcatctctaaattgctattatctccaacacatatgacattgaaatatttagtctaacttctttcatgat

SEQ ID NO: 49294 - DNA, 468 bp, Zea Mays
tgtcttgcatcaagacacaacctagtccagtgccagaggcatcaccatacacatcaaatggcttgctgctgttgggttgcgctaacaccggcgctgttgtcagatgatgcctcaatgtgtggaaggcatcttcgcacttctgaccccaaacaaacttggcttctttcttcaacaatttagttatgtgattcgcaattcgagagaaatccggaatgaatcttcggtaataaccagccaatcccagaaaacttcgaatttgacggacagtcgttggtggcttccagttcatcacctcttgcaccttatcaggatcaacaactatgcctgcctgagagatagtgtgacccaagaattttatttccttcagccaaaaatcacattttgacaatttggcataaagacggtgctctcgcagacgttgaagcactacatgcaaatgaccagcatgctcttcttcgtttttcgagt

SEQ ID NO: 49295 - DNA, 495 bp, Zea Mays
taaatcatgaccaatgcaattacatgtgattttctgcatcatccctattccagggtgaccaagacgtgcatgccaggtcttgaatgaatcgacattctaaaaaatcactttgtacgtaacatgaggtactggttttatgtatgtgtagtacaatccggatggaagtgaaggtattctttctagaatgttagcgccatattcagaaggtttggaaatgaggagaaattcctcattattttctgtatgagtagtaatatgtaaaccacttatccaaatatctcgaaaactcagaagggtgtgagttgaatcgggatataataaagcatcctcgatagtgacttgtgtacccatagggagtgtaatagtcgctcgtccagagccaactattttcgcatcgcgtccagcgattatcaaaacatttcctggcctccttgtgagagtttggaaattttttgtttctcgaagaatagagttggtggtaccactgtctacaag

SEQ ID NO: 49296 - DNA, 466 bp, Zea Mays
ttttacttcctcaatcacattgagatttgatccaaagatcaagatgtcatcaacataaagacacggcataacaaactcatccccaccatagcgataatacacacatgtgttagcttcatttacaacaaaactagtagttgtaagagtattatcaaacatttcataccattgcttaggtgcttgctttaggccatacaatgattttatcaacctgcatgccttgttctcttgaccatccacaaagaacgtttctggctgatccatgtagatctcctcatccaactctccaattaggaaagttgtcttaacatccatctgacgaatgataagaccataagaggctgccatggctattaatgtgcgaattgtagtcaatagagcaattggtaagtaggtgtcaaagaaatcttcaccctccttttgggtatatcctttggtcacaagccttgccttgtacctctcgatt

SEQ ID NO: 49297 - DNA, 627 bp, Zea Mays
tgtgtgcatgttgggaaagaatgaacccttcgtaacctcctctcgcggtcgcacatgaaacctccccttcgcaacccctacgcaacataacccctcccttgcacgatccataccattttttcccttgctcgcaatttctcttcgcaccttcgcttgctcgcatcggaggttccccaagcgaggcgccattgtagcactgggaggaggaggagcaccatcatcttccttgccaccgctaatggttctccggccatcccttcctcggtgagaaatccctgcctccttccttgatttctccacatttagtcgtaaccggtgtgcagagttcctctgcaatgacctctgctcatagctatggtggccaatttccgcccctctcctcgttggatcataagaaagacgatctaatcaataatcccagggtcagatttcgccataccctaatttctccctccagtttcccttccctttcctctctagtcttctatgggtcttcttccttgtgttcttgtgtcccatggatgtggctgagtgaaaccctataagcacgatctccatgtgcgcacccctccctctctacctcccatgcgcccctactggacggtcgtacaggcccatggcacccac

SEQ ID NO: 49298 - DNA, 428 bp, Zea Mays
gggaaagaattgcacggatccgtgtcatagccgccaccacctcgtgcgtccgtgtcacagcgctggcagcgctcttcttgcgtcttggtttgtttccatgacctggagacgagggaggtttcccggtcgggtttggctgggaatagcgggtgtgggccgggattgaggcccgagagggatgaaacgaacactcgcttcgttgtgggccgggatcttttccagaccgggttgaccagggggaatcggaccgaaaccccgccaggaacagcttaaccgaataaggcctaagagaattcctgctaaggatttggtgagctggctagacatgatcttgagaggcaaagtgtcaaatgttggtgctcctgttgcctactctgcttggaatctgtcacctcctaagtcctttatcaattttgtgtctaatcctc

SEQ ID NO: 49299 - DNA, 531 bp, Zea Mays
ctcgactttatatacctatgtttaatatcctgctttgatataacattagcttcaaagacatgatagagaaaatatttgtggacctttatgctcacattcttctatttttttgcagccttgacaaacttgctttctgaacaagtgagagatgatggctttccttttgtggatgtacatcttagtcgcctctgcagatggacatctttatcgcttctgtgggtagattgtttgactggcttttgtggatggaatggctctccacttatagttgtgtaatgttaatgtacctagctgtctagattgtgtcagccaagagaccgctaccagtaccttgtatatacatctcgtttagttgcctgccccccgctgtgtagggtagacatagacttggactatgtagtcttcttctggatcagtttccagctagaacaagcctcagcgtcatgctatgatctgtgtttttgtgtggtgctgcaactttaatgtgaattattttcaggctatctatgttctgttaagtaccttctttct

SEQ ID NO: 49300 - DNA, 770 bp, Zea Mays
attaatatgaatttaacacaactagaatggatcaaaatagagttaaaatgaattacttatgaattaaacaagtttctcgaattatttctatactaaaaatcattttctggtttcttttattaaatctgagatttatttggactgcggatgtgatttactagtagcacagggctaaggcgcaattattctgggctcggttgtaattcattttgactagggtaggatggcgggttgatttactaaaaccgtaggcgctcatatgaaaaagcccacgactgaaggggtatctgcgatgatcgaccgttggattataaaccgacgcccacagatcaaaattgaatgggtacttcgtcacatccgatatatatcagatcaacggtgcaggattgcccacgtcatgtccaaacgtgcacccaccatccacgatgcgacagccataattgtgcctaatgaaggggtatgcgttgttttaatcacgaccgcctacacagagctcaacggcggatattcgatctagtcgaaccattaccctgacctaatcccagccacatgctctacatctaactaatggtgtagcttctcctcttcgagccatggtgcggcggtcccgagcttcactacggtagagcacgccggagcgcacctgactccaggactctacgcacggatcccgcaccccgaccgcatttggaacagggctcaaccattgtgaacccgatactcacccccgccaccaggattggcgcactaaggtcattgccaaagcttga

SEQ ID NO: 49301 - DNA, 366 bp, Zea Mays
ggcaattggtcgactcataatgagtcggtcttccttttgtaatgatccctgacttatggatggaagaatgaagcatgtttcatgccattcctctattgtgtattctgttcttttgtctgacggtctgatcccaggtaaccttattgttgaatcttaggtttctagaggtactgaccgagtcccattactctattgcgaccaaaactctcccgagacactggcttgttcttctgtgcccgactcagtgtgccaacctgtacatttgtcgacgtcctcttggctcctgaaccctaattcctgtttttctatgcgctttccagctttctgagttcccacatcttttcacgttttgttcttgaaccacgc

SEQ ID NO: 49302 - DNA, 710 bp, Zea Mays
taggcaattataccctaggaggctagcttattgggtttgggaccaaacaatgtccaaatcatttcaaacatcacccaagggttttaatcatcaaactaagcttgcccaaaaagttttattatttttggagctcaattctgcccaaaacagcccgcaacggggaaacacgcccgcgcacgtgcccgcgttggcgactttgtgtagaggcccccggccttttaaataactactaaagaatctacgacactattcatgtggctctctaacattcgcgcaaaacccctcgcacttctatctcttcatgactcaagtccctgaccacacacaggtcgaacacctagccggaaccgagtgcacttgccggtggggacccgttccgatgacatcaagcatacggtatcaatcacagatgctatcgaagccctttctatacttaatttggttagtctgtcacttaatcaggtatgtttgcgataaccgcggcgcaaatgctccagtgaggtcgtcctaggttacaagagtcagtagcgttcaatcaagcgactagggaagattcagtggctagctaggactaccgtgctggcgcaaacttggacgaagaccacctagaacgaccggtctacgaaagccatgtccgcggtggcgttcctagacaatactatcacgttgacaatgctacggtgcggtagagttcatttggttgagccaat

SEQ ID NO: 49303 - DNA, 482 bp, Zea Mays
gatgagtctccagtggatcacggacaccggtgctacctaccataccactcccaaccctggtatactcacctctgttcgccctccttcttcctctctcccttcgtccatcatggtggcgaatggctcgtgtctttctgtcacatctgtgggtgccgccggccctcccggctcttttcgcattccagatgttcttgtcgctccttctttggtccacaatcttctttctattcgccgttttaccactgataattcttgttctgtcgagtttgactcttctggtcttactgtgaaggactcgacaactcggcgcccctcctccgatgtgatagcaccgaccccctctacacccttcggctcccgcatgccacctcctctttgtcctcgtcgcctgacactgctgctgtttttgccgccaccacatcttctactacctggcatcgtcgccttggacaccccggacgtgatgccttgctgcagcttac

SEQ ID NO: 49304 - DNA, 386 bp, Zea Mays
caacacaaaggtgaacacatctgatctttaggctagggttggttttgagacttagagaaatttttgatggctctattgtgctctccacttggttaactgatttggggtttttgttgggcctttttgtaatatcttccttaatacatttggtagattttctaatatacttcatctttggtaaaggtttcctttcatgatttggtcatttgcccactctttcccctttaatcccatgtttagggtttaatggcttaagaggggaattagggttttggaatctttttcatgagtgagaatgtatgaaggctagggtttccttcttgttatgatcaatacttagcttaatcatgattctaagcttttagtgccttcactttctaatctag

SEQ ID NO: 49305 - DNA, 925 bp, Zea Mays
gtaagggcaggagagtcgtgagtgaatgccgctggaggcaaagaatgtggtgagggcattattaacaaactcagtgccattatcagcctgtatagtcttgatagggaggctgaactgtgtgtggacataagcgcaaaaattaatgatgtgagtggctacctcggacttgcagactagagggaaagtccagcaaaagtgagtgaagtcatcgaggatgactaggtagtactgcgcaccagagacactggcaacgggagaggtccaaacatcacagtgaataagctcaaatggtagagatgaaactgaactggaatttccgaagggcagccgcacgtgcttgccaagttgacatgaatgacatagagtatgagcggacttattacatgagatggaattattttgtctaagcaaatttagggcagcagctcctggatgaccaagacgatggtgctagaggttggtggaggtggcgaggttggcttggggcgtggcagggacggtgtagaggccgtcggagctattagagcggagaatcacgcgtctggtctgcagatccttgacagaaaaaccaaacgcgtcaaattcgatagtgcaattgttgccacgagtaaattggcgaaatgaaagtaagttgcgcactagagatgggacaactagaacattgcaaagcgaaaaggatgaagtgctaccaggcaatgtggaggtgccggagcaagacacaggaaggtgatgaccgttgccaacagtgatggatgggacagaggagggttgatgggagagaagtataccatccgtgttgtgcatgtgggaggtggcaccagagtccatgacccagccggagttctggagcgccatctggttcagggcggcgatgaggctggcctgatcccacaccgggtaaggaggtggcggtgcggcgaagtgg

SEQ ID NO: 49306 - DNA, 653 bp, Zea Mays
cgtggtcgaaatcctttgctatgttaaacaccggtgagtggtccctaaccaattcacaagaagctctacgttgtattgcactggggggcataaggaatggttcaccgggcgctaggatggacggtcgccggtgctacgccactgcggtccgcgcgtgcccggcagatgggtagtccagggaaggagatgatgtctatgtcgttggattcgtatccaacggataagattagatggcagggtcacgaccgtagatctgggtatgggcggtggtgatctagtgctaagtcgatgggaaacatggtccgctgatcttgtgattgacgacccaaattagataggaaggtaacgcttcgtcgttttaaatccggaacgtttaatccgtcgcggagggatgggatccaagcacgtagcaaggtcatctggaccgtcgatctatatttctgcggctagggatgctcaccgtttcattaaggtttagatctaatcctaggcgtagaatcagatccaacggctgtggtcgcttgatacccctttgaccgcttattttgcgatagagaccctgggatatggatatatcaacccgccgtccacagtagcagtaacctgagtctgctggatttttgcgatactaacctcggactttttagtatttg

SEQ ID NO: 49307 - DNA, 1307 bp, Zea Mays
ttccaactccgaagcgtccttatcactgagttcaccaccaccaaggtgcttcacaaaaatatgagctcatctatttcgtcaccagtagtttgagtaggctcagctgcgtctgttccaatagtaagatttggctctttcatccctccttctaccttctcagccctaaggatccaccacctttagtgttcttcactttgtcctattcctcgaaggatgatgaatcccagaaagcagcacctccaagacccagaattcgcatgctctctacttcttcttcagataaaatttccttgcacttcgaagatcggtcaccttcgtcagtacccttcatggttggcataaatcgagttagtattggtcccaatggactgagagtggagaacagtaacagttgcgtcattacctcgagaatccgtgtacaacccatagatgaagtagttgtggcactccctttccctgctcttgtgcagcgatagtcttcttcgtagaagttcttgctttcttcttctctatacctaaagacggttcttcgtcaccctcggactcatcctcatccactgtatcatcatcgacaatttttttcaatgctttgctagcacccttagtaactcttttacttttctccccagcttcggtgttaattgcgggatcttcatagtgtgggcactcaaactcgatggtatttgtaaccctgttaagccaaagttttccccagctcccaaagatagatgacatgtctatgtgctccatagttaggtaatttctgcagatttcattgtacttctcttctatcaatccaagccacccagccgaaggagctttgtacgacgactgctctttaaagtcaaaagctagtgtgacaagtccttcgtccttcgacttcacttcctttgggagtttccacctagcttgagtcagataaatgttgtaagcaagtgcttcttgaattaaatctctagatccaatccttttaacgactacattgaaggctctgtagcactcatcgataattgcattcagttcacacttcggtcgttttagaccaaagctaatcttcaaaggactcatcaacatacccttgaagttttcatgttgttcaaaatcaactttggcatagaaccactccttcgtctagtccccatgccacttggttcggtatgcaagaaccgaaccagctgtgtccctacgatacatgaagttatatcacccaaaattgttatggatgcctatccgacccttggcctttgtttgataatgcaaatcgtgcactttgcagaatgtatcagcatcaatgcagtttccctggc

SEQ ID NO: 49308 - DNA, 507 bp, Zea Mays
tcactcactactcactacataacatatgatgtagagttgcagacttactagtatataaatgccaagtaggcaagtatagaactacagacttactattgacctaaagaagtagagcctcatccaattgaaaagcagcatcactagcagccctccacccgactcagattcttcttcctcatccacttctccttgagtttgtactggttgttcagctagatgatcactaccatcttcatcatcaggataactaccatcttcttctccaacatcttgagcattccttggacgcttcctagttcaaacataggtccttggatgaggctgagaagaagaagaggccccccctaaccagaccaacagtagccctaggtacattttggccccagagaccctatgttgcacccaatgcttcatcaacggcagtccaaagattaccactatcagattcctcatcaacccattcattttcccattgaaactcttcaagcaccagtgggttgcttttct

SEQ ID NO: 49309 - DNA, 275 bp, Zea Mays
gaagttgttatcagatggctattgatagtagtgaagcagatccactcgagattatcaaggttgtgtccgagttcccagatgtgttcccaaaggacttaccaggcatgccacccaaacgaaaagttgagtttgtcatagagcttcttcctggaaccgcccccatctttaagagagcttacaaggtatctggaccagagttggttgaactcaagaagcagatcgatgagctgtcagagaaaggttatataaggccaagcacctcaccttgggccgcc

SEQ ID NO: 49310 - DNA, 539 bp, Zea Mays
atcatcgtcgtcctccgcaggagagagcactactgcaccagcagctagggctggagtttgaggtgggggatgagcctccaatacgtccatgcgtataacaagttcagcaactcatcgatcaagatgctcataggatgtcgccgcagagtcctggtcttttttgaaagctccagtcattgcgcgcatcatctccttcaattatttcagctgagagacacactcatcatcgttaagcttagggcccttctccttgtctgtttggttctttggtcatgtcattgttagcacaaaacagagacaaaaaggtaacaaacaaatagtgtgaaccctacaatctcagggtgtggtggtggaacacaagttatgaaagcgtcttaccccgctcttacaaggttcttaccagcactataggtggcaaacaatgttcgatgtgattgcaaaggagtacctgttctgctcgggagataagtggagctttgggaaggctcactaatatatatttgtggcacacaacttagtaacagatatcaatgatgaat

SEQ ID NO: 49311 - DNA, 347 bp, Zea Mays
gaacaatattggacgacatcaagcactacatcaataccttttgcaggcatcaatgactttgagtcgaggacgactcgaaaccaatcaggggagaatcatgagtacatggatgtcaactatatggtcaaggcccaatcaatcagagtcccaagctcaaggggagttgaagtccagtttattcgtgaatctggtttggattgcaggagtgagtctcacgaaaatggatgcccaggctacatatggaattcgtttttgacgttctagataccattggaaagctaagaagataaactttccaaccaacttgtcccatgtcaaaatatgctcagagcagatggaaatcgtca

SEQ ID NO: 49312 - DNA, 1022 bp, Zea Mays
cttctcttcccaacctgctacatccactccataccctccctcatgtcggaccacaaccttctgcttttacaaggggagataatgctcaaaacaaacaactccttctgcttcaagaacttctgggcacacattgatggattcaaagaaggggtccatttgtcctggaataagccgttaccctctgttcagcaaccactcttgcgcctgcacatcaaactagcatggacggccaaggccatcaaggctttgagaagagtgaaagtaggagacacgaaacttcagctggccatagtcaagggagtgattcttcacttagaaactgcttaggaagtgcgcactctctctattgccgaattgaacctcctcagaagattgaaagctaaatccttgggagtgacactcatcgagaaatcacaaatcagacaaaggtcccgcttgactgtcgtccgccttggggacgccaacacaagatttttccatctccgagcaagctctacggcaaggaagaacttcattcaagccttacaaactgagactggcttgttcgtcacacaggaagaaaaggagaaggtgatcactgaccagttcaagcagcatttgggcacaacggtccctaaagaaaggacattcgattgaaattcgctaggctaccaccacattgatctttcctccctagaagctcctttctcccaagaagaaatcaaagagactatcctctcaatgcctcgcgacaaggcgccaggcccagacggattcataggtaccttttacagggcatgctgggacatcattaaggacgatttaacatcagcgtttaatcagctccacaacctaaatgagtaatgcttcaaactactgaatgcagacaatattgttctcatccccaaaaatggacactttgagggtgagcgacttccgccccatcagcctcatacacagtgttgccaaaattttctccaaattgttggccaacaggcttgtgcccacctagacggtcttgtctcaaagtgtcaaagtcttgg

SEQ ID NO: 49313 - DNA, 567 bp, Zea Mays
ggggaacaagccgatggggtgggttgacatctccagagggtgaaatccacagaaggttgtcagcacgtgcatggctgtggactctatagtgtcatcggcccagaaaccgaaagactccgagtccagcgaatgccatcctagctgcaggaaataaggctctagagtcatcctcaccctacagggaggtacctggtgctcctcaaacagctgcacctcgtactggggaggtgtagtgtaacctgctacctgcagtacttcccacaagatgaggggaaaaccctctcgcgtgagaccgtccatgtgggaaagtgtgtcccctccattagtgggtatgtgggaagtcatctctgcaagggcaagtgtaagcgaaaaagaaagagaaccaaaaataaaaggtgctagtgcaaaagactagaaaattttctgaggatttagattttctagggttaagttgagatctccattataaattttaaaattttattacgggtgactccttgtttatgtaacttcttattaataatgacattttacccagaggatgggaaaatgatgcatgcatgctcg

SEQ ID NO: 49314 - DNA, 599 bp, Zea Mays
tgacctacagtgtacgaaacaagtgggttacaaatttgaaggacacagtaggaatagagggcaataataaggaaacgcttcgaacctggtcgtcttcacttttaccactttgcttcagccttaaaactttgtcataagcagcacaaaacttggaggtttcccgttggatgtcaccccacctgtgttccaatgaatgttgtgttcttgagttaggtgctttcgtgtgttcattgtagtactcacttatgcgacgccaatacgacttccatgattgattagttccaatagccggatctttggagatgtttaggtaggccgacacaaggacctcatcctcagcctgactgtagtttgcaagtcttcttgttactgtcttcttaacaattctgtttcgttgagttggaggagtagtattgttttcagatgcctgcaagttcacgtcaatgttgcaagcgttctggaaggttgcatcatcatcaaattgagttaaatcaattccttcggtgtaaacaaaaggttggtggccatgagaaggttctccctcagtatactggtccattttacgactgcgttaaaacaaacagcaaacatataccaat

SEQ ID NO: 49315 - DNA, 490 bp, Zea Mays
tgagagagaggatgtgaagggcataatccaatgccccttccgttcacacttcggcattaggaggccttcgatcgcaagtggaaacgaagtacaagcatgtttgatggccttcaacacagtgtgcacttacatcggcaccagagatttggtttaggagcatattgcttataaggtatggcagcttgttaatgactgggagatgccgaaggaaaccactgctggctcaagcgaaggtggactggtttatctaaggtacacctatcgctacagaagtcaatttgacgaaccgaatgatgactggcttgaagctgttgaggtgatcagtgacaagctattgggggtttatacgaaggcagaggacgaagccatgaacactgccttcggcgctcaaggcaaaaggagactgaacagagtttttgatgtgattggattcatttatcccgattactgctttcccattcggaaacaaggagcgaagagggaaatcacg

SEQ ID NO: 49316 - DNA, 466 bp, Zea Mays
acggaatccattgaacccaatggatacactgtttatagataaaatcgataaaacgacgtcatgatcctcagagaagggggtatgagaatgatcagaaatgagagatttaggttaatcaacatccgatacttgagaacgggttatagcagataaccaaataaaagggcagaatcattaaaggatccgaagatttggatgacaaggccacaacatgattcacaaggaaaaagattaccagattcggacaaggataagtaggaaaacaagatctgctaggatgagtagcagaaatgctatgaagattcgggacaggatctatggaaagaaacatggccttgatagagtttgtgcaactagacatcaaacaacacattttttcttagacacaacaagtgcataaggagacttgggttggtttagcggtcaagctatgggggtctacaaaatgtgcaggtgtaacttcaag

SEQ ID NO: 49317 - DNA, 777 bp, Zea Mays
ggagagtgggtcaatagagagggtgtctgcggcggtgttttacggaacgattgggtgttctaggttttgggctttggtaaagttcaattggccgacaccatgggcaacatgaggctaaaggcaaactaaaacaagtggcaattgggtagatactgacccgaggagggctgcccacgaaggggtccttcacggtagcgctaagaacggtgaggatgagacaatggcttaacggagtccctcggcgaaattgggtggtttgcgcaagcactcgggtgcgtgatgcagtgaggaagcagcgctcgagctcaatttatagagggatggccggtggtggacgggattcaaaacatctcccaatgcgctggcgagctcacctgcgcgggcagggccacggcgagcgtccgctgaactccttttagccagattgtgccacctcacggttacatgcgccacatcacggaggatttttaccacggccgcaagtctgagcctcagccgcggtggcgttcttatccccgatgaggtttactgaaccacggtgaacagtgtgcctgctagcccgaattcaaatgaatattgctccccattttttgtggttgctcgcaaacgaatctgtatcaaagttgtaccttgatcaatgttctttcattttgatataatgaccatgtcgaaaatcctcacggattgaccaggccagggtgctcaagtcggtgcaataacactgaaccatgaccataatcagatgcagtgagcacataattatcaagccgactgaca

SEQ ID NO: 49318 - DNA, 363 bp, Zea Mays
cacccaaccccacctaattagcgcggcggcgccagagcgagcgtggtggtgccatgatcggcaaatgtcccccctggtgctcgtattgtacgattagtagcgctaaaccacgcggggaaacatggcgaaacagacaggggtgatcataccgatggactcggcgcaggtgatgtcgcccatggtagcccgcggatccgcgacagcacgtttactccgtcgagcgattggtgaaacactggcgaactcccacgatcacgacaaccacggtcgccctccccgggatttggcgaaggtctccaactgattgcgaagagtcttcaggagtagatagcccgtgacccatggcggtggcgcacactctcc

SEQ ID NO: 49319 - DNA, 763 bp, Zea Mays
gcggggacttgaacttccgggggattccttccatcaagctgagcttccagggctatgatccttgcatgtgcatcctccagctccaagtgtaccctagagaggtccagggtagcactatctaggtcggtgttaagacctgccaccacaccagctaaggtggtgaggcgatcttcatttgctccacctggaacaatgctggtctggttctctccatgaatacgtagaggaagatgcctgtacttcatattgtgcagcagctgctggtaggtgtggctgagagaccacagagttcacctagcaacgtcgctgatcgaagcagcgtaggtggatagcggcgtcagagactcatgtgctgacagagtcctgaaccctctatcacctgcatccattaccctgacatgaatgcgagtgatgtagtagcaagccagaggaggctcgtacactctcctagtctcgtacaggggtcggacgtaggttcccaacgcgtgcagaacatcctgcagcaggttagggaagtgccttgtcttgaacattgaggcataatgttcagtgacaggccataaccccacgtagtggtcctgctgttcttcgttggcttcatcgttgaggttttcctcatcttcttcttcctcgtcgtcttcatcatcatcaccagaatcgtttggatcgtcgcctccaggagtaggggcttggattgctggtgctgggaatgctgaagctgatgatccaactgcgaaggctagtgattctgccaacagggtga

SEQ ID NO: 49320 - DNA, 676 bp, Zea Mays
gcaattaacactcctcctctagtcccctatgtgggactagaaacaaaattgttgaaaccagaccaaagaatagacagaatgtcaaagtccgagatagaacacaatttggtctcctggagacaaacaatggaaggcttgatatcaaggaccagagttttaactgaatccctcttggtacgatcatttaggcccctcacattccaaataagaaaacaactattctccattggaaacaaatcagatcgcccccacctgaggaaccttccaaccaaacagagctaccaaagcagcaatatgtgcactcgaaagcccggaatcaaataattttgcataattgttggcatcttcgagagaaatattctccatgtcatcacaaaaacccagacgcctacacacttgcgcagccacattggaactcaactccggaggaaatttggccaccctcctacttctccttggtcgaaaatcacttagcatggcctttttccttcttttggtccttcggtggggaggggtggtaacaagccatcagaaggcttagtgaccacaaacttgaacgcatccaaaggtggaatcatttccaccacggattgtagaaaaaggtcttcttggacaatctgagcctgagataatcttcttctggaataaactttaaacacggtggcttagatttcca

SEQ ID NO: 49321 - DNA, 425 bp, Zea Mays
tggcaggtcatgtgcatgtatcaaaggatggctaatgtcagacgatgggtcctatgggtgtgctactaacgctccctagccgaagctgtgttcaggtccaggtcccagtcaaggctgcctcctgggggccgttgccaactcttttaggtatgctggtatccagcctcgacacgtcaagcctatatcctaggggggccaggtaccagggaggagtcggcagcgccacacacaacaaggacaatagtatgcagataagtgctaatactgctcaataaatagtactcaaaaggtaccttacaaaaacaaagttattacatccgccttcaagcgggaccctagccttgtgtctacaggtatgacctactcgacatcagtagggtcgcgctggaagcgcgcggccaccatctccacggcgtacaacgtct

SEQ ID NO: 49322 - DNA, 532 bp, Zea Mays
cgaggactccaagatacgcaccggacgacactccagagtcagatcctgctgcacaacaattggttccatctcgatctgatggtccggatcccgcaagaacatcctcaacatagagacatgaaataccgggtgtacccctaccatggaatccggcaattgcaagcgataagccaagctgcccacccgagccaagatagtgaacggtctaatgtatctcgggctaagctttccgaagacaccgaaccgaacaactattttagtaggtgataatctgagaaggacttgatcacccactgcaaattccaagtcccgcctcctcacatcagcgtaacttttctaacggttctgagcagccaaaatattctggcgaacttcccgaaccttctctgatgtctgctgatcccaatcaggactaaccagagatctctctcccaaagtctcccagcacagaggggagatacaccgcctgccatataaggcatcaaatggtgccatcttgatgctagcctggtagctgttgttataagcgaac

SEQ ID NO: 49323 - DNA, 443 bp, Zea Mays
ataaattctattccgataattggatgaagggcggtcgtgagatggccgatgaagctataaagaagagtgaaaaagaatcgcacgatacccgagtggaggcaaaggaagctgaagaagctgttgaacgcacattgattataggtatccttttaaaagctttttgcctcgttatttgtttatagcttcgaaaattcatcattatgctttttattaatatcggcctttcgccaccaccggagccatacaatcctaaggcggatccaattatgaaagaggctttagatgtgatgaaaattgctaacgaggttgttgacgaagtcatcgacaaacttttgcatgaagccaccgaaagaatactgaaggtagactagattcctgtttactagaaaatgtaatatttgtgtatgagtcagacatcaaatatttatatgtatattaatgta

SEQ ID NO: 49324 - DNA, 271 bp, Zea Mays
aatactagagggcctgtctgaagatactggtgacagtgatgattatgatgctgaaagcgggggagaggattctgaggatcgaccgtggaggtcgagtcatacaatttttgggaaatcaacgattaaacagagtcatcttgacaatatgagaggaaggtactttcgggatatatctattgttagagctggtggagacaacaacgtccctgcccccgaggaagacgaagttgtgatttaccgaagtttcttcaaagctgggcttcggtttcca

SEQ ID NO: 49325 - DNA, 432 bp, Zea Mays
ccgggcctgacgtttcggcatcacaggcctagtaaagctatgaaaagttaagttttgtgggagtatatgtggaaagaattctattgttgatgacctcggccaccctagcaaaagcgatcatacactagctagtaatatatcacactaaggtaaatgacatgtgcagtgatgtcatttcctaatcccctcttccgagcatggtctatccaaattgaatcccagattttttgtaatgaggaaaaacactctcaaagctatagtgcctcttcccccttttcgtcttgttcgatttgtaattaaggctttattctgttaatctgttccacatgggaattgagtgcgattgaatcccatgcaagtcaaaatctctcttatccccttccatgtcctaatatcccgtcaaacgaaccttgcatgaaggatcaaacctaa

SEQ ID NO: 49326 - DNA, 544 bp, Zea Mays
gccgcttgggttgctggggcaacagaggacatcatgacggtgtacccgcccattgtcctagggtagaacgcactacaatggcttcgacatctacatcgacattgcattgacgactggggagatttcagcagtcggtttgtcgcaaacctccagtcgctctctgacaaaccggcgcaaccgtgggatctcaaatccatcaagcgctagaacgatgaaactctccactcattcctcaggagatttcaaacaatgaggaacaatatcccgaggtcgctgaggcagccatgacttctaccgagggtccaacgatctagtttttcattcgagctatacttcaaaaagcacctgccacctctgaacaactattcagggaggcgaacatctacatcaccacggatgagcgggctcaagacctcattggaggcacgaagtctgtacctccagtgcctcaaaaggacacgaaccagcaatcaaacaaacgctggaagaagaggccccgggtggaagtggacaccaccgggccacctgcagctcgagcccatgg

SEQ ID NO: 49327 - DNA, 499 bp, Zea Mays
ttaaacaagtttctgcaattaattttgtactaaaaatcattttctaaattaatttctctgttttattaactgtctgaactgcatgcgtgaattgcagaggattcggggctgttgcgcgagaagtcccaagactcagggtatcccgcgcagaactgcaggttgaatctttaatttctcagggactcttatgctaatgcacacggttgaagcgttacccacagatctcggccgtccgattctggttcaaccgtgcagattagatcagcccacggtgaactgaggtgcaactaggttcattgatcccgagatcgacgccccacgactacacgcgtcagggccatgaactatgtgatctacggtcacaatcgatcgctgaaccggtacatcatcctgaccacacgatcagaaacctacgacacaggtctaatcacacccaaacgatctacacgcccgatcacagtcgtcggttccccgatctacggacgatacgtggtcttcc

SEQ ID NO: 49328 - DNA, 472 bp, Zea Mays
agatcacatatgatttagtgagtgaatgattctagtgtgttatgggcatatgatttagtcatcttgggcgaatgttatggacatgtgagaccacttggatctaatatagggcccctaacacatatattatggacccctctttgaaattatttcttttgttttcttgttgagtgatctgaagtttgatcctatcacctctaggaatacgtgctttgatggtggcactatgttgttgaccatctcagctttgggctctttccttctactagcctagctatgctcttatatgtggcaatgttgaggctaattttatggcattgaatcatactatagtgtgattggcagttgagggttgtaagtttcccactattgtgactgttgttgcacatttgggtttgaggacaaaggatgtgagttatgtccatgatgctgaatgtatggtgttgcatagttggctaggcattaagatgat

SEQ ID NO: 49329 - DNA, 528 bp, Zea Mays
tgattgcaatggcctagcagactttagatgtacaacctttactcgttggcaaatatcacacctagcaacataacgagcaatttctattttcatcttcgtccaccagaatcatgacttcaagtcttgatacattttattacttccaggatggatagaataccaggaagtatgagatccatccagtatctgttgccttaacttcgagagttttagggctactagccggttcttaaaccaaagaacacctttgtcgtcaagccgaaaacacatagtgtaatccactgtcatatgctctttaatatgggctatccccgcatcagtcttttgggcttccataatttgattaactatgtttgattccaactgcagattggctagtagggctggttggaatatactcagattcagtcgtttccatttcttgacatattatggtttcgaatagactagctgacaaatgacatgaatgctacttgcgactgagcgcatccgcaaccacatttgccttcctcggatgataatgtactt

SEQ ID NO: 49330 - DNA, 505 bp, Zea Mays
tttatatgggtgaataagagtgaagtgtgtgcttggtttgaatttaggcgaagaaaatgaaattcgggcactcggctcggaaacgatcgctcgaaacgaggaatttggtgaaattaaagcctggaatattggattgacgtgaaatttggcgaatatgttactggaggtattgtgaaggtgcatgaaaaatttggggtcaatcagagcatttttggctagtttggacatttcaccgaacacgtgacgtgcgaagttctagggttttggagaaatggctattagaggctgtgaaaccctccctaaggagctagaaacctgcagggatacacaatgggcacagagcaacatttctcaccacatgaattcacagaattggataggaaattgagttgggcacaaaggggtggaaagggtgttcactgtccagagaaatggagagagagagggaagatagtggagggaggtgctcaccagagaagaggaggcagaggagcctacgcaggag

SEQ ID NO: 49331 - DNA, 711 bp, Zea Mays
gtcggtgagcttgattcttgatcacgtaactttgagtattgaactttgaagattctattaagacttccatgtgacctacatgttagttaaggatatttttatggcatgaaagaaaatgtaagaaaattgctatgcatgaaggagacttttttgtggtatgaggtaagaattgaatctgtgctcactctcgctatgcagcccgaactagggtcggacttaccagttgccttgtgtatgtaagggcttagaagtaacccatgagtcagacaaggcatgtagcaccaaactagggtcggacttcatcgcccgagccgatttcctcgtgtaagtaagggcttagaagccacccatgagccagatgaggcatgtagcatcgaactggggtcaaacatcgacgccggagcaaattgcctcgtgtaactaagggcttagaagtcacccaagagtcagatgaggaatgtagcatcgaactagggtcgaacttcatcgcttgagttgattgcctcgtgtaagtaagggcttagaagtcacccaggagtaagacgaggcatgtagcactgaactggggtcaaacttcaccgcccgaaccgattgccccgtgtaagtaagggcttagaagtcacccataagtcaaacgaggcatgtagcaccgaactgaggtcggacttcgccacccaagccgattgcctcgtggggtagggtatggtgtgc

SEQ ID NO: 49332 - DNA, 494 bp, Zea Mays
acttagacaaattttctttgatggaccttttataatattttttcttgaaatgcagaaaaaggaataaagggtgggaaaagtggtagtcgaggtacctattcacgaagaaagtccactggccaacttgcaactagagtcaaggctggagccaaaggtgatgccttagaagggtaagaggatggctaacatcctgaaagtgatccttaaactcgtaaaaatagggggaccatcgagacaaaggttgctcttccttctctgacaaaagatagtgtgctcggtgccgagagtgcaaaaaatggactggcagaaaagtacatgataccccgaaggacaaccctgctctggagaaaatctctgcttctagggtttacaaaatttctgatgccctcaaggaaaagtaaaatggacaggaagaagcaaaagatcccaaagaggaggttgtggtggcagtcgaagaggaaccagctgggccacatgaatatatcatatgtcat

SEQ ID NO: 49333 - DNA, 814 bp, Zea Mays
catgaatctgctttccacactacgtcttagttcttagtacatatttatgggggatcatgttcacgtgatcttgagggtcccacatcggctcccaacaattttccgtcggtcgacccaccttgggtccgctaaaaggcgttcgtcgctttctcgaaaggtgtaggcctttaggcatccgtctccataaatggacgagttcctcttgcaaaattttccctctcttgtcttctgcgctcgacaatggatcaaggtaggtcgtcgagggatgggctcctcttagtgggggaatctttcgaaaatcgtccttgggggctatggtacatgcatttttcctttggtttattccactaggttttcctattttcctcagcacttcgaccctatttaggcatgagcattcctttttccagggtgcgaggggagcttagtctttcacttaggccaattaatcctttggtccactcgaagtcatcggtggaggacctctaaagggactttgttgtagcccactcagctgttagcactgccaacatcgaggtccagtgtctatggacgcgtctggtggccctcaatgactcaggagctggtaactcaagtggcttggtttctcaatttctggcctgctttcggtgtggtaatgagagcccgcgatttttctgtgtttttagagctagaacatgaagctctaacccttcgattatgcatggactaggccatagggttcctccgtgcctagggtagaaatcacgatttacgtctttctgacatcacagttcacgtttgtgaggctgtggtgtttagggttcatcgcagc

SEQ ID NO: 49334 - DNA, 808 bp, Zea Mays
gataagatcgatgctgatgtgattgcggcgggcttcgctgccacccggagcgacgaggagctagataatattgaagaacagtctgccctcacatctagtcgatcgtgagtcgggtcgatgtgaagttcttcctaatgagccttagagtctggagccatccgtcggtacctaaactacgctattttagtgttttgcaataaactctcgtatgataagaccagatagatggacattttgcttttggtgtaatgtcatttctgagttgggcaccctgtttttgcctttttcttaagtcctagactttatgatcggtcgtcttgaatttatcgtagctgcgaacgatggggacttctggggcgtggatatgtcccagaatggatcggggtgcttaggaagcattaggaagcgcctggtaaagctttgtgcattttgcggagtggtgcctgttccaagcccccgagtagaatgtggcgacttggtcagccaggcgacttggtcgtcaagttctattttgctcgagtgcgaaaacagaaaaaagatagaaattgttacttaggggtagtacttacttaggttctcgacgttccatgtgttggttaggagattgtcatccctatccttaactggtaagcccttgggcacagaacctaggcgattatgaaatttccctcccacggtggggagagcttgtgcttgtccttggtagtcataacccttctcaacacaggtaaccgacattgaacaacctgccatgaacttgtcgatcatggtagtgtcgcaagtcttgctggtacttggcagagcagat

SEQ ID NO: 49335 - DNA, 351 bp, Zea Mays
agagaccgaggtcaccgagacaacaccaatttctgaagtcatgaaacaatcaggtctagttgtgactgacgaaggtacccatgttaccgaagctgaacagactgttgctgaagaagaagatattgaagaggatgaagaagattatagtattttgatcccatcaaaactcagtcatctagattttgagaaatctaatgtgtctgaagctgacatgcccatgatgataaagctgggctactttggggaagctaaaaggaaacttgtccgatttgccggagaagagaccaccccagcaccgaagaatgatgaagtagtggttttcaagagctttttcaaagcaggactgcgact

SEQ ID NO: 49336 - DNA, 471 bp, Zea Mays
ctttatttagtttatgaattcctatgactcgtgggcggcgggtattaaaaacaaaaagattagggttctctctagtaatttctagacctatttgtagtagtcttctcctagggttggatgacgggtttattcttcagttttctaggggctcttatgcaaactcactcggccacaacagtggaggtcaagactgatcgctggatctcgagccgagggctcagattcatccagccgaaccggtatgggggtccttctaatcctgaacgtccatctaacaggtgatggctagatctttaatgtgcgagggcggggtacgtacgttatggtcttggccgcccattcgagattgccgacccatatcctgtttgatcccaatctaatcctcacctcccccactagatcctatggcacacacacccccttcatcctccagttgaccgcgcatagcggcgccaccctggaccgcggcgg

SEQ ID NO: 49337 - DNA, 534 bp, Zea Mays
gttcaatcaatcgctttgacagtaacaacactggctgcaaatcaccattcaggcttgtttggtttagtttttttctgacgagtttttccgagaatctgtctgtgaggagaatctgagtattgtggaggttacacccggagtaagataaaagagtccataaggtttaggatctagtaggtgaccgatttcttctatcgcgacgactcgaccgattgtgttttcatgtcgattttggacgattttcactaaagcgattttcggagaaacaggctaaaaagctgcgcatttggtagtccgcaacagcttctgatggccagaatcaggaaaaatgctgaaacaaacaggcccgaaacggacaggaagcgagatatcgacttcttcggtgtaggtgcaataatgtatggtgacatggtgctgggagtatgttgaacatgacatgtattgtgcgggaagaattcaaatccataacacttataaaaagatggatctaagcaatacttctactgagatatattctctaaatttcaagatata

SEQ ID NO: 49338 - DNA, 457 bp, Zea Mays
aataaaactgaagcaggtatggagttaataagaaacataccatacaccacgtcggcatcctcaggaactgattccgctgtcacgtgattaacccttcctctattctggttctgcagagttttgttctatgcagatccacgagtaggggtgttctggttaattctttgactgctgttcttctgaggtgtctgttggttgcgccttgggcagttgttagcatagtggccaagttcgccgcacttgaaacaaccattgggttggactggtgcattgttgttgcttttggcctgtgtgtttacgacgcttccttgacgagtctgcaaattttcactagacctttagttggtctgagagccgttcctctactggttctgagtttaattgcttctctgaccttgttgtccagagcgttgcatttgatagttgtttccaccctgatttccagagcgaaactgag

SEQ ID NO: 49339 - DNA, 573 bp, Zea Mays
atcccagtcacttcaagaacaactgtccccagctgaagccatcaggacctgcttactccaactcggtgaatggccccaagaatacctcagcatccgcccccaaggcgccctcctccatcagccagcagaacaagaccctgtatcaaggaagggctcgagtaaatcacatcgatgctcaggaggctcagcaagctccaggagtagtgctcggtgagttcctcgttgaatttactcccgctactgtactttttgattcaggagcatcccattctttcatagccactagttttgtggaaaagcatggcattccctctacccctctagagattcccttggtcacccgaaccccagggtcagaccttctttgtcagctcaaatgctcccaagtcagaatccttttaagtggggtagtgttcttggtagacttaaccgtcttgcaatcccaagggattgatgtaatcttaggaatggattggttaaccaagcataaaggtatcatcagttgtgcaaacaagacagtccttctcacagaccaccagggaaagtcagtctcttgtcaggctcagccacccc

SEQ ID NO: 49340 - DNA, 606 bp, Zea Mays
caaggaaggcggcgctgagggtcctgcggcggcgggtacttctgcgcaggttgaaagaatatagtaggagtggtttgtcttcactttgtacatgatacttaagatcggttgctacacaggtttcgacgtctgggcctacgcaaacaaactttgatgataacgagaatgatgaatcgttagtgtgtcaaagtgtagtattcttagtagctagtgacgcatttgcggaatctgatgttgggtcatgctctttggaggttgaggggttggtgagcccgtttgctggaatggacgacgactcttcgaaagattatttagattattttatggtgctagatttatttgtagcggagtctccatcgagggtcgcccccctacggtggcgaggacttcggtcggggttgccctaggcgaaccgcgggatcgaaaaagattcgagtgtcaaaacaaagtgtgggaaaggtacgagagtcttctcaaggtattggagtctcccgaatacatcgctgaatgggaatggagaggtctcgtctctgaagtggaccacggttggagcaagggacccgtcgtaccatactggcgccgacgaccggatcatgtttcggagag

SEQ ID NO: 49341 - DNA, 730 bp, Zea Mays
tggtgccataataatgtagcagtaaaagttgcctctagaaaggtgttgtcagtctgtgtgggttccaaaaaccttgtttagtgttaacataccaactttagagtcttgctgtgttaaatccatacggttgcgacctatgttctctagagtaaagttgtagatcgtacattagtgaacgattttggttaaggaatatcaggttgttgccatatgaaataatgaaataaaaaggcataaacaggaggagttcaggtggatggtagggtgcaaattcagtttggacaggtccaaactctgaaaaatatttttccctccctgctgtattccactcgaatggtctaggttggggataaggaaggaaatgacttgggagcttttagtattgagccaatagtgtttctcattatgaatattaaggactccatagttatccctggtgggaacctttatttgtttctctcggtcaaaaagttattcctttcaacgtgtccacaggttcatgcgtggagctccatggtatgtgcacgcagctgcctgtatcagcagccggccggagacatgtcgagtagtcgggataaagaaactaaataggaccggggcctgaggccagcgcagcaccccaaagcccctcgtgtgtccatcaacctgtactgcatatgcgcagtaaaaaggatcgctcttcctgctcttgctgtcaaagttaaatgggtcacacctcacatcttttgtc

SEQ ID NO: 49342 - DNA, 328 bp, Zea Mays
atgattgccatgcatgttacatgctacgacgggccatgtggcttagtttgttgattattaggactacacatatggacaaaacggactcagtactagagccgttattacgactgtacgatggccaccggttctgtacttttattgccgttgcaattcaaatcaaatatttcgcagcgcttcaacgtcctccaatactatagtagttgtggatgtcctcttgccatgatgatgacttgacggcccatgtgtggtttggacatattattagtgtactagatgcgtaagtttgaaccgaatgatactctaaagcatgttatagtcgagatca

SEQ ID NO: 49343 - DNA, 669 bp, Zea Mays
tgtcttttggtatatgtcctgctacacttaaaacaagctgaaagatagctgattagttaatgttttaatgacctttggctaaagagggtctccaacagtagcccctcacggtattagttcgtttttcataacgagctcagaccgtgaaacaaacgacgacctcgtgtcgaaggtccgaaaacaccttcatttagctcattaacgaaaatgaattaatgaaagtatgccttcgtaaaaacctaccaagaaggacccacttgcagcgacaagccattttttaaaattttgggctcccatgtattttgtcagtattatgtataaagatgggttgagatctgcgtgcttcgaacacgacattcatttgcttttgccatcctgccattgctatttactcaaactccaatgcttattttggagaattcgctcgctttgcaactttgtttccaagtttcgggatttgtcaaatgactgaagaggggaagaatgatgagcttgctcttgttgcgtattatgatgctgcgaagagggccaagattaccgaagaaatcatggtcggtctatcagatgactctgacgacaacaaggattttgattttgatgaggatgccgaagatcggcccgcgaagccgagcaacgttatttttggcaagttgaccatgaaaagggggc

SEQ ID NO: 49344 - DNA, 409 bp, Zea Mays
cttccaatattttattagtcctttcagtctgtccatcagtctgagggtgataggttgcaccaaatttcaacttcgtatccatattctcataaaaacttttccaaaatctgggggtaaactgtgatcctctatccaaaatgatcttcttcggtacaccgtgtagagacacaatccaagccatatataactcagccaattgagatcacttacaagtagtcttgaccggaatgaaatgagccactttagtcaatctatccataatcacccatatagcatcatatcctttcaaggtgcgagaccatccagcaatgaagtccataccaatctcttcccatttccactcgggcatctttaatgggtgcaataatccagctggtctctgatgttcagccttgactctttgacatat

SEQ ID NO: 49345 - DNA, 942 bp, Zea Mays
tagatttaggttcataagaagttaattttagtaataaagttattatacattcattccaatttgcatggatattaaatgcatacgtgcaatgaagtcatgatatataataaagggcaccaaaagttttttctacgagtgtgttttctttattttaatatagaggaaaatttgatcaaaatatagaaaaagaatataacggtaggatttataaaaatagaatagtgaaaaagattgaagcgtattaaggatatgtaatttcttatagtttgatcatttcaagtacttctttgtaaacaatattttttagttttagttccacatgatccatccggattttctatcaatatttttaatccctttctatctttgactcttgatattgcaacatataattgtccatgtgtgaatactggtttctttaaataaacaccaacattggataaactttgtccttggcttttatttatagtcattgaataacatacctttattggaaattgtcgtctacataatgtgaaaggccaatgagaaccgtgtgttgttaaattaattctaggtatatatgttttctctccagtatgtgttcctgtaattataatagcctcaataacattttgtcctagttttgttactattagtcttgtgccattacataaaccaaggctttggttcagatttcttaaaagcattatcggtacaccctctttgagttttaggttatgagttggaaagttatttgcatttaagctattgagatattctattggataaagtacatcaacatcattacatgtatctgtgtaattcgatatgctatcagcactaaaatattcgatttgcaaactcggtattaagctaattatataatcatttatttgatcaactatttcatttgttgttgcaagaatagctctgtctttaagatattctggattgttgtat

SEQ ID NO: 49346 - DNA, 768 bp, Zea Mays
gaccgacttaagccaaacttctgctttcttggacggtgctcgctccttgaactcctctctaaatgcacaactcgactccgagaagatggcacatgaggtaaactctcttggctgcttctgttttacttcccttgcttcaatgcttagtgttgttcttgcttgcaggaggaaaaacgagcactcgttgcttctcgtgataatctggacatgatgtattgtgatgccagcacctccttgaccattctggagaggagtcaccattttaccatgtcagatttggaccaccatcgtgacaaactgagggcatcctaggatgaagtatcccgactcggcaagctgctgttcactaaagattctgccatcaaggagctgcgtgcctccaagaagcttgtcacgcaggagctggaggccgcccgcctcactatcaaggccttggaggatgatcgcgtcgtcatgaaggcgatgtgcgacaaggccatggataaggctgttcgcgctgggtggatcctgatgaggagacccggtgtcgtggtgcctgaggacattgtcgctgatgtcgtggccgcgcctgatgccgcaagccgtccatcttcttcctctgctcctgcaaacgatgcttcctgcaagaatactccagcgcaatgatttgcctaaaaaacacttgttcattgagttagcaccttttagagaaaaagtgtaatgggagttatgtatgcgtgcaactgttatgtttgaactgattgttccgtcggtagcgtgctgaaaaac

SEQ ID NO: 49347 - DNA, 322 bp, Zea Mays
tcgaggtccccaaagccaaaatggcttttcgctacggtttgggtcaaatctgcgtgcactaacttcgtgttacaatggcccacactctacacacacgtgctcatgcagagtagatggatatggatcctatgaacaaataaaatgcaacttggacgattgtattcctacagggggggtaagtcatcagacgcctgcacaaatcacatatactatctctgcagcatgcagaccattgttgcattgtagctcgctcgcaagtcgcaacagagcagatcacacaaaaccttgctcaaatatttgttgtttttcaactaaaacatga

SEQ ID NO: 49348 - DNA, 662 bp, Zea Mays
tgctaggatatgcgccgcgaattgggtgacaaggtcttgcgaagcctgtagaaattttctccacgctcgggaaacccttcgcagttcacaaagctaatcgcccacatgtggcctctttagcgctggggcctggacattgtcgggccgctacccacggcccaagggaacctcaagttcaccttcgtcgtcgtcgagtatttcaccaagtggatcgagacaagagcagtatccacgataacgtcgaagactgcccagaaattcttctggcaaaacattgtttgccggttcggagtcccgtccgagctcacagttgacaatggcaaacaatttgacagccaagacttcagggacttctgcttctccattggcaccaagcttgccttcgcctcagtataccacccacaatccaacggcgtcgtggagcacgccaacgacaagattttcacgacgatcaagaaaatgctcctcgacgacaagaagggtaaatgggccgacctgctacctgaagcagtctgggcactgaacaagaccgaatgtcgggcgaccggattcactcctttttgcctgctatacggatcggaggccatgaccccgcaggaaatcaaacatgggtccccacggacaagtgcttcagtcgtccccgacgtagatgaaccaacttc

SEQ ID NO: 49349 - DNA, 868 bp, Zea Mays
atgaattctagacaaactagttagtccatgtgtttgtgttgactatcaaccaccaaaattaattataggaaaaggttaaccctatttccctttcaatcaccaaaacaactagaaatggcccaaggacgcatttctctttcaagtaacgtgccttctggccagatcggagttggaagttgaccgagccgacatacggttggttggcacgacccggggtcacccaacgactgaagaaatactgccacaacttccaccggggtcaatcccctagaacgcctcgcacagggtgataaagcacgccatgtgccagacatagttgggatggaggttttgaatctccattccgtagaaaaataacagacccggacgaagggatgcaggggaagcccgaactcacgctcatagaaaggcgcgagcaccaccaccttatcgtctcggggcagcgacacatcaccttccttctccaagctccaccgagagacctccttggggggaggaaccctttcctctctttcctctccaggctaaggaggcgactgtgttgggtcgaacaggcgtgtaagacgccattgccatgaagctactcggacggacgcaagaacgcgaaagctaaagcaaggagacagtggacacatgggcgacaaggcacgatgagcagaaccgactccaaacacctccatatcctttttgtacgtagaaacgacacgtgaagcaacacctagaggaggggccccacgtaccatataggaggatctgcctcgttgataactcccctacctcgggcgctgcgaggaagactatacgtaagtatgtcttgcaggattcgtgccgcttcggaagacacgtctgggaatacgtgggggaaaag

SEQ ID NO: 49350 - DNA, 714 bp, Zea Mays
aatgtaataattatacagacttcattgtacaacttgacctcattacttattttacataagcataacatctaaactatactaatctagtcttcatcatccttggttgcttcatttcctgctgcatgagaccgttcgtcagcaaggttcatggaaggagggggcctaaaaaggtccaactccccatcaggtccttcatttgctgtatccgatggtccggctcccattgcagcagcgtcggaaggcacgtccgggtgcagtcgagcatacagtacatgtacttcttcatgtaaagtattatagtacacttgcaggctgtcgagggtcgcactaagctctgccacatgagctcgagcttttgcttcgtggtcccaagcgatcgaacgcgagttgacggcccaatcaatggccgaatcccgttctaaaatctcatattgcaagcggctgacgtcagctgacaattcagctatacgctggttatcctgctcccatgccctattccggtgacgtagctctgatcgaagttgttccaccttggcttccatgtctccaattgggtcattactgccactactacttccttcatgtctgggggctagctgatggcgaggcacgccaaaaggtctagtagacttgcgtgctgttttccttgtatgcgccatgtctccataagaggggaagatttattagtatattcttaacatgatgcatgcatat

SEQ ID NO: 49351 - DNA, 401 bp, Zea Mays
gtttacccgtttatcccaatatgctattgaccaagtgaacactaacctaaagaaaaagaattgcttcatgaggggactcaacgaccggctccaacggaaaatggccacctgcctggatcttacttatagcagagctgtcagcacggcgctagtagtagaagccaagaacacaggcgaggaaattctaagggattttgaggtgacaggtctaatcagggacctgagaagcgaaccaggttggtaatccgaccttttaatcagaatcattcttcacctcgtccaccctcctatccgttcaaacagcctgttttcattcgtcctaccactgcccccacttttacaaatcagtcgagtgccccaggtgctcgtttccccgctctccctagttcttctactggctg

SEQ ID NO: 49352 - DNA, 1079 bp, Zea Mays
gtccttattatctcacaaattctatgccaacagtatcgcttgtggcagtgtctcctcttctccttcggatgttcagccacgtatcgcatggcaatggagactcacatcagtggcgactagcgagtcgaaggctagctatagtggtgtggaagagtctgagtgaaggaggcagagacaaggaaagagatggaaatttagaggttaaatatgaaggagaaagaagcgctcatggtggttgcatggttatcttatctagttattaggcgatacgtgggggaaaatagatctatgtcgcgatgatgacaatgggcgaattagagaccggcaggatggcctactcgatggggaagtatctgggtaagggaggcagagacgagaaaagagatggaatgttcgatattaatatataacgacaacaggaatgaggagattgaagcgctcgtggttggtgagacatgggaggagtagatctacaggcttcgagcgtgatgcacgacgctcgtgctttaaaggaaaggagtagagatataaagataaagatgtttggaccgcatgttagattagaaataagtgtaaggatgtttttgcaaaaggacgaaaatataaactagggaaactagtgatttattggagtagatatttttgctaaaatatgttgatgaaagaaactgatacactagcatctaaggattgtagtagcaaagctctcaattttgcttccgtttcaaaatccgcttgctaattttatctatttcaaactccactctataaacgacatggtctacaatgtaaaaacattgtttcgtatggttgtatgcacgatagcctaacaggattatcatcggattgactatcggtgccttgcggcgtgctacctttttccacgcctaatgcgagcccatcttccttggtttcaccttcgtgtacgttggcgagtggatcctctgcagttacgtcctacagatagatcatagactaacatgtaagttcggtttggttctagacccacatatcactgacaaacacaactggattcgcttacctacctatacgtgggctcgcgaccaaagggatccctc

SEQ ID NO: 49353 - DNA, 529 bp, Zea Mays
atcaaagccaaggactccattgttgtggatttaatcatcccggagttggacaaaatggctagtaacaacaatgtgcacattgggaagtcgtcgcatttttgatgggaacaattatgactattggaaaataagaatgtcaatgcatcttaaagctatgggaggaaagatttggcctattgttagagatggatttgttgtattgaaggaagatgaatagtcaccgagtgataatgaaaatgttctaaccagtgatcaagctatgaatgcattctatgatgcgttagacataaatgagttcaaccgcatcaaaaatctcacaaccgctcatgagatttggacaaagctaatggaaattcatgaaggaactacaattgtgaagagtgctaagttatatgtatgcaaaggaaagtttgagaaatttctcatgaaggaggatgaaagtgtgtccgacatgtttaactggttaaatgagatagtgaatgagctcaagggacttggttttaatgtaccggatgtggattgcactcac

SEQ ID NO: 49354 - DNA, 591 bp, Zea Mays
aggggcatacagacaacagggcggatctagaataaaattagagtaagagcatccttataagatcaaggattaaaatgtaaaagcagggtcatctaagttaaatagagaagagaactctatggtaaaaatctatattataccatgtgcatcatagaaatgagcagggcctagatccttactcaccatagtgtataggtccgcccctgcatacatacggacacgggacagaaattagtagccgaccacaccacacacggcgatagtacacgggagctggacagcagcattctgtaaaagcgcggttaatactgtacgtgggagtaggtaaccacgtctgaacgtgcagagaaaaagtttgaacatcaggttaatagccaggcctactgctactagcgacaaaaaaacgtactacatcgcggtcagttccaactgatcggcgaacaaaaaagccacacagatgcgtacggacggacacttcacgtaggcaactgaaggggcggacccagcccaacaaggtctaaatagagacctactattaactaacacatgttggaagaagagatattatagagttaatcatgtcaatatttt

SEQ ID NO: 49355 - DNA, 663 bp, Zea Mays
cattactacactcaaaggtaccaacttattacattaatttgctgaatgtaaaagagtttctcaaatatgtaaatgcagagcaacttcttaatagcttcgggtcttaactacccaaccccttgaggtcctcaatatatatgcttcgtctctgggaccatactgttgatagtatgtgtttcggatccctcccttatgtccctttgctgcaaatcttgcattgggaacctgggatgactggaaggctcttgctcatagggaggtggtccccggatgaaagaagcagatggtgaccatgcacttattactggattgtttgtggtgtttgaggccgaaggtaaacttagtcttggctccggtaactaaggttgtacatattgtgggatataagttgaacaatatgatgatgtactgaacacatcttttgattgggaggatgagtggatgacgaagcaagttccttctacttattgatagtatgatggcatgttcttctggtgtgacctttgtgctcaccataaaacaagcagaatgtttttgttggaggtgcattgaatctaccaccaaaacttcgccctccacttccgcctcttagagcgggaggacgaaatgtgttgtgtgaaggtggctgctaagagcttgcttgttgggagcttgcttgctatt

SEQ ID NO: 49356 - DNA, 498 bp, Zea Mays
ggaggggctctttataaaatttgccacgcgaaaggggtatccggtgatatgggtcgtcagatcgaccacggagcgccccgattagatcccgatttccccaaaccggtgtcacacagcagccatcggatcatagatccaaggtcacgatcgtaacacacgccagtcgttggattactgatcatcgaatgagattgatcggcccgaagcggtaccccaaaggaaatccgagccgtccatcagttgaccaacggctccagttttcttccccaatccacagtagaacacggcggcaccggtcaccaggggcggcggcgccatggccggcgatgagccatacggccaatcaagcccccaaactacacaccagacgcccctacgcgaagaggagaactaggcgaatcctatggttagcggcttacctccaatcgatggtcaaggcgagctggccacggtatgcggcggcaccacggcagggacggtgctccggcaagaaattgc

SEQ ID NO: 49357 - DNA, 421 bp, Zea Mays
attttgatggaaaatggaataccttaatgatatgttgatgaaatggtcttttgctaattgaatctactggttcggagctacatggtgcaacatcacattatttgaagtgggatactattattttttaccttagctactattaagccattgttatttttttggcatcattcaaaccagactagtagataaaaactgtactatcaatacggcttacttgattgctaggcaaacagttgattgcacctgtctatggctctggtaagcagcttgtcacacatatttttttccctcggaacatggatattttttattattatgtgcatgcaatgcaggatatgcaccctttgaaacctggtgagatggttgaccagctgaaacaaggacttggaaaggagggacatattttcacttatataacgtt

SEQ ID NO: 49358 - DNA, 935 bp, Zea Mays
catcccccagccacttgacgttggatacgttcggttggccaggtattcctgcaccaagtccctggtgttgatttgctcagccaccaccctgaattctactctggccagctggcatggtgaccctagttgcatgttgcataggggcctagtcattccgaagtttaaggacagcgggcacatgaccatcgtcattagtttccccctcttcttctcatcagccttaatataaaaccattcacctttctagccggttggccattttgtgtggtaactgagaactggagcctttgtatccttgcgatacgtaaaattgtagcaaccaaaattttcatgaagaccgtctgccctagccttcgtctggtagtgcaactcatgcactcagcagaaggcttcggcatctgggctcatcccttggcttcgaagggcccagatgaagacgctaagcctaacaatggcgttaggggtcagctgatgacgatatatttcgaaatttttcaagacttcccctatcatctcgtttagaggaaatcgcagtcctgctctgaagaagctcttgaaaaccactacttcatcactcttcggtgctggggtggtctcttctccggcaaatcggacaagtttgctttcagcttctccaaaatatcccagcttcattatcatgggcatgtcaacttcagacacaatagatttctcaaaatctagatggctgggttttgttgggataaaaatactataatcttcttcatcttcatcaatattttcttcttcagcaacggtctgttgagcttcggcaacaggagtaccttcgtcagtagttccctctgtcacaactagacctgattgtttcatgacttcggaaattggtgttgtctcagtgacctcggtttcttctccctcatgagacacccttgcagtcgaacgcactctggccattt

SEQ ID NO: 49359 - DNA, 611 bp, Zea Mays
gcagaggaggagtcgctcctgtgccaggtcgcggactgtccgcacctccgcaaagagcaccgtgagacggtcccttctagtgtttaacgcccggatcgacgtcaacacatagtgccagcttgtcacccgcaagttaatttatccggagttatattaatacataacaataaaaaaatagcgatatcgaatcataggaatgttatgctaaagtattagaccggtcatagtttgtcaaatgatggtagtagtcacgagtaggtcggtacaaaacttgaaatgcgcaatcccttatttaccagactatgctgcatatgcgtcgatctgagctcgaagtgcgcaaatccttaaccagattgcgcatcgaccttcgcatcccatatagacgcgagattgtcatgagatactaatgtatatactagctgacatgtgagtccacacgctcgtccgtacctacttgtcagtggcacaacatgagatagagtggccacgcactactagctagtcgaacttcctctcctaaacgacgttacatgcatgttgggttttcctgattggctaggtttgtgagcttgttgctgtgcgcgtgggagcatgtgtataacctctggccg

SEQ ID NO: 49360 - DNA, 814 bp, Zea Mays
aaaataatgaaattagcagctaggccaggtttgcttgttgtgttgatatggtcgcacttaaacaatgccagtatatatgatgagtgattgaatggttagttcattctagaatttattctagaatttaggtgctaaatttcttggtgatgcttttgaagcataaattcttttggagaatttattcgagaaggaaacatatatattcggagctccacactgtcgtattggatctagccaccggggtacgcgaggtatcttgcagaaatgaaggaaaaagaacgcagggaccaatccaaagtaatcgatggggcctaaagctgcgtggtaatccagagtgatcggaccacaccttcaacttgaaataaaacgagtagcgtttaagtcggacgaagaagccgccagcacactatacacacgcacagcttccaagacaaacaccacccaattccttcaaaagagcaacagcaacaccttcaattcattcatctcgctatccatccatcctcctccatggatcaggatccgccgggctccaaccaagatggagtagtaaacatgacgagggcaatgcaggctctgtccccttggctgaagcacccaaggaggacgatcgcccaggtggaaggtctggtgctagtggccgctgcgctgctgcttctccagctcttcttgggcttcttcaggcggcggtaccggtgtcgtaactccttcgtcaatactgtcctgggggcgtcttccaaactcatggaggctctcatcatctacacccttggtacgatgcagtcctccccgatcaagaactcgtcgtatcccg

SEQ ID NO: 49361 - DNA, 444 bp, Zea Mays
aatcaactccgctaccaggagccacagagctggccgaagcgccaacaacaaaagaattggaggaaccaaagactctgttaccagaaaccaaagagctggccgaagtgccatcaacagaaaagatggaagaagcaaaagcatcaactgagggagcaaaaatatcagaaattttaagtccttcagtagaaattgaagcatcaaaaattaagaaggggccaacagtgacccccaaaaggaaaagaatggttaatgtgttagatgttttggaaacaattaaactttcaagcacaaccccaaagaagactactaaaacttctgaggcgcttgctgaagtgtccgttgctgaagctccgaagcaacagactggagttgaaaccgggccttcagaaccaaccaaggtaataccttcggaagcagaagaagtaaaaattgcaaaggcaaccg

SEQ ID NO: 49362 - DNA, 457 bp, Zea Mays
gtctgaccaccaggtactaccgctcgtacctggctaccgcaaagcggaggatcggtgtgcaggtcaggatgttcagctatggctccatctccgccgacgacatgtacagccagatcctcgcgtgctcccagcaggagcacatactgccggagaccgaagacggtgatgaggacgaggtggtggccgcgacgaggaacggcgacaatgccgatggctccaactccacggccatcttggtggcgtctctgtacgcggactactacgagaggctgaggtcgaggtactacgaccacggggcgaagggcggcgagagggtggccgtgttccaaccgtcgcacgaggagcgccaggcgacggacaacatggcgcacaaccagagagcgctcgcggagatctacctgctcagcttctccgaggagcttctcacgtcggggaggtccacgttcgggtacgtgag

SEQ ID NO: 49363 - DNA, 301 bp, Zea Mays
ggggattttgctttacccttttgatgtccaaaccttaataaattttgttaagtaactagtgaactacaactttagtcaatgttccattttgtgattaagtgatttgattagtgttcttgttgatccctttttggtgctccatttgctcaagggtgggggcacttatggtttaatcacttctcccacttttatgagcatggtatggttaaggttgaccatttatgatgattagcacttatttaggtctctaatacaagagtgtggtgactttagcccaaggaaaaagacatgtgataatagg

SEQ ID NO: 49364 - DNA, 831 bp, Zea Mays
ctagactcttcggccagatcggctaaaatgtcttcaatgacttcgtcaaccgcagtagagtcctcaaccacaccaaccaaagcaccgctcgcaacgactgggatttctcatgccctcccaatagcatccgaagatgccacaatggccagctcgatactcgatttatccccttccattgctaatggaatgaacctggcaaagcatgaagattatgagaaagcagaaggctgaaaggagtttcggaggtagagaaagcaggagcagcaggtcagcaacaacagcaaatattgtacctcattgtcaggtcatcatctgacgcgagattcgaggaatcacattcattttttataatatgagctctaggaaggtgtttttcggacctatgtcgtgaggcctacttcgtttattccgtggtttgagctcgttataaaaaataaactaatatcgtgaggggctactgttgggagcctactcttgttgaaggtccccgaaacactaagatattgatcatctctaagtttatttcaggtgtcccaaagaaatgatagaaccacatgtcctatcaacgtgcacaaagatgaagctggaagcttcgatcttacgattcgaatacgaagctcttgatcggtcagatgaaggaggctttcggctagccaaatgaagggaaatcttaaatgcttgttcaataggtctataaggaaaaaagacggtgatgcccttagtggtttttgtagtttgtatgtataggaattgagggcatgattgtaattccatacaaagttgtatgccagatcatcactataaataaaggcaaagtgtcatgcatgagag

SEQ ID NO: 49365 - DNA, 357 bp, Zea Mays
tccacatggagctgacggttgagcttctctgcatcttctgctcgggcaatcatctgacggtggtgtcgagccaagaaatcatactgggcatccagggtgagcaggtatgcggtgaggtacacgactgtggggttgtcctcaagcagcttctgaccttccaatgcacgcatcctggccatccaaacgggacggtttctctgaaagggcggaaaggatctgagcggtgtgtcggccacttcatcttcataaatttgacacagggccctcaatgccttgcgggcgacgactttgcaggtgtctttgaatctatgcccagcagcagtgacactcgattccacatggtgcagactggatcca

SEQ ID NO: 49366 - DNA, 810 bp, Zea Mays
accaagttattttattcattacaccagttcattacaagcatacagttaccacaagtcgcactacacgcgagcgatttctaaggtacttccaaactccttttctaaggtgtccccaaattccttgagaaggtcatcaaggctagctagggacatatcctcgacgtcggacaaattctctatcctggagagaggtggagctggaggggctttcttcttccgctcagtctaacatccttggctcttggtcttcttttggattttcttcgtgggggcgagcttcttcagcttcttatcgtaatccatctttagggttcggtaggcttcacgagtgttggcctcttcgccttctgctatatcgagacactcttggagggacgccttctcctttttaagttccttgacctgctgctctaagctttccactcgggagtttaggtgggtgcagtgggaggaaaggtcatcgcagtggttatcgagagtgtggagatatccggccatgtagacgatggtggggtcatcctcggtaggatctcttcctgacagggcctgaagtcttttcctccaggtaggggtatttttattgctaggcgggaagtaacgaagggggtttcaaaaacctctttgctgtagttttggcatagctgtcggagggcttttcgggcaacattttggcaagtgtctgggaagtggtgtccagtgaaggtaacttggaaaggagggtggtttgggttgcttcggctttctcccaagtagactgccatagagcacttctcaattccgttttcgcggtattccttccagacatactcc

SEQ ID NO: 49367 - DNA, 524 bp, Zea Mays
atcatagtagaaaataaactgcatttcataaattcaaagcctaaaatatacccaacataaggatctatgcttaaggcactggtggctacattcacatgagttaacatcgtgcattactcaaagtcatggaccataatcagtgaaggtagatattcgtgaagtcatcccttgatcatcaaaagaagatgatcaacaaacagtcgcaaaatgctctccaaaaacctaatcgcctgcacacctgagcatgtatctccgacgtggataatggtttcaaggcttgatcttctaattctctatgtgtgtagaggattaggacaaagaaactcttgagacaactcaactgagaagagtggggtgttcatgtgtgtgtctcactttgtgactgcttgtgcgctagaaataggagataatggtaagagttttggccgatctgtttcctcctccattatttaatccacgtagaaaacaaacccactggtgcatcaatcacaaacttagaaacgaccatcacatgcctaatggcc

SEQ ID NO: 49368 - DNA, 600 bp, Zea Mays
tggcggaaagcgaacaaaaacatgaaaaacatttctttacctgaaaaagtgacaatggccgaatgtagacgctgacgacggaggaagccgcaagctcgcagtccctcgaaactgggcggaggtggacgtcgacgatggaggaagccatgggcttgctgtcgccctcgaaatggatgcgggagccatagtaagggacgaccagtgggtagagaagggaagcatatgaatctttttttacctggaaaagcggcgtcggagagtgcagcggaagccgcggagtctctgtcggcggcggcgtcccctacctctctggcaggttctggagtgttcactcggcggcgtcatcgtttcatttttttaataaatgtgaagggcaagcaaaatggtaaaggaagagtagcaccaggctgagcatgcgtcgtgatacgaaggagtagggaacacgtgtgcggcctagatttttttgttgacgtggatggaacggctggccagggaactgcatcggtttaatatgaagaaacatccgacggtccagatctcaacataacccttcgaccaggaaatcttcttaaagagcccctgagttttttaggaaaccaa

SEQ ID NO: 49369 - DNA, 513 bp, Zea Mays
gctaagtattcttccaagaggggtagaatcataaaaggacattggtgcacggaataatgagttgagtaacttagaaaataaggatcttgatgtcttgaccccaagaacaacaactgctaatgatctaaatagcaagaagaacaccgagaagattccaattgcaatgtacacagaagtcaacttaagagtactaacatcaggattctcgacattagtagccatccatgaattctgtgatatttggccacatacgaaaattatatgggaaataatacccagagaagcatagaagaagcctttattctgacgcaggtagagaatataaggcttgagaccagtatcacccatttctctttcttctgtcttaatcagttgatctgttggtgatggtttcaaagactctttgtatctgcttccatgaacatcaattgtcttcttgatcaatatttcattttctctatggggaggcaccctgttaagatctgaaacaccaatagtgtctttatgggcatt

SEQ ID NO: 49370 - DNA, 631 bp, Zea Mays
gaagtgtgctcttggtttgaatttaggcgaagaaaaagggattagggcactcggctcggaagcgatcgctcgaaacgggaaatttggtgaaatttaagcctggaatctcagattggcgtgaaatttggcaagtaggttactggaagtgttgtgaaggtgcctgaaaaatttgggttcaattggagcatttttggctggtttgggcattttaccgaacacgaggtgggcgagttattagggtttcggagaaatggccatatgaggagtgaaaaccctcccgaaggagctaagaacctgcagggatacacaatggggacaattgaacacattccaccaactggattcattggatttgacaagaatttgaagaatttggaagtgatgcaaaaggagaggataagggagcttctgctcaccagaacagagagggaggagaacagggctgctcaccgagagggagaggaggagcccaggcacacgatcgccggagcacggtggtcgcctgtggacggagaggggaggtcgccggtgggtgctgggaatcgccagagacagaggcggagacagagcgcgctggcagggaaaagatgcctctggctcggtcgggctggaggccttttttttaaaacgc

SEQ ID NO: 49371 - DNA, 624 bp, Zea Mays
gacccatgctggtccgcggtgaaaacagagctataatggccatcattagagcagaatccacggaattaaattatgacacggggggagataaatgggggcataattacgatgctacggttctctccaccagtgattagcagcagctggttcgtctcagcttacaccgttagagctgatttggtgatccaggatcccgggagaaatagagggggggattgagggggaaactggtcatgccattccgacatccaggttgcaatttgacgactcatgctggttcgcggtgaaaacatagctataatggccgtcattagagcggaatccacggaattaaattatgagacgggggagatgatagggcataattgcgatgctacggttctctccaccagtgattaacagcagctggttcgtcccagcttacaccgttagagctgatttagtgatcggggatcccgggagaattggaggggattgagagggaaactggccacgccattcagtcatccaggttgcaatttgacgacccatgctggttcgctgtgaaaacagagctataatggccgtcattagagcggaatccacggaattaaattatgacacgggggtacatgatgagggcat

SEQ ID NO: 49372 - DNA, 386 bp, Zea Mays
cgccaggagagagaggagatacgccaggagagaagagcgcaacaacagcagctgcaacaacaacttcaacaaaatagcagcaacagcaacaagtgccattgcctccaccaccaccaccagttccacctcgtgataagcaccgggagtttatgagccataagccacctacattcgctaactcacctgatccactggacgcgaatgactggctgaagtccgttgagaagatgctgaatattgcacaatgcactgactgggagaaggttttatatgcttctagacatctgacaggtcctgctgctgactggtgggattcttatactgctgcccacgatgctgctgatactattacttgggcagagttcagtacacaattcatgaactac

SEQ ID NO: 49373 - DNA, 923 bp, Zea Mays
cgtagaccgcagccctgaccttaaaagttccttagcaagaaaacacctcttacccccaagaaacattttctctcctttccccgatattaacagacccttcttttcttctaccagatggaaagctcttgggtcattaggacatcatactgctcagaggaggaaggctttcctcaccttctacggagttgcggactgcgcatggggatcagcaagaagcccaaatatgtctggaaggaataccgcgaaaatggaatagagaaatactctatggcagtctacctaggagaaagccgaagctacccaaaccacccccccttccaagtcaccttcatcgggcaccgcttcccagacacttgccaaagtgttgccggaaaggccctcaaacagctatgccaaaactacagcagagagatctttgaaaccccccttcgttatttcccacccaacaacaaaaatacccccacctggaggaaaagacttcaggctctgtcagggagagaccccaccgaggatgaccccaccattgtctacatggccggatacctccacaccctcgatacccactacgatgatctctcctcccactgcacccacctaaactcccgggtggaaagcctagagcagcaagtcaaagagcttaagaaggagaaggcatctctccaagagtgtctccacatagcggaaggcgaggaggccaacacccgtgaagcctatcgaaccttgaagatggactatgataagaagcttaagaagctcgcccccacaatgaaaatccggaagaaaaccacgagcaaaggatgccagacggaaaggaggaagaaagctcccccagcaccagcttccgccaggatagagaatttgtccgatatcgaggatatgtccctcgctagccttgatgaccttctcaaggaatttggggacac

SEQ ID NO: 49374 - DNA, 547 bp, Zea Mays
caccgcggcggaatccgataagcacgccggtgaccgccgccttcctgccttgcaccgcgtgtccaggcacttccaccgcatcgccgtgacctgctctcgctccccgttgatcgtcggagtgactgccacgacgtaggacacaaattcactgcgctagtgaactccccctcctccgaccgccgcacgtctttgttgcaattcccggccaccgctttcgatcagtataaattgagccccccgtaagctccacaaggtcatcacacacccagccacccagtatcaccctcaatcgttcgctgaggaactccaatttctaactttccccaaatcggttcgaatacaccgcaagaacacctcaccgcggccagcttgttccaggttagttcaagctcctcaatcatttgtcctagcatacttaagttatcctcaagctcctcgatccctttaattgaactatactgccatagatcatcgggaacgcgttgttcctttgattctccgcactgtcaccgtggacagaacagggtagaccaccattcatgaaatt

SEQ ID NO: 49375 - DNA, 727 bp, Zea Mays
aattcggaagaatagtcggcgttacatagtcagtggggagagtagcgatattccttctccagctttgtctgctctcgttggtctgcaggaattgtccatatcgaactttgatcaggctctcgaggatgtggttcttgaagatttgctgtccgagccaacagatggtggtatgatggacgtttgctctgacattccagatgtgggattagagttatcccgagcaacgtctcgtgcatcgtcgaccttggagtgcggtctttggagtcaagagcctggtcaaggttgttccattcccatggaggtgactgagaatccttcagccttagaggtggctgctgcagagaacccggtccccaaggatggtgcaagtggttacctagcccccgaggatgttgccggtaatgatccgactcgggtgggtaacgcgagctacaacctagcccccgagggtgctaccggtggtgatccggctccgatgggcagtgcgggctgcgacccagcccccgagggtgttcgagcgggctccccttctcataccttcatggatgtccacgtcgggtcttctcctccacattctgattgtatggcaacagcacctgatgctagagttctgattcctgctggtgatgttgagttgatccctgatgatgctcttcagattgactcagttgatattccttcatcgagccaccaactggcttctcatgatttggagcttccttcattc

SEQ ID NO: 49376 - DNA, 567 bp, Zea Mays
ggggatcccaggcatttgtgacggttcccaagcgaaccctagttcccgctcaccttcaccggcctcctcatcatcgtccttttctttgccagcccactatcgtgggtgcgagccatccttcagggcctactcacgccacttgatgacacgcttcccgagtttctagatcatgcagcactcggaggcactatgtttggtggtggggtggacagggcatgacctgttgtcgccaccctactgacatgggttcttgccccatgcgttctgaccaccaactaccgctgcagcgatcggagcgccggttgactgcttatcgctgtcgtgacccttgttcttcttcttgttgccactgctttgagtagcgccccctcgagccacccatttggggggccctagtccgaggatccgagtcccatgctcaaccctcggccaaactgacacatttgtcagctagagcaaaaagtgtggtgacgctttctacatcatgtgtcgccagcttttccagcatcttctcatcacgtaccccttgatggaaagcagtaataattgatgcattggaaatatgag

SEQ ID NO: 49377 - DNA, 558 bp, Zea Mays
cccacgttgacgaagctagcctttattttctccacgcagcctaatgatttttcaaagcatctttctttggatgcgcgaagttcttcaactgttttttctaaatggtttttccaatattcattaatatctcggttagcttctgcgagaccgcatttttctttggcttcggccaactgtttccgaaggtctttgatctcattcttttggatttcagcttgagccttgaaaccagcttcatcttctttcactttgtttactaatgaaatcaagattttgtcttttttaagaccttcgttccttagttcgattacctctgaacgaagattgttcagagccattgtatatccttcatcttcaatgttattctgtactctgagggcgttgctaagaattaagccctgcaagaggaggacataattaagtataaacaaataaaatatttcgttttcaaaatacaaaattagtttttatacctttatgctattttacgccaaacagtcagcaagctcatcctttgataatattgaaaggtcatcttctagcttcgggaatccgata

SEQ ID NO: 49378 - DNA, 308 bp, Zea Mays
cacatcctcatacttccatctttcttagagacgaaaaggactggtgctccccaaggggatgagctgggacgaatgtaccctttttgttgaagacctgcgatttggagcttcaattctgctaactcggtaggagccatacggtatggtctctttgcgattggtgtcgttccagaaatcagatctatgtagaattccacttctctttccggtagcattcctggtaactcttctgggaacacatccatgaattcttctaccactgatatgttctctgttgctagattgaacatcatcggatcattggcggg

SEQ ID NO: 49379 - DNA, 684 bp, Zea Mays
ctctaggaatcccaagacatgcagacctcttcattgggggtcttctgaagctcattcgggtcaacgccgaactctaggaatcccaagacatgcagacctcttcattgggggtcttctgaagctcattcgggtcaacgccaaactctaggaatcccaagacctgcgaccatgcacctagcactctagcacgagcctatgagcgcccgccgcagccaccatgccagccttggtgttgcgggtctccctgcctccccagcgcccatcattggtgctaacaaccccacaatgtgtaactattgcggctatggccgcgcctatgctgcctgcaccacttccaatggccgccctacctgctccctcgcaccagttctaccaccttacagtgatcggatgaccgagcattgtcgtcaagagctatgttacaactgtgatgaatcataaggtggggccaccagtaccaacatttgttctatcttgaagacaccaactacctgcttgacaaggtacccgatgacacaagcggtgaggtggtccttgaggacaggcccgatgccgcagtcgtctccatccacgccatccttggcatgcattgaggacaccatgcacctccacgcctacatccatgtcatcagctccttgccctcctagatggtggcttgacccacaacttcatcaatgtcgagg

SEQ ID NO: 49380 - DNA, 352 bp, Zea Mays
ccgggatgattttgcagtaaaagatcttggacaatttagctattttcttggcattgaggtccatcacacatctgatggtattgtgttgctacagcgcgaatatattcgtgatctattgagtcgcaccaacatgctttcttctaacggtgtgcccactcctatgcttcccactaaaaaattatctcttgatggtggtgaaaagctttcttcagatgatgcgactaaatatcaaagtgttgtgggtgccttgcaatatcttttattgactcgccctgacatctccttcagtgttaatcgggtttgccaatttatgtctgttccaactgatgttcattggggagctgtaaaacgg

SEQ ID NO: 49381 - DNA, 365 bp, Zea Mays
gatttatccaaccatatgtatgaagagaattaattcagaaccagaatcaagatgtgattgagactaaattctgagagcggcaactggccaaaacctgagcggcgctgcccccattcgggcaatcatatatgaatcggtctcatggatttgtaccgtttctcatggccatgtcgggccaggtctctgcgaatcaggcatgttttctcagcagtctttcaagaactccatccacggaccacggggggcatggccgcatgggggctgacaggcaaggacgagctgcttattcggatcatcgctgatcggatctagcctagacagcacgccagcgcactgactctctcttgaatgaacctacacaggtg

SEQ ID NO: 49382 - DNA, 515 bp, Zea Mays
caggcgaagaagaaaatgtcccaaaagcccaaccgatgcaatagatgcaagaaaaggcatctatgcccccacgaatgtcatagatcatgtaaataggcctcatagatagacatgtaatttcacacgaagttgtacctcgccattgtaaatataggcacagtgtcatgcataaggggaccttttttcggatgcaagagagttggaccgctctgccttcgaagctaccttcttctatcatcgtgctctcttttgtaaggtcagaggtattcatgtaattatttatggcatgaagaaaggaagaattagttgcttcgcctcgacacatcctttgtgatgacgctacgtgtcacctttgattcccactgcaaccgcaccaccgagttttgaggctcaaactcaacaaaaccactagctgagtggttttcaggctcaaccactgaaaccgccatgagtagcgcaccgcatgcgcatcccacatgtcctgcacacgtgtcccgccagtcctcgatcgcgtc

SEQ ID NO: 49383 - DNA, 476 bp, Zea Mays
cgccaccggcagccctgtaactgagcctgaggtcaccatcagatctcaagcgtccatccgggatttgacaacctaacttcaattaaacacgacctgatcctagacgttcaatagggatctgaccgcttggatccacccctctcccgcaccctacatctgtgcccgaccggtcagtccgcctcgtcccccaggccattgactcccctggcccacttgtcagtccgcgctcgcgctcgctcactcagatttgatcgtggtcgttcgtctgcgatcggatggatgagattaactcgtaccccttcgggtggtagttttgctaaagagaccctcgactttctgagaatcaacccaccgtccttgattttcgcgcgctggcccctgtatttttgtagaaagacccctaaccttttagtttatcgcagaattggacctagttttgtatttttagttccaaaacttgtttatttcatatcgtt

SEQ ID NO: 49384 - DNA, 425 bp, Zea Mays
ctgcgccctgcccctactcctcggcccacctttaacatccaacttctatcgatcaaggagatgatgtcaagtgagatcaactagctcccaccttgtcatcgttctaaattcacagagaaacttgctgcatatgactaggaggttgacaaggcatgcttagccataaaagacagccttaacaaaattgttgagaagcaatatgacatagcagacaactttatagagctaatcaatgaggtattacgtgctgagtctgataatttagaaaacgagacagatgagccacaacaatcgcaaaattcggatgattcagtaggtcagtcatataattatcacttttcatacatttagaacattacacagactacatgtgcatagggttttttatatgtatagtaaacatcattttgttatttttagtatat

SEQ ID NO: 49385 - DNA, 692 bp, Zea Mays
cacctttacaccgaagacggggaagacttcgggtgaggtgttggagttggttccttgcatgaaaaataagtggggtagttgtaccaactcttggctctatgtaaagtttgccaaagggggatgtggatctagcttagttcagtctctagtttgtttcaggtaatgcctcgtgaccccccgtcacgctactctggtcttctcttttatagaccaatggaggagaaagaattacatattggagtaatgtgcgcttcagtcagctatggaccaatagctcactttttcttatggtcgtggagttgtatgtagtgtcatgcctttagtcgtgacataatgtatggggtgttcacctataatgtaagacgtacatgtcattagggcaggtatgtcaaatcatatcagtgagcatcgaagtctatgtcattgggtacgtgtagtcgataacatgtgtaacaatatatattttataatgctttctagtacgctatgacatccatgcgtggctatagggctgttgcacatatcgaatagcggacttgcgtatgcatattgcctaaaccttgtcgacaatgcacttgtcagattgtaaggtcgcgcatcacatttaatatgatctaccaaagccttacctgaagtgataacatgaggctatatcaggagtagacttcgaatgtggcatcgtgcctttgggg

SEQ ID NO: 49386 - DNA, 501 bp, Zea Mays
aggcggtcaaatcacccaacgaccttgttgttgagcttgcgggggtcctctattctaggtgttgaacacaatcttgtaccttcgagcatgagcctgcgatggtgttgcaagagtctttctcttcttttagtctgatgtgctatgatacaatcctcttgagatatagcaaggttcaccaaatcattgtaagtctctgctctgacagtgtccagtcattcctttagcttagtgctgagcccatgttagaaacaatccctcttcttcacgtccgtgttagcatgatacccaacatattggcacatgttgttgaaagcgtgtgcatattgatggacaatacgatttccatgcattaaatccaagaattcatttaatttcctttccagcaatccttccggtatgtgatgaccccagaatgctatcttaaactcctcccaagttaccacatgatcggcgagcaatattgcgtggtagttgtcccaccataacctgactgacttgtgg

SEQ ID NO: 49387 - DNA, 658 bp, Zea Mays
gtacgtgcgggggacgtcggaacacatgaagtttatacatgtttgggtcgcgcaaatgcgtaataccctacgttttgtgtggtgctgagtattgaattgtctcgagttcactgattgcaggtggttcagggacggaagatgagttctcctatcaatctaatggtgagcgagagtcaaagagagtgttttttgtaggggtatctttgcagccttatatagccgactagagagttacccctatacaattcgttgggtttatctaaatctactttccattgctatgagtatgtttgcttttccgttgctcggttggcttctctgttttatcatcccagtgatcgggtacctggcctcgtgagaaacgtgtccttagaactgttaattcttctgcaacatacacacacgaatggtatattggtgcagtgttctttgggatctcctcttatcatgtgctctgttgcttcgtttgccttttattttgcccggacgaggcctattagtacgcccaactggacatcttattgggggcctcttcggcggcccatggagtgcatctatgagggaaattgtgttgagactccaggaatgagctctattacccggttttattttctagacgcaactttttttccatgctttggtccattggtgcacccaa

SEQ ID NO: 49388 - DNA, 764 bp, Zea Mays
gtcattgtgtcccatgacagacatgacaggaatgaagaatcctattccatcagagttggatgtttgtgattttgatgcatcttcatcgtcacacttctccttcaggccgagcgcactgtctgacaggtcaccctgcaaggtattagcaatattcccttttctcacttcagtttggttatctttatcctcccatatttctttgtctgctaactgaaactgcatcacctcattatcaaccccttctttagataccgcaaggtaatctttcacctcttcttcactggtttctctactggagtcgtgcacgcagaaggaagcagaagacgagtaggaggaagccacgaccttcgatagaagtgaaggcctagtactaatgctaatggctagagaagatcatgtatggagacatcatgtcccattagagtcataaagcgctctaggccttgtaggttgaagagacagggcggtaggaaagacaaaggtggtttcacctcttcttcactggtttctctactagcttagtcttcgaaggtctagccacaacgtaggcaggagaagcgcttgcagcagcagcttctcccaattcttcaattttgtcctcggaaaccttactggaagcaggagtagacaccttcgaaggtttcaggacagcgtccagaaaactggccattctcctccctatccaaggagttgcagctgaagcagttactacctttgataacccagtcattgttgtaggactctgcagcttcagtcgcccctcg

SEQ ID NO: 49389 - DNA, 596 bp, Zea Mays
ggtccttcctgaggttgatcccaatgggtgtgtccttcctgaggttgatcctaatgggtgtgaccgtgcaccggctgctatctatatatttgatgaagatgatgaagaagtcccgctgatccgtaagaacaaccggcattacagaggtagtgaggggggagtgatattccttctctagctctgtcatctcttgttagccttcagggactttcaatatcggattttgattaggcccttgaggaggtcgtccctgaggatatgctatcggagccaactactgatgacgtgatggctgtttattcagaaattctagatgtgggattggaggtatcccgagcagtgtctcgtgcatcgtcgactttggaaggcagtcttcaatgacaagacgttggttcgagttgctcgactcccatggaggtgataggggagccttcagccttagaggcagctgctgcagaaaacccagcccccgagggtggtgctggcagtgatctggctctggttggtagcacaagttgcaacccagcccctgagggtgttgccgatagtgatctggctctggtgggtagcgcaagctgccacccagcccccgaggg

SEQ ID NO: 49390 - DNA, 640 bp, Zea Mays
cttttctccctctccacttttctttagagttttgttttcaaattagaggttaaattctatgggtccatttatatattgttaatgacacatttattttattatccacaaatgcgcaatcaaataaaactcagcatgatgcatgatttatttaggtgtctttggttatttaatcctttttggatggtgtttattcacatgtggtagtaggtatagtcaatacacataaggacattatctcttcttatggtttacaattttgggtattacaaaaggcccgaaagcaccataactcatggggacgaccgccctgggccaagagtcaaagtgatggtgcaggctgccctcggggcaaggtatcttcagttaggaaaggccgcaagaacaacaaaataaactcctaaggatggcaagataagaaaagagacaagaggggacggtgcaagaggcttacaaactcaacgaagcatggctcagggtgcatcagaggagtctagggggtagaaagcaagggcgattgtgtaacacccctggttgtcataagatttcaaaacaaacatgtgtgatgatctgacttggtcaaggaggcccttgaccctagattagagtatctatccttaaggattagagacctatgaccttg

SEQ ID NO: 49391 - DNA, 591 bp, Zea Mays
tgtaacagaacatggttatcatggctctttagcccaacaagcttcttctccttcacatccacattgtttcttatatctgatgcataaccatcaggaaattttactcctttcagtacttcacaaaataatgtcttctcagacgcactcattgtatatgatgctggtggtaaatataacttgtcacccactggaataggatgaagctcagttcgaatgcctagggactgaagatccaaacgatatttcaagttatccttggacttccgttggatgccaaggagggtgttgacaatgttatcacacacattcttctcgatatgcatgacatctaaattatgtcataacaataaatccttccaatatggaagcctaaaaaatagacctccttttccaaatgatagtaggctccccttccttcttttttgctttatttttatgttggcaacctttcccatgcactgtgtgcatattctctgtttgcgataatactttctctccagaaagtggtctaggcactggcttgtcctaaactttacgatcaaatgaatctgtatcaaatctatatggatggtttgggtccaggaatctacg

SEQ ID NO: 49392 - DNA, 790 bp, Zea Mays
cagtaactgcttgcgccagctcgctagtccctggttataagaagcagctgcacgcggcgtgttgcattctttgtatcatgttcagctcaataagagtgctcatggtctccatggttgctagccaagttcgtcgtagtgacctgggctcgaatccctgcagccacacggctacctgcgacatgcagccactgctggtattaatcctctccccagcccaggttagcactgtcatgtgctgcgcgtgctaagtctggtgaccacgctcaccggttcctcacctcgttgtgaccaagacatcttagggagtgaccagttcgcatgacccgcgttctcctaaggtcagtgaaggttttcccgttggtaatttcagtctactatcttgtgttaactagaacagggccgcaccgccacagaccgtcactatagacagtctcaccatcgaccggttaaattgtgtcgttcttggccggtttcatgcaagcaccgtagtcgtggtaggtccctattgctccctgcgtcggagtttgaagctctaccatgcggtggccatagaattgagcccaccggactgagtttgccaccgccgccgtcagtagttatgtcttagcatccccactgtcgattgaaaacaggtctgagtccaccgttgcttggtggtcgcgatgttgccgtcgccgttgactaggtcacactgtcatggctggtctggtgccggtttactggggctgagcacggcaatgtcgtggatgggagtttgcaaaagagatgaaaccgaggggccttaatgctg

SEQ ID NO: 49393 - DNA, 1419 bp, Zea Mays
ccgagctttaaaattaaataaaagccagaatgaattggcatcctactagtcgcagtacagtacgagcacaaagattgaacttgatggaaggcagcctaggcatcaggcatgcatgtgactggcagagaggaagcagagcctgctacctaattactccttcattcatgcaagtgaagacccacaagacatgaattggttatttccgcagtattgcaatccatagatgagtgtggtatcgctagtactgtagtaccagatcgcacaatggctgaactgatgttgtgggttcaaagagagaccatgtgcatctggctgtgctgcagtcaaatctcaactctttctttctaggtcgctcgttctatgcatttaattttataacttaatttctactgcaagagattcctattagttgcatagattgagtttgacgtcatccaccacctcaagacccatgaatagaaggaaaacaaattactaagaagttatgttacaaattttgatatgttttcgtgggccttcagtggtggatgtgaggggtgaaaaggagcgtttgcatggggggtgtagagatcccccccacccagaactggtacggcaaaagctgttggagtaatctaggaaccctaaacaagagcagaattggattaagcagccatactttagaggcgatgcattttgaatgggtagtgaactgaaaaacaacaagaaaaatttaaaaaacccttctcatttcatttcatttcatgatgatagagtaaagaaaagccttggctaactgcattgtttgctggtacttggagatccatatggttcatggaagcctccatcatggattcatggaccagaggacccttcatctccacagtcactccctcctcaagatgttgtataagtagaacttctcatgaaaaaaaagaaaaaaaagtaataaccaacagggtggtctcctctgtctgtctgtctgtctgtctgtctgactgactgactaataaacaaacaaataaagagtcagaggctacagtgcatgaacatgggtggttctggttcatgtgatatgtgagtgatgagtcaattgactgctctgctagtcactgccagtgctaggcttaaagcttaaacggagctaataaaatttccttttgtgtaaaatgaaatgttcccttttgtcttattattgttagcaagtgaatagaatacgtagcacatgccttgcattcagtggccaatctttcttagtgtacatataagctatacaaattattgatcagtaacactagctagggaaaaattgatccacgatgtacgtttggttaagtcaactcattgaaacggttatgctgtccattaccatgcattaataggattactcctcacaatgaaccaaggacggaactgaaggaaagaaaaaggccacccatg

SEQ ID NO: 49394 - DNA, 3026 bp, Zea Mays
catgaatcccggatgatacgtgacaggcgttttacgcacgcataaaaatatgtagtaatgtgcataaatcatgtatagaaggaatcttttgtgccacgaatcacgggaacaaatattaccatgtgcacaccgtttacgactgcataacgctgtgtaacatgatagtataaaccatgcaacatttaaatctccaccgctttgagataaggaaagacgtgctccacgttcgcgtaaataaaggcacagttacgggaggaaacaaattctaatttacagccgctcgtccacgttcgtatctttgatattggcggcggttaacggcggcggaagggagagcaccgggtggcgattaacggcgagaaaatgtccagcatcggcgctggcgatgacatgcaacctgtagcgtctgtgcatagatcaacatgtacgtctatttcaatggacatgcatcctgtagcgtctgcgatcaccagttacacagagggtgtatctgttactccccccgcgacattgagggcaccttgacatattgatgagcacacaaaatcggtagacgtggtcggcgcagataagcacattcccatgagacatattggggcgcatgaacaggatacacctcatattcttcaaagccatgtaagttctcccaattatgatactattattttcttacatactttttttaatgttgtacctatattacgttagatttaatcgctattgaatcgtaaacgttaaatttttgtgcgcagccggacaatattgatataagattgatacctaaagtcggtatgacatttagtaacgtggacgaggcgtataatttttatagtcaatatgcatacgaggttggattttcgttgaagaaatatagggagcgtaagaattgtaaatggttgaattgttcaatggaaggaaagaatgctgaaagggtagctggaaatccaaggatacataacacatgttcaaaacatagcgttgaattgttcagattgtgaaacttataaagcatagaacattgtcgaatgtagcatacatatatgtgcaactatgcataacatggcgttgtttattgtataaactggtcagcctgtgaagcatgactgtacaaagagatgtttccagtataaaacggtgataattgtatcataaacttgagacaaaacaagcataaaacagtgataattgtattataaaagtatgggcaacaatgcataacacgacgttgtttactgcataaactggtcacacagtgaagtttatgactgtacagcggtgataattatatcataaacttgagagaaaacaagcataacacgagattgttgacaacataaaatttaaatgacactgcacatcatataaagtggagtttcatttgtaaatataaacgacactgcttctatccatataccatatataagacaaattaaattgataaaaaaaatatgataaacgcataaaaaaataccgaacaatgtacaaatggttcttgtccttggcgtatcttgcccttgtcagctcttgtcaatgcttgaataatattcctatcaaaatatttgatgcgtggtgttccacgtttattctgaggtgtagctgaatcatgaagatgatccaaataatacagctgcaaaagcataacatgaatcattgtgagacataacaaaatataatctaaatgtatatgaattttgcataaaaaaatatggctacatataaaagacaaaaagtgacatgcttacaagaatgatgatggaacatccgtaaattgttgtagaaacatttgtaacgctcctagtatgtcacttcttggcagtttggcataaatcattgaatattagctggtaccagtctatctcgtggaaacgatacatttcctcagttaaaagaacctcatggttagttattccccagctggcagtagggaacaacaacctattgcacagtatcaggaagaaggatctgctgcttagatcatcgtcaaaccctttccttaaacgatcttgaagagctgcaacactaaaatcttcttttgataaaccaagtttagcccttaaattgtttgcagcaacagcttcatcaatgcctaatgccgtttctccaccagcatttggtaaccccaaaataagttgcaccgtctcctttgtaattttgagctccttccctgggccggctcaaattgtcatgtcattatggtcaagcttttccatcagccaagctaaatgagatctactgccaagtgcgtcaactctcatatcaagaatactggagaaccccctccgtgcaatagcttggcgctgtctgtcatttaaaatctggatgcttactataacgtcttggggattgcatctcacattaagcctctgctgaaaaaatgtatacaatgaatagcgtaaacatttacatctgcataatcgcaacttaatgtttaaatcaaatctcaaaacaatataatttcacgcagaaaatgatatatcgccattgaccatcaattctaacctgtcgggggggggatccactactttcctccgctttgtaactatcttcttcaagacttatggaggactgtcatcaaagttacgcttcttcgataatggcataaagttatcgtcctcatcaccagcctgcattggtttgtgtctaacagttttcgccggaacacggggtatgtcgacactaaagcactcttgagtagactgaattataatccgctttggattagatggaggtcggtctacgttcttcatgtatgatgttcctgccaaatcaaacaacacatatacataaaaaacgtaatggagcaataaaaattctgctcatatgcaacatccaattaatgtataagctggctatttcgtgcgtactggccctaaatgtacggcgagatgtttatggcataacatgttgacgtatatatcataattttgtcaacaaaatagcataacacggtattgtttagtgcataaacgtgtgagacgttgaagagtataaatttgtgtatccatttaacaatgaatttatgctga

SEQ ID NO: 49395 - DNA, 594 bp, Zea Mays
tgaaaggttttgtgccatctatacttaaaccaaacctggagttccttgcattctctatgaagtcagagaattctttattgttttttctccactaggacccatcgatggggtgtctcaacatagcgtctaccttatggtactatttgtgccatcacaacaactttgcatggtctttgttgttcaagcatgttagtataagagcatactacatgacctcggtaggaactcccttactagtatttagcctcgacatcactaaggccatctcacctcatcttatattatgatgcaccacaaaccaagcatgcatccaaattctcgtacttctcactgtggtagaggatccaagcattaggacatgcatgcatttttggcatctctaattccaaaggacagacaacatgttttacttcatatgtagtggcacgtaatttgtcatccttcaaacatcttctttgtgattgtcagtaactccccaaattccttgtcacaccattatttgtcttgtgttgcatcacttctagtgtggtacccaactttttccgcccctcttcgcaatttgttatagcaatttcttgtgatcgtataacatgc

SEQ ID NO: 49396 - DNA, 542 bp, Zea Mays
atgtgtgagacttgatactagcacacatttgattcgcgcccgagtttgccccttaaattcgggtgtgacagccaacggataggctacgaagaaggagggtcggcgtagggatagatatagataaaatctagtaatgaagacgcccaaacttttatctccagcacggatgcgccctccctaggaaatctgagagatatggtagaagtcccacacgggaacaagaactgacacacgacaatatttagcaagggtaaatccttttttaccttatattacattcccttttgggagaagggctggccacacaaaatgggggggggggagaacgatagaacaacacaacaagagaagaatagaaacattcacacacacatgcatacaccatagagacttgggactcttccctctcccgcccgcttgtaaccccctactacgagcaatcaggtgcaggtagcgcgagccaccgaagaatagagtagggacatttcacccgaactagcataactcttgtgtccaccaagcacaccatccgggcctaaaac

SEQ ID NO: 49397 - DNA, 551 bp, Zea Mays
ccctatttccgaggcatcgttcccccgaagggacggatcttttttgagcggtttgtgtgggcacaccttccaagcgccgcttgggcttccttctcttgagcataaaatagaggggagggtgcatgtgtccagtttcgcttaccacaacctcgtgttcgggcatcttcttctccctctcccttgaagcttccctgcgcacttccgtgttcttcttccttcatcgttcatgctggcactggtcctatggattcctttcctacccgctccttgatccacagtcaactcgaagatctagagaggaaaggatttttgccccctaggtggtctctgggtggcgtcttgaggaaggaggcggcgccccaacatcgtgggacggtgaggtggtggttctcgcctccttctatgagtgcggcttcggatttccctagcatctgttcgttcacgggatcctattttactacgggctggaactgcaaaatctccaccccgaataccatcctccacatagcgtgcttcatcacacttggcgaggcctacctcggcatggcccc

SEQ ID NO: 49398 - DNA, 1144 bp, Zea Mays
caggtccccgccgctgctcaaccaggctgcgtcgcgaagggcctcctcgttctgatccactttcttcactttaaattgtgagaaggccacataacaatgcgagcacaaaatggccgggggcaagacagacaacccttcgacatcccccggtgccacaaaaaaccaaaagtcctaccagttgctccacacttattctttgcacaacgaacaatatcaatcacttcggcccaagtctttctggtcctcagcgtgaatgtacaggacccaaattgcgcaatcaaaccacctatcttcttctgccaatgtgagcaataattcttggcgaagacctcaacagacggctctccgccatacgacgacaccgcccaaacatacttcgccaatgccaccatagcgttcgacgtcaactgatgaatttgaatttcgaacttccacataacttcaactacgcgccggcaagcgaaggccaacagcgaaaaacgtctcgaacacaaccaactcccccttcggctctaggacatcttcagcgcccacccaactccatttccaaaacaacccagacgctgcatctcgagcatgcgacccgagtaaatcctcgatgtaccaaactccaccgtgtgctcgtgctgtagctccacaaccaccgttggatcactaatcgtcttttctgacgacgacgtgttcgaggacgcagtagttgtggacgacgacgaggaagaagacgacatgatcacgtatcgtttgcggcggcgagcagtttgcttgacgcgagccagatcaccgatggcgcgagagtgaaagagggcaaacaaccagagagcaaagaggttggggctttttccacgcgcagatgggtaaaaacccaacaactcaggcaaaactttttataggtaaggggaaaacgcctcgggaactcaacgacctcatagtaaaacgtcaacttttaacagtcatatttcaaaaaaaaccgcgaagccacttcgagcgagggcagcatttcggccatctctcgacagactttgacactagctcacttagtcgaactagcccctcggaggaaaagtgttgggccgaaggcgtaattcccccctcgctcaactgtttcacaacaggagtggaacatgtcggaggaaaaagcgagagc

SEQ ID NO: 49399 - DNA, 603 bp, Zea Mays
cagagttatctgtagtggcgcttactgaggcaaaggctcgggataatagtttatcgttcatcatgacttacagcgatgtggtacaatggcacatagcgtggcagactccggtaaactgcggtcacaccggcggtggtcgtgcggccatgttgctgtgcaagttggtacggtggaggttggctcaatcccgacccctactaatcttttcactcctgcggtgatatccgctactcactaagcacgaatcgcggcgtcgacgcgaatccaggcacggggatcaccggtggcaagtgcactgaacctggcatcaggttagccactctaccatcacgaacactcttcagtgcgcctgacagagcaaattgcacgacttggttctccaatttttatgtgacaacttactaattcgtctgtaacaaagttgatctcctacaaactagctttgatttcgttataaagaccttgatcgaattctcatcgaatcacacagaattcagcctccaaagttcatccgagctcactgtcactccaaccctaacacctagtctgacttacagccagactttgagtccatttttctccaatttttgtacaacacaaatg

SEQ ID NO: 49400 - DNA, 432 bp, Zea Mays
gaagagggtagtggttctatatatgtcatgtgtgattgcattggtgatgtgtaggattagtttggtatttctaccagcttgccgacatgttgtatcagtgttgttgtgccgattttggatatgtgatggagtcaatgccttgctctagtagtcattatcttctacttttagtgatcggttaaatgtcttgaattgatggtaacttttgccccgaatgtttaaaagatagtagcctgagtgagacgattttagttgaaattcaaggaatactatggtagaggatgtaaaaatgctttaggtatttaggtcgatgagaatacagttcagtcgaggagtgctttggtggatgtataggtctagtgtcgtcgaagtgatcctacgtatgcgatacaattgcgttcatgagtttgtagtggacacactgcatttgtg

SEQ ID NO: 49401 - DNA, 535 bp, Zea Mays
cggcattgtccggttgtgcgccacctgcgcacccaacctccgtgatctacgcggacctcaggaccaggtcggccatgctcgtcctcaccctaggctataaatctggccccgcgacctattctcctcaccccatcccagtaggaagcgccccgccagaaatagagagagggagaacggagaacctccaccgtcgaaccaggggaagtgtatcgccgccgtgggtggaaccgtggagtaccatcgctcgggctcttgggcagagaacttcgccgaaccccagtgatttgctcctggacatctcggatggggaaactaccttggctcgcccggatttcttgacggggttggtgccccgccgttgacccgctgtgctgtgtgggcaacatcgctactgccaccctatccaagtaagcccaaaccgtaatcagttcaatatgctccgtagaacgtgtattacctatcgacactgggaatcgtgctctagggcgttgggcgcatgctcaccggtgcggtgcccctgcgccgtcgctgggta

SEQ ID NO: 49402 - DNA, 583 bp, Zea Mays
cgagattctgcgagtgacgtgcttcaccctctttttaggcacaatgcccaagcgaaaggcagttaaagcatcgcgtcagttgatgacagaaggcagctaggtgggggaggtggagaggcaattgaaacattttccctgaagatcgtggggggctagtcgacgattaggtctcgctgccttacatcgccgcagtcgtgcacttcgactttcaacgagctgccagccatccgtcccgggacatggacgcgcgacctccatcttcgacccgccagaagggcgcccaacatcgccggccgaagcccatggagcagacctgtctccgctcttcttaggcagtaacacctccttgaaggaaggggcaggccgcacgtgaaccgccgcctcgacagaagaggccgccccatcttcttcccaatgttgggccttggaacgaccagccaggaagagcgatccatcatgataaggctgagaagacaaggggagggggaatccggtggcgagggggcaggaggggtggtcaccggtgccttgatggtcgccggtgaggtctcgtggtgggtgagcgcaccggtggggtggggag

SEQ ID NO: 49403 - DNA, 359 bp, Zea Mays
aagagcttagactcccacacatgttttagtaattgtgccactgacatcattcatggataagtggtaaacctcctcttccaaatgtttcgcttgttcaatttacttcagcgtttcatcaaataatggcatgggcaaatctttagtcgataatgcattcaactgcatttgtaacctcttcggacatttcccttgatggcccggctcaaacttctccccacaagtgaaataaaggccattttgcctatgatactctttaaccagacggtccttagacatctctcctattgttgtggttgccttgttgttagttctcggcaccccattacccaaccgattctgccccacaaatcttagaggct

SEQ ID NO: 49404 - DNA, 473 bp, Zea Mays
gaggaacagtttctttcggttcagcagctgaagaagcttccccgccaaactcaggtaccacgaccggttcaatataacgtggccggtgggtaaggactttcaattttttgctcttcggcgcaggctcatctggagtgtccgaagcagcagttttggccgaagcagcagttttcctcttttttcctcgtccttgcagcgggtagcagtagtcggggtaaacaaaaccaatcgcatcaaaaactctgttcaatctctttttccccggcacccaaaggatgtggataatgcattatcttctgctttacaatatgacccaagcagttcatcacttgtagcttcgatacatttcagccagtcgtcatttggttcatcaaatttatctccatatctgaacgtatatttcagtcgaaccaggtcaccttcgctagactcggtgacagtctcctttggcatctcccagttctctacaagcg

SEQ ID NO: 49405 - DNA, 477 bp, Zea Mays
ggtaccccatatagcaccaccattcgaaacatgtgtccattattggtgttaattaacacaagaactactaccttggactaattgtctaaggaaactacacaacctgacatcaagcatgaaccaacatgtaagaagctcaaaccaagtcatagatgcaatcaacactacgatttcacaacatcgaatttggatacagccatacatcagcatcaatgtcttaaaacgacactcttttatgaaggggtaatatgcactaagcacaacctttaccaacttcaacaattcattttaattcaatggtgaaacatccacaccagatgaatgtataagaagatcaaacacctcacctcacagcaccacgaaacaagtagttctattgaaacaaaactcctaatcttcctaaaccttgttcttgccataatgaaaagataatcatgtaatataacatactttgcaccccaccaaaagggagaaaat

SEQ ID NO: 49406 - DNA, 410 bp, Zea Mays
atgatctcaaggcatggatttagctagcaagcagtacaccgacctactcatacccacaatagggttccgggtccgtggcacccattcctgagacaacaacaccgtagagctcaaacgaagggaacagggagcaccagtaggtcatgtagtacacgatgcttgcgtgaaccagcttaggaccgacgggaatcggttggtcgacatatggacagttcgcagagttagtccatgatgtcgagatcgtgtttcgagctagctataatagtaatgaccaaatgtccactttggtgagcttcaccaacaaacatggacactagaacgctagatcagaggcgttgaaccataccgtgctcgcttgaccacgtgaggttgctatgtcggtgacatggtcaccaggcttgcgaaagcac

SEQ ID NO: 49407 - DNA, 365 bp, Zea Mays
gtaagcttgagaagatatttccatccggcttctacaatccaatgcagcatttgattattcatctcccctatgaggcacgaatgggggggcccatgcagggacgttggtgctatccaatcgagagatgtctaaacactatttgaaagaaatgtagaaataaatgctaaatcgaggcttccattgcagaggcatacattctagaggaggtgtcaaacttcacaacaacttactatggtgacaaactgccgagcgtgcataatccaccccctcgttacaatcatggcggcaatgaatcgaacctcagcatatttcgaggccaactcggaagcgcaagtggttcgaccaccaagaccctgacacatgaa

SEQ ID NO: 49408 - DNA, 380 bp, Zea Mays
ctcagatggtcaataccaggcggggtggtggaattgatttgcctcccaatcgacacactcggaggatatatagacaacctcagccacaacctgcagagatgaatcctcctaatcctccaccaggcggagttgacccactggttgctgctcagatggcggtgatgcagcaaatggcggacactatggctgatatgtgtgcccagatgcagcaagattgccaagagatgcgtcaggaaagagaagatatacgccaggagttgcgccaggagcgagatgagatacgccaagaaaggagggcacaacaacagcaacaacaacaacaacaacagcaacaagtgccactgcctccaccaccaccaccagttccgccccgtgataag

SEQ ID NO: 49409 - DNA, 925 bp, Zea Mays
ggatagcttgcagattagcttttttcttactgcatgaaatgctgaacctaggtggtcttgtaacttcctttcctagttactccctccattatcttttatgaggcacacacacatatcaaaattcaaactttaaaaactttgaccaataatttggttaataatttgtaactactataatacaaacttgcctctgactcggtggtttctttcccagttgatgcccattctctcccggttttagcggttgatgaggtggtagctcctggatctcctgactccactgctcaggacgtggactgggatccagttgacgcccattctctcccgttggtctcggttgatggggtggaggctcctggggttcttgttggcactgttactagtgagcctgttgttcagctggtgtctactgttctatctatgtcagctgcaccgcctggttctgggaatcaggtgactgaggtccttccggtcagagtgatgtgaatactcagtttggggtttctgtgcaaggaaatatttggactgttgaacctctgaacagattgtcttcggtttttctcagcaagatgattcatggttggaaggatgatactcccagcctcaaggtttattccaggagaaagaagcttgttctagagccagttcaggatgaggagagtgtgctttcatcacagctgcaagagttcaagaatgatgtaactaaaccgattaatagtttgctgccacctccttgaatcaccaataggaggaggactgtgcctgctaatttcattcccaggcgtagcaggagagtggccaagtttcctccagagctgggttctagttctgctgcccaggtctgtagacaattgggtttttgtgatgaaatggagaacatctctcttgatgatgccaacggatatgcaaggctattcgaaaatgg

SEQ ID NO: 49410 - DNA, 542 bp, Zea Mays
tgtatgacacttaactgaaacatttgtcgtcatcatccatgaaactttaggtcatggccagcacgccaggatgcagacctcgagtgtgtagtagcatgacatgaggatggggcactcgacagtgccaaattgaaaggatgagttgctcatgctgatcaactgtagatctcagtctcccagccagaacactggaggcacacgaaatgtgacacatggcagggccacggtagcgacagatgaggtggaagcattcaaaggcaaggcgggggaggacgaggtcctgcgcctaaacctgagcatttgtcgctacgtttgcgacggcgctgcgatgggatgagataggcatgatgagaagcttggaccccgggttgatttaaaaaacacaagggaatttttgcaaaagtgacgatgatggaaccttcgggactatgaaaactaatgatttatatagtagataaagatgtagaacagaagactggacatacttctattttttaacgatattcattgacctcgtttctcatcacagtgctgcaaatttc

SEQ ID NO: 49411 - DNA, 554 bp, Zea Mays
gctagatctagttggtgaatatgttgggaccaaatttcttggaatattggatagaagttatcatgttgaagccataaatttttgaatctaaagatgtttggtctaggcacattagttgcaatctctacaagccaagggacatggtctaaaatatatctggccagagtgtgagctctagttcctaagaattactgaaccacttatgtgaaatgaagcaccactccaatttttccaatagtggatgctgctgcatatttgactaggtaaaagcttgaccatgaagggggatttcttgcaaacctagctgattgatggaggcattgaattgaagcatgaactgaatattacctcccactttattgtgattctcagggctgcgaataagattgaaatcacctaaaaagatccatggttgatctggcaaaattataatattagagaaccattctaggaaatcctttttgccatttgacgtgcttgggccataggtataaataaggagccatgactgatttattaatttggtgcgaaaacaaattgtttgggcatacaca

SEQ ID NO: 49412 - DNA, 358 bp, Zea Mays
gctgctatacataacatgtccggtgccttatatatttctccaaacatgttgtagacctctctgagtgtcatatccagtgccccattcagtgtgacatctgatgcacacctgcgtgtttgatgtactatgtttctgtagccctttcttcaacacagtgctacttttattcaatgacttatccggtgcctcactggacacgttcggtgctgctgaatagcctgttttctttgtttcttcgtgtctcttcatatgagcttcttccatcttgtctcttaaactcttgcatgatctttgtaggtcttcaatgagtcttctattgtcttgcttgaggtgttgatcttctgatcatcacttttcc

SEQ ID NO: 49413 - DNA, 411 bp, Zea Mays
gatgtcttgtacctttatcatatcgaaactgcgtcacaacttcaatcatcttcatgataaaaggtgcatgaagacatcccttcaatggaaaacaggcagcatggatgatttcctgccagatcatatcaaagacattgatactctctgagctgctgggcttcatgaatgagagcaaaaccttactctctccaagaatattcatctaatttccccctttaggaatgagggtcatcctgctgagggagttgatgtatctataatacttgtgcatgttggtggactcccaatatttcccagactcagagagatgaagatctctggcttcatctctggtaggttggcagaaatcatggatcttgatcttatcaccagaaatatcattgttagtgaatccaagaatgtgagcaaacc

SEQ ID NO: 49414 - DNA, 318 bp, Zea Mays
tgactaccttgcactagaattgttccgaaaatatcttcaacttacaaatgcaaactcaacacatgacgaaaatttgctaaagatggttgcgaaaaaatagaaagtacaaataaatcggaggattctcttccaacaccacccactagattctctccgaacaccaatgcggtcaacttggatttgagaggaagagatgaagacgatccgtccatttctaatcaaagctttgaaagaagttggtttttgtctgtaggctgtagcgggagttgttgctagcttctaaaggcggccgatccagccgctttaaggctacgttcg

SEQ ID NO: 49415 - DNA, 447 bp, Zea Mays
acgagaaaccgagaatagagagcgggagagagtcattgctaggagggagtaggaaaccaccgagtgcccatgccacctggcgccgtatacaactcgtcccgatcagtgccgccggtgagtaaccgtaaatattgagtcgttattctttcctcgtcgcgatgcagttgtagaaagaaggaaggtagaagatggccacatctagatctcatatattatgtctatctaccacataattctttatgtgacaacgatttaaccaatcatatcacgtcatatcacctatttttgtgtagtcccactaatttattaaaaatatgataacttctgggtcaaataatttgtttccatttattcaaattacgttagattcatattaattttgcgtacgtagtaataacattgttttaatcataccacatgttttaattaattaattgtttaattaat

SEQ ID NO: 49416 - DNA, 752 bp, Zea Mays
tgacatcctgattttgagcatgattatctccagatttttcacaagaacatggcttgcactcttaagcaaaattgttctcctttgtttgctctacaactttgatgtggtgccctagggcaaaaaccttatactttgaaagttacaaagccccaaagttgagtccataacactgtttttcagacttagagtggaatctcaattggggtcctttttgcaaatgaatccaaaacttagggtttggcttgtaaatcttcccaaatgtgaaccatgggactttatatgctttaacattatagtttttacactttagtccaaatgtgcacagtttttgcacataggcccctagggtttggacttagggttttccaaggttccaatgggggtttttggtatctcaggggtataaatgtgattcaagtttattcttgggaacattttatgactattcccctaaagtttttttaggttttctcaatttgggttatgtcttacccctttaatccctatttagggttaagttcccatccagggtcctatttgcaaaatgctataacaatacaacttgtttgaaatttttacctagttaatgcactctaggtgtgtcaaacatatgcaatgccaatgtttatgatgccatgctcaagttttagttacagtaacaccaggggtgttacattatatctcaagggtagggcctttacagaggtggtctgttctctacaggtatgagggtcatccaccccttggtttga

SEQ ID NO: 49417 - DNA, 535 bp, Zea Mays
cccggtccgatcctgacagcaaacgcgctgccctcctcgtccacgaagccggcgcttctccaacttcacgcgcaggtcgtggtcgtccagaacatccgtgcacttgtcccggttgttcttgacatcgcttccgccttctacaccagatggcgtgattccttccttctcgggcaggtacacgctaaccgaccgcgtactcaccgagacatttgcgccctcctctcccgattgggcgctgatggattgcatcgtcaagtcatggatcgtcgacaccattaccaccgaacttgtcgataccatgctcatatgcgacgtccctgctcgcgacgcctggcttgccatcgagttccagtttctcggaaatcacgagacccgagctctcgtcctcgacgcggagtttcgcaactttcgctaaggcgaccactccatcaccgactactgctgcaagttcagagggatggctgatgccctcggtgatctcagtgagtcggtccttgaccgcactcttgttctcaacgtcattcgtggtctcaat

SEQ ID NO: 49418 - DNA, 476 bp, Zea Mays
ccgagccgatggctatcatgactgggcaagaatttgatgattaaacagagattcggaaacctgaaggtgcccgcccaaagcattcacaccgagtgaaccgcccgactgcacctgtcgaggagaagaagaagaggcgacttcggcgactatcttgcttggatcagggtgctggtccttctgcactaatccctgatgatatcccagcgaacgccattcccaaggttgatgccaaaggatgtgataatgcacaggctactggcggcatgtttgacgaggatgaagaggaggaagaagaagaaatcccgttgatccgcaagaacagccgtttctacagaggtagcgcggggggtagcgatattccctctccagctctgtcggcactcgtcagtcttcgggggctttcgatatcagattttgatcaagcactggaagaagtcattcctgaagacatattatcggagcctcctgaagatgat

SEQ ID NO: 49419 - DNA, 323 bp, Zea Mays
ctgtgatctagagtaattccttgttagaaactgtgatctagagtaattccttgttccattttgatttttatttccagcaataaaggcactgactactagtattttgtgcactgtagtattccttgagctattgatctgtcaacaataggaaattccttgagctgaatactagacgcaaagcacctgacctaacgaaagttaaatactcctaaatactagacacaaagcacctagactaagtccagaacactcttgttgcattcatacaatacagcatgcagaccagtgtggggtgctcttatgtctgttttatcctgttactt

SEQ ID NO: 49420 - DNA, 416 bp, Zea Mays
cagggaaacatccactacatcgatggttcaatcaggaatccgaaggcacttcttcaattgagatacatggaacacattatgcactgcagacaatgttttggtagttgaagtcgatatgccactggcccgcattgttcaagaatgggaaacaggccaatgtatcggggtgccaattttccttttaccccgaatcaattaacacccttcattggtgatactttcaggtatacatgatccttgacttgaaagaataaaggtcgacgtcgcttatccgcataattcctttgccgagcttgtgcctcttttaagttgtgtatgatccgttggacttcttcttccgtctctttaaccatgtcgggcctgaaaaaccacctttctttgggttctgaccaatttaagggtgtccggcaccgtcg

SEQ ID NO: 49421 - DNA, 672 bp, Zea Mays
gttttcttgaggtatcagagagtcggcactccccactactccacgttggagcacttgtgcaaggattttgtctccatcaatccgtcaggactaagcctcactacgaactgattctttgtcagctcgttgtggtgagttgcccataatcactcacattataggttggatatacacaagctccatcgagtgatcaccatattccagtcaccaccaagccacctaggtgatgttgatcaacaagagtaaaaagcataaactctcacttggcctaaaaaagtttaataaaaaatatggatgcattaatgaggtccttaatcttgcgattatcaaatcttaagcaccccattaggccagaactctctcttgctttctagtgtgtttcttcaactgaataaatgagtaatagaaactccaaagatgagatagaggggcatatatagcccgaaggcaaagtgttagttgttgtccctccactcaacattcacagcgtccggtgcaaccctgttgtcctcactagacacgtccaatgatattataactacttgtttcaaaactagcccttaatagtagagaacgtctggtggttaaggttcggtgcttatcggacatgtccggtgagtctagaaccatccacacgagagtcgctgcatatgaatagctcatattgtgtga

SEQ ID NO: 49422 - DNA, 447 bp, Zea Mays
caaggtccttaggacaaggacaactgtaggtaggcctaataccttaggaggttccgtcacatcaagcgagcggccaggcagtagatcaagcgaccagctctctagcaggcgtgtgtgtgctaggtgcagggctgcatcgctgcaggatgtgtaggcgtgctggtgacctggcgtgtagcacactggcacactgcacatcccctcaccaatcgcaatcgcaggtctctaggtttgattgtttgagaccgtcggcaccatgacttcaccctcactaccccagagctctagcagtgacacaggaaggtgagaactaagaacataaattattgtctgatccctatcaatatttactatggatctaaatgtacactctagtccttgtgtttgtttgtggtcttccatggaccatatcttcattgttgagtgactaacgctaacccaatccgg

SEQ ID NO: 49423 - DNA, 1301 bp, Zea Mays
ttgggcttgtgaaaagcacaactcctaaacgatcaggtttatggctgtcaaattttagtacaagcaagataatcatgttatctacaactcttctatatgacttttctacagaaaacatgatttggtttatcaaacaaacagcacaacgaaaacaatgcgtgcagcccaaaacagcaaccaataaattccagcttctatataattcaagaattgccgcattctagggacttgaatcattctagcactttaccatttcttagagttaaattaattaaatgaggactagcaagtagacttacaaattttatccaaatcatttagtgcactaaaattactacaaccaattaacaacgcattcttcacgataatcacccaacaatttgcgttttaaattagacatcacatgagcactactaatttttacccgcgattataaccatgcgcaattgggctacaacatcccaaacgggtgcgagaactctagtttctagttttaaccccatgattattccattaattattttaactacttaatcggcatcgaccgacttaaccttcatctcgacggtccgagcaccacaattcacgaaagtctacctagacatctagcatcacatggagagcctactacttcacattgcaattcatgagaaccgcaaggtgacaataataacacagaggtaatcgacctttctctacgaccttcagttaggtcaccaacagacgacatgatgactacgaaggcatgtcaccatttcatcacacccattcatcgcctatatgcgcactaattcttttcttacgacacatgcactcacaatcaatccacactacacaaaatacacttatttgcgaatcacaatttaaggaacgcctaacacgtatagactcgacttatatataattatagaggaagtgatgactacttatggcatgtcatcacctctctacataagacaaaacaatttctactaacgactaagagttctaagtattaaacacactgttactttccatgcgcaaataaatctcaacttaacactagtgacaccgatggatttttactaaactcatcatgtgcataaccgtgtctcgcatacaaccatatggtggcgtgcactcgagacacttcaatcaatgtggcgtgaccactaatatatgaactctgatactcatgttttaataattcatcctctacgcaactagcattttctaaactactcgtcacatcaataaatatactccctatataatcatgaatcccatcacattgcataaaacaattatacttttcgcataac

SEQ ID NO: 49424 - DNA, 728 bp, Zea Mays
ttcatttcatgataactagtgctctctttccaaaattctagaatttcccttttagattttaaattctattttgggaatttaatttatttcttcttcaaattatttttttgtcacaaaatgcaaacaaaacaaaatccagcatgatgcatgatttaattgagtgtcttttgttattttttttttgtaagtaatgtgtccacatgaaatgataaacagtggtagtacatatagatgtagagtgatataatttctcttttagacttttcttacaaagtgggtgttacaatagtttctcctgattacattggcggaggacaaaacaataaccagatatgactgaagaaggaaaaaaaaagaaaaacatgatgcaacacataagactcgaacttggaacatgttgattgcaagcagtatgcagttaccactacaccaaacatgatttttaggtatggctcaagccattgttcgccataacgggtgctccgccactacctgatttgtatagcatggatgttggatccaagacctgaagaagtcctcccgaatagactcaaggtttctcgtttgagaacggaaatcgtatcacaacgatcatagaggcaaacgatggttggtgtgttggaccagaggtctgatgtggcagtagggcagaccacgttgcattctccttgggcccgctgaggcacaaacgcagccacgacccagacccgttgagtggagtgggtgta

SEQ ID NO: 49425 - DNA, 605 bp, Zea Mays
tggtgatgtcgtttgggttaacaaatgtgtctgcatacttcatgtacctgatgaattcggtcttcatgcccgaactagacaagttcatggtggtcttcattgacgatatcttggtgtacttgaagagtgaagcaaagcacgccaaacatttgcacacagtactcctacgtctgagatagcaccgcctatatgccaaattgtctaagtgtgattttcgacttaaggaaatcaaatccttgggtcacaccatctcccaagaaggaataacagttgatctgaataaagtgcaagaggtgatggattagaagcatcttaccactgtccgctagattaggagttttctgcgattagcaggatattatcgacgattcattctggatttctccaaaattgctaaactcatgacagagctattaaagaagggagcaaagtttgggtggggtccgaaatgtgaagatgactttcacaccttgaggcagcatctgaccaccgcacccatgatagcgcaacctgacaacaccaagtcgtttgatgtgtattgtgatgcctctggcactgggataggttgtgttctaatgcaagacaaccgagtcattgcctacgca

SEQ ID NO: 49426 - DNA, 1540 bp, Zea Mays
gcgagcgatttatccatgcaaaagcctatttaaagatcggaatagctatttttatcgtgtattcacgctacttgtggatcagatatccattcgtgtgcatgagcagctaagctgctgagccggagctggagtcactattttgaggccagtttatatttgggctctcgaaaatgtatcctgtcgttttaccaggaaaaataatacttaattgtgctgcggaaaatatgttacttagatttcccaaattgtttgagtcgatcatagattgtttgagctatcaagggtgaggttttgcctcgtgtctttagttgaatattgacaaaaaggaatttttccaagatgataagtgcccagaccttatttctgttccataaagacggatgaggaattcctatggaaaatttattttggttctgttctaatcttgtaattgacaataaaagaaaataaataacaatagcttctcttaatcagagtaataggaaactagctagtaattgacacaactcattggcttgcaatcttgtatttgatgagcaccaaatatttctcgtacatgtagaaacggagtgaacaaatcacatggtgttgaaatcgatgcctgatatccacgctgcaatcaaagatttagatgggagagaataattagtaagccatgcttagcatattgtatgctactcactgaaatataaaagacacataaggtcaagcacaaaaccaatacaagtcaagtagacattcatctaattaaaaaaaaacacacacacacaactaataagaaatggatatgaaacaggtcacaaagagcacctggaatttggtttgtcaaagtcgaccaagtcaccttcaccgacatagaggcgagatcaaagtttacttttttactcacacatccatgagtgtttacttcaatgggaatacagcgttcagcgtcgtcttttaagtcattgtttttacccactttgaacttcaaatgcatccaagtatcctcgaatacagcaaccgcgtatcttaagccacttgactcaccaacaatgccattgaagagctgaatttcttcttcttctgaatcactgacaaaaacaaacgaactgagagacaaacggacaccttcctgcgcatgcacttctgatatgaaaacttctatcgtggcctccactccgcataaaatgcgggctacagtcatgtcaaccgcaccacaatcaccgtttatgcgatatgtgaatggtggccagcatggtgtccttagctcagaatagtctatcattccatcaatgagctgtagatcatcttcttctcgatctccattctttatcctcatatcaaactcaacaagtacagaggaaaccattgagatgcctcgcttagggccagtcatttcgataagggaatcctacaagattattattagtagtagtagtagtagaattttttaatattattattattattactgctgctgctgctaaaaacaatggaagttgagtttcagtagttacaagccaacaaaatactaagaactagaaaatattcacataac

SEQ ID NO: 49427 - DNA, 747 bp, Zea Mays
aaaaccatttccttctgtctgaatctggatgtttcctggatgttctccacttactattcaagattcgtatgaagcgttggatttccatcagacggctgccgttatttaagatgacgtggcctaatcttgtgtcggagttgctcccgctgttaatatagtaaatgtggagtggccaccgggaactggtgaactagatatttgttgtacatgctgcaacatttcaccatcagtataaacttcatggaccatggtttgaaacaatgaacaagtgttcagagaggcactcttagagcgagaaagagggagcaaaataagtaatgactaataagaaaaaaggtagctaaaactacattatgtaatataattaatcttgtatgtaccctattgttcctcacatttagtcccatttactgaaattgtctcttcatgttcatcagtagacgcaataaaatattggtggcattactctttggaaccaataagaagtttttgtgatattggtggtattttattttatacttgcatggactgtctagcgctcggtagggcgcattcttttctagtatactagatgagtataaaacataagaaacatatttgtttgtcggttatattatataggtgtaaataagtatttagagctaacgactatggtttaaacccttgtgtgtgtatatatagcatatttttgtcatttgaacattatatattgttttaagcccgttaggcccattgggtcaccccgac

SEQ ID NO: 49428 - DNA, 681 bp, Zea Mays
accaatgagagcagacaaagcaggagaaggaactccactacttttgccactagcgatgaactgccgactgttttccgagtcaaaggaacttcatcctcttcctccccgtcgtcttcattagcaacacaggcagcacacccattgggatcagcaacagatggagcacccacattgggatcagcagcagatcaggcacacccattggggtcagcatcaataaattcagtcacaggcacttcttcagcagcaggaaccgaagtaccaacatcccgatccaaactggatactcgccggaggcgtctctttttctttttctgctcatcagcagaaggatcaggttgattggctcggcaagggcgcctcgggtgagtactggcaggcttctgaatatccaaggtcgtatcagcctctgggaggggcgccaccaccaatgtcccagcaggagcagcatcagaagagtcctcagccagcaaatcaagcatagcacttatctctgcatcactaggattcaggggcacctcaaaatggacctgccgttcatcatcaggaatctccccgagcgaggcaaccaaggcgctaacttcttcagcagagggtcgcactctaaggcccaaactgccatcagtgacaggtggattcgacacaaaaagagtgaaggctttgggaggaggcaagttccaa

SEQ ID NO: 49429 - DNA, 508 bp, Zea Mays
tttaaaattaaataatatgaagaatttagcccctcccccgttccctctcctattcttactctcgtacaatattattatttttcttcaatctcaaatcaggtacagggccggggtgaagccattgaccgatcaagcagaccaacacactcagcaactaatgggaacaagcttttatatccacggcggcgatgtcgatggcgatcgatcttaagatgaaaaacttaatgggcggttgagagtgaaagtgacaagagtaagcaacgttgatatccacggcgacgatggtgatggcaatgctgcaggagcagtagcgtgctggagactccacctcgtcacctcctcctcctcaactttacatcctcaacaccacccttgtgcatccatctattctggtttctggctgagccagtgagcctgtcgcccatgagctcatcttcctctattgcctcaacctagacgccgacatccccaccatcctcgagatctccctatcccaggtcatctgcgt

SEQ ID NO: 49430 - DNA, 420 bp, Zea Mays
ttcccatttttcttttcgatccttatttcaagcaggaaagcagtaatcgggataaaaaaatccaatcacatcaaagaccttgttcagtctcctcttgccgcgagcgccgaaggcagtggtcatagcttcgtcctctaccttcgtataagctcccaacaacttgtcgctggtagcttcaacatcctcaagccattcatcatttggctcgtcaaatggactcctatagcggtaggtgtatcttaaataaacctgaccacctttgttggagccagcagcagtctccttcagcatttcccaatcattaacaagcggccacaccttataggcaatatgcccttgaactaaatctctagtgccaatgtaagtacacactgtgttgaaggccatcaagcatgcttgcacttcgttcccactagcgat

SEQ ID NO: 49431 - DNA, 295 bp, Zea Mays
atccgagccatatatactcttccaattgagatcccttataagtagtcttgaccagaatgaaatgagccactttggtcagtctatccacaataacccaaatagagtcatatcctgctggagtgcggggtagtccaacaatgaagtccataccaatttcttcccatttccactcaggtttcttcaatgggtgcaatagttcagctggtatttgatgttcggccttgactctttgacacacatcacacttagccacgtgtgcagcaacatctcttttcaatccataccaccagtattt

SEQ ID NO: 49432 - DNA, 475 bp, Zea Mays
atcctctacagagcgcgcattagaggaaaggggaaagggaagaaatagacgatgcaccagggagaaggaaacacactagggtgctcatgacgtctttggacaagggaggggaaggtcttcatccatgaaggactccaatgacaatgtcttgacgaccctgaccctggcctcgatctcggatagagcaagcgacataaaggaatagcggtcggaatcattgaccccagagtattgatgcctcggttttcggcaagacattagaggttggatccaacgatgcatgaaggtccgcactagccgcgtgccagagagaccccactgcttcaacgtcttcaccgccgttagcaggtttcctacctcagctttgaggcatgcctctctgtcgcgttgccactcatttgaggacatcgactcacggtcggtgaataacgaaacactcgtagccacattcctcacataaaaccactcgcctttg

SEQ ID NO: 49433 - DNA, 297 bp, Zea Mays
ggcttgtatgatgaagttgtgtgccctcgcacattcggctatgctcgcgaaggcgttacgtacttggtcaggtgtaattgttatgctggactggtgcgcgtgtagtcggtctttgcgcggactgttgcacggataattttcacggaggacttcgattcttcgcacttattgtgctagcccggctgcacccgtaggcgacttctgcacggatagtctccgtggaggacttcgattcgtcgcacttattgtgctagtccggctgcacccttaggcgacttctgcacggtaagtcttcgc

SEQ ID NO: 49434 - DNA, 375 bp, Zea Mays
tggtgacaaagttggaccaccaagtgctagcggctccgcgaagttgttgtgcagcaaatagagacttttgtacctcagtgcactgaataaggccaaacttctgctcaatcacctgcagccactcaattgtgtcaagaggctcttctcctttagcaaacactggcggtcgagtctccataaattccatatatgttgcatttcttcgctgattctggggaatacgaggcccaccctgattgttttggtgatgagcaatctcatgcaaaaccctagcattatcaacagtggcattcactagggcagcaatggcatctgctagtgtaggtggaactagtggcggtggtgggttgatatcagcttctgcaccaccacgcg

SEQ ID NO: 49435 - DNA, 364 bp, Zea Mays
gatcaacgcacacacactcgggtggacacaggagagtcttgttgctgccaagcgatggcttttctggtgagtgttcattgctttataaactaagtacatgcagtaatataaggatacaaataactgagccaatcacggcatgatcgtgattgattgctgccatcccaacaatctgggtcatgccgtgagcacttcctctaattgtgctggctgatttctaccttctatctttaggacttattcaaacacacaagcgcacagggttcacggttgcgggacgaattgaattgaatatactggaggctcggagctgagattgggagaaatggtttgtggagtggttaatacaaatgatttgtcttcc

SEQ ID NO: 49436 - DNA, 668 bp, Zea Mays
ccggtgaaccagcaacacagacgcgacctcccctgcaacggcatgacccgacgcttcagaaaatctccaaccacgtgcatcgaggtcataccaccggccgccagttccttgatcatgtccagtacgggttcgaactccggcacaagggacagtttggccctccattgcttccggtcgagtcttggtccgtcgttcggcagggcaaggcggtcgttggcctcagcactgacgatcacccagtcattgcgccagttctcccacctcgcgccgccaagggtggcaatgtaggccacggttggatctgacctcgtctagaaatagtaggcatcgaggtggtccttgcccttcccagacctcaccagcacgcagaagtggcggaagagggaagtatagcccccacccccacgaacatctcgcagaggtggacgaagatggccactgtgacaccccagtgtcacctagggtttctctcaagtgctaacccaagaaccatcatcttatgtgaaccaaaattgagcatgaacatcaaattgacttaagaataaaggatccactaagcttatacttaaaagtatcatgttcaaaacaaatgggtttttcaaaaaggcaaaatgtgcaaccccaataaaaaccctaattgagccctataaacaaaattcaagagaaag

SEQ ID NO: 49437 - DNA, 809 bp, Zea Mays
tcctttcacttggaacctcctgacaccacgcatcggggagaccttgaggtagacgaagtctccttcttcaaatctgagctctctccgcctattgtccgcataactcttctgccgactctgagcttcaagtaatctcctgcggatcagggcaactttttcttctgcctctttgacaaaggcaggtccttctagtgctttttccctacgttggaccacatgagaggtgtctggcactttcgtccatacaatgcttcgaatggtgacatcttgatgctggcctgatagctgttgttgtatgagaactctgcgtagggtagactggattcccaacttctatcgaatgctagcacacatgctcttaatagatcttcgaggactttgttaactctttctgtctgcccgtctgtctgagggtgataagcggtgctgaaatctagcttggtgcccatcgctttctaaaggcttgtccagaatttggagttgaactgggttcccctgtctgacactatcttccttgggatgccatggagtctgactatctctttgagataaattcgggcaagggtggctcctccaaaggtagttttcactggaatgaaatgggctaccttggtgaggcgatctattattacccagagagagtcattccctttttgcgtctggggtagtccggttacaaaatccatacctatttcttcccacttccattcaggcacggggaggggttgtaataggcctgcaggtttttggtgctcgaccttcgtcctttggcaggtgtcacaccgggccacatactgagctatctcttt

SEQ ID NO: 49438 - DNA, 1245 bp, Zea Mays
ccccctcggacttctatttctttacaatgccaggtccacgacgtcgcacggtggcagactaagctcaggcgaacccgtattgaccacgacactcaatgatcgacgctctaacttgaatgagacctaattcaacacctaacaaatgtttcccctcgatcaatttcatagttcgagctctaaatcaccctgtctaaggagacagtgcgaacaacggatgagcagaagtgttcccggcgatctagggcagtctagcttaatcaaacgagtcgaggagcatcaggggcatgtaagggtgctgaaacaagagagcagaggacaagattggacctaaaacgagctagctatgacgaggacctttttatggtggcggaaatccgatatggggaaagtgagcaattcgggggctcaggtgaacaattggaggcacgagcgagtggattggatgcttgaatacctaacggagccgagggtgtgctcaatttatagggctcttgagcggtggccagtgaatttgagctcgcgtggtggcggtcggagagaaggaggtgcactggcgcaagtgattggtggcaattaccgtggcaagctcaccggcgatcaccggatgagctaagatgactcactgcggcacggttaaagcaccaaggcacgtggcgcaaggctgcgaggtgtctaactccggcgagggtcgatccgaagcggccatgagctaagcggacacgacggccggagtgaatagtggccgaagttcatccactgggtgatatttcttactccctctgcgctagccaactgcgccgagcacgaatcaccgtggcgggcgtgaatccgggcgcacggtcgccggcggtgagttaactgagctgtcgctctgatctggttactgtaccattgaagccctgattcagagtgactgacaggccgattgcctagatctcaaatttttgtacatcaacttgccaatacatctgtagcaaacttgtagcccttcataccagctacaattctgctatagcaactaccctcaatcgagcaatagatcttactctaattcgacccaaaagtctggccaatgtcactagtgacctaaatccagtcagtagagtgactggaagcacaactttgagcttaattttctccaaactttgtatgagatcaaagcttagttagttaagcaaagttgttctcctattatagctctagacttttgatgtgttgaccctaggcaaattttttgtattttta

SEQ ID NO: 49439 - DNA, 663 bp, Zea Mays
aaactattgagattatctctattctctttattacacttttgagtattacacctctatgattcatcttatttccatcttgtttccttgttgtacctagatgcttgttacatcctttgtgtcttcctccaactgttctaatacatcctctaggccagcagctaggacaagtactttggacacttattaaatattgctatctgttactgagttgtgagccacaaatatatatttagtcagccttcccaaaattccacctttctctcgagcacaacatgtactgctttgcaatcacacccacgctctttgggctatcacactggccatcatttgccacctgcagtgttggtaagaacattgtaagagcggggtaacatgcttcgtaacttgtgtttcatcaccacccttgagagtatttgtaggattcacaccttttgcttgttgctttgtttctgttttgtactaacagtgacaggaacatttcatttggagctccatgacatgatgagagctatgtgtgatactctcaacatgaacactgaaagattgaagagagtttcaggacttgttgaatagatggacacgatggagactcgtctaccacaacctgcaatttcttccgcaggtgattctattcatgcttttccatcctatgatggtatatac

SEQ ID NO: 49440 - DNA, 667 bp, Zea Mays
accaacacaagcagcagggttgatagaaaaaatggagagtttcaaatttgctttcattctaaaattgatattgaaagtgcttgcaatcacaaatgagctctctcaaatgttgcaaaggaagagtgttgatattgttcttgccatggagttacttgatgttgttaaagcccgaatggctatgatgaggacaaatagtggttgggagtcattctttgaagatgtgaaggaattttgtgctaataagggtattcctatggtagacatggatgcagaagtacctattagaggtcgatcaaggtgagatggattcacagtcacaaatcttcactactaccgcaccgagaaattttttgttattcttgataaaaccaatacagagttgtgccatcggttcagtaaagtttcaagtgagttgctagttggttttgcttgccttgatccaaagaagtcattttctatgttcaatttggagaagcttgttaagcttgctaacttatatgatcaagatttcacagttgttgatcatgtaatgttaagagagcaactcgagacatatattgttcatgtgagaaggcatgctgcttttagtacttgtgaagatattgcatctctttctattaagatggttcagactagaaagcatgttgtgtttcctttagtctacaag

SEQ ID NO: 49441 - DNA, 402 bp, Zea Mays
cgataataatagaatagccggtgtgtatggtgtatagcggcctatattgtggctctggttagccgacttgttagatggttttgattaagctcgtggtcacgaagaattgcttgttgtactctaaatgcgtatggttattgtcgcggatgaaaattagtagtgctcaagtggtgtctaagctaaaatgcgaactagtgggtgaaaagcgcttcgatatacatatatgtcggatttgatgtttgtggtgaatgcgttgattaaatgtgtatgttagttctagcgcgcgaaataaattggataaaaagtagtaagtcgacttgttagtcctaatttgattaatttaactctaacaaatggtaaagtgttagaataatttaagtctctagaacgcgataattcttg

SEQ ID NO: 49442 - DNA, 344 bp, Zea Mays
cagagacgctatgatcattcaccctactgccagcacaaataccaatgctatttttccaagccaccaagatgccaccactagcaccaacagaaggtaggaatacaaaattgtcaaaagctggacctagcatccgcaatacaaggaaccgagaaacatccaccattttagtctcttgaagacaaaccacatcaactcgagcagaatccaccaaagtacgtacaacatcctgtctagcagacccattaaggcctcgcacgttccaaataagaatttttgaaggatccataagaattgaaaaaaagaacgactaccagggagggacccaacaaatcagcagattggtc

SEQ ID NO: 49443 - DNA, 459 bp, Zea Mays
ggaggaggcgcatccacaaaattgagtgttgatgtgttttgatgcaagaaggccgagtcatagcttatgcctcaagacaactacgtcgacatgaggagcattacccgacgcatgatttggaattagcagcagtggttcatgcccttaaaatctggcattattatctgctgggaaatgtttgtcatatatatactaatcataagagtttgaagtacatttttacccagtcagatttgaacatgagacaaagaagatggctcgagctaattaagtattatgatttagaaattcattatcgtccgggaaaatctaatgtagtggttgatgccttaagtcataaagcgtctttccattgcctcactgtgaggttgtctgacactaccttatgccaggaaatgggaagactaaatttgggtatagtgcaacaagggactttgatgcagctaaagcttgagtcta

SEQ ID NO: 49444 - DNA, 421 bp, Zea Mays
actgttattcaccgctatcacgtgttaaagtccgcactcgtggtcgagcagacaataaacagctgaggtgttacagtcgatctcggccgtcggtctgtccgggagcggttaggattagagcagcatgtaccgttcgtccgattcaatccgattcactagtttagaatccaacggatcggattagagttcgtatacctgaaacgtggtcagatctaggtcgtcgatcttaatcgtacgactccgattcattgagggtaggatttaacctacaccgtagatcttggatccggcgaacagaatgagtgcgggttattagctggccctgatctaatctggtccgtagatctcggatcgggcggccagactatgcggataccccttcggtcgtgcaatcttgcaaatgaacccctcggtttttatt

SEQ ID NO: 49445 - DNA, 312 bp, Zea Mays
gttattctattacctttatagccaaccatcctatttatcgacctactgccatgaagattgggccacccttgtaccgaatataactcggtacctatcactcgggggctaggtcatcgctcgctttgccgactcgctacttcattgactctagaggctaggttatcacccacctcgccgactcacggcttcactagctcaggggctgggtcattgcctgcctcgccgactcgctgtttcatcgactttgggaggctacgccaccgccttgtcagctcggggattgcgttatcacacaccttgccaaccacttcg

SEQ ID NO: 49446 - DNA, 480 bp, Zea Mays
caaaccaccacgaacgcttcctcctcctcgctgtcgtcgtcatatattaacccgcaacttctcatatcgcctccctcaccctagatcttccgcaccaccatagatgacatcgacctccccctgttgacccagcatctcaaaccgctgccgcaactctcctccgctcgtcgtacgcctctataggcattagggcaagaacaaccaagggagcaaccaaccatgcaaccaccagtccatccaccatgagtgcttcctcctcgtcgctatgtgcctctataggctgcagggcaagaacagccgagagagcaaccaaccatgcaactatcacaagcacttcctcctcctcgttgttgccatcgtatattaacctataacttccatctctttcgcatcttcgcctctctcacctaaattctttccgcaccaccatacatgatatcgacacctcgaatcactctcatgactctgccaccatacgcc

SEQ ID NO: 49447 - DNA, 369 bp, Zea Mays
catgtggaaagggctttgggtgcttaagaagcgcttccccattctaaaagtttccacgttccacacactggaaaatcaagtaaagatacctatggctgctgccatcttccataatctaattcgatcacttcatggcgatgaggaatggctagatcatcaaccagataatatcgatcaatcaaactttgttgctctaacaagtggtgatcagatgaatgacctaggcactacacaaggcaatagtttaagagatatcattgcccaagaaatgtggattgaatatcaacaacatttaaattagtattttcgtggttgaacaagatgtaataatttagtattgtgacatgtaataagttagtattataacat

SEQ ID NO: 49448 - DNA, 858 bp, Zea Mays
ggtaccggccgccatgaaccatccgatccacaacagtcggcccagattagatcatcacttcaatgaagcagtacggcaccggaaccgtccgatttaaaaccgagggctacgatcgcattcgccgagggagttcttcatcttcaatcctaactgcacaatcatctcacaatggttccgatcaaaactctgaaccggtatcaagtcgctcacttctccaccattggccaggatccaacggcccaggctaatcgtcctcctcctgcggccaaacagaggcaccggcgcgttgagcacggcggagctccaccggagcacaggcgatctaaggcctcggcgccccaaatcaggcctaggtaattgctacgtgtaacaaaagcgaaggcgagcacagagagcagattcttactagcaatagggtcgcaggaatggttgcccacggcacgggacgggttcacgacgatgacgagcaattgccgaggacaccagccgactacccccgattgtactctctcctggatacggcaagacccgaccaacccacggataaccctgcaggaacccaactctcgacgtcgacggaaacctgcggcggtgcctccccgactttcttacaatcccccactgtgcctcgcaagcaagcgcggtgaaggcgttcgggggtggggaagataatccaagcacgggcatggttttataggcacacggcgaggctggcgacccggatagcccgcaccaaccggaacccgcagatcacggcgtgccatcgccatgcacggcgagtcagttgggaggaggagctggtatccaggtcccggttgtctgcgacactatttctccagtacgcgaagtaagtgccag

SEQ ID NO: 49449 - DNA, 423 bp, Zea Mays
aaaaaaagatgtgttgtagacagcatcagacctcttgttactgttgcaaagaaagacgagatacagaaaaggtgagtaagcaaaagcagagagtcttccacaccagctttggacttgtggtaaatcttagcaaaggtaataattcataagtaaaccagtattccttagccgaccagtcaactacgtggataaccttccaagctgaagttagatcctaagcacggaatcaaatacaggcatacaagacctttcagagcagaactgcatatacagaatctagcaatttttagcctgaccagaacaaaccaattttttttctcaaacttatgcattgccttgtctcggttagtcttgtcaatttcagacatgtgacttgtatcttgtctaagcaaggaattataaacctcaaacatcctacttcct

SEQ ID NO: 49450 - DNA, 382 bp, Zea Mays
gcggttgcaaattctgaaaagttcagggtcagaccataattatttggactgaatagtaataacctcagaacgcatggagacgacgggtttatttactaaaacattagggactcttctgcaaacatgccacgacaaaagggtatgggcggtttctggccgaccgacaagattcggtcgccacaattaaatcgtcatctgaaaggaatcggtatatgattccgaccgtaagactgaagacgtgtggctcaaattagatcaccccacaagccgaaccggtaagtcaccacaatcgttggattatacatctatgatttcgattctacgaggtcacgatctaatccggagcgttggttatggatccaacgccatccaactagagtgc

SEQ ID NO: 49451 - DNA, 460 bp, Zea Mays
gctgaatcaaccctcgacgatgctcttcagattgttctagtttatcttccttcgtcgagctacaacacagcttctcatgacttgggattgccctcattcttttctaatcttcaggtaacttagctcttttcgttccgtcattcctcctggtaaatcactttctttgtactcatttgtttttaataataggctttgttagtagggtatagtgatcaccctaagtcgagtaagcgcgagcatgttgcaccgtcttaagtcattgccaacttaagccgattgctccgttagtagggtatagtggtcaccctttgtcgagtaagcgcgagcatgttgcaccgtcttaagtcattgccgacttaagccgattgctccgttagtagggtatagtgatcaccctaagtcgagtaagcgcgagcatgttgcaccgtcttaagtcattgccgacttaagccgattgctc

SEQ ID NO: 49452 - DNA, 510 bp, Zea Mays
ggtcatccaggtggaaagagctcgagaagaggaaagaggtcacctcaagagaaaatttcaaattcttcaagctcaacagcaagacaggcaccagagggttcgatctttcgggttccctcccaaggggtcaaacctcagcaagccagcaggatctgctctgccacgtttcaaccagcctggtcagagttcttttcacaccgagtccgcagcaatcagccaacctccagccaatgcttgttggcattgtggtgaccccagtcatttcaaaaataattgtccacacctgaagacaactgcacctacctactccgacttggtgaatggccccaagaatgtcacaacacctgcctccaaggcaccctccaccaacaatcagttaagcaagtcatagttccacggcagggctcgagtgaaccacgttgacgcccaggaagctcagcaagcccctggagtagtactcgatgagttcctagtcaaatttacccctgctgcagtacttttcgattctgg

SEQ ID NO: 49453 - DNA, 437 bp, Zea Mays
aacgtcgtaggggctaatggagctcttggggtagttttcgcaaccaggatgcttccatggcgtagaactcaaccttgatgttggagcaggagactgcttgttggcttttgctggaccaagggccgagactaacatcaaggaacacaacgtagtccgagatagacttacgcatgtcaagataacaggtctagtcagcatcaatgtacatcgtaaggaccaaggcaaggagcacctaaggaagggcctaagattagctatgacacacgattagcgcagaatgtgcttcacaaccatcacatgagactcccgaggagcatgcatgtgtaggtaaacatgttggaccgcataggtaatatctgggcgagtgaaagtgaggtgctgcaagaccccaaccaatctacaatagatagtggcgttagccatagggtcgcacagta

SEQ ID NO: 49454 - DNA, 333 bp, Zea Mays
tcctcttcctctgaagtttctttggcaacctccttctctttcccaggcactggggccagggtcttttcggcagctgtagcagcttcttccacggccatgttcaagatcatcttatcaatatcagaaaaagtgccttctagatttgtatcttcgaccgtctcagcttcggcgggggcaacctcagttgctgcggtatcttcggcagccggtgtttttgacgccgaggctggcggtggcgtttcttcaatagcatcaaaaacagtaatgatccttcgccttttttcagcaggcttcttgattgtcgcaggctcctccttcttctgtaaaagcttc

SEQ ID NO: 49455 - DNA, 966 bp, Zea Mays
gccgacgccggcctgcacgtaggtagcggagtccaacttgtcgacgcttgcgtagaggttgccgacgcagccaaccatggcctccttcccgatcagcttcaccgccgtggcgatgggcagcacgaggagggagaagaggaagtccacgacgtccttgctcgcctccgcgaacagcacccgctgtgccttcctgtcgatgagaagcttcatggtcagcccggcggtggctgtggtggttgacatctcgtaaacgtaagtgctaaaccttgctagtttttctggtagtatcatagtatgctctgggagtctgggtagattgaagggcagagcgtgagaacgagatggagaaacacaagatcgatacttgtagggatagcaactagcgcctagcatagattgtgtgacctgaatacctgatacgggaatttgagacgactgattgattgaaaactcttagaatcatgcgcattaataattctgcatgggaatgggagaggacatcatgcatttgtgtacggggactcggggagatcggtggacacgggtgagttttagggcctagggtttatggttcctagtttagtcgggggattttctatcattcaatatgctgatgatatcgtagtttttatagatcatagcttgcagcatgctcgtaacttgaaactaatactatctgcttttgagcaaatgtctggcttgaaaatcagttttcataaaagcgagttattttgctatgttttagctaaggattatgaacagaattactctcgcctttttggttgcaggatcggttcgttaccttttagataccttaggattcccatgaccctccacatgttacggaatagcgaatgacaatgtgtcattgatagaattgagaaaggactaagtacttggaaaggtaaacttctttctttcatcaggcgcctagttctcattaattcggtactaagcagttttttc

SEQ ID NO: 49456 - DNA, 559 bp, Zea Mays
cttccattcaggtatcgggaggggttgtaataggccagcaggtttttggtgttcggccttcgtccgttggcagatgtcacatcgggccacatactgagctatttctttcttcatccccttccaccagtatctggtcttgaggtctaggtacatcttggtagttccggggtggatggagtaggctgagtcgtgagcttccttgagtaggacttctcgggattccccttttggtacacatagacggtgtttgaaccaaaggactccttggtcatctgtcctgaggtccgggagttgttccttgcgggctttctccacgagccttgctgtctctgagtctagacgttgagctttgccgatgaggtcttctagcattggcttgacttcgagactgtcgttgtttcccagacatgcatttagttgtgctgattctttcttccagtcttctagaaagttggtcccttttattccgaatggctttcgactgagggcgtcggctaccacgttggccttcccggggtgatagtgaatttctaggtcgtaatccttgatcagttctaac

SEQ ID NO: 49457 - DNA, 796 bp, Zea Mays
ccttccaccgaagcatcatgaagaaaagctttgtatgcacacacaagcaacaaagatgcgagtcaaggtagtcagcctcggcatgcaagaaggcctcggatgaaaacgacaaagagggcgcaacaaaagtgaaagggaaaagacagcaatatccatatgacatttgtgaacaatgagggtaaaaccttaaggggtgtgattgtaattttggacaaagccagttcgtcttccctataatagatgaaaaatgccctgcataaagtaccctgttttgaggtcttcgactttgtgttgcttagcattcaaagaaccttcgagcctctttgtgttaaggagccaaaggtacgcttgtaaactcatctaataaaaagggagatggaataaaatgcaaggtaaagaagatgagcttcatcccctaatatgcaatgttgtttcattctacattatttcgtttacatttactttttgaagaccttcatccttcacattaacactttgaataagtataaagtcaaggacgaaggttcatacttaacttatgttgccttgattttcaatgccttcaagggattgagatcaagtattcaacattggcacccacctccattgattccatgaccacatcagcgtacaccatgccgcacgaagaaaacaacaaaaactaaatctatcctggcaccccttgatcctaatcaagggaatgaagctctcatcagataagcaatgaatcagaagaagaatgccactagcccatcaccccacgaagaggagcttcatgaggagatcagcaacctcg

SEQ ID NO: 49458 - DNA, 859 bp, Zea Mays
cccccgccagccgttctatctgtcttcctggcgactccctctccccgccggcgatctccctccaccggcggccaccgtctccaactgggctccggcgaccacgtctccctctccttccctcctcggtgagcagaccatcccttcctccggtctcctccctctctgttctggtgagtaaagctcctcccttccacccccttttgcatctcttccaaaagttatgaattcctgtaaaatccagttgtgaaatgtgttcccctgtgttccttgaacactcctgcaggtttctagctccttcgggagggttttcccacctcaaatagccgtttcaccggaaacctaattccccgcacgccacgtgctcggtgaaatgcccaaatcagccaaaaatgctccaattgaacccaaatttttcaggcaccttcacaacacttccagtaacctacttgccaaatttcacgccaatccgagattccaggcttaaatttcaccaaatttcccgttttgagcgatcgtttccgagccgagtgcccaaatctctttttcctcgcctaaattcaaccaagcacacacttcactcatattcacctatataaacctattcgtgaagtatcggctcaattccatatcgattcgtgcctcaatttgaattccaaacctcctatggcactatttatcgttcaaacgtcgttttcacgtcgtttgacctctcgatcgactcatcttgtgtttcctgtgccatatttctcttgtgtatgtatttattcacatttaatatacttatgactatgtgactaatacatgctcacctcttctgtcatttcagggaccttgattgcacgtgtgccgtctcccgtcc

SEQ ID NO: 49459 - DNA, 419 bp, Zea Mays
cttgaccactgcctattactggtttcggttttacccaatcattgcttggatttactagctagcactaggtttcaagcagccatcaatctatctatggttgtaatcgtgctaaactctttctggatgcggttcggtggttgtcagggtgttcatcagcattgtgtgaagagagataagacacaagtgatgatggtctagtgagaacccagtgcctactcggttttggatacgaactgaactgtgtcatggactgtttcccccgaggaacaaggaatggtaggcatcttgtactgtacaagtgatggcttatcatggaatcttgtactgtacaccacatggaatggcggcatttactaaaattcttctcccagttagtagttactaccagctagcccaactacttattaagtactccaaat

SEQ ID NO: 49460 - DNA, 520 bp, Zea Mays
tatactacacagatcacatatcagttactactacacagatcacagatgttactctattctacagcaagcaccattgtccagtacacagatcagttaaacaaatgttaagaaaggttacaaatcagttaaacaaattactgagcaccggttccaaagctgttactactacacaaatcagttactctattcagttaaactcaagctgtcaagcaccattgtccactcatgcataaatcaggtaaacaagttactactacacagatcagttactactacacagtacacagatcagttactctattctacagcaagcataattgtccagtacacaaatcagttactctattcagttaaactcaagttgtcaagcaccattgtccactcatgcataaatcaggtaaacaagttactactacacagatcacaacatattagattacctctgcgccagacacgaagaactcgccgctgttagtagtagattcggagcaccggttccaaaaggacgggttcctcacgg

SEQ ID NO: 49461 - DNA, 492 bp, Zea Mays
cggacgaccaggattctctaccgagcaatccagcaaggcggagtggacaaccaggtcccgtgccgagcaaacctgagcaggggaagggtcgatccgacactgttgaaccacgacaagacgtgtcaccataaaaccacgttcgaaccatgagtttggtgcaaaaaggtccttgtcaaacacgacggtacacccctacattcaacctcaggcgtatccccgctgacttgtggggctagccaaccctagtcctggggacctcgacaccggagtatctacagtgacccaagtactggaaaggacgtgacgatataccacaccgagggtatacctacgcatacgggatggtgatgccaggttcatgacgaaagacgaagtcgtaccaaaagcatccctaaaccccaccataagtctaccctgcgagacctgccaagtgctgctacatgcatcaacatcgaacttgctatagggacccatatgctagacggatgaggt

SEQ ID NO: 49462 - DNA, 356 bp, Zea Mays
cgccttctttgcctgcactttgacttgcaacacaggagcaccgcttgtggacctatacacaacctcggtgtcaggagcttcctcatccctttttagtgcctctgacaatgttggtgtcactagcctagcagtcattataatccccgccatatgaagatctcttaagaagcccaagtttctgaagctcatagaaagcgaaaagagcaaatgagctttagaggtagagactttaatggcagcaggatggtaatagcagtaaatgtcgtgccaatcaactagggcagattgaattatatagataaaaggtgcagaagtcgaggagccatgctaggtccgctcgatgcctggtgaaccac

SEQ ID NO: 49463 - DNA, 832 bp, Zea Mays
aaagaaatcatcatcaatgatgatagcaagcactatccatcaggcaagacaacactgtcgtagctcaacgacttcaatcccgagatgtaggagtgttatgaccgggtcctcaaaaccttaactgataaactcttcacatgtttcacctagacatggtctagtgttgtctggctcactaggaaaccaaagacgcttctggaggaggttgatctttcgacaccattagaggagcgcactgtcgctctttaccaagaaatgaactacatcatccaccattccatggtacaacagtcagagatcccaatcaactccatggagggagttattgcacgagtggctagatcgattctagacatgaactacactaccctagggccaacttttgggtccaattagggcaagaaataattctatgcttggccaatagagccaacacatattagtgctccttagggcactacgatcaaattccttgcccaccaccctaatttgccacacaagataccctccattatctatgttcatccttcaacatatatcctggaggtcaattttccagtagtgttgcatccttggtacaaataaggtaagatgattgttcatgatcctatcacacaagactgatatccttataaatgtagcatatcccaaattataagtgagtccacatgtaaagagatagagataagtatctccatttgtaggagggggtctgttaggccaatcttgatccttgtctagctagcggctagataggctttctataaccaaccacaccttttgggactataaaaggggcggtagtgctcaccaaaggaaaatcatcttatca

SEQ ID NO: 49464 - DNA, 487 bp, Zea Mays
gggacattatttcaggagagctcaggggtttctgtgtaaactccgagatctagatttaattattcttccacgtgtgtggacggcgggttggttttaatgaaacccgagggctcttttgcacttatccctggccaaaggggtatggagatttctgagccattcgatcacacgtaggtgaaccagattacaacacacgtttatgaaccggtatcgacccatggccgcctgatcgcgatccggcggtcctgagcaaatcacgagaaggggtgcatgctcaagtctgaatggttcctcgagatatcgacggccaataaggctccaatccaaatcggcacaccagcactaatcatcgtcgttgccttgctgatcaacggcccagctacggtcttcccctcccccaaccgggaagcacggcgccgccacccagtccacggtggagacatcaccagcggcaccaatcctcggccccgatgactctaaatccaat

SEQ ID NO: 49465 - DNA, 1020 bp, Zea Mays
caccaccgcaccgaacatggcgcgccgccgcgctcatatctcgcgtacaccggcacccatcagtccaagtgtggtcggtagtgttcatcgtccatcggggatcgtgctcggaccaactaatccaacctcaagacatccggcccggaggaatttctcaacggagagtggcggtcactgtgacccacacctcgtcgtggtcggagcctagtaccccgaaatttgtggtaagcgccatatctctcgtcttgatttcataccctcgtcgagtagagtcgattagaatagagggtagcttacacgtgtccccagtattgctcaccggagctttggttcgccgcagttccacttcgcatcgcgggaggcatggtagtcaccataatcctcacaaagtaactccctatcgtgttcgtcgttgcccacactttgtttcgcacagagcggatgccggggtaatgcaccagtcaacggagtaagcggggcgccgccgtggagacctccgccgctgtggtacaacgcgtgcgcgctgtcgccaggtagaagaaaacccactggccgttggatgcgcgatatggggctagatctttacttgtcgctcgttggatgaccgcttcgtgtgtccgttagatcaaaaatgggtggctcacatcgatttgagaccagcgctattaaggatcggtctattgaatctggaccgctggggggaagaagttgatcaggtccatcggtcctagattgggcagccaccagtggttgcatactcatgtgagttgagagataatcgggatcgtccagttgtaatcggtcggcccacatcgagcgataccccttcgcgattgcgctttatcatatgaacccttacaatttacagttatcaacccgcggttcgcagggctattctctgagtcttaggattttacccgcaacccccctgtctttcccagaaaatgaggcccagtccagtcaactcgaaaatcagagaaaataaaatagaaatggatttttagtgaataaataattgct

SEQ ID NO: 49466 - DNA, 1651 bp, Zea Mays
ctcggggttttgactaactggagatgggttcggttactattcttatgagtcactgacgatttgcatagaggtccttcggtttctaattcttcgcaggggtacgtccccgatgtcgcacggcggaggtccgatcaccggcgaggttagactggccggattacgcaaggactggtgcactcgagcggcaaacaccgaatcagacctcctctgagcatttcccctaagttaattgcacgattggtgacctattccgctctgcccacgaggacagtgaaggctatggaaagttgctcgtgttcccggcgatgggtggctgtctagttcgattgggcgggtgggtgagcatcaccagcatacaaagatgctaaaacgagaacaaagagggcatgatcaaacctgtggagggctggccacggcgagggtgcgctttgcggtggcggagaccagtttgggggaaactaaaattcaagctctctaacgaacgattgctagtgatttttggtggctgggtgtgtgatgaacttgcggggctagcgggggcttcaatttatagggatcaacggcggtggccgggaatttccatggggacgcgcggcggtcggaggaggaagaagagtactggcgcagtggcttggtgtccagcgccgtggcaattgctctggcgatcaacggggagctagagtgagtcacggtgatgcagtacataggtagagacacgcggcggacaacggcgacggcttaacgatggtgagaatccttatccgagggcggtgagtaaggggagaggtaccgcggctagccggagtggcgtccagctcaccggcgacgaagattctcttaccccgcgatgttatccatctgccatgagcgcgaatccttacgccggtgacatgaatcgcggcggaggagcgatcgtcggcggtgaggtttattgaacctgatcgagttactgtaccatggcaatcatcattcagacgacttgatagtcattctttgagcttgattttctcccagattcatatggcaacacaaccagtgatctgcggcaatattgtagtgctataaaccagctacaactttgctatattgtgctcccacaaaaagtcaatggatcttgcttgaaattgagcttgaagttcatgccattccactgttagtctgatttcagactttaagtagtctgacagtccaactttgggcttaattatttccaatttcttctcaacaactatgcttacactcttaagcaaaattgttctcctttgtttggtctacaagtttgatgtggtgacctagggcaaattctcattaatttgaaagatacaagggctcaaagttgaagcaatcacactgaaattcagacttcatcacatgagtcaagtgtggctcttttgcacttaagtccacatctcaagttttggattgcaaaccctcatgattgggaaccatatgacttaagatacttatttaacatggtttttacattttagtccacaagtgcactatttttgcacataggcccctagggtttggatttagggttttccagggttccatttagggtttctggtatctcagaggtgtaaatgcaacttaaacccatccttcgtaatattttatgactagtttacttagtctttgaggttttctc

SEQ ID NO: 49467 - DNA, 334 bp, Zea Mays
cgagttcaagcgcccatatgttgaagatcttcgtgaatttgggcatgatcactgcacaagatttgctcccccgacagagctttgtcgtttgtgtgtggaagtcgagcggtttggggcagtgtaaagagagttgtcgtgtcacaaaggtggcagtgtcacaaggttgagtcccgaggtaaaactgcgccaaaactgtgtcaaatgaaattggtttgagttcaaatttttccagggcgtgttcaagggaatttggcacaactttggtatttggacttgtttgatttgagttttgaaaaacagagaacgagattgatctttgggaaggggccgaaat

SEQ ID NO: 49468 - DNA, 1225 bp, Zea Mays
tgcacatggcgaggcggatcgtcgtcgtggctcgagcgctacgacagtgagcccctggggcttgattagggccgaggtgggtggtgaggtgatcggggtaagctggtgatgcttccaaggagttaaattttggcgcgagtttcttaacagaggggtgagggaggctcaccggcaatggtggatggtggtgcttgctttgagcaagcgttctcgggggaggggggagattgtcggcattggtgtggcggtagaagagctcgagtgtgctcctcttataggcgcccgaggaggtgttgttctggttggctctagtgaggcaagagagggagcaggggggagaatgttggaggatgtccgacaacgtgatagtcttgcggtgggaggacagagctggtgtagtagggtgtaggagtggagaaggaggacaaggcagtgcctaacttcgatgagacgcgacggtgaggcgaggacgatggtcggtgggggaagcgacgattgttgtgttcctctgctcggcgaggatggcgatgttgaccagcagacccaagctggtagcggctctgactgagggccccatctattagcgaaagaagggaggtctggttggcctaggatgggtagtgggctgaaaaggagggactgcggggcacggcgtagcctaggccaagaggggaagggtttttctttttccctctcttttttgtttctttttttgaagaggcatatatatatatgttcttaccaatttgagaagaaataaatttttatctaagtatggcgctcttcaaaaaatttaacaaacattcatgcataaataggcttgaaaaataggtgtgcttatacctatgtccatccgtaaatatataagtaatcctgattacttcctacttggagattggggtgttacatgctcttagtatgcctccaacctttgattgtctagttagccattgctgagagaaattttgtgagacatttagtttgaaaggtcgatttgactatggaaaggaacgagtacactatgttgtaatgagtttgtcatgtgaggaagatttgactatttacaaaattgtgacgaagagtagtaatgacaattgctttgaagttgttgtggataggggatgtagtacattggtggtgtatatgaatgtggatggtatagagaacctaaccctagaagatatggtgaagttgattattcctagggaagttgataggtcttatc

SEQ ID NO: 49469 - DNA, 639 bp, Zea Mays
caatcatgactaagaagaagcgcgaggagatggacgatcgaaagcgtagattggtggacctcagcctgggagcaacaatcgcccccatttctcatgtaatccacctcagcaattcaagcagagtcaccctcagggatatcagcagcagacccaacgtctgcatcagcagcagtaccgctagaacagtcagccagaagggagtgagttctagaggcagaataatcaggcacctcgtcttcctgtcccagcaaccaatcagggcagtcaagcagccttagtgcaaggtggaggcaaaggatgtttccattgtggagagcagggccattgtgcgatgcattgttcgaagaagatggatcagtagcagccggccccaatgccctagcaaggcagcatgtacctcagcaaggagtaggcaatcatgttcaaacgcgctacaaccatggtaggatgaaccatctagaggccgaagcagaccggaaaacactaggcatgatagtaggtacgtttccagtcgaatctcatcttacagaagtgttatttgatactggagcaacgcattcaattattactgtatcatgggtagaagcgcataatctcccaataaccaccatgataacaccaattcaaattgactcagtc

SEQ ID NO: 49470 - DNA, 307 bp, Zea Mays
acgacctcggtttgaattcaaatttttcagggaggtgcctttggtgatttgggtacttcttgctatttggtccaagtggttttggcgccagcacaaaggtgaacacctttgatctttgggcttgggtggttttgggacttagaaattttttgaaaggctcaagtgtgttcccctcttggagaattgttttggggtttttgttgggcctttttgcaatacttgtcttaacaaaatttgtaggtttactaatacacttcatcttagtaaaggtcccttttttgtgttttgatcatttgcccactctttc

SEQ ID NO: 49471 - DNA, 613 bp, Zea Mays
gccttggctgaggttaaagaagcaatgagcttgtactctatccattcggtgaacttgtcaatggcaaccaacatatgagtatagcctccctgagctttcttgaagggtccgatcatgtctaacccctagcatgcaaacgaccacgttacagggatggtttgtagctgttgtgatggtaaatgttgttgttttgacaagaattggcaagcttcacatctctggactaactcggcgacatcattctttgctattggccaatagaaactagatctaaaaactttcccaactagagttctggatgcagcatgtactccgcattgtccggcgtggatttcctccagcaattgcttcccgatagccgagtgaatgcatttcatgaggactcttgtcgcacctcttctatacagtgtgtcccctatgagggtgtagtgggctgattgtattgcaatgcgttcggctgccgccttgtcgtccggttcctcttcattctttatgtatttgatgatagggtccctccagtcattagggtctggctctggttggctcagggtgttgcattcttctgccggatctatgagaatactcgggcgtgatacttcctggacaaagattc

SEQ ID NO: 49472 - DNA, 1848 bp, Zea Mays
ctgaagcgttgttgtgatgtcttcgtaggcgatgagggatgaagaggtggaggacctcgccagcctagagagctcggtgatccgaaaggacgccaaggtggagacgggagcggaagagcaatcctcactaaagaaaggtggcgctgagggccctgcgatggcggggacttctgcgctggtttaaagaatatagtaggagtggtttgatggtgtttgctttgtatgatacttaagatcggctgcaacgcaggttccatcgtctggacccgcgcaagcaaactttgatgataacgagaatgatgaatcattaatgtgttgaagtgtgataattcttagtagtgacgcatctaatgatgaatctgatgttgagtcatggtcttcggagggtgagaggttggtgagcccgttcgctgggatggacgacgagtctttgaaagatgatctagattattttgtggcgctatatttgtctgtcgtggagtcttcgtcaaggctcgcccccactgcggcggccgccgaatgggaatggagaggtctcgtctccgtagtggaacacggtcagaggaggggacctgtcggatcatacgggcaccgatggccaagtcatgtttcggggagggggatctacgggctctttttgatggcgaagagttgagactgatgctgttcaatttctgtgaagctagccttatcccgaaagaagagccaatgtaagatgtgtgttgccatcgctgttctttggtgcatttaagtgaaaacgctgccctcacccccctgcgccaaaggacggctatggggacacttgtatttgaatggttttcctatgtgtattatgcatcttggacttgaaatatgatgtgcctctcgttgtggtatcattaaaatgtatttgcgctatctcagctgcatccttggattacttcacactgttaggtgtcgttaacatgtttgtattgattcgactgcaaccttaagcgacttgtggtagggtatagccgtatctcttggcgaggactccacacctttgtgatgtgcctgctgtgttaatccaactgcatccttagacgacttttgcttggatagaaatatgtgtttcttggacgacttctcacccttggatgctgttacacacttgttgtgctgacccagctgcacccttaagcgacttttgcttggataaaaaaatatgcgtctctaggacgactttgcacccttgggtgctattacacacttgttgtgctgatccagctgcacccttaggagacttctgcttggataatgcctgtcgcacgcaatgactgtttaaactggtcgttgcggtgactgttttagtgtcgaatgccgaagaccgactccgcggtctttttcgacatcctgctgtcatggtgtctcctttttgtgtgggggatttttgtggtgatatattacatggctccgcctcattaaaaacctcaccccctgctaggaaaagagtgcgggcttgactgaaataatgtctgtaggtgttacaaaggcgcgaaggccttggtatttgttgctttatacacaaatttttctcaagttgtctatattccatgaatactcgaggtcttccccggattgtgttgtgacttgtagctatttggggacgttttcttcttcatgatgaggggcccttccctttttggctcgagtttgtctcgggactctgttctactggttctgattaggacgaggtccccttcgtcgaactctttaggggtgatattgctgtctcgccatgccttcgtttgcacttggtatctgttcaatgttttgagggtgaaaactcgatctccatcgagaaggtccttagtagttgactcatca

SEQ ID NO: 49473 - DNA, 429 bp, Zea Mays
catatctagaaattcccttggtcacccgaaccccagggtcagaccttctatgccacctcaaatgctcccaagtccgaattcttttaagtggggtagtattcttggtagacttagctgtactgccatcccacggaattggtgtgatcttagggatggactggttaaccaagcataatgtcgtcataagctgcgcagataagaccatccttctcactgaccaccaaggaaagtcagtctcgtgtaaggctcagccacccacccaagatccaatggtgtttaacctagcagcagaaagcatatctgtagtagaataattcatggatgtatcctagaagaattgccaggaatgtcaccagaaagagaggtggagttctacattgatctaattcctggcaccgcaccaatcgcaaaaagaccataccgcatggc

SEQ ID NO: 49474 - DNA, 498 bp, Zea Mays
agctcaggctggccggaccgggcaatggctgggactctcgtgcagcagacactgaattggacctcgcccgtgcatttcccccaacccaatttcatgaatggtggtctaccctgctctgtccacggtgacagtgcggagaatcaaaggaacaatgtgttcccgacgatctatggtggtatagttcaattagagggatcgaggagcttgaggagaacttaaggatgttaggacaactgattgaggagcttgaactgacctggaacaggctggctgcggtgaggctaaaccgagcggagttctggaacgatttggggagaatccaaaattggagctctctggtggaggagttgaggtgcaggtgggtgcgctagctgcttgattacttgacggagctgagggcgcggtcaatttatagagcccgcgagcggtggccgtgaatttgggcgacgacgcacggcggccggggaaacaaggagctactggcgcagtggattggtg

SEQ ID NO: 49475 - DNA, 595 bp, Zea Mays
cagtccagccggacctggacaaggcccccgcagtcagactccgggcgggacagccgcagtcagtagcaggtgcacaacatagccaaccagcaccccgccggcgaggcagctcgccgtcaagattatccccccagggccgcggcaatggcacgcgtggccggggttgggaacgagcgcagcaaccacacaaatattactgcctgtttcatggcgaagactgcgcgcacccgacgagggactgcccggaaacaaaggccaccagggacaggatgtctcgggcacaaccagccgacaaccaaagagtggccgtgcacacatatcaacaccaccacccacaaccatacaaccacggccacgcccagcatctaccccaaccacgcatatcagcaccaccaggaggtacaagttgtaccacccccactcccgcctccgcatcaaccaaacctacaccaccaaaatcacccccaagcaccaaaacaagaagacttcaccgatcagccgtatcgcggagtcattcacatgatcaccggagggtccagtgtcgacttcgacacgaagcggcaaaagagggatcactaccgaagcgtcaaccacg

SEQ ID NO: 49476 - DNA, 677 bp, Zea Mays
cggagtcctcgccgcgggtggaggttggcgaggtggctgatcttcctagtgcgaggaccaagtgccggcgacgaagggtggtgttgaagcatagcgtgggcgaggtttcgcaaagtggtaggcaccgtcgaatggggatggagcaggaccgtcttcgagtagaccggtttggtaaacaagagctattgtcttcgccgattgggacgagcattggtgagggggatctgcagaatctttttgagggtgagtaattgaaaataatgttgttcaattatagggaggcgggcatcatcccgaaggttgagccgatttagtatgtggttccttcgctgagtgtatgtaactgcaacttgtattgtaatgtggcctgttggccgttttcgcgcacttgtgctaatccggctgcacccttaggcgacttttgcgtggagtgtcgattgacacacttattgcgcttatccggctgcacccttgggtgacttttgcacagagtgtctttttagtaaaagattttgattgacgcacttattgtgcttgtccggctgcacccttaggcgacttttgcatggagtgtctttttaataaaagacttcgattgatgcacttgaaaaaaaaaatccggctgcacccttaggtgacttttgcgcggagtgtcgattgacgcacttgttgcgctt

SEQ ID NO: 49477 - DNA, 470 bp, Zea Mays
gagagtgtgtctagtctagtagtagtagccattttcgcatatgaaggatgcattggctcttctgtcttggctcgagtctagatgtacgtgtgtgtggctgacttcaaccactggacagtctggaacaatccctcttcttccattattccatatatactgttagagcagctccaagaggatgtttaaaactatattatttttagatgtgtttccgatcctattcgagacaatggctacacatcttacaatttggagtctaattatacggtgctttgcccaagcataagaggaactccaacaatctaccgatatgaatacatggactctaggagtttaacattgctgggcgtgtccattatctctcccttgggcatgtcagtgttgcaagcacatggttgtcatcaacattgtcagactatctcgttacgcatccacatctctgtatttatattcaagcttcactctatgaa

SEQ ID NO: 49478 - DNA, 848 bp, Zea Mays
cttaattggactggtccaaccctaattgatgcttgttcatggccatgacgacgctagagctccggtgagcgcgttccgaacaaccaaacgcggtagtgtttaaattggagctagggcgagtttcacttattcaccagatgatgggtacatgcttgaatttggacggagcgggtatgggaaagtgggttgtcgggagcgtgctctcagacgtgttctgcggcggcgaggtaaggttctcgatgccctatcgcgataatattcaatcggttgggccgacaagctatgttaacattcaaggatgctagaacatggcacagaggggaaggaacaaacctgggaatagttggtcacggtcgggtgcctcacggcggcgtaactgaccacgatggggaaaactgcaatttgtgagctctggtgggtaattggaagcgaggaagggtgcactaggcgcgtaaccagaaggcggatcagggagagcctttaatttatagtagctacatgagtgctttgtgaatttgggatgagaatatctcacgaccagaagggatgtgagtcaccagagggcaactgttgtggcgctcggtgaggtaaagcccctggcagtaaatgggctgtccacagcgacctattgcaacgtggtaacgtctccaagaatgaggcatcctcgcggcgagcggcagacgccgacggggacattccgtccggtcgcgaagcaagtggttacggtggccagctcacaaacttatccgtagtcatgatcttttcacttgcccggtaatatccacgttgatccaggcacgaattttcagggcaagctcgaatcacggtgcccgatcaccggtggtgag

SEQ ID NO: 49479 - DNA, 633 bp, Zea Mays
gttagattaactaagttatctggagggacggttatagcttcaatagtatatatgtcttccggttggctacatagcgcgcgcccatacaccaaatcagtgggacacatacacgcaccatgattgcaaaactaattaagaaaaggaaggctatgagagggagataaactaaaaggcaacacaggaaaaaaaacgtggggataagatatcgatacaaagaaagattggtgaggtgcggtcattgttgaagccctaagccaagagaggccgttctaggtccaccaactggttgttatatggagatggagaccatccatccatccatttatctacctatccaccgtctgccgtctccgtatctagcctggctgccccatccatccatccatccgtgctgctaaccaaaacgcccactcccaacctcaatgtgtgcgtcgctagcctcgtgcgtacgtggcttggatttcatttcaagagctgtttattttctctgtctggatcaaatttaaaatcaatcatccatgcgcggtttagatcaagagcgttatcatcgtccgtaactgtaaagcgcccaacttgttcatcttatagttgtcagtttaatcgccagacacgtcggggtgctccgggctaaac

SEQ ID NO: 49480 - DNA, 392 bp, Zea Mays
ttcgtgctttaataacagttcaaggctaccccttaccagtacatgctgactctgggatagcgcttgggttgtggcagccggcggcgaaggtcgaaatgctactgctcaattcgtgcactatcccacagtatgtccctagctgagtagcagttctcgcgtctgttctctatttttgggtcctaattacttgttcaatattctgtcaatagcagtagtacttgtgaagataactcttatcttttgtttctctgtttgcattatttgaattcagactatcagaatgcctcgaggacaaagctcttctgtgtcaacccgtgagaatcccaaagttgatcgggcaaccgattcaaatgatgacagccgcaagaataggaggggtgcttatttgttac

SEQ ID NO: 49481 - DNA, 321 bp, Zea Mays
taacaaagctaactttggacttggattcaaccttgatccagtgctcaactaagtttaatccctatagtcgagttgtagctggtttatagcactacaatattgctgcagagatctggacgagttgccatttgaatttgggaggaaatggagctccaagatgatctgtcaggtgctctgatgaggtctcgccatggtacagtgtcccgatgtggatcaggtcgccagcacggcaacttcaccgccgatgacccatccgcgccgcgattagcgccggggtcgggatgatctggcggcgagcatctccgcgtgaagacccttttg

SEQ ID NO: 49482 - DNA, 418 bp, Zea Mays
ccattctgagccgtagatctaagattcaaggggtgcgcgtcacgctcgattatgtggagcacggttcgttgatcgcggatcgtgaggctagcatcgcgtaccggttcaaagatttcagaaatctaatccgggtcgtgtagctgtgatcggacggctcggatttgcccatacctctttaaccgagaccctttttcacatgaacccttatgttattacagaataaaacccgtagtccacgtggactgtgcgctgggtcttggtcatcttaccccgaggcccctgagttccctgtaaatagtgcgcccagtccatagccctgtaattttagttatttgattttagaaattactttttaacacaaaaataagtgctaggactttaataaatcatagaaaattcacgcgaactccaaattaac

SEQ ID NO: 49483 - DNA, 622 bp, Zea Mays
attacatgtcatttttttgttagaagtttgacttaggacaaatcccatattcgtgatcgtagtatgaatgttttgtgctactgaagacaccatgtttaatttacttcgtataaggaatttgattttgatatatgcagcttaaatatagttgctttgctttacctacataatgctcaaattatatgtgtttttctattgtaaactgatttagccatgtagcctctcccaaatagcttcgacactaaaaggttggggaacaaatagtacatatattttctgtttgtatctgtgttctaattcgtttagagttcaaatctgttcatatcgaaatgctcaaattcgatatatatgatgtcgatatctattcatatcttgtccgacacaactgacagtattcaaatctaaattcaagaatttgataaccatgtgtgatatcaccttgttcctgagaccttgaacaacgaaaaggttttgtaaggaaaatggttagtttcactgaaagcaatagagtgcaaacattgagtttccttaggaaaacattagtttcagtgaaaccaacagagtgaaaggattggttcccttagctaagaaattggttcgtttagagtgtacttagctgttt

SEQ ID NO: 49484 - DNA, 711 bp, Zea Mays
gcgtaatctctgaaaccactcacacttcaagttatgtcaattgtcaagtctatactgatctgatcattgataattattagctagctacagatgacaatgagcggcaattaactcttgttcacaagttcctgttaataactgagcactgccttccttttgcccgagattagcgtgctctggtagactggtactcaagtgagcattagctgtatcagttgctcatgcacaaactggtgacacatcgcttctatcggacagcgatgtgagtgtgacgacggctggtctttttgacaaagaacgtctttttgtggccatgctatatattaccttttgaattcgacgaacgaccctttccaaactctccagtggcatgaatcaatctggctagctagagagatgcacctagcccctgccttgtccttttgtggacgcaagccaagtaagggcgtgccgcatgcctgggtgattagtcagaaacagagaaaataactgtctccatcttatcatcgctgtttttttatatctctactcctttaaatcaccatttcgtagccgtttccaggtatgaacggtggcgccccatcgaagaccagagctctgcttgacccacagagatcgagcacttttatttgggagtagcgaggcatggcactgacgcgggctgggctcctgttcactgtgagtaaaatcagagggcaggtggaggaacgc

SEQ ID NO: 49485 - DNA, 541 bp, Zea Mays
gctgggcttttagagggggaacactggagatgttgggaagggtatcaagtgtgttcctaaggtggttaggttttggtacccacacttgtttctgaggaggggctctcacaggcctttcaatcataccatctctcacaggggtgataggcttaggtggggtgattttgatacgcttgggagtggctgatggtttctttgatggtttcaatccactccactcaccaaccttgccaaggtgagcgtcactcccaaacctagaagcaaagcctattcccggtccaccagttcctctcttgaactggctgaccactatgtctaactagggctcactacacgacacctagctcaagaccgactgaaggtatgtgttttctttcatgatccaggtattgttgtgtctgcatgacccaagagtagacttcaaaccctcacaaagtgcacactgcacaggtgcagggcactcactgagctagccttctcaagcaaggctatcctagtgtttctctctgctagctaagtctgcaagccaggacaagcggta

SEQ ID NO: 49486 - DNA, 434 bp, Zea Mays
cggtagaaggcacgtccgggtgcagtcgagcatacaggtcatgaacttcttcatgtaatgtattacaatatgcttgcaggttatagatggccgcgctaagctcatcaacacgagctcgagcttttgcttcatggtgccaagcgatcgaacgtgagttaatggcccaatcgatggccgaatcctgctccgagatctcaaacctcaagcggctgacttcagctgacagttcagctatacgctgactgcctgctctcgtgccctgttccggtggcgtagctctgatcggagttgctccaccttagcttccaagtctccaatggggtcgttggagccactactgctcccttcatgtctgggggctaactgatgacgaggcacgcccaaaggtccagtagatttgcgtgtagttttcctcgtacgtgccatatctccat

SEQ ID NO: 49487 - DNA, 411 bp, Zea Mays
gttcggaatggctggaaatgtgtcatgagatgaggcaagaacaactagaaaggcacaacaaccaccaccacctccaccaccaccagtagctccacccaaggataagcaccgtgagtttatgagtcacaagccacccacattttctaacccctcggatccactacaaactgatgactggttaaagtctgtggccaagatgctcaacatggcttagttctctgatagagagaaggtgttatatgcatcaggtcgcctcaccggcccagctacggattggtgggatgcatattgcactgctcatgctgctgccaacaccatcacctgggcagaattctccactcaattcaaagatttaccatattcctgctggtcttatgaagattaaaaagaaataattcttatatctcaaac

SEQ ID NO: 49488 - DNA, 604 bp, Zea Mays
gttgttcctggctggacgatgcacgggaaatgagatcagtggatacgccatgccaaattcgacgtggatggaaatcgcgtcgacggcgtgccgtgctcgagcaggcgctcagtcgtggattttggtccgtgtccatgacatgttgcctcaacgtgtggatgtgggggtggcacgcctattgtgcacagagcacgtacacaagccgtccgtggacttggcgttgacgaaggggaaccaatcggcagaagtcgttccgttctcgttgctaattggatgattgattagtgcgtccttgactgacccgcaccgatggaagggaagggagtcaaactttggtttgagtcggatcggaatcagaccatcggatggatgaaatggacgatgagaggagctgcctctgtgttcctgcctttcccgatcccaactcccacgcttggcgtgacgcgccttttccttttcacccatctcttccttcctcaattcgtgctccaaataagcaacaagccgacccaacgattgatcaagcaaaaagctgcttcttccatatgatccaccaccgatcacttcataactagcctcttctttccttcaattcgttcacgac

SEQ ID NO: 49489 - DNA, 518 bp, Zea Mays
gtccactgttcagtcccctcacctccagttgctgagctgtggggcttctctgtcagatcttccccctccgtatccattcaacagaacgcgaaatcgcgcacgggtttatcggagcagcacggtgatctccggggatttgttgggatccttggccataggggcatcgcggtgctgcatccctctcgacctccaagccaatacgcgggggcagcttgtggtctctcaccgtgcctttgcccaacggagaggggcatgggtcgccgccgtcatgggaatcgatcggggctgcacctctgtccatgaatgggagccctagaacatcgctagtccatggggcaacgtctcggggcggtgggactcacgggggaccaacggggtggctggatttcctccccatcgctcatgcaccgccgctgaccacacctcaccatggcatgcgtcgcttgtgcaccgattgatggtaagacgcaatgcaccgagttcgccttcttctccacttagtgtagcacccatttgat

SEQ ID NO: 49490 - DNA, 954 bp, Zea Mays
tgaagctcgacatgagtcaactgtaccaaagtttggcaactacaagattgcgctccttcccaattgtccaaccatgacaccagggtcaaatgattgtggtttttttgtcgcaaacttcctccgctactacgattttgatgatggcgacttatcagaattttatactccggtatgtcactaaattattcttctaatcttgcatatattactccttcagatttaatcctaccattaatttgatattatggctatttcaggatgaaccattggaccaacgtgcctttgttctgcattaccttacctttcatcgcaacaacatggttgccccccttcctacagaactgctgcctttcaagtatgctccaaggagacaccgctgtttgaaagccaagacttagatagcatagctgaacatgattccctgtgggatccacaaaactgtttttgttacttgttaagtcacttatgtcaggcctctgatcatgtgtttgatactccgtgtgccacttatgttcaatgtgtctaatgtctatgctacttcgcatcagtttttatttgaagtgtgtcaaacataattgttaccagaatgtctatttatgttatctgttaacaaattctatgctgttttcatctccagtttgtgagatggttaatcgttttgcttccaatgtttggcttatttgtattatcatattgtttcaatattcaagttttatgcataatatatacttccttattttatatacactaggttcatcttttatacatttttcacgctaattatgctaattgtaacaagtgtttatgctatatcctgtttgttgtatttgaagtgcgaaaccgacgtatgcactcccatttgattagtattgttaagtgtatacagttttatataccattaatgtccagaccttccgattgctaaacgttcaatgccaatttgttgtacatatt

SEQ ID NO: 49491 - DNA, 457 bp, Zea Mays
cgagccagagacaccaaacagcatcctcggctagctattcacttctggtatttggaaaaaaattcgatgcacgcacccggggatccaaatctcgacgaggccctccctcgttttggcttgcctatatacaagctgaagctgatcgttcgatcggccggcactgcttcgatcgttccatggaactagcttcgtgtcatgttgcgcgcatgcatgcatgggcactggactgagcacgcggcggtggcggtacgtcttggatgcgatctcttcgcaagcatgtgtgtattgtgttcgccttctcttatataattatctagttaaactttagcgtgggtgatcacattgatgtgcccctgtccctttcctgtgtgtgtgcgtgttactgttaaggggacgtaaacgtacgtaacgggctgtaccagtatagtacagctgggctgggcccaataagtttctc

SEQ ID NO: 49492 - DNA, 683 bp, Zea Mays
ttcgctgagacctaattcaacacctaacgaacgtttcccctcgatcaattgcatagttcgagatctaaatcaccctatccacggagacagtgcgaaccacggatgagcagaagtgttcccggcgatctagggcagtctagcttaattgaatgggtcgaggagcatcagtggcaggtaagagtgctgaaacaagagagcagagggcaagatcggacctgaaacgagctagccacgtcgaggactctttcacggtggcggaaacctgatttgggagaatgagcaattcgtggactctggtgaacaattggaggcaagtgctggtgctttggatgggtaattaccctacggagctcatggcgtgctcaatttataggtcccttgagcggtggccagtgaatttgagcttgcgcggtggcggtcggagagaaggaggtgcactggcgcaagcgattggtggcaattaccgtggcaagctcaccgacgaccaccggatgggctaacatgagtcacatcgatgtggttaaaggctgcgtggtgtctaactccggcgagggtagatccgaagcggccgtgagctaagcggacacggcggccggagtgaacagtcgtcggagttcatccactaggtgatatttcttacttcctctgcattatccaactacggcaagcacgaatcaccgtgg

SEQ ID NO: 49493 - DNA, 411 bp, Zea Mays
cgttcttttctttgcgcaatcactgagacaacacaagtgcgactcagtcactgctcactgctgcactcaccaccagggggcaggcagaccatgcacagaatcggctgcatgcgtgcgtgattgcagtacggccactgcatgcacagcagcaggccgtgtgcagctgtctggagttcctttttttaatatgtatacaaggtcggcgtttgttcccagttttcctgtagtgttaggataaacccaaaacgaataattcatgtgaacggagggagtatataaatacctcacaagggctcaagagtcattcttcattacaatagcctcactgaatgggccctagttgagccgttaccagggttacagggccatcagatcctcaaaggcgaaggctaaactgcatcctggtccaag

SEQ ID NO: 49494 - DNA, 386 bp, Zea Mays
ccggtgccgcacagcttgatcatgataacgcctcaaggtctgctggtaccgggccgactgaattacggtgttcaatcgttcttcctccagtacatcaatatcttctagcctggtagcttctgcctcggctatgctttcgaaggtcaaccttggcgccccgaatatgaggtcggcgggtagcacttcttctgaaccataaaccataaagaacggggtatttctatgcagagctcgactaggttgagttctcaagctccaaaccacatatggcagctctctgatccactttcctgcaagcttttcattcttgtcaaacactttcttcctgagcgcttcaagtatcattctgttggccctttccacttggccattagctcttggatgcg

SEQ ID NO: 49495 - DNA, 691 bp, Zea Mays
gggtgcatgtttcagtttggataactaaacttggtttagttggcgtgaggtgcactgaacctcaccgtcgccaacgtgctttgcgcgtcgtgatttggtttgagtcattagattcgtgctatgggcatgcaatcaatagcgccactgcatcgttctacaggttgaacaaagatttggctttaaagttatccgctcgccatgccacttcattgttggccctattctggataagctcatcgccacaacgatcgttgtagcttcgggtgtggccacacagctggtcagcttgggcacgtcctctgctgcggtgtcaaagttctaggtgtttgtgtgccacgcaatcctgtaatgtcgccattgttttcacttggagtttcctgtcaccgcgccatcctctctcctctctatccaaattgaccaaagtgcgagtagcttccattaaactgagcaaaacgtccatctcacctctcccttatgcgccttttctaccggtcgtttcactagtttacccagcacagtcgaaactcaccggatttccctgagcttgctcactgccatcgctgtgaaaatgcctcaccgtggccgggccatcccgagcatgtttcatcccgtggcgtccatgttttagttccctctagtagtattgaaggtcctcgacttgattgtttcagctctactgttatgtcttcac

SEQ ID NO: 49496 - DNA, 449 bp, Zea Mays
tcaagaaatagacataatctgatctctcgatctccgtgaagtaacacaatcgtgagaaaaaggagtgcacagaagcaaattttccttgccttcaaccacgtgcaggccttccacgcccaggcgagatgatggtgagggtcagcgcaccgccgcacgcgatagaggaaaccaccaaacggatctggagaatggtgttgtgctgatacaataaaggcgatggctgcgtgtcaggaccatggttagtctatcatcttcagtagagtatttgaatattcgtggttgggccgtcagcccatgtaagaactaagaattggccggcagtatataagccggggtggtggagggtttaaaaacaagaaaaaagaacagaactcgtttacctgtatcttcttcgttgcctcacggactcagccgtgttctctgtcttcctctcgctctccatcttcctg

SEQ ID NO: 49497 - DNA, 485 bp, Zea Mays
caatggtctatgagtaaccgaaagatcattcacttcaacaacatatacacctatatgttgcctgatcgagtggagcagatgatgctatgctgcttgatgtatccaaggggaacaatgacaacaagcctgataaaaccgaattcaagctagagcacatatggtacattcttcgccatcagtccaagtggtgtgcgaggcacaatgatgatgactcgagatgagagcaaaacacctttgtttgaacatggatgacaattatagctctacgtcataggaaagtggggacgtaccacaccccattttccacaataagacaaaagctcaatggaagagaaagggcctaacaacatgtcctcattcacacaaaaaaagaatattaaaaagcgccacaaggctagcaagaggattaatcaaactaaagtattttagtatttcaataaattactggatcgcttcacgatcgacatagatgaagatacaaaaag

SEQ ID NO: 49498 - DNA, 602 bp, Zea Mays
cccagatagaaaccctagttccgatgtaaatcctctgcaagttctactcattggaattaccgtcttccacgggattagaggtgcagtgtcctggttaaaccaggactgctcttttgccgatgtgaatttgggaggggcgaggaggaggaggactggactggaggaggtagatctagatctctgagcctgcaaagttttcagtggtacatcgccagagactctctctttttttttaaccgctgccactacctctccatcagcacgaattacaagaaaggccggggtgatggcattattagtttattacctctagtgctaggtggttgcggtaacagcagcagcagtagatcccatctagcggcgcgagggcatgtgccgccctccgtccatcaatgggcggcgtggatctgatgcatccttttgtttaacctctgcagagcgggagcaggcggggcagagatctaacagtaagaaagtgctgtgattgttaattagtctgttaatgcgcgacggaacttataatctaacagttgtgttaccaccgcttcacccagtagcgagtactccagctgtgatctgccccctttttactttgttttctt

SEQ ID NO: 49499 - DNA, 455 bp, Zea Mays
gtgtggccacttgtagatagttgggagatgccgaaggatactactgctgggtccgccgaaggtggattagttcgattaaagtatacctttagattcacggactggtttgacgagccaaatgacgattggctgaaaagcattgaggctactagcgacgagttgcttggaacatataccagggtcgaagatgatgccttgtcctcagccttcgggggtcggggcaagaaaagattgaacagggtttttgatggaattggcttcatatatcctgactactgctaccccttgagaaggcaaggaaaaaagaggaaaactgccgcttcggccaccactgcagtgccaaagggcaagaaaataaaggttttaatccaccggcctcgatatattgaaacgaccgtagtgcctgaatttggtgaagggacctcctccactgccgaagcaaaacaagttgctcc

SEQ ID NO: 49500 - DNA, 536 bp, Zea Mays
gaagtggtcgaggtcaccgtagttgaagcatccatccttcgacccaccacgccaccgattctggcagttgttgtgcaactgcatgaaccggctggccacaagtgccagcttctcatccccaaggctttccacctgctcctctgtgatagacaacaaagaagatagaaacaaagtaggtgaggggttagaagcagaaccacctccagagactaaggccatggtgggtgcaccaggatcttggcccgggtctggtggtcaatctcaatggacttaaccttgttgaacagctcgtccaaggtgagagtctcaaagttgggcgagtcgatgatcggcgagaccttcacctcccaaacccttcgatccagagcatgtagcaactttatcgctctctcatgatcatcatatggaagatgtgccttgttggcacgcatcttgttcactatggctagaaacgagccgagtcgagcccggcttggctcgatgtggatcggtggatgatcgagcttggcttgcatgagctcaaggatgaggcttgg

SEQ ID NO: 49501 - DNA, 661 bp, Zea Mays
ttcaggtttagcttttgaagcagtacagttcaagctagtttgtaactgcctcaagacaccctagagtgttcaatggagaatagacctccataatgtctgcctacagtgaaattccatagaaacattccaatatggagccgttgaatatttcttttaccacacaatcataatgcaaaagcaaaaggatggcagaaaaaataggcataaaacagaaccatgatgtcctaattgttctctacaagaatgtcccacagctgtaataagaatcccactttgataagtaactggctaactacaattaaaaagtattagaatattattgttcatggttcattaactaagcttggcaactcaaaccatataaaagcactatacttgaccctaatagcatgcagttacaaaacgatagtgtgccttggcatctcactaataattattgtccaaatcagacagtggttcaaattcccagccagttattgtttttatcctaatccaacctacaagtgcaaacatgtccaacaaccaatacactaaattgtaacttagaatgactgcaatgctaaagccacaatctgctctggcataccccaaaagaagtaataaaccacaaagtttttccccatctcctactccaaagcgagattaacaagcaagcccgttg

SEQ ID NO: 49502 - DNA, 521 bp, Zea Mays
ggaagaagagcggaaggtccgcggcagtggtataaagcaggaaatacaaggcagatgagatgaggaaagccgcaagcaaggcccaatggtttcagggacttacataaaaccagcctgaaaacaagtttggcagcaccttctcccttacacaaatgccgtctaggatctaaaaaaaaaaccaatggatgacagccaactgcttaaagcttggcaccaaatggaggtggaattcaattccttgacgagtgatgactccaccgaagggaagaggctgaatggaaaggaaaaaaataccaaaaggaagcacccaaggtagaaacatctggcaggtaaaaagaagggagggaaattgctgcggaggcagacatggtgggttcgttaacatgcttatgttgggtgagtagaaagatgctaaaagcaaagtgggcggtgatgaatggtcctcggtaccggctgacagattgcaactgaagatgatcttttttaaagacagtatgtttagctgtgaccgttttccaaac

SEQ ID NO: 49503 - DNA, 614 bp, Zea Mays
gcgatggtaaaccccgtgagttcaccattgatgagaatgatttggtttgtttcaggggccgtctttgtgtgcctcagaaatcagaggtgaagatggatatcttgagagaagctcataaaacgccttacaccgttcaccctggcgaaaccaaaatgtatcgagatttgaagcaaaacttctggtggaagagtatgaaggttgacgtttctaagtatgtggccgcctgtgaggtatgtcagcgcgtgaaggccgagcataagaggcctacaagtttattgaagccattgtaaattccagagtggaaatgggagcatatcaccatggattttgtggtgggcttacctcgttctcctcgaggcagggatgctatatgggtggtagtggatcgcatgactaagtctgcgcactttattcccatgaagaccacaaattcaacttcagagttggttcccttgtatatgaagaaagtaatcaggcttcatggggtgcctaagtccattgtttctgatcgaggctccaactttgtatccaaattctgggagaggcttcacagtgcattgggtaccaagctctcacttagtgacgcttttcaccctcagactgatggtcagtcg

SEQ ID NO: 49504 - DNA, 385 bp, Zea Mays
tgggtgagtaggcgttacggcggcaaggacgcaaggttgtggcattgtcgcaacttggaggtgggggtagtgaaagactgcggtagggttctgacggcaagcgtgcgtgcatgtgtatgggtgggtgagtgcgggcgagcacatctaggtgctatggcactagatttctttgtcctatcagtagccaatgagagttatttatttttcgtcgacttttataatactcgacggaaattaactaacttggatcggctagttagagggttgatagaagttaggcctaattttcgtccgctaagcaatagccgacataaatttgttaatttctgccctaaaaatcaatggaaatcaactagattaacggaagttcctgtttttattcgtt

SEQ ID NO: 49505 - DNA, 553 bp, Zea Mays
ctatcttaaactgtaaaaaattgtatttatagagtctagtttaaaaatagaagataaagatgaggcagggttaggcaactcactcgggcggcgaagcggtaaggcgaataggcgcattgcatgtcgatggcgcaggcagaggatatatactccgtggcgcagatgcttccgacactggtcactggccctgcaggaaggtaccttcagattaacgcataagccatcgtctgaagctgactgccggttgaacgccataatgcgtgctcaggaaagctgatcgcggcagagaacaaacaatgccctgctttgagatgtaaaggaaaacattcagtgcgtcaaagcattagcttactgtccatcgtttttagattattgttgacgcgctaagatgatttcgaatcacacgcctgcgagagttagcatgcccaccgttacaaacaatcatgatcgcagcaagagaaacaaggaagaggttgcgttaggttgaagagtggaggggaatgaaatggttttattcttattttctaaatgtttggttgttgaagttcccata

SEQ ID NO: 49506 - DNA, 361 bp, Zea Mays
aaagttgtgcatcaagtattcgaatgacttgcatcttgcacattgtagcgtcctcagaactagaggggatcacaacataccttggtctaggcataatatatcaattgcatcgcaaaaagataccaattgaatagatgacataatacaacttatgactagtggaaacaatgcatgcctcaagatatataaccttttaaaagcaacctaggcacgcttcacacatgatgatcattgcaacacatagaccaattgaaaaatgacaagatcatgcatataaagcacaatgtctaagcacaccatgattaagaagtattttcttaggtacaccaaaggaaacaacattttaaagcataaggcacct

SEQ ID NO: 49507 - DNA, 967 bp, Zea Mays
ctacgtttgaccacatcagaggggtttggcatctccttccatacaaggcttcaaaaggtgacatcttgatgctggcctggtaaatgttgttatacgaaaattttgcatacggcaaactggacgcccaatctctgtcaaaggtcaacacacaggctctcaacaaatctttgaggacttttttgactctttccgtctgtccatctgactgggggtagtaggcggtgctgaaatccaacttggtgcccatagcttgctgaagactcaaccaaaacattgacgtgaattgtgttccctgtctaacactatttttcgcggaatgccatgaagtctgactatttccttgaggtatatccgggcgagggtggctcctctgaaggtagtatttactggaatgaagtgagctaccttggtaagacggtcaattataacccagatagaatcgttccctttttgggtttgggcagttcgattacgaagtccatgcctatttcttcccacttccatttgggcactgggaggggttgcagtaggcctgcgggcctctgatgttctgccttagttcattgacaagtatcacactgggccgcatactgagctatctcctttttcattcctctccaccagtatctggtcttgaggtctaggtacatcttggtagaccctgggtggatagaataggctgagttatggcttcatctagtaggatttctcgtgcctctcccttcggtacacacaaacagtttctgaaccaaagggtttcttcttcatctgtcctgagatccgggagttgttctttgctagccttttctgcaagtcctgccatctcggcgtccaaacgctgagctttgcgaatgaggtcttccagcatcggtttaacttctatactgccattttctcccaaacaagcattcaggtgagctgattctctctcctagtcttccaggaagtttgttgctttcttcccgaa

SEQ ID NO: 49508 - DNA, 582 bp, Zea Mays
gtcatacaaaatttggagaaaattagatctaaagtcaggatgacagtcagtcaatgaactgaataatggttaacagtgaagttgggcaaactttgagattgtattcgaccatgatccagtgattgtttggctatgatttctatagcaagattatagccgaatcatagggcaacaactttgttacaggcagattaacaagttgtcatataaaaatctgagatttgagcgctgcaaaccgctctgtcagaacaactgaagcagcccctgatggtacaatagcgaaaagatcttctggttcagtgaacctcgtcgccggtgaccccgcgctcggattcgcgtcaggcgccacaattcgtgctcaacggagtacaattaactgctcagggtgaccccgcgctctaccacgtcgcagtaaagtgtcttggcgtgtccgttcatcaccggtgactttgccgcggtgaaagccacgcacctcttgcgccagtgctctcccctctctccggccgccagcacaccatgcccaaattaggagccactgccctcgggccctataaattgagcatgccatcagctccactaggt

SEQ ID NO: 49509 - DNA, 419 bp, Zea Mays
ctggtggcctatcctgagcgcacaggtcgtcgctaccgcgagcttaggggtctgcgaggaagagagggagaaggagaggggtcctgcgtacctggtaaccgctgcccttcacgcctgtgatctggatccggggcgagacgaggagctttgcgacggctagggatgcatttatagaaaagagaggatgtagaaggcggttgtaaaatttgtcgcagatcgcgtcatggccgagtgaaaaaagacggtcacgcgacgagttgcgcaatacagtgtacgacagaggctgagtcagacggatggtagaaagggttagataaaattagacgaaaatggttagagctggctcgcggaccagagatcacggggtggaaggcgaaggggtagacgaggatagacaaggattatgtcgacgacgcgag

SEQ ID NO: 49510 - DNA, 904 bp, Zea Mays
gttttcaagagttagtagaggtctggacgacacatattgtttaggcacatttttataatctgccttagttgggatctttatctttgcggccatttccttagccttttctacagactcctcgtgctcggccaaatcaacagtacgtgacgtgaggtcccgtccaatccctttaaaaaatcgagttatgccagcagtagtagctttactcttctttttctcgaatgtagacaccaattttggtagaggaaatttagatttctttgattgtcgtgaatcccttgatggatgtggagaaggtggtggtgtcctaaatgttgatgcttgtggcggagacggtggattagaaagaggatgaggagcagcaagggaagattgtggagttgatgatggatgtaaaggtactaaagtttgaggaggcggagatggttggggatgagacgacgacggcgttggtgtatcaaccaattcgacatcccttcgaggctaaaggatgaaattttttatggcttgtccaagtttctcgattcctttgggcccatggatgtctagcatgtcgtccttagatccttggacgaccatcgtcacttctatcctgcaataatcatctggtatgtcgcttccatgaaacttgcgtcctgggatcgcaatgtctgttcctactttcttcgtgcgattattattaatatcatatcttataaccagtgtgcatgtcactggccttgttatgtcatcaactggataacagaccttatttcccattgacgcgatagagcttgggacggttgtacaatcagtggaagccggcggttgagctgttggaattatttgtagctatggagtggtcatctattgatcagacatcgcacttgccaactgctgcatcaattctggtgaaggatttgat

SEQ ID NO: 49511 - DNA, 794 bp, Zea Mays
ttcctctatatacccattcaaaaaggcacttttgacatccatttgaaaaagcttaaaaccctttaaagcagcaaaggctaaaaggatcctaatggcctctaaacgggcaacaggggcaaaggtctcctcataatcaattccttctttttggcaatacccttgggcaaccaacctcgccttgtttctcactaccaacccatcctcactctgtttgtttttgaaaacccatttggtaccgatgggatgacagttagaaggaggtggcaccaaaacccaaacctaatttctttcaaaattttcaagctcctcatgcatagcattaacccagttaggatcagataaagcatgtccaacatcccagggctcaaaagtagcaacaaaagctgagtgagcaaagtgagaaatctgctgtgacctggagcgagtgactcgctcgtgaagctctccaatcatctgctgaggtgggtgacgacgttgaatgtgctgtggagcctcccttgaggaagtggcctccccctcaacaacatcttcagctcctccagtctcagcaggagctgaatcgagcggaccccaagtggtggaagaattggggtcaggcccgtcagccgaagtagtggaagcaggctcgactggggcagccagtggagtcggctcgggatcaccccaatcggcgtcgtcgtgctcctcctccacaaaggtggtctgtcccatctgatctggacctgcaggctcaaagacaggggatggacaaggtgcagtctcatcgaatgtaacctcacaagtctccataatgt

SEQ ID NO: 49512 - DNA, 758 bp, Zea Mays
caactttgatgcagacatcctctttggttgttacacaaaaattggagataatcaaacacaaagtcgggctgtcaggctgtttgatgtctgaaatttagactaacagtggtactgagtcatcttgggagccttgcagatcaagaacttcaaagaatttgtctcgagtcaatatagcaaagttatagagccattgtagaggaacaactttgctataggtgtttgggcttggtaccatatgaaatttggagaaatctggacctaaaaatggactgtcaggcgctctgaagatccttcccatggtacagtactgaaactgaaacagatcatttgatttttccccttcgccgccggtgatccaccgtcacagttagcgcctgtctgatagattcgtgccactaggggaatggataacgccgaggacggtaagaatatcctacgccgggtgaatccggtcactggccggacctgtcgccgtgtcccgtcgtagatagttgtgctggcatcatcggcgttcgttgttattcagccgaactacgtgccacgaaactattctacatcgcggggagtcactaggagccgctttgtagcataagttcgtcaccggtgaggccgccacggtgatggccacgaatcaccgcacctgtgacttatcccatatccgattgccactgcgctcaactcaaattcactggctggtgctcaatattgctataaattgaagccaccgtgagctccgtagggtagtcaagcacccagcc

SEQ ID NO: 49513 - DNA, 459 bp, Zea Mays
ctcagttacttccatgggaccaggatgatccaagtcagtctcccgaccctcgagatcgcgctccaaggtcgacgaggcacgggatgatctcaacccagcatcaagcacatcaacacaaacctccatcacgccatcatccactggctccgataacaaatcctctggaaccatatcctcaagagtctgatcaaagttggccagggacagttcttgcagaccaatgagagcagacaaagtaggagagggaaccccactactttcaccgctagcgatgaactgccgactgtttttccgagtcaaaggaacttcatcttcttcctcctcgtcgtccacattagcaacacaggcagcacccccattgggatcagcaacagatggaacactcacattgggatcagcaacagactgggtacacccattggggtcagcgtcagtaaattcagtcacagacacttcttc

SEQ ID NO: 49514 - DNA, 1026 bp, Zea Mays
cctgcattgctgttgattccttggtgtgttaggacactagtgcaaacactgcagtctccgtccttggcgagatgccctctagggtctatggtgcgaagattcttagtgagatggaccttactactaatgaggtggtcgtaggagcatttgaaggagattctcgccaaatgatgtccactgagcaaaccatccattgatgtgtcttcagtgacctccacgttgcttcaggccatcacctttgttgaggatattgttgtggtggaggatgcatcagataatgaggaagctaccttggttgcgcaaactatttttgaggacacatatttcttaccaccatagaaaacggtcctcattctatggttgaggacaatcaaaacctattttggtgaaggacgcatcagttgatgaggaagctaccttggttgtacatagtccttcactttctatggttgaggataatccaaaacctagactggtagaagatcctctgataaagataggtcttcttagtccaccagagctagaaagaatgaggaccttgcatgccattctttagctccactctcaccattgactatgacagttagacgtcgacaaagtactatatataatagctcgtcgcttcgtcgaagtgcccgtcttgcacaacgtagtgtgtttaaagatctggggattgttgggattgacagaaagcccaacaagagtttaatttaagcctgcgtagaccatccaaacttgttgccaccagaccttctcaagaagcttttgagtctaaaagatcgtgccttttgaccttgagactttgtagcgtagttttatttgcctattcattagattgtctttgttgtactcggtggcttatagttttatttgcctatttattagattgtctttgttgtactcggtggctttttgttgtgtgttgttgctaaggtgttgcttttgttggtagtgttacagtagtttttgctgtaattttgttatagttctcttctgaaggtaccttcctctttgtcaatataatcg

SEQ ID NO: 49515 - DNA, 566 bp, Zea Mays
ttttctgtcttcgacatcctgctgcatttccaaggctttgctcagtagtagactctgcaaaacaaatcaaagttagaatacacaaatcaccacgaaggtaataatagagagctgtagagaagccttactttgaaatttgagtacaacaagttgtcgataatgtgttgccacctatagcagctaatgtctgtttccagcttcggaaatccaacactcttggatagggtgcttataattttcgcctcaacacggtcgcaaatgcatcccaaaatctcttcgtcgaccccgccgaatagtatggatctaggctggtaaccgcaggatatagcaaactcttttaaccctgatttatcctttctggaaagttcttggccacctaggtgtcgaaggtcaaaatctttatcttccgaagaggcaccttcatttctttttcccttatcaggcgttgcggccatgttttcctcagcaaccacatctgatatgagtcagtcgatttccgacattgtggttgcgagttcctcagcttcggctccggcgatatcttcggtatcgacaggcttcgctgc

SEQ ID NO: 49516 - DNA, 880 bp, Zea Mays
cgtcattgcacaaaaaaatctgaaacttggtatgtttcttcttatgtgctgctgcaaaagagaaaaatataaaaaaaatatttgaaaaaaattgcaaaaaaagaaaagaaaagaaaagaaaagagtagcacataaacagaaacgccagtgttctgtgcacctctgtgattattttgccccaagcctgcacctagatacttgtacctcctttcttgtgccttggtccaactgttctattacattttctaggccagcaactaggacgagtacttggaacacttattcagcattgctatctgttactgacttgtgtgccacatatatatatatatttagtcagccttcccagaactccagctttctgtcgagcagaacaggtactcctttgcaatcacacccatgctcattggacagtcagaccgatcaccgtttgccacctgcagtgctggtaagaacgttgtaagagcggggtaagacgcttcataatttgtattccaccaccaccaccctgagagatagttgtagggttcacattgtttgttgcctttttgtctctgttttgtgctaacaatgacatgacctaagaatcaaatggacaaggacaaggggcttaagcttaacgacgatgagtgtgtctctcagctagaattgaaggagatgatgcgcgcgatgactgaagcttttaaaaaataccaggactctgcggcgacatcctatgagcagcttgatcgacgggttgctgaacttgttacatgcatggacgtactggaggatcgtcccccaccaccaactccagccccagctcactctcttgtggacgacgacgatgacgatgacgacgatgtttatgcaccgctgcgacaacgcctcgcacgtaatc

SEQ ID NO: 49517 - DNA, 636 bp, Zea Mays
ttggagtcttgcttttaggtcaccttcagtcgaccgtacatatggtcaccggaagcttttggattttgtattatagagagtactatttatagagtaaagtttgaagtatgatatgagatagaaaagctactagagacgacattactaatggaaggaggcaaagtcgtatctcaatggcacgggcgatcacggtcacatctaccgtggcctcgtacaccaatatatggcatggcctcacacgttatcagataagccggtacgattggtaggatcggtacccaggcgtaccagttagtgtccggaatcgcttgtcgtgagaaaattgcaggacctgaagcgcaccaaatccgcgtccaggttccatcgctggtttttaggacgtcgccctttttctcgaaggtgatgtgaagtgcaatccaagtctcttaatctcaagtctaaacctccatatcacagaccgacaaaggcctgggacgacctctgcctcctgccgtttagcttgcaccgtaccctctccattgcaggtgccgttgggcatcggcgacgggaccgagtagctcacgggaaccaccaacgtcgacaacttgccccgcaatgagcccccccaaatgaaccagaagaggagaagagcgcacg

SEQ ID NO: 49518 - DNA, 1115 bp, Zea Mays
caacttttgagctttgcatctttcaaattctagggattttgccctaggtaaccacatcaatattgtagatctatggaagaagaataactttgctatagaactcatgccttggtaccatgaagaattttgagataaatgagcctgaagttggactgtcagactgcttgaaatctgaaattcagattaacagtggaatggcatgaagttagggctcggatttaaacatgatccagcgccagtttgagcatgattcccataacaaatttgtagctagtatgtagcactacaactttgatgcagagacttggggatgtttccatagaaaattgggaggaatctggccctaaatcttggctgtcagacacactgaataagcatcgccatggtacagtgcctggacagatcagatcaattgctcacctcgccgccgatgacttcgcgccgggatcatcgccgccgttaagattcgcactcactggtaaccggatagcacttggggtcgcgtagatatcctcgtcgtggataaactccggccattaaacaacttcggccatcgtaccaggttcaccgcagcggaatccgataacttcaccggtgaccgctgcctctcggtcgtgtgccgcgtggctctgcctttccaccgcgtcgccgtgactccctagagttgtcccatcgtcgccggggaggttgccacgacggtggacacgaattcactgcgccaaggttcttcttcatctccggcagccagcacgactcgaccgaattaatcaccaccgctcgctctccctacaaattgagccctccaccagttctgcaaggtcatcaactacccagccaccaagaattgctagcaatcgatcaccagtgtgcccgaatttcttgttcccccaaatcaagtttccgccaccgtagaaccaagctcgccgtggccagccctccacaggtctgttcataccctccccgtccctgttctagcatctttgcatgctggtgatgcccctcgacccctttaattgaactggaccgccagggatcaccgggaacgcactcatctgtccgccaccccctcggttcacgtggacagagcttgatagctcaccaactgtgcaattaac

SEQ ID NO: 49519 - DNA, 668 bp, Zea Mays
gtgagctcgctgctgtaatagtgggtgattgcttaccttcacaatacaagtacgatgtcctcgtgcacgctagagagggtggactcaaacacgtttcgtgcttgtacccgtcctacatggccctgcagtacctgctgcttttcccttacggtgatcatggatatcaccttggaataaaatacactgacgtgggagaaggcgatgccacatgccgcaagtatgttacgatgcttgaatttgttagacatcgttcacactataggctcaacgaaccgaacccattcacttgctatggtaggctgagcaaccagctagttgtcgatgcgtattctacgatcgaggcatctcgattgcaattcatagcggaccaccaaaaaaattgcgttgtgaatccgtacaggggataaccgatgccattggcaggggtctcaccagtgcagattcagttggtggaagagtgatcgtgcctgcatcttttacgggtggccgaaggtaccatgtaatgaactaccaagacgcgatggccatctgcagagtgtacggcccaccagatctcttcgtcaccttcacatgcaaccctaaatggaaggagatagtcgatgtgcttcacttcgagcctggtcagcaggcatgcgatcgttccgatatcgttgtaagggccttccata

SEQ ID NO: 49520 - DNA, 502 bp, Zea Mays
gccttcgatttcctttagaaccgtgttgtcgggttttgaggctcaaattcggtgaaacccgtgaattgttgtgttgtctggttttgaggctcaacgaccaaaatcctcatgggtaccgtacgcaccccacatccttgacatgtgccccaccgcccccaaccacgttgacgatatatgatccacttctccatgtccttgcgtctgtcattgttcctaggtgtcagtcgccatggctactcatctggcttctctaggtcctcgatcaagacccaatgttcgtccttcatcgcttttgatccctcgacatgaacccatatgaacttcgtcattgaccattgtctccagactccacacctgcacatcataaaccaaaagacatgttacacaatcacgtccatgccctagttagtccacacaactcaacccaagacgttacacttgttgacaatcactcatcacaatctaaaccataagagcacatatcaaccatgtgttcacaaat

SEQ ID NO: 49521 - DNA, 341 bp, Zea Mays
gggttttctgcgaaccgcatgactcatgtgaataatacccccaggacttagttgtaaggaaacgggaaaatagagaccagggtcccgagcgcaaactggttattctttttccatttagaattcctatttcattttaaatgtatagcaaacttagaaaagccataacatgattaatattcatccaaatttggtcaaaccaattttgctagactccgtgtaaactaaactacccagcaaaaatgatagactccatgtttcctgtattaccttttatggtttcgattaaattaagaaaactacttaaaccttagaaataggaaaaatagtagtaaaatttttag

SEQ ID NO: 49522 - DNA, 382 bp, Zea Mays
cgggcgcttgctccctggggtaatccggagttgtgtagccgcttagcttggttccgtaccctaagcctgcacgctccaccgctctaggacgggcaccatagtatttggaactatagtcctgtgggtccgacaacctagggtccggttctagagaatggacacacgtctcctggggtggtccagatctgtgtagtcgcttagcatggtcttgtaccctaagcctgtgcgctccaccactctgcgacgggtctcctagtatttggaactgcgattcaaggggtccgggcatacggcttggcttcctagactaaatcctgcaggtcctgttgcatgaatcaaaggatggcagataccagacgatgggtcctatgggtgtgctatt

SEQ ID NO: 49523 - DNA, 484 bp, Zea Mays
gggtccggaatagtcgggaatggaaacgggagcgggataaacgaaattgcgaaaacgaactgaaacggaaatactaacggaaactcataatttaatataaatagaaatgttattgatgtttgactagtgattgattggtagaacaataacataaaacaaatagatatagagaggcaacattctatttttgtttggttgctaaatgtgtacatttagctacatctgatgttgtttaagactttagatcacttgtcatttgaaaagagctggtggttacaatggccaattgtgctataatttgtcacctaaatacacgaggatttagtttatatactaatgcatattaggctcgtcccatatttgtcaaatatggaataaatacgggttcaatccgaaaaaacgggatcatgcaaaaacgaacggaataagccctctcccgtttccgtcccgtttccatatttttgcgtaaatacggaaacggtcg

SEQ ID NO: 49524 - DNA, 460 bp, Zea Mays
aaaatattaggtatatgagaccaaattagataaacatcaggtctaccacatcataccattgactaactcataaggtctagcacatcatcctaggccacgacctatgtcgactaaaacacagaatgagaaaggcatcaaccgcacgtccgtagcatccaaccccctgtttagcacgtcctagcattgtgcccaatgtccaatcgccatccaacagtcaactcatcattgttggcctaccgctcagccgcccacccaaccgtcactgccagccgtcaggacatcgtcgctagcttgtggctcgcctgccatcgctgccaacccatcgtctagccgatagcccatcatggtcggcccgcctccactcggccactgtcccgcactagagtgcaagctgccacgacaccataagattgatggtttaatggtgttttcgatgttttttctatatagttttgttctt

SEQ ID NO: 49525 - DNA, 516 bp, Zea Mays
gctaacttggcgggaacgctttgggcgagcactttcaggcttccgagtctccaccgctttgccaagtccttgtccagccgtaatagtcatcggctcagcatgggttgagtcagatgattccccagctagcatactaagcacaacatctatctctgcatcgtctgtgctagctggcatctcaaaatgagtttgcttctcatcattgggaagattccaaagaggagcaatcagagcctcaatgtcctcgagagagggtcgcactctaagacccagactaccatcactagcaggagggttggacacaaattcagaaaatgacctatgaggtggcagattctaggcagaataggcaacaggagcaccaacatttgacactttgcccctcagaatcatatccagtcggctcactggatcttcagtggggattctcttgtttgtgacccgggtagagtcattgatgccactgtacagataagctgggtactccctgtccgtcaaaggctgaatattcttgaa

SEQ ID NO: 49526 - DNA, 627 bp, Zea Mays
caaagaactgtcgttcaccagtttgatcccaatacagtggagtcctgcattttctgccatatagagcctcaaatggtgacatcttcaaaactggcctggtagctattattgtaagagaacttcgcatatggtaagctcttatcccaactaccaccatgtttaagagcacagactcttaacatatcctccaacacttggttagtcctctcggtctgcccatcagtttgaggatggtaggctaaactgaaattcaactgtgtatccaagcactcatgcaacttcttccaaaaccgagaagtaaattgtgatcctcggtccgacacgatcttcttaggcactccatgtagacaaactatccgagtcatatacaattctgctagcttggctcccgtgtaattagtcctcacaggtatgaagtgagccactttcgtcagtctgtccacaatcacccaaatagagtcataccttgcaggagtgcggggtagtccaacaatgaaatccatatcaatttcttcccatttccactcgggtatcttaagcgggtgcagtaatccagctggtctttgatgttcggccttgactctttgacacacatcacacttagccacatgtgcaaccacatctctc

SEQ ID NO: 49527 - DNA, 827 bp, Zea Mays
cccgccgccaggggttcccctagggccgacgcaggtggagacaactcgataaggaccacctccaagatggtcatgctcgtcgtccccgaaacgacctaagatgacggcgccgctgccacaggggaggagggtggcgctccgcccgtgggatcgcccctaggaaccagaagggggcacctcctggtgactgcagtccgggggcccaggggatgcagatgccgttctgaccaccaagaccacgtccctcacggacttgtgcaccacgtacgcgctggacgagaagaagaagggaaaggaacaccaggcagggaacataggaccaggagcaagaagggaagcaaattgaaatactgggacgatcacgtcctagtaaccactttcccatacgcgaccggcgaaggaacggaagactgcggtgcaacccagggaaacgcctccacacgacaccccataagatccgagggcatcacaggggacgccgccgcctgtgccgaccctctcacagccgtatttgccacgacatcaacagcaggcgctgcgacaaggatagaatccatggccggtctgctcacttcagccagaatgttagagctggtttgcgacatcgtcgagcatgatggactacctactagcgccacggtccccgttccaccaaaagctaaagaagacgttccctccaagacaagaggaagaatagctccctcgctcgaccaagtggggcatgcaacgtccttgttcttcttcttcttcgcttaaaggtgactcatgcgccccagggtttccctgtcgctccttttgcgcttgtgctccagttggactgtgccccc

SEQ ID NO: 49528 - DNA, 1444 bp, Zea Mays
aaacaaagaagaatcagcaactgaagaagaaaaaccaagctggtaaaggcgctcactaagtcgagagtaccacgccctaggggactgtttcagaccataaatggacttgtgaagcttacaaacatagtcaggtcgagaggcatcttgaaaaccggaggctattgcatgtatgctgtgtcatcaagaaaaccatgaaggaaagcattgctgatgtcaatttgcctggtgtgccatccacgagagactgcaagggaaagaacgagacgaacagtagccggtttaacaaccggactaaaagtctcatggtaatcgatgccatactgctgtgtgaatccccgagcaacgagccgagcttttaatttgtcaatggagccatcaggatgttgtttgacacgaaaaacccacttacaactgataatattttgaccagggggtttaggaaccagagtccaagtgttattctgccgaagggctagaaattcatcctgcatagcctgacaccatttgtcatctgccagggctgttttatatgacgagggtgtagtaaagaaagcccgtcgacttggattataaaggatagttccatcagcatgaatccgaggcttgtgaatattatgcttggatcgagttaccatttgtggagctgcagcatcaataccagatggaatggatacaaaagttgactcttctgccacaacttcagggggtgcaggcgcagcagatggtgaagccaagcaatttgttggtgaaatggaatgctgctcagtgtgtggtggtggaacatcgtcagttgcactggagtgttcatcgacagcagcaggtgggtcatctgaacagcgactacctgtagaacctgaaacagtggcaaaaggaggctcgagtgagccattaggtagcaataaatcaagtctgtaatgctgcatatggtcattggaaatagctggttcttcagaaggaaacaaggaagaagtggagatagaatcagagggtgtggaagatgaggcaaaaggaaaaacggcttcatcgaacacaacatctcgagaaatataaattcggccggaagatcgatctaaacatttgtagcctttgtgcatagagctatagcccagaaacacacactgggtggatcggaaagctagttttcgactgttgtaggggtgtaagtttggccaacaggcacaaccaaatatacgcaaaaaattgtagttaggtgactcatgaaacaaagcttccataggggaagaattctgaagcacacgggtgggcatgcgattgatgagataacatgcagtaaggaaggcttcatcccaaaaccgtataggaagggacgagttggcgagaagagtaagaccagtttcgactatgtgtctgtgcttgcgttctgctacgccattttgttgggaggtatgtggacaggtaattctatgatgaatgccctgtcgtg

SEQ ID NO: 49529 - DNA, 1727 bp, Zea Mays
aaaaaaccttctcactgtagtttcatcccaagggttagattgagaatcaattaattgatgcacccaccaaagacaagtacaatctattggtttcagcttgtgtccccgaggaatccagttatccctccatatctttgtacttctcccatcaccaatcctgtacacaacaccaaattttagaagctccaagccatatgcaattcgtctacatgttagaaatccatcagctgctagaactggaacagtatcaagtaagttaccctgagagaataacatatgcggagggcttgtgcaacagatttgaaacaagagctgctaaaatttgtcagtacagttgagaaatgacttataagcattatttcagataccaaaatcacaagctaaatcagtcaatgaactgcacttcctgaagtcctcagaagctacaggctctgaggctgcccccttagcattacacatgtatagtttgcttctgtttgcattaatccagcttgttccaggttctttctttacctttcttgatttcatcagcttccttacctttacagcgtcttcccaatgcccaatcgtcctatacacattttcaagaagaacatagctcaggtggtattgaggctccaattccatcatcttctttgcaacccttactgctacatctgggttagtatgtgtggcacaggcaccaagtattgctgcccacagtgatgaatcatctctaaattgtgacttgtttacaagatcttcagcctcttctagaagctccactctactgaggaggtcaacaatgcaattgtaatgttcaataccagggggaataccatagtccttgctcattgagttgaagtagttccttccctcttcaaccatcccagtatggctacaagcaaaaagaacaccaatgaaactgatgtagtctggcttgacccctcctctaaccatctcattgaacaggctgatggctcgctcaccatggccattctgagcacaaccacaaatcatggcattccaagtaatcatgttgcggacactgctcattttgaatactctgtaggcatagtctactgcaccacattttgcgtacaggtccacgagtgcggattcaacaatgacatctccgcatcctctcatcctcatagaacggcagtggatttcttttcctagcttcactgcagacagaccagcacaagatcgcagaagagtccctaagctataccagtcatcgtcctgctcctgcatatgcatctgtcgaaacaacgagagaaccttctcatgcttcccagtttgacaataccccccaagcagggcacaccatgaaactgcattcggagccttcatcctgtcgaataccttgcgtgcatccaccatcataccacacttggcatacatgtcaagtgtgctgctctccacgatgacgttcccacacaggccacgtgtcacaacctgcgcgtgtgcctccctaccctgcctcgctctcttcatgttcccaagcgccgacatcatagagccaaatgtgcagccgtccggccaaaccccatctgtcctgagcatagcctgaaaccaccgcagggcctcgtcgaaccagtcgttccgcacgaatgctgatatcaacgacgtgtagcatatcccatccggtgcgcgcatttcctcgaacgccttccgcgcgtcgcccggcgcacccgagtggccgtacatgtccacgagcgcgctcagcacgacgccatcgtcgc

SEQ ID NO: 49530 - DNA, 662 bp, Zea Mays
cttaatcaaatgggtcactttagggatgaaaacggtacggcaaaatcctgtaccgatcgacaccgtataccggataaaatgtctgtttaccatattcccaggaaaaaacagtaacgggaaaaaatataggaaaatctagcggttacgggaacgataacaggtgaacgattttcctgatcgtttttgcggatcctgtattttaccgggacaattcctgtcggtattcgtgtaaacagcagtcatagaatattagaatgacaggaacatcagaacatgccatggccaccaatctgccttgtgcccatacgtatatagcccatacgcaattaccgaattacgcatacagcccatacgggaaaatgcctgctacagcccatacgcatacaacccatctgtccatgagtccatcagaaattctcaaattcagaacatgaaaatcaacgcagaaaacttaagcaaataaaaaccctaacctacggccaacattttacatttattgttgtgcgtggcggcgttgctccctgccgtccctggctcccagtccggcagtccctgcctccctggtacgtgctctctctccttctctcgtcaactacggttctctcgtgttggactgctggtgctctgcgcttgcttctcagttctcactcctctctctcgac

SEQ ID NO: 49531 - DNA, 783 bp, Zea Mays
attgttctttgccaatagccttcgtctcatataaaagcttgtgcatgttgcagaagcactttgcgctcggctctagcccctggctccttacagcctagacaaatatccccatcctgattatagcttcaggggtaatctgatgaataaatatttggaatatctttaatacttcgaccacaaatttactcagcgggaaccgaaggcctgccttcaagaagcttcggtaaataacaacttcgttttcctccggagtaggggcagtgctatctcctccaactctgacgatagacatgtcgcgaaaataactccccctcatggcatcaatatgactctgtttgatagttgactttccgaagatagtatggcttgggcgccacgaccgatccttagagtcttcatcctcactttccacgtcataactatcactgtcatcagaatcttcggataaaccctccatgatctccttagtaattttctctgtatttgtttttgccatgtactcataaaatccagcaatgaaaggatctgcaacttttttctcttcatacagcttcgtttcctcagttgttttttctcttcagtcatcttctctccactcatcttcttcttttcaaatttggagcaaacgtgtctttaaaccgaagctctaaaaactcaaaaatcaggcaagagctaatgagcaagagccaaaagtttgagaaaataacgcaaatggcagaaatggcgtatcaaatgttgccgctatggttcatatttatacgcccagtgctttgcaacttggtg

SEQ ID NO: 49532 - DNA, 460 bp, Zea Mays
cgagtaatgagtatttgtagtagcgctgttgaaaaaacaatgaaggtactatgcagttgatagagaaactaactgagttgtttagtcagtggcgaatctgcgctgtgaatgtggatggacgggcgacgtggacgaccggtggaatggcgcgacgaatgcagtggcgaacgtggacggatggacgatgcggacggccgatggatctgagcgtcgcagcaagatatggaagcagagaacgtcatgaaggaccatggaagaagtagggagcctagatggtgttaccgtgtggagacggtcaccggccgtgtcaccctccttcacctgggcgacgacgacgaagggaggtgggatccagcaacgaggacgaagggaggtgcaagttggcggatttgcgtcttggtgtgtggagacagttgacgaccgtgtctgcctacttcacctcggctacgatgacagagga

SEQ ID NO: 49533 - DNA, 651 bp, Zea Mays
caaaagcgtgaggtaaattgggttcctcgatccaatatgatcttctttggtactccgtgcagacaaacaattcttgacatgtataactctgctaactgggctcctgagtaagttgtcttcataggtataaagtgtgccactttagtcaacctgtccactataacccatattgaatcatagccatcccgcgtacggggttgtccaactatgaaatccatactgatttcttcccatttccattccggtactttgagaggttgtagcaatcctgctggtctttgatgttcggctttaactcgctgacacatgtcacatagtgcaacatgagtagccacatctcttttcgaaccataccaccaatacttttccttaaggtcctggtacatcttagtacttccagggtgaatagaattagctgaatcatgggcttctcttaagataagttggcgtaggtgttcgatttctggtacacagattctctttttaaaccatatcttgccttgatcatcttctgtgaaatctagggcttttcccaaactaatttgtgtcttaatttccttgattttctcatcagactcttgtcctttacgaatctcttcttccaaagtagattcaactttcataactgttgcttccatattattgagcatt

SEQ ID NO: 49534 - DNA, 645 bp, Zea Mays
gttgtgagcttcgtcaagcagaacttctcgttcctctccttttggtacacatggatggtttctgaactaaaggactccttcttcatctgtcctgaagtccgaaagttgttctttgcgagttctctccataagacttgctgtctcggtgtccaggcgttgagccttgcgtatgaggtcttctagcattggcttgacttctaggctgccattctttcccagacatgtattcagttgagctgattctttcttctagtcttccaagaagttggtttctttcttcccgaaaggttttcggctgagggcgtctgctaccacgttggccttcccggggtggaaatggatctcaaggttagtctttgatcaattccagccatcttcattgacggagattgaggtctggctgagtgaaaatgtactttgggctcttgtgatcggtgaagatgtgacatttgttcccaatcaggtagtgcctccatatttttagggcatgcactatggctgccaattccaaatcatgtgttggatagttctgctcatgtgtcttgagtaggagtgatgcataggcaatgactttctcattgcataagtacacaccctaaaccttgccttgaagcatcgcaaaagatgacaaaatcctgatggatg

SEQ ID NO: 49535 - DNA, 635 bp, Zea Mays
gccggaggcctcatcgcatcaatcgccttgatcttctctgggtttgcctcaatgccctagtgcggctaatgaccccgtaagcttctggacgtccttgatacgggccggaggcctcattgcatcaatcgccttgatcttctctaggtttgcctcaatgtcccggtgtgaaaccaggaaccccagcaacttccctgcagagacaccaaagacacacttgtccgggttcagcttcgtgcgggttgcccgcagcctgtcgaagaccagggttaagtcttccactagggtcgaccctctcttagtcttgaccacgatgtcatcgacgtatacctccaccttgtccctaatcaggtccccaaaagtcttactcattgcccgcacaaacgtcggcaaggcatttttcagaccgtaaggcattacaacatagcagtaaagcccatccattgttacaaaagcggtatgcttcctatcttccctagacatctggatttgatacaaaccagagtaagcatctaagaaggacaaaaggtcgcacccggaggtagaatccacgatttgatctatccgtggaagtggatacgggtccttgggacaagccttattaaggctattgaagtcgatgcacatccgaagcttcc

SEQ ID NO: 49536 - DNA, 387 bp, Zea Mays
caggaccaaagaatcaaatgtacaaggagaaggggcctaagcttaacgatgatgagtgtgtctctcagctggaattgaaggagatgatgcgcgcgatgactgaagcttttaaaaaataccaggactctgcctcgacatcctatgagcagcttgatcgacgagttgatgaacttgttacacgcatggacgtactggaggctcgtcccccaccaccaactccagccccatctcactctcctgtggacgacaacgacgatgacgatgatgtttatgcaccgctgccacaacgcttcgcacgtaatcgacaaggtatgggaggtaatggtagacgtcgtcatcataatcctcaaccagaccataatccattagctaagattaagttctcta

SEQ ID NO: 49537 - DNA, 393 bp, Zea Mays
atgagtattccaacttcagctttgaaatacataataggatgtaatcaaacaaaggtgtcaaattgataacctttcgcttgttttatggcttcttcactgtcacacatatcccaagtatttctgtcaaaaatcttcccacttgaaatagcttcagctaacgttctttatggcatcaacatgagcaaatttattcgttgaaccttcaatgagatgtaaaggtgaaactggccctgctatcaaagtgtgtcatcatattcatgttgtttgataatggatagtggatgcattaccaaaaatcagcaacccggattcaatgtgcaaaacccacattcagtaccttcctcttcatcatatcaagcatcgcattataatcatcacattgatggccaggcc

SEQ ID NO: 49538 - DNA, 333 bp, Zea Mays
cagtattgctcgttgttcagcggggtagctgatggccttgacctgaagtactaccctcgccgttcgaccggcagtgctggaggtgtgattgtctcgtcagttggtgaaggcaatcgcaggctgaatagcatggtcaatctggtcgccgtgctcaacacagagttggaccacacccttgatgagttgggcaaggtttgggcagaggttgcggaattgcatgctgagtgcgctgcacgccactatcttgatggtggtgctcccgcccctgtcgggattcagcacccttaccgttcaccgccctatggtcgcttcgactatggtaccccagactgc

SEQ ID NO: 49539 - DNA, 348 bp, Zea Mays
gtgtttagcttcaaaaatttcttcttcagataatctttttcccgaagcgtgtcgaataatataatcaaggacttcggaagacgcttcgggagtagatgcgacagctttttaaagaaaaatctgttttatagcttcttttctcgctgccttttctccagtttccgaggatttctctttgataggctctaaaggcccaacttcggcatcggcctggctcattgtagcttcggcttcagttacctttgcctcggttttaatttgcgccttcgaagccttagcaattttccctggagtagagcttgaagcttttattatctctagtacatctagtacactagccatcctttt

SEQ ID NO: 49540 - DNA, 323 bp, Zea Mays
gccgagccgccccaacgcgagaacaacccgtctgcgcgcccgatttccggtattcctcacctccttcatgttctccttgatcttaggacagtgtagcgcaagttaatttctggatggcggcgggattggtgtgggcgctactccggtcatggcgtctccgccgtggggctgtgctgcgccgccgccctagtggtcgtagggtgggagaagaatctgtgccgttggatgaggtaggagcgggcacgatcagattgagcatagcgtttcggccgattgatcgtgcatcgttggattcggatcgggtggctgggacttgatttttc

SEQ ID NO: 49541 - DNA, 372 bp, Zea Mays
gaacaatatgtgtagtgagtagagaaatttacatgccactgaattttgtgggtgactatctattttagatatctgcatatgaaacttacatgatagattaaacagttttagcatacacaactgcagtatattgtgatgttgtctattgtgtgagattggtgagtaaaatcataactgcagagaaattcacacatgccactgctgctgctgctgccataatagattaaatagttttagcatacacaactgcactctagccacaaccaatgagacgctgcttaatgggcattacaacatagtgtttatagtgttttttgcacaatctaattgcggttcgtctcttcattggaactcatagcagtaccacacaac

SEQ ID NO: 49542 - DNA, 999 bp, Zea Mays
caacaatctaaagtttcaaagaagtgacttcttcagtctttgcctcctcagtcttcgaagcaacaactttccagtctttcgaagtcatagcaaccaaggaagtctcttcaatagcaagtgtgctcgcagcttcgggcatagtctgcaaaggaaacaaacaacagagtcagcacaatggtgctaagttaaaataacatagttcagacatttgttataccagtaaagtctccctcgaagcctgagaaggtgtcaccccacgttttatctttgacaccttgttcagtttggttgttaccttcttcttcctcttcttcgactcctgagtcacttcagagtagttggggtaaaagacagtgatagcgtcaaatacgtgatttaatcgacgttttttcgtgcttcaaaaggccgatgcaaagcttcggcttctagcttactataattgccaagtatttcattgcatttttcctcaatacaatctagccactcgtccaggctccacaactgaagcatctttctcagacatattcgacatttcccatttagcccttagtggccatattctaaacgctatgtgctcttgaacaatatccctcgtcctgatatgtgcacagacatcattgaaagcaactatagcagcttgagcttcgaagtcaacataacaactaggtttattacaactgaagcatgtgtggataggagtttggataattccctttatatcagaccgctccttcatatcattcttcatataaaaccattcttttgcccacctgtccggccatttgcttcgatatgcaagagctggagacataacacctcttcgataagcaaagttatagcaaccaaagttattgtgaaggcccgtagttgccttcatctgaaagtgtaactcatgaatctggcaaaatacctcgcaaaaagcttcggcactgggttcgacgccctggcttcaaacaaccaaataaaaattcctaaacacactatggcatttggtgtaag

SEQ ID NO: 49543 - DNA, 388 bp, Zea Mays
ggaatatgtcgccatgcaccctgatcggcgcgtcgcagatgacccccaggcaaatgatgcgctcgccgttggccacggtggcggtgagtcgtgggcgcggttggatgtgcagcccggaacggtgcgctgcacgctctccgatgaagttgtgcgttgatcccgtgtcgaggagggcgaccagcactgcggtcccgaggaacgcgcggacctgcagcgtgtcgaaggtgggcacccccgccacggcatgtagggagtagatgggggcctcccctgctgggacagcatcgcctgcggcgtcgtctatcatctcaagttcaacgtcgtcgatgtagaagaggcggcgacaggtgcggttgtggccgcgggcgtacttctcatcgcagttgaa

SEQ ID NO: 49544 - DNA, 291 bp, Zea Mays
tggtgtaggggatcaatctggatcaacccacactaggaaggcctgatactgattgatagagggtatcagcccacactaggaaggcctgatactgattgatagaggagatcaatctggcactatttctataagccacacatgatctctccctataaatactgtaaccgactggctcttcattcatcaatacacaatagcctacacaacatatctctctcacatggtatcacgagttcgggacattcccgttccttccaccttccgttgaaatctgcagcctgctgcacctgc

SEQ ID NO: 49545 - DNA, 469 bp, Zea Mays
gacgtgggatctccctctccactggtgattatcgcggacgccgcaacctaagtccagtacctcggcgggatcgcgcgctccatcgtcgatcagcctcctccatcggaggtgagtatctctccctctcccaggccgccagtgccagcgctgcctcccaacaccggcgtcgttgataaatgtgggcagctgcgtgaggtagaagacaatgttgtggccgttggatggccatcgtacgacggtgattcgagcgtgtgtaccagtttgcgcaattaattccgaccattggatcgtgatcggatgggctgcatcagaacgagcgtaaccaaatacatattgtagatcttgaatccgccggtagtaaacgcgtactggttcgcgggggtttaacatggctagatctaatcgcggttgtccacgcttgatcggatagctaagatcagtcgataccccttcggccaaccattattac

SEQ ID NO: 49546 - DNA, 377 bp, Zea Mays
cccgggtgtccgggaattatcaacgacacgaatatattctgcctttgaaagcacacaccagggggagattgattgggataacaaacacgggccaacatgtgtacggggcagcgctcattccatagggattgaacccatttgtggccaacgcaacacgtacattacgagcctcttcagctttctcacggtgaatgtcatcaaagtgttttcatgcttcaccatctgatgcgtgcaccatcttgtcaggattgtatcgttttccatttttgtgccatgtcatttgtttcgcggattcctctgtcatgtacagacgctggatcctcggtatgaacgaaaggtgttgtaggattgtcaaggggatgtcgagctgcctcttc

SEQ ID NO: 49547 - DNA, 752 bp, Zea Mays
aacaagtgcgtgaatcaaactcttttatttaaaagacgctccgcgcaaaagtcacctaagggtgcagccagaatagtacaacaagtgcgttaatcgaagtctctcattaagaagacattccgcacaaaagtcgcccaggggtgcagccggatcagcacaagcatatgaatacgaccaacaggccacatcatacaaattacagttacatacactcggcgagggcatcatatattacattggctcaaccttcaggatgatacccatctccctgtaattgaacaacattatcctcaattcctcaccctcaaaaagatttcgcaaatccccttcacctatgctcgccccaatcggcgaggatagcaattctcgtttaccaatccggtctactcgaagacggccacgctccatccccatacgacggcgcctaccacttcgcgaaaattcacccacactatgtttcgacaccaccctttgctgcctatacccagcactcgcactagggaaatccccggcaccctccacacatggcgaagactccgctgtagccacatctaacgctacaaaataatccaagccttcattcgaggactcctccgtccaggaaaacaaactcccagattcaccatcagactcaaaacactaagacacagagccaaataaattatcatcggcaggcactacagttgaggccgccacaaaatcagtattgccagcagcggttgcttgcgcaggcccaaacgtcggaacctgcg

SEQ ID NO: 49548 - DNA, 434 bp, Zea Mays
gcgggtgccaatcttgaggataatattgagagttgtggtggcactagagctggtggatgtgtatctgatgaagaggaagaggatgatgaagaaatcccccctttggttcgcaagaatcgatgtagcaaaaccagcaacgacgtcccaattcaggctctgtcagggctggttaatcttcagaatatgatgatgtctaccattgatcatgcactagaggagattatcccagaaggtcttttattggaacttcctgaaactgggggtgcttgcatccatgcagaggtctcggatgacattccctcagctggttatcttatctggcaagaaataacctggacagtttcccatgcttcttcgacctttaagggcgacctgatccataggaacacctcggtttctgatattacatgtaatggttatccagctcctaaggg

SEQ ID NO: 49549 - DNA, 322 bp, Zea Mays
gacagcaatcgtccaattcgcagaacttcatcttgggatacctgcagctcatggcggtgatgatctaggtcagacatggtgaagcggtgggtcctctctaggatggtcaaggagttactggcgtcacagcacagcctatctagattgtcacgagaggcaataagtgctcgtctctcctcctacaaacagaaaacaacattcagcaccaaggcaataataacatagcagggtcagccaggaaagtttacctcgtgtgccatcttttcagaatcaagctgggcattcagaaaagagttcagagaatgcgcactgtccagaaagg

SEQ ID NO: 49550 - DNA, 919 bp, Zea Mays
tcgtggcggagcagacctcagcgagctagcctgcagcctcccgcacctcagcttcccgcttgccggtgagtgggaccgacgaactaactctaccataatagtttagtggatggattgtacttagcctggtgctgtcaatgcctgctaccgacttacagacttacaaggaaataatcaacttgacttcaaagtctcatgcgacaagactattctaataagaaaagcatttagtgagcaagattttgtagactattcatgacgagtatcacaactatcaccttttttgtgcatctctaggtctgttgttcttgtccatgcaaaaccaatgaatgatccattggcacaactgtacaacgcttcaacaatggtcctaattcctcaagacgctagttatcctaaacctaaaaatttgagccaaacaactacagtgataaaagcaatacaagtatctacaagtttcaaaaccacacataagggatctctaaagactttatgtcaaatacacagattcagaaaatccacccactccaccaagttgcattgaacctaaaccccaaaccagacacctcgagaggaatgaaaagaaaaccaatttctcaaaacaagtaggaaaggtgtgcttacttgtcgtagaaccccggaggcggcccgatcgccggactctttgcgcatgggtactgcgctggtggagctggaggcggtggcggtgcttgcagtgcctgagaagaagtgaggaaaatacacaagtcacataacacgtaatattgacagaatcaaacgtattgcgacaatatctactggaacatcgtcgtgtgtcaccccctctcttctgcccacctatctgtgctctcccacatttatggtaaaaaactaaaagtgcgtaaataaacaagattcaaatcatgattatgggtttcaa

SEQ ID NO: 49551 - DNA, 352 bp, Zea Mays
aaagaaggaaggtgggcgttctagaaggtttgagaaggcgcgcgctgggccggaggactcgtgaagaatgcgacggtcggaggtgtctgatatgtgctgcgtgccttcgtgtaggggccgagtggcgacgacggaattgagacttgagagttgagacaaggacacaaggtgaggcttatccagctgcccggggaagacgtacacttggcagcagctgggcacgctgcacgctgccctggagcttaatgtgtgggtcctggcgtcctgccaacctgaaaggcttcctcaatttcatgtcctcaactcctatagaatgctccctcatttcttcacccacccatcaggccaccac

SEQ ID NO: 49552 - DNA, 571 bp, Zea Mays
cagtgggtgcgccgctttgacgaagaaaaacgtaaggccattggggaagagatcgataagcttttcactgtcgaattcatctaagaaattaaccaccctgaatggctggccaaccctgtattggtatgaatgaaaagcgggaaatggagtatgtgtgtcgattacaccagcctgaacaaggcatgcctgaaggatctgtttcccctcccgcgtatcgactaggtggtcgattcaacatctagttgcaaggccttgagcttcctcgatgcctacttaggctatcaccagatcgcgatgaaggaatacgaccagcctgtgacctgcttcatcacccctttcggctcatactgctatgtgacaatgtccttcggtctgaagaacgtatagccacgtactagtgatgtatgatcaaatgttttagtgatctgatcgaaaggtctgtggaggtgtacgacaacaacatcatggtcaagattcgacagactgatagccttgtccatgccctgagagagacattcgacaagctaaaggccaatgaaatcaagttgaacacggaaaagtgtgtcttcgg

SEQ ID NO: 49553 - DNA, 818 bp, Zea Mays
aacaagagaaaagaagacgctagaaattattataacattttaaaagcgtttgaaacttttctcggagcgttgaaagttgcatcaacagaagtgttcggtagatcatcggatgtggccacgcaacacgtgctataatgctaagatacgagcactcactaaggcgcgcaccttgatgcggacacacaagaaacatataagttcggtggggactggtacgccttgatgtgccaccagacgtgtgcaccgattcattctaccatataacctatttgtggaggtgtttgagaattacaccgatcatacttctctgatatgcaccatagtatgtccacggtgccaactagttttggagctattggaaagtaatcgttggaaagtctggtatgatgtccgttctgcatcgaatgtgtccattgtgtgcagaaagtgagctttttccaaacatgcaatttggcttgtgggcttatgaatataaggtgtgagctcccatttgagtaggttaggattgaaaggatcaagatgccaaaaagggagtgagtattgtcaagcccaacttcacctcttctgcctaaaagcatctctctctatcaattaaaagttttgcatcataagttacaatccgtgaggtattggagagtcagcactccctgctagtttttattggagcacctacacaagggtgttgctcccccttgagccatgcaataaccaagtgctctctatgagatagttatttacctctctagcatgattaattgctcataaccgtatacgtatttgatttgggtcacccataagctctactggtgatcaccgaa

SEQ ID NO: 49554 - DNA, 672 bp, Zea Mays
agatgccaaaggacatggaccagtccaagaagttgctctcgggtctcagtatggaatacgaaaaaattgatgtctgtgacaataattgtatgcttttctgaaaggaaaccgtgagtgggaagaattgtatagtatgtggtgagcgtagattcgtagaggttgaaaatgacaatggtttgaccatgacgaccgaggtagcacggaagcaacttcattacatgcctcgtatacctcggttgaaacgtttgtttatctccaagaatacagctagacacatgaatggcacaaagaacgcgtacgtgagaatcccgatgtaatggcgcacctagctaatacagatgcatggaaggtacagatgcctttgattctagctttgctgatgaagtgcggaatgtccgctcggtttggcaacaaatggtttctcgcctttcaatctaactacatcatcctactcatgctagcacgtctttgctgttccatacaaccatccgccagctctttgcatgaaatatgaatctattttcttatgtctttgtaatacctggtctggatcatcctggaacaaagatcgatgtgctgatgaggcccctaattgaagaattgaaaattttgtgggaatgagtcgaggcgtatgattgttacaagtaaaagaagttcaacctgcgagctgca

SEQ ID NO: 49555 - DNA, 726 bp, Zea Mays
tcgagctcaaggtcctacacgtcgcgtgaagaatctagggttcgttagtatttggtccaaaaaatgccaacagaaaggatgcgggcatgtctgggtagtgaagaggaggaatggccgggaaagaagaaacactcgtgaagaaggaaaataaaaaaattgaatgtaaccagcggtacagtgaggaattttgtccagctacgtacatcaaacataatttgatagagcactcttgaaaaactttaccaaaacgatgaatctagccgctagattcactatttcgttggatatagtaaatttaaacagtttgactagttttttgtgcaagaaaaatataattaatctgtagttgttggagttgttccaaatgtacctggccttttggggcttgttctcgctggtcaaagtcttcacgaggaaacgtccatccgagaaagttgctgtagaaacatatcagccatctaacgtgatcttgaccggggaggagaggaatggcttatatattatttggataatacatatcaacaagggtttttccgtcgtatgaacgctttgctatgccacacgacgcatttgctccgacgctatgctctttggacttgtgaccataacgatgcagaatatataagaaatgtctagtgcttgctcattcatataggattgagacggatgtttaccaaatcttacattctgaacgtatcactcctaaagattgggatcatagacagt

SEQ ID NO: 49556 - DNA, 481 bp, Zea Mays
aaacaaccttccttacgcataatggacactatgaatataaggtcatgtcgttcggtctgacaggagcactggctacctttcaagattttatgaatcacatcttatctccccttttgagaaagtgtgttgtggtattcttggatgatattttggtttatagtactactttagaagatcacgttggacatttggaacaggtttttggtattcttacccagaatcagttgaaactaaaacagtccaagtgtaagtttgcccaagacaaattggaatttttgggccatgtaatcagtgctgctggtatttctactgaaccagccaaggtggaagtgataaaaaattggccaattccgaaatctgtcaaggaggtgagaagttttttgtgtatggcggggtattaccgacgttttgtggcagggtttggcatcataagtaaacctctgaccaacctgctgaagacagaccaaatgtttgtttggac

SEQ ID NO: 49557 - DNA, 462 bp, Zea Mays
atttattctacttcgggtatggacagtcctttataaaatgaccagactttccacagttgaagcatccagtagaagaactagggagagcggggaaacgagcaccaggggcactcggctaatttgtagaagtgggggcagtggtgggacgaatgaaaacaggctatttgaacggataggagggtggacgaggcgaagaacgattctgattaaaaggtcggattaccaacctggttcgcttctcaagtccctgattagacctatcacctccaaattcctttgattttccctggcttatgttcttggcttctactaccagtgtcgtgttgacagctctgctgtaagtaagatccaggcaggtggccatttttcgttgtagccaatcattgagtcccctcatgaagcaattctttttcttcaggtcagtgttcacttggtcaatagcatattgggataaatggttaa

SEQ ID NO: 49558 - DNA, 318 bp, Zea Mays
ggactagtaacctacaaactgaagctaccatctaaactatccgcaatacataatgttttccacatattttagctgaagaagtgtgtccgagtatcgacagagatcctgactgaaccagaagtggagacaagaacagatccaattgtagccagacagttaagatgtataaagtaaaatggggccaccacactgaagaagaagccacatgggagaccgaggattttctgagcaaaaatttccccgaattccaatcaaaaagtgttggtacataaccatacctccatcaccccctagctttctgcttttaagatgccatca

SEQ ID NO: 49559 - DNA, 356 bp, Zea Mays
cgggatcccaaaatcatcatcattaggaacggttgtgccctgagtctcgaactaatggaataccgcatcctctgcatgagtgtctggcactggatctggtactggcaatgggtccttaggggctggacgataggagccaaattggaggcatgaggcctcgagggtgccctggaactgtggtggccggatcagctgcgcgaagatgaagcagagataatgtgcatacgacaactgtcgccaggcatgaagaccatctaacatggtgtcctcaatctcatagataaggaaatcaaccatatcaaactctgaatgtgagaatagggcaccaagtagctagagctggatgtgagtggtgg

SEQ ID NO: 49560 - DNA, 499 bp, Zea Mays
ctcttcggcattcttttgcgctctggatttctcaatttcccttatttcatgttttacctttgcgacttcaaatttctcacttgtctctgcgagttgcttctttaagttttcaatttcgaccttgtgagctttggtttgttcatcaagcctagcttcactggccttcagcctatccactaaggaaagcaatatctaatccttttcaagggcttcgttccttagggaaatggcctccacccgaagattcccaatagctatttggcagctctcatcttctacttctttttgggctctcaaagctttacttaggatcaaaccctaataatagaaatatatgagaacacaacaataaaaagaaaatatataaacataacttattttacaacaaaaatatataccttcaaactattataagcaaggctgtctccaagttcatccttcgacattgcagataggccaacctctagtttcgggaatcctatattttttgccatctccc

SEQ ID NO: 49561 - DNA, 586 bp, Zea Mays
tttgtaaggtgagtaacaatcattcttattgcaaggcacattcttcttgattcttattcctaatataatatttggcaaaacaataaaatacaatgttgtgcttgtaccataagtagaataaatatttgtgcttgcctacacaaaagtacaatggtctggattgctgaaacatcacacaagtagaataaatatatgtgcttgcctacacagggtgctgatttgctaaaaccatgaatgatgggttgctccattaaatcatgttttttttgtggttttagattcctaacctatcatctgaaaagggaaacaatgtatctccttgtgtcttgagagtgcttccattttaacaagtgatgcagtagccattgactttttagagcatcagttctcttgttgttggtcacctcaattagccagtttaagtttactggatgctactactattttaatggtcacctaaatatatgtgcttgcatcatgaaatcctaaactagggatatgtgatgatgagatataaggaggtgattttctgacttgtgtggaggcacccagtggtcattgtggcggaactgcccgaattattcca

SEQ ID NO: 49562 - DNA, 365 bp, Zea Mays
gttcgcttgtatataaaaactgtcttccctgcaataaacacgatagtgattgtctctgccatttgtctcaatctcgttaccactgagttctaacacgttatcagcacccgctctcaaccgagtgtggaaaggccatggcgcaaaaatcgacgaagttgttgtctacaccgacgacaataatcagaagaagtaaccgtcaacgccagccccggccaagacgggcgccgcgcaggaaacggctgcacacgccaattgatctgacggagtagtagaatgcacaaagcaaaaagcaaaggaaaagcataggtacgtaaggtgactagccttcgctatgcaagattgacaggatgtgatccaaccggatc

SEQ ID NO: 49563 - DNA, 483 bp, Zea Mays
ctttctcattcttctttatagcttcgtcggctagttctcggccgcctttcatccaaatgttgaagtaaaattttccgcccattagagtcacctcagccgaaggatcctttgtgttctccacagtgaagacagcctccgtctgggatgcagctttaacatgatcacaaccaaaattttccaaaattgccgcaacccctctggaaccggcaaaggcgcagaaatcaccatggtcactaaggatctcttcaaaagcttcagcttcttcaccaatccattcaatgattccttcgggatcgcctctaataattttttgctcggatgagtaagcacccacctttgcaaaactatctttcagcttcttggcacaatccaatgatttttcgtaatatctctccttcgattcccgaagctcatctacattattttgcaatcttgcgctagtctactcgcttattttctgttttgctttagccacttaaaaat

SEQ ID NO: 49564 - DNA, 733 bp, Zea Mays
aacgggcaattgtgctagagctgtgaagcttatgaagaaccgatgagccgagatgaccaagacgattgtcccaaacgttaacacagacaaggcatgtagtgtgatcttaggatgatgaagtaatttgtggtagagtgtagaggtcaccaagctattgcagcgtatgatcacacgtcacgtctgaaggtacttgacaaaaaaaccatgagggtcaaactcaatagaaacaaaattatcacaagtaaactgatgtgcagagatgagatttttaattaaggtaggaacatgaagaaccctcttcaggacgaagttagaagaaggtaaacatatatgcatattgttgtataaacgcactggcacttgagtaccactgccaacagtaacataaacaaggtaggagagaggaataagagatggagaggtggtaccattgtcggatgacatatgtgatttggcgttggagtcaataatccagtcgtctgtagatggatgcaacatattattcaaggccacaatgagacctgcctgatccgactatgactgagaagagagagtaggcagagacgacagttgcaatgaaacaaaggtggtggtgtacgtcgattgatatgctggaagagccgagccaagtaacccaacagcagccggtagaaccacgccacatggggttgaagcaaaatcaaggaacatttggggtagactgacacacggtgttgttggagccaccgtaccc

SEQ ID NO: 49565 - DNA, 684 bp, Zea Mays
cacatcctgcactcatcccctgttagtctaagaacaacagccaagttgggggccaaattgtcgaagacgcatctgttcccgtgattccaaatcatctagactcccaaggtgactagagaattaagaccttgctgcattaaaccacgtgcagcatcactaacttgctcccaccatgccataaaggaggtcatatccggttgaggagcaaaagtttgcaaaccaaaccttcttaaccaaaagaaccaaaactcccttgtgatctatggtttcctcctcttggtcacaaagggagcatctttcggggtgatctagatttttttagcaagtctggcagttgtccaacattttcttagggctgctaatcaaaggaagaaccgacacttgggggatgcccaaatcttgcatattctttcatgatcagcaaagtcaactgaactgacaaaaaaccctcatatgcagccttagcacagtaaacaccattggcagcaatgctaaacacgtgtctgttctccacatctgattgcaactgaaggtcttccaaaagcttccacagctgcaggtagtcaaccagagcacctacagacaaggcacccctgatatccgagatccatttcctattcgacagagcctcctggattgttctctttttggcaattttcttgggaacaatttcaaacagtcatg

SEQ ID NO: 49566 - DNA, 493 bp, Zea Mays
agcgcacatttttcattagcttcagccaattgccttcgaagatcttcaatctcggttttttgggcttcgatctgagcatggtagttagcttcatcttctttcactttatctaccaatgaaaacaaaattttatcttttccaagccttcgtttctcaactcaatcacctctgaacgaaggttgttgagtgctatggtatagctctcgtcttcagcattcttttgtgccctcaaggcattactaagaatcaagccctgtaaagaagaagaaagaattgagtatgacaataaaatacttcgtttccaacttcaaagtcaacttttatacctttatgctattgtacgtgagactatcagcaagttcatccttcgacagaaccgaaagacctttttcaagtttcggaaaacccatactcttagccatctcccggcaaatgaatatttctttgttgtccgggagacagtataagaagtcatcatcgttagtgcagttaa

SEQ ID NO: 49567 - DNA, 341 bp, Zea Mays
gccatgtccgatgttacaccagacacatagtgaatactcaacctctcctactcattttgcagcctttctaggtgccttgtatggtgtcatgctcgatgctataccgtactcatctagtgactgttaggctttgaacacttgccttcataactctctaggtgccctatttgcacaatagatgtcaggtgctagcactattctaataaggatagttccctatcaactgcatatgtcaggtgcacaccaaacatgtcatatgcctccataacaccgctaacttgcttgtttcaacaatgtttcgagttgggtttgatctcaaacttcttatgggctctcatgag

SEQ ID NO: 49568 - DNA, 570 bp, Zea Mays
atagtggtcaccccgagttaagtaagcgcaagcatgtcgcaccgccttaagtcgttgtcgacttaagccgattgctccattagcagggcatagtggtcaccccaagttaagtaagaatgcaagtcaatcatgaacaaactgagtatctttgaagcctttttattgatgacatatttcccattttatagagtacatcgtcgtcccgatagcttttgaaatacagctagggataaaacttcctgaggtgttctatattccaggagttcccaatttctgtgccgtccatctgagtgagacgatatgatcccggtcgagtgacttctgctactatgaatggttcttcccataagggtgacaacttgtgccgtccctcccccgttagaattcggcggaggacgagatctcctactgaaaaggatcgttgtcgcacggccttgtcatgatagcgtctcagagtctgctggtaccgtgccgattgaattactgcgttcagtcgctcttcttcgagtacatcaacatcttctagcctagttgcttcggcctttgctatgctttcaaagatcaacctcg

SEQ ID NO: 49569 - DNA, 327 bp, Zea Mays
taatgacaaggagaacatacggtccataaactttttggtcttggctaaccactcagcagaatgaattacattcttattccaggcattgtacatccatctacgatctttagtcatgcatgaagccattacgacgagccatattgtaaaaacaacattctacttcctcaggtgtattggtcttacatctataggcaatgataggtcctaaacccagccaagagtgaccgacacaacacaaatttatgacaagcctgtagaatctgaaggaaattttgacagtataacctcgttgttctccatctgcacaccgaatatggtacagtggag

SEQ ID NO: 49570 - DNA, 552 bp, Zea Mays
aacactcaaactacattgcagcgaaagagcaaggaggagaaggaaagaacatatatgtatgttgttgattttatttatgagtgtggcttacaacctaatgtcatcaactcaagggcctttgagatcatgcttgaggtggttgggcaatatggtcctgggtatgtgaaaccttcatatcatgatgttagggtgtcgttgcttgagaaggcaaagaagagtgtagatgagataaaaaaagactcatgagttggcttggactgaatttggttgcacacttatgtctgatggttggacagataggaggggttggcacttgatcaatttccttgtcaatagtccagctgcacatttttcttggagtctgtcaatgcctcaagtgagacagcagatgctcagatgttagttgcactactgtagaaaagaattgatgccattggtagagacaagatagtacagattgttacagataatggggctaactttaaggctgttggaagacttttagaaagaaagatccctcacttgttttggactccatgtgctgctcactgt

SEQ ID NO: 49571 - DNA, 352 bp, Zea Mays
gtagttctccagagtcccaaaggtgacgtatatgtgcccgagtgtgtactctcctttggtcggcatgataccgaagaagggtgtatctgactcggtgaggtctttgagtgcaacccccaaggctaggagtgtccgggggaaggtaatgttaatgctacttcccccgtccactattactttctttaccctgctctctcgaatcaccggatcaacgaggagtaggtacttgctggggtggtcgaagttgagccactgattcgtccggctgaaggttatcacgtgctctgaccaccgataaggagctggggcaatggtggttgccgccaggacctgtcggtcattgagcttctgc

SEQ ID NO: 49572 - DNA, 555 bp, Zea Mays
ggcgggacaggcagtaacgactcgcctgaggtcatccgcgggcgggacagacagtcacgactcgcccaacgccaaccccccgggtgggatacacagttacagctcgcctgaggccaaccccggtgggatacaaagttacaactcgctcgaggccaaggcaagacagaacaggcagtccgcccgaggcaaccctcgggtgggagaggcagtcatgactcgcccgaggccaagcccaggcaggacaggcagccacgactagcccaaggccatcctctggcgagacaggcagtcacgactcgccagaagccaacccccaacgggagacacaatcacaactcacccgagaccaagccctggctggacagttagccacgactcacctgaggccatcctcggggggggataggcagtcacgactcacccaaggacaacccggggtgggagaagtagtcacgactcgctcatggccatcatctggcgggataggtagtcaccactcgcccgaggccaacccccggcgggatacgtagtcacgactcgcttgaggccattctc

SEQ ID NO: 49573 - DNA, 408 bp, Zea Mays
ttctgatcagatacttttttcttcagactttaacgaggatgttctcctgatgtagttcgactttactcctcacccttcaataattggcacatctgaatcttcctcttctcaggacccttagttttttgatgctttaggtgcttgatgccaaagaggggaggagatttctgagtctaggagaggaggcatatagacaagggcggtgtgacaggtaaggggaacgagagatacataatagtttgatttgctatattttatatgtgtaatactccgtatgcattatattatgtgtcatactcacatgcgctgtcttatgtgtgatactaccatatgcactatcttttgcaagttcatattttgtcctatacactttatgttgatgcatatgtacgatatatgtgtgatgaa

SEQ ID NO: 49574 - DNA, 413 bp, Zea Mays
gctttgagctgacaccgtctcaagttcctactagaaatccacctagattttgaggcccaaacctagaaatcgttcgctcctctagcttctccacttgacttagatcaatcgttgttgtcttgattcgatgaacacaatctactcatccatgtcctcttgtacttgtcaatgatctcagctgggctgccggtgtgagtcatctatagtcgctctttcagcttcttcggtccctcagtccaagttcaaccgcttccaatccatcggcacaaaccatcatgtgacctccatcttcgttgtccaccatcgtctctatgcccacacttgcgcatcataaaataagagacatatcacacaacaatacacttattctatagttagtctataaactcaaccaaaaccgattatcccgttta

SEQ ID NO: 49575 - DNA, 821 bp, Zea Mays
catttgggccaggcattggtcaggttcagaaatgtttttgacagggataatctggtcaacttggggccacaagaagctatgtggtttactttctcgcttattcgacacaacgaagcctagaattgtagggcgctcaatttcaatagagactgttggcttatgttattggggtttccatttgattactagatgcaagaacatatttagaatgactttggatcctttggtagagttataacgtgggacgctgatagagcaaatctcacaaggcttttagtaagagcccgtgtcacttccctagaagaaatcccgtaatttattgttttcagtgttgcagaaggctttcaatgtgtttcctggacggttcaatgcgaaaccattcaacagaatatgttaggtggaatgcctgaagatgaagaagaagttcctccataaccttaaaatggtcatcaactaccagttgaatacatgggtttgggtcaacctgttgctcctcctgggttggatctcaacatcccgctagtgcaaaatggggatatttacgaagctgagggttaggatgcttggcctgcataggaacagtttcagcagcacaatgtaatccaacaaatgcagcaagagggtgaagaagaatccattagcatgcaactctcaggtattgaagatatacaatcttcagatagctcggtgggataggggtttaagatattcatgcctgtgcaccctcctaatcctattgttgaagcacaagaggagcttgacttgatgattgatcaagaagtccatgaagttcaaataccgacggtcttggctctacctgc

SEQ ID NO: 49576 - DNA, 419 bp, Zea Mays
gggaggggaggacgatctagctgcacaatctaaccttttctgtagtctttgtgtgtggtcattgacttggtctacaggcacatgaaaagaaagctctgtcggcgcgctggaggagatcattcttgttggtctctctttccgtcgatcgagcgatcagagcttccctgctggctggtccttcacccccgatcacccgatgtggtaggccccgtcgatcggggggcgcggccctgccacattatattatgccaaaagacacggacgctacatacaaactcacctagttgccctaccacccaaaagcaagtccatccatggccagcgtctagcctcaacaccagcaaaagtcatcacaatcaaacatttatgtaagaggatgtttgtttgaaattataattattcagagattatatgatcca

SEQ ID NO: 49577 - DNA, 400 bp, Zea Mays
tgcttctgctgtgtgggacccgttggtaagtcccatccctatcccgagtccattcaaccaaatccatggaggccgcacctgccgtcgcgttttcttctcgcctctgctgaccgcaatggattcttccccaaatcgcgctaaggtcgggatttgcaacctccacggactctgccttcctggagcatatagacccgctgccaccatcaactccgactgtgggcgtcaaactcgaccgagcaacgccatggagtcccgctctagcatctcgcctctctctgctctcagacacgattgccccttgccatagctataaatcccaacgacgacacaccccgagagttccctgtccatcaaacctcgatccatcgccacccatacacgtttcgcgggcgcgtcatcg

SEQ ID NO: 49578 - DNA, 686 bp, Zea Mays
acgcgctcgctcccatgcgcgcacgacgcacgtcctccactttcgctgactcaccaggcacgaacgcacgttctttctcccatgcgatgcgacgctagcgtaccactaagctccttcggcctataaatacaaggccacatcgctgagttcgggggattggacaaaaagaaaggacgctgtcaggctgccgcgcttgctgctcaacgcaaaagtgccatcatacacatcgcaaaagttactgctttgaggctgccgtgaggtcacctcgcgtgaggagtgtgagtaggctattgaaattctacatcgagaaattactgcttcaccaggctccatctccatcggcaagaaaactcgccatcaagcacctctctctaaggaactggttccaaagacctcaagggcatacccttgaggaatatcgcgtcattcggtcatacacagtcttaagggcatacccttaagtcagatcatgttgcacgattatatacgtcgttgtagcccatcagaaaggtctattgcaaggtaagaacccccatgttactgcagtattccctagcttctttaccatcacagaagaataatattcctcgactcgtgttgttgatactaaatcagaaacaagtgctaaagtcgacatcatgccaaaaataattatactccacacatatgtataaattatccctgga

SEQ ID NO: 49579 - DNA, 453 bp, Zea Mays
ggtaaccgatcttgtagcgaaccaatgggccaacatctgctagtgccatttactgcgctgctacagccacaagcagccatggcaccatttactgcgccacaacaggcacaagcagcaatggcacaaaatgttccatcagcacgcgaaacaaaaaaagggacacaacaccttggcgaatatatattccattccacttagctctaattttgggaacacgaataagttgggagcacatgttagaacctgttggacttgatttttttactattcttcccaaataaggttgttagtcttgttcgagagctgttgaagaagctactctattttattacctccctcataagattcctccccatataacttcacctctctaacttcacactacatcaactagcattcttttcatactattaacttttatttagaatatgtttaatcgctacacgtattgcg

SEQ ID NO: 49580 - DNA, 981 bp, Zea Mays
ccggtatgcgctcacaacctgaggatcccgatctgacggtggtggttttaaagagataaggagggttctgaaccgcccaatcaaaatccaaaggccatcgctgatactgtgccaagctacacccagattgaatctgcaccactcatcaacaaatccacggttcccactgtcctaacctttcatctaatcttgaccgcaagccatgagatcaacggcccaaacactctcccctaccttccgctatttaccaggtcacggcaacccatgaccgcacgcggaggtcacggcgacgcatgccggagcaccggattccaacccaccgtgccccactcccaggcctgaatagtacgacgcaaagcggaggcaacaaccattcaccagaggaggtactcaccgtgaatcaccccgcacaaagacctgcccacggcagaacgccggcaccaaggtctggtgcacgattgcttgagttccgcccagccgttcctcaaattggtggtggagaaagcttccccaagactcggcgatcaatcctatacccacactggacaccgaatggcccccagatagcgtgacgatggtggcggcggcgcttcctgtctctctctcctctccgctagatctgcgacgacgagcactgggcgcggacgcgcggtagcttcggtgagtgcgagcacggtcgcgagggccgggttttatagggtctacgccacggattccaagcagagggggggcacggatgttgcgtgaagttcgccgtccgctccggcgcgcgcggtttccgcggatttcgttgccggccgagtcaaacggggaagaagaccccgctgtcgagggggtcccacaagcagcgagtatgcacaggtgaagctcagatggaaaggctggccacttgggcccacaaatcggcgaaacaaggcgcaacacagccgtgggatgaggggctgatcgcagccgcagtagctgacccgtggggccggggtg

SEQ ID NO: 49581 - DNA, 367 bp, Zea Mays
cgggttcctcgatcaggtcgctctctatgcgaacacaatcatacattcacatttcaaaacagaaaaggtaaacaatacaccatacaagaaggtgaaacccaaaatcatacacacgacgtatggcttagcgctaacgaccgtttgtagtagtgagaatgacataactcttaccataatcgacaactcgctatgctcatgtttggtgaaagaatgaacttaaacacttcatttcatgtagttataataactgatatttaatgcaggtgcaactatgattaatatctaagcataattaattctacatttagctaatgtgtcgctccctaacatgaaccgatcaatattagcaaacttaggtggtgtaggg

SEQ ID NO: 49582 - DNA, 355 bp, Zea Mays
cgcttctgcttgtagaatggctggagaagacgatgggaacggtaaaataaaaggctaaaagtttgatttctttgaagggaaaaggttcattttactaccctcacctattcacatttggccacatgacaacaaatgactgttggccatatgcttaaccagccagcccaatgccacaggcctatacatcattggctgttgttccttgtatttttttgtctattctctgtccatcactagtgaatgttacaaaaattgttttatgtgagagctcaaaccaatatgtgtttattatgacatcaaccacaccattgttttcttggcatgcacaatgttggttgggtggccaaagcagccg

SEQ ID NO: 49583 - DNA, 907 bp, Zea Mays
caaagatgcaaatcaatcatgaacacaagggacaatgaattcaaacatactagcacaacacaatccaattctactcattcaaccaaaacaatggtgagacaaggtttggaataagaaagataatataacatcaaggagttgggtacaaattatcaaggagttagacatgacatatttgttggtggccaatagtgaaataagataaccatgaactaataaagtgaggataaatgatataaccaaggatatgaagtgagttagggagaaaacattatcaaggagacgaaatagagaggcattatcaagtaggagtagggagacaaagaattcagtatatcaaggtagatattgcgcaaggatggcaatacaatggcaagaaatcaaaagtataagaagtcaagggttatatagcaatattagggattagaaaaccacttataatataatatcgccattaccgatctagtcgaaaatcttaatactaaagaacaatcctatcaacctaaccaagaagtctagtaatagatccaaaggatccataacaaaacttcttgcggagtggggataagacaaaggatagggcatcgttgatagcttcgaaaaggtttcttctagaaaacttcgcttcaagttccacaatcctagcttgatcatcttgcaacgcttctcattagaaccttctgatagacgaagaatcagacaagaagagttgaaaacaaaagagacgagtttttgtataaagtaagtttttatggagacaattaactcaagttttgaacgactgactgggctttccatttctaactaatctagcgacctacggtcacattcctttgataccacttctgtcacacccgtttcctaaagggcagtgccgggtgcatagcatatgtgtgccaggatctat

SEQ ID NO: 49584 - DNA, 289 bp, Zea Mays
tacatactcattatttcatttcttgcaatatgtcaaatgattacaagtatttcttcgacttcacatgagtgagggctcgaaggtatcttcgaaggctgagcaaatcaatgccctgaactcttgagaggtgaggtcatgcatggcactcttcctgtacttataggggagaggtatagctttatatgaaattataagtatgttcatgcattttacacacatggttcacatgtaccacaggggcaatattgtcttttgtccttctctttctgtgctgaaaaagtccttcgag

SEQ ID NO: 49585 - DNA, 624 bp, Zea Mays
gtgatttggcgatagagaggtcaaacgacgcgaaaacgacgtttgaacgatgaatagtgacataggaggtttgaaattggaattgaggcatgaaatgactgggaattgagccgatacttcacgagtaggtttatatgagtaagtatgagtgaagtgtgcgcttggttcaaatttgggcgaagaaagtggatttgtagcactcggctcggaatcgatcgctagaaatgggaatttgtggaaatgtgaagtctgggatatcatattggcgtgaaatttggcaaatatgttactggaggcattatgaaggtgcctgaaaaatttgggatcgattggagcaagtttggctggtttggacattttatcgagcacctggcgtgcgagggtttaggtgtcgagggaaatggctaatagaggtggtgaaaccctccctaaggagctagaaacctgcaggggatctccatgaagcacagagcacacatccatgcacaagattcaaatggatttgcacagaattttggatttgagttaaaaggtgggggagtgagcatagagcagcacactggacagagaaggaaaaggagaggagaagcttagggctgctcaccagaggctcctaggctggag

SEQ ID NO: 49586 - DNA, 473 bp, Zea Mays
tcggaacaacgacgctctgtgtcttctgcttgggagccatcgcaatctctcgggcagagcgagcgggctcaagaattcaggaaagcggagaagtggcagaggaaaaagtgagagttagggttcggaactcaagaaggcatgtcggcatgagtataagtggactccttaggtcgggcattacctctaaagtgccagatcaccactcgaaaaagtaaagaccgcaatcgtcactcgggcattacctctaaaatgccatcattgtcaagcgcacggataaactttcaagcgcacaaataaaaagcaaacaacgattatctggagcaacttcatccttcattcgtaataggggaagtaatacaaactcaaagccgactcattatgagtcagccttctttcccctagtcactacattacattacattaccttactacttacattacactacgtactaactaacactaccttattctac

SEQ ID NO: 49587 - DNA, 795 bp, Zea Mays
ccttagaaccctgaatcaaccaaggtctggaagatgtactttgatgggtaactgaaactgcaaggaacgggggctgggatcctcttcatcgcccctcgaggggaccaactcaagtatgcacttcaacttttattcccagcctccaacagcgcagcagagtatgaagccttgatacatgggctcaacattgctgtgtcgctcggcatcaaaagactgatggtgtacgtagattccctagttgtcatgagccaggtcaacaaagattgggactgccccaccgattcaatgggaaactactacgccacggtcatgaagatccaagataaattcgaatgcttagaattccaccacatagatatgatcgcaacgcagcaacagatgcagtgtcaaagctaggctcaagtcgggcacacgttctacccggcatctttgtccaggaaatatagtagccgagcaccacaacagggccagcagaggaatgtaaggcagtggagcaggcagagccagacctgaaggactgagggaaccaattatcaaatacatcaaaaatgaggaggagcctgatgataaggtcgttgccgagcgcattacacggcagtcagcccattatgctatcataggaggattgttgtacaggagaggggtcgccagagtactcatgaaaagcattcacttagctattgggaagcatttgctagaagagatccttgcaaggaagtgcggagtacatgtagtctcaagaactctagtggagaaggctttcagagcaggcttctattggccaacaacaaagaa

SEQ ID NO: 49588 - DNA, 453 bp, Zea Mays
aaaagttgcgtcgtttcacgcccgacaagagagaagccatccgtgctgagctagctcgcctagtcacggcaggattcattagagaagtactgcatcctgagtggttagcaaatcttgttcttgtactcaaaaagaataaagtgaattggcgcatgtgcgtcgactatacggatctcaacaaacactgtccgaaggatcccttcggacttcctagaatagaccaggtggtagactcgaccgccgggtgttctgtgttgtccttcttggattgctactccgggtatcatcagattagcctagcaacagaagacgaggaaaaaactacattcatcaccccgtttggagctttctgctatacctccatgccgtttggcctcaaaaacgctggagcgacttaccatagagccattcagacatgcttagccgatcactggggcaagcgtgtagaagctt

SEQ ID NO: 49589 - DNA, 710 bp, Zea Mays
ttccgacatagaccttattattagattagttctgtttttcaaacatataaatacatagagacatgcaccattctaaagacatatatacataaataacgggttgttgggaagagggtctcttgctcaaggtccatactaacacaaaccattacttaaacgaactttcggaatccaagttgtttaatcagactttcgagattcaagtacatggtaagagctttggatcaggatggagccgatcgctaaaaggccagagctaagaggcattgccgacgaaaatacacagtcgcagatcatctgaagccatctttggaaaagggaatggaacaagaaggctggggagaagagatgacatgtacgacatgtctctgctgtaaaaaagacataattatatcccccagtttcaaagacccatcgtatatattaggaagggcattcttgtaatttggcacaaagatgtataccgacctgaccctataaataagggaacaatgcttctgctacagggatgggagttttgtgacttggtgcttgtagtagctaagatacaatttatatgaagcatgaatatgattcagtaaaagaagccattgttttaggataaacacaaagagactttgttgttgtttgtaatcagatatgaaatcaatcaatatgatgaagcgtgttctgttcttcactaacacttgtttcattgtttgtgttccatg

SEQ ID NO: 49590 - DNA, 832 bp, Zea Mays
acaaaaaagagaaaagaaaagctcacctatgcagacttgggccaaatccgtcaccacggcccaccttacccctcacgcgcgctggcctcctatcactgccttgcggaacccacttaccagacgaatgcccagtcacgcgcacctccttcctctcagcaccgccagctagggtccactactcatcctccacccttctcatccgcacgaccgcgtgtgcctgcgttccgtctcacttccttgtgggcctgagtcatcagatgtttccctttccttcgccgcataaatcggaggaactcaaccatgcgcgcttctcgggatccattgactatcgcctacagactaacctctggcggccacaaaagggttgccgagtcctccccttccctctcccttcttgatcgcgtagcaaaagaaaacctgggccggcggcagctgtggcggagagaagaagatccgacgccatgaacccacgcccctattaccattcagtgcgctaactcgggcttgagggcttcaaaccgttcctaggattgtacccgtggactcgccagacacgattggtgtgcgaagctcttggaatttctcgccggtgttgagcctccgtcgtgaatgtacgtgccgccgtgtgcatccgactctactactctacttccggtgagaaaccttttctctggttggccatcatctcaattccaattaacaccttgcgtcgatagaaatagtgcaccatggtgcgtgtatacatcacatcggtgaccgcgctgccactgtgcccttgcgccgcctctgcgtgggtcctaggggaagaagacgggtcggtagtggttggatc

SEQ ID NO: 49591 - DNA, 602 bp, Zea Mays
cggggtgttacatgatgtttttggttaggacggcgtcgttgattgcgactcgatggtacgtgtggaagcacatcaatattgttcaaggattatacaggtttgatccactttgaattgcgtaacaccctacttcttgttgtgggttgtggctatgtattggtttttgggtattaggattaccagtgagctttgcgattctcgattgctgttgatgaggatggggtgagatgatgttgtaggggtctcccctcggccttatatacgcgaccagagagttatccctttacaagttgcaatcactatctacttcacttatctccgtctttgtcgtagcttgcaatactatacatccggagtcttgatcaccttcttgtccgagttatcgccgaatgcttggctcctcaggtgcttacaactacaccacccgagatatcagtgcttcagtagcgcctaaatcggacgtcggtctttgtctttctggatcaagctcgcctaactcggttataacccgctggcccatcccgttggatgacctaatgggcgacccgtgatacgttttaatgttcatgaggacatgtgagatatctaccccacagggaaag

SEQ ID NO: 49592 - DNA, 730 bp, Zea Mays
ttcccgcaatctgggcagccgtactagtccccacacaaatattggtattacaatgtcttatgtttccgtttacgaaacagtaatccacgtgtcggcggtccatgggccttcgcgtagatttcgcccagcagagtacgtgtatcgagcccacgaatccacccacgagcacacagttattcagctcacctcacccgtaatgcacgcggcggccgaaccctagcattatcgccgtcgtctgcttgttcttctccaccgcggcggccgaaccctagagattctacccgctgtcgccttcagcgtctccaacgcagagaccgaccgccatcgcctttagcttctccaccgcatagatcgagcccccgtcgccttggtcttcttcaccggagagggacccggaatcgcggagaccgagccgccgcccccttgttcttctccaccgtagagaccgagccgcattcgctccaccgcggcggccgaacccttgagattctacccgccgtcgccttcaccgtctccaacgcagagtccgacccgccgtcaacttcagcgtctcctacgcattgaccgagccgccgtcgccttggtcttcttcactgcagagggacccgaaatcagtcggttctcattcccctccacacactggtaattcctctaccgccaactccttcatttgaatatttacacaaattgtatcgtaaatcagtgtcaccttatagtaactcaattgttt

SEQ ID NO: 49593 - DNA, 342 bp, Zea Mays
taccaacccaccaatggagaatgcagcacaccaaaggaggaaccatgggggcggctagggtttagagggaagtgggtgcagcaccttggggaggagaggagcggctgcaatgggaagaaagggggcggctagagtttttgagaagaggagggagcgatgcccccgatgcccttgatgtgaaaccgacgactcacaaccaaatcccccatccatgccccgatttagacaaattaatactcaaatgatatcatttaaatgagatcttcacatctgcggactccgaacttccaacggcccacaaccattttcccacatccacacaccgaagatcaacttttggtc

SEQ ID NO: 49594 - DNA, 616 bp, Zea Mays
ttgcaaaggcttccgcaacaactcccaagaggaggagaatggctagcatgctagacgctgtcaaggaaacgacaagggctttaactcctacacctgtgaagaaggttgccaaaactgttacggctcgtgctgaaaccgaagctgggccctcagtgcctgcggaggcagagcctgccgcaattgagcagagagctgagcaagaatttccagatactagcatgtctctggtgaaggatgtggccgaaaaagctaaatctcctgctcccgaagcaccgtccgaagatcttgactttattattcgacatgcttcgggaaaatgactatctgaagaagaaattgtagaagccaaacactatgcctgggaactgaaatacccaaatggggccttggtgtacaatggcacagacgaagatgacttcctatactgtctcccagacaacaagtaaatatccgtctgccgggagatggccaaaaatatgggatttccgaagcttgaagttggcctttctgccatgtcgaaggatgacctcgcggacagccttgcatacaacagtctgaaggtacagaagttatgaacttaaaaacaaagtctatgaacttagaaataaagtctttt

SEQ ID NO: 49595 - DNA, 459 bp, Zea Mays
gccgaaacaagagagtagagggcaagaccggacctgaattgaactggccacggtgagagcttgttcacggtggcggaaacatatttgggggaactgagaaattcgtgggctttggttagtaattggaggcacgagctggtggattggatgctggaatacctaacggagccgagggtgtgctcaatttatagggctcttgagtggtggacggtgaatttgaaggaaacgcgcgacagccggagaggaggggcactagcgcagtgatttgtggcaattacgggataagaagccacgacggtcactggttaatgatcacaactcacggcgatgtggttaatggctagaggcgtggcacaatcgcggtgaagggcgcaaactctggtgacggccgcaaggccacgtcgccggtgcaagtggtcgaggaacagcgaggccacagtagcccgaactcatccgcga

SEQ ID NO: 49596 - DNA, 611 bp, Zea Mays
ttccaatggggtacgatgatgaggacatcctccactattacccgttggcaaagacgcaattggcccagttggcccaattatcccacctcgcttaatttgggaggaggaagccagtttaaaaggtagagccacccttcccccattggactagtctttcggggcgattgggcctttccctgagttgggtgtgcttaatgaactgttgggctccgggcaaccctaatttgttgggcctcggccaaccccacctgggctgggtgtatcatctggtatcagagctagggcccattttaagaaggtgggaatgatgaggacatcctccagtattacccgttggcaaagacgcaattggctcagttggcccaattgtagtcggacggcggctgtgtgagcctcagaattatcccacctcgcttaacgtaggaggaggaagccactttaaaagggagatccacccttctcccattggactagtcttttggggcgattgggcctttccttgagttgggtgtgcttaatgaactgttgggctccgggcaaccctaatttgttgggcctcggccaaccccacctaggctgggtgtatcatacggaccagtaaaaagcctttg

SEQ ID NO: 49597 - DNA, 716 bp, Zea Mays
aatgtgtactctgtgcggatttatagtccgagcttgagtcctatagacacaacaagactaggaccgagaaacaaaacacataccctcagttagccttaagctaggtatctagtagcgagccccagttgggcatgatggtcagccaattaaggagaggaattggcggaccaaggccaggctttgctgctagggatgggagtgacatttgccatagcaaggttgttgagtgcagtggcttgacacctttagagaaacctacatctacttcctagaaatgcctagaggtctatgtgtccttgtggttcgggttatgatgagtgattgtcaataagaatagtgtcttaggtgagttgagtggactaacaagggcgtgattgtgtttgtgcaacatgtctcttggcttgtggtgtaggtgtggattatagagagggtggtcgatggcaaaggtgtaggtcatgcgagttcatgccaatggactgggagctatgaaggatgggcattgggtcttgactaagggactagagaagtcgagtaactagctatggtggctgacacctagggacaacaatggaaataaggacatgatgaagtatatcgtgttgcatatgcttgaggaccagtgggacacatgtccaggacaaggggacaaacatggattacgctacccatgtgtcacaccctgattttgaaaaaaaaatcgaattcataacatacat

SEQ ID NO: 49598 - DNA, 369 bp, Zea Mays
tggcgcaagtctatttgctaaaatcttggttaatattttcatgaaactgttgatgagactgatcggtctaaacatgtcaatcctgtcagcaccctcctttttttgtaaaagagtgatatttgcctcattaacgaggttcgggtttttgcatctatggtgatagaaatcatgaattgcactggatagatcatctttaatcagctcaaaacaacacttatagaagagccctatgaaaccacctggacccggcgcctttttagagtgcattcccataaccacatttttaatctcatcatcgttgatcatataatctagatctgataactcaaaaagactatagcctaagttgtcccaccgaacagcacattg

SEQ ID NO: 49599 - DNA, 334 bp, Zea Mays
ttgagggtgcatggtaacaatttgtaggtggtgcatatatggtgaaaatttggtccaaatcactagatttctaattttttgtgggtgcatgtgcaccccctaatttctatgtagctccgcccctgggaggatacatgcatgtagctgttggagccgtcctgacgaaggtacgtacgtgaccatcaccatgcacagcacagttataagctagcgaaaactggcctgtatctggctggctgctggtaggtatagtataaacctagctagctgtcgccggcctgtcggcaacggaggcctttgctttcttctcaatctatctatctctctctctctc

SEQ ID NO: 49600 - DNA, 425 bp, Zea Mays
atcagctattatataacattcgtattttgccaggtaactgtatcttttatcatgctagactgctaatttgtccaacaactttttcaaaaaaatgacagcggagtagcatcttcaatcaatcaaaaaatattgcattttggtaatggtcttttaatcaatattttgtgctgctttggtccagaatttacaaaagaattgtgaactcaccaggtaattcctttgttgttactgttacattccttgtcactaaacttgaggttgtagagatgttgatgaactattaaatcaaacggtaattcattaacaaaaatgtattcaaatttgtttatccaaatcattgcaatagtaaaccaaggtgacttattatacatagcaaggtagtgtgctggagagtaataaaaagcataccaattgatcgcgacatt

SEQ ID NO: 49601 - DNA, 698 bp, Zea Mays
catctccgttggtttaaccgtagcgtttacatgtccttgtacttgatttagtagatggattcatttgttcatggcgatttgcccagttagggtttacgggttgtccccatcgcctattgttaggcttttacgcttaactgatccgtcgttatcttgtagaccatgtccaaggctaatagtttttggagcatacgatagaacacgaagagtcgggtgtgattttgatagtcgtcatcgtggcgtgcttattgtttgtttaagcacctaagtcgaacagctcaaataatatgtgctcatgtcagttgtatgttcattggtcagtcatgctggtacacaattcattgttcatattggaatgccaacaactaagcacgaattaccgttcatttcctcatgacaacccctttgtttgatgcatatcccttttttgcattgtaataagttactctgtttatgaactccacttagttaacatacaacccctttgtttgatacatcactaaacattgcatgcaactaacgaaaccttcacttattatgcagcttgaaatatttatttcattatttgacgtccacttcaactaactgaggttctaaatcctttttcgctttagttatttgtttataatcaacttcttaagtgtactgtccatgtctgatgtctgtgctcccatgtttgttgtgcaagttcattttat

SEQ ID NO: 49602 - DNA, 627 bp, Zea Mays
ggaattcaagcgaaaacaaggttgatatgtaccattatggttctggttagtgatgagtgattgttaacggagtagcatcttaggttgagtcatatggactaaccggggcatgagtttgggcaacatgtctcttggcttgttctacaaaggttagagtccataggcgtggttgacgataaaggtgaatgtcatgcgggttcctgttgatgaatcgggagccgtgaaggacgagcgctggaacttgacgatgggctagagaagctagatgagtagatgtggtggctaacatctggtgacaccaactgtcgcgaggacatgatggagataatgtgttgctggcatgatcgaggacaagcgagacacgtatctaggacgtgggggacacatatggactatgctacctacgatgggttgacaaatgagcctcaaaaccacctgcgatggtttcgtgggtttggcatctataaatatttagtagtaagttggggatgtaaaaaagtcatttataaataagagggttgtcccaaaccatgccatctatctaatctctacctttggtttttacacttacattaaggcatatttggttcaaatacgagttgatggaggtggaaaagctaaaagttg

SEQ ID NO: 49603 - DNA, 853 bp, Zea Mays
aaagcttgagggattccaccgttactgcaagggattggatggtggtgactagggcggatgtgttgggttccgccataacagaggttgatgagactgcgtcggatggtggtgaagagatggatttgggcggcggaagtggtggggaggatggcctggaatccggtaccaagatgttgtgacgtgttccaatggagttgaggggtgccggaggcggcgacccctagctgcgcaaggcgtagccaccggtgttggcagcacaaggttttgcccctcggctatctatttttgctggagagtaggtgaggaagataatatgatttattgcttgtctttcctgattacaaaatcctaattatataggcctaaggctaatcgactcttcccccaataataggagataaaactgctaagacctatccgaactaacaaatgagatctagctgctaaggcttatccaaactaacgaactcaatcacaactgattctatctattctaaccaacttgactgatctaatgttaaccactggcctgaccgttcccttatcctaggcttacgtgaataccgtttgccccacatgacaggtccattttctgacgcgcataggcgataccagtcataacattatttcttgtcatgtggacatttcaccgttgctcaaaacatagtcagaaacattcttgtaattttttggaaaatgttttgccgaacaaatacataccttcaatatcacatagtatagtacgatcaacgatgcctcatgctcatttcattgcttgaccatgaccagagtttggcactttgaccaattttttagcaactcgcaaattgcaatagattcaatgttaatcaac

SEQ ID NO: 49604 - DNA, 1471 bp, Zea Mays
cgagacgacactgtttgaaccaaatgtgatgtgttgtgatgagtttttttacggttgtagagaattactgataacaatgatgaccataatggcatgagcataacatgattgttaccaataattaccaaaattaaatatcataaacaacatctaggttcatttactatataaacaacatctagcttcactgataatatctatgttcatgaattatctaaatagttttgaaattaaaatgtaccataaatacctaataatctaacagaggttacattagtcaaacatcgaatccgtcggctaatacccaactaccttgttcattttatattatcggagccatacccagggtcatgccttcaatcatggcacaatgtagatgtccttcactagtatgtaatcatagctaccataggggcaagtatgatatgtcacgtccatgagcgttagatcatgtgccatcgagcacgacatagttggtagccggtatatttagcttcgccttcactccctttggttgctccacacacctctaacgccaccttccgaatgaaggttgccatcttctcccatatgtcgtttatgaattcttcttcattccaagtgtcgtctttgatagcccttttattggtgtctccccttttagtttctagcactttgttttcacaaaatcttggcttgttcatcgctacgagcacacatctaaaaattagagaccgttgtcacaagcttatgttgagatacaacatactcctcggtatcatcgtacaatccaaggatactcgtctatcctctctttttgtgaggataaagtcaatcttactaaaatgttgtccactactataaatcactaaatgggtttctctctttctaaaaaaaatgttggttaccaataggtcaaaactactgcatagtcctagacttcctctccctcatttctactaccatatccaaaacctccatgaatcgactcaaaccctatactttgttgtaccttcatgactattgagatatcccatgaaaatcttctcacaaatagttatagctctagcgatgctatctaagtcttccaggaaagtctcttagtactttcattgcggccaacttgggcgcatatacgtaattacatttaggaccaaatcacccatgataagtttgaccaagataattataagtttgaccaagataatcctatctccttgccttatcacatccactattctattcttgaggctcttatcaatcaaactcctactctacttctatttgcagttgtgtctatgtatcaaagcttaaagctggtattgttcaccttattcaccttataacccttccatttagtctcctggacactgtctcaactaacttcattaacttacgtgtaagcaaccctacattccaaatttcaaactacctaaatgaatcttagttagctcgactagctttcttaccctttgcatccgtcaatgatatg

SEQ ID NO: 49605 - DNA, 514 bp, Zea Mays
cggccctttactgaatgtcaacgttcgccgagtgtctgtctgtgccgagagtcctgctctcgataaatgtgttcgttatctagagtaggacttagctgagtgcgacactcagcaaagagccagagtgcccgacaaaaagtactcgacaaagagacggattccgatagtgaaatgaggtgggacggtagttctctaacctgaatatattacacatgcacggaacagattatgctatggatctctctgtctttctcaagctttgactttccaaggaaaggatgcatccagggcacaagtactcatgttgacgaattgaggttgaggcatcatcaatctatacatagaaactaagatcaccacaagtccacagctagccaggcagatgaagaaactgactagcgctccatccgatccagcctaataaacagcttgtcttggagtgacacagacacgtttatgttgtgctagctggcagcttgtcttcactgaaacaatggacaattttccatacctg

SEQ ID NO: 49606 - DNA, 532 bp, Zea Mays
atcatggactgctgcgtcctgagtctcaaactggtgaaaagtggtatcctcggcctgagtatcaatcactggagcaggtgccgacacaggatcctctggagctggacggtacgacccaaagatgaggcgagaggcctcaagagtactctggaactgtggggccgaatcagctgagcaaagatgtgacacaaatattgagcataaggcagctgtcgacgagcacgtagaccatccaggactgtgtcctcgatctcacaaatgagaaaatccacaacatcaaactctgagtgagaaactagggcaccaatggcagaagcgtccgtctcatgagctgatatagaaatctggtcgttgtggtgaaatctgccggagaacatcgcgacccatcggagaagggcggtcggaacaaagccatgacgtgagctgtaccaggagcaactccatcgtgagggcgacgaggagggtcagaggtgccatagcacatgctgcgaagatgagtcgatgactcgttaaatccaaacacctgacaaat

SEQ ID NO: 49607 - DNA, 573 bp, Zea Mays
gcgacgacaatttccggccaccaattccgggggcccggacgctccccacccgttcgagctccacggtgaagtccccccggcaagcaaagaattgagtccatctacttcgcgcgcgagaaatatccgcacagggcgtttcataatctctctccctcaccgctccgctcgatggaggtgctccatgcccgattctctctctccggcgaggtagccatcagctacatcattggctccctcgaggttggatgaaaggaggtcctgcagtcgcatttataggttgggaacgaagtcaatccgttggcgaagatcccggtctgttaccataatcccagggaagatcagcggcggatgagggaaggagtccgtggggaagacgaccagtgatagggacccacctggcagcggcaagagcgtgaggcaaaacgtgatcggtgcgggcccaccagcagtggcgcaggagcgatcacccacaagctgtccacacgaggtggtgtggtgcgacatgtgggccccgccctggtagtgcgcgcacgcatgtggcaggaggaaagttgggcgcagagatgagctagt

SEQ ID NO: 49608 - DNA, 400 bp, Zea Mays
aaatggcaccgtttgaagcactttatggacgaaagtgtagaacaccgctttattggaatcagaccgaagaaagtcagttatttggaccagaaattctccaagaagcagaaaagcaagtacggattatcagagaaaatttgaaaatggcacagtcgagacagaaaagctatgctgacaatagaagaagagagttgatctttgaagtaggagacttcgtataccttaaagtttcaccgatgataggaatgaaaagatttaaggttaagggtaaactatctcctcgctacattggtccattcaaaattttggaaagaaaaggtgaagtagtgtaccagttagagctacccgatagtttatcggatgtgcatgacgtatttcatgtgtcacaacttaagaaatg

SEQ ID NO: 49609 - DNA, 641 bp, Zea Mays
acaacccaaaattgacaccctgggttgttgcctggaggcacaaccaaactggccaacatgttttataaaatcatagttgtctctcttttgtttctatttgggcatgtcttttcttttttaaacataaggcaagagctttgcaattaatgaacacacccacccctctgcacaccgggaataaacatcaaacacaaaccactatgcaccaaaactttatagcagtatcccatgtagacttgtcacttgtccttgatctctatcaaaaagtctatcatggatggcacttttgcactaagttttgtgagtgcgtgagtttattgtagtgtttttgtgtgtataggcaggctctgctttcataggggctccttacccccctctcattttctcatattcttactataaaaatatgcaactcttcttcgtttcagaatagttatccatgtatttgatgttatatgatacaatattctgtgggtttcttgtaatcttgtgttgctatccgttatgcaatagtagaacatgaattacttatttttgtttagtgtatgtattaaaatgattgttttatactatagaggttttgtagactccagctatagagctatgttagagtatcaatatttttgtaaaatccgataacc

SEQ ID NO: 49610 - DNA, 478 bp, Zea Mays
ctctttatggcagcttctatatgtagcaacttctttagggacatttggggcttttactttggatagacctacgataatattgcttttacgactctttgttattgtttacaccggaaaagatcggaggtcagggactcctttgcggaccattggaagtttgcaaaagtctgacattaaaggttctcccatgagtaagaacggactgccaaaacgcaagaacacactgccaaaagaatatccttccatagtagtcattcattctagaaattgagacaaaccattctaaattttacacttagcaggtggaggattgacgactccttatctgcccattcttctcttgaccagctcctctacttctttgctcatctttgctccatcttatcattcatggaccaacacgtagtaacaagcagctttggtttgcacaggaacaaacgcagaggtgtcctgacatcctccaacaattttgatggca

SEQ ID NO: 49611 - DNA, 814 bp, Zea Mays
gatggtttttaatggaactaggaagaattgccatgataaggaattaacaaaaactgaagagggcacacactctttctctcaataatatgtttatttgctttgtgtttcattctctgctaagctctcataaagtgttgctacagtaggacattcgacatatttatctcaacaagccactacgtagattcgactaaatataattgcacctcattactgatgttagaatgcttgggagcataagcttcaaggtatcgattgagctacttagtctggtcatcaattttaagggtgatataaagaattcattcaataactatgtatggattaacttgaacaattctatccaaacccttgtaaaaaattatccctatctgacacaatgctaacatgtaatccatgcaagttgtagacattgaccacatatgcctgagctacttgaagtgcaacaaatggatgagatagtgggatagaatgacaatagtttgtgaacttatccaccactacgagaatagtatcaaatctgttagacttaactatccctctataaagtccatgtaaacaatctgccatgcattatcaagaataggtagaggctacaacaagccactcattttaacatgttccacttcaacccgttggcaaatagttctcttgatttaatccttaatatcaggcttcataccagactagctgaatgaatgtttgatcctataataggttgcttgaaagcctaagtggccctatcattatgtagcaacttcagaatacatatagtaccaaaaagaaagttaggaaggagcatgacatatgttgg

SEQ ID NO: 49612 - DNA, 380 bp, Zea Mays
cggaagagggcgaggggtgaatggatctaagcaaggaggcgacacgctggaggtcagaccaccaagtagagcaagagggagttcgaggttggaggcgggcaccgggcgagaggatgtggattgtgggcgacggcagatttggtgaaggcatgatcgtatgaccatgtgagggtagtgcgggagtagttgatggtctgatggaggttgaaggattgaagggcatcatgaaaaatgagaaaaagggcctagagaaggcatgggcctattctagttagatgggtcaagcctcacgttgaattggcccctagcaagtagagagtacggcatcaagactagtggaggaagaggctttgaccaacccttaggtcatagtgtcaaac

SEQ ID NO: 49613 - DNA, 557 bp, Zea Mays
gctaccccgtgtggagctctgtttttgtgtttctggccattttcccctgtcgcttcctgttgggcggggggccttgacccgtggtggatttgggtttggatgtgcttgggcgtgggctaattttggcggtatttgggtttggggttgcggaattgctgccttcggttcgggtgtatctggtgggatcgggattgaatcgggcaagcattgttaggatctgaaattggatatgagttcatacggtggtgtagaagctttcaacgaattggcgttggatggtttggtgcgcaggttgagccgtgttcttggttgattagccatgctagtacaaacaattatttgcacttcgtccttccaatggtgacaaaatgagatgtactctgaggaaaacataaggggaaaatccctgtttactttaagctacggtggaaaatttattcatgccaccgtatgttgtcttgcctttctagtttcaatggtaacactaccatccttttgctctgatttgaacatgatgtccgcattagtcatatatctcatatagttttcactatccg

SEQ ID NO: 49614 - DNA, 448 bp, Zea Mays
tatcttgctaatatgtctcttttttatctttcattcatgtaggccaatcatttctcgaggttcgaccaaaaccattggacatattgttagacctactacacccaaatcctctgtccccactgtaagtgcatttgatagcattgaagattcagatgacgaggaggatcttgtcccagatgccaagaatgataatgcttacttggccccaagcagtgctattttaagtatcagatcgctaaacaagtgacaccaaggatatgttgttttacctgcgggtcgtgccaacttgtgctagcctcattccagttcacttgattcaggataaagtggcctcaatcatgttcaggtatcccttttttgcattccattctattgttttgtcttcttatttgttgctcttaatttgtttatcaagacttttagtactgaaaaatggtgtgacccttag

SEQ ID NO: 49615 - DNA, 870 bp, Zea Mays
cttctgccactgacctgtggacccggtcatcaggcactttccgcagctagaactgtgcgcccgatctcactgccctggggaagtcgtctgcactctcggggtgaatcgggatccttcggtgcatggtgaatttctcgtcggcctaccaggaacaccaccgccacggacttcatcacgagcagcaccatcctagccatcctccctggtatgagcgatttccactggttcaccgtgtgcatagcatcatgtagctcggtcgaatttagggtttggcgctcaggtggagccgattggatgccttgccggcatgctccgccgggtgggcagggaggcgccaccgcgctcggctggcttgggtggaggactcgcgttgaccgtctgatccatcgtgtgcggtcaagattagaagcgcgataacgtttcggccggtggaacgctcacctttggattagatcaggcgaccgggattgattcaggtgtttccttgggtcgggtagtccggggccatccgatggcaatcatggggctaggagcggggctcggtatttttttaaatcagaactgttgatcgctactcgggcgttcacgggcgcgtatcgtctcggtgcgaggcaatctgatctgcgccgtcgatttctaatccggtggtcaaactcgcgtaccggttcggttgacgatagatgtaatccgggctgtccaatggggatctaatggcctaaatcgcgcgataccctttcgcgaagccaaaattacataaaaacccctaggttttggtgaaaccaaccagcggtctgcgataactgtgcagtgagtctgggaattcttgcaccgagatccctgcgcttcctaataataatgcgcccagtctag

SEQ ID NO: 49616 - DNA, 547 bp, Zea Mays
tctctcttctggagttctcggcgtgagcgtgacagtgcacgacgtggagcttgacaagtcagagcgctgaatgctgatgatgatgaccgattaaacgtcgccgctttattaggagacggcgacgcttctgcactgtaatcatactcttcttctgtcctggaactcgcatgtcggcaccctggctggcatctggcgtagtagtagagagagagagaggtagcagggatctgagttctcgatcgatatggcatgccggggtcactgtggtgccgtcactccagccgtccactcgcaatttggacagacagtgccacgatgctcttgacaggcagtgcccaggcccgaatcttttcaaattctgtggatcgcgctagctggctggctgcccgccgtgtatagcctgtaacccgcccgaaacgattctcaaacgatagctagaaccgttacccacagcccacacaggccaccacaggacacaggagatcaggaacgagcgtagcacatatcttagactatcagatttcatatcacactctttatttcaaac

SEQ ID NO: 49617 - DNA, 592 bp, Zea Mays
atcgttgccttcaggcaaggtcggcagcgacacaaggctggccctcaatccgtcgctgttggtcgatgcttcttcatcacagccaaaaccacacttgtctcctttgtcatcacaattgttgccaacacaactagcaaattcatcttcacagcaggtagaactaggggaaaaactgactccaaagaagaagatgaatgatgtctagaaaataaggacagatgtcatgtgtaaaactagtttcctagcttttttgtagcattagttcacagatctgtttgcaagtggtccttgttgttgaataatggtagctgtagttcacagaacagaacaagtttgcatgtgaataatagtagctgcagttcagaaatatgacaaaaaaaacacctcctggtgggtgaagttcactaaacagaaatgctgatttttttcacatttcgtattgcaaacacaggagacggaattgtttgatcattgacaacacaaaggccataagcctgttcataacatagatgcccaggttcacaacacaaaggccatatgcctgttctacaaagcagttctaaatctaccaaacacaaaatacagttcaacc

SEQ ID NO: 49618 - DNA, 379 bp, Zea Mays
ggaaggtgtttctacttggaggtttgatcaagatgcacttagggaggccttcgctgagatgattattgaagatgagctgccttttgcttttggtgaaaagcctggcttcaagaaattcatataaactaatttagagccagggatcccctcttgtcaaggccaaggaaggtccccatgccatggggccctaggagcagcggtctttcagctatgggccttgaagtcagtcttatgtgtcaagattcttgagcgtgtcttggtagcaatcgagggcatgtccttccctgggcactaataaagtcccttgggtctgttgcaggaataattctatgggtggggccaatttttcttctcgatgactcatggtgtgggggacaga

SEQ ID NO: 49619 - DNA, 370 bp, Zea Mays
cttgatctaacctaacgaaggctaacctcaagttgagctaatctaatgtaagttgcttaagcaagttggataatgctggtggcataaattagaccctactcctataaacatgattaacctaaaccggttccctataccagctcagccatatacaagtacttgacttatgcgttgggttgcaaaatctgtataaatcaacataaaattataagcacccaagattttcaactatcataacttatcctactcacatctacctgcttgtccctaattcggataacaacaccaaggatgaagaccaaagatgatcaacctcatcaagaaaggataagcaccaattcaagtcttcaaggaccaagcgggatcacca

SEQ ID NO: 49620 - DNA, 903 bp, Zea Mays
gacattgtgcatcttatccttggtgtaccaaatcatggcggtggaaaaccattggggattgatgaagcagttgcagcaagtaacttgagggcagagcttggtttggctaaagacgagttcaatgtgacattgctacaggatcgtttaaggaaaggggaggatgatgaccttaccatcagatgtttcttccttatcttattcaaccgtctgttgtttccaactgctagctggggcataacaaaccatgaattgcttctgacagaagaaatgcaccgtttccatgagaccgattggtgccaacttatatttaatgacctttgtgaagctgcgaagaagtggcataaccgaagcaccacaaacgtctccacgacgatatacagatgctcaattgttgtccttgtaagtatagagtttctcttatgtacatatattgcaatttttttgctcattatggggcatgatatatcatatattatgatgtttattatgtttacttacacaaccattgcacattgaaattttttatgtagttgtattacctggatcacctgcatgcagccgctgcccctcaaaataatcttggtacacctcgcataaaattctttgataagaatatcataaaagctttgactaaagccgacaagaggaaggcacgccatggggccgaacctttcgattattgtgaagtaagttattcatatttaaacaagtgtattttatgacaaattttatgtcaaatttatgtgctttgttttgagtaccattgtttgcattacaaactcatggtccagttcaactttcacttacattttatattttagtttcgaagctcgaccgagacattcagttgtacctcagctcgatcgccaatccgaggcaagtttttgttgtattatatacatc

SEQ ID NO: 49621 - DNA, 557 bp, Zea Mays
gctctagccacagtgtgtgctgtgaagggatgcttcaatggtatgaaatgggcgtatttagtatctctgtccaccacaaccaaaatggagttgtacccgtcagatgatggcaaaccctctacaaaatccatcgtccaatcctgtcaggcccctgccggaatgggtaatggttgcaatagcccagctgtatgggtatgctcgtgtttagctttttggcagatgtcacactgtttaacaaactgttccacatcactctttagccctttccagtagaaaaactgactgacccgataataggtcgcctttaccccggaatgaccaccaatagcagtagaatggaaggctataatcagcttggtttgtaaggctgagttatgagctacccagattctattatggtacttaataattctctgacataatgaaaatccttgttcatccggtgaatggactgccaatctagtgagtagctcttgagcctcggggtcggttacataggtgttcaacaactcctgcacccatagaggtcgaattgcggttaaagtgacattatgcat

SEQ ID NO: 49622 - DNA, 774 bp, Zea Mays
cagaaaccttgaactaataaagaaaacatccatccaaaattcagaagcacatggttcacaatagtatccttgaatttacttttgcatcacttaaaaaatgattcgctgcaacagtggccataacatctccacctactaacaagagcctaatagtcatcattttaagagaaccgagacctacttaactgaacaagagcctaatcatcattttaacaagagcctaacacgaaacgataagatgtgatgatgaaccatttgtcatcccaattatctcaatatcaaataatcatcggtaccattttttcatatttaccttttcacaaagacctggattttagtgtcactttgaaatgacactatcaatctgtttctgttgtgtgtagcaggtagagccctgtgtgagccagtttccgtggtgtgtagcagttgtatcatcattttttcatatttcagacaagagcacagaatgacctccatcaaaataagatgatgcatgagtgcgaatcagttactgaatttctctagtgcgattagtgtgtttcagttactcacatttgacaaaaaacacagaaaactatgaatctgtctcacagaaaacagatgaattcagtaactatttctattaggctattggaaccaccatgataactaagcaacatttcacacaaaggatagggctaagtggattggctcaccttgaactacaccatagaatctgacagacctgcgccacgtcgagcgcttctcttcaaacctgtttcagtgggatatgac

SEQ ID NO: 49623 - DNA, 577 bp, Zea Mays
tgagacgtctaacaattttttgagagaattcaaaattttaactagcctcgaggatccatgaaaatttgtcaacctgcataggtacatgtcaaattagtcgtgtacacaccaactatcaggtgacaactttagttgaaatttgtagattttattatccacgagatctaatgtagtatgtatataagttagccatatttggatctagtttttgtagtctatacggacgtcccagctgcgacatgtggttctggtgatcgatgttgttagcgcacattctgttgcttcatgtgatcactttttctggactttggttgtgaggctatgtcataggcaagtcaagtggtcagcggcaatcggtagctacccagccagacgataagatgaatcatatagaggtgaggttcagatatcaacgtctgcaagcaaattaggtttaacgtcttgtgccatcaattggtcattcaacaaatattttcttttttgtctcttttagactttagttggcatattacaagagttatggattatatattacaacaactatattaaacattttattaattatgttgacaaaatt

SEQ ID NO: 49624 - DNA, 534 bp, Zea Mays
cgagcaccgactcgatcctcgccaagcaacttagcgaggcggaagtcccagtcaagtactctcgacccgcatcaacaaggacaagacacgttatccctatacccattggacgaacaaacgagacattataccgtgacgggagtgtggctacacacaaccctacgaacaacgacagaaggactacgtcgtccaagggcaatgcaccatgctctcactagtagaatgcaattctccactgtaaggttctgtctttgagctataaaagggcatgatcccttctcgcttcctacgagcacattagttgtaacacaccctaaaggaatactacaatcagcactacactagactaaggcgcgagactgaacccgtgtaaaccctatgtctcgaaccccatgttcgagtctcagcgattcaccatttggagtgagtctatgatagcttcctcgccaaacacaaatcctattgtccctggtttctgaaaccacgacagaggtattcaacatgatgctcacatactgcggaggtggatatccc

SEQ ID NO: 49625 - DNA, 547 bp, Zea Mays
gtggcactacgattaagctgcatcaaggcatcgcgtctggggtgaccaaggcgacgatgccaggtggtagaagacgtggtggcagcaaaaacagcagctgtgtcaggtgacgaagacgaagaagatgtggcgtgcggaagccgaagggtgtagagggggccggtgctatcacatctaaggagggggcaccgagttgccaagtcctttacagtaagaccagaagagtcaaactcgacagaacaagaattatcggcaataaactgacgaatagaaagaagattatggaccaaagaaggagcgacaagaacatcgggaacacgaaaagagccgggagggccagcggcacccacagatgtgacaggaagacatgagccattcgccaccatgatggacaaagggagagaggaaggagggcaaacagaggtgagtataccagggtcaggaatggtgtggtaggtagcaccggtgttcacgatccactcgagacccatcggcggagtcagagtgggagtctagaaggcagccaggcggccgcgtcccaaccaac

SEQ ID NO: 49626 - DNA, 478 bp, Zea Mays
cgaaggagcaaagaaaaagagggttgtaagtattttgaaaaggcaagccatgcggtccattgaaaagatcagagggctgctaaaaaacaaaaaattttagcggagccgaaggatgcggctcccaaaaaacgaaagtcctcaagcttggcccctaccgaggcgaaggtacaagatgtaccagagaagattgccagcacctcttcgtcctcatctgccaatgttacagaaatattgaaggtaatgattgaacccttcccgtttgctatgctaagtcccctagggttagatctgactagcttattgcagtcaaaggagaagggggttgagaaaagcgcggaagagaagaagactgcttcggcaactggggaaatgcggggggtcagaagaaacgacagatgatggctataatgaaggctatccatcagaccccacccccggtctcggcggaaaaaagtgctgcccctgctaatgtcgaagc

SEQ ID NO: 49627 - DNA, 368 bp, Zea Mays
cttgcactggaggctgaggtgggggtgggtgctgctgcacctgcttcattgctgctactgtctgtccaattgcttggactgcctgagtttgcatgaagaacatttgctcaactgtcatcgagggtggcagtggcaactgctactgagctacatcttcttggggtgcctgctatttcggctgagcacgccttgcacctctgcgtctgttctcagacatctgtacaaagcacacacacatcatatttgactctgcagtctttcagcataagaaaagatatacataaatcttcatagcactgaacaaatgatcatcttcactgacagcttctcagataaagaggaaagtggaaataaatagattacccaac

SEQ ID NO: 49628 - DNA, 463 bp, Zea Mays
cctatcgatggtggagataaggttgttaattgaatcagatattgtttaaggtcttcgaaagcttgctgttaggctggtccccattggaatacttcagttgactttaacacctcggaaaatggcaagctttgttcagcggaccttgaaataaatctattcagagttgtcggtctgcttgctaagtgctaagccccttttcttgatttgggtggttccatacaaagtatggcttctatcttataagggttggtttcaattactttcgttcacactagactttcgaggaatttttccttcttgaccctaaacacacatttctcaggattaagctttaggcaagtctttctgaagtttccaaaggtctctagccaatccaagatgtggtcctcttgtttagtgctcctaacaatgatgccatccacatttgttaacacattcttgccaattggaatgttcaacttac

SEQ ID NO: 49629 - DNA, 499 bp, Zea Mays
gtgcgagacacggagcatagaaacctagtccttgggttaagaaacactacgcgcatgcacgcattttgtccttctgtccggccgaataaaaaggcgtgtacccgttcttgtcttgtagaaattcgtggcctgaggcctgtgtgcttcctgtttgagatttctaaaaagtgggcctagtgtacattacttacaaagcaagtgcattgttctgtcacttggaaccgctgggttgttgcgcgcgcatagcattagttagaagagtcttctcctgcaccaaacgtcaagaacaaaacgggccggccggccggccggaaggggatctatccagcgctagcaggtactgcctaacaaatggcttgtcaactcagttgtcatgttacatgtgtactctctactgggtaccaaattgggtctggaatagtgcttttgccgctttgctatgaaaagacctgctgttgatgtagtagtactactagtgttacctattgatgccttcttg

SEQ ID NO: 49630 - DNA, 915 bp, Zea Mays
tactagagagcaaaatgggtcgcaacattttcacctatgtcgacgacatagtcgtcgcaagcaagaataaaaagaccatctctcagacctcgcagaaacattcgccaacatgcgcgaagccagactccgcttaaaccccaaagcgtgcatattaggcgtccgacaaggcaagatacttggctatctagtatcccatagaggcatagaagaaaacccaagtaagatacatgccataatggacatggctccaccacagtcgacccgagatgtccaacaattgacaggaagactcgtagcattgaacagatttatctcacggtccgccaaggaaagtccccctttcatgaaaatgttgcacggagccaaggacttcgcctagggccctgagcaggctgtagccttcgaatcattaaagtagtacttgtctgaacttgcaactctaactagcccagaccccgcattacccctcctgctttatgtcgcagcatcacccaacgtggtcaatggcacgccccagcagtgtccggcttacttcgtatccgaggtcctcaccaattccaagtgcatcatgacaaaactagaaaagatagtctatgcagtaatcatggcttcacgcaaactcaggcactactttgaggcacacaaaataagaatcaccaccaaccgaggtttaggcgacctatttagaaatcccaaagcatctaccagaatagccaagtgggcagccgagctctccggctgcaacatcacattcgagccaagaacaacaataaaatcccaggtcttggctgatttaatagtagactggacagggccttcagactcacaccagcaaagcacagaaacaatttggactatccactgcgatggagcatggtaccatgtgggggtaggcgctgcagcaatcattacatc

SEQ ID NO: 49631 - DNA, 1075 bp, Zea Mays
ctcgaatgtggacaccaattttggtagagggaatttagatttctttgattgtcgtgaatcccttgatggctgtggagaaggtggtggtgtcctaaatgttgatgcttgtggcggagatggtggattagaaagaggatgaggagcagcatgggaagattgtggaggtgatgatggatgtaaaggtactaaagtttgaggaggcggaaatggttggggataagatgacgatggcattggtggatcaaccaattcgacatcccttcgaggccaaaggatgaaattttttatggtttgtccaagtgtctcgattccttcgggcccagggatgtctagcatgtcgtcctcggatccttggacgaccatcgtcacttctaccctgcaataatcatctggtatgttgcttccatgaaacttacatcctgggatcacaatgcatgttcctactttcttcatgcgattattgttaataccatatcttataaccagtgtgcatgtcactcgccttgttatgtcatcaactgaataacgaaccttatttcccgttgacacgacatagcttgggacggttgtacaatcggtgcaagccggcggttgagctgctggaattatttgtagctgtggagtggtcatctgttgaacagacatcgcacttgccaactgctacatcaattctggtggaggatttgatagcatttgagacatcaagtctttgaactctttctttgcctcctgcttaaaataatccgacaactcttctttgtatcgatcacgtttcttgtacaaaccttcccactgtggtccgaatccttccttccatccttccttagacaagattcctcgtacatggcctggatgctcagggttaccgagaccagccattaggatgtctctctccctttgtggcttaaatgatccttggctctgcttacctgccattgcatatatgtttttcgcaacttcttcgacatttggatcatcaaaagatacaccagccttagtttgcctgggttttctagcacggatccaatttgccgtcctttcaccaagttgctcgtaaagcgtcggcaaccctgcg

SEQ ID NO: 49632 - DNA, 418 bp, Zea Mays
ggaacatatcagacttcaagtgcaacagaatactcgtgggagcaaccatcaagaatcacaagataatacttacaacccaaaatactctgaacaggtgaggcccacaaatcacagtgaattagatcaaaagggcgcacgacttgagtggagtgaggaaaagggagcctaatatgacgacccaactgacaagcatggcataaagactcatggtggccttgagtacaatagaggacaaaactactagacaccttggacataacatcgggacgatgtatgaccgagccgacggtgccaactagtggacgaagcggtagtagtcaaagcaggtgaggctgacgaagatggcgaagtagtggatgcaggaaagcgaagggtgtacaggggcccagagctgtcacaccacacaagaagactttga

SEQ ID NO: 49633 - DNA, 499 bp, Zea Mays
ctcctctatttttacattcatgtttaatatgattttgtccagggatctccatgtttctcttattactaatgctactaatacattctttgagtccaagattagtgtggttaacaggtatgcatcacttgcaactgccagtccattggatgacatgtcactgcatcacaagtttataaattcagctttgggcatacattgccaccgaatgcgctatatccacttttccatggaattgctggaaaatgactttagctttcaatttaaatgccccaaacttttggcaaaagtatttcaatttttatgaggggtaataaacttgtgaaggggggaatctacaagcttttagttgttgctattctgcagtataagagcatcagatctatcgggtcccactttggaaacctgtgttgagcacttgagttgcttctttctttttgtggtgctggtggttggagggggaagaggggttggcagtcaaaatcattaacctttattcttg

SEQ ID NO: 49634 - DNA, 550 bp, Zea Mays
ccggcgtcggcatgccggcccgtcgcccgtcggactgtgggagcatgcatgagtagggcagcagcgttcagtaggaagaagcgcaggaggagcgacgatttgttttgcctttcctgctgtatgttttgcggtgttccggatgtcgcatcgtctcaaaggtttcttttggtttcttgctaattgctacgtgagactgaactgttgtaacaaaaagtcaacataaattggactgacgacgagaaccgcacagctccaaaaaaaaaaaaaaatggtactctgctcgcaacgcaacgcttggcgttctggcttagcgcttttagccttcgcttagtgtacaccttcagtcgactacgtcatttgttttacaagcgagaacgtcatgtgaatatgtcgtggtctctattgctatgctactcctgggtcaattggcttggcctatataaatttctactgctgatattacgattgcagagccagacatgcacggtgaaccactcaatactaccccaccaaacaatattagcaatatactcaaagaggttgcaaagta

SEQ ID NO: 49635 - DNA, 618 bp, Zea Mays
ctcatgaggcctgagtgctcttgaggcgtaagcaatgactcggttgtcttgcatcaagacacaacctagtctagtgccagaggcatcataatacacatcaaatggcttgctgctatcgggttgcgctaacaccggtgctgtggttagatgttgccttaatgcatgaaaggcatcttcgcacttctgaccccaaacaaacttggcttctttcttcaacagctcagttatgggcttcgcaatttgagagaaatccagaatgaatcttcggtaataaccagctaatcctagaaaactctgaatctgacggacagtcgttggcggcttctagttcatcacctcttgcaccttatcaggatcaacaactatacctgtctgagagatagtgtgacccaagaatttgatctcctttagccaaaaatcacattttgacaatttggcataaaggtggtgctctcgcagacgttgaagcactacatgcaaatgcccgacatgttcttcttcgttcttcgagtacaccaagatatcatcgatgaaaaccactacgaatttgtccaattcaggcatgaaaacaaaattcatcagatacatgaagtaggctggtgcattagtcagcccgaa

SEQ ID NO: 49636 - DNA, 578 bp, Zea Mays
ggaaaagtgcttcctcaggagtgaggagctacaaggctgttgcgtgcttgcaacgagtccttggcgagtattttattgtagttccatttaaagctgagcatatactattttgctagagctaggccagttgggaacgagatagagatggttggtggccttccgatgcaaagcatggacgacagatacgtagtggatggatgttgttcgagacatttggttcattagctcatctgtttcttgtagctggatcagaattaaccacccctcgtgcatgacgcaagatgatactggacaccgctcaactcatgcatggtttatgaatgttgcatcatgaatccatgcatgacctctgtttgataattgttgaggcatgttttttctctatcgaattattgtgcaatagccagagacatctttatggttctatctatccatgaattgtgtgtttaatgcgtgtgtctaagagaaaataaaaggacatatgttcagtggaagatgttgtgggtctttaaaatcggcagtcataccgtgtatttatatggagtcaatatcttgagttataagtcatcaagactgtt

SEQ ID NO: 49637 - DNA, 459 bp, Zea Mays
ccaaaccaagggacaggacaggcggcgacgacgaccgcttgatttatgcatgcatggaatgaagggggtattttccttttcagttccttgctttcaaaggaattaagtcaggaaacctacgcgcgcgttctgatccagcgtaccgatccatcacacattctgcgcgtgcatggagtgcatggctagagtccatgcctatgtgtgccgtccaggcttggtgaaatggcgtggcatgtgtgctggcgctttccgtagaaaagtggcggcgacgtgggcttgtccatgcatgggtacggcgtgtgccatactgccatcccatctcatcaagggccaggtgtggtatacgtgaatgtacatgcttatcgattgaatggagctaatcctctgcggtcatgttttgggcgtgccctagctaaccgaaatgaatcgacccaagcatatctatcatttcaccggttg

SEQ ID NO: 49638 - DNA, 413 bp, Zea Mays
ggtttgccttctaaaaccgggtgtgacatatacacttgcagattttctagggctacacttagctcttccacccgggcttgggcagtcgcctcacaatcccaggctatagattgcgaatttatggcccagtcaaaagccttatcccgctccacaattttccgttgcaaacgctcgacctctgctaacaacttagcgatgtggtgactatcacgcgcatgctccctgcctccatggcgcagttccatcgttagacgttcaactctagcctccagaagccctatggtatcattactcccactactacttccctcatgtcgaggagccaaatgatgacgaggtaccccctgaggttcggtcgcctttcgaagggtagtatttgtgcatgccatgtctctataagaggggaagattat

SEQ ID NO: 49639 - DNA, 640 bp, Zea Mays
gtgcaaaattagtccacttttggactaaagtgcaaaaaccaagttaaataagtatcttaagtcatttgggtcacaaatatgtgaatttacaagccaaaccctgagttttggacctaattgcaaaatagacctcaattgagttctattctaagtctgatttcagtgttgagggctcaactttggaaccttgtaacttttaaaatatgggatctttgccctaagtcaccacatcaaaattatagcctaatcataggagaacaactttgcttaagggtgtgagcatagttattaaggaaaaactggagataattgagcctgaagttggactgtcagactgcttgaagtctgaaattcagattaacagtgggatgacatgaacttagggcttaattttaagcatgatccggtgactgtttgtgagagcaccttgtaacaaagttatagttggatgatagccctacaactttggtgctgatagatgacaaagttgtaatgcaaaaattggaaaaaaaaatggctctgaagtcgctctgtcaggcggactgaataccaaccaccatggtacagtaacgtttggggatcagaccgccagcgcggctgtcctcaccgccgacggatccctccgccgcgattcgtgtcg

SEQ ID NO: 49640 - DNA, 896 bp, Zea Mays
gccgaacatgatgtgacttcatagagcgaagctctcactgccggtgaacgctgaaatgtgagccatcaaagtggaagatgtcactaggcatgctaatgatccctacctggtgcgccaactatcgtggtttcagaaaccatgggatagtaagatttgtgttcgaagcggatgctagtgtggactcgctccaaatggtgagccactgggacttaagcaatggattcaagatggtgggttatactggtttaggcttgcgccctagtctagtgtagtgttgatcgtagtattgttgagggcgtgttacaactagtgtgctcatgtgttgttcgaaggaaggacatctcccttttatatctcaagagagaagccttacagtgggatcccttcctcgctgaggagagagagtgtgtcatatccaccagggtcaacaaactggttcccatttcttgtttgtggccatacccctgatatggcgttgtccctcatgacggttcctgtagcgagtccattgttgatgtcctggtggcagtatgtggtaggtcccatgagtctgtctaggatgtgatcgtacgcgatgtggcttcctctcgtcgcgccctacgtctcctcccatcatacgtgatacatacacctggtatggtgtgttgtgtcgtctttttcgatgtgtgggctaccattgagactcctatgttgaagtctcccctaggactcatcttgtgcagtgtgcgcaagttcgggcatggcgtggtgatgacatgtcttgtcgtgatgggcacgagtttgcatcgtcggtgttaggtctccacctcgtggacacagagacttagtcggcagctccacctcgcaaacttgcttggtggggacttggtcggtagctccgtctcgatggcttgctc

SEQ ID NO: 49641 - DNA, 1059 bp, Zea Mays
gaggaattggaggccatatttatggggaagatcttttctggtgcggacagatcactgtagtcttagattccttctagatcaacgactatctacaataccatacatgggtcaacaaattgtttggatatgatatttcagtggaatataggccgggcaaattaaatggagcacaaatgccttgtctcgacgcgacgaagacactgcccaaattaacaatatttctgcaccacaggttcagttgtttgacacccttcacactgaagccgccactgacccacaagtcttatgtttgtgggccgccattgcagttggtacagcaaaacctggatggacagaagcagatggggtgctactctttcaggggaaggtcttcatcccggacgcttcagcagtttggacagaaatcttagcagcagtacataactatggtcacgagggcattgagaagactgtacattgatggagagcgtccttctacagccctcgagccttgcgacgggtcagagaatttgtgcaagcttgctccacttgtcaacaaaataaaactaagcatctacacccagcaggcctacttcagcccctgccggtgccatcagaaatttggagcgacatctccatggactttgttgaagtattccctaagtttagtggcaagacagtggtgttaatagttgtcgacatgttctctaagttcactcactttattcctcttggccatccatataccacagtgtccgtggctcgggcattcttcgaagggattgtgcgctttcatggtattccttgttcaattgtgagtgatagagacaatttttactagtgccttctggtctgagctctttcgccttgctagggtcaagttgttacttagttcagaatttcacccccagaaagatggacaatcgaaagcggttacatgattattgtcatgtacttacgctgcttagtgggtgatcggccaaaaacttggttacaatggcttccatgggctgaattttgttacaatacttcataccagtctacagtcaagtgcaccccattccagattgtctatggccg

SEQ ID NO: 49642 - DNA, 456 bp, Zea Mays
atactttattattgcttatctagattttgtgcttagtttcctagtttagcttgctaggcaagtgataggattggtacctaggttgtataactcttttgcagtagagacaacaacacgcctagaaaaatcatagttgtacattgcctaatttattcccctcttaggcgtcatactccctttgggtatgtgcatctaccctatatccacgcatgctcatgacaatataccatgaaggattatcgagtacaaaaggctacatcgactattaactacatcatacccaacgacatgtgcctcaacgtccgtggatgtgacatatcataactgcccttaaggcaggtatggtagcctactagagatggacatacttgactaaaggtatagatttaggtatgactccacaaacaagataagaaaaaagtagtttggtcttagccaaagggattcgatgtccat

SEQ ID NO: 49643 - DNA, 454 bp, Zea Mays
taattaaacttggctgaaaaaagtgaagagtataggtaacttgttagatgggagaaatggtgaaccatgtatagatcgggtgggcttagttcaaatagggaataatgggtgaagctatgcagttgtttatgtacaatatcttataacagtatatcaacaaaaatgtgtgtagtttctggcagaaacaaactctgaacacaatttcacagcactaatttggccatggacaatcaatataagaacatttaaactcccatatgggtttgtagattctttatctaacagaccagcactgagccattaacacattagtgtataccaaaagataaacattcaaactatacttcacaagaatcttttggcgtgggcttcacgcaattaagcttactcaaatacacaattgaaaccaactacaaaaaatggtccgtcttctctacccatccaccccattttg

SEQ ID NO: 49644 - DNA, 581 bp, Zea Mays
cagatgtgtctattgtgcattggatatacgtattggacatgggaatgccttattgagaataggcaaagagctggtgtgtccggtgtgcactagacaagatgcacgagagaggccatccagagagcttccagattggtacctgttgggcacccagaaactgggtgcctagacaaagcccaaagaagtctctgccgagcaactttgcgagacggaacggacaaccaagtccctgccaagcaaccttgcaaagcggggcgggtgaccaagtccctgtcgagtaaccttgcgagacggagtgagcgaccaagtcccagccgagaaaccttgcgaggcgaagcagacgaccaagcctctgtcgagcaaccttgccagagaccagcgtagaaggccaacccaatgatacgagcccacatcagcaggataaacgggtcatgaccaaactatgtccgggtctcgggtatggtgtcgaaaggtcttcgatggacgtaagatgacacatgccgcataccgtcttgggcgaaccaccaccagcgaataggaccagtcaatcctagtcgagaggatctcaacattagagtctc

SEQ ID NO: 49645 - DNA, 987 bp, Zea Mays
cgacgaatggtatgcattagcccctgaaggacccttatggataaaaatagtgttgtgcatgttagtctaaatcttaatgattgactgtgtatttggtaataaaaacaataactttgcagaattgtaaccacgaagcaacttgttgttgcgtgtctcactggatgttgagactaacccttcatgttgaaggacaaatatgtagtattcatgccgctacattaatctaagtccacagctcactgcataaaaccactatctataatgtgcgtaagatttcctaaataaatcaccacaatagcatacaatggccacaactcgatgattgtggttggggattttatctgtatgcttttagaacatctcggcattagggggagaaatgcccatatattgtaatgcctcaatattctataaaacgcacaaaagccaaactaaacttgtcgtttagtgtgtactcctatgtatatggagtttgccagaaatcgttgaggagtaaccatattggtctgaatgcttctacctgatgtagatgtggatatacccgggtttaatatcatatctacatttgacttattggtatttgatctattctcggggacgcctgcgaatatgatccatcagccttagtcaaagcatatattctaattgcagattcacgtggtctgtgataactctccttcgattaattcaccctgatggtgatttgcctcacgaagaggttcatcttgatgatgaaattcctagcaatacgcgcaatatcattgtgctgggaatacggaacaataaatctttcgttttgggaaatgacggagatcattattaaatgtgggagacaaatatgtcgacacctatcttgcccctctagattgcaaatggatccaaaacaaagtcctaggcatgagtgctttaagctctcttatcgggtcattgataaatgcaatcgaggctgaaccaagaatcacaaaatgaaagtcgcgagcttgaagt

SEQ ID NO: 49646 - DNA, 580 bp, Zea Mays
cccgactgggttgagttctcaggctccaaaccacgtatggcagctctctgatccattttcccgcaagcttttcattcttgtcaaatactttctttctgagtgcttccagtatcattccgttggccctttctacttggtcattggctcttgggtgcgccactgatgcatacttgatctggatgcttcgttgctggcagaaatcaaagaattcagaactggtgaagttggatcccaggtcagtgatgatgttgtttggtataccaaacctgaatattatgtcttgtataaactccaccgctttggctgaggtcagagaagcgattggcttgtactctatccactttgtgaatttgtcaatggcaactagtacatgagtatagcctccttgagctttcttgaagggtccgatcatgtctagcccccagcatgcaaacggccatgttacaggaatggtctgcagctgctgcacgggcaagtgttgttgctttgataggaattgacatgcttcacacttctggactaactcggcagcatcgctttttgcctttggccaatagaaaccgaatctgaaagccttccc

SEQ ID NO: 49647 - DNA, 853 bp, Zea Mays
accgtttgaggctctatatggcagaaaatgcaggactccactgtattgggatcaaactggtgaaaggcagttctttgggcctgaaatcatacaagaggcagaagaacaagtgcgaatgataagggagaatttgaggactgcacagtcaaggcagaaaagttatgcggatacctggagaagactactagagtttaaggagggtgatcacgtatatttgaatgtgccaccaatccggggtatgcgaagatttaaagttaaagggaagttatcccctcgcttcattggacctttcttgatcttaaagtgagtgggagaagttgcatattaactaaaactacccgatcatcttgcggaagtacatgatgtctttcatgtgtcacaattgaagaagtgtcttagggtacctgaagagcagctaccaatggaggatcttagtgttcaagatgatctgacttatactgagtatcctatcaagatccttgatacactaactcgtgtcacaaggagtaaagtgatcaaaatgtgcaaagtgcaatggagtcaccatggagaagatgaagctacttgggagagagaagaagagcttcgcatagattttccccatcttttccctagtccttcctaaatctcaaggatgagattctttataagggggtaggatttgtaatacccaaattataatgcttataaaagagttgatctccttatgtgatttgccatctacctttgagacatgtgactaatcatgtttaaaaattaataattcttactaaaacacaaataaaccatgcatcatattggagttttgtttgtgcatttaatgaaaatagcaatcattaatggaaataaataa

SEQ ID NO: 49648 - DNA, 317 bp, Zea Mays
cgcccgcatccgcgcaccgcaccgcaccgcgccgcgccgttcagagagggagaggaggggacgcgaggaggaagaagaagcaggcaaacagcagcagaaggcagaagccccgtcccatccccggcagccccctccatccaagtgatttcaagtagccaccgagaagcggagaaggtgaccgcacctcacgcaatttgcccctgcccgtcgattccatcgcctcccgccgtcccttccctcctctagggttgtcttgtgggtgcccgtgcttcccaccctaggggcaggtccagggccgggccttctcttcgccccgc

SEQ ID NO: 49649 - DNA, 453 bp, Zea Mays
aaccaattgcagtgcagcaggatctgaccttggagtgtcgtccggtgcgtatcttggaatcctcggagcgtgttttgaggaagagatcaattaagtatggcaaggtattatggactaatcagtctgagcgcgaggctacgtgggaacttgaggagctgatgcggcagaaatatcttgaactttttgttgtgggtaagtgttgttgattcattatttttttccttttgtcgttccgatagaagcgttagaattcaaggtcgaattctttttaaggggggtagagtgtgatacccagtttgtaaagaggagaagtggaggttattctttttgttctttttcctcattcaggtgatgcgctttgggaatttggaatttgtggaaaacattcacctgtaagacagtagaatttctttggttagttgtttgcgacggggtcgggagctgtcacgtggg

SEQ ID NO: 49650 - DNA, 417 bp, Zea Mays
accagctttgggagtgcagtctcatcatagaaattatgggccatctttgtgagctcttcgagggactgggatcaagaaataataaacagaggaaactacataataaaggttaaccaacatgttcttggtgagctcttctattcccacatcacagactttaacacaagacttcagagttcagataaaagaaagaaaaaagttgtagaataaattgcttgctaagttgctatgttgatccaaagttaatttgcattaaaaaactcaccaaaacatgaatgaactttttatgtcagaaaaaatcattgattgtgtttgaatgttctaaaataacttgctttcataataatgaaatggttttcaaaattctaaaataactctgaaattggttctttttaaagcactacagtatgggcagcc

SEQ ID NO: 49651 - DNA, 481 bp, Zea Mays
cctgtgaaaaaattgtcgcaatatctaaacgttgtttggaattgcttatttgtgttgattttaatcagattgtgagtgaggcggtggtggtgcatacgcactggacgggacgaatggagcatcttccaaacaacgtttatggctaaaggaacttgcatgtagaatgagaatttgatcttctatttagcttgcggctatcttctttgttctgtgtttaatgaaataataatctaatttggatgtatcattattttcttcttctaattttcagtattttgaggacatatcctttgttccgtatagagaaactgtgtctttatagatctctaactaggtcctttaaatttgctatagtaggattaatattgtatctttgttgcagcacatgttgaataaacaatcataataaatatgatcttgaaaaaaaattcacaatatacatatgaaaattgcacatttcaaacagtgaaattggtgtttg

SEQ ID NO: 49652 - DNA, 553 bp, Zea Mays
ataggttaattccacatccaattttgagcatgattgacacccataacaaaggatggtgttaaccacaaagaatgatcaggtgctcgatatagaaagaggaagaagaaaaacaaatacaaagacttaaagcaaagatatagctaggatattttattttgccaatcaaaacaatagagtgggtaatcgaatttaggataagtagtggcagtataaagagtggaactcaaagtttaaaattattacttaagtgccactaggtgaattaagtccatgcatgagcattaaacctactgaagtcttgaaactccaacttagacatatttgtgaaaatgtaaactcatatgcataagtttaaaggacatgttggagttagaacatgggcgaaatatagacaaaaaaggttaaagggcgcctctaataatcgtcaaccttaacataggtagacttggagtcagtctgatggttagccttattctcttgtaaaacaagacctctgaatcataagcattgctctcatgatggagtagcccccactgttaggcgcatgagaaac

SEQ ID NO: 49653 - DNA, 676 bp, Zea Mays
cccgcggtgaccacgcgcgtagtagtgtggactgtggagcccaaaaaaacacgcgtcgcggacgggcagacgacgacagtttatctccgagcaccgtgcatgcatgggcatggtggcgatcacagtcacaacaggtaagaggtttgccacgatgagggtcaatgaatcagatatcgctggtcaaaagcaaaaaaactcagtcgtgctcgtccatggtctcgcacccattagccacgccgacgaaccggccggggcctaacccgatcactttggacgcgtcggatcaggtttggtttgtaggccacgatgacctgacggctggacgcgctgactggtacacctaactccaaactgatcccatatggtagacaacctgaccggcgggcatggattgacatgtcgtgtgaccaggcattctcaccggtcggcactcatcagcagcccttgatgaattgacacctggcttgcactacgtactccatggtttcagtgacatgcttgagatatttatgcattaccatgcatttctaataattccacacgaaaatatatgcgagttagatttatcatgcaccttatacagggccgtgcctgagatattagggaccctagacgaaagtttatactttatatggagacccttttgacatatgtatatataataaatctatattaa

SEQ ID NO: 49654 - DNA, 357 bp, Zea Mays
cacagagtaagacataattgatgatgatgaggaggatttgatggatgacttggtggcagattttagtagagagtatccaacattggactcagaacaggctacaccagtggaagtgtaggagttttataagtttcttcacgtgttagaggaaaaagtgcattatggcaccactatgaccgtgttgcaggtggttacacgtcttatggcgatgaagacaaagtataacttctcaaataattgctacaacgatataatcaatctgattaatgatctcatcccatcgaaccataagatgtcaaaaaacttataccagtctaaaaagattgtgtccggtcttggcatcaagtataagaagac

SEQ ID NO: 49655 - DNA, 531 bp, Zea Mays
atagtagtctgcctctgacgtgttctgccttcgatgtgttctgccaacggctgttctgcctccacccgaggcccccacgagtcgtatacggatccctcatcgctcctgtgccgcgcaaaaagcttatcttggtgtcgcgccaaagcaggagaagtcggactaagcaattggatatccacaaaaacgcttataagacacgttccaactctttcaataggcggtatggtactaatcaaacaaacccataacagtgctagcgatttgtgaggcccagcggttcgtgtggcccagcgacgagtgcggcccaacgtccctcgcacaacgatttgtttacctcatgcagcccagcttcgctatgcgaacgacgcacgacacctgtcatcctcttcggcaacctccgcctccgcgacgacgctgcacgcacgagctccactcctgtgacctcctcccccacgacctcaaccagctctgccactttcgcacgttccctgtgtacgccctcactaatcgcccatggccgaaacccctcgc

SEQ ID NO: 49656 - DNA, 519 bp, Zea Mays
attgcttcagtaaatatgtctagactcaggcacaatgatgtttactgtgcgagcttcagactcttcatgtgtgtcacgctgttgctgtgcttggcagttcccttctggctactgattgtgaggcaaggttggtgccatagctggtggtggtagaggagcccatgcagcttgagagtgacttgccgaagcaactgatgttgtgtgctactggttgcccacatactcgggaatgtatggagaataacacgaagtagtgtgcaggacctgcttcggttgattctgccgtgctttgactttagctatttatttttgcttctggatcatgacttggcacgcccttcttgtatgtcccttgtcttccccacagaataaacagaacaaccttcttggttcgaaactgaaccttcctccgaagcatcttcctcctctgcctcttggagctggtggcctataagaactttgttgcgtccctaaagactgggagctttgctgatggccttgagcgtggtttcccctatc

SEQ ID NO: 49657 - DNA, 823 bp, Zea Mays
aaagaaacgaaactatttgccctacccttagggcagtctagacccatctctgaaaacttaacaaaagaaataacagcggcacctcagtttttcttgaatacaatgtctgaaaggctattcaaatttccactatcagataacttatgtgcagcacttttcagtgttcttagtggaaccagtgcacaacaggttattgtacatttgtactaactttatgtcatattgcttttatcttcttttttctgtttcaccagtatcaaccgcatatgtgatctgctgttttctctctataggttccccaggaaaattctgagcctgatccatcaagggatagaaattgcaatattttaagcttgccacccttttcccttcctcagattttgatatgcatctttagatttatgcattcttgtaaagattcctcagcacgcacaagaatcttaaatcttcttcttggtttgctggattcaaactcttcaaacatcgaggcattaatggtacttgctattttattgggtctatacttgttacttattgtgtgttctgtgttgatgctggaatttttatcaggagcacagttggaactcttggcttgaaacatccacaaaacttgaggtattcaaggactacaaatcagtttctaaaggcgaccctgacgatgtgaaggcagatgaaataagtcttgttaggaacttgtattctttggtcctttcatactacctgcgctttgttagaggtggctggcatcaacttgatgatactgctaattattttctcttaaaaactgaccaggttggatgctgtttcatccgttatttttttt

SEQ ID NO: 49658 - DNA, 398 bp, Zea Mays
caatagaggccagacgtggtatctcaacactaaagaattcttggcttgactcgatggttatacgtttaggattagccggaggacgatccacggacttcattttttggggtagaacacccttcgtaaatgaaaaagaacatcaggtaagaatactatagcatacataataattgaataaatataacattatgaaactgttgtggtatgtatagtgtgtatattgtgcataacaacagatgtagacaacataaatgagaagaaggaatgcataacaacagatatgtgaaaaaacacatttaaataaaacagtacataatgtgcataaacaaattatgcaatataattcataaaattatatgtagtataactctcagaaacaacaataataacacagtaaa

SEQ ID NO: 49659 - DNA, 906 bp, Zea Mays
ctcagtcacctccatgggagtcgggcaatcctgaccaacttcttgacatcgaagactgccttccaaagtcgacgatgcgtgagacactgctcgggatacctctaatcccacgtctagaatttcagagcaaacatccatcatatcgccaacagccggctccgacagcatatcttcaggaatgacatcctcaagggcctgatcaaaatctgctatggacaactcttgaagactgacaagagcaaatagagccaaagaaggaatatcactatcccccttactacctctgtaacatcggctattcttacgaattagcggaacttcttcttcctcttcttcgtcctcatcaaaaatacgaacaatagccagtgcacggtcacacccattggggtcaggttctggatggccacacccattgggatcagcttctacacggtgggtcaacttctggacggcacacccattggggtcagcttctgcacggtcacactcattggggtcaacttctggaaggtcacacggattgggatccacttcaacaaggtcacactcattggggtcagcttcaacatgtacacccccattgggatcaaccttagtaaggacctctatcggtacttcttcacaaatagaagcagaagggccagcatcctggtccaagcatgatagtcgccgaagctgcctcttcttcttctcctcctcagtaggcgcagttggacggctagcttggcgaggatgtttcgggcgagtaccctcaggcttttgggtgtccactattttgttaacctcttgtccaaccataacagccatcggttcagcatgggccgagtcaaaagattctccagccaacatattgagtacaacatctatttctgcatcatctggacttgccgacatcgaaaagtgaac

SEQ ID NO: 49660 - DNA, 887 bp, Zea Mays
cattatttttctttactctctgagtaagagagaaagaatcgactacctcctgcaaggcgaccatcacctcatcgttagatcgagctaacaaagacaaagcttgtgccatttttgaatttttcatattagctttaatattaaactttttgcataaagcctggagaatcgcacgtggtacctcagtaaaagaatctgaaatagccgagatcccatccaaggcaactgcatcagactggcaagagaaaatgtccttcggagccaacaccacctgacgcgctggatgtttaccaccaggagaaacatgcagggagccaacaaaaggtacacctgcacccgcgtcgacaaaaggaacaacactagagggccccaattcctggtatgattagaaaagcatgactcctgtgctttgacacatgctggaacagacaaaagatcagaggaatcatttctttttgtatgaggaagagaagtaaaaatatcaacggttggcatatctaaagtagtaaaagaaataccagttgctgccttaggagaggtcactttatttagtaactcagagggagcgacaccccctgtcgtcaattgttcatggcacccaacaatgccaggaaatcgatggagaaaagcatctggtccatgctgctgaatttcttgtggcagacataaatttaatggacttgtgctaccaggacagcccacactagcagaaacaatccccaagttagacactgaaatggtcccagaaccttgaagtaaaaggtctggttttactgatgctgtgcaagacaaagcaactggatctgtattggagtaaacccctagggtattttgtccttcttgtgcagtgaccaaatgaggtaaaactgcatcccccaagactatagaag

SEQ ID NO: 49661 - DNA, 357 bp, Zea Mays
aagcctgttaccacactaccatcacatagaagtagaacagtagaacattcgtaagccatgttgctccaggaattaaaatcaatggggcactggtagcgcattttgcaaaactctggggtatcaggcaaaaaacagtcaagtactctcaagtcattgaaaacactgaaatgttcggctagtcctaaaacaagcccctagaatatccctaacaacaatgcacgtacagaagcagagcagaaggtaacagccgcatgcgcacagaacaaacaaaatacgacgccgccgtgactgcactttgcagaactagtcgacaaaattgtgctgttagcctagaaacgtggctaagcgtactgaaac

SEQ ID NO: 49662 - DNA, 290 bp, Zea Mays
cctagcccagatgggtgatccaaggtgacacaagtcttttatcctggtttgagctagagaaggctctacttccaacagagggggatgagacttatatttcatgcacctaagtgcttgtagtagagagcacaagctagtcgggagagggaaggatcccatgtccctggggttgattgaggctagtgccactatcgctgcggaggtgagaaccacgaagtgttcacccgcctgcctacctaaagtcgtgtgcacctctatttataggctcaagatgagccttcaggtgtgct

SEQ ID NO: 49663 - DNA, 440 bp, Zea Mays
tgccgagtgtcagtggagtggcaggtgctctatctgcagccaagatcacaaggatgtggtgtgtaggatgaatcccaatgggaagctcagatgggagctagtgacttcttcctcttctcagggcactgtcaacatgatgtctagcgctgagcagcaatattcagtaccaccccctccgcagcagttttatgtgcctgggactcctcagttcgtgcctatgcagggttttcctcagtatttggctgtgcctactcctgcaccgactactcctataccacctcagtttggagctccgcgtctgcctcatccgacgactcagtggggttcttctgttaacttcactccgggagcttcctcttctgcgggtatttctggagcttatgtgctaccctctgcggatggcagagagcagggagacgtggtgataggtacgatctcag

SEQ ID NO: 49664 - DNA, 739 bp, Zea Mays
cgaagcggtatgatgtgatatgagctgttggatccgagatcgagcgcccagattagatctagctttttaatgaatcgttatgcgctgaggatcgtcgattacgccttctacggtcaggattttatgagacgaaagggtacgccaaatcagatcgtggccacccaaatctaatctgacgcttaatatttagttcgtcaagatctaatcctagccgttcactgcgacccgacggtgcacgcaccatcccctaactcccgctcgcaggcgatgccggcgtgccaccccacggcggaggccatggccggggtattaaatccagcgagctacgggcctaatcctcgaatcaaagggggtttctacgcgaaggacgacgaaataaactactaggatgcggaactcaccgaagaaactgactcacttgggctgtccacggcgcacgacaaatttgcggtggcggtgacgaactggaggcacctgtatcgcactcccttctagattccaccgcgaatgcaatacgggtgattgggcggaccccctcaactacgctccgagtcttcgccggcgatgttcacacactgcggctgccccctttccttcgtaacgatccgcgcggacgtcacagaggtgccgaggcaatttacgaggtgtagggaaactaacaagaggaggcgaggagagaagccgcgacgatccgacctatatgagcgcgaggtcatgcgctacgtggagcagcggagct

SEQ ID NO: 49665 - DNA, 1602 bp, Zea Mays
gatgatgtcggcaggttttccttaagataagctaaattggttcactatttgctaggagataagccggaaggctatgatcatcgtgtcgtagggagtgtcccacagtcgtgtatataaggcataggggggacatcatcattttcatctcattagcacttctccattcgggaaacaccacttgtaaacacgccacgcatataaagccaccccacaaagtagggaattacgcctctcaaagcggcctggacctgtagaaaatcgcttctctctctgtctctctctcgtgctctcggcatgaaccatcgagctacgatcaacaacaccgtcttacccaaaagcaccacaagggtatcctcgagtgtgcggtcagacactagacaccgacacacattgcgtggtatccgaagcgttagtgagcgtaacgtcccgaaggagggtacttaggatttcaagctcagacttagcctgatctgagagacgggagacggaggccataggtagagggtgggagaggaccccacaaatattttggttcacatttttagtatgcgacatgagggcatggaattttgtggtaaggtcgtcatccgagcaccagacatcgtgctagaatgaggtattttttccatcgtggatgacataagtggcaataacatggtagagggggagcaaggagcgcaatgaggtccaatgagcgcctgggagatcacttgagaggctggccaaacaggcgcgacggcggacccagtcaccccaccccaagaggaacatgacgaagtgtggaggcggtggatgagtttaaagtggaggcaggtgttgaaccactcgtgatctcggacgcctaggccaccagcatttttgctctcaagcaccatgtcccaagggacaaggcatcgcgacccacatgcaacatccttgcccgactagaggaaattgcggcgacgttgatccagtttcttgatggccccttttgggagctagacgactctcatgatgtagtttaggtgactgtcaatggcaataccaagcgtcccatggggttcaggagagacgactgccaccccgcgagatatttatcaattttagctatggtgggggagaaaaggtgcaggcagagcatggtgggggagagggggaggtcaaggtatgtttgagggaagccttccaaccgaaagccgatagaggaagtgatttgctggatgtggtcagagctcaagtgcatggggacggctacgctcttgctgaagttgatttttagctgcgtcagggggctgaataggtcgagagttgtttttaagtgagaggcatccttggggtggcctttgaggaggatgagggtgtcgtcagcgtattgcaggaccgtgcaaggttcaccggcggtgagcgggcgcttgatgttaggctcccatttcatgatcgcctatagcacatcagtgacaaggatgaaaaggtagggggacagagggtccccttggcgcaaccctcgtttacaggagaaccatgggcctagggccgcattcacaaggatagaggtttttgaggaggcgagaatttttttccacccacatcatccaatgatcgctgaagccgcgggcagcaagg

SEQ ID NO: 49666 - DNA, 585 bp, Zea Mays
cagggaccaccaagatgtacctagacctcaaaaccagatactggtggagaggaatgaaaaaggagataactcagtatgtggcccagtgtgatacttgctagcaaactaaggcagagcatcagaagcctgcaggtctactgcaacccctcccagtgcccaaatggaagtgggaagaaatatgcatggatttcgtaatcggactgcctcggacccaaaaagggaatgattctatctaggttataattgactgtctcaccaaggtagcccacttcttccagtaaaaactaccttcggaggagccacccttgaccggatatatcttaaagaaatagtcagactccatggtattccatggaagatagtgttagaaaggggaacgtagttcacctcaaaattctggatgagtcttcaacaagctttgggcaccaagctagacttcagcaccgcctatcacccccagtcagatggtcagacaaaaagagtcaacaaagtcctcgaggttttattgagatgttgacctttgacaagagttgggagttcagcttgatgtatgcagagttttcttataacaacagctaccaggct

SEQ ID NO: 49667 - DNA, 647 bp, Zea Mays
ttttgtggttccaggtaccgtccctgtcggtgacacataactgacccatcgattttttttggacagattgactgatggattgacggctcatcgtaggagcccacttgcccaccgatcgcttcattttcacggtaataataaaatttcccgtcacgtcgtcggcaagcaatccgtggttgctggatggcggtatcaccatcaacaaatggcacgttgatcgttcggagcataggtgctgtttggtttacgtgctgttgttcgtgaacggtaatggtattctttatgcgcacgactaatgtgtaagtagattgttgagcatcatttgtgacactggagtatggtcggatggttcgtccttagccgcggacggtccgcgattaaatataaagtggaacgaccgattgcgatcacaaacaatcgaactgcaatattctgttatttaccttttgccctaggagtagacactaacatacatttctccctctaatgtccacctctcttcggctctatgtcggatagagacgtcttgggtggtctgccgatcacaaaacaaaccttgggatctcttctccctgacggggtctatccaagcagcgagatccagatatgttggcgaacgccgccgcccctgtgcacgcgcaccgtac

SEQ ID NO: 49668 - DNA, 866 bp, Zea Mays
tgagatcaaaatagattgttgagcttttagagacatgagagaaccaaggacaacaacataatccattgaaccaaatggatacactgcttagagatagaatcgataaaacagcgtcatgatcctcggagaaggggtatgagaatgaccagaaatgagagatttaggcaagatcaacattcgatacttgagaacgggtcatagcagataaccagataacgaggcagaatcattaagcgatccagagattcggatgataaagcaaatatgattcacaagaaaaaggattatcagctccaggagaaaggagaggtaggcaaacaggatcagctaggatgatcgacagaaatgctatgaagttttaggggccaggatttatggaaagaaacatggccttgatagggtttgcggaactagacacaaacgatgtttttttgacataaccacgtgcttaaggaagtttcggtttggctagttgttaagctatggaggtctacaagttgtgtaggtgcaacttcagggtaaaacacataagggttagaaaacaccaacacaagaatgaatttgtttttttttaagattttacttgctaactacaaggttgtttggagggggtcttctcatgagcaggacatacaagaaattttgttggttagaggcaaaatggactgaacaactatcgtaccttctagaaagcatgtcaaaagaaacacataacacaacctagcaagacttactaattaggcaagagataaggcatttcttgtagttcataacatagcaatacatcacattattcaaaatttcttattattggaataaaggtgagagaagcatgttgatgcacaagagacaatgatgcgacaatc

SEQ ID NO: 49669 - DNA, 506 bp, Zea Mays
gtcgaggtgaggcagacgcggagctccaaactgagacggtacaggaatagtcggtgcaggagtaggcacggccagatactgaggaaaaccctgcatcggcatgaactgagaagtcccaggcacatagaactgctgcggaggaagtggaactgaaaattgctgctcagtgcttgacatcatgttgacagtgccctgagaagaggaggaagtcgctggctcccatctgagcttcccattgggattcctcctacacaccacatccttgtgatcttggctgcagatagagcacctgccactccactgacactcggcacagcgatgcgcatcaccacaacggaaacacaccagccccagaccgggcttaggaacaacccgatacctctgagtacttcctcccgaagtaccagattcagaggatttgccacggtaggggtgatggcgctggtgctgagacttgcccctcttgtgggctggtccctcagtgttgcccctccttgcgtcatggc

SEQ ID NO: 49670 - DNA, 300 bp, Zea Mays
atatattgtgagaaatctttgttttgtagaatacttgttggtggttctaccctgcggaatagctgctgcatataaatacaccggattactcaataaacaacaaccaattttatgaaaaggcaacaaatgcttagcatggagtgcatccattttactttttgtcgtcctgacaaagcaaagcatgcactagcactggtctgccatcattcaagcatgtatcatagtttaaatatttgatttatggttcagttgtaggtgaaaagtgtgttccttaccctaatcattaatagtaactcaaca

SEQ ID NO: 49671 - DNA, 273 bp, Zea Mays
gtccctgcagaggaacggggatggagaatgcttctccgtccctgtttatccgttaaaggaagaattttccccgtttacatccccatcccctaatggaggaattcctcgtggggaattaaagattagagccccatgctacgtggtgacgtctagccaagcgaaggtttgttgactgcggaaataagctctaggacaatatcctttgaggaggacccagggttgactatggcaagtgtttggaagcggagaatgaaagttgttggcttgtggaag

SEQ ID NO: 49672 - DNA, 734 bp, Zea Mays
ggttctataaaaacagaggggccaaagtgcaaatccgcgcccgcgaaggggtacaggaggatctctaccgttggattagatacgagtgcgccagattaggttgtcgcaccatataatggttaacctgccccaatcgtccgatctggagtatacgacacggattgaccagacttcgtcgccaccggaatgagaggggaccgctggatccaaaagctacggtccagactttataacttgaagccaaacctatgtcgtccgattacgcacgaaaggcccagattcattcttgcttccacgatgcacacacctgtttacagccctcgatcacaggatcaacggccaagcacttatcttcctcggcgagacacccaggcgtagttgtggtgcgcccaacggcggacacgccatggccctgcccatggcttctcccccgcccctcgccaaggcgattaactggttgctacggactctaacccgcgcccaatctttaccccgcaactcaacaaagtccgttcgactcctatgatgctatgggttagcgcccggaagaagcagcacaacagtgcggacacctgtgcctcgccaaagccagcattgagtcctactcgaatatgaaatgacaacgagcgagaattgatgtttaccggatgctggacgagttggcgatgcccgcgacccgacactggatttctcctacgcacagcagggatttcggcaccgcacgtgctccccct

SEQ ID NO: 49673 - DNA, 414 bp, Zea Mays
caggtggttaagcactagccatttattcaattaaagatggcatatggttaatttgttgcatatcagtttcactaaagtagatggctacaaaattctcaatgcatgccacttatcatcaccttttaattttcttatcgcactactgttactttttccttacgtgcttgatctgcaaggctaactagtaatgtgcaaaactagctttcttattgacttcgagtgtgaattctttttttaataaaggaacaagaaaagaatgaaaggcagcccactcacccttttctcttaagtcttaacttttctccatgcaaattatagaccctgataaattgataattgtttcatagtacttcaatataaaaacacttctctgggtagctattgaacactttgatgggcagtttataggtttgg

SEQ ID NO: 49674 - DNA, 462 bp, Zea Mays
gcttcaccaaggcattcataacgtttaaaaaatagcaaaaggagttcatgtcctcgtaaggcgaggggccaaatttcgacagaccattcacgcacacgttatgtgcatgcgcccttcgccttggcccgtgctcgagcccaagccatgtccggccaggcgagcgagcatgtgtggactctcgacttcccttctcacctccatgacttggtggtataggaaagcctccacttatagattggagtacaaccacttgcactagcaatgtgggactaatagttccaccattcccttgccatgcatgggcactttgagatttatttagaattgattgaatttctatatggaccaagcccaaatattccaacgaacccccaccagatagcaaatgcccatttagagattggcaatacatgacaatatttgatatactagtgtttcaacaaagactgttaagttgaactt

SEQ ID NO: 49675 - DNA, 949 bp, Zea Mays
cacccgtatatcgttgccgagacgttactagtgcttctattgtgccatttctgggcagcttcacataggccgctgaaaatgagatggcaccaatcaatgtgagggaaccgctccaattctttcgtcagtagaaccttgttgtaagatatcgatcagctagccgttgggaaaatcagccggttgaatagtattaaaaaacatcggattgacagctcatcatcgttgtctagcctcagtctgtcctgtagctttgaaatcacaaactcatccttgctaatacttagggaggaccgaaggtttgctgcggcattcacttcgtcaatatttagtggcttcccaccacccgaatttggaagacccaatatcagatggacagtctacttggtgatttttagttctttgtctggaccaatacgaagagtcatgtctctggggtctagcttctgcatgagccaacaaagaagtgtccgacatccaattgcatcaatcgtcatgtcaagaatgctggataaaccttttctgactatagcttgacgttgcctttcattcattatctgaatggacgcaagaacatctcctgggttgcatctgatgttgagtctctgtaaaaaaatgtggatagattgataaatatgttaataattaaatatcatagtatctgcattcttatttttacatagttccatggtctattactgttttggattgatatgctaaggtaatatagtaagttgtatgttgcagcacaggaagtatgcattgtgattgtatgcatgattaaaatattggaaaagataagtttctgcaatgttgtaaactcacctgcgtcttgtttggggcatccattttgatattacacttctttttttggggctcaaagtcatcatcatcatccatactgcacatggggagctttttagcatcggcaacaacacctctctttctatgt

SEQ ID NO: 49676 - DNA, 760 bp, Zea Mays
ggggatgcagagaggttggtttattttacttctcttgcacatacctttctacttgatctttcaagctttgagctcctcaaaatttatcaacaggatacgaagcgttgctaggatgcctctgtgctggggtgataattggggccatagctgttttctgcagtgttaggagaagaagagccagcaagtcccaaccatcaagaaacgatattggtaatttcactaattaattgcacatccatatgcatatagaagttactgagatagatgtttttttacccactaatagcaatacgaagttgcacatgtttttttttcttgcagaggtcgcgttggcatcccttgagtatgaggagactacctgcaagccgatgtcgatcaaagaaatatacacagcaactgaaaacttgagtccatcaaacgtcattggacagggtattgcaggtacgtgttcacaatacctgattcacagttatggtatctataccataaatcaagagaaagtatatttttcatccaagaacacgagacttagaaacctaactgttcaagtatatgttgtcctttatggtgtgcaactggttcatcttgtggttccaggcaaggtatacagaggagtgctgacaaatggctggcctgttgcagtgaagcacattgttaagaatgagcatgcagaaacattcctaagggaagttaaaagcctgtcacatgtcaggcacccgaaccttgtgtcattaagaggttactgtgacgggcaggagga

SEQ ID NO: 49677 - DNA, 511 bp, Zea Mays
cttgctatctaggtggtattgtaattgttcaaccctttttgccaataaaaaaatgtgttgtttgtttcgctcatgaaaagaccccccgtccaaacaaccttgagtttagcgagtgaaacctcttaaaaaatcatgcttgagttggtattttctaacccttgtgtgttttacccataaagttacacctgcacagcttagagacccccacagcttgaccgctagaccgacccaagtctccttgtgcacttgttgtgtcaaaaaaatgtcgtttggtgtctagttgcgcaaaccctatcaagaccatgtttctttccatagatccttgctcctaaaacttcatagcatttctgttaatcatcctagctgatcctatttgcctttctctccttttgcctagatctggtaatcctttttctcatgaatcatgttggctttatcatccgaatcttgggatcccctattgattctgcctcgttatctggttatctccaataacccattcacaagcatc

SEQ ID NO: 49678 - DNA, 543 bp, Zea Mays
aagaaagtgaatttgtggcactcgactcggaatcgattgctagaaatgggaatttgtggaaaactggtgtctgggatatcggattggcgtgaaattggcaaatatgttacttgaggtgtcatgaaggtgcctaaaaaatttgggatcgatttgagcaaatttgagtggtttgggcatttcaccgagcaagtggcgtgcggggttttgacatatgggtgaaatagctatttgggggtttaaatcctccaaaaaggagatggatacctacagggggatacaaggaggcactatggcacacattcatgcacttggattcacaaatatttgcacagatttggtttattgaatcaaagggtggagtttgggaccttcactggtggagagagctatagacagagagagaagagaggaggaccaggactgctcactaggggagaagtggcgcacctcggcgaagcaaagttgccggtgatcaccgccggcaagcaggagaggtggagatcgccagagactcaccagagaacagacagaccgagagaagaa

SEQ ID NO: 49679 - DNA, 2039 bp, Zea Mays
gcgggagttcctggagcgcggcgagtcgctccggcggcagctgcagatcctcctcgagctcaaggctgccgtcacccagcagcagcaggcacggcgcggggggagcgctgccgacacggatgacccctccgtttcttggtccattcagctcggtgagaccaatactcctgtagacttgttggattgacttaattgtataaactgatcctgacatagcgtctcaaaagttacaggaggccaatctctcagggtaattgcagagaaagaagaagagtgtgaagaaaagctcaacggcggcgatgctaccgccaagataagcagtggtgaaggacccgtgtctcaaggtctcagtgaatctgggagactttgcaagccgaatgaagaaatgacgaggacactctccggccagggcaggagtgtgaggatcaacatcccggtcaccacgccttccaggactgtcaccgccatacgcgaactgctgttcggggacatgccgagccagtccaagaagactggcgcgcatggtaccgacggcagtgagaagctgagcatcaacaagaggaaggtgcaccaggcggagaagatgatcagaggtgctctggttgagctgtacaaaggactgggctacctcaagacgtaccggtatgcgtagttggttctgcctgcgacatggcttcttgtacttgaacgtacgtggatgcattactgacaaggagggcacgctcgttgcaggagcttgaacatgatggcctttgtgaagatcctcaagaaatttgacaaggtttctgctcctatctcttgctctcctttgatggtgccctatctcataagagcaacaatcctgatgacagaagctatatatttttccgtgtttcaggttacaggaaaggaagtgcagcaaatttacctcaaagcagtggagagctcctactacaacagctctgacaaggtattttgaaacaatattggagcaattctgatttcattcaacctcagctccaaaactcctgactgcgcgcggttttcatcttaacaggcagtcaggctaatggacgatgtggaggagctgttcttgagacatttcacagaaggtgacagacggaaagcaatggtgtatctgaagccaaatcagcgggaagagtcacactgtactacgtttttcattggtaataacttttgacaaggtttccattccttcatcaccataggtttttccgatctttaaacaggcatgtaaattttccaggagtatccactggcggcttcatagcattgttcataggttactgtatcatggcacgcgttgctggaatgtacactcagcagtcaaacaaggtgtacatgtcaacttcttatcctgttcttaggtgagctctcaaaatgccaaatcagttaccgctgtgcagttcctgaaaaaagaaaaaccgttatgccattgctgacaatacatgatcccaaactgcagcatgttcagcctcttcttcctgcatctcttcatctatgggtgtaacatcttcatgtggagaaagacacgcataaaccacacattcatatttgaattcacgcctactaaagagctcaagtaccgagacgtgttcttgatatgcactgcttccatgacaattgttgttggtgcaatgtttgcgcacctggcaataattgttaaaggaaattcatcaggcgttgtccaagcgataccagggtccttacttctggtatgcactattgaacttaactgatgtgttcataattacatctgaaatttatgagcttataaggtgctccctctatccaggtgttcttgttcatattagtctgccctttcaacatcgtctaccaatcaagccgttaccaattccttagagttatcagaaacatcattctgacacccttttataaggcaagtttcttaagcacaattacttaagatatgttcagaacttccaattaaattttaaagggaacaagctggtaacttttttgtatatgtgcaggttgtcatggttgatttctttatggctgatcagctctgcagccag

SEQ ID NO: 49680 - DNA, 422 bp, Zea Mays
tctagacgtacgggtaggattagatcctgataccgattcagccgaagcaaacagtgaccgttgatgcgatatccggtggtggagatccgatcttgaactcattaagcgcggaccgtcggatttagatccgagggctacaattgcttaccggttcagataagattcaatctaatctgggccgtccgtagcagatcgagtggatgagagttaaccgtaacccttcggcctcgtgcgttttgtaaaagagaccttgtattatccctgaatcaacccgccatccatgcgatagtggcctgagtcttgggaaaatgttggtttaaccccctgcacttctctatatttgacgcccagtccagagctcatgaaaatcaaataaataaattcagaaatggatttttaatataaaaacaattcccagaact

SEQ ID NO: 49681 - DNA, 636 bp, Zea Mays
ctagggaaggcaatgttagcgaggactcctccttggggttagtctggcatccttggcttttgaaacgcttccaaatcttcttgactagggcgaacctcttcagtttcctagcatagtccacctttagggtcctgtatgcctcacgagtgttgacttcctcgccttctgccatctcgagactgttttggcgggctgcattctcttccttcagttccttgatctgttgctctaggttctctacccgggagtttaggtgggtgcaatgggagaaaaggtaatcagagtgggtatcaagggtgtggagatatccgaccatgtagattacggtggggtcatcctcattatgctctcttcctgacaaagcttggagtcttctcctccaagcagggttatttttgttgttgggtgggaagtagcgaaggggtgtctcagcgaattctttgttgtagttttaacataactggcgaagggcttttaggacaacattttggcatgagtctgggaagcagtggccagtagtggtgatgtagaaaggtgggtggtttgtctagcttcgacttccccccaggtagactaccatggatcacttctcaactccattttcacgttattccttttagacatactctggcttct

SEQ ID NO: 49682 - DNA, 1474 bp, Zea Mays
ctttatctaacataaatcaacaaatgatgtattggttagaaggtggtagtttgttctttgtgacctgggttcaatccctagtcacttgtattttttagatttttgtaggcatgtgggaagaaattatttttgtcaggtgggagacgacatgaagggagaaattcccacatatagaagtagagatagatattaaatttgacagttgcagacaatgtaaattgcatcggtgacatcgccatcgagtccttttgcggacaaaataagtttctagcttagtatattcgattttgatatctcacaaaagtaaactcaactcgggatccagaacgtcttcccctttccctcggctgttcaaccacgcatcggtggcggtgacgcctcgtcttccacactctcatttattcctgtctcactttctccaaaggcatatggcggcgaaaagtcacaacagtggttcgaggggcttgtcaatgggggaaggtgaaggtggcggcgtaggtgacagtggggtaccacggtagcggatgacaagtaagaggcgatggcctgctcgatgtcctctatggccacttgctcgacaagatatcctctattgccacgcgaaagaatacaaggtaaagaacacagagacaggaatagagatggaaagttaggggttaatatacgacgacaacgagaagttggaagcgctcgtgatgattgtatggttgtttacgcacacaaggaagcaatagataaaggcttaatgtatctttgttagacgaggaacaataaggaagaagcgctcatggtggttgcatggttggttacacatactcgtgttttataagaatctaggtgagggagatggtgacggaaaaagagatggaaagttgggggttaatatacgatgacaacaacgaggtcatggtggttgcatggttggttactcagactgtcgcgttataagaatctaggtgagggagactaaaaaaagatgtaaagtttggagttaatatattacgacagtagcgaggaggatatcagtacagtgacgacagttgcactcgagcattgtactcaccaaacatgtctagtgtgagcttcggatatcaatacagtgacgactagttttctgaaactagttattggaaagacattagatgtgtctagtacaaagagtgggtgcgcatcgaacatgtctagtgcacctcgactatgttgagtggaggggtaactaatagttcgtttgttttgggcaccgacactgtaggagagggtttgtttagaagcacgctgtttttttaaaccttttctatatctagtttctaaaaactggtttataaaaaacaaagttagatgtagtgtttgggtctcagttttctagttttttatacataattactagcttgtcattgctctattttaaggagtgacaatagatatataaataaattgccgggccgggttcgtttggcccatcgtgccaccaacc

SEQ ID NO: 49683 - DNA, 805 bp, Zea Mays
gcgtgcacaaataccaggaagttcagggactaactcataaaattcccaagacttagatttaaactctttactatgctcaatgctatgcgggttagttcctatttttctcggggttcttttgcaaaacgtatgactgaaagggtatcggctgatactatccatctgatctcccctgaacggcccagattagatttattaaccagcgaaccggtacgcgatgccgaccccaggatctaaaatctacggcacggatcttacttgccccggagtcgccccgatccgccctatcggatcttaatggttctgatccccttgccccaatcgttacgccaggatccaatcttagccgtcgctacggaatccaacggtgccagcaatcccatggtcgcccccgacgcccctgttgaccgaaccagggcgacgccgtcggcattccgcggtagtgatgattccggtgacaccgcgatcatcccctggcgcgcccccggtaccccgacacgaattatcatgttgatccgccatcagcccatctgtcgaacgccagaagaccactaattggtcagttggtcacccggtatacctgcccccgagagacacggatcactggccaccaccaaacgccgatgagcaattcaaggctatcccgcgagttatacctagcctagggctacgcgacatgaagtccattaccaggatgagggctcgggtaggtacataccaaagggaaagcgtagcaggtggttgtccacgatacaaggcggacgcgcggtgattcttgtcaccgacgagctcccccctggtgccc

SEQ ID NO: 49684 - DNA, 384 bp, Zea Mays
aaagaaggccttgtgtagaaggtccaaaaataccttctcttagcaagttattgaaaacaaatattcttaaatacgcctttcagcattggtgactatgatcggcatcggtgctccactagctaacaagtgagtactagtgaccgctcgacttctgtgctttttacctatatatcagtgttgactcatgtgattcagacatcacatttactgatgttgacaacctgctaccaccagtttctttgccttcaaagctccttcattctattactttttcatgggtttcaaaagtttcatgttcgtactctaccaatggcggaacctgaagtgaccgctgaactagccaccttgagatcctcgaatgctactgataagaagatggagaca

SEQ ID NO: 49685 - DNA, 541 bp, Zea Mays
aaccaagaggcacttgggctggttcttcttttccctttggcccatttcattctttcccttggatggccatttcttttctttttaccgcacgtctagctccacatgaacgacatgctaacttatgcctgacatcagctacatattttatttgaaacaatggcgctcgggctctgataggacccacagttcagcttcactcagtgtccacgcatgacgccgcagatccacttgccagcttcgctcatccatcgcgcacacgagaaacgccgctgtctggtggtcccaacatgacagctacatcttcctgctcgaacggactccgctatttctgcgcagtcgtaaccaccatgcgcgagatcgatctgaccaacaacctcagctaggatcccgctacccaaatcacacccccgtggcaaaaaaaaattgatttcctcctgcgcctataaagtctggggcgctgcttctctggggcattagtaccgcgcgatgataggagggagaaccaggaaacgccagggccaccattgttgggagagaaagc

SEQ ID NO: 49686 - DNA, 577 bp, Zea Mays
gggatttcatattgggaagtcaacggtgctcacttaatcgtgagggtcttggatatgttcccaagaaaggaaataatgcttttgtaaagcaaaagacattgtttgtgaaagaatgtgacaaagtgtgtcacaagtgtcacaagaagggacatatcaagaagaattgtcctaagttcaagaatgtatcctcaacttgttttgagcattgttatgttccttctcataatgcaaaatgtgttcatgctaaatttgttggtacttcaattgttggcaacaagaagaaagctatttgggtgccaaagaccttggtcactaacatccaaggacccaagcgagtttgggtacctaaaagagattgatttccttttgtagttgaactataaggcgggagggaatcatttggtgttggatagtggatgcactcaacacatgaccggggatatgaaaatgttcacccaaatgagtgaggaagattgctcaaattatgatagtatcacatttggagataatcgcaaaggaaaggttaaaggcttgggtaaaattgctattttgaatgatcattccatatcaaatgtgc

SEQ ID NO: 49687 - DNA, 893 bp, Zea Mays
gcggcatggcgggtctaaggacagatgctacaactatggcgattccgaccacttcgttgctagcttccctaaggaaggcaaggcggagtctagctcgcgcgggcatcactctggtcgacgcaagggcaagtactcctccaacaagtaaaagtccaagggaggattcgacaaggaggcgctcaagaagaagtaccttcaaaagcaaatatcaaggagcgtgcctttcttgcctccctcagtgacctcaaccacgactccgacaatgacgtatcttcctcaaacgacgaggagcttgagaggcgggtcaaggacaagctgaacaggctgtgcttcatcgccgacgccacgggagcctctacaccatggcaattggtgaggatgtggtcgacaccaaagatgacaaagacgtcatcgacaacactacttccgaggtactaccttccaccaatgatctcgccgttgagatagaagagctgaacgctgctttggctagtcaggaaaagttgcttaagtaggctgctcgtgagaggagagaatttatatccaagtacgatagcacgcttagggaacttgagtctgctagagcatcagttgtggtgttcgatgagaataaatgtgattattgcgctctacacatgtcgaacatcactgatagagctggagtgcccgatcttttggtgaggtggataatttcgattggtggagggcgtgactctcacgatccgactacaaacgaataggttgtggcgccttagcaatcacagaaccaactccaattggttattgaccttgctggtgacaagatcaacctgaacacgaagttctattcctgcaagcaatcaaagaaacaagcaagaacaagatgtaggtaaaactgaatatcaatcactcat

SEQ ID NO: 49688 - DNA, 907 bp, Zea Mays
gaaattgggagataatcttgcttgaagttggactgtcaggctatttaagtctgaaaattcagactgacagtggactgatagcaacttcaagaccaagttcatgcatgatctgctgcctttttgtgacaataccatatagcaaagatgtagctggtttatagcactacaatattgctgcagagatttggacctgttgccatgaagatttgagagaaaggttgctctaaagttgctctgtcaggaggtttttgggtgggattcagaatgaacagtaacctgcataagatcccggttcagggaaccttgacgtcggtgatctctacgccggtgatctcctcaccgtgattcacgccggtgttaagatatgcgcctggataagagtggatagctgtccacggtgaaaatatcggggagggggatggatgtggtctctggcgcgagcttatccgcttcagccagttgctcccgtggtcggccgggacgccatcaccggagtttgatgttccttgcggccacgccacgtaactgagggtgttaccacgtagctgggagtcgtggcgtgaagccagttactaccttaagccattgctccactacgtgccacggtgaacacgctccagcgaagatcttttctgtcaccaccgtgtgcacttccgtcccaaattggcgaagcaagaaatccatccctttaaattgaggacactccctgcttcgcctctctgttacgcacacagcccacccctcactgccccagttcattcaccacagcccccagtcaccggtttttcccgagaaaggtcggtagcgccgccgtgagaagttccaccgtggtcagtcctggctgaggtaatcccagcccaactgctatctgttctagtttcctttaggtgtcgtggtgctcactggc

SEQ ID NO: 49689 - DNA, 480 bp, Zea Mays
tacgtgtccaggctaaattttaagtacgtacttttcgccaaggctttaacttatcttaatcgtgcatacaaaatataaaataaataaattccttcgaatatctttattgagagttggcttagttacgcagctaataaataaaataattgccgtctatagaaaaaaatatccatgttcagctgtggtgtaggccccgtttcccagagggtagcagggccttccaaaaattggcgcgcgagcccaccctaaagtaggggcaggacatcgctcgcacctttggcaacgtgttcagtcgggtgtcggcacggcacgtcagtctctatacgatcatcaacgggccgcctttcacccctgacagggtcaggtaagagttccgcatccctcacgcgtcgttcttatagcgcccaggcaacactcacgtcgcttcagctcgcgttgtggtactaaaaaattccaacgcgcagacgcctctccgaccga

SEQ ID NO: 49690 - DNA, 884 bp, Zea Mays
tcccctcactcaattttacgaacggctacctaatttgtgctggccacggtgacagcgaacatcacggatagtcaaccgcgttcccggtgatctaaggaatcctagctcaattgagttggtcggggagtatcaggggcacaccagatcgctaaaatgggagggcagaggatatgagtggacctgaggcacgctggccacggcgaggtcaaaccgagcggagttcttgagtgatttgggggaagtaaggaattggagctctctggtgaacgattggaggcaagacttagtggattggtgtgtgattaccctatggagctcgtagtcgctcaatttatagagccagtgagcggtggccggtgaattgaacaacgacgcgcgatggctggagaaaaaaagggcactggcgcaagcgcttagtggctttcaccgtggcggtccctccggcgatcaccggatgcgcctaacatgattaaccgcgacgtggtaaggtgcctgggcacgtggcgtagatcggcaggtagccaacgccgatgagcttatccgcaccggccgcaaggcaagggggtatggcagccagccaccggagttatccccaatcgaagatcttttacctaggagcattatatggtcaccggtgggagcgaatcataactgcggcgtggatctaggcgcatggtcgccggcggtcaggtgtgctgcaccagcgatcatgttcagggcactgtaccatcggaaacaactaacagagcgcgtgacaaaccagattcaaggcagcttctctcaaatttttatgtgacaacctcataagttatagatctataatccatgttcacttttgttatagcaacaactatcaattgagcaacagatctcgcccaaaatgg

SEQ ID NO: 49691 - DNA, 1497 bp, Zea Mays
tactgttgcttgttcaaggctggttgcttgtgctgttcacagtccagctaataccgtgctaaacaatcggaatttgaaggccaaatgaaacctcaagcccacacagttttgttaccatatgtctatgtccattgtttggttttgggtagccgctcttgcaacagcttagcatgatagtagaacaacctgcgtgacagatgggatacacattgatttggttggccttttgttcttttgcttctgtcacatgtttggattttagcaccactgtgtttcttgttcgtagccattgcctgttcttgtgaaaattgtctgttttcgtgacgggaatggagcattttcttcttggtttgcatagccttcacgccttgtgcttgtcaagtatgattgaacttgatatgaatgatttatcttgatcaattacatgtttgctatggaatattataccctcattaggaaatgcatgaaaccacactgcctcttttttgaatctttcccagatattgcatctatctgtttctgtttaggcccatccaaggccatagctgttagtgttcaatttcctcggtttgtgagccccaattttacaaccataattaattcccgttaacattttttgtattttattctgctgtttctgggatggagatatagccattttttgcatttagacatttggttgtgcagcattgtgtattgaaaagcattttttgcattatgcttttcattagcttaccatatgagctgagctgtccaactttaccatggaactcaatgacccttgtacaatataagtttgcatgtgccatttgtgtttatttgagattgtgcgaaaaggtgtggagaagtggcgcattagagctggcttggtgatgtggtgtagctagtcattaatgcactcgcaaatgagatgcactagccatcagagctctcacaaatgagatgtgctagcctttggaacacacacaagagggccacattcatggagttggatttgagctggcatggtgtctggctagctgttagagcattcacaaatgagatgctctaactgtttgagcaccacaagagagtcgcgtccattgagttggatttgagctggcaaggtggtgtcctctagctcgctgttagaacactcacaaatgaaatgctctagctgtaagagcacacgcaagagatgcgtccatggaattcactttgagctgtcactgtgtcagtgtgtgatttgtcgtgtttctgtgcgcaccactggctggatagtggcaactcctcgcgtacgttgcttgtaaattcatgcatgaatggctactggcgccttgcacgatttgcttatatgtggacacacggattttctgcgtgacttctgtgaatcggttttttatggggaagctggttaattgttgttgggaaaaaaacgttctatgaaatgttctctatggttgtgtcggagtgatttctgttgctttacttttctcatcaatatggccacaccaagtt

SEQ ID NO: 49692 - DNA, 474 bp, Zea Mays
tgtccaaagactttctaaaatgcaagatagcagaaggcacaacagttgggccacatgtaatcaaaatggttggttacagtcagaggttggagaagctaggcttcccaataggccaagagttggccattgacttcattttgacatatcttctgcccagctatggaaacttcattactaactaccatatgcatggggtatagaagggcctcaatgaattatgtggcatgttgaaaatagtagagggtgacataaagaaaagcgctagaagcagtggttgtgtgatggcaatccaaaacaaacccaactttaagaagaaggttgaatctcaagagaagaagggcaaggcaaaagatacagtatccaagccaaaccaaaagcccaacgtacgctagaccatctgcaaacactgagtgcttttattgcaaagaacttagtcacgagaagaggaattgcaagcaatacttggcctctatt

SEQ ID NO: 49693 - DNA, 1712 bp, Zea Mays
aagtacaaagtcatgactcatgaggcatcgaggatgtcacgtcggagtgaatagattgtgtccttagagtgttgatgatctcataggagacacccatctcaaggaataacattgttgtcatctatgtgatttgttgaagacaaaatggcatagacaggggggctggcaggggccttgccccccaaggtttgtacaaacatgtaagtacatactaattacttctacttttaagtagttaagtatataaaaacagtgattgattcaataaatattggttatttctttgtttgtgaacatgtagttaaatttaaactgaaatccgacactcatgtactgcatataatctattaaatattgtttatgcccctctataaaaatcctggctacgcccctatgaagacgtgccctagctagcctttcttttggaggatgtagcatggcattgtgaggcacatggttctgttgtgagatggcagagttgtggtgacgttgaggagctcatcgaggaagatgttgtcgaagtcataggttgacgacgagatggataggcaactcattgtgttgttgaagctgatgaagacacgaccaatggtaaggtagtagcatgggatgttgaagaagagaccatgctactgctatccattgtgccctacaaacacttctaggtctcatgatgtttgcttgcaaagtgtgtggtagcatcgatgttatcgtcgatgtttgaaggccaagtgcgagaaggcaaatctattcgaacatgccatcgacgaggacatattccaatggattcgatagtagcagtgataataatggaaggtagaaacgtccattggagaagatgaccccgtcttccatgggccaagctcgagcgattgtaatggtgtcggtgatgaagcgaagttcgggtgcttctaggactaggtttggttgcacgttggaggtagtcgtggtactagggatgcttaatggagtttaggaagagcagacattgttgccggaagagccaagacaatatgtggtgctatcctagtgtgaactctagtgagagccatgatgcgattgttattcctggaagattcaagcatggcaaagttccaaaaggtggggccaagggaagacaatcatggtgagccactaagaagtcatgaatctagagtgtctcgtcgtcgacgcggagtggtacattgaagcaagctccatggtagcaatacaactgccattgctgatcgagattgctgtgtcgacgtggcgttcaacatgtcttgctagactagtaaagttgacattgataatgtgtgtggcgtcagtggctctagcaaggaacatggttctccaggcatgtatgcttggctcttgatcgttggtgaggatcatcaagcttggctcaatgttctttgggctatagtcattcaccaaagcggtattgaacaaatgcttgcacttgtgcgcttgagcgaactactagtcgtagttgaagcataggcaacccaacattgttacaccatctcctctgttgtgaggtgtttgaagctacggtgcggtgatgtggttggggtttctatagtcattgttggggttgacgctgtaggcgtcgtaacaagtgtcagcttaaagcgcatgtggaggttgtggtaccattcttgttgctctagtggatgttgacttggtgaggctagcgacaacttcagtgtgtcgcttatgcatgccctagc

SEQ ID NO: 49694 - DNA, 410 bp, Zea Mays
ctcgttttatccgcccgccgctctggaatgtaatacactccgaatttgatgtgaacacaaactctgtgaattccgacatgtatttatgatccgctgtgctggggctgccttgtgcaccgaatcagtgatcgggcaacgtaatacaaagagggagcgcttgatcatctgagctggttttgtacagaatgtcaggtatagccaggtgctcgttgtcgttgcttcagttttaacgagtcggtcatgcaatgcagctaacgttctggcatcggccatgctctgttgcagagagtaatgtggatagcatccagatatctgttagtaacgatgagaagaggaatagggcagatgctaagatctcgcaggacgagccgaggcacaccatgatgcggtcactgaagaagaaagccttg

SEQ ID NO: 49695 - DNA, 843 bp, Zea Mays
cggaggcagactcggcaagccttcaacatcaccaggagccacatagaaccaaacatcccaccagttaccccacttgttcctagcgtaggggactatctccacaaccatagccgaagtcttcttagtcctcagcgtgaaggtgcacgatccaaattgggctatcttattccctatcttcctcttctgccaatgcaagcaataatttttggcgaagacctccacggacggctgcccgtcataggaagtaactgcccaggcatacttcgcaagcgccaccactgcgttaggtgtcaactggtggacttgcacctcaaaccttcgcaacacctccaccatgaatcgatgtgtcgggaggcgaagaccgacagcaaaaaacgtctcaaaaactatcaactcaccttcaggctcggggacctcctctgcacccagggcccgcccgacactgttaccaaagtaaccaaatcgttgcatctctagtacgcggcccgagaaaatcctcgaggtaccaaattccacggtgtggctgggctgcaaatcaatcaacgccaaatcactcaaggtctcctcggacgacggtgcggccgatgatgcgctcgttgcagacgaggaagaagacattgcaacataccgtcggtggcagcgcacggtctgcttgatgcgggccagatttccggtgcagagcgagcaaggagggcaagcgagcaactgtaaaaagctagggtttctgcagtgcaaatgcaaataggaaacggtctcggccgaggtcggctttttattggtgcgacacgacgcctcgggaatcccgcagtccaacagtaacacgtccatcaatggtcacatttc

SEQ ID NO: 49696 - DNA, 564 bp, Zea Mays
aagcgatggctcctctccaagatagtgagggaattgctagcatcccgatataatctatccagattaccactagaatcaagaagcgttcgcctctcctcgtacaagaaaaaaggacactgagcattgaagcaaaggggtgaaatagaagcagttaaggaaatctacctcatgagccatcttctctgagtcgagttgggcattcaatgaagagtttagggtctaagagctgtctaaaaatgcagaaacctagttcagatcagcctagccctgggcatacctctcctcagcatcagagcaccgctgagtcaaagctggtgaagcaataggaaaagaatacaagatgtgaaatgagagaaacaataaacagcaaaaggaaactgcagacccactaaccaaagtttgaggcctttagatcatctatttgcctctgaagcagtagaggattccattgcatcaaatacgaaacttgatcggggacaggggcgccacaagatttcaactaggccgaaacagagttgaggacattctgcaagcccaaaagttagcaagagaacccgtttgtca

SEQ ID NO: 49697 - DNA, 447 bp, Zea Mays
ttggaggtggtagggatatttgcatagcactatgacaccacagataattctaatgaggactgttgtcttgtaacacagatggcaccacctagggcacatgactcagaggttgatggttctagctcaacggtaccaccataaccgacaacagtcgatcttgctctgcttcaaatactcatagcactctagactaagcagtaaaggaagacaagggtccgagagcaacaaagtgagcgcatgtttgcaatgttggagcaaattcaataatgtcaggatcaattccaatagtagcatcttgacacctagcagtacttgctagcattcatggagcacatgttgcatgttataggtcacccccatttggttcctctatccagcagtttgcaccagcactgatgacaacctttgtgactccagctttatagtctagtgaactttagagtcaag

SEQ ID NO: 49698 - DNA, 315 bp, Zea Mays
gtttgttgaagcaatgagcaacaaagatgcgccgagtgccatgcatctgaaatgtcctgagatggaaccaacgcggaccatcttacaggagtgtaatgaagaaaagcagatggtcagggaaacaaatgatgagcacgacaacccagtgatgaaagaaggcacggtgcaaaacagttatgaccgtcagcttgcaagtgttctagatggcacgactccaagacaacagccagatgtattaactcatgctgctactgtccaaacctatgatggtctcttaaaagaaccagctaaagaaatggatacatgcattgtcac

SEQ ID NO: 49699 - DNA, 402 bp, Zea Mays
ctggaggcacacaccacacacatggctgatagagtcagcaaagacacagttctctcttgcttgtgctctttgcaagcaatggctagggttcatgtgctgcctgggtcacaatcagaggagcctgagtgttagtagcatatattaggtggtgatgtatgggctggaccttgaatgctattgggtcgaagcccaagttatcatttctagcaactagtcattcaattagaatgggtcgactattcgtggctacggttgatgatttgacagctaattgatttactaggcaatataatcaaatcaatgcacctattccttgtccagggaccaaattattgatttaccatggttaaacatgattaatcgagtgagctgaaaacactgacttatgcaaataaataagga

SEQ ID NO: 49700 - DNA, 392 bp, Zea Mays
tatgcccattccccagaatacttctatgtaggttctacctgctgtttctttcagttcgttctgcactcgtgtgacctagagcaaatgtgtttgagtcacatctagttgtgctccactagtccacttccatttttgatgagaattagttctgcactgcagcctaatctcaggtcctcaagccgtccaatctcctgtgttgttgacaccacttaaattgtgccatccaaatgctaagtagtaatatgattgttttcaacatcagctgtggttagttattgttcccataatttcagttagagactgatcaatggtcccaattttgcttttatttcttagggctaaaatgaggcttttctttgtcgcctattgatattgttcacactgaactgttg

SEQ ID NO: 49701 - DNA, 718 bp, Zea Mays
gcgggagctaactcgtaagttttcgggacataaattaaattctacactacacccgatggactgccggttagtttcctcaaagtgcaggaactcttttgcaaaacgatcggaccgaagggtatcccctgatccgaaccgtcggataaaaaacagacgacctagattagactgtcatcttcacgaaccagtacacgaactcaaccattggattagagatctatggccccataacttcctcactccgatcacatccgatcagatccgatggcccaaaacagtcccccgcgaatcgttatggtcaattcgatcctcaccgcacagacccatctaacggctgaagcgcgctccaccgagaatctaatctcagtcgttggccatcagatcaacgaccgaggcccttccctacctccgatggagaaacgtggcggcgcgcactgacacgcggcggaggacattgccggagtatggtaaatcagtcacccgccgatccaaccatagcgcaaaaactataccgcaagaaagggaagagcaaggcgatttcgccagagtagacatatcagcttttcgtcgtgagggcgggtctggcgacgtgatggcgcagttccccggtccaatccaagtccgacgagcaattccagctcgcccacgggcccctcctgcccggcgatgccctagaaacacgcggggcgcccccagcactacactgcaatgccccgac

SEQ ID NO: 49702 - DNA, 1077 bp, Zea Mays
ggggcatagtggtcaccccgagttaagtaagcgcgagcatgttgcaccgtcttaagtctttgccgacttaagccgattgctccgttagcggggcatagtagtcaccccaagttaagtaagcgtgagcatgttgcaccgtcttaagtcgttgccgacttaagccgattgctctgttagcggggcatagtggtcaccccgagttaagtaagcgcgagcatgttgcaccgtcttaagttgttgccgacttaagccgattgctccgttagcggggcatagtggtcaccccgagttaagtaagcgcgagcatgttgcaccgtcttaagtcgttgccgacttaagctggttgctccgttagcggggcatagtggtcaccccgagttaagtaagaatgccggtcaatcatgagcaaactgagtattcttgaagccttttttattgatgacatatttcccatttaacagagtacattatcgtcccgatagctttttgaaatacagctaggggtaaaacttcctgaggtgttctatattccaggagttcccaatttctgttctgtccatttgagtaaggcgatatgatcccggccgagtgacttctgctactataaatggtccttcccataagggcgataacttgtgtcgtccctcccccgttagaattcggcggaggacgagatctcccactgaaaaggatcgtcgctgcacgaccttgtcgtgatagcgtctcagagtctgctggtactgtgccgattgaattactgcgttcagccgctcttcttcgagtacatcaacatcctctagcctagtagcttcggcttctgctatgctttcaaagaccaaccttggcgccccaaacttgagatcagcgggtagtactgcctctgacccatagaccatgaagaaaggagtgttcccatgcagagctcggctaggttgggttcttaggctccaaacgacgtagggcaattcccttatccactttcctgcgaacttttcatttttatcgaagacctttttcctgagagcctccaatatcatcacgttagctcgttcaacctgcccgttggctcttgggtgt

SEQ ID NO: 49703 - DNA, 1296 bp, Zea Mays
aacaaattaaatcccctatgatattgttgagaccttggttcccctttcatacgagttagacacacacttcttgtattttttgtaagtttacaggtgttatgtagccttttgaacatttattataaaactatgttcatgatttgttgtgtgatcacaaacaactctgggagtcagggactacgccactaccgagagctccgggagggatattgctggccaacggcggccaggcgatcgcctccatggcatggaagcttgaggggtcatgtccattagggagagcagaggagatccgatgagtccattctctagagtccagactccagactaggatagaacaaggctgaggcatccagtttcatcagttcatcacgtcagttaccaggcgcacgccacatggctgattaccaaggtgggcctttcctatcctcttcacacctttcttgatgcagtgtcaatctttaaataatctcgacatatatcttctcctttcattttctatgctagagttaccttcattcgatatattttttccttttatttatctttgcttcaaacaaatatattattttctaaagtactgactttttgtgtcctgtaaaagtaaaacctatttgaatagtcaaatcttagttgtatctataacaagatgaaagtggtggcagccaagatgaaagtggtggtggccgcatcaaaggagaaggtgcaacaagacgaaccgaaaggtgagaagatttcttttcccaaatcaacttgcatctacctgtgattgtttgtgaacaagtttttatgctaatttttttatgtagctgctatctcagatgtgaaatgtgacaacccaaaagaggagggcaatgtgcagcaaaccaaaaggttagaggatttcacttcctcaatttctttggttacactgtttgtttgatgctgattttgttatcatgtagttgttgcctcagatgtgaaatgtgatgacctagagcaggaggaagattccaataaaaatggggaactggaggagtgtaacaaatgtgtaatttatttttttccactctatatgctatcttagaagtttcaaaagttccttgtttgtgcgtaattcaaaatttactattagtcattgttcctgaacaacccttgattttatttcttgaatgtgcacctgattcgtctaatggaatcatagaaccacatgttgtgctactattttggttaagaattacaatgatcttaaggcatttgttttgtatgttgtctcttaattttgtctactttttatatttcatttttcatctgtat

SEQ ID NO: 49704 - DNA, 660 bp, Zea Mays
agagaacatatgtacaagtcgagtaatagtcggctaaaacataatagtttatattctatgaaagataaaatattttcctttaatctgtctaagttggtagtcttctatcttagttcggtgtctttttaggtccatggagaagctacatgccccatgtaagggtatgctcaggaagaacacccatgggtctggacccccaccagtaagacctggacccacgcaaacgccacctggcccacccaggattagtccttgatggacacatgtaatggtcgggcctccttgcctgcctctggaccccggtcggtgcgagccaagggcttcagttggttcgcatatccttggcacaagccctcctcatagataggggtacggtgctgccatgtggctttaaggcatccgactcaagccttagggaagaagcaagcctcccatctgcaggcccgctgcctatatttaataaggataggccatggcacactatgccacatgtagagtagatgtctaacaggttgacaagaccgctccacgcgctaccgaggcacacaacgtcacaaccacactaggtgcatttaatgcacactcatgataaacgcgagctcccaaggcggtcatctcatacaagtaggcaactgcatcatgaagcgtcactcatacgac

SEQ ID NO: 49705 - DNA, 1342 bp, Zea Mays
ggtcggcccatttctgctagggatggcaatttgatccgtggatttggatatccgttagatatccgacccgacggagctgggtatcgatacatgttttgacccgtgggtcagatccgaatccgatccgaagtcgggcaggcatggattaggatattatcttctacccacgggttatccgttggatatccgaaatcgacccatagtgtattttttggcctagcccatattacatagcaaagaacagatcctaacaccataaaccccacgcctaacgctcccaatttctcactgttggctgccccttatagcattgctagcttcctgcgctgtgcctcgtggccccttccaagtctcatagaccatagcaccactgacggctgacccttccaagctctagtgctcttaaccgaggctcgcaggcccataataattcttttattaagttttaattgtgtatgatggtgaattgagaatttttgactaattatgctattgaattgttgaataaatgattgtgtctgtcatatccaacggatatccgaaatccgatggacacgggcatggatataaatttctatccgtgggtacagtcacaggcggatattgatagcaaccgcgaatatggttgcggatggatatttgcaatatccgatccgaatccgatccattgccatccctaatttctgctcttggcccaactctttccctcgcgccaaccggtagggatggatatggatggcaaaatatctgaattattcgtattcgtaaatatataaatatggatatccgtattcgtattcgtatataatttggttgataaagtggatacatccgtatttgtttattaaatctgaatctggatccggatatccgatttgttgttgaatccggatatcaaatggatatatccggaattcgatttctccgccaccgcaagatcgcgtctgtcgtctgttgctctgcttggtattggtatggcgcgcatttcgctggctcccgcctcgctctcacgccaaatgctcctatcgcgcgcgcaaaaaccaaaatcctctctctgtagcgcctaaatcttgtcgcaggccgcacttcctattcatttcaccaatagaaatcaccaccatctctctcatccaaaattccccacatgcaaatagggaccagcagtccaccagaccaccacaccatcggcgtcacaccctctactcaagtgctcagtggcggcgacggcggcacctgaccaccacaccatcggcgtcacaccctctgctcaagtgctcagtggcggcgacagcgacacctgtgcgacggttgtgctggaccgatatgctcttggcctacttcc

SEQ ID NO: 49706 - DNA, 887 bp, Zea Mays
ctcggagagccgcgcttccatcaggcgcaattcctcgagcacctggcggttactggagtcagtgtactccattgctgcggtggtcgcacgagtacgccgttggcagttgctacttggatccagagtgcctgagtctgataccagattgttagcgtgtggtggagaaggggagaggagaggaagagatccgaggtaggagaagaagactgggaggcggcgccgaccaagatagccggctgcagagagtaatctattatctattctgtttttcgatgccctccgtgagtttgtttccaggtttatatcctcttcattacaatacggcccatcaggcctacacagtccactctggcccagataccctcacgttacgacgattcactcgttcagacgtgtagctgctccatcctcggactcgccatccgcttcgttgttcacttctccgatgtcctgggcgccggagctgacaaaaactaatagctaggcacgtactataacatcaaactcgaatcagtgaacaaagaactgagatacttatcctctcgcacagatcagaagccctatctgtaacaaaaaagatcattctggccgaaaaataccgaggatatgtttgcgccaacaaacaaaagatctgagagaacaacgaatgaaaggaggggacaggatgaccgtgcctttaggaaattagattaaacagaacaatcaagtcgcatggctaacgcctacgcagcgtttgaacttcggacatgttttggagctcggagatgattgattaatcacctcttggtatagtcagatgtgacgttggggctccggatccggcagatggaggcggacaacaacgtccgagcaaggcacatgatgaagcttcaggtgggtgcccgcga

SEQ ID NO: 49707 - DNA, 356 bp, Zea Mays
ctaagaacccaacctagccgagctctgcatggaaacactcctttcttcatggtctatgggtcagaggcagtattacccgctgatctcaagtttggggcgccaaggttggtcttcgaaagcatagcagaagccgaagctactaggctggaggacattgatgtactcgaagaagaacagttgaacgcagtaattcgatcagcacgatactagcagactctgagacgctatcacgacaaggtcgtacgacgacgatccttttcagtgggagatctcgtcctccgccgaattctaacgggggagggacgacacaagttgtcacccttatgggaaggaccattcatagtagcagaagtcac

SEQ ID NO: 49708 - DNA, 624 bp, Zea Mays
tggaagtgcaagaactctagatttggtatgttcgtatggtatgttttcaggtcatgttcgttaacctacaattatattagaagcggttgcttataaagatctctggatttggcatgccttttttggcttaccgatctcaatgatatcaacgttttacaatggtctctgctttttgcaaagttagctgaaggtcaggctccagaagtgaattatactatcaacgatcatgattacaaaatgggatattatcttgtagatggtatatacccatcttggactacatttgtaaagaccatatcacaacaacaaggtaataagaagaaatattttgctaaagcataggaggccgtacgaaaggacatcgaacgagcctttggagtcctacaagcttgcttcgtaattgttcgggggcagctcgtttatgggacctagagacattggcttatattatgaaatcttgcgttatcatacataacatgattattgaagatgagggagatctcgatccagaagaacgttttgattcccctgaacataatgtacaaccatcgcattccactactccgattcttatggaatttatcgagacacacagaaaaataagggacaatgaaatttaccatc

SEQ ID NO: 49709 - DNA, 516 bp, Zea Mays
tgtttcgagattcttcttttcctgctcagatttttctgactttttaagtaattcattgtttaatttgtcattttcggcttgggcctcagccagtgaaccttccatagaatgaataacgaagtctttcttttccaaggcagcttcgtgttctttaactatgatttcaaggtcttgaatgacgaagtcctttttcttcagagcagcttcgtaattttcgacttagtcttctagatctttgatgatagctttgtttttctcctcttcaagatcttgttgcattctcagcactttacttagtagtatgctctgccaaaacaaccttcgttagaaaacatattaattcagaaaacaatataaagtcgagtttttaccttgaaattagcataaagcaggctaccagcaatatgctatcgctggtacctgcataggtccgcttctatcttcggcaggccaatgctttttgagaaggtcttaacaaccttggcctcggttcggttccgaaggcatcttagcttc

SEQ ID NO: 49710 - DNA, 341 bp, Zea Mays
tgcggttctacaacaggaaggacatcctattgcttatataagtcgagctttagtgctaaagaatttgggagtgtctatttacgagaaggaatgtatggctatcctttttgtggtggaacaatggcgttcttatttgcaacatgacgaattcctgattaaaaccgatcaccagagtttaacccatttggatgacgaaaaattgtccactccatggcaacaaaaggccttaaccaagttactcggtctgcagtttcgaatcatatacagacaaggcagctaaaactgagtagcagacgcattgtcacgccgtccaaacttggaccaggatgaaccagagatgc

SEQ ID NO: 49711 - DNA, 439 bp, Zea Mays
gtggcccggaatcgagctgatgtcgcaggtatcgaacattggccactagggctcggaggagatcattggggaggagaggtcaacttgattggctgggtgagaactaggggcaggtggatggcaattgcaagtgatttccatcaacttagtgggtcttttaccaaacataagttgaagtcattaggctctttcgtcttttccaacatctaagtttatccgaagctttaaccgagtgctacctattttattgggctctagcgatgcattgatgctaggcttcatccatgatgccaaagttgttttccttcctttggcttgctgaagcgtgcacataaagcttgtgtttcttgatccctgaaagagatttaaaatagaaagattcattacttgaggaccttcgtcaaaatcttctcaacgacatctttaaatcaacctagat

SEQ ID NO: 49712 - DNA, 1266 bp, Zea Mays
aatacatgaaaagcaacaacaattgcaccgtgcatttgatgggtgccctgacgatttggacgttactgcgcccatggagacgaacacaaactcaaacgcggaaaagcaggtattatatacaatctcatcatggttacattatatgttaatttccaatttgcatccaaaatattagacaaaaccataataatgtcaacaggattaccattttaatgttggcaataatatgtcgagggacataaacatgtcacatcaacatataccagattgcaacactatgagctcgtatccgtcttcccacttgccgaagtttgacgccacaccgcaaaaacatgtatatgtttcatctttgttttgtccattgtaatctcaattatcgattaaatttaattgacacatgactgagggtttaaacatagtaccattgcttttttggggcagggaggtgacattgatgcatctcatgacactccaacttaaacgggccccctttttgatcagacacctagtggtcatgtaagtaatccaattatacatttattacattcatgcttctcataactcattcataaattactatactctctacctgcattgtgtttcaggttgcatctgatgaggaaacacatagcttgcacactacacatgtgcactcactgccacgtttaacagaattggattgtgctcggtcgcttcgtgattttttgtgctcctcaaaactcgacccaaacaggttttagtctttaactattaagaccaaataacatgtaggttgttgcttgcatatataatgactaacatttctgtttttacattattatataggaaggtcatagaattcggtgaatgtattggaaattgtctcgatattcaacaatcatttgcagacgggatgtgtctggataatgttttcatgcagtgtttcattcagtgttttcgcgatgaagaaataaatcattgctcgtccatcaacaaaaatagacttttactggatgtcaatgttggtgtatgtacatttcattaatacctacctaattttgcaataatttacatacagttttatatgacacagtaattatgattatgcagactctcctcaattttgaggagcatgaacgctacagcaagtctcctcagatttttgatcaaactgtccttgatgcttacctggacaagacactgccccagctggacaactttgttgactacaaaacggtataaatatttttcattgtatcaacattttttctgttatgcatttatatt

SEQ ID NO: 49713 - DNA, 489 bp, Zea Mays
aaaaccttataatttgaaagttacaaagctccaaatttgagcccatatcactgaatttcagacttaggtgtatagggtttaagtggtgcttttttgcaaatagacccaaaacttagggtttaacttgcaaatccacatatttgtgatccatacgacttaggacattttattatcatggtttttgcactttagtccaaaagtggactaattttgcacttaaccccctaggctttggatttagggttttccagggttgctttttagggtttttggtatttcaagggtgtgaatgtattgtaagtcccttcttagtaacattttatgactattttacttaaactttagggtttactctatttgggtcttgttctacccttcagatccctgtttagggttaagtatcctatactagggtcttatttacaaaataccataacaatacaacttgtttgaaatttttgcctagtgaatgcattctaggtgtatcaa

SEQ ID NO: 49714 - DNA, 1505 bp, Zea Mays
ctttacaagtcgaggtccccaacggggaacgacgttgcagagctccgacgagctcgtgtaccggctgaaccgctctaggaccggcgccctactttggtagagatcaaatccaagatctaacgagggtttcccctcaatcaatttcacgattggcgatctacctagctctgcccacgaagacatcgggcagcgtggacattcactcgcgttcccggtgatcagtgggttcctagttcaattttgcaggtcgatgatcatcatgggtacacgagagcactcaaacgagggagcagacggtatgaactgacctgaattgcgctggccacggtgaggtgttcttgcggtgtgtttgagcagatttgggggaactgtaaaattcaagctcgctggtgatcaactgagggtaatactgggtggctgggtgtgtgatgatcttgcggagcttacggagggctcaatttatactaagcgagagcggtggccgggaattgtagcgaagacgcgcgacgatcagaggagggggagttcacaggcgtagtggattcgtggcatcaactgtggcattcactccggtgatcaacggagggctaaagcagatcacggcgatgcggtggagatgcctagacacacggcacaaggccggaaggcagcagtcaccggtgatctcatcttaatccaccgcggcgagcgtagtacggtggccggaattatttactagccggagcttatccacgacggtgtgactccgagcgttatccgatcaacccgagcacgaatcgagacggcagcggcatgaatcgcgacggagagatcgtcggtggcgaaaaacttagctggcggtctgatctacttcagatactgtaccatggcgaactctatgtagtgcacctgacagccaagatttagggcagattttctctaaatttttcatggcaactcacccaaagctccgcagcaaagttgtagaccaatgattcagctacaatcttgccataacaactatagccaagttcctactagatcatgcttgaattcgtgcccaaagttcctgcagttgcactgtcagtctgaaattcagtcttcaaacagcctgacagcccatctttgggtgcatttttctccaatttcttcataacaaccatgcttactctcttaagcaaagttattctcctttgataggtctacaatgttgatgtggtgatctagggcaaaatccttcttgtttggaagttacaaggtcacaaaaatgagctcaaaacactaaatttcagacttagctttagaactcaaatagggtccttttgcaaataggtccaaaattcagggtttagcttgcaaatcttcatgattgtgaaccatatgacttaagataccttactttcatagtttttgcactttagtccaaaagtgcactgattttgcacttagccccctagggtttaggtttagggttttccagggtcctttttagggtttttggtatttcaggggtgtgaatgtaattt

SEQ ID NO: 49715 - DNA, 337 bp, Zea Mays
ctcctcagtatggttggttgcttgcccccatatatagcctactggggagttctggcgctcagcaatcccatgtgtcttccaaatctatggtaacaagccaagcagcggcaagatccaagattcttcggttccatggctcacaaaatgtcattaaatttcctagctacttctcgctgctcactagaagctctctccatcgcgcctctacatgcttcttttttcacatttgatatctctccactccatcgcgtatctacaggcttctttttaaaaactttgatctctctccactgcacgagctaccattgcttctattccattctcctgctatgctaat

SEQ ID NO: 49716 - DNA, 634 bp, Zea Mays
gtttcaacggttgtcgtgcttcatttttttaaaaaaagtctcttacatcttttggattaaacccgatgtccctccctccttcgacccaacttctggaaaatctctatctctactttataaagcaccagtttcaacagtcatcatgcgttatatttgcaaaaaaaggtctcttacatcttttggaagaacccgcgttctgtcgtccacacatctgcattgtttggtctatcgccccatgtcatctaaccgtgcatgcgctctcccccgataccacgctcgcccctacccacgtggagtgtaaccaccctagctagtcgtcggttctgcgaccgccactcctttaacagaaaacatttatctttactattatataatacaagagtttcatcggttttttcgtgcgtcaatgcgtcccgcgcgagtatgtcaggcctccacgcacgtgtttgtgtctacatcaaaattcaaggcatgcaacaaaaatattaagtgagagtaggcatcgaaccaacgccctctaccacaacaacacttgtataattgcattaaaattaagagagatcgatatcgttaaaatatgaactaataattagaaattttaaaatataatcacacatgatatatagaaaaccac

SEQ ID NO: 49717 - DNA, 413 bp, Zea Mays
gcagtagaaaaaaggattgtaggatggagcatctgctccggtatcgatcatattcttgactcgcccaaacaccacaacgaaccacctctaaagctgccgcagctatctctcctctggtaaaccagcttcccaaccgaaataaatatatgaccatagatcaataaattagccactgttctctactctcatttgtgtccttaggtctcttgtttatttgtttatataatataataaaggcactatactctgaacagtctggatgcggatgggttgcttgctaaccttggtccaatgattcgttgatcgagtctgttggttttgcatctggaggtggcttctccgatgaattagtggctgtcactgtctaatgattcgttgcttctgactgactacgtacgttatgctacgttttc

SEQ ID NO: 49718 - DNA, 897 bp, Zea Mays
attggtactggtgcctcaacattattctggaaggaccgatggattcatggtaaatgcattgaggaacttgtgccatgccagtttgctgcaatccctagacgtttggccaatagcagaaaggtgcaggaggcactcaatggcaggaaatggatagctgacatccatggtgctctagctgtgggggtcattgctgatcccctcactctttgggatgccttacaacctgttgtgttgcagcagggtttgggagataaacatattttcaggttggccaccaattgtaaatattcagccaaggcggaatatgagagtttgttcatcgctcatcagctcaactcattttgatccttgggaaagaatatggcactcttgggctcctccgaagtgtaaattctttttgtggctggctgctctagggaggtgttggacagcggatcggatgcaataaagagggttggaacacgctgaaaaatgcccactctgtgatcaagaacctgaaaccattgatcatctcctcattagatgtgtctttgcaaggaaattctggttcagattgcttggacaggttaatctacacaactttgctcagcaaccaggtgaacagaataccataaagtggcggcgaaaggtggctgatcaagtgaagggcttggcagcaaaggggctgaataccttgattattcatttattcttggttcccggacaatctggaaccacagaaatgggtgtgttttgatagactttcccctagcttagagctggcttttagaaggctagaagaggagaaggtgctttgggagatggcaggggctaagaaactctctcctcttggcaccaatcctaggtcttggtagtttgtttagttcttaatggatactttcctgtatttttgttttt

SEQ ID NO: 49719 - DNA, 1071 bp, Zea Mays
ccggggccaaattgagtaatcggacgccacgatgagcttcacaagcgaacggagttgcagaaacaacatttgatttgggcagagccttaccagagtggtctggccacggatgagctgttcttggcggcgcggcagaccgaattgggggaaaacggcgtcgcggtggctctgtttgaaattggggttggagattgaggctactcggccgtaagaagatgtgctttcaccgtgcgcaatcgatttgggagaaggtggagagggcagtgcgaatttgacttcgatctagtcactgtgtttgctatgatcacacctcgccgtgaacccaatggctatttatagccgtggcggtccggcgatcacctcgcggctgaggatagtatcgcaatcgcatgtcgaccacgtcggtagaaggtatagtgagggagaactacggcatgagcgccaccgcggtggaattcactgagtcacggcggccgccggtgagtaactccggctaggcctgggagatggcgccacgtacgggttatccctccccgacgttatccacaccataccgcccacaaatcaggacagcggtggcactaattttggcgcagagaggtcgccgacggtgagcaagccgcgttggcaacctgataaacccgagagcactgtaccatgggatacttcttcagtgtgcctgacagtcacagtttaggaccaaattcctctcaatttcctatggcaacatacctgaggttctgcagcaaagttgtagtcctatagatcctctttatctttgttatagcaatcctagtcgaattcctactggatttagctcaaatctgatcacaaattcgaccactaccactggtgaccatatttcagtcagcaatccgactaacaacccaacttggcgccttttttctcttaactttgcataacaaccatatttactctcttaagcaaagttattcccctatgatagatctacaatattgatgcggtgacctagggcaaattctcaacaatttagaagatatagagctccaaagttgagccaatatcacagaaaatcagacttagactatt

SEQ ID NO: 49720 - DNA, 510 bp, Zea Mays
aacacataccagaaagaatggagttccaacaagacttgttgaaccagttattgtaagtttttgtgaacttgacatttattgtaaggtgttttttgcatcacatttgctactgtttcctatagtggtaggtactgaacctttctcttttgcaactcaatttgggtagaacaaacttaaagaatatgttgaggcccatccagagttgaaggaaggaacaattcaagaaggtgattcttttgctgctgtttgtggagagaaatagccaagaggatgtgtccgagttttgggtctaggaccaactccacaagatattggtaccccgggcttgagaagttacacacccacaagactccaaatggaagtcctagcccgcaaaaaggttgaacgtgagaaagctgctctagaacaacgcatagcataaatggaggagaaaatgcaggagcaaaggatggctcatgaaatgagagatgtggaaatcatctcgcatgatggttctaatacacgacacca

SEQ ID NO: 49721 - DNA, 504 bp, Zea Mays
tgatcgatgacagaatggatgtccgactggttgaggcagatggctctcagctggacatcaccctgccctgtgcttcaatgcttctgctggttagacttgcacttcagtggccacatttggacttcctcccatctcagtcgatcttctccttttgtcgcggtacatttattgtggatattttatggatatgacttctgcaaaaaatctttaaaaattcctggcgacacacccaatgggtgtgcccaaggggtgtcttggtacgcagattgtttaccacattgtcctggagtagtaacttgatgtgacttggggtgtgtaatcatattgcctaagtagttgaccttggtccaaacggtgccgtgttacgcgaagcggtgcctattacctgactcattttcaggcggcttgaattgcttattgaattcttgtgactgtttggcgagcgtggtaggaagtggacggtcgcccccggcctctataaatagcctacttgccccgttgttc

SEQ ID NO: 49722 - DNA, 841 bp, Zea Mays
ctcgtgtaacttttggttccacctcctattctcctttactgcgtgacacaaagagtaaactagacaatactactacgggctgctagcatgtgccaattcaagaaaagggggaacccacgaccacagaatgggctttaggttagacagaggttgagttccatacgaacatccaaccttctgatgatttttttgtgtgtctgcttgatagcttggtaatggacatggatggtgacctcagattacatcctatgatgagaagagcgccctgctggattatgttatctgtgatcctggttcagtaaaaattcatgctgacccagcaagaatcttgggcagtgaatcaacaatggtggggcccgttcaaagatttagtgggtttcaaagcaatgcctaccgatgcttgctgagtaggtgtgcatcaatggtcctttcgcattgacttttcctcatgaagttgcctgacaattatattggacttttgtgggtcagtcagtcatgttcaggatgaatcttgactcctcagatcaacttaaattgaatagtctgattaaccatcgctttgtacaaatccagctaaggttacaatgattgtggccgttattggaaacccgacctaccactgaaatcattctagaccagaatcaaagtacagcaacctcaagtgcactatgataacgttatagccttttgctatcactcagacttgtggctccctcagtttgtctttctgcattctctcttctcttttgcatgctatccaatttcatgaagtacaaagtatttaatgaaagtcacagtgtattgtcttggtaactgcatgtgcactcaattatcagtctag

SEQ ID NO: 49723 - DNA, 464 bp, Zea Mays
taaataagtgtgaagttgtgctgtcagaagtaagttgggcaaatatgaaaattggattcagaaaagtatggccccaaggaaatgcagttgatttgagagcaccaaatctgagaatctatacagaattgatccatgaaccctataacaaacacaaaagactgttgtttggggaacaaattttattaagggaggttaccctgttcttaacaagaatcatgagaaagtggggatgataggtggtcggttcagtaaaacgctgaagatcaaaacactgtaaatatctgaagaacgtggataaagatctgaggcacttttgaaccggatgtgctcgagtgatctggtgaaggagtcgatcgcggagagataacttcggacgtggcaccatcccgcgaacccagccgtgcgtggtcggagatatcccaccggcggtcgccgtggctcggtcacttccgccgtggtgtcac

SEQ ID NO: 49724 - DNA, 425 bp, Zea Mays
caaatagccaattgatcagaggtggcaacagtcactaagagccactcaaacgattctccataagcaccaagcaggctaggtgatggaaatcaccaagagtactaagaaatcctaaatcacaaatattatctagtaccaccaaatgcaaatctcaaatgcacacccaaggtatcttaacctctcacataaattaggactaagtttaagagggagacgaggtgaaggagctgttcttcaatatctcaagactatccacgtagggtactcaatctctaactataaatttgcaccaagcatgagagggaaagaggagagaaaatgaatactagaacaagttggatctcaaactgcaagaatagggagttagagtgggatggaaggaaggggctaggaaaacacccttcaagccagctagtagtctccac

SEQ ID NO: 49725 - DNA, 426 bp, Zea Mays
accctgtccacctttttatttctatacatgttttgcgatcgatactagccgctgccgcactgtggtctgcgactaggcagtgaggtttaggagagacaaaggggactttccccttgctcccaaattaaacatgcttctccgtctcaatgtccattattgtgcaaaataaagctttggcgcataggttttggaggtctccaccaccaatgcaagtgatttccccccacctccggtccacaagtgagtactaattgtgagggaagcgaatagatgtacgtacccaagacaaactcgatctacatgcatgtgtgcaacaaattaggtaaccaaatagcagattgatccataaaatactcagatctgaccctaaaacttcctgcatcgtcctgacgacagttaacactacttagatagccaccccggccc

SEQ ID NO: 49726 - DNA, 367 bp, Zea Mays
gtaaaagatctcgcgggggagcagatgtggtcgcgggggaggcttatcaccacgcctgtagccgttgcgacatggccggaccgccggtattgccgtagaaactctggtgacctcggttgtgccacgtcgtggcttgttactgtgcggtagtaaccgtggcacacttaagagtacaatctttaagccattgcgcaggtgaacgccacgaatcctttacgccagtgctcttccccctctccggccgacgcgcgtctcctccaaattagccgccaccactcatgaatcctataaattgagtgtgccatcagctccgctaggtagttgtgcatccagtgaaccagctctcacctccaatcatcccctacag

SEQ ID NO: 49727 - DNA, 826 bp, Zea Mays
taattccaggaatatcatctgtctatttagagagttcgtctgctgcaattcagggcccatccacggtgaggtcgtctattggctcgtcatggccagatcagtggccccctctctcctcagcctctcaggagagccgtggagtctttcgtgcagcgccaagggctgccgaggtcgaggtggagctgctctggtcttaacttgtcaagtctaatggtcacgcgatgggtaagatgctttcctcttgaacccttggtgttgtcctggccctgattgcgttttcttctaatagcctagaaggccgagcttagggagctacagtgccattagggtcgggctctagattttgttggtgcgagtggctcttctctagtagagcgcataaacaacgtcctgtgccgtgttcggggcgctgttctaggtgcttgctggggtgccaccgcggcgcagctcatcggggaactcaggatgagctgcgatcttaatggggtcgtcggtcctcccttggccttaccagacaaaggcttgatggagatgctagagcgttatgacgatgcagtgagacataatgttcataggttgtctgtggatgatgtcgttcgcaacactcctgatcctgctttgtaaacgcaccccgtcgtgacctttttgaaataataggaaagttggcttatcgttttccgtttttggcgaacgatgctcgttcgtgttggagtgccctttctcgcgcaaaagttcgactgtggagcctgtctgggctcgtgatggggattattgtttgcgtcgtcttgatatctcaacctccgcgtgtaagaccatggagcctggg

SEQ ID NO: 49728 - DNA, 473 bp, Zea Mays
gcggggtggtgacgccgcccatgcactgacgagcaattaagctcccacttctacctaatcacgtgttcagataggtgctagagaatgcggagatgaagacggacaagatgaaggatacctcaatggcggtggaggcaatgacggagatggccatggtgtagtgcatttcgtcggcgcctttcaactccgatgagtaattctcggatcctcaaccactcccatcatgcagcgagggcacgaccaccttccgtgcaattcgttgaatcgcccaagacccgtgattgacgcctgacggcagcgcgaaggaacatccttcgcagcggctcctccctgtctctgtttgctcagtggccggtggtttcgttcttctcgcacgcaatggctagagggggtggtgaggttcgcttatatagccatgggcggaggatctagggctggtgaacgaacttcggatatcctggctaagttcatta

SEQ ID NO: 49729 - DNA, 471 bp, Zea Mays
ttcaaaatgaattatgtgaagtgattcttcaaaatgaactggggctaggagctaaataactgcttcacatgattcactatcatcatatagtcagactttccatagagtttatcatatggtttcaattaataatcactttcagccatagaatcacttctctcatagaatcacttctaacagagaatcaggatcagtggatgctctaacaaacaagcccctaatatcatggcagttgagtgatgacgtcaaagctgcatggaggctaccgggaatgccacgaccaagcataggcccactagatgagccacgacatggcggaaggagccacaataggagggaccacacccatgccatggaaggtgactgaaaggatcacgatgcccaagagggggtgaattgggcttttctgaaaatcaacaataattaaactctaagcaagagcccaacttcaccccaacaactagcaataag

SEQ ID NO: 49730 - DNA, 765 bp, Zea Mays
agtgccatgctgattaccagaaaaattcctgccaatggttatataagctttctttttgccatgggtcaaaaccaacagcctcgagcccccgacaaagaaactacaataagcagatttggttgagaaatctcctgtagtggatggtgatcgaatgtgccagtaggtcgtgtattctcgggtgaagatcaatttctgctatactatcccatagatcgatggaggtattccatcatgctgtagctgacagccccctgatgtaccatacccaagcattgttgtccaatgcatcctgcaccattgttcttttgattgctctctttgccacatgtgtgaacgacagattttccctgaaaccatttatcacaccaaaaaagttttcggctgtcatcacctaacacagaataagctgaaatgcagaacatggacatagaattagagtgaacctgtaaatctagagcagcccatggctgatcaggttagatcttttttaaccatagccacctcattcttagagcccaacccaaaatttccaggtccaaaattcctaaaccaccaagatcaagtggcctttggacccgaccccagtgtttcattcaactaaatatggcaactgatccgtgaatacagactacttcagagttcagagtaacctgtatcaagcatgatgcatatgtgtgctttgaaccttgtagatagtattccttatgtttccatcctgttcaactcagtaccatactaagttagtagtatgtgacaagactcgat

SEQ ID NO: 49731 - DNA, 769 bp, Zea Mays
tatttaactaaatcaaacaatacagttttctaaatctgttctgacagtggacagaatatagcaatcctcttataaaattcataactctcaaactatcaggtttattgtcatgaaaatttaacaaaagtaagataagaacattatctacaactttcttataattgacaaggactgattctaaactgaacttaagcaaacaatgcgacctctgaaatctgttcaggaattggacagattcagttactaaacttgcgaaaagcataactgccaaacgattagacttatgactgtcaaattttaacacaagtaatataataatgttatctacaactttcttgtgactatcaataacttatttcaacattaacttagacaaccattgcaatctctgaaatctgttcagaatttcgacagattcaggtgctggacttttgaaaagtatagcttctaaaccatcaattctcagcttatgcatttttaggacgagctagatacacaagtgaactacaacttttatatagcatatatctacagaaaacatactttacttaactagattaatcgcacaactaaaactgtacacgcaggaatttcagtttgcaaacacgagagcactcaactaaattaccaagcaaaatcattgagaggtactaccaccaatttctcaagtttaaatcattatgacttagttatcaagtttcaatttatgtcaagacacttaatcatttcaagaaacatggatgcttttgtttacttctaatttgtctct

SEQ ID NO: 49732 - DNA, 316 bp, Zea Mays
gtgatggactgctagctatggcaatccggccaggtgctacgacagtactgcaccacggcgtgctggcatactggacggaagagcaacattagtatgtcaactgggcaaagaaaaacaacattagtactggtactatagacgcatgtggtgatatttatatagttcgggtatttgggtatttcgggtaccggatgttgctacccgattaagcccgaaataatatcgggttttaagttttactacccgcataaatgtttcgggtatcgggtattgggctatacgggttcgggtttttcgggtttcgagcttcgggctc

SEQ ID NO: 49733 - DNA, 385 bp, Zea Mays
tacccgggccttaatcaggacccaggcgggggtccggtgccgacacgtgtccagacctgatctggtgggatccggaccttatcacatacactcctgctccccgcccaggcggagactcgatgctgccacgtggcctactgcgcgtggtgtaagccaacgggcggagcctgacataaagcctctgggctacgcgcatctttgcatttattacggataagacgtgcgtctgtccattccagtgacatgcggcacgcccagtccacgttgcgtgggccgggctgttactcacacgttaccatagcaaggacaatgactcaccattactctcgcgttaccaggaaaagggtcattgcgtatcaatactgcatggactgcagtcatcatg

SEQ ID NO: 49734 - DNA, 1583 bp, Zea Mays
ctttatctttgcggccattgtcgtagccttttctgcagactcctcgtgctcggccaaatcaacagtacgtgacgtgaggtcccgtgcaatccctttccaaaatcgagctatgccagctgtagtagctttactcttctttttctcgaatgtggacaccaattttggtagagggaatttagatttctttgattgtcgtgaatcccttgatggctgtggagaaggtggtggtgtcctaaatgttgatgcttgtggcggagacggtggattagaaagaggatgaggagcatcatgggaagattgtggaggtgatgatggatgtaaaggtactaaagtttgaggaggcagagatggttggggatgagacgacgacggcattggtggatcaaccaattcgacttcccttcgaggccaaaggatgaaatttttgatggcttgtccaagtgtctcgattccttcgggcccagggatgtctagcatgtcgtcctcagatccttggacgaccgtcatcacttctaccctgcaataatcatctggtatgtcgcttctatgaaacttgcgtcctaggatcgcaatgcttgttcctactttcttcgtgcgattattgttaataccatatcttataactagtgtgcacgtcactggccttgttatgtcatcaacaggataacagaccttatttcccgttgacgcgacagagcttgggatggttgtacaatcggtggaagccggcggttgagctactggaattttttgcagctgtggagtggtcatctgttgaacagacatcgcacttgccaactgctgcatcaattctggtgaaggatttcatagcatttgagacatcaggtctttgaactctttctttgcctcctgcttaaaataatctgacaactcttgtttgtatcaatcacgtttcttgtacaaaccttcccactgtggtccgaatccttccttagacgaaattcctcgtacacggctaggatgctcagggttaccgagaccagccgttaggatgtctctctccgtttgtggcttaaatgatccttggctctgcttagctgccattgcatatatgtttttcgcatcttcttcaacatttggatcatcaaaagatacactcgccttagttttcctgggttttctagcacgaatccaattagccgtcctttcaccaagttgctcggaaagcgtcggcaaccccgcggccttcttctcggtgtcttcttgtctccatttagaaacttgacgcttgtaaccacctgtgcctaagtggtgatggtacttgttctttttagatagttctgaatttgcctcgcttagacatatgaattcagggccgctcctctgctctagaaatactgcccactgaccttctgagattttatatttttttgtcaggtctagcctttctttgcaaattttgtattcatctcagacctccagtttcgaaaattgattgcaagctgcttcatcgtgtattccttcacgagttcttctgaacccagaggtagaacaaacctcgttaatagcttattccatatttgattcttgacatcaactgacacatctttccaatgtgggat

SEQ ID NO: 49735 - DNA, 730 bp, Zea Mays
gggcactcattgcacttgggaatgacgtgcaagcatgccagacggctttcaacacagtgtacacctataatggcacaagagacttggttcaagagcacattgtttatagagtatggcctcttgcaagtggatgggaaatgccgaaggaggctgccgttggctccagccaaaatggcatggtctatctcaagtataccttcctatatagaagtaaatttgatgaaccaaatgatgactggttagatgttataaaggcaacaagtgatgagctgcttggggtctactcaagggctgaagacgaagctatgatagtcgccttcggcgctcgaggaaaaaagaggctaaatagggtttttgatgttatcgggtttatttatccttattactgctttcctattcggaaacaaagggggaaaagaaaaattgtaggttcgacatcttctagtgtgccgaaggagaagaaagtaaaggtcttgacacatagaccgagacacattgagatggtcgaagtgccaaagcttattgaacgtgtagaagtcgccccttctgccccagaatcaagtcctgctatgtcgatcgaggatagcacagacccggtcgaggagccgaaattagagaaggcagtagatcagttgaaggtgttgagcccaccagctacaataggactgttgaagccatcaagtgtttccgcagtgactccaagaaaaaggagaatggctagcgtgctaga

SEQ ID NO: 49736 - DNA, 275 bp, Zea Mays
tttaaaaaagaatttcccaggatttttagcctcatgtaatctgcaaagtatgcacatttgttgtaatagaggaatgaaccccataccacccctgccttgtaccaaaaataaggaaataaagatgtgtcgtgtttccttttccactacttgtcctaggacttttaatctcgggacgtgattcttttatggggggaaggatgtaacaccctagtgttactgccactaaaacttgagcataacatcataagcattggcatttcatgtgtttgtcacac

SEQ ID NO: 49737 - DNA, 602 bp, Zea Mays
gtgatcgtaagcatgttatactaggtcgagtaggcgcgagcatgttgcaccgtcttaagtcattgctgacttaagccgattgctccgttagtagggtatagtggtcaccctaagttaagtaagtgtgagcatgttgcaccgtcttaagtcattgccgacttaagccgattgctctgttagtagggtatagtggtcaccctaagttaaataagcgtgagcatgttgcaccgtcttaagtcaatgctgacttaagccgattgctccgttagtagggtatagtggtcaccctaagttaagtaagtgtgagcatgttgcatcgtcttaagtcactgccgacttaagccgattgctccgttagtagggtatagtggtcaccctaagttaagtaagcgtgagcatgttgcaccgtcttaagtcactaccgacttaagccgattgctccgttagtagggtatagtggtcaccctaagtcaagtaagcatgcagattgaaaataaatagttcgaatgcccttgagaatgaagtctttttattgatgatgtattttccgattacagaatacaatgctgccccgatagcttttgaaatctagctagaggtaa

SEQ ID NO: 49738 - DNA, 511 bp, Zea Mays
cttccttagtgtaaaactgaataatcccagtgtcaagtgactgaacgtttggaatgtttcattcagttttaacaacattttatcattcatttcattttttatttgttacgatgaagcatttgtcttggtatgatttgtaaatgtatctgttgtggaaggtaccatgaatttagaatgggtagaatgcagacctccctttaaattcaaattaaattctaaaatgcatgaggacgttggtaatatcagcccgcaacactgaaagcagatatggggtcagtcttaatgttcaatgatttaacatctccctagcaccagaacatcaagataacacatgcttaaaccagtatctagcaagtctagtgtcgtgtaaatatataggtaactggctctggtggctctggatgtcaaaatcatagtaagtaccttttcagcatccaacacaagagtaacaatgtgagatctcattaggttattatggaataagaaattaggcaaaaggcagaacaaaaag

SEQ ID NO: 49739 - DNA, 587 bp, Zea Mays
gccggcttgagatgattcttagaggccaggtgtcgaatatcggtgctcctattgcgtattctgcctagaatctgcctccttccaagactttcatcagttttgtgtcaaatcctcctactggtgatagtggtttgggccttagagtgcgaccctctctcgaagaggtcgaggctttggttgtttcgcttggtgaaatccccaatgacgagaggcaggttcattttgagatgcatataaacccgagcgacgcagaaataagtgctatgctggacatgttggctgaggattcctctgattcggtccctgctgaaacactagctgtagcacctatcccagagcctggaaagaccttggacatttaaagatctgatagcactcgcccgaagcgtcctcgccaggccagtcatccaacttctcctgctgacgggaagaaaaagaaaaagagacggcttcggcgagtgtcatgcttgaatcaggatgtcggccttctgctcctgctgccgaggaagtgccagtggagatttttactgttgctgaacccaatgggtgtgacccggctgatgctgaccccaatggttgtgaccttg

SEQ ID NO: 49740 - DNA, 596 bp, Zea Mays
aaagaactcaagagcacaagaaccactgtaaaaaaactcaaatacaaactctccacaaaagcactagcaattcactaactcaaatctcataaatgtggcacttggggagggctttgaatgacttggagttgttgcaatgaatgtatggatgtttggtgtagcacctgtgtcttcagtgtgctggttggggtgtatttatagccccaatcacccccacatagccattggagttaagtgggaaaatctacataaacttcaagtgcactagaccttctacagtgacggtctggtgcaccaccagaccttgtcagactgtcattgcatgtgaccattctgatggagaccagtcttgtcaggacacaccagaccggtccggtgcaacactggacctctgccacgtcaactcaaccactagaatcaggagatatccattgaacacagatggtctagtgcaccagctaatagaagtccattaacaccatgtaggaacaaggcatcagctagagggggatagtgaatagatggttttaactaaaatcaaagacactcaacaaatttaatcgatataagaagagagttgaatacttcagcctatg

SEQ ID NO: 49741 - DNA, 302 bp, Zea Mays
cagatggacccaaatactcagagatgatgaatgagaactcatgtgcacgacaagataaacgacagcgagacggtagcttcttgttatacgtatccgtcccgctatcggatgacttatatatttataaggtcgttcacgagtagatagctcaaagtacattgctgcccccacttaacggtcgcactcttacaacacggactatataacagggtaattacagtgctgcagccccactggttacgtgttcgcataactatacccactaattacattgacaggtggatcctgtctgatgtcactgt

SEQ ID NO: 49742 - DNA, 336 bp, Zea Mays
gagaaacgtacccatcataaccggttctcctcccggtgtcgtggccacttgagtgtaataaatctgcctagttttcttcatatttttgcccgcggtattgtttgtcgcatttcccttgccttgagcggaactccctgaactctgctgattatttgatctgttctgcttcgggtatggacaatccttgataaaatgtccggactttctacaattaaagcagcctgtggaagagcttgggagggcggggaaacgagtaccaggggcacccggctgatttgttgaggtgggggcagtggcaggacggataaacaccggttgtttgaaagggtaggaggg

SEQ ID NO: 49743 - DNA, 504 bp, Zea Mays
agtatcgttgcaatttgatttccgtgtaccatgaacagtgcaacatgagctgtggtcagatttcagtagtcagatggccacaaaagtaagcgatgctttcatatcgactgcaaggctggcacctaaaataaaggcgagccgacatcgaccggccatgagcccatgacctgcaagctcgagacttcgtctcccacctaaacgcaaagaaaaaaaaaggattttgaagggtgcgtgaactatgacttgagtgagttacatgaattcgatgggcgtcgacttgagcaaacaagcgatctggtgggcgtcgacttcggcaagcaatctggtgggcgacggttgctcgccgcgaggtgtctgctcgcaactggattctgcggtcatgccctcaggcctcagctctgaccttgcgtttgcaatttgcaagacagattcagactgcagtctgcaacgccaaagggaaactgtgaggacagagcgtgatgcaatgcaaacgttgaacagaag

SEQ ID NO: 49744 - DNA, 420 bp, Zea Mays
aaaacaccaacattgcctgccatagctcggctgttatctctaaaacgtcgacagagtcaaataccactcggccgttacctctaaaacaccgacagtgcctgccataattcggctgttacctctaaaacaccgacaatgtctgtcataactcggccattttctctaaaaacgccgagactcaccaagcatggcgcagcagttaccagttattgcttggtaattatttctaataacgtcagcaacgttgggcgcgaaggcaaactatcaatcaactataaaagaagaacgacgaaaaagcaaaaggttgcccagagcaagctgaagttttcttggatatacagaggagggaagtttttccacaaacttaaagaccaactcattatgagtcggccttttctccctttttcactacactacatt

SEQ ID NO: 49745 - DNA, 663 bp, Zea Mays
ttttcctttgcataagatgttggtcgaagtgcttaaaagatttgagatatatcttcatcagtttactccggaagctttagttaggattggggtgtttatttgggcagtgagaagtcaaggcttagagccagattcagattgcttttgcaacattcacgatctcttttatcagatgaaggctactgggaaggagcagtaccacaacaactttggttgttatactttcatatatcgatcagatgtcaggcacgccgtgccaacattttggaaaaagtggtcgggctcatggatgaaatagtggttttatgtgaagaatgacttggtcaagagaggtgatattagggatatgatctagtggcttatccgatcccgcttcggaataaagaggtcagttatcgtgaatatagataagtctcaggcttgcttggtggcatttaacactgtgtgcagctacatttgcaccaaggattggttcaagagcacatagcgtttaaagtatggcccctcgtcaatgagtgggagatgccgaaggatgttgacgctagttcaagtcaaagtgttggaaagggtgggttagtgtacttcaaatatacatatcgttatataaatcaatttggcaagctagatgacgagcggcttgaagctattgaatcaacttgcgac

SEQ ID NO: 49746 - DNA, 697 bp, Zea Mays
tcgatatgcaaggatcgggccagctttatccttacgatacgtgaagttgtagcaaccgaagttattgtggaggcctgtctgacccttgacctttgtttgatagtgcaaatcatgcactctgcagaaagcactggcatcggtgcgaccccctggcttcgtacaacccaaataaaagcgctaaggcgaattatggcattcggagttagatgattcatatatacctcataatgttgcatcgccatcgcaatcatcttatacattggaagtcgaagtcctgccttgaaaaagcttttatacacaacaactttgtcttttcctgggtttcgggttgtttcatttccagggaggcgcacattgatcttgctgctaaaataactgagcttcttcatagattgtaggtctttctctctcaaagtggaatgaccaatctcaatataacttggctttgaaggcatgtccctgggtagctcttggacatgctttgataatgacgaagccttcatagcttcggagatcgggatggtctcttgacgcgcctccgaagaggtaggcgtgatcagctttgcggtggaacgaattctagccatttggggaaattgtctacgaagatgatttagccgaagcaggcttccgaagcaacaatggatgggaagttttggaggcacaataaattttagcagcaggtggttgatggcag

SEQ ID NO: 49747 - DNA, 629 bp, Zea Mays
cccacatccttacaagagagtgaaaatcggaagacccggtctgacagttgaagagtcctgaaaagcttcgcagaaccaccaatgcaggattggagcataagacccaccgaatcttcacacaaacgcgaagaacatcattgctccaaagaacacggagcggcgaagcacaagggcagggaggcgactgcgggagatcagaccgcggcggcaacgacatcatcgctggcagcggcgacgagggcgcacacagggaggacagcgggagcgcacgtaggggaagccattaattgcctagcggcggcggctttctgctgctactcttgtagattcatgttcaaatttgtgtagtaatcgttgagttatgttccatgtgggtacttctcggattcctatgctgacattgtctcttagtttaagtttgtggttgtgtgctaacggcctttgagtacgaattcatttcatctttgtagttcatggtgtaatcttcagtataaataaaatgggccagcatcaacgctagccacatggaacatgtcatacatgacttctattgacaacaagcaattaatcaagccttgatcaacataacattcaaatagtatgcattgttcacgttataagaactccag

SEQ ID NO: 49748 - DNA, 555 bp, Zea Mays
ttttggagaacactatgtaataaattgggactaagctattgttttcaaaggcatgtcacaccaaaccgacggtcaaactgaggtagtaacattatctaccatgttgagggttgttttgaagaagaatttgaatatgtgggaagagtgcttacaacatgttgagttttcttaatagggcggtttactccaccaaggtaagtccttttcaggtagtgtatgggtttaatccccatgctcttattgatcttttacctttacctatgggacaaaaaattcatcttgatgctaaggaacagactgaacttattccaaacttgcatataaccactaaagaaaatatagaaaagatgaacaaacgatatcaagaagctggtagtaaaggttgaaagaaagtaaaacttgacccacgtgatttagtgtggttacacttaataaaggatcattttcccgagttgagaaagtcaaaattaatgcctagagttgttggtccttccaagataattgagaaaataaacaacaatgcatataagcttgaattgcctcccgagtttggga

SEQ ID NO: 49749 - DNA, 306 bp, Zea Mays
ctatgaagacgttatcaaaacccagccaatatcatagttcatacattgtgaatacctattttagggtacaagtagagggctttacccataattattacatcgccacactgacgaaatcacctagcatctggttttatgttttctatgttaagtggtacgcaagggtaagggaaaaaccaagcatcaggttttatgttttctatgcataactcatcatcaaggtatatatacccacaaggtatttctaacccatccatcccatatccaacacaacaccgaccttctcacatctcaccaccatgctat

SEQ ID NO: 49750 - DNA, 322 bp, Zea Mays
caacagccattttcacaacctaaagtttcaatggcttcggcaagtcactctccagctacgtgggccttaccacaaccaccggtactggctccaacttcgtcccacaaccagcagcctgaagggcagcgccaaattcagcaacaacgcgatgcaagagaagagtcctaagctcgaacagttaacagtattgttctagagtctaggcacatttactgaaactacaaagagactggactaagaacttcatatacacctattgtaattttcatttctctcgcttcatgttcttgcctcagaaacaatttgagaaggtgcaaccttc

SEQ ID NO: 49751 - DNA, 695 bp, Zea Mays
cggaaatttaatgaagtacttaacttcatatacaagatgtccaacgatgtgattaagcccaaggatgtgcatttctttgatattcaccctagactactagagccccggttttggccacatttaagaattgcattggtgctatcgatggtagccactttccggcctctgtacctttgtctgagcaacccaaatatattggccgtcatggatacgctaagcagaatgtcatggtcgtttgtgactttgatatgcagtaaaaatttgtcgtgactggttggcctggttccatgcacgataccatagtactgcaggatactcttgtcacctacgatgataggttcccccatcctcctaaaggtatgacgacaacctatgtttgtttcatttacattcctatgtaaaaatgcccttgaccatgataattttgtattacaaggaaatattatcttgttgacttgggctaccctaacagaaaggggtaactatcaccttacaaaggtcaaaagtaccacatttctaaatggcagcatgggaggcaacatgttggtgcaaaagaggtattcaactatgtgcacttgtcgctgagaaatgttatagagtgatcgtttggggtgctaaagatgaagtggagaatcctgcttagcctaccttcattttcactaaggaagcaatcaaagataattatagcatgcatg

SEQ ID NO: 49752 - DNA, 884 bp, Zea Mays
aagctctgctaggtaaacccttcctaatctactctctctgatcacattctcctctctgagactatctgtatattgctgaagagatgcaacagagaatgacgcggaagaagtcgagctacttgtctttggtggaggaatatatcgcttttctagtggaacaatgagatttgcagcaactctttcaattggggttaatggcggtggtggaggaggaggtggtagagaaacatgaaacagatctgaatctgtttgatcaaaattaattatgtgctccttttggttttcaggagacttctttgggagagctgtaaacaatagcacgcaaactttctgacatctgtagttggtgaatataacttagatgcactttgtcataaagactttatacctgctgcagatgaacttagttgatggaccctcctgtccggtgtctcgcctgaacttatcaaataaaccaattacatgaacgcaaaaaataaacacaaagctatataatagtgggatgaaaggtttaccttctttaatatcattgctttgttgcactggaggtggcttgatttgcggttcaaccctatgatgcacccctcccagctgacttctattacgatcgtatctcgactgtctcccttggtacttggatagacaaaataatactaggaagactataacaataaacagcactactccagcaagaacaaaaccaacaatcttgagggttgatgtattgtgtttcctagatgatgaagtgctgtctcgggtagttgatccttcaggataatttgaggttgttttaggcgggggagtagctcttgaaggagatgggggtgctggtgctgggggcgttgaatttgaagtgttaggtgctggtgttagagttgggtcgg

SEQ ID NO: 49753 - DNA, 327 bp, Zea Mays
ttttgggaccttgatagctagcagcacatgaataagaattgcagtcaagagtcaagacaaatttctcccaagtagctcttccagccatgttcataaggggtaagggctgctttccagcagttcttttttctcacggatgcacaaggagtaggtgcaaggtcaggtacttaaccaatcatgggctggtctagactctagatatgcaagttcatccaaatgcatttactctgttgttggaaaagtattttttggagtgacaagtggtttcacttcagtttgaaactgttatggtcgctagatcagtgaaggattagagagggaattcga

SEQ ID NO: 49754 - DNA, 762 bp, Zea Mays
tggatgcatgatgtatcaaagttgaagctggtctattaagttataaatttgttgtagagtgttggtcacgttgctatagaaatctgagaggaatttggccctaaactgtgactgtcagttcatctgaatggagctcgccatggtacagtaacttaagtggatcagactgccagcacagagctctcaccgccgacgactgatctccgctgcgattcgcgtcgctgccgttgtgatttacgccaccggtgaccggataagcctgccagatagtagctcttcgcctaacgataactccggtgactcaccgtcgtgccttcccccttgctcaccgaacccgtggagaaggttctcaccgccgttaagccatcaccggcgtccgccgcgtgtctctacctttccaccgcatcgtcgtagcctactctcactctctgttgatcaccggattaatcgccacggcataggacaccaagccactgcgccagtgctcttcccttcctccgaccgtcgcgcgtccttcttcaaattcgcggccaccgcccactagctctataaattgaagccaccgcaagctccgtaaggtagtcaagtaccccgacacccagtattgcccccagccgatcaccagcgagctcgaattttgcattttccccaaaccggttcgaatacaccgcgaagaacagctcgccgcggctagctcgattcaggtcagtgcaaaccttctgctccctcgtttaagcagtctcatgcgtctgtgatgctcac

SEQ ID NO: 49755 - DNA, 712 bp, Zea Mays
aaacaagaaaaggtaaacattggaatgagcaagcagaccatcatgccaagacaattcaccatggtggaaatcttgtattgtagatggtacaaaacttaaacataatgtttggaaagggacctggttgccaacctggtctgagtgaagatggaagggcactaatgtggaagaagtcaatgttttggcacctatcttattggacagttctagatgttcgccactcaattgatgtaatgcaccttacaaagaatctttgcactaacatacttggtttcttaagcgcatatgagaaggacaaagatgcagtcgaatcacgggaagatttgaaagctatgaatcaatgacaggttcttcacccagaagagagggatgcaggacaacattatcttggtcctgctagctatacactcagcaagaaagaaaatgacatcgtgtttgaatgcttgaattatatcgaagtcccaactagctactcctctaatgtaaaaaagctgataatatgcatgacaagaaatttatgcacataaactttcatgattgccatgttgatgacataattgctttcagtcatgttgaggggtgttttcccgagcaatgttagaaaaacaatcacaaagttatgtgcttttttgaatgcggtgtagtccggagacatgtaatctctattaaccctaatacgtccaggtcgaacgctatcttcctatctctaagc

SEQ ID NO: 49756 - DNA, 908 bp, Zea Mays
cttcaaacgaattaatccaccttgactggacccgacagcagtctccttcggcatctcccagttattcacaagtggccataccctgtaggctatgtgctcttggatcaggtctcttgtaccaatgaaagcacagacattgctgaaagccttctgacatgctttggcatcattttcaatcgccactgtcggcctttgaaggctgaagcgagatcagatggggcattggataatcacctttatgtcctccctttcaatcatattattcttaacataaaaccattcctccatccaggacctgggccaccttttctgaaatgttggaaccaggtagcttgcattagaacgagcaatgaatccataacaaccgaagttgttgtgatactgctctttgccagtggccttcgtctcgtacaacagttcgtgcatattgcaaaaacactttgcgctcggttctagcacttggcttcccacagcccaaacaaacaaacccattctgattatagcttcgagagtaatttgatgaagaaagatctgaaatatcttcaacacttcaaccaaaaatttgctcaatgggaaccgaagacccgccttcataaagcttctgtagacaacaacctcattttcttttggggcaggggcggtgctgtcccctccaaccctcacaatagacatgtcatgaaagtatcttcccttcatggcatcaatttgactttgtttaatggtcgactttccgaagatggtatggcttggccgccagggccggtcttcagaatcttcatcccactttccacatcatagtcatcgctatcgtcagaatctacaaacaaatccgccattatttccgttgtaatcttctctgtatttgtttttgccatagattcataaaacccaagaaaagggtccacaac

SEQ ID NO: 49757 - DNA, 473 bp, Zea Mays
aagctcctagcacttggaggtttgatcaaaattcattaagggatgcatttgctgaaatgctcatagaagatgagttgccctttgcttttggtgagaagtcaggtttcagaaaatttatgtcaaaagcttgcccacggttccaagtgtcatctagaagaacttgtactagggacattgtccgtacatacttccaagagagggccaagctaaagaagttcttcaaagactcttgtcaaagagttagtgtaacaacagattgttggacttcccaacaacaagatgggtatatggctgtgacagcaagttttattgatgagaattggattttgcagaagaaagtcattagctttttcaagataaaggggcataagggggacgatattgggaaaagcttgatcaaaagtttggtggactggggtttggatagaattatgactgtaacagttgataatgcaagtgccaatgatagtgct

SEQ ID NO: 49758 - DNA, 362 bp, Zea Mays
agaagacaaggcaaaaacaagttttatcacacccttcggcacatactattttgtgtgcatgcctgaagtcttgaaaaatgccggctccacattctcaagactaaccaagagcatcctagagaaccaaatgggtcgcaacattttcacatacgtcgacgagatagtcatcgtaagcaaaaataaggaagaccatctctcaaacctcgtagaaacatttgccaacatgtgcgaagctagacttcgcttaaatcccaaaaattgcatattcggtgtccggcaaggcaagatacttggttatctagtatcccatagaggcatagaagcgaacccagtcaagatacatgccataatggacatggccc

SEQ ID NO: 49759 - DNA, 434 bp, Zea Mays
tggacgcggggtgggagacgaggggctcatcccgccagcggtttagacctgaatatgttgtgttgtcttgtttggacaaaactgatatttaggattgagataaggatgaattggacagcaaatttagtggcctcgtccctatacgaaatatcaaaccttggactcctttaatgcttatccactagtgggatctcagctgcctttttctgtctgtagttgagaaaaactgatattttggtggtgtgagacaaaccaaattcattgtatttgggctgtgctgtgaacctgcgtgatagtagtgcatgtgtgccacatatttgagtccctgtggtgctggcaactggggaaagcacttcttcactgcatggttgccaaatcttgtgacacctgcccttggttagaggctataaaacttggttccagtgaagttcttc

SEQ ID NO: 49760 - DNA, 912 bp, Zea Mays
tccgaggttgccgtcaggcacattactcgaggacaataaggtatagaccatgattcgtccgaggccccactcggcggtcactcataactccgcctcgctcgagcctgccctcagacaaggtatgaactcgggaaaatcctcgttcgtaccgagggtccctctccatggaaccaccgttctcgcctcgcctgagcccgtctcgggcaaagaagacaaccccaagccagacctcagtcgaaggccgtaggggacatgagcattcaatacgttcaatatgcgtacctaccccacgcaacgtcgcaggcgaacaggagcgataggaccgcagtcctgtcggcttacaccaattactatgacgcatgcctaggtacaacatctactgttccccacgcctcctgccaacacctgatgggacacgcatacaccaaagcgcgggctgaacctcaggaggaaactacgcctcgcccgaagccggcctcagtctcggaacaaactccgcctcgcccgagcccgacctcggctacccgctccccgctaatctcgtaggaggccactccttcaactgtgttgtgcacgtctacgaatcctggagcgggctcgatcacgacctcgggtagacttctgcatctcccgagcacggcttttcggcctcaatattatcaacaaaagggcacccgacgtcaccagaaacagcagagctgacgtattacccaggggcttttcgtcatactcagcactgcaccaaccactacggcatgggcagcttccccaacaggtaggctcgcgtacgtgaccgagccctcgatcctggcctcgactctctgtgtagtcaaagatacaaatacaggaaccggacgtctccaccgagcacaagtcaacaacgggtacaaaggccataccagctacaggggc

SEQ ID NO: 49761 - DNA, 306 bp, Zea Mays
cttgttactgccggggtgcatggagaattttgaaaggtgagcttcatccaatatcttctttctgagctcagggttcttgggaacaaccaatcggtctccaaaccataggattcctttgctatcctgtcggaagcatttgtatttttctgctttctgcttgatcatttccttaatgacctgaacacccttgtcttcaatctgtgccctgactatttgctcttgtaatgtgggctccaccgagatataatttaaagcacccgagggaacaacttccaggtttagtttgcacaactcatcacatagggt

SEQ ID NO: 49762 - DNA, 809 bp, Zea Mays
gaaaagcagagctaaagtttttgggcaaactagagtactaccaaaccgacccttagaattgtctctctgctgacagtgataggcaagtagtctactccgttttgtggtgaaagggaagtattcaaggacgcatattcagacagtcagtatgatgatgcagggagaaaacgtggttcatcaagctggaagtcagtggtcagagtcaagacatgttgaagggagcaagagcaaatccacctctctgtctataatctgcgtgttgtttcatctacaaatgaggcaggctcctcttcagatgcttcagctccagttccagaggtgcacttgaggagaggtctcggcttctctggtgctcaccaagaaacgacttctcccaaagtgtttggcaggacgtagaagcgtctgctggaagccttgccaacaaaacggagccgaatttttttccagtccgatcggcctgcattgcttgcctaacccccctgttcatctcaaaaggtagcattgtttttatttttttcaagggaacacttagtggccgacacacaaaactagcagtctaacaagggtacagtttccatcgcgccacacatttggtgcatgcattgcttcacactactggcaccatgttgttcgcctttgaagctacggatgatcagaaaagcaaccaaaattaaagaataaaagagagagagagagcgagggagagggaaacaaggcaatgtgggaggggggacaatggaggcagcaagcctttttgctcccatcattcatggtcatggctgtgttggaggcctccatgcatcaggcgc

SEQ ID NO: 49763 - DNA, 1523 bp, Zea Mays
ggcaaactacgatgctaagtggcatgatcaagtcgtgctctagtatcctagaagataggaaagggtgtaaaccaactggaccatatttgtaaaatgcttgagaagacttccattattttccaacaagatttagagaataaaaaatcatttgggacttcgatggtggagagtatggtgacacatatgattttcttagaagacaattacatctcagaagacgaggaggtgtggaactgtgtgttcctagacctaacgtatggggagaatgctcatgtcccctctgtgtatgagcctggtcgtgatatgggttggaattttgaagagtggtgataatgtactatgtgagtgggcagcggttaggttgtagttgtaaccttctgaatctagggccaaacttgattttgtagaaccctatttgtaatgagttgttgtgaactaatgagttatgttcgtaagattttcggtgcacttgtgatattgaatgcaacttgtggtttgtgtggtacataactagtgcacttgtggtttgtgtgcctggctgggatgtttcttttgtcaggtttgcccaacaacactcatttaactgcggaaacatacaaatattgtctgtgtaaagtgatcgttgtttttggtctttagtttgtgctttcaatgaactacttcactgaaaaggtctcggggagtttgtgcaccaactgctttcactatggaattagcaccaacatattttgtgcaacattctgtgtgtgcatagatataacaaaatatggagacgcaatatgtctgtgcacaagtctcgcaaaatagaaacacatagtatgtttcaccaaagtgcaacaacacaatcaggctctgaagattaacacacaactgcaccatcacaaacacttcactaacctttagtttttatagaaaagagacacacacaactgcataaactttagtcttcagtcgaacacactacagttcaaaacacaaactacaccatctgtttttttagaaaacacacactacaactagctctgaagactagaatcaagtttctttttctttggggtaactttcttaacaagcacttcaactatgcgtggtggagacgaagtaattatgtattgatctttagtaataggttgtgatgaagtagcctacatctcctttggaacccaaaattttgtggtgttctttcgtggcttcatcttcctacaaattgtggtacaaagaataattagtaacaatcaaacaaatgaaaattagtacaactagatctaacttagtaacctctttttggttctatttaaagggcacttgtagcatgtttggcggtgacccaattgaccacagtttgggcaagtatactggtgttttagcttgttggcttgttctttatctatgaccttaaccttttcccgctccctccctcaagtcagctctttattctatttttcctttgtcacccaacacctcttttaccgattggtgcacaaacttcagtagaaaaatccgcattatgccgaaaagaatga

SEQ ID NO: 49764 - DNA, 871 bp, Zea Mays
cttgacgaagaaactgggggtgaagaaaaagaggattgtaagcattttgaaaaggcaagcaatcagatctattgaaaaagacaagcaaagagctgcttccaagaaacagaaaatgtcagcagaaccaaagctttcagctcccaaaaagtgaaaaacttcaaccctggcccctattgagatgaaggtgcaagattcactagggaagattgctggaacttcttcatcctcttctatcggcatgacaaaaattctgaaggtaatgactgaatccttcccgtttgctatgctaagtcctctggggtcagatctgactagcttattgtagtcaaaggagaacggggttgaaaaggtgctgaagacgagaagaagactgcttcggcgaccagaggggtgagggtggtcagaagaaacaatatatgatggttgtgatgagggccatccataagaccccacccccgatcacgatagaaaaaattgctgccctgccaatgccgaagctgatgaaatggctactgaagctaaaaatagcggaggccctcttggaaccacaatgtccgaaattaataggattatagctgatgtggttcccgagagggaaatagatgaagtaactaccggcagggctacacccttaaaggtgaaagaattggaaggagcttcttcagagagcaaagatttggacatacgacacttgggtggccaggaactctccgaagaagatatctctgaattgaaagagttcgttatagcgggtagctaacagcctggatccgtgctctttggtggtgttgacgaagaaattctagggtggctccctcatcatgacagtgcaaagattgtcaacactctatcaaagagcattggattcccg

SEQ ID NO: 49765 - DNA, 1639 bp, Zea Mays
ggaagactctatgttggtgtgtaagtttggttaatggtcataaccctaaagttatttggaacttggagtaaaaatgtgtttcatttttctctgttaggtgttgactgcagtttctgtttctgatagcaggaacagcatgttctgggtttcagtcagtctttgggggtcctttggtgttgatcccaggggttatgagttttgggtctcgtagcaatgacttaaggaatgtttagtgagcagttttgttataggttgattccaatgttttatttaggaatttgaagatttcatgggagtaagtcgtgctcccatttgaaaggttaagggctctagaaactagaggtgggttcctccgttgggtgcagtttaggaacgttgatgtgctgagcagaaaaaagaaatcgacggtgggcatcttacgtggtgattcagacttgcagttggccagcacttgcatcgatgtgtggtggagctccatggtatgggcacgcagctgcctgtatcagcagccggtcgtggcgtggacgtgtcaagtagctaggataaagaagttgatagggtcgggaccagggaccagcgcagcaccgtgaaacttctcgtgtgtccatcaaccggtactgcatgtgcccagtaaaaaggatcgctctcctagcttttgctgtcaatgtaaaatgggccggtcacacctcacatcttctatccatgccaaaaaaaacctgtgtctgaccacctaagactgtcgtggccgagtatgagattttgttgctcccatctccggtgagcacaccatcaacgttgcacatcaccgtggctagcccattcagcggtatgtcaggctcagtttgcccgtgttttgtggtcttctggcgcaggttcaccggaacaccaccatgccactagagaacgtcatcgtgggtgttcttcatgtcgacctatcgaaccactctttatccgcgcaaaccaacgtgagtactttgttctagatgggttactgatgcccgtaatggccgtgaattgagcgctgccacgatgcgggcctcagccgacctcgctggagtccgtggtgccgcccccaccgtggccagagacggtgtaacctgttcggatctaattatccgaggagtattagtgagttagcatcggaggttgtgtaggtatgctcagcttcactggagagggcctccaacggcgagcccagccgagcgttggacagcgtggaagtattcaccgtcgtggccaagaaagtaagaataggatgaaagggaggggtttaagtgtgaaggtttatgcacggtgaacagtagactaggcgcggttgggttttgtccgagcgtaaggggcctcaatgcaaaaatcccagcgcgggcggccggtgcggggaccgtttcccctgagttcgtgggccgagcccgttggtttcggcccgtcactgttgaatctttttctttttcttttaactgacaacttgtaaattacactagaaaatgtagaaaatgataaaattgtgaaaccaattttgtaaagtccacaagattgtctagtttgtgctaacaatatttttagggttattacagtaaaaagtaaattattgatcatttaaaggttagaaataaaaccggagtaccaaaaattatgaaaa

SEQ ID NO: 49766 - DNA, 906 bp, Zea Mays
tatttaattgtttgttggcccagaaaaaccaacacgtcttatttgaaacactcaaaatttcaaggatccttgcaaaaaaagatcagcactttttcttggagagctttaccaaggagggtgtaaagcatgcaattgagtatatcgtatcacaatcaaaaaataacagtcaccagaacatgaaagaatattgcctttgcttttacatggaaacttcctcgactgttgaggcatgcagcattgcgaataattctgttacggaactagcaaaagagataaagaaaaacttcttatcggtaaaagggagtaacaaatctccaaataggtttggatttactctcaaaagtgtcagggacttttttgctaggttgaatttatattcctcgacacaccttgctgaaaatcctgatagctgcaagcagttgtctgatctttcaaggagattattgtcagatgaactgccagttacttctaattttgagtttgtgcagagtgggtctatcaaatgtttgtcagtttatctctcaaacggggcatactgcaatgcagaccttaatgatggacctgtacttgagcagcttagtgtggtgcatagtcggttgcataaatttgctaatttggctctcacccccttcaatgaaagttcagcaaatccacttgggattttggtggagaagctgctagacactttgcacatgtgctatggcagttttccggtactgctatcttatgaacagatgtcacgtgaggacatgacgatgattccgctgagatatcctgaggccaagaaaccaacatcattgctattaaaattccataggtcgcagaaggagagagaattgtacaactacaatggtgttcttattgtcgaccttttctcaacaccagatagcaccgaaccaattctat

SEQ ID NO: 49767 - DNA, 1038 bp, Zea Mays
tactcagtgaaatccttctatttggaaaaaaatgtgctcaggttcacgtgccgtattattttttatggaaaccgagattgccacaaaaaatcaaagtgttcctttggttggtgctgagaaataagataataagattctcacgaaagataacctctgcaaaagaaactggcatgggcctgtcgagtgtgttttctgtggcattactgaatctattgatcacctgttctttcgatgccctgttgccagatatgtttggaggttgatccaaatctttttgggcatttcctgcatccctaacaacattgatgagctctttggtgtatggctgcgaaatttcaaaaggatgcaaagcttatcctctttggttgtggggctgttttatggtctatttggagagcttgaaatgactggtgctttgttaataagactttttatgatccttctaatgtgattttcatgtgctgcttttggctggattcttgggcgtcagacaaagaaggaaaaaaggaaggtagagtaaggaagcagactcattagaaagatggcaagtgaagtgatgcgtcgtgccttcggctggtgtccgatagaccgatggatcgttggaagttaatcttcatgtccctttgagctcttggtgcttgtctgtttgtgtgctctttctgcgtttgtctggacctcttgtcttgcctcctcaggagcgcgtttcttgtaataagtggatctgcgactgtgccgtgtgtgtctgtttatgctttaggctgtttccttctctatcgagcgcactcgattttgtttaggtcgcctagcgtatctccttttgttgcgccattggttaatgtactctgttcactcaatccaatggtcgtccttgtaaggtgacttttgttcctatttcttaatgaaatagggggttataccccattgtcaaaaaactctctcatttctttgctttccttctctttttcctaaaaaatggagaattattttgttttatattgacataaacctagtagaatgagccctagacgcgctttggtt

SEQ ID NO: 49768 - DNA, 350 bp, Zea Mays
tacagtcgtgcctacgactatcgcctgggctcctagcgacatgtcctgctgtggttgatgtatgcttgcggctccgacctgacgcttgggctcactcggcggggtcccaattgtttgctccgcttcgcatacttgcttggcagggacctggtcgtcttctccgctttgtacacttgctcggcgaggaacttggtcgtccgctctacttcttaggcttgctcagtggggaacttggtcgtccgctctacctcatggacttgcccagtggggatttggtcatctcagcttgcaggccttgcttggaggggacttggtcgtccatttcacattgcagacttgctcgctgaggg

SEQ ID NO: 49769 - DNA, 638 bp, Zea Mays
tcccaatagcttttgagatatagctaggggtaaaacttcctgagatgttctatgttccataagttcccaatttccatgtcgtccatttgagtgagacgatatgatccaggtcgagtgacttctgctactatgaatggtccttcccatagaggcgacagtttgtgccgtccctcccccgttagaattcggcggaggacgaggtctcctactgcgaagtaccgatgccgtatggccttgtcatgatagcgcctcagtgtttgctgatatcgggctgaatcaccgtattcaatcgttcttcttctagtatatcgacatcctccagtctagtagcttcaacttctgctatgttttcaaagattaaccttggtgccccaaacttgagatcagcaggtagcactgcttccgaaccatagaccataaagaaaggtgtgtttccatgcaaagctcgactaggttgagttctcaggctccaaacaacatatggcagctctctgatccactttcatgtgaacttttcattcttgtcgaagactttctttctgagcgcctccaatatcatcccgttggctctttccacctgcccgttggctcttgggtgcgccaccgaggcatatttgatctgaatgctcttttgctca

SEQ ID NO: 49770 - DNA, 761 bp, Zea Mays
aaatttgtggtctctggtgagcgatttgaagcaatagctggtgcgttggcttctggattatatggcgcaatagccccagccatcaatttatagggggcttaggcggtggcgcgcaatttggccgagcagtgctggtggccggagatagagaagaaccttggcgcagtggattcgtgtctaccgtcgtggcgacttcaccggcaaccaacggggagctagagtgagtcacgatgatgcggtagacaggtagagacacgcggcggatggcggtgagggcttaacggtggtgagaaccttatccgaaggatcagtgcgcaagggggaggcacggcggctagccggagtggcgtctagcgcacgcagtgatgatcttttaccccgcgatgctatccatcaactcccggcacgaatccagtcgtcggtgacacgaatcgcggcgaaggatcggacgtcggcggtgagggctccctgcactggcgtcttgatcctcacaaagcactgtaccatggcgattttcagtcagatgaacctgacagccaatctttgagctaaattttctctcaaactcatatagcaactaatccgggactctgcagcaaagttgttcctctataatagctctacaactttgttatagcaaccctaggtagattctcactggatcatagtcgaaatggctctcaaacttggatctaggtcactgtcagtctgaaattcagactttatcatcctgacagtcgaactttgggcttaattatccc

SEQ ID NO: 49771 - DNA, 415 bp, Zea Mays
tcctcccacgcacggcacgcagcacgctctcatcctcctcctcacgcctcccgccccaccctcacaggccggaaagctccaaccgagaggcctctgtttgtatgtaggacacccagagcgcgtcaagaaaatatacgagagggaaggttgggagcagttcccctgtgtcccgtcccctcatgtgcctatacctgcctgccgattctatcttggccgaccactcccttgtcgtcccaattcaattctgattgccggcgcgcgagtggtgtggtgtgtcgtcttcgtgcgcgtgggaatgcaggttttggaggcaccagcccactaatcgcgacgctccacgggacttgcagctcgaggtaccctcacttcgcttcgctgcagtggtctcagtctcagtttctgttttgtttattat

SEQ ID NO: 49772 - DNA, 741 bp, Zea Mays
gaccggcttctggatggttcagacccctgcagttggtcccgagtcctcaaatctctggccatccgtcaacatcgtggtggtcagaccaccaccttctcctaggggaacttttttaccccatggggatgttgtgccatcctttcggcgaccagcaccatgctcatcacctctgtagccgctgcaatgtataagtacaatggctcccctagctctggagctaccattatttgtagggacacaatgtgctgcttcaactcttgaaaggctcgttctgcctcttcggtccaagagaatggaccggacttccgcaatagcctgaagaagggtagcgccctctcagccagtcttgagatgaagcggctaagggcggccagtgaccccgtaagcttctgaacatccttgatgcgggccggaggtctcattgtcccaattgccttgatcttctctaggtttgcttcgatgccccgatgcgaaaccaggaatcccattaacttctctgcagagacaccaaagacgcacttgttcgggttcagcttcgtgcgtgttgcccgcagcttgtcaaagaccagggttaagtcttccaccagggtcgaccctctcttagtcttgaccacgatgtcatcaacgtaaacctccactctgtccctaatcaggtcaccaaaagtcttactcatcgcccgtacaaatgttggcaaggcgtttttcagatcgtaaggcattacaacataacagtaaagccca

SEQ ID NO: 49773 - DNA, 429 bp, Zea Mays
caggatttgaagcagaaatattggtggtatggattgaagagagatgtggctgcacatgtggctatgtgtgatgtgtgaagagttaaggctgaacaccagaggccagctggactactgcatccactaaagatacccaagtggaagtgggaagagattggtatggatttcatcactggattgcctcgcacctagaaaggatatgatgctacatgggtgattgtggatagactgactaaagtagcccacttcattccggtcaagactactcataaaggctctcagctggcagagttatatatggctcggattgtgtgtttacacggagtaccaaagaagatcatgtctgatcgaggttcatagtttacctcaagattctggagaagctttcatgagactatgaacagtaagttgaattttagtacgacttac

SEQ ID NO: 49774 - DNA, 422 bp, Zea Mays
cctatatatacacactttcattggtgtataaatataactagttacattttcgtatgtagggacaatataagttggaggaggagaagagctatgaagaccctgacgtttgtgtcggtcttcaacgcagcggcctatagaactgtcacgtgtcaaagctgtatgcgtgtatcacaagaaggtggagaaggttgaaatgaccaatgacgaagcagctagaattcatttgacgattgagcagtaccttcagagtgaagtggattggctcatattgaaccgtaagaaatcttttgaaccgtaagagcaagccaggcctctaccgctacagagcagatggacatattgaaaaaggccaacgaatggtatgaattcttccctttgactatttgtttctaaaacatgtttcttattttcttaatgtgtca

SEQ ID NO: 49775 - DNA, 719 bp, Zea Mays
ccctcagggtcgatggcagtatgactgctaccgacaccgaacaaggcagcaacaacatctcccatgtcgtcgacgtcatcggtaagctaccctaactcaacgagctcgtcgttgatggttctagggtaccgaccgttgtcgtcgtcgtcatccataacccccttctcggcactgtacctcaacggccctggcggcactagcacgactacaacgtagtcggctggcgacctaccaaagcccacaagcaagcagcgaagaggagattaggttagggttagggatttgccgactggggagggagagccggagagggacatacctgccaagtcggagcccagagccggagacgagggtcaagtgcatgacgacgcaggagggagagccggagaagaggagattagggttagggttagggattgggattgccgactggggagggagagccagagagggacgtatctgccaagccgtagcctggagccggaaacaagggtcaaccggtcaagtgcacgacgacgtgggagggagagccggagaagaggagattagggttagggatatctagattggggagggaccgagggagagacggagaggggcgagccgcacggaaggagagtaggagacccatcgatgtcgccggtgaagaagatctagcagtggcgacggcgacggtgacgaagcatcgggcggagcgaatcgagtgaggagagcgccag

SEQ ID NO: 49776 - DNA, 436 bp, Zea Mays
acccgactgatgctgaacccaatgggtgtgaccttgatgatgttgaacccaatgggtgtaatctggccaaagttgatcccaatgggtgtaccgtccgcattattgatgaagatgaggaagaggaggaggaaattccctttattcggaagaacagccggcgctacatagccagcggggagagtagtggtgttccttctccagctttgtctgctctcgttggtctgcaagagttgtctctgacaaattttgatcagactctcgaagacaaggtcgcagaagatatgttgtcagagccggcagatggtggaatgatggaagtttgcgctgatgtgcctgatgccgggttagagttatcccgagcagcatctcgtgcctcgtcgaccttggagcgcggtcttaatagccgagaggctgatctggattgctccgttcccat

SEQ ID NO: 49777 - DNA, 964 bp, Zea Mays
ggtggagagcacgtgctgataacgtgttataattcagtggctaaccccgtggagagagacagagagaaacgacaaaatgacaggactgttgtattcatctcatgaagtgtacatatatatacatagtgaagggacaccacaacgggtcgcaccccttggaattagatcacataaaatattttctaacacctggaacggcagaaatccggagtccccccgtatccagggggtgagggacgggtgggcatggtcccacgcgtcggcgtctcggcctactagtataggggtagcgggcaggcggacggggagggcgactggaccgcgggccaggaagtagcagtgctatgttcggtcttgtcccgggcggggtccagctgggttgattgcttgttggcgggcccaattatgagtgacccgtgggcccgggcgccctctgcccaatggacgtgtctggtttggttgtgagagagcagcagcgcattgaagggcgagtatgatttgctgcttccccctcctaccgctgctacagtgccgctgcggctcctcgcgtcaagggcaagaacaagaaaaggctggctggctggcttggcaaagcgaccccatctgtactagcagtgccgtagactgatagtgtagtaggactcgcacgcaagcagccaaagggaacagtttttggttgatccggtcttggtttggtgaaaactgatagtactcctgcaaagcattctattgttgagaattactgtcctgtttagccgtgccagtacgcagcggtgtgtggcgcattgatttggggaggcacgcagcagaagtgcccgtgcagcagcggtagtagcttgggactggactggggctgccactgtgcacgccagttagctccagtacacgcacatttattaagggacttaatcgcgctgcacatggaatgtcttctactcacgctgtccggaatggtcaaaccgag

SEQ ID NO: 49778 - DNA, 428 bp, Zea Mays
tgcattatcaaattaatcttaaacctattaattttccaacatgggatgggagcggggacgcgaaacaaatagcgagggaaagctgggttgttgagactctgtcgcaggccaggccaggcaggcaacgccgatttgaatgttttggataaacacgtagccactatcccgccgaacttgaacaacctttttcctccctatatcttcacaccaatttaaccgtggtgccctttcttcgaaaaccacaaactccgatagcagattgatcgccacgcttcgcttcgctgatggtgcatagccgccgaagcgcacgcgcaagggacgacagcgcaaagctccacgcagcggcgcaggaggtgcacttccttccgttcaacttcaaccccatcgacaagtgcatggcgctcaccgcctgcatcgccgacggcagg

SEQ ID NO: 49779 - DNA, 612 bp, Zea Mays
cgcggagttcaggttcggcaaaattacaaccatgtccccagacctatacatacgagctattgaatgaatcaagggcactgttgtcattttccttcatagttttgttgaacaagtcttgagaatttagccttgcttcgaccagtttctcttctgcgtgtatgcgccgtcgattcgaagcttcaagctttgtttttgtgaccacaacatctgcatgtcatctctagccgaaggcatcattcggtatatgctctgctacaatttaaaatagacttgacaatggttaatggataagcattttgaggaccttcgattaaagagccccccccaacaacaggtatcctcatctaacctccagcaaacatgacaccgagtatctagtctcaaagctctacttgtaatctttattttcaaaatctataacactatataattcatcagttaaaactttgctaaacccacccaaccaaatcaccctcacacctataagcttccctacgtacaccaaacaaattgcacccacaaataacacaccctcaaaatcaacggttcagatcgccctctctccctcccctcatcactcatatccaatggtcagtgttatttggatcatcc

SEQ ID NO: 49780 - DNA, 435 bp, Zea Mays
ggagtatataataatcgtagcaaagcacatacaactggctagtatatagaatatgaagcaataaaaatatatgtgttgtattggtcagatgtatgggcgtgaatgtggagccaacaacgacgaaggttcgaacctctgcttgcgtacatttttatgcgaggagctgagaacctttccgtcggttgagtttgatcaggctgacgggggcaccgcacaattactcaaagagtggagcaaaatgttattttcaggaacaacagaactgcaattgcacatggccatggatagagatgttcataaaacatgagattaatatgaccaatctaataatttaatatagatatgcatagaattcgaagctattttttagtcattcttatcaagaatattataaagtactataaaaaattgtataattattggtgtgcattactt

SEQ ID NO: 49781 - DNA, 469 bp, Zea Mays
ttcggtttggtgtctccagaaagcttagctcgagatacattggaccgttcactatcttggcccgggtgggcagcttggcttatcgcttgcaattgtcggattccatggtagaggtacacccggtatttcatgtctctatgttgaggaagtttttgcgggatccggaccatcaaattgagatggaaccgattgctgtgcagcaggatttaactctggagtgtcgtccggtgcgtatcttggagtcctcagagcgtgtcatgagaaggagatcaattaagtatgttaaggtcttgtggactaatcagtctgagcgtgaggctacttgggaacttgaggagctgatgcggcagaagtatcccaaacttttcgttatgggtgagttttgatgattcattaatctttcttttatcgttccgatagaagcgttggaattcgaggtcgaattctttttaaagggggtagagtgtga

SEQ ID NO: 49782 - DNA, 423 bp, Zea Mays
attccgtacatttgatctttcattcactgtaaaatgtaaactactcaaacgtacgtcacaggaaatcataaccacaaatcgtgtccaatcggggaggtaggcatgcagtacgattacagtgggcgtgggattatcacagatgctgtctgtcatgcggtgaacagctcgagctagcatgtgccaaaggtgacacacggcacctttataagaagttgctgtagtgtcatgtatgcagcagcgccgtacgtgtgcagctaatttactggtggtgatgttcttattagtttaggttaatttgcgttgcgtcaatcgatcgatcttgactgcagtttcaaaaaggtcgttcggtttctttaatttgttgtgacgaataaatgattgatttggtgcttttatcaagattaattacatgcatacagtcta

SEQ ID NO: 49783 - DNA, 392 bp, Zea Mays
agaatttgctttgatgtcattaatcctttgatcaactctcacttcaccgctcccaatggcctctgcttatcctcacgacgaagaatgatgatgaggtgggcccatctattttctagaatagcctattggctaaacccccaagtctcaagcggtccccaccaacccaagaccttgtcctatgactagaaaaagaataagagtggttttgatcgatcactctgatgatgattcgccacctcctcttactatgaggccacaccaatccaagtgaggatgctctatcatccgtatcaacatgcctgcaacacataggggggcaacccaaagcaaacaacgatgatgacaatgatgatagatgatctctcggtcggctgtgccatcgggtccaaagt

SEQ ID NO: 49784 - DNA, 386 bp, Zea Mays
aaagaatcaaatggataaggacaaggggcctaaacttaacgatgatgagtgtgtctctcagatggaattgaaggagatgatgcacgcgatgtctaaagcttttaaaaaataccaggactctgcctcgacatcctatgagcagcttgattgacgagttgctgaacttgttacacgcatggacgtactggaggctcgtcccccaccaccaactccagccccagctcactctcctgtggacgacgacgacgatgacgatgatgtttatgcatcgctgcgacaacgcctcacatgtaatcgacaaggtatgggaggtaatggtagacatcgtcatcataatcctgaaccagaccatgatccatttgctaagattaagttctctattccac

SEQ ID NO: 49785 - DNA, 288 bp, Zea Mays
ggctattgaaagacgaggagaagaacaagacgtatgagataggagcatgagcacaacaaaggatagagttgaagcaagatttgcaaagcgggaagggaggggaaacaaccaaggacgagataggtaaaaccacactctcgaactaaaatgggagagagaatgctttaaaatgcaggtataagataagcatcaaggtaaatgtcaagagacgacaagggttaaaggtaacaacagatagaaacacagcaagggatggggttgagacaaaacttgtaaggcaacaaaaag

SEQ ID NO: 49786 - DNA, 444 bp, Zea Mays
ggatgcggtagcgcatcgaaaggcgtggagaactggtggcggggtaataggtgaaccagcgggcgaggtcggctccaatatttgtaggcgtgacggcatcaacggactccggagcttgcagtcacgacgcgacatgcgcggaggaacgggtggcgcgcgaggaaaacggaggtgggcggtactgcggctggtgcgcgggccccgtgtgacagagaaacagagtcagcgcaagcgggcgagagactgacgggcgggccccgctgtcggcgcgcgaggaagcaacgcaggcgcacgcggtggagtaatctgggccgcacgggggagaaagaggaggtgggccagaattgagggaaggtggcccaactggtttttaattctttttctttttatcttttatcttattttctctatttctaatttcaaattggaattagagttttgaat

SEQ ID NO: 49787 - DNA, 588 bp, Zea Mays
ctgacgggtaggactatagaacttaccgctgcaacctcaagactggttggtggaacttcccggtagtctcagcaccgtgtactagtgtggacatcaactgtatgaaaatgaggttttccagacacatagaacgtgacggaaaaggtaacgacggttaatgtcgattagactattagcttgattttaatctatattggtttctccggtattttatacctttaattcgaaacgaacaacttagataataccgattggtggctatcgatccaccaatgaattaacaccggtgctttcaatgtagacaactagacatcacgatagatataaagcggaaaataaataactatgtaatgctcgtctaactaaacactagaatttattatggcatgaatcaaacctaatggccagagtctcctcagtctctagttaatgcttttttcaatctttgttctccatgtcattctagctcaattctccacacccaacatgcatatgattttatctatgtcgattttttttgcatctttacacctctagatctatagctattttctgctaaatgtgaatcgaagtcatgaagtaatctcg

SEQ ID NO: 49788 - DNA, 294 bp, Zea Mays
ggcaattggtagcctagtatcagttcagacgtcaagtgaaacttgttcacaccaaactgccaatttaaggcttagtccattgtgcagttgtggatgagcctagcttgtcgttctaggtggatgttcaaccttagccagtctccaccaaaaagttggtatattaacagtactttggtacaaggaggataaaatgtgcctctaggatctggtgagagattgttaaagattttgggcttggcccaaataataattcctgtaaatcccaaatgcccactcacacatgcatgttatggt

SEQ ID NO: 49789 - DNA, 1785 bp, Zea Mays
tttggctagtctatatttctttttatgatgtcctccttgccaaaagaatctggaccgaatagcatctagcttctgtagcacactagttgggatttctaagaaagacatcatgaaaatgggtaggctacttaaaacagaattaatcaaaacaagtcgcccccttaggacaggaatttggctttccaattactaagtctcgactcaaaccggtcaacgacacaacgccactcactatttctcaatcttcggtcggtcataggaatcccaaggtacttgaaaggcattgtgcctacgccgcaaccaaagagttgtgagtactgggactcacaatctttagtcgtcccataacagaaaagttcacttttgtgaaagtttatcttaaggccggacatttgttcaaaagcagttataagcagttttacattcctggcatgttcgatgttatgatccagaaacaccaccgtatcatctgtatattgaaggatagataaacctccttcaatcaagtgcggtacaattctgttgaattgatgttcctctttcgctctagcgaaaagcactgccaacatatcagtcacaatgttaaatagaattggtgataaaggatccccttgacgtagtcccttgtgtgttgagaaaaagggtcctatgtcgtcattaactctaacccccacgtgaccttttgagacgatactttggatccatgtacaccatttcggcgagaaacccttcatgctcagagcttgctgaaggaacttccacttcaccttatcatatgctttctcgaagtctaacttgagaataattccatctaaattttcctgtgtagcttatgtatagattcatgcaaaacaattaccccttcaaaaatgttacgaccaggcataaacatagtctgagagggtttaataattcgatctgccaccatacctattctgtttgtgagtactttagtgataattttaaaactcacatttagcaaacagataggtctatattcctggattttcaaagcaatctctttcttaggaattaacgtaataaccccaaagtttagtctatacaccggcaaagaattattatggaagtcctcaaatagagccattaaatcacttttaataacttcccagagaacttgaaagaattctactgggaaaccatctagtcccggagctttattatgctccatttggaaaaccgccttccagacttcctccatagaaaatggcgaagttaaaatttcattctcctcatttgaaacttgagtgatatcattagtaaccgattcctccaattcaatagaagtaaattccggtttaccaaataaacctttgtaatagctagtaatgtgtcttttgagctcctcctcatctactatacttgtacaggaatcatcttctagactgtatatcttctgtttccgatgtttgccattcgccactaactagaagtatttcatattatcatcaccttcaagcatgtgcttaacctttgctctttggaataaatgaatttcctcctctcttagaatgccagccagtcgttcatgaatataagctttcaaagctagttcattaggcgacaggcgaataacctccgcctttttatccagatcttcaattaaattagtaagtttaatttttttttccttcttcattgttccagctgttttttttgcccaccctctgaggtgctggcatacaacccgtattttgttctgtcatttttccatggcagtgcatcctttcatttcctgatcccaaatagaggaaaccatatcatgaa

SEQ ID NO: 49790 - DNA, 425 bp, Zea Mays
caacaatcatcacaaagcaactttcggcaaccagctccaagaggagggagagggggtgaagctttggcagaagactcaataataatactcagccgaggaagctatattacatgttttgtggacaaaacaagggtcatactacaaagacatgccaaataaccatacaaaaacagaaagagctcactgatgtgcagacaaaccaattgaatgaagtcttccacacttcctcatattactctctctgtattccacatcatgtacaacaccaagagtcgaagccacaacctttaggctccattgtttcaacaagtctgtcacccactcattcggtagtgcccttcacatttatcccaggatccccaccatatgagcaagtgtcttcgggccaacctcaattcttagcactagacatgcttcaacatgac

SEQ ID NO: 49791 - DNA, 880 bp, Zea Mays
tcgaaccctcggtcctagcctcggctctcagcagaaatcgggcgggcacaaatcaacagcaagtacaagacccacgttctaggacataccatctacaggggctcggctgtgcctcctcatcgtatgtggccaactccggtactcctgacagccctccttgaggctataaatagggcagcctatggcttcagggaggtgggctaatgcttcacggttttctcctccaccatgatattaacacttgcctaaatcaaccctagtgacttgggatcattccctctcccgctcaacttgtattccctactgcaagcacttaggtgcaagtaatataagtctcatccccctctactaaaagtagggccttctcttgcccaaaccaggataaagacgtgtgtcatcttgcatcacccatctaggttaggggcacacaacattatttcactatttggtaagaccctcaggtccggacaccgacaatcattaacaatcgtaaaattatattagccatatataacagggcagacaaaaggggactagatgggccatgacacatcctaaaccaagctcgccatggcctcgcctcggtctcattctactgttccttcaattgcacgcctaagacagcgcccacgagacccaactgtgtgagtttgccatccatgagcctgagaccacgctaccaccaccgccctatgctcttgccctaacgctcgccaccaccaccctagctctagtgtccaccatggcaaccccagaccctagtgcctgccgccatccctaccctagtggctagcgcttaccattgagacatgccgacaccgcgcctaaccggccagccctaagacattgaagctagttaaaaccagttgatgtactacat

SEQ ID NO: 49792 - DNA, 470 bp, Zea Mays
gggtggtataccgaggcgaaggcaagcttggtgccgatggagaagcagaagtccctgaagtcctggctatcaaactgtttgccattgtcgaatgtgagctcggacgagactccaaatcagcaaacaatgttttgccagaagaacttctgggcagtcttcgacgttattgtggatactgccctggcctcgatccacttggtaaaatattcgatggcgacgaaggtgaacttgaggttcccttgagccgtaggtagttgcctgacaatttccagcccccagcgttgaagtggccatgtgtgggcaatcaacttggtgaactgcgaagggttgctcgagcggggagaaaacttctggcaagcttcgcacgacctcgtgactcgattcgcggcgcatattatagcgggccagtaaaatccttggcggatcaccttggcagcgagggccctaggccctgagtgagagccacaagt

SEQ ID NO: 49793 - DNA, 738 bp, Zea Mays
ctgtttctccaagtaatccctgaatatatctatcatgcatcacccatgagctgaagagatatgttcccacatttttattatcattagccattacctccataaagaaatgaaattttgtcatactgttagctggcttggtcacttaatgagttgcatacaactgacctaacttattgtcacaacattcgccatcattttcagtaacttacactgggtaatacttttgatgttttagaaacacaaccttgcagtgaattgaaggactgatcaggtttggttagcaagtaattgggaaataaaacttgtcagcacggtacaatgataagccaattattctcattaagtgaagctgatgacacaagtagccatgcaggggctatttggttctgtaattgagtgctggtgggctcgttgtaggacgggagatggtccggtttcatagtactttgatttgatgctgcacgggtagtggatatgcctaactgtgttggccaatttttaagtattcggtggcgattaatgcagatctatcttccacaggcccatgatttcatgtgctcaaaataataaaatttagtaccgccatatcttagtgtaacagttctggtccttacactgacttctgggaactttttttaaaggccgtgcagcatatcatctatatgaaagaactcgtccactgatttctgcatgtatgctacattacatagtatggggacaacagaatttgtggtcacc

SEQ ID NO: 49794 - DNA, 557 bp, Zea Mays
aaagtcttttccaaaaggctccgtacaaaagtcacctacgggagcggcctgatcaacgaaagtgcgcggcttcatcacacaaaattatggttacataaacacaacgagggcatcacatattacattggctcaaccttagggatgatacccatctccctgtagttgaacaacattatcctcagttcctcaccctcaaacagatttcgcagctccccctcacccacactcaccccaatcggtgaggacaacaattctcgcttaccagtcccatccacgcgaagacaacccctctccacctcgcttcgacaacgcctaccacttcgcgacaattcactcactctcagcttcgccacagccctccgccgcctatacccagtactcgcgcccgggagttcctcggaaccctccgcgcgcggcgaaggctccgctgcagccacatccagcgccgcaaaaataatccaagtcctcatccgaagactcctccgtccacgcaatcgaactcccagaatcatcagactcagaacatttagacacagagtcaaacgaatcgtcatcag

SEQ ID NO: 49795 - DNA, 353 bp, Zea Mays
gataaacatagcaagtgagttgaggctctagttatatagctctagatacccaagtgctcaaagaatcagacggtgattagcttaggagattttgtgaagtggttaggttagttcggtcacttttgtatcacttgctctaggatatccctagtgattagaagtaaagttagactccctcaacctttttggtacttgtgtataccattgtattataccaagaagggttgtatcttgcgagatcacaccaaccacgtttgtggtgtgacacccaccgtgtaccaaagggaaggaggcctatagcatttcagccaaaagtttgacattagagatagtggggagcatctaagagaggc

SEQ ID NO: 49796 - DNA, 481 bp, Zea Mays
cacgattcacgtttaaccgaaccctagtttcttatatgggtcatctatttcccatccaacgaccggtaacgttttccccaactccgctcaacccgcagcggcgcacgaggacaccagcagcggcgccatcgccggtgaataccaattcgatgtcgcagagatccaaacgcgaatctactcggtgcgattcattgcgcagtaattaggtaatgtaggggaaaggtcctcaccggagctcggtgccacggggttactcgaccacggcacggggcggaactcgccagcagtgggcacgacggcgagcaattcgcccaccacaccgacgctcggctccaatcgcaggagcgtgcggctaccttggacaattacgaccccacatggccacaagccgaggcaaaatcactcgcacagaaggagttcaccggcggcgtgactgacccttcctggcggcgtctggttcactcccgcagagcactcaatc

SEQ ID NO: 49797 - DNA, 894 bp, Zea Mays
ttgaagcacgaacggtggacgccaaatgttggtatcgattaacacgtggtcaagcgggccaaaacactaggaaaatgggggattcatgtgctcaacaaaacagtaggcatggaactgtagcgtcatgttaagtgtgtcccatcaatgtacaatttgggggtatttataggtaaccagatgggtgagtgtgcccttctaagtacaattatgctcctggttacctgctacagccccaaaatatccccccctacgaggtcattatagcgatgttaagtacagcctgatcaaatacacagtaaaccctacaccagagagggcttacaaataggcccaaatgacagcaggacgcagcatgggccccgccattggacgacgcagtcctcgcccgtgcgtggcactcttcgctctaaggcaacgagtattcgatcctcgccaaggctgcaacttggaaccgtccgagctggcggggtcgccttcgcgaagtcatgaggagcccccgctttaaacggtagatcccttcgcttcaatgccttcgatggttcttggaaaagacctcgacctcgataacggtcgaagtaccctttgccttctgtgtctacgatagaacctgtctaattcttgttaaagaaaactgatcgaggggtggggaccttcgctcccacacctatcaccattactgagtgactaattctacttttgtacaaaggtcttcgggatctttttctattatgactctgccttcaacttgaaggacttcagagtcttgtcatccttattggataattgatcctgccttcatacgaatgtctttgggatctttttctattctaagtcttatcactattactccgtgactgatcctgccttcgtacgaaggtcttcaagatctttttc

SEQ ID NO: 49798 - DNA, 829 bp, Zea Mays
gtgtggaggtaccagttagtgtcgacaccatagccatgaatgccatgagtggccgcaacaataatcttggtcttggaggagtatctttcattgaagtgataccaacaatctagggtaacgtgccctactttgccacatacttggcagatcttgttagtgtgctgggattgtgagcgtccattagacgaggagaaagacacacattgatggctacgaccactaggaccatgacgccctctgccccgaccatggccacgacacagttgttgctttcgtgaccttgaccagcaacattagcagaagcttgatgacctccatgaagtagatccatactgacattgaagctgggaggtggctacagtcacggtgacctgctcaacatgggccaccagagttgagactaccagattgtactcttcatctagtcccaccaggatgtacgagaagagttcttcatctatgtttttctttgtagatgtcatctcatatacaagaggcttcattttggtaacatattctagcatagtcatgccacctagggggtcctgtaggttgaaacttgacttatgacttcttgagtcatggaggtcatgaggaaaccgaagacttgctgctcaagtcccacccaccgaccccgtaggttgaaacttgacttatgacttcttgagtcatggaggtcatgaggaaacagaggacttgctgctcaagcgccacccaccgggtgtacttcggattgggtttccctagcgaatcttcgtcgcctttcttggtgttgatcttctcttctggtgtaacaactgagccatcgaggtagccctgcagctgcgca

SEQ ID NO: 49799 - DNA, 301 bp, Zea Mays
ttactaaagccattggaaattccggagtggaagtgggagcatatcaccatggattttgtggtgggcttacctcgttctcctcagggcagggatgctatatgggtggtagtggatcgcttgactaagtttgcgcattttattcccatgaagaccacaaattcagcttcagaattggttcccttgtatatgaaggaagtaatcaggctccacggggtgcctaagtccattgtttctgatcgagactccaaatttgtatccaaattctgggagagtcttcacagtgcattgggtaccaagcttt

SEQ ID NO: 49800 - DNA, 577 bp, Zea Mays
ggtcccgccaatacctagtgggcaaactttgtagttgttcaacctgagggtcatcttgtgacgggggcagagttcaagaaagcgttcagggaacattacattccaaatggtgttctgtagatgaaatgggaagagtttgttcgcttaaagcaaggaggagactcggtgatgcaataccttgccaaattcaaccatctctcccagtacgctatagagcaagttgtcacggacctgaaaaagaagaattgtttcatgaaatgtatgaatgaccggctatagcgaaagatggccacttgtctagatctcacatacagcaaggccatgagcacaacacttttggtggaggccaagaattcggggcagggaaagacaaaaatatttgggcatgaagggggtgaaggatcctctcaaggatctaagaaggggtgaaggttggtgatccgtccctttaacccaaatcactcttttcctcgtccacccgcctatcctttaagttacatccgtcccactgcccctgctcaaaatattcagccgagtgcccctggtacttgtttcccagccctacccagtttatcta

SEQ ID NO: 49801 - DNA, 596 bp, Zea Mays
tggaaatagggaattcatggaatatagagcacctcaggaagttttacccttagcaagaactatcggagcaacgttgtattctgtaattggaaaatacatcgtcaataaaagatttcactctcaaaagcattcaaactattggttatccgtcgacttcgacttgattaaacttggattcaaaacacttactcaacttagggtgaccactataccctactaacggagcaatcggcttaagtcggcaatgacttaagacggtgcaacatgctcgcgcttactcgacttagggtgatcactgtaccctactaacggagcaatcgacttaagtcggcaatgacttaagacagtgcaacatgctcgcgcttactcgacttagggtgatcactataccctactaacggagcaatcaacttaagtcggcaatgacttaagacggtgcaacatgctcgcgcttactcaacttagggtgaccactataccctactaatggagcaatcggcttaagttggcaatgacttaagacggtgcaacatgctcgcgcttactcgacttagggtgaccactataccctactaatggagcaatcggcttaagtc

SEQ ID NO: 49802 - DNA, 312 bp, Zea Mays
ttcgagctaggattccagatcacaaccgcctcattgctgtttgctgcgagacgatagaaatatggtgttgctgtctacctagacataattctgccttgttcttccttctgctgtaacaccttgactatgtaaacttctgccccctcaccatataaacctatgaaacaactttgcaatcgggcgttcggccctccaccctccgggcttgaccggcatcagacgctctccaacgtttcactctccccctccccctgcgtcggctcctctgtgcacgacacttccctccgctcgtccaacggggcccctcgcgcg

SEQ ID NO: 49803 - DNA, 601 bp, Zea Mays
tgcgaatgttgtacaaagagcacggttgttgtagaacgttactttaatttttttctccaagctttagtttagcaagttttttacatttgtttttgccacggcccctcttctcttcagttctatcagctgaaacatttatacttcaactattagttgtgttcctatacctaaaagagaaaaatgaaaactgtgtaaattaatcataccttttttgtagcattcacaatgttttcggcattggatgccctggtacagtccctcccctcctcaaagttttcagaattgggtgccctggcactgtccctcccttcttcataatcatcccttctggtgtgtgaattaagcacaccatttttgtagcattcattaagtcttcagcattagatgctctggcacagtccctcctatcttcaaaataatcccttctgcttgttggagcatcctggttcatggctgcagggcatgtggaataattttcaatgacttagaaaaaatgaaatatcaatttattggtcatgtactaagttatcaggtcctcacattttgacttctttggatgtctctccttattcaggaatcttttttttggaaatataagttc

SEQ ID NO: 49804 - DNA, 548 bp, Zea Mays
gtcaaaggcagcagtcattagttggtcctccttcttcgtataattaccaaggatttcgttgcacatagtttcaatcatttccagccactcttggcatggtttcttgaactctttctcaaacttgaaccagtagggtagctgaacaagttcatgcttcttgctcgcatccttcttcttgggcatcccccagccactagaggtcgggaataccatgtttgccaagaactcttgcaccaaatccctagtactaacctcgaccgccaccactctaaactccactttggctacttggcatggggagccaagctgcatgtggcacaagggcctcgttattccgaagtttaaagctagtggactcataaccatactcatcagcttctccctctttttctcatctgctttcatgtaaaaccattcactcttccagccagttggccacttggtgcggtagctaagaactggtgcctttgtatcctttcgatacgcaaaattgtagcagccaaaattttcatgaaggccatctgccctggccttcgtctggtaatgca

SEQ ID NO: 49805 - DNA, 557 bp, Zea Mays
agccactcacccctagtcaccttcagcatttgagaagatgattcccggaggtcgggcgaagtcatgacctcctcagacctagcgcacgcctccgccaactcctcaacaaaacacctcgaggcctttggactcccaataccctcatcatactttcacatccattttccttttccgggtcaccgcagttatagccttccccttcgtgtgcccaggtcttcgccttcttccctcggtcatccctggcatcggcatagcccccctctaggaatggaccataccgcaggacattcaactcgaaaactcgtttcaacctgacatacgagcctcgtatatcccaactccttgttagctccgtcttcgttgagtatttaccgacaattttcaccacctccgcttccacctccctgataaaggcggtcgcatccctccctcatagctcaatggcgaaggcgaggttctataccatccgattatttaagaagggcatcgggcgcagcttgacttcacctagatcccagtcgtgagccagcggccacacaccgcatgcaacgaattcc

SEQ ID NO: 49806 - DNA, 1975 bp, Zea Mays
gtggacgtgaagaccctgctgatcggcccatggagtctggtgtcgcctgctggtggcccaccccctagcacctaagctacttctctcgcctactctgtcttgtaataactcccttggacacgatctttacgtgacatgttgtatttactttgaaccttttgctcttcgaatctcggcctccgtggcgcctttggtgttcatagatttttgtgactatgattcctcctatgttgattagcgtgattttttggtaggtgtagacctttttaactgcttctcgcgaggcgcggcggcctggctatctgggtgacttatttgtagtaccttcagtgaaagcagtcttggtcattggtgttttaggtcgaaaaaattcatcttccatctgacagggtcttatgagggcaaaatgattgatggggacgtctgatttctttcttgatagatacagggtttgaggcaccaaatcgattgggtccgacattccttacaaagactatctgctatgtgttcccacatgagccttccctcgcctttctcctgcctagctacgcttcgatccacacgcgctttgcgatgtccgtagcattagacaacacattcgtcttgatgccatgttcctcagagtggtgctccgagagaccgaccatcatgcaggtgagttcacatttcacttgctcgcaagtgtacaccattttatggatgcagaggccgtgatgatcccacgtggtcctggcatgttcagctttaggtatgtgtagtttggcatggccatgacttggcatagcatggcctcccgagtatggcattgtaagatcctgggaagtccaccacctcaaactataggcgttcgatctggaaattggctcggtcgccgaacatgacggggagagtgattcacccaagggggtaggcctgatggctgggtatgatgtcgtgggatggcatcgtgcttggtcgcagcgtgcagcgtgtcatccttagcccatcgaaggtctcaatgtacatgatgttgagtccacttcctccatccatcagcaccttggtgaggtgcttagagcctacgactggctcgatgacgagagggtacaccttgcgatgtgggatgctattgaggtggtcacgctggtcgaaaacgatcgaaaattttgaccaccgaaggtatcatggaactaccaactctattgcatggacttctcaatgagcggccgtgatgcggcgcttatcgccataggcctcggccccaccgaagatcatgaggcaccctgttggttcagggaaatctttagcggggagctcctactttgttggttttgtcggctcctccagccttgccttcttggcgggaggtttggagataaagcgcttcaagagctcgcactctcgaagcttgtgcctgatggggaagcctagttttgacatgacgagtccatcaacttctggaaatggtcgccaccattctaggctggtggcctgggtggtcgatctgcggtggtgaattcctgttcatcaagccgaggacgatggttccttcggtgcttgtcggggtgctctcaatgctccctcctttctccactgggctcgccagcgtcccgcgggccctttcccatgtggaaaatggctcccacagcgtcctccctgttagcgaacttggtcgctatgtcaagtaggtccatcgttgttcttggtcttccctggccaagctcggggacaaacgcttcatcagtggtgccataggtgaaggcacttactatgtctgcgtcggtggtgtcggggagctcgttcctcatctgggagatcctccgaatgtagtcccttaggctctccctgcttctctaggtgcctagaatgttttcgatgacatccttatggaggtcggcctagtcacggacggttccaatcaccaagtgttcaagccagactcttgctccctctactaggtgtatgggaaggaactgcatgacgaggtgatcatcgt

SEQ ID NO: 49807 - DNA, 678 bp, Zea Mays
tctattgcctggattattgctatcgacggacgatacatggctgcggcggcatgattaagaggccacgcgagcgaggaataattagcaacagcgctgctcagctcgagtgcgcccgaccgggtctttaagcggcttcggagatctggggattttctatcccacaagccagcatgtggggtgctcggttcactgcgcttgttcgttctagtgcaggagggggtgggaagggaacgggaaaagagggcgcgcttcattgaattcagccagcggccagcgcggagctcgcacgtcatggcctgcctgcaggcgcaattcattcccttgttgccctcatgcaaggggcgaaatgatgatgataagctttgcgaccatccatggattgggacacattttggtgtttggagctgtaggctgtagccggggaaaaaccttgcttggtggagcagtggcgacacacatgcccactttgagagcaaatgcatcctttgaaaagagagagagaggtggtggtgagtgttctctgtccatcttgactcagtgatccagagcttattatgccagttaggctgttactgctctggagactatgcgagtgatgtgacgacgacaatttttagagtactagtgtatactagctagctcttattaacatgcatcacgaggtcttcctatgctaga

SEQ ID NO: 49808 - DNA, 571 bp, Zea Mays
ctttatcatacctttccaacgagtacttatgtgctcgattcggagttatattttaggagatatcgttgtttaaatccgggtatgttgctgtccaaaaacagattgcagggttcatcttgtggactgttttgggctaaagaagggttggaatttaattatcatttgtatacaaaacttgtgggtaattttatgtagatgcttctggagtttttgtttgttaccattgctgtcataattttaaagatatgaaattgacaagcagtgccgctgcagttggtgggtgatgtgggtgataggtcgcttgcgacgggttggaatcgtgcgtaggtgcggcgtcgtttatgagcgtttgttatgtgaatttgtgcactaaatggtgtgtcaaaaagaggtgatggacttccggatagcacttagggctttgtccatgttccccgatgaaggcaagtaaaatagtgatggttattccgttggtcgattaatgtgtcttatacttgattatacttatgttatttgtgtttgtactcatattccttgttggataccatcgtttgaagatatctatgttcta

SEQ ID NO: 49809 - DNA, 1269 bp, Zea Mays
cgcttatgaagacaatatgaattatccaaatagtgtgcaacaacagaaatgtaactagtcttttgatgtgatgaagtccaaatatctgaagttaaagcaaacgaaaactgaacttttttaaaattttctttaagaacagcaagttgtttgtgatactgagacatcaaatcagattttatagtagttctactaacaggttggtattgtgggcagaaagcacgctgaatcagattcttaaaattagggctttctcccatcataataggtaagtgttcagaaacaatgtatttaataatttcttcacgagctagttgaggattgtaaacccaagtacttacagtgccgtctgcggcgaagtttagttgagtttgcacacctgtaccaaaagtttgccctgccttcttcatacaagctctgaagtgtcgattcaaatgcccagtgccaccagcagaatctgcactcaactcagttttacaatagtgacatacagcaatataactttttataccattctcaacaatctctcgcttatccatatgcttccagcactctgcccttgaaacaattggtttagcaccctttactggcactggcacatcaccaccaatatccccatcaccattagaaacacctccagtaccatttgatggtactggtaaggaaccatctatcctactacgaccaggtaagggacatgaaccaggtaaggaactagaaccaggtaagggacatgaaccaggtaagggactagaactaggtaagggactagaaacacctccagtaccatctgatagttcgctaggattgctggaatcatctatcctactaggaccagaagcttttctaacaactaacctcttcctccccattgtagaagtgtagaaccagacatagaaccacaggatcggggtactggatcggggtagagagtaccactgagcagtagcaaaaaaaactggggtactggatcggggtagcgactagcgagtaccactgagcagcagaaaacaaactgaaactagggtactggactactaaacatgtacgagcagtatgagcagcatgagcagtatgagcagtatgaactagtacgagcagtatgagcagtatgagcagtatgagcagtatgaactagtacgagcagtatgactgtatgagcagcaacaactaaacatttgtagagcacgacagcaaacattcgtaaagcaattactgctaactcttgggaataggcacgaatgcgaacgggccgaacaagaccacttttcc

SEQ ID NO: 49810 - DNA, 378 bp, Zea Mays
aaggtttgagaggaagaaataaaatggtacaattatgtcgttaaatgacccccggtccctaggatccaccagtcagagagtgtgctagggaagggagcccctgatcgctatgaccctccggtcagttagaagagacaggtgcgccaaccctagaaggacccgctcctggtcgaaccctatggcaccaatcctgggggcaggcgtggcggagcctgacaatggaagtcaagcgtatcagaagggaacgactcgagtggatctcgtgccctaccgtagactgacccatcataaatgactagccgcattaaccacacctggcaccgagccacagtgtgggtgccggtccgcttcccactcatgacctacggacccctcgag

SEQ ID NO: 49811 - DNA, 861 bp, Zea Mays
cctgccactaatgactgcaatttatttcatcagcaaattcaatcggccattaacgagggccggttaaattaaaggaaatgcaggtagataagcaacctttccctatcaacactatggatttagatggtaaaaaggtcttggttcggacgggggtggccgataatgacaagggaaaaggcatcctcatcggcgaacctcggtcctcgatgaaaatagaaaaattcactctagtgaagtaatttatgaaatgacgcaagatcggggaaagacgttgatgatcaccatcaagtcctccaacactgggggaaggcgcagataggtgacagggctaaggccactgtcctgcgtatcgtggatgatccgaactagagacggacggtccagatctccaacggatagtccagccagcatggacagacggtccggcagtgaacagagtcaacagcgactgtgtactttgaaaccttcatgacctgaaataggtacatggaaacaaaatacagctaaagcaactggtcggttgattaaagctggccctacttttgaccagctgttgtccaaatatgtcaacaagaaggatggtcaccacgatcggccgtgtaagtgacctcgctcgcctggccgagaaagacaagagaaagtgattggaccttttcaccaagcaaggccgaataaattggctcgagacattgtccaactagcgccacaaacacgagcaactctaataccctcgtacatacacacccacaccatatgtcccaaatcagatgtggggcatatgccatcatacccttatgcgatgcaaccacaccaaacttgggggcacaacaaacatctgtggttgataggctagcagtactg

SEQ ID NO: 49812 - DNA, 835 bp, Zea Mays
aagaggtcacgacactattcatgtgtctctctgacatttgcgtaaaacccctcccacttctattccttcgcaaacccaggtcctcgttggcgaacggcggtgagcgtgctctccagcgagcttgtatcggccaggatgcgcaacgactgacgccctaactcgatcgacacctattcctacccgtggcgatcataatccctccattaattgcataaatccgggccagaatttgtctgctcacgatggcggtgagagccagagacaaaccgaggtgttcttggtgattcagtgaggtctagctcaatcaaacgggtctacgagcaacaggagacttaagggaggctagaacatgaagtagaaaagcttgaactaacctgtagagggctggccacgatgagatgtctcacggcggcgttccgaccgatttgggggaaatttgaaatttgcgagctacagtggctaatcggaggcgagggctggtgcactgggcgcgtaacaacataatggagctagttgaacgctcaatttatagtgatcatcagtggtggcgctcaatttggggaagacacgcgggccaccggagagagggggaggtcattggcatgagttaccgtggcattcactagagcaacgactcagatgatagacatgccatctattgcgacctacggcgatgtggtaacaaggtagtagcatggcgtgctcgggttaacggtgatcatcactgtgacggccacgcggccacgtcgcggtgcaactggatgcggtgatagagcggccatagtgccccaacttcatcccgtgccaaagatctttcaccccgagtcgttatccg

SEQ ID NO: 49813 - DNA, 811 bp, Zea Mays
acccgcgaaggggtaagtttggatcacggccattcgttcaaagatgggcgcacaggattagatcccatgtgcgccgaaccggtacaccacgatgaccaccggatttagatcccacggtctagatctaatgacccgtggacccattccccgccactggattctcatccaacgatctctatacgccatggccgaaatgttatttggtttctaatcccgaccatccaaccggggatcgacggccgagatcgcgcataccaatatacagtgagcacggcggcggtggcgcactggtgccgcggcggatagctcgccggcggcacgcaatccggctaatcactaccccatacccaaaattggaccgctctacaccacgagaccgacatggtgaaggtaggagtggagttctcacctgcgtttctagatcgcgtagacgtgaccacggtgcgcggcggatccgaggcggtggtgaagctccggtgaagaattcgccggtgtagatcgcccccaacccgatgccggtgcatgcacaccttccctgggtcctagcgacgctatccgaccgaaatcccggtgcggggcgcgagcacagtaggggtctcaccgttggcggccgcgaaaattggtctggcggaggcgtggattcgacggcgacgaaatcccgggatccccggtcaccaccgcacccaaggacagctgcgccctcacccgagaaggttctggggagctttagcacacgcggcagagtacaattccgcagcaccccagtgtcaatcggaaacggcggcgatagatggctatggcggctcccggc

SEQ ID NO: 49814 - DNA, 462 bp, Zea Mays
cgaagaattcaaagctggtgaagttggatcccaggtcggtaatgatgctatttggtatcccaaacctaaatattatgtcttgtatgaattcccctgccttggctgaggtcaaagaggcaatgggcttgtactctatccattttgtgaatttgtcaatggcaaccatcacgtgagtatagcctccctgagctttcttgaaaggtccaatcatgaccagccccagcatgcaaatggccatgttacaggaatggtctgcagctgttgtgcaggtaaatgttgttgccttgataagaattggcaagcttcacatctctggactaactcggcagcatcactcttcgctgttggccaatagaaaccagatctgaaagccttcctgaccagagttctagatgttgcatgtactccacactgcccggcatggatttcatctaacagttgcttcccaatagccgagtgaat

SEQ ID NO: 49815 - DNA, 436 bp, Zea Mays
ctaaactgtaggtacaaaaaataatgtgacatgataaaatactatatttgtgtgtgctcgtactttctcccgtgcataatagggggtagggagatggagagcaatgacataatataggtgcttctacagttagtgagagatgaggaggagctttcttatagaacatgatatggatgtttcactacggtgaacttggtggtgtggccagtcgcggtacttagcttgcttggatagtaagcttgggaggacatgggaagaaagaaatcatgtagtagggttggtgaagcagaaaagatcctttggtgtatgagaggtgaagaaagaaattaggatttgcggcatgtgtaggttcaacgaatgttgtgggttgattaggttgttcttcgtgaagtccaacatattttcttcttcgatcttgtcaacaaaagatcctttg

SEQ ID NO: 49816 - DNA, 462 bp, Zea Mays
ccaaattattggggcttcaatattcggttgtgtacaagaaaggtacagataatagggttgccgatgctctctcccgcaaagtaacacatgatgccagttgtgatgcgctgtcagccgcctctcctcagtgggtcgatttagttgtggattcataccagcaggaccctttggctaaggagatgattactaaactttcagtgaacagtgcatttgttcctcatttcacactgagccacgggttacttcgttacaagaatcgtatttgggtcggtgatgatgacagcctcaaacacaagttggttgaagccttccaccatagccccattgggggacactctggcgtacctataggaatctcaaacaagcgtttgcttggcggggtatgagatccttcgtccattcttgggtgtcctcttgtgtgacttgtcagcacgctaagccggaacgttcacgccaaccagg

SEQ ID NO: 49817 - DNA, 433 bp, Zea Mays
aactatggtttgtcccaaggctatcttcaccagttcgtcagcgacttcgttttatcgtcgtgcaatgtggttgagctctaatccgtagaacttgtccttcatgcatcgaacttcttcacaataggcctccatctttgggttgtggcaactcgagttcttcatgacctggtcgatgatgagctaggagtcacctcgaatgtcaagatgtcagactcccggctcgatggcaatgcgtagaccatttaccaaggcttcatattcgactacatttggtccatagctcagtctggattggggtcattggtagttgagtgtcaatcaatttggccaggaaatctgtcaagttttgagacttgatagcctttcgagggtgaacgagagtgtttcccccatgagctccactgcccatttggctattctacctgaggcttcc

SEQ ID NO: 49818 - DNA, 482 bp, Zea Mays
agacaaatggtgtcacaaatgtccggagttcagacttctgagcaggaagtcaaagctaataaaatgctcgattttttcggtgcgcagtcagtaaatctaatacagtataatgaagaggcaagtcttatgccgcttcctttcaaataaaaaaagtaaacctacataccgctatgcttgctgctagagactccgctttagctcgtgcacattccgtacgaaactctattttacaccgtacattgcgccgttatatgagtgcttcatttcaccgattctggttcctgggcagtgggcaccggtccggccgatgaatgatttacagatcgtagttcgcaccgcggatggacggatggtacagcgacggcgttggatgctcggtgcaatgcagcagcggcgaccacaagacggcaagagccccggacgcagaacaatagagtcgatgtggaaacgaaacgatggcaccgtggaagcgaggcgcgatt

SEQ ID NO: 49819 - DNA, 682 bp, Zea Mays
caaaggatgaagttaaggtaagacaagacttgcaaagcgacaaagggaaaggaaacaaacaagagcaggatagggaaaataacactctcggattgaaatggaataagtgaggctaagaaatatgtaaacatcatggtaaatatggagagaggtcaagggtcaaaggtgataataggcaaggatataaagaaagaggtaaatgtgcataaaaaaaccaggaatctaggtacaatcaagaatagaaataagataagtcttgcaagaggtaaagtataggatataaccacgggtgagataagtaagagaccacgcttgaactaaggtgggagattggaggttttagataacgaacatagcgtaatcaccaaggtaagattgagagatgagaagggtaaaggcaataagaagcaaaagcacaacaaaggatgaggttacaaacacgcgagccaaagaagaggatacgaccaaaagaaagaaggtatgagacagaagaggggcgaatttgaagggcaggtatgagacaaacatcaatgtaggatataaaggtgtcaagggtgcatatgataataattaaaaagcataacaaaggatatagttaagacaagactcacgaaacgacaaagtggagaaaacaatcaagggtaagatcggtaaggttccaacagaagggttgaagtaaaga

SEQ ID NO: 49820 - DNA, 1090 bp, Zea Mays
ggattttagccccttcaacccccttcaatattttagcttccaaattagtccttagggagtgttagcctatgagttctctcctccttcacatgtcttgtctagaacgtttgactaccttacgtctatggatcatggctcgtgggtccttgttgtttttggaaggggcaggtggttggacgtctctaaagtccttcttattgtacctaccttgtacgacacacgtctagctaggagtgtgcatcaagtggtcagagggccataaatgtgtcaaccatacatagagattcatggtacctctgaaccgcgacgacatagagttttatcaaggttatacgatttacattgatctagcttagggcgacatcagttagatctgcttggtcgggatgactaggccgaggtcacttgggacgaccaaggttgggatgatcaggtcgggacaattttggtcgaagccgacctggtagatgtgactaggtcgaagcggttttagttgagggttgtcctagttaggaccacattagattgtgctcttctcttagaatgggcttttggggccatattgggataccttaatttggtatatgtacacatcactcataaagttattgggtcattccctaaccctatgcagtttaccgccatgagttgcattgggtggctgaacatgcaaccccagtaccccacaatcaaggaaagatcctcttccatctccatctccacagcaagggatccatcctttagcttagaattcttcacgccacactccgcactagcatcctatgccatacgcttacgctagtggcaaagctagagtgaatcagaggagtgtgcaaatgtcttgagggtgcatagtgctaacatataggtggtgcatatatggtgaaaatttggtctaaaccactgattttattaattttcgtgggtgcatatgcatctgcagactcaaacctaacttcgcccctggcttaagcaagctagatagagagccactggtcttgtttggtataacttatttcacagcttcttcatgaatttaagtagaagttgtaccatacaagacgtttctatagcagcttattagtgtaac

SEQ ID NO: 49821 - DNA, 1575 bp, Zea Mays
atgtaacataagttcacataataatatcaagggaaataccaacctcccataataacaagttctaagatgacacgtccataatcacaagcacacaatcaactaaaaccacaagttctaaaatggcatgtgacaaccacaagcacacaatcaactaaaatggcatgcccacaacaacaatgacagaagtgtcactctcaatcccccttccatttatgatttctcagtaatcatcatccaaatcatcaatatcagtaaccatcatctcaatctccctttcttgctgcggcggatgacaggcacaagggcgcagaggcgacaggcgggtgtttatacgcctaaagctagtgctttacgctttttgtgaaacgttttagtgcttcaggcacttagcagcgttttgacgcttaaaagacgcttaagcgactttttaataaccacgctcagtatcttgaaatttgacctgcccccataacatgtgtaggctgaatcagttcatattgacaatgccactcaacaagtaacgaattgtgtcatgctgatccaaaacattactagccaatgccagaacaattaaatatgaaatttcgtcacaactttggcatataacacaaaacaacaagagttcagtactaaattgaaaaggagtcttattcttaggtatcattaggacaaaatttatgaactcattcacttctaaaccttaagcaaatcaaaagagaagctgtactgaactgctgaaaaaaattgtgcactcgaatgctttatccaccagattttaaactgataacagaaggcacttacttctaataatcatatcaactatagaatctcgagtacaaaaacaagtagctaatatgttttgccagatctactccatttcgaaacaaatccacagcggaaatatggcaaatcaaaagggcaagatacagccaaaacatgtcacctgcttgtacttcttttggcgacgtccatcagcggtctcgatgacgaactccgtggagaagatgttagtgagtttggcgccgtatccgttcctcccgccggttgtcttcttctcgttgtcgttgtagttgctactggtgaggaggtggccgaaaatcatctctggcacgtagacgccctcctcctggtggacctcgacgggtatcccgtcgccgttgttgtatacggagatggagcagccgtcgacgtcgatctcgacgcggagcgcgtccatcttgggatcccgctgcttgttgtcggcggcgttgacgaggatctcgtcgaagatcttgtagagtccagggacgtaggtgacggagcggttcaccatggcgccgtcctcgtagacccagagcgtctgggtatgcttctccaccgagccaatgtaggtgtcagggcgcagcaggatgtgctccagctgcgtcttcttctggtacatttcctcgatggtcttgcccccgccgccggcggcggcgttgtggccggagctggagtgtaagggacccgtcatggcggcgatgcgctgcacacggaggtcgtgtgcctgcgcagctgcggtagggttgaggggtgcgtgaggcgttggggtcttgg

SEQ ID NO: 49822 - DNA, 408 bp, Zea Mays
cttcattctggtccaccagtacaaggatctgagatcatgatacatcttgttactgtcggggtgcatggagaatttggaaaggtgagcttcatccaatatcttctttctgggtttgggatttttaggaacaaccaatcggtctccaaaccattaaattcccttgttgtcctaatggaagcatttgtacttgtccgccttccgtttgatcatttccttaatgacctgaacacccttgtcaccaatctgtgccatgactatttgctcatgtaaggtgggctccactgaaatataacttaaagcaccgaagtaaacaacttctatgtttagcttgcacaactcatcacacagggtggtgatttttgcatccatattcacacagttacactgggccttctgacttaaggcatc

SEQ ID NO: 49823 - DNA, 434 bp, Zea Mays
ggcgtgagcatgttgcaccggcttaagtcgctgctgactttagtcgattgctctgttagcagggcatagtggtcaccccgagttaagtaagcgcgagcatgttgcaccgccttaagtcgttgtcgacttaagccgattgctccgttagtagggcatagtggtcactacgagttaagtaagcgcgagcatgttgcaccgccttaagtcgttgccgacttaagccgattgctccgttagcagggcatagaggtcaccccgagttaagtaagtgcgagcatgttgcaccgtcttaagtcgtggtcgacttaagccgattgctccgttagtagggcatagtggtcaccccgagttaagtaagcgcgagcatgttgcaccgccttaagtcgttgccgacttaagccgattgctccgttagcagggcatagaggtcaccc

SEQ ID NO: 49824 - DNA, 335 bp, Zea Mays
gaacccttaggatccttgtcaaggaaatgaacctcggtccctgggacccgtcagtcagagagtgtgcagaggaaaggagcccatgatcgctggggcctattagtcagttaggagaggtagatatgacaaccctaaaaggacccacccctggttgaaccccgcggcactgagcccatggtcgggtgtggcggaacctgacaagggaggccaggcatgttggaaaggaaccactcgagtggatcccacacccggccctagactgattccccataaatagccgaccacatttaaccacgtctagcatcgaaccacagcatgatgtcagtccacttccc

SEQ ID NO: 49825 - DNA, 543 bp, Zea Mays
ataacttatatatgtctccccaaaatccttctgggctcgacagcaaacttgtttggcgagcctcactggccttatgaggcactcaccgaaaaagtctcaaagatgtcctccccttttccgggcaatcacttgtggacgcatcacttccttctgattggatgtctggcgctctagcaaagacttcgccactccattcccaaatttctacaatcatgctcgggttaaagatacaagtgtgcacaacccctgggacacctcttggttgtggctttggatgagtcacattccctccaaaaccttatatccggtgtttccctcaacaatgggtctgatgctcatcgttgcttcgccgctgatgccgatgggcagcttcggtacaagatcatctactcccggctctcgacatatgaccgctctgacagccgagtgccgcgcttcatttggggcaattatgccctcctagggtgaagtttttcacctggctcgtgtcccacaaccgtctctagagccggaacaacctccacaaaaagaagattgtccctg

SEQ ID NO: 49826 - DNA, 806 bp, Zea Mays
cgcggcgagacgaaggtagagagtctccccagtgtcgtcaggtgctacattggttagatcgtcgtgccacagagagcaaccgccttggccgtaggaatatgcagtgcaagagcagctactcaaacaagacccctcacacgatttcgcgctcgtagcgttctgtatacccatgccattgctgggcagcctactaaatggcatgggatagaacctatctgccatgcttgtggcgttgcagtccaatggagtgtctctgatgcacccgccagtcctgtcctccatttcccagtcctcaggcgacctcacagagaagcccttcatgcaggagcacaccgggtctgcgttgctagagcagaccgcgtaggctccacagacagcgtagacgtcgcatttgcttctcggagagtagctgaacgtgatccagtcgtttctgtcccagtcccacacgcgcaccatccactggccagagacgtccagcacgacctgaaacgccgtgctctcgtttaccaaggtgtaggagaagtagaactctgggccactgctgacgaacatgtagttgcagtaggagggatccgacatctccggtatcccgttgaagtacctgccgttccactcgccggaggaccagtactccgtagaggatctccacgacagcctcatgctctcgtcaacgccgtcaggagctaggccgatggagtaaacgcctggagcttggtcgttcgaattccttcttgaaacgaagcggcggtccaggccggtggccttgtttctgcccagcttcgcaccgggcagcagggtgtcggttg

SEQ ID NO: 49827 - DNA, 518 bp, Zea Mays
aatgcttgggtgtcgtccatgtggctcacccattgataaaaatcaccaaacttgtgccgagtcaggtgaccctgtgaatcaagaaagatatcagagatagtgggtcggttgatatacctttgtcatatgagaccagacattgcttatgcagtgagtgtggtgagtaggtatatgcatgatcctaggacaagacatatggaggtggtctatcaaattccgagatacctgaagggaaccactggcaaggggttgtggtttagagcgaatcaacacctgaatctggagggttactgtgatgctgattgggcaagcagtagagatgatcggagatccacatctggatactgtgtgtttgtgggaggtaatcttgtttcatggagaagtaagaaacaagttgtggtgtctcggtctactgcagaagccgaacatagagcgatggctttagctctatgtgagatgatgtggttgaaaggtcttctgaaggagcttcgggtgttgaagaatgagactacgttact

SEQ ID NO: 49828 - DNA, 409 bp, Zea Mays
gaattttaaaagaaatagatttggaaaaatttagacagacggaggcagacacgatatcaaaatcgtgataaacgaggttgattaaaaattagtgacctttacattcatagctatcacgtgttaacgtccgcactagtggtcgagcagacgataaacacctgggtgttacaattggaatattggagaagatcggcataggcggccacagtatcagaggacgccggacgctagcaccaccgtgatctttgtggttgctacttctccgctgatgtgctactacattcgctccatctagtattcttaggtgaaggactgaaggtatgatccgctgcctaactttttgcctcccatgtgatcttgcatgttcatctaatttttattttttttctttgacttgcattaatcaagc

SEQ ID NO: 49829 - DNA, 430 bp, Zea Mays
taaattattaccgttatcatttacgttcgtgaaccaaacagcatccaagttctgtaatatgcgagggcaactccggtaggacctctaatcgaccccccgagatgctttgagtgacaattatcttctttaatgaaagaggtatcattgttgaaggctatccaactacgctgctgcgcacaatacacaaatcgacaagatgtttaacaagtttatcatcatcggtatcagacacatccgcggccctcgctgtcccattccgcatcaagcgcgtttatcggcggatccagaaaaaagagcacggtgacagatacgacggcgacacaaacccattcacgacgcgatctttatctctgcgggcgcgcagcaacaaaagggccccggacccgctgacgcgcaccgccaactccgagccccgcgtagccgcacacgg

SEQ ID NO: 49830 - DNA, 516 bp, Zea Mays
ggagtatcgtataggaatccataaacaaacgaaaacaaagattactgcgttgtcaaatgtagccgtacggtacgtgcctattctacgccttgtccatacagattacccaggtgggcgttggaactggtactagtgtcttttcacatggcctgcgcgcatacaccgctccgctcctctggttctagttttgagatgttaccatgccatgccggtagactgcacgtcaagaacgcagaggcgaagacggtgacggggcaccaagcaccgcagtgtcggagcacaggacaagccaacctaccctacccactgcgcggtcagctagttcgccggcctgccgctcgctgacgatccgaaacaaacagtaccccctaccccctccccgtctgacaacgatcccaaatctgatgaaacaggcccagagcaggctggcatggcgacggcgatggcgacgtcgatccgcgcaaaatgattcacatctcgatcgatccttgagttgagactgatggacgacgcgca

SEQ ID NO: 49831 - DNA, 507 bp, Zea Mays
cttttttattctggtgcatcacataactttatgggcaagacttttttggataagcattgcatacatatcactgaatcaagagagggatttgttatccactcacctgggggtcagatatttactaaggaagtagtcttccacgtacctgtaaccttggtcggacatgagttccctacaaacatgattgttttaaagggacaagatatagatgtgattctaggaatgaactagttagcccagaataaagccatcatcaatacagagttatggtcatgaagaagtacaattgtccatccctatagttgtcccagtcaaagcacctggacaagtttttgaggccatggtaaaagaaattcaggatattctggttgtatgtgaaatttcggatgtatttcccaaagacttgctaggattccctccagaaagggacgtgaaatttgtgatcgagttgaagcctggtacggctcctatttccagaaggtcataccgtatgccacctaatgaact

SEQ ID NO: 49832 - DNA, 741 bp, Zea Mays
attgttgacaaaattgccatccactatgcaatcagtagccttcgcgcaagcgtactttacagtcactgcataagagaccccccttccaacctccaagagttatactagctcttcaaaaaatatgcctgttcacaggacctcaaccaaaggaaagtcgagtcacaactaaagccaaggtttcgcgatccagcaggatgtggatcagggccccatagcaataccccccgccaagagtgtggccagcaactccaagtccataatatcgcaaaccaacaacaaccagcgaaggccacccccagtgccaaaactacccttcacaacaaggccgcaccggcaacgcaccaagaggcagaggtagaggcccctagcagcaaaggaagttttactgcatcttccatgatgaagactcagagcacccaaccaaagattgctcggaaacaaaggaaaccaaagatcggatggccagagccgctccggcaaacaacgagagagccatcgctcacacctaccaaccaccccctccacaaccacacccataccaccgctcgcactatcaaaacgaacacccacactacccctagcaccaacagaactacaatgatgctttcccccagcggccacacctacaacaccaagaaagactagccctaccaccccctcagccataacaagcaaaccaacaacaccaccaaccaccccctccaccacccaagcaagaagaatttgttgacccacctttca

SEQ ID NO: 49833 - DNA, 844 bp, Zea Mays
cttgaacactaggtggcacgaaggttcttcaaaggctaaacaactcgaagtatggccctcgaaaaggtgaatttatgcagagcactgttcatctatttatagggaagataaacagcttcgtggaaaattacaaatatgtccataaagtttacaaacatgttttacaaatgacacatggacattgatgactttttatttcttgctgctcaagtcttgaacttggtatctttgcgttcgaagtctcacccgtgctaaagctagcggcttcggctcgctccttcgccgtttgcacacttggtcgaagcttttctttatgccgcttcaacttttcttggcaatgtcccgaccgaaggttagctttgttcgatgttagtcgtgtacctgaaacacatttgttcactctgaaacaatagttatttgaggaccttcggcgaaggtaggcccccaacagtagccccttgtgggatgagttcatttcttcgtaacgagcttagatcgcaaaaagtggaattaggaggccttatgacgaaggttcgacaaacaccttcccgaagctcattaggtagatggtagaacgattcaataaaaaaattgatctagaagttagatagacgaagaaaagttgaggttgatgcgcgggaacctttcctagtgactcgcgctgcttcgtccatttctcagtataaaaacagtagagcaggtggatgtggatcacatttaccgccctcagcaacctgttgccataacattttgtgcctctgtcgagtatggtaattaggggtacccagattacacacctaaaaacgcgattaaacactaagaacaccatcaaagtacattcccc

SEQ ID NO: 49834 - DNA, 432 bp, Zea Mays
aaaggacactagaaggacccaactttgttaaagaagtcgaagagaaagttgccttgatccgcaagaggttacttgaagctcagagtcgatagaaaagttacgcagacaacagacgaagagaactcagatttgaggaaggagatttcgtttatctcaaggtctccccgaggcgtggtgtcaaaaggttccaaatgaaaggaaaactagcaccgcgtttcgtcggcccctaccctgtcattagccgagtgggatctgcatcataccgccttgagctaccagactccatgtcagatattcacaatgtgtttcatatgtctcagctccgcaaatgcctacaagtaccagaaaaccacatcgaggcagaggcaattcagattcaaaaggatctctagtaccgagaaaagccagtgaagattctcgactcagcagtcc

SEQ ID NO: 49835 - DNA, 769 bp, Zea Mays
acaagcagcactgctgaaaaaggataatttttatggcagtcactgaaagtggagtaactatactactgaagatcaaaatttaggcacaatctgcagaaagggagggaggagacattttagtttgtttatcgatatgaatagggcacagtttacctcctactttatgttggtgatattgtactaacaatttcctcaaccactctggttgcactaacaattacctccttactttatgttggtgcacttcagcagaagtcccctgtgatagatcttaacgctcttcataacttcttgggcatacatgttcagcacacaggtttgggtctcttcctctctaagctatagtacattattgagattcttgagcatgctagaatgattgactgcagaggccacctagttacgtcaattattgttgcctaaggctaagatgcacactctcagccattggtcattcagccattctggtaccgtttcagtcgttgtattacattttcactcattctgttgtggtttcagtgattctgttactgttacagttgcagacgttcggtcacagcgggacacatggggagtgccgcgtgtttggtggttgcagcgtgcgggctaatcggggtgcgacggttagggcacctgaagaagcgcatgggctaattagaatacatgtgtttagtgtgtttacaacggttcccgatggaatgtttcgaaagttttgattgacattttttattttaaagattttcataaatggcttacgaaatgacatagt

SEQ ID NO: 49836 - DNA, 691 bp, Zea Mays
tagaaatcagcatattgtcttcatctcatgctttttgcgaactcaaacaacatggtctgcccatgccttgttaggtttgaaatttatttgatcggtgacagattggacgtctggtagatggctcttggctggtcttcatttcgctttgtgcttcaatgcttctgctgactagacttgcagttcagtagctatatttggctttcctttgatctctatcgatatcttccttttgtcttaatactttcattgcgtatactatatggatgtgacttgttcaaaaaatctattaaaaattcctggccgtccccccaatgggtgtcccccaatgggtgtgaccaagggacgtcttggtacgtagagcgtttagcacactgtcctagagtagtaacttgacgtgaccgcgaggcgtgatcatatcgcccaagcagttgaccttagaccaaatggtgtcgtgttacgcgaagcggtgtctgctacctgacttgccttcaggcgatttgaattgcttattgaatacttgcgactgttcggtgagcgtggtaggagatgaacagttgcctccggcctctataaatagcatgcttgcctcattgttgtttttacacatcctctgatcatctgttgcttctttctcaaccccttcttctcttccatctagccatgggcaaggacaaaaaaggtgagggctcgc

SEQ ID NO: 49837 - DNA, 420 bp, Zea Mays
attcttttgcgcgcttagggcgttgctgagtattaagccctgcaagaaagaataaaatggttaacatgagaataaaaggcttcattctagatttcataagcttcaaacttcacaatttctgtaccttcagactattgtatgcaagactatctgcgagatcggccttcgtcatggcgcaaaggccagcttcgagcttcgggaaacccatacttctgactatctcccggcagacggataattctttgttgtccgggaggcagtaaaaaagtcgtcctcggttgtaccattaaatactagggcttccttcggatactgcaattcccgggcataatgtttggcttcagaaatttcttcttcggatagtctttttcccgaagcatgtctaacaatataatcaaaaccttcggagggtgcttcggg

SEQ ID NO: 49838 - DNA, 545 bp, Zea Mays
cccgagacagtctacgtcacgccctcgggcgaggcggagaaatcccttagccaccagagccaatatgtgccgcgccctcaggcaaggcggagagtccgcaaccgtccgagccagtctacgccacaccctctggcgaggcagagaatccctcagccatctgtcctagcctgcgccacgccctcgggcaaagcggagaagccgttagccgtcccagcctgtgccacgcccttgggcgatgtggagaatatgttaatcgtctaagcctatgccctcggcacgtctgccctcagtgtgtcgtgtctgcccttggcacgttgtgccctcagcgcattgtgtctaccctcgttgtgctcagtctagccacctagtttggtctcgcagacgcccttagcctcggtcgttcgtctaccttaaatgcgagctccatgtcacattgcatatttacttgatctatactatttggtgtattgttcatttgctatttcccaaatgtattgaatgaatgattgttttgcgtggacaacgagcagtctatgtttcctgag

SEQ ID NO: 49839 - DNA, 792 bp, Zea Mays
tgagcttgactgaccaccgaattttgaacataaggctggagtttgagtaacacccgatcaccaacttgaaacacacgctccacctgatgcttatcagcttgcaccttcatgcggttctgagctgcagccaacctctctctcaacaaagaagagtaagccaactgatcctaaatcaagctctccattgtagaatcaggtcctgcaacaatcgaggcagccacaaacactggatcgtagccgtacaaagctttaaaaggtgagcaccccaaagcagtgtgatatgaagagttgtaccaaatttcagccaatggtaaccaagttctccactgtttaggactgttagaaatagcacatcgcaaatacatctccaaacattgattaaccctctctaactgtccatcggactggggatgatatgttgtagtaagagctagcttggtgtttaaagcctgaaatagagacttccaaaaatggctagtaaatatcttatctctatccgagaccacaattattggagtcccatgaagacgaaccacattatccaaaaacactttggcaaccatagaacctgaaaaaggttgctttagtgaaaaaatgggcatacttagtgtaccgatcaaccaccaccaaaattgtgtcatacccttcggactttggaagaccttctataaaatccattgcaagatcttgccaagctccctgtggaacgggcaaaggttgcagaaaaccaggagaatgtatcctttcagctttagccctttgacatatgtcacattgtttcacatactccac

SEQ ID NO: 49840 - DNA, 1116 bp, Zea Mays
ctcgtcacccatcaggccatcacgtcgacgctatgctacatcaccggttcgccaccatcacatgcacctggcaagtgtagtccttatttccccattttgattaacacagtgtgctttcttatgttggttcgtatattagttgcgtgtgaaccaagaatttaatctccaggttattttctctgctcagatcatttcttttgttgtttggtataggatggcttctggaagcggtagtatttatgcaagtacgggcgcatcactgcctctcatggaacaccagttggtactagtcaatcagcaccaaagccaccactacctattgtgatgaagcaaacatctacagatcccacaacagttgttgttggtggaggctcagcacttgttattcatgttgataaaaatgtcgttgaaccattagagcctgctgcaaagaaaatgagagagaaaaaggctacatctgaggtttgggagcacttcaccaagtccatagtggaaaaaagggagataatggcaacattgggaaggaagtttgggcaaaatgcaagaagtgctcattcaaaactcgtggtgagtcctcatggggcataactatcttctggaatcatatgaaagcaaatcaccaattgactagagggcaacaagaattgcatcttcagagtggtgcaggtaatagcacagttattcaaaatttcaagtttgatcctgaggaaagcctaactaaattctataaggcaatcattatgcatgactacccctttaagatggttgaacatgagttctttgttgatttcatcaagtcgttgcgtccacactttgcattcaaatgtcgtacaacaactaggaatgatataatgaaaatacacttggatgaaaagaaaatgttgtttgaccatcttaagtcgctttcttgtcgattttctgcaactatggacatgtggacatccaaccaaaataaaggttacatgtgcattaccatccattggattgctgatagttgggagatgcaaaaacgtataatttgtctccctcatgttaaaggacatcacacaggagaaatattggctcatgaatttgtcaagggtgtgatggattggaacctagaaaataggttatttt

SEQ ID NO: 49841 - DNA, 514 bp, Zea Mays
cgatacaaattcaaaaaacaaaactatatgaacccttgtcgaatgtcaatctatagatcttctcgaatggtgggccatcagaaaggaggtggggtcaggcgacctctccgacagagattgtcaacgcttgttggtttgctaagctcgtcgtctgttggcgatgggtcgcatcttcgtggcgagcgagatcgggcttgctggacgggccgacgtcgcaacaaggacgagcagggtgagggtctcaggaaggggtcagggtcagacggcaacacacgttaggaaggtgacaacggcgtgcagtgtcgggaacggggcaatggagcagattagttcgggtgaacttgagaagaatgagatcaaacattcgaagttatagatgcaagaactggatcaagaaagagaacgagggttaagaggactatacttcgaacggatagatgcaagaaccggatcaagaaagagaacgagagttaggacgactgtaccgatccgattagaaggtctaggacagaac

SEQ ID NO: 49842 - DNA, 644 bp, Zea Mays
cgcgccgccgccgacggtacgtagtaatgtcatcttcttcttcatccgctgcgaatacgcccctgggcgaatcgtcgtccgaggatatcatgagcgatttggcggcggtggagctgcacccgggccacatggtggagttcggcgtttcgaggatctccttggttcgcgtgcaagacatgcaacagttgggtattttgggaacggagttggacgagttccaggggcagaagagattcctgagctggagggtgagatagttgtgttcgaggcattttttactgccggccttcggttacctgcgcattgttttgtggcagaggtgttgcagaggtatgacgtgcagatccatcaattgacacctaatgtcgtggtggccctggcgaagtatgtctgggcagtgactgtcagccctccgtagaggtcttcgccaagaattattgtttgcactggtagaagagaaaagttggaagcaagattgcacagtttggatcatgcacctttacgccgaggactggcaagacttcggcggaagttgcggagctagttccttgctcccgcaacaagtggggcaattggtatgattattggttttatgtggctggaggcgaagtcgaagacctcccaggactcccggcggccgtgat

SEQ ID NO: 49843 - DNA, 768 bp, Zea Mays
gagctatcaagctctgtccacgtgaaccgagggggtggcggacagatgagcgcgttcccggtgatccctagcggtccagttcaattaaaggggtcgaggggtttgcgggttacctaaggatgctagaacaagcagcagagggacagggactgacctgtggatggctggccacggcagggtacgattcacggcgacggagaactgatttggggcgaattcaaaattcgtgagctctggcgaacgattgctagcgattcacggtggctgggtgggtgatgaccctgcggggccggtgggggcttcaatttatagggctcaacggcggtggccgggaattttaacggcgacgcacggcggtcggaagggcagggaattactggcgcgcatgaactcgtgtccaccgttgtggcgacctcaccggcgacgattggacagccgtagcgagtcacggcgccgtggtggaaaggcaaagccacgtggcacaaggccgagaggcggcggttcaccggcgaagctatccgcgccagccgcaaagcagaagggggagatgacggtgagtcaccggagtgacctccagctcaccggcggcagagatccttttcctcgcgacgttatccatccaccacgagcgtgaatcttgacgccggtgacacgaatcacggcggggagtcaccggtggtgagatttttctgccgcggccgatctaatccacaatagagcattgtaccatggaaagcacctatttagagcggctgacagagcactttg

SEQ ID NO: 49844 - DNA, 488 bp, Zea Mays
taaatacccccatccgacctcgggtttgccaacacattttgagtttttgtgccatccgttttgtcatgcattgtttgtatcacttgttcctaagtgcatgggaccatgagtcaggatccaacatttggcacccaatgtgttcattatgaagaccaatcccacgatggatcccaaaaagaacaccagatccaactctacccaagctaagccgatggagatagtctcttccgacaccacgaagaggcccaaggtcaccttcaccacccaagaccagaaaactcaaacaaagatagcccacgtcactgctactgaactgtgacaccccagtgtcacctagggttccttccttaagctaacccaaaccattatcacatgtgaaccagatgaagggatgaacatcaacaattaataacaaaggtttaaagtgagtcttgtatcttaagaaattctccttaatcatgtcatgaacctcaaggtaagaagaactc

SEQ ID NO: 49845 - DNA, 536 bp, Zea Mays
ccggcgagccaagaccggccggaaaacacaacgactatgcttcttcgttgctcaacacctaattctaccctcagtgacactaatccctcactcaattacaaagttctagctcacaatcactctgtccacggtggcgatggaaaccggagataactcaacgtgttctacgtgattcaagtcggtctatttcaattggacggttctgtgagcaacaggggacatgagggaagctagaacatcaatcaaagaggcttgagctaacctgcagaaggctggccacgacgcggtggttcacggcgtgcggaaaaccgatttggggagagtaagaaattggatctctctggtggctaatcggaggtaggagcaggtgctctggcttcgtgattacttaacaaagctgatgtcacacttaatttatagggcccgagggcggtggctcttgaaattggaatggcacgctggcggctggagaggaagaaggttactggcgcaagggattcgtggctttcaccgtggcaaggtcaccagcgatgaac

SEQ ID NO: 49846 - DNA, 425 bp, Zea Mays
cgagactgttggagaacggcttgggttcggttcggatctgacagcaccggtggtgcctgccctgcctgcctgattgcctccctgtaccggcgcgtgagcgtggtgactgaacctaaacgtcgtcgtgcatgagcttgcattgcatgcccaagtttttgatgcctgctttgcagctcctatctaatcttcaatagatctactaccctcgtaagtcgtaacctaaccaagctgcggacatggttctttccatgcatgagcatgacccaggtcaatgcagacagccatcctcctttgtctgtctcccgagacatttgcttgccacgcacgcacatcaagaaccatgtcaaaggctccgtccagacgcgccacagccaaagccctgttctagtgttctcgtcccagagctcgccttcacttcatctccc

SEQ ID NO: 49847 - DNA, 538 bp, Zea Mays
aaacataggttatgactaatattcacataatatgatgaagaataaatactgacagtatttaggggggagttacttctgagacaacacgcttgtcggttatgggagcgttgtgaaaaaaataaataaaaaacattcagatatattaggcttactatcacatattgtaattaaaagtataatcattgggaataaaataaaacaaacatttgattttgaagtcttgtcaaatattgggacatccatgaccgaatcttttttacaaacgtttccactgaatacctttattggaaacatatgaagttggtgtacatgtgaacttgtatgctatatttcatatatgcttcatacttaaagtttgtatgaaaaacttacctatctcgatactttattatcatcagtaggaacatgggttggctgatcgtgatgctgatcatcagaggttcgaacaggaggagtggatacagggtcatttgtcgggggcgatgaggtagtgggtgggttatctacatttggacaataaaatgataaattagttgat

SEQ ID NO: 49848 - DNA, 691 bp, Zea Mays
ttctattggccaacagcgaagagtgacgcagccgagttagtccagaggtgcgaagcctgccagtacctgtcaaaacagcaacatctactagcacagcagttgcagaccatacccataacttggtcgttcgcgtgctggggattggatatgatcgggcctttcaaaaaagctcaaggaggatacactcatgtactagtggctatcgacaaattcactaaatggatagagctcaaatccattgcttccctaacttcagctaaggcagtggagttcatacaagacataatattcagattcggaataccgaatagcatcataactgacctgggatccaacttcacaagttcagagttctttgatttttgtgagcagaagagcattcagatcaaatatgcttcggtggcacacccaagagccaacgggcaggttgaaagagctaacgggatgatattggaggccctcaggaaaaaagtcttcgataaaaatgaaaagttcgcaggaaaatggataagggagttgccttacgtcgtttggagccttagaacccaacccagtcgagctctgcatggaaatacccctttcttcatagtatacggttcagaggcagtgctacctgctgatctcaagtttggggcgccaaagttgatctttgaaaacatagccgaagctgaggctactaggctggaagatg

SEQ ID NO: 49849 - DNA, 408 bp, Zea Mays
gggagacagttccgttgcaccgaagtatgtttgttagttccaaagctaaaacagattacgaagctaaaacaccatagatgtacctatatgcctagcccgctcgacagcttcttcagcccttttcgcctcttctgaagcatcatgtgattccttttcgttccttttgatggcttcatcagcgacttctagtctgcacttcagccatatctcggagtaaaatttcccacctagggtagtagcttcggctgaaggttttttgatatcatcaactgagaaggcaaagtttgactgagctacagctttagtatgatcgcaaccagccttcttcgagatggacgtggcccctcgggcaccagcaaagacacagaaatcttctctatcactaagaatttcttcaaaagattcggc

SEQ ID NO: 49850 - DNA, 297 bp, Zea Mays
ttcttgacatcaactgacacatctttccaatgtcagattgtgatgtcaagattatccctaactaagaacccaagtgcattctggaacttagggagtgcctcttctagagctaggggctgacctttcgggctcacatctgagattttatatgttttgtcaggaaacttgttcagtcccctgtcacctctttttcgatcaccctgcttccttttccttgacctctcggtggttgtatcggacggtacgggtgcgtcttcatcttggaacagccccggtgcgtcttggtatcgtgccacg

SEQ ID NO: 49851 - DNA, 813 bp, Zea Mays
gagatccgcagaagttttgatattaggaagtgtcgagggtgaataacataggtatatcatggattgtgattaagtaggtaatgacaagttaacaaacaatggagccccgtctaaaccttacaagatcaacacatttcaattgacccttgacccttgcaaacaatcctgcctcatgctcccgcctcgaccgacccctgaccccaaggggcgagggtggggtgggctatccccaagacccctacttgcctgacccttggccgcataaggggtcagagtatgaagccatgtcccgtaatgtccacatcgcctgatctaggggttgagggttgcgcctgatccatcgaatatggaattcacaaggttgcaccaatgaccattccaggtaagggtatgtgtgggtcagcctctaacacgagagtgtggacaagggggttggaatgttagtatgccggcccctaccaccacagaatggtccatagtaccaactcaaccaccttgtcccagaggagtcaaccaaggatagtagggcagtcattgtgagacaagacgacatgcaatgacgactgcaacatctctacaatattgtgatggaagggggaagagtcatctacaggattcctttggtcggcaagaatcctaaaggataagaagccatacaacaaggcctaaccaccacccattccgctcgacatgacttatgtaacaaaacctgccctctccttggtctgtaaaaggaaggacaggaccacgatcaagaacaacaggcaacccgctatcacaagtagccaagacacctataatcacacagatcac

SEQ ID NO: 49852 - DNA, 681 bp, Zea Mays
cgagcccctgaagtcacaacatagcgcaaccttcgtaaacaatattatttaactctatattttatttgattgttttgtgtggcatcatatatttatttatattgccaagtggccataacaactatatcaagctctatagtgcttgaataatctgggaaattaaattgaaatacaatgaaatatagataagttaattctttgctctcctcatgcataaagttttacccgaagtaacctgaagatatataatataatgcatgaaagcctttttggcatagaagacatcacaaattgggattctattagtaagcaaaagaccttaccaaatgatttaagactataaatctcaggcatacattgctcaaccagatgttagcacattgaactctttgtcgctaaatgacatgaagcaaactatgagataaaaggacatgtaatcgccagcaacacgaagttgcgagtataccgagaggttattctgagaatttttttcactatgttggtgtgaaaaccatagtgtgttcccgtcgaaccactttactcgttctatctaggacctctatgcttgtgtcgcatacatctctcagaattgtaaatacttatagtcactgaattgactcgggatagtcctttgacaatttggtatacactgtaagctaaatggtaaaggtcggtcctgaa

SEQ ID NO: 49853 - DNA, 499 bp, Zea Mays
agggcattgtaatcacacgagagggtattcgagtacaactagttgatgaagacgttattgggctagctaatgaccttttgtgatatcaggtttcctataatccctttattcaaggcatacctagatggtgtttatgtccactcaagtaaaacatcacacatcattatgccacatcatttctcaaaataaaataaagaccatgggaaatttagccaaattgcacgagagaactttccaaacataggttaaggttgtaaggcacctttttccaccaaaaagatgctaataagtaggaatataaagaattcaaaccaatagatcaccttttaaactaaaaaggacgtttccctgatgtcaagggcattgtattcgcatgagagggtattagagtacaactagtggatgaagacattattgggctagctaatgaccttttgtaataccaggtttcctataatcccctctattcaaggcatacctagacggtgtttatgtccac

SEQ ID NO: 49854 - DNA, 536 bp, Zea Mays
acttaaacaaaaaattgatcccggttaaatgttagaacgagaaagaatgtgaaccaagtgagggaaaaaagttctatctcacttgttgctcttataagtgctaaataatattagagagcaaacacaagtgagttagaatgagagaggaaagagaattcagaaggggagatagagagagaggaacaaaccacgacgaaaaataacaaacacaagaagcatgcgatttgtttaccaatgtttagctcaaaagaacctatgtcctcattgaggtatcccataggactaggtctctcttgaccttctcaagtgattcagcgatcaacttgagccctcagatccactattaatagggacatcgtctttgcaaggcactccataagatttggagcctcttgttagtctttacaatagaatatcacccacacaagagcaataaacacaagaacacaatataaagaaagcagatcataagagcacaccctctctaaatcattatctcaactcaagtgggtacttagatctctctagaatgactt

SEQ ID NO: 49855 - DNA, 446 bp, Zea Mays
gttttcgcaggtagggagagatgttatgactggcatgcagtacaaaaggaaacagcaggccaaggggcatgcggcaggacaaggggatcaaggctgggacaaccagcagtaattcagtaatcctaggatctatttccttttgagagtttccttttatttacagataaacttccttttattcagagagattagtttccttttattaagagataagttcccttctattgagagagaggctagtataaataggagatgtaagacaggaggaaagatcatcaaagaaattacctagccgtcttccctgtggaagtcggaacctgagctagcctgttttcccacgccgtgaacacggcatcccggcgtccctctcgcccagtcccccgccaacctccagcagtacaccagtacagcttgagggaggtccctggtaggaataggaatcctat

SEQ ID NO: 49856 - DNA, 322 bp, Zea Mays
ttttttctttcggatacgaatagtatcggatatttcacggttttgtcgaatgttgtcgaatacgaatcttaaatcggatagagaagaaacgaattcggatatgtctatttaacatccatattaaaatcgaatacgaatacggatatccatattagcgttttatccgaatacgaatacggatatttcggatctccagacatccgaatccatccctaagtgccagtgccagactctgccagtgcagtgctgtgctgcattatttccactgcacccctgcagggtggtcggcgtcttttacgtactactacgacgtgtgtcacgg

SEQ ID NO: 49857 - DNA, 563 bp, Zea Mays
tgcttacttcccatgaaataataaggctgaggttaaaggctggtgcacaacaatacaaataaatttattttaacatccttacctcatttatcagcttcagaaactgctgttttgtcagattgctaatgagcagcagaatgtgtaaagcgtatttagctgaacgtgctgttcagtcctgaattttttttggtctttggttgtcaatactatacaataatatctgagtatttcgaatgtaaggtacatcaattatgtaaggaggaagtttaaaccagtgctgacaaaggaggctgaaagagttatctcaagctattatcatctacagagaaaatcaggaacacataatgcaggttagcctgagctaaacaaatattgtttctgtagccttgacattttgtagtctcaaaaataagcttctaaattgcagcaaggacaacagtgcgcatgcttgaaagtttgataaggctagcacaaggtatgttctgattctcctttggttcttttcctccttccacaattgctattcttgatcctttcattcctttgctcttactgttcatttt

SEQ ID NO: 49858 - DNA, 662 bp, Zea Mays
gcgaataaaagaatgcgggaccgactgaaataatgtttgtaggtgttacaaaggcacgaaggccttggtattggttgccttatacataaaattttctcaacattgaactgatacactaacaatttgaactgatgttatggacaacgagtcttcagaagatgatctaaattattttgtggagctagatttgtctgttgcggagtctccgtcaagggtcgcccccctgtggcggcggggacttcagccagggttgccccaggtgaacccacggggtcagagaaggattggggtgtaaaaacgaagtgtaggaatgcttggtgagtcttcgtaaggtattggagccccctgaagacatcgccgaatgggaatggagaggtctcgtctctggagtggaacgcagttggaggaggggacccgtcggatcatactggcaccgacggacgggtcatgtttcgaggagggggatctgcgggctctttttgacggcgaagagttgagactgatgttgttcaatttccgtgaagccggccttatcccaaaataagagccaatgtaaaatgtgtgttgacattgtcgttctttggtgaatttaagtgaaaacgctgccctcgcccccttctccaaaggacggctatggggacacttgtatttgaatgattttc

SEQ ID NO: 49859 - DNA, 383 bp, Zea Mays
ggtaaaggagacagaagcgaaggttcaacgaataattcataatttgaagaaagttcaacctcgtcagaagagttacgcagacacacaccggatacccttatactttccggttggagattatgtctacctgaaagtttcaccaatgaagggtgtatcacgttttggggttaaaggaaagcttgcaccacgatatattggtccttttctcattcttgaaagatatgggccaatggcgtatcgacttcaactacctgaaaccttgtctgctgtacataatgtgttccacgtgtctcagttgaagaaatgtctttgggttccagatcgaaccattgaaatagcagatgttgtcctagagccagacttgacatattcagaacatccta

SEQ ID NO: 49860 - DNA, 435 bp, Zea Mays
ggacttcactaaatttctggctgattgtttccaatgaataaccaaacttgttccgtatctgtctaaatgattgcggcccctgcaagcccacaagaaaattgctagtgtctccttcgtactaactccgcgactagctaccaggccataattatgtaccaatgtatcatggagacgatgaaacacagttcgacgcatgcgaaacatgtcgtggcaatcatcactactctccaatgtacgctcaacccattggataccagtttccgccatgggtcttcttgaaaccccacttgacgaaccccccatatatccaaagcaactagtgcaactatgaattcctcatccccgttgtcattactttggtcgttatgaggctggaacatctgcaaacatacacacaataaccagttttcttgtatcaggagtgtaccataccaa

SEQ ID NO: 49861 - DNA, 923 bp, Zea Mays
tatcaccagagaagcaggctcagttcttgaccgctcttctaaatcctctctgtcatcaggtgattaatttttgttttttaatattatggcattattttttttaaacatgagagacttactgatgcgggtaacacccccaaccccccaggccgagtcacttgttatggatgccaaagcacgaggcttgaggaatcatcaccaatggctattagccttcaacaaattattgttgcattgaatatggtcagcaaggtaatttgcatccaccattgcaaggatgcatgtaaaatattctctaaaatgtttgatattaaggtgactgcctgtggtccatctgattgtttaaagttgtgatttattctcatgtaataattcttacttctgagcacgaagttacttacaactcatacttactgtatctgaacactgcccttttttagggcttcaatgagcgtcttgtgatggtaaataggccagctattgggatcatgtttaagaaagtaagttttgtgaacttacatatattccacaatattgtatggttctcacttgttaccatgtagcatatatgcaactagccagtggtggaatctgttgttagccctcaattactacctgtttaagtagtctccacatctgtggtcttcatttagccctttcttctgatataaattgtttttaccatcttctccccagacccttgatgtagttttgcaagtccttgtttcatttcctagcgtgagacctctgcgatctaaggtaaatctgaacctgttccttaagcatcttcgttacttccgtgctttaatggcatgattaaccattccctaacttctccatgtgctgaaatacaggtcatatcgtttctgcatcgtatgatcgagatattaggtctctcagtgcttccctgtattccaattgca

SEQ ID NO: 49862 - DNA, 801 bp, Zea Mays
atagaataaaacataaaggaataatgtcttgactgaatccttttcctacataatgaatgaaaaatctaaccataatgataatgtaattaagcaaaaaatattcctcctacaaagtcacacgtcgacaatgagagtgataataaaactaacaatgcaattttccagtatgtatactaactggatgtatcatgtgacacaataagaaaatcacaatcaatgaaataatgacacaccaataactacaccatcagaaatctgaaacaaggtaacggtgaaaaaacattaatggcatggcaacaatttaacgatatctttcaaaaacaggcaactccagttaataatttcatccgataaaaccaccatccatcaatgtgacagaatcttgacatgggaaccatgaccaagatgattccatcacaataacgtggaaataaatagcaccacctctccattttatcatcttaaacatgctcaagaggctgaattagtcatatcaaacaacaacagaattaataacaagaataaaagataccagaaatgaaagatgcagacaatcttagcccgtccaactaaaaatgacgtgtactattcggacacagaatctgccacgagaaatggaagatgcagacgaaccaattgccatccagacagccgagaatctcgctttgaagacacggtttcagcaagcgagacccatggatagacaacagctgatagttccgtgtccaaacgaatacaggggcaagcaatgggggcgagtgaaagacacctaacgaaactttttcccgagcctaaaaacac

SEQ ID NO: 49863 - DNA, 680 bp, Zea Mays
ttcagatcacgttttacacttaaatccacctgagctagaacccgagcatgatcggagcacactgttttcacgctgtaatttaggccccattcgtcgttacgaaatagattgatgatgtacgctaaaatttgtacccatttacgctgttttggttcaccttttacgctgaaatatgaccgagctagaatccgtgcacgattgaacgtgcgcaattttcacgctgtaatttttgggccccattcgttgttacgaaacaggtctataatttacgtaaatttcgtattcatttacgctattttggttcacgttttatgattaaatccacccgagctagaaccctagcacgatcggagcgcgtgtttttcgcgccgtaatttgggcctatttcgtcgttacaaaacagatcgacgatttacgcggtaaccgtcccacatttatcgcgaatttacagcactactttcctaatctcaaaccaactcagatctacgcacacactggtcacgtatatacaataacataaatggtctgacgtcgcgatattgcatggtttatgctgttacgtttcatgttcttatgcagtcgtaaacactgaacaaacttgtaaagtcatcccacgtgatttgcgcgtcagcagatttttttgcatggtttatacacattattcaatatatttatcccgg

SEQ ID NO: 49864 - DNA, 300 bp, Zea Mays
cttggaactagctgcagttgttcatgccctcaagatatgacgtcattattctgctaggaaatacttgctatttatatacatatcataaaagtctgaaatatatctttacccagtcataactgaacatgaggcagagaagatggcttgagctgattaaagattatgacttagaaagtcactatcacccaggcaatgctaatgtggtggccgatgcactgagtcgcaaggcttcttgtcattgtcttacagtaaggacccctgacaccacactatgtcaagaaatggaaaagttgaacctgg

SEQ ID NO: 49865 - DNA, 340 bp, Zea Mays
ggggcggtcaacagtgagggagaagggtcgtccccgggagggaaggaggagcctcctggggcagcgatgcagaagtcggtaggtaggtgttggcggcagctgtgggggtgggtggcggttgatgtgggtgtgtaacactaatcctatgataccatgtaggaaactgtagtacttgatgtattgataggagatgtggtacaatatatagactcacaaccctaaccctaataggccggcaacccaactatggtgttggcccagtcacacacacagtctaacacttagtcatatgataataatatgttagctcttacaataaccaacttgatccatgtcatcg

SEQ ID NO: 49866 - DNA, 754 bp, Zea Mays
tcaggaaaaagatctgcatccactagctgtttccagatgactttggataagtgcaaaacaacaagaatttcgttctggtaaaaagggggtcacaggagcgatttttacagcccaggggggcttttggattggatcgatctgcagcctgacagccatgactcacctgcttatttactgtgctggtttgctatccataggaggattgaccacctctgctgttttccttgtgcctgtacccttacgtgggggtcatgcaggtgaaaaaatggagcatgctggctctctttggccctctgtttatgaccctaaaggaaagacccagccggctgcaactgctgtcttggttttgggcatacaagcacctaatctgagatctccaagttttagccgattgcatatttgtccaccgcgtcacaccattctcacaactctagtttaagttctccatcttccacatccctctaattccactaaaaagccttgaactcacggtgggtactgaggccggtgatcacgacaggcattttttcccttaccgtggccaggtgcagtcaacatccctccgtctcttttctcaagttctagtatccttcgcctgtggtgaagcttacgcgtgtgcctgattgatttgtaccgcacagagctgcctggaacgccgccttgacagacggtgaacacccccatggacagggccaacatcgtctgacccaactgtagttcattcaagacggttttggtgagcaccgtaacctag

SEQ ID NO: 49867 - DNA, 479 bp, Zea Mays
tatcaacccactaaccgatgttcgaggctttcaggtcatctatctatttttgaagcaggagaggattccactgcagcaaggatagaacctgatcggggagaggggcaccctcagctaagccgacacagagctcacagcattatgcaaatacaagaattagcaaagtagtcctctgtcgacaaaggtaaagcagggtaaggatcaactcacctgaaggttagaaaggaacaaaggaaatcccaaagccggaggtgtcgaggtgccatcaaacagcgagatactagtagaggcaatatcgagagcagactcgagtcctagaggaggattagagctcatgccctaggaaacatctagtgggacctccgctccaacagcatgcagcagatcctcaacacccgggtcactgacctccaaagcgaccaggtctacaagagcagtaggaagatcaaggcttgtcaccgctggctcctcagactgaa

SEQ ID NO: 49868 - DNA, 400 bp, Zea Mays
cgtattagtcacatagtcataagtatatgaaatgtgaataaatacatacacacagaattatggcacagaaaacaagagtcttggcgatcgagaggtcaaacgacgcgaaaacgacgtttgaacgagaaatagtgccataggaggtttggaattcgaattgaggcatgaaatgatttgaaattgagctgatacttcacgaataggtttatatgggtaaatatgagtgaagtgtgtgcttggtttgaatttaggcaaagaaaatggaatttaggcactcggctcagaaacgatcgctcgaaacggggaatttggtgaaaatggagcctggtatatcggatgggcgtgaaatttggcgaatatgttactggaggtgttgtgaaggtgcctgaaaaattggaat

SEQ ID NO: 49869 - DNA, 473 bp, Zea Mays
gttcagttggtggaaggacccaaactgatagattttgccctagtgcaaaggttcaaataaggggatagagttccccgctgatctaatagttatgggtaactaggatacaactatagatatcatcctagggatgaattggctaaccaagtaccaagccagtcttagctgtgacaagagaacgatgaagttagtgtccttatcaggagaagaagtgttagtagagttggtcttatcaggaccaaggaaagggagttgttaccaagtcaccgcctgtattgaggtgattaaaccatcagaggctatcaatgtagtgtcataattcccagatgtgtttcccgatgagttactaggtatgccacctgaaaggaaggttgaatttgccatagagcttatacgaggcaccgcccctatttccaagagagcctatcgagtgtccggaccagagttggtggaactcaagaagtagattgatg

SEQ ID NO: 49870 - DNA, 400 bp, Zea Mays
gctccaacgaccccattggagatctagaagctaaggtggagcaactaccatcagagctacgtcatcggaacagggcacgggagcaggacagtcagcgtatagctgagttaacagccaaagttggccgcttgcggtttgagatctccgaacgagactcggccattgattgggccattaactcgtgctcgatcgcttggcatcgtgaagcaaaagctcgggctcgtgtggatgagctcagcacggccctcgataacctacaagtatattgtaatactttacatgaggaagtacatgtactgtatggttgactgcacccaaacgtgcccgctgacgctgctgcaatgaaagctggaccctcgggaacagcaaatgaaggacttggtggggagttggatctttt

SEQ ID NO: 49871 - DNA, 395 bp, Zea Mays
gcgcgagtgagtgtggataaccatcagggatgaaaagatcgtcgagggggtgaacttgagccctatgcaccgtacccacttgcccggtgacgtggccgagcggccatcgccgtggtggccgccatctatctcggttacgccacgcgatagactgattcaccacgatgctgggagtcatggcgtgtagatagttactgcccaaggccgttgtttcaccatatgccatgacaggtaggcctcggtagaaatatctcgccgccgctgtgaactcaacctcgtctaaattcgtgacactagaggccgattagtataaattgagtactctccttgctccgcccttctgttaggaacccagtccaccctcagccgacccctctcgtccaccgtagctcgag

SEQ ID NO: 49872 - DNA, 409 bp, Zea Mays
ttatgtacttcatttcttcaaatgcttctgtacatttgaataagtttatagcatataactaaatttgtcccatctccacaattactagaatggacccagcaaacaatgccacttcttcatagcccatgtcaaatgcctcaagtggccagcagtttcctcctccacaccctttatggcctacgggttacatgcagcagagtggtatggattgtaactttatgggaaacctcaattttccaaaccctggtcaaggtccgacaacaatgtgggcacccatgcagacaggacatagtacttcccaatctaccatgattccggcctcacaatcagctatgtactggaatcattacttgaactttgtcaggaatcatcttgggtcagctgaagtaaatccatttcctgattccat

SEQ ID NO: 49873 - DNA, 514 bp, Zea Mays
agctgaaatctggagcccgttgatgagggcctcatactccaccacgatgttggtggcatcaaagtgaaggcaaatggtgtagcagaggttgtgtccttgaggcgatgtgaggactattcctgcactgctgccgtcttgaggtaggatctatcgaagtacatggttcagtactctggatccttaatgggggtggtgccttggcttttgtccactttgagacaaaatcagccaaggcctgagatttgatcgtggttctgggaacgtagcttatgtcaagcctgttgagctcaaaagactactttgtgatgcacctgaatgcatcacggttgcagacgatttcgcaaagtggagttatggataccactgatacgggatgccaatcaaagtagtgtatcgactttcttttggcaatgaggaccacatagagtagcaactatatctgagggtaccgagttttggactcaattagcacctcgctgatgaaatttacgagtctttatactttgagtatgcg

SEQ ID NO: 49874 - DNA, 476 bp, Zea Mays
gagatattgaagcccaaagttggactgtcaggctgatacagtctaaatttcagatggacagtgacttggatccaagtttgagagccagtttaaccttgatccagagagaatctgtcttggagtgctataataaagatgtagctgaattgtagctctccaactttactgcagagcatggaatatgttaccatagggatttgtgagcaaatcgagcctaattattggttgtcaggccaactgaatgagttagccgatggtagagtaacctgcttgggttcagaacacttcaccgccgtcgatcacttctccgccgcgattcgtgtcgccggcattaggattcgcgctcggggtgggtggataacatcgcgagatgaaagatctttgccgtcggtgagctgggggtcactccggtaactcaccgtcaccttctcctttctgttttgcggctgagcagataagctcgccggggaaccacc

SEQ ID NO: 49875 - DNA, 429 bp, Zea Mays
ttccttgcttcaataattgcaatcgatttcgaagaccacgttgatagctggaaggaacaaatcgcctcttcatcactcacttcatctcttcccatgtattaatatgtcttagtcccaatctaatttgatgttcttgcacttaattccaccaagtaagagcataactagataactcgactgaagccaagttcactcggtgttgatctgaaagattgtgaactctaaaaatttgatcatattgctcagcccagttaagatattcatctgcactttctttcccagtaaatttaggaatatccagcttgactcgggtaatattgtccgggtcatttctatgacgacgcccatgataacgatctctatcttcaaagttagcatgtcagtgatgatgacgccgaccaaacattccatcatttgcaaatggattct

SEQ ID NO: 49876 - DNA, 668 bp, Zea Mays
caggagtacacaccgaacgacatattcagtttggcttttgtgcgtttaatagaatattgaggcattacactatatgggcattcctcccctaatgctgagatgttattaaaagcatacagataaaatccccaaccaaaattatctagttgtggccaatgtatgctattgcttgtggcgatttatttgggaaatcttacgcacattacagataagggttttatgcagtgagctttggacttagattaatgtagtggcatgaatactacatatttgtccttcaacatgaagggttagtctcaacatccagcgagacacgcaacaacaagttgcttcatggttacaattctgcaaacttactgttattactaccaaatgcaatcaatcattaagatttagactgatatgcgcaacactattttatccataagggtccttcaggggctcatgcataccattcgtcgtttggagccattagttgacttcagaccaacaagtaaaatgaccatcggggtctaacgctcacaaagtcattcacaggttgcattgtgcttttaagcacataggaaaaatgtgtgtgtttatattggtagtgaagtgcacgacatcaggccaatgctgccaagcaaagatttttatatgcagagatgtatagtccagctcgtttttat

SEQ ID NO: 49877 - DNA, 575 bp, Zea Mays
accgaactctagcaggaccgccgaaccaagtcctctgccctaggcgggaagggacagcacaacggcgaccatcaccaggatcgaccccctcggttccagaagttggacttcccaaagtatgatggcaaaactgatccattggtgttcctcaaccggtgtgagtcctacttccatcaacagcgcatcattgacgaggaacgcgtgtggatggcctcctacaacctcgacgacgtcgcccaactgtggttcatccaaatacagcaagatgagggcactccatcatgtgtcacttctccaaactcctgaacctgcgcttcagacccccctgcgttcaaacccgctcggcgaacttgttgcatgtcgtcgaacggggttggtacttggtggtggactaccaggaccgctttcaagctctcctgccacacacgggccatctcacggagacacaacgtgtacagctcttcattgtaggcctccaaccgccactcagcctcgacgtcgagatccacaacccccagcccttgtccgtcgccatgagcctcgccaggaagatggaactccgggaacaaatcgcg

SEQ ID NO: 49878 - DNA, 562 bp, Zea Mays
attgtttctacagaaatcaaggggaatcctacaaagactacttcaaagcttcagacctagcttcggttcattgaccgtcagcgccatcatcctgaagaatgacgaagaacagggtaatcaagaatctggtaaggaaaaatttaaggtcaaagaataaaggtaaagagctatgctttattaagtaggttccgggtttcgtttccagccaagtcgcggccgcccttagcccaaatttgagtgatgaacctattccctatgcttcgggcttcggctggaacatcaaccaggtccgatgatgaaaggctgaagtttggcctgttgacaacaattgcatgattacacctaggttttataaaagcggtgtcgtaccacgagaagttgtgcatagaagtctccatggccggttatgacttcctcaaggacgtcaacctctttctcgatgcattcgagggccctggggacatcttcagcagaaaggctagcttcctctgatgcagctccaactgaattgaatatgcttttcaatcgagtggtacattggcttgcaaagtttaagcatcta

SEQ ID NO: 49879 - DNA, 559 bp, Zea Mays
attccataaaaatctggacctaatcgtaattatcttacgccattagtggacgacgggttatttacgaataaggacaagggcacttttacaattgtaagcgaggcgaaggggtacaagtgaatgcgaatcgctcagattagatctaatggtgcagattggatttgggcgctttatgaaccggtatgcgacggagatcgtcgatccagagacaaccagccgtgaggcagccacgatttgacacctttttgcaccctccatccacaatcctatggcctagatcaatccacgaagcggtacatgatggttctaatctcagccataggctagagatctaatggacaagattttattaaacgctaacaaacctccacggtccaacgccagattgatggcgcagatttacctgaccgaaaccatctgcacgatcaaattagaaccgtttggtatgatccaacggtcaaaactctatctcccttcccaccaccgagccatggcggcaccgaccactaggcggaggtggcctcaccggagcgcaagtaactggcgtgctaaagccccg

SEQ ID NO: 49880 - DNA, 595 bp, Zea Mays
tgcatggcattttgcctcctctaagggcaccatcgtcttttccttctcagacatgctgatcaagccttctggtgttttagtcctccctcttttgataacttgttgttgtgcctagaatacaaagtcgaagcttcttagtttcaccattgcataagtgtcacctagatgaaggtctcgtacaaaggatagcttcattatcgctttgaagcacctaaaacaactttaaaatgcaatgtcttgaggagcttttgttggttttggatcttgatgctgaatttttgttgtgggatataaggagaatagtacgaagatgtgtgaaagaattccttcggttgacttatttgtggagtagcaagctctttcttcttttgagtaacatcccagttttgatccccaggttagaaaccctaaactcctaaacccccctttttattcctcctaagaccccatcacatgaagcattttattcatcatatgcatacaccatgatttctagtggcactccacatagagtatctcattttggcacccaagaaatttagatgaatatttgtttgaagaagaaaaagggatttaggaaaaggaaatagaaaac

SEQ ID NO: 49881 - DNA, 960 bp, Zea Mays
ttttgctgcagagccttggatgtgttgccatacaaaatttagagaaaatttgccctgaatttgatctgtcaggccaactgaacccacctcgccatggtacagtgcatcggggaaaacaagtttagaaactcgccaccgacgacccgcgcccggattcacgctcatgccgccgtgattcgtgcccagatcgtatggatagcgcctgggatcgagtaagaatcctcgccggccatttaactactccggccatttaactactcgggccatttaacaactccggccaccgtaccgatcttgccacagtcacttcggatatcctcgccggtgactgcctccttacgatctcgtgccatgtgccttggcacctccaccccatcgtcgtgacccgttgtaactctctgttgatcgccggaatgactgccacagtaataggacaccaatccaatgcaccagtaaccttccgctccttcagccgccgcatgtcatcgctcaaattcccggccaccgctcttgcctagtataaattaaaaccaccgtgagctctgtaggatcatcacgcacccaaccaccaagtattgtcctcagtcgatcaccagggagcttcaattttggatttcccccaatctgctcaagaacaccgctatagtttcaacctcaccgcggccagctcaattcaggtctgctcataccttctgctccctcgtttgagtgttcttatgtacccatgatgctcattgaccccccccaattgaactgagctgccttagatcatcgagaacgcgcttagtggtccgttgttgccgttgtcaccgtgggcagagcactgtagggctccaatccagaaattagttgaggggaaacattccttagagctggaactagatttaaaccaaagattagcaccggtcttagtgtaatccagccagtattagctcaccggagctcggctccccaccagtc

SEQ ID NO: 49882 - DNA, 704 bp, Zea Mays
actcttcttgtctgattcttcgtctatcagaaggttctaatgagaagcattgcaagatgatcaagctaggattgcggaacttgaagcgaagtttgccagaagaaaccctttcgaagctatcgacgatgccctattatctgtcttatccccactccgcaagatgttttgctatggatcctttggatctattaccagacttcttggttaggttgataggattgttctttagtattaggatttttgactagatcggtaagggcgaaattgtattatagtggttttctaatccataatattgctatataacccttgttttcgtgccattatattgccacccttgcgcaatatctaccttgatatattaaacttttgcctctcaacttttctccttgataatgctttcttcctattgaattcttatacttttgctttcgtgccattgtattgccacccttgcgcaatatctaccttgatatattaaacctttgcctctctacttttctccttgataatgctttctccctaactcactttatatccttggttatatcatttatcctcactttaatagttcatggttattttatttcactttttgccaccaacaaatatgtcttgtctaactccttgataattcttacccaactccttgatgttataatatctttcttatttcaacccttgtctcaccttttgttttggtt

SEQ ID NO: 49883 - DNA, 550 bp, Zea Mays
gaacaattgatcatctttactcacaacttctcatataaagaggaaagtggaaataaatggattacctaactaaaaaactgactttattaataactacaccaagttgtaggagatacccacaccttggtgacaatcaatacaaagatgcaacttcattacatgtccatcataacaagcattccgacacatgataagcaaactaactctaactaagactgactagactaagacactgaattaagcattattacagactccgactccatcgatctatggatctaagtctggggttccatagtcaaagcgaccacgcggcggtaaacggtaagggtgatgaatcctgacaggggcgggagaaccaccatcctgatagtggcgtgttgcgcactcaacacacaattccacaacctccacctgaaccttgcccaactcgtcaagggcgtggtccaactctgtgttgagcatgacggccaggttaaccatgctgttcagcctgggattgccctcaccaactggcaaaacaatcgcacctccagcactgccggtcgaa

SEQ ID NO: 49884 - DNA, 432 bp, Zea Mays
atgagcagaattatcctacacatgattcagaattggcagttgtagtccatgccttaaaaatcgggaggcattaattgatgggagctcgctgcaacatctataccgatcacaagagcctcaagtatattttcacccaggccgacctcaatatgaaataaagaagatggctagaattgatcaaagattatgacttagagccacactaccaccctggaaaggccaacgtagtagcggatgccctagtcgaaagccacaatgcaattgtctaactatggattctcgcgtcaataccttgtgtgacgagatggagaaaatgaagattgaagtggttctttctagtaccttggattacatctccgttgaaccgactttgctagaccaaattattatggcccaactcagtgataagggagtgcaaatcataaaggaaat

SEQ ID NO: 49885 - DNA, 447 bp, Zea Mays
gaaagggattcatatctcgacgcttgattccagtcagctcatcgcatactctgatgctgattgggcagggtgtcccgatacccgtcgctcgacgtccagttattgtgtattcatgggcgacacccttctctcttggtcctctaaacgccaacacaccgtttcccgatcgagtgcagaggcggagtatcgtggcgtggccaatgcagcgtacgaatgtggttggcttcagaatcttcttcaggaacttgatgttcgcattgataaggccacaattgtgtactgtgacaacgtctcggcggtctacctatctgaaaacctggtccatcatcgacgaaccaagcatgttgaaatagacattcacttcgtccgggagagagtggctgctggtgacttgcgtgtcatacaggttccaacaactcagcaatatgcagacataatgacgaaggg

SEQ ID NO: 49886 - DNA, 343 bp, Zea Mays
gctctatgaggcactaagttttacacagatcaaagtcattgacccctcttaatagtacgactatctaacctactaatccggtcaagtatcttctctaaactcctgaagaccggcaaaaacaaaaccaatgttatacctttgccttcacttgatccacaaccaatgcttatgaatctccaagatttcatgttctatgtggtccaaccctgcattcttatttctccaagaaccggtaatccacaagcagttgtcattaattaccaaaacatcactatggggcctagatgattcacaacgcgtcgtccgcggattgcacggccgaccgttgcgctggcaaccgttg

SEQ ID NO: 49887 - DNA, 442 bp, Zea Mays
aaatgttctccgcagcttggagaaaaaaatgatgctttgttgatcactaaattagaaaacttatttaagaccatcttctctcggttccccttatgcttccattatgttactcacataatatatgttgtcattcatgggactgtgtttctgatctgatggaagcattttggcagtattcctagtgcataagatcggccacccaaaactgatgccacctagcaaacaataggaacaacatttgagacctgtcccaaaagcacgtcgtagcccagtacactttatataaaaagttaggtatatgttgccacattctgcactatatgttctacgggagatatattgtggtgagtcagggcatacttgcaaatgatctacagattagtatttacgtaattcgataaaaaggaaaacttatgatgacatggtaaaaacttgatgctgg

SEQ ID NO: 49888 - DNA, 1141 bp, Zea Mays
ctcatcaaatattttatcacacttagcaacactaaatgtgaacttaactttccccttttgtgccaagtgcaggtgagagtgagcagaagatttagtcttagtaggccaaacaagcttagcgacatgtaactttttccatcccctgaactaccattgtcgtgatattcatcctagggctcaggtggccaactatctttttgtcggtcttctgcactagaagtctagaacggtcacaggtgacttcgatattccggatggtccgacctgtgtgaccaggcttcaccttcgagcattgtggtgggctccgtgtgacttcggactgtccggcataaggtgtcgaacggtccgatgaagggccaaacggtctgagatcgtgcgtagactgtctggtcgtgctcagagccgatccaccgtataatgaagaagacaactacagtttccccggatacaagttcatcgacatatcataatatagttgggactgagaaaacacatttgttgtcgatgtgtttggcacaattgtttcggtgcccaattcatgtgacaaaaaattaggcgtatgagattttacaaatgcatgcgtcattttctctatatcctatgtcatactttcaatccggttatcaaaagaaattttaatagattgaatatcatcgaatgatgcggtgtcacttacaatggggagttgctgcaacaagctgacagtgaatcgcagtttatttcattctcccggacgaccttctggtggcaatctatgctgaagcgcgagaggtaccgcttctccatcccctcatgcttctaagcttgttgtcgctagaactcctcgtcccacttctttatgtactcttttaattcctcatgctcaatggccgataaattagttagccttgtgtcgctgtctagagaaacatcgttgagacctttagaatcggacatagaaaccgatttttgtagatttgcaatcttcgcccctagcggaatcaccaaaaagtgtactggctccgatgtggtaccaaacactagataaaataacctgacggtgctctctgtaggagcacgagaggtccgcgacctcgctacaggagcgagtctcctctggtcgcgtgcaggacggtttgctctctgggcaggacggtccgcg

SEQ ID NO: 49889 - DNA, 1006 bp, Zea Mays
ccacaacatacaagcaagccataaccttctcttcaccctggaggattccgaccggaatcttgggacgagattcctttaaggggaaggctgtaacaccccagtgttacttagggtttctcccagtaccccaacttgtgaccatcatcacatgtggctctaatgatgcaagaaacaccaaacttaaaggattaaaagcctaagcaaagtctctttcagctcaagaatcatacactaagcacatcatgcaccttaagagagaaaaacatccaaaaccctaacaccattcaaattggccatttgagcacaaaagggaaattgagaaaagccttgggaaaagtacaaatggaccaattaacaaagttatagtgcataaaataaactacaaagtgtagtaagaaagattggtcatctgaattttccaaaatccccaaaacagcccatgaagtgaagcctctaggaaaaattcagaaattcagaaatctgaatttcagaccatttccaaagttcagatgtgttccctgtttcccaaaactcgaatccttaagtccaaatatcaaagtggcgccaaaataccctaggaacactctggcgaggtttgaaaccaaaccaaaatcgtttgacatgatttgacataggttttgtcttggtttgaacagtgccgacagagctatcttcacgccacaatatcttctcacccaggccatatcttcactcgggactcacacacgacagaaagaccttggcacggtgaagagatgctacacaggatccttggcaagatatgcacgtttaggtcggccaacaggtgtttgaactcgggcagaatcacacctccacgtgttcgatcgtgtgctcaagcgctcggctgcgcactagctgccctctacgcgcgtgtcgtgcatggtcgatgcctgtcccccgcgcctgtgcccggccttgcccgagggtgcctataagtacctctagtgcgcagctgtccacacatcacttcgtcgcatgccccgag

SEQ ID NO: 49890 - DNA, 487 bp, Zea Mays
tcttcttcaccctcatcaacaatacaaacaatacacccattgggatcagctttggcaggatcacactcattgggatcagttttagcaaggccacacccattgggatcagcttcagcagggtcacacccattgggatcagcatccatagggtcacactcattgggatcagctctagtaaagagttccactggtacttcttcagcagcaggagcagaagggccagcatcatgatctaagcacgatactcgccgaagccgtctctttttctttatcttcccctcggcaggagcagttggatgactaacttggcgaagacgtttcaggcgagtaccctcaggccttcgagcatccacagctttctcaggctctggaatagttccaacaaccaccgtttcaacaagggcagaatcagaggaatccctcgccaatatatccagcatagcacctatctctgcatcactcggattactaggtatctcaaagtgaa

SEQ ID NO: 49891 - DNA, 341 bp, Zea Mays
tttaagcttcagcattccccacccactcagtgttgggaaaactctgttgactagatattcttggaccaaatctcgagtgctgatctgctctgccacaactctaaagtgaacttcgaccagttggcatggggagcctgtctttataaaacataaaggccttgtcatgccgaagcttagcctcatagggctcatcgccatgttcttgaccttcttcctccctttgctgtcagccttcatatagaaccattcgcttgtccagccagtaggccattttgtacgatatccgatcataggagccttgatgtctttccggtatgcaaagttataacaaccaaagttct

SEQ ID NO: 49892 - DNA, 733 bp, Zea Mays
actatggagttggtggagcaaaaataatggagtagagcagtcctaaacacgctcttaatcgtcattctcactttttggaggtatcaaacatttgacaaatcactactacaaaaacgattctagaggatagaccttctaaatatcagacgtagacgcaaattcgacgtgtcttctaaaatgtgcaacgatctacaaagacaagcaatttttttagaagatgccaaatgtctaccttcgaaaatgatccctattcagaggtgaaacttttatgggacccgtatttcctaatggacacgaagttcacatggctcattagtgtgaacacttatgattttgaatccatagccactactctcacactagatgacacggattgtaagttgctccatccaccgaccctacatgaagaaactttcaacacctttgtccagctttgctacctgcacttgtgaaaacggagaaacactaaaatctttaggggagaattgactacgcttcaacacacgttgaacgaatgtaagatggacgactttgggtacatcgaatgcggcaagacggtcgggttatcgtcgagagctggtgctctattcttagtttacatctctaatctcgcctcacgaagccttgagctaatgcttcatagttccttttcttctcctttctcaaaataatgtatccctgtttgtaaccttgttgggtcgacgcggactgtctttcgggcctcaatgcgatg

SEQ ID NO: 49893 - DNA, 474 bp, Zea Mays
cacacagggagtgatagttgaactagagcccaccctagagcgggatatcaaagaaggatagaaaggtgatgagaagatcaacgagatccatcagctaatcttagaagggagaggcaaggactttcgataagatgtagaaggcgtgatatggttcaaagacttactgtgtgtttccgacatcaagtccattatggagctaatcctcaaggatcctcatgagacagcctattttatacaccccagaagcgagaagatgtattaggatctaaaaggagattttggtggtacgatatgaaaagagagattgcagaacatgtttccatctgtgacaacgtcaaagaaccaaagcagagcatcagaaaccagtcaaacttttgcagccgttgtaaattcatcattggaaatgggatgaaatcaggatggatttcatagttggcctaccccgtaccggggccggctacgattccatttgag

SEQ ID NO: 49894 - DNA, 937 bp, Zea Mays
gtttttcctaatcctgctgcatggataacaaagtgaagttctaaagtcaagatagtctaaaaggatattatagttgaggccttgagggagttctcaaagtctgcatgaaccaatcaaaacatttcaatacgatatattgattgtggatagtcctaccagccctgctggcacgttttcattacaaaaccttgatggagcaactacccttttccccatccccttatcacctaacaatctcaccgtcaagtgtctggtactctggttatccaacgcataaaaaaacaatgtcttgtgttctctatagtataggaaatcagggaaagttctcctaatgttagcctgcctttgggttttccagaaagctacctttcttctggcaatgataaggtgctagtttgtcaccttaaacctttccagtttgtcgccaagtccagtcaggttgttattttcagtttttctccttcgttgccataaagctagagacgcttaagcttcaatgtggcatctactcatcacatgccctgtttgatgttcacagaaagttctttctccttgttctgtaaagatatgtttggtactcgactactggtgaaagtaatttgtttaattccttgatgagctatctgctatagtaaaatatgaagtgaccatcttaatttgttaagtgatgccttaagcaatgttgatggatataagtaatgccaagtgcccaagttgcctactggctttggtttttttgcatttggatatagttgttttggcatatagctgctacaagaggtcatagttattttagccatgaaacaacaaatcttccttttttttctctcccctagaatattgttggaggattaggctgcagaggagcaggtgatatttataagcctatgtataattctgtgacatggttagttttggctcactgattaatgggact

SEQ ID NO: 49895 - DNA, 376 bp, Zea Mays
acatagacatggttgcgtgccatgtgttgctagtactgcgctatcgctaggaggcaggcattccactgtagtaacctccatcgtctccatggccatgccggctgctccatacagtaccgatagatcagagctagcacatactactgttcgagtcaacaagcaacagtgtgacagtacagcacgctgcgcaaaataaaggacgctttaatttgttcatgtatatttagaattattgtatttatatatatggatcgaacgtccaccgatattacttgtttcgaataaagaaggaatacaaaggagatgtactacataaaaacataggcaattaattcttgccagcttaattaaaccaagcagcataatgatggattca

SEQ ID NO: 49896 - DNA, 369 bp, Zea Mays
gtagtagccgccgtttcgatcgtaaatccaagtcatggcgttcggtttcatcggcgattaatcggacagctagacaaagtccattattgcgtgtgcggttcttggttgacaacgaattaaatagtcatgctaccggcgtcgtgtgctatgctatgcctgggagtgggagtccaatagtccatcgcatcgtgctcgtgcgtgcacacctggtctcgtctctgctccaatccgacgtggagccgagaaggactgaaggacagagagagggagagggtttacaaaattcgtcgtgcgcgcttgcgtgccatatatctgcgtctccttgcgaagtccgctggctcttggagacggacgacgatagatatgatg

SEQ ID NO: 49897 - DNA, 295 bp, Zea Mays
tttgtttttaatgtttttcaataagtagtgtactaaagcctaacatacagaccttaatgttagatgggcaatatctagaataaataatgaacacgcaagtaggattacaatctttcttttgggagcataggctcttcttagttcattttactgttgttacaacggttatacttctgctatattagtgcatcatatccgcaaatttactcacatactccagaactaaatatgctaatgactatctataggtcgcatgtattagagatactgtgagcacaacaatcggaagtttaaa

SEQ ID NO: 49898 - DNA, 753 bp, Zea Mays
gttgctatagcaagattaaagctggattatagggcaagaactttgttacagagggattgacaagttatcacaatgaaaacagaaatcaaagcctagcaaagtgttctgtcagacactctgaatgggatttaccattgaacagtgaactgaagaagatcatcaggtacatcacccctcgccgccggtgacccttgcaccgtgatccacgctgtcgccacgatttgtgctctctggcgaggacataatcatggcacggtaaagatcttggcaccggataggctcaaacccggtcaacagtgagttcgttgtacctacttgggttgcggtcggccgaaatggtcctcgccggcgttggccgcttaccgaccatgtgccacgtgccttagggcattaccacgtcgcagttaaccactgaagcaagccgtccatcgccagaggccttgccacagtgaaagccacggtatcacctgcgccagtaaccttccttctctccgaccgccagcacgccattccaaaattaggagccaacacccttggacactataaattgagaataccattagctccgttaggtaatcacgaagccagagcacccactcctgcctccgattagccaccatagctctctaattcccattttcctccaaattgggtttccgcgcctccgtgaacgccgcgtcatggccagctctctacaggtccattcacgccctcctcgctctcgtttcaacacccatgtatgctatagaagct

SEQ ID NO: 49899 - DNA, 593 bp, Zea Mays
gatatttgttcatccaatccaagtatccaactgaataacaaagaaacacttactagttactaatactaccagtccaagataccacatagcacacattaccacccagttacctaaagaagatcttcatccaactgaaattcatcacttgcagctcctcttccacctaattcttgttcgccttcatcttcatcatcattcatttgtcttactgtctcttgttcttgttcatctttagcaggagaattgtcatcttcttcactatgccttgagatatagctgctgcatttctgggtcgttttctagttctaacataggtttgtgtctgagtctgagaggaggaaccaaaacctgcagcagcagcagtcctgggcaaatttcggtcctggagaccctgagttgcacctagagcttcatccacaccaccccaaatgttatcaccatcatttttcttcaacccattcattttgccacataaactcttcaagcaacagtggattgcttctctttcccttggaacctagttctcttatatttgtgaacctattatccatcttcctgttgtagcttacataggccaattatttttagtctct

SEQ ID NO: 49900 - DNA, 349 bp, Zea Mays
ctaagggctatttggcagctttcatcctcagcattcttctatgcccttaaagcgttgctcaggattaagccctacaaaaaaaggggggaggaaaaggatcagcataaaggtaaaagatgtaaaaatgatttgctcataagtcaacaacttttatacctttaggctattgtaagcgaggctatcagtgaggtcacccttcgacatagcagagaggccaacttcaacctttggaaatcctatgtttcttgctatctcccagcacacagatatttccttattgtccgggaggcagtacagaaagtcatcttcatcggtgccattgtacaccaaggatcctttcggatatttc

SEQ ID NO: 49901 - DNA, 704 bp, Zea Mays
atgacccacgatccagacatttctgggaggattgccaagtggtatcttgaattgatgggatatggatgggatctcctacacctcgcgaacatcgattaaataataagtccttgctgacttcattgcgaagtggactgagacccaattagagccaacacgaaccatcgagaaatgttggatcatgcacttcgataggtcgatgacaaaggggagagccgatggcggcctcgtttttacgtcaccataaggagagtggctgcagtacattgtgcgactccactttcaagcttctaatgacgtggccgagtacgaagcactcataaatggtttgcgcaatgtcgtggagctgggtgtccaatgtctggacgttcaaggggactcctagctcgttttagggcaagtaatgaatgtcgcgatcgcaagatggtggcatactgccaagaggtgtgacggctagaggagcaattcgacagcctcgaactgaaccacatcccacagcgagacaacgaaatggtgaacaccctcgcgaaaatggcatcgggacaaacaagcgtgccaccagggatctttgtgaccgacctttttaaactaactgtccaatacgacgatgtccactagaggggcaggcaactcatgggcacggacccgccgactccagaactagtcgccatcgtggaggaaaccaaccccctagccgaccccat

SEQ ID NO: 49902 - DNA, 661 bp, Zea Mays
ggtctttggtgttcggctttaactcgttgacacacatcacatagtgcaacatgagtagccacatctcttttcaaaccgtaccaccaatacttttcttttacgtcctggtacatctttgtacttccagggtggatagaataagctgaatcatgagcttctcttagaataagttggcgtaggtgctcgatttctagtacatagattctctttttaaaaccatactatgccttgttcatcttccgtgaaatctggggttttacccaaactaatgagagttttaatttccttaatattctcatcagattcttgtcctttatgaatctcctattccaaagtcttctacttccataactgttgcttccatattattgagcataccaagattgagttgttccatttcctagcacaattcctgtgacattaaatgagtagtgatactgttcacttgacctttatggctcaaagcatctgccactacattttctttacctgggcgatattgtatttccaaatcatagtctttgagtaactcaagccatcttctctgtcttaggttgagttctttctacgtgaagatatatttcaagcttttgtgatccgtgaagattttacacttgtttccaatcatgtagtgcctccaaatcttcaaagcgtgcactat

SEQ ID NO: 49903 - DNA, 709 bp, Zea Mays
aaacgagccgagccgagctggctcgttatccacccctactgaggcagcagtgattgaggacttctaccggggatctaatgacttggccttcgtccgagccatactgcagaaagcgtcgaccacctctgaacatctgtttcgagaagcatacctctacatcaccgctaacgaaaaggctcaggacctcatcgagggagtgaaacctgcgccaccagcaccgcggcgcgacacgaaccagcaacccgacaagcgttgggagaagaggccccgtgaagaggtccacgccgccggaccacccgtctctcgtgcccgaggtgcacctcgcggaggtgagcggacactagatgacatcttggatgcccagtgctcgtatcacaaagatatgcgacacaccctgtggaactgcagagacttcaagtattccgtcaggaatggccgaccgttctagcctctaccacctcccccaccacgaggagggaatggcgagccccggcggcctcagcaacaggaagggggaggggtggagcattctcgtgcatcgacggggaggtcaacgtcatcttcggaggacacgggtcgcaggagaacagaaggctacagaagctcaacgaccgacatatactagtggcaaccaccagtgccccaacccctatcagtggtcagagtacccgatcaccttcagccgggcggatcaatggctcaacttcga

SEQ ID NO: 49904 - DNA, 586 bp, Zea Mays
tttttttatcttgtgtcgctgcaaatgcacattgtctgcatgatagaaactgattttacttctttgcccagttttatttttcgctgcatcacaattactaagtgcatagtatctcttacgtactctgttaataaggtgattacattggatggttccggttttttgttagcctccttcccatatctggaaatatgttcctgtttttagtatatacttagctacttacaatgcatgggctgctatcagtctaagattccttctttgaatatgatcttggagcaccaggccatgctttgatagttcctgacatggttcttaggctagcaagcttaaactaacatgagatgtccaaagcaactctgttagtgtttctgaagaccagatcaccagaactagggttttcaatgagcatttcaacaacaacaacaaacccttttagtcccatgcaacttgggtacctagagttgaaatccaatagaaaccacaattcaaggttttgtcactggatatctgttttccattcaaggctaaatctttggatatatttcatcctttcaaatatgcttttactacctctttccacata

SEQ ID NO: 49905 - DNA, 496 bp, Zea Mays
attcatcccatttttctgaaaaggccagatctctcaacatatattctaatatcttattaactctttctgtttgcccacttgtttgaggatgataatctaaattgtgaataagtttagtgcccaatgacttgtgaaactcctcccaaaacgtggagacaaattgtggacctctatctgacacaattgtcttatgtactccatggagactcaaaattcaagcaatatataacttagcatacctgattaccagatcccttactttactggtaagaaatgaggtggtctacaataacccaaattgagtcataccctttcgaggcttgggtaacccgacaatgaaatccatactgatgtcttcccacttccaagttggaataggcaatggttgcagtggtccgatagatctcaattgcacaaccttcagcctttgacaaatatcgtccatggggacatagcgagaaatttcaatcttcattttggtccaccaaaacatttg

SEQ ID NO: 49906 - DNA, 482 bp, Zea Mays
gaagaaatgaatggcagactaagtccttaaaaatctaatcagcaatttgactaagtaacagttaaattttaacaggcaagtgtcgcttctaagagtttgggagaagtaaaatactaaaatctaacagctgatatgaagtttgcgatgacaacctgattgactccgaagcatttcgacatgtcctctcaaattgttgaattacatcagggaagtgcatcaaacctgaaacagaacagagacattaaatagcacaagcaatgaactggaaaatggaaaggaagtgaagggtgttgctttatctcatgcaacccaagaacatagctaagacctacacactccctaaatttggattgccagtcagtgcacaaataaggatggagatttctggtgcttctattaatcatctggtaactaacagatggtcgcacaacatgtgctgcgacgctcaagatgaagggagcaaactgatgatagaatccaca

SEQ ID NO: 49907 - DNA, 324 bp, Zea Mays
attggacgtccagctcgtgggcgcaaggctcgcggtggcctggatgcgcagggatgctccctcaccgtatctccacgcatgcaaattgacacaataaaaagccactaagttgcatcggtgcgtacaagctcgtctccatacatacagcccaccaatcactggttaaatgcggtcaacggaatgtggagagcccagacgcacgcggccaggtatccaatcacgcggtgagtgtatcgccggagttgtcccttgcggttaacggcatgctagcgacggtgccactcctagtcctacatacagtgttgttgaccttttgtagaagac

SEQ ID NO: 49908 - DNA, 578 bp, Zea Mays
cccatacaaggcttcaaaaggtgccatctttagactggactggtagctgttattataagaaaactctaccaaagaaagacacgtgtcccaatcctttccgtagtgtagcacacatgcccttaacatgtcttccaaaatttgatttaccctttctatctggccatctgtttgaggatggtatgctgagcttcgtattacatgggtcccaagtgattcctgcaattgctcccaaaatcgtgccacaaatggtgctcctctgtctgagactatagtccttcatattccatgcaaacgaactatctggtcaatgtagatctccgcatacttctccgtcctgtgggtggtgtgtactggcaagaaatgagctgacttggtcaatctgtccacaatgacccaaatggaatcatggtgccgggaggtattgggcaatcccacgataaagtccatgcaaatgttctcccatttccaagatggtatgggaaggggctgcaaggggcctgctgtcttcaaatgactagctttgatcctctggcaagtgtcacactcggatatgtacttggcaatttccctcttcattc

SEQ ID NO: 49909 - DNA, 595 bp, Zea Mays
tggctactctaacctactaccgaagtgtcaggtgcaggtccataaccacagggaagaatcaaaggctagatgatgaattctcgaagccatggggacccgctccctactttggcggcaaagacgactgggtggactcacctataaagggggccagcctccgggtaccgtacgaagaaccaacaaggtcaagggttgtctgcaagggtggcaggtcgacgggtccttgctctgaatggccgctacacaacggcaccctgcccctccgagcccacttgtaagcgatcaaggagggtacaaattctggtgtaatatggagatttgtacttatagtcctataattaacctattgtacagtgcatgatgggaatatagttggtagccgggggttataggcctgagacagacgcgctagtcaaactgtccctctagaggcagttcgaaaagaaagcctctgtgattattaaaaaattcttactgttgaagttgtagttgccatcggtcaacgattagattgtggtcatttacgccatcagcggcctttgcacaggtcaattgtacagtcattgtaccagagacccgccatctgagttgtacc

SEQ ID NO: 49910 - DNA, 468 bp, Zea Mays
cgtggatcagtgcttcatactctgctgcattatttgatgctggaaatagtagctggagtgcatacttgagttgctcacctctaggagcaataaagagaatccctgcacccgctccttgcagcttcaacgagccatcaaagtacattctccacacctcggtaacctctgggctgtctgggacctgatgttcagtccactctgatacgaagtcaaccagcgcctgagtctttattgtcgtgcggggccggaactctatgtcgtgagctcccagctcgcacgcccacttagctatccttccaatagcttctttattgtgaagaatatctcctattggaaatcctgtgactactatgactttatggtcgtcaaagtattggcgaagcttgcgggcggttaggagtaccacgtatagcaacttctggacttgaggatactttgtctttgaggacccaaggacttcactgatga

SEQ ID NO: 49911 - DNA, 323 bp, Zea Mays
cttgtgctcttctcctctcgatcgcgcatgtcctgtcctgacctgaccggcccatcgccatcgccatagcatcgggggtcgagcagctcggcgaaatgacgcagctgggctgaggagagcggtcgatcgagagatcatccatcggggtcagggactcagggtgtgagcgagggtgtaggtagggtgggtaaagatggacaagatggagagctacctgaacgagaacttcgggggcgtcaaggcgaagcactcgtcggacgaggcgctggggcgatggcggagcgtcgtcggcgtcgtcaagaaccccaccaggcggttccgct

SEQ ID NO: 49912 - DNA, 504 bp, Zea Mays
ggaagaggggctaggagaggaaataaaatatgagatgcctaaggcttgggtgcagttactggtttacctaaggaacttagagagtactcagtaatctgggtggttggttctatgctaggcatctcaaaagaggtggatatgttgtttactcgaaagtttgacagggcaaggttgaaggtggccgtgcttgacccgaatttgattccgcaagtagttgatgtggtaattggagactacttatatgaactgaaattcagggtggagtcagaagctgaaggtgaccagcctttgccgatggatatggatcattttgggggaaatgatgatgatgaatttcaggatcaaaacaaggatcacaaattgggtgaaagagggaataaggggtcgagcttgaagggagcatcaaaggattcaacaggggcagttaacaaggtgtcagattctgtgctggacagcaacacgaccagcgggaaatcagtgtgcggtctccctgatgttgttcct

SEQ ID NO: 49913 - DNA, 291 bp, Zea Mays
ggacggaacgcacggactttgcgcaatccgttgacgcgctcgcgaccttataggcagccgtggcccaaggctcacttaatccccctcgtttccctatcctcgtgaccaccaccatagcggagagaaactgcggagcaaagccgagagagagaagaagagctctgtcgtcggtcggatcccacgttgtgcaccggggagggctcgggtttgcgtctgggctggtctttgggttacactgaagtcgcccacagctccgaattgtagcgcaggtggcggggatctccggaattc

SEQ ID NO: 49914 - DNA, 534 bp, Zea Mays
gttctctatcaacactgttaatttgctttctctagtagatcttccaacaattcaacactagctacctcactcgatgcatcaacagaagctaaaaagaatgtccctgcaggactattagcaagaaagttgatcaaatgttgatgtcttgtatcgatccatgcatctgacataattgagcagccatattccttccaagcttgttcatgcttcgacctcaatgttgttgtcctgttgatagccctatcaagccaaggtaccctaacatcatggtatgatggaccacggtatctaggaccaaattgcccaattgactccaacaaaacctcccagctccttgaattgacgattgcaatggtattttttctcatatggaaaatcggcgacatggtcgttaacaatttgcttgacttcctttcctttacttgtgcaagcttcaagagtttactgagtggttttatttttatgcttgtcagcaacaacttctggtgtcttgcaaaacatggcagccactgacttatcggacttttgggtggg

SEQ ID NO: 49915 - DNA, 709 bp, Zea Mays
acttgagaggataaagcatattccaagtccgctatgtgttttgcgtcagcttttttctctttttcaagcttcaaaattttttggtctgcctcagagaaagcagttaagtcagtctggcttttcttaaacttttttattaaagaaattaaaatcttatctttctcaataacctgatgtcgtaggtctataacttccgaccgtagattgtcgaaggctatccgagtactttcgtcctcggcatccttctgcgcttttaaagctttactcaaaatgagttcctggtagcagcaaagcaagatttaataaatcgatacgcagaagtattcgagtgataggtaaagtaaaggagaaaagcataaacaaacctttaagttattatatgtcaggcaatctgcgagatgatccttcggcatagtagatagcccaagctcaagctttggataacccatgttgtccatcatttctcagcaaacattaatctctttgttgtccaggaggcagtataggtaatcatattcatcatttcccccataaaccaaagagccacgagggtacttcaagtcttttccataatattgcacttcggcaatttgttcttcttttaattgtttccccgaagcatggcgaacaatgtatccaagatcgccaagagacatcgcttcgggtattggcaatgctattttctctagtaggctttcacattcttgtt

SEQ ID NO: 49916 - DNA, 458 bp, Zea Mays
gttagggtatcaaacgtttacatgcgctgccgaagcaccagatccaccgactatgacactgcagtactggaccaaggatgtcatcatggcataacacttgagcttgagcaaatcgagagacgaggggagcggactaggggttacagaaatgattgggagagctggagaggaaacaatgagagaggaagcaacagatccaccgactacggccacgggacaccggagtaccggaccaagccaccaaggatcgcacaacacttgagaggcgaggggagcgggcgagcggtacaacgatgaagactcgctggtaaccgttaacgctgggaccagaggtgaggcgaaggcgccagcgatggagcagacgaagacggcctgtgggggcgccatgcggcggcgtatacgaggggagagccgctagggtttcgcgaataggcgaggcgagtgcggcatatgcgagg

SEQ ID NO: 49917 - DNA, 427 bp, Zea Mays
aaagtctcttccccgaagcaggacgaatgatgtaatcagtgctttcttttgaagctttggtagcagcagcttcaacctttttagacgcaatttgctctgccgctttttcttcaactacggcaggctctgtctcagtgggctctgaaggcccagcttcggattcagcttgaattttttcagcttcgacttctgcttgcttcgtttcagccccgggtagagctttggaagcttcagcaatttttctcgaaggagcaggactcaaggattttgctatttctaacacaacatctaacacatttgccatccttctcctcttaggagttgcggcagaacccttttgtgctttcggcactgttatctctattgacgggctcaaaatctctagcatttgtgctatttttacaattttcgacccttcacccttatc

SEQ ID NO: 49918 - DNA, 921 bp, Zea Mays
cccctcaatcaattgcggagttctagctcacaatctctctgtccacggagatggcacacatcgacgacaatctaaggtgttcccggtgatccaacatgggctagttcaattggctgggccgataagcttctatagcatacatgggtgttgaaacgagagcgaggagggcgtgaacggaactgcagagagctggccacgaggcgacgttcacggatgcgcggaaacccggtttgggggaaaagaggaattagagagctatggtggctaattggaggcaggagcgggtgctctggcttcgtgattacctaacagagctagtggtatgctcaatttatagagtccaagggcggtggctcctaattttggaatggtgtgctggcggccggagagaaggaaggttactggcgcaggtgataccgtggcttttactgtggcaaggactcaggtgatggacggcttgcttcagtggtttattgcgacgtgttaacgccctaaggcacatggcgcacggttggtaagcggccaacgccgggagggccatttcggccgactatagcccaagtggatacggcgaactcaccgtcgaccgggtccgggcctatccggtgccaagatctttactctgccgtgattatctccttgccagagagcacaaatcatggcgacgacgcggatcacggcgcgagggtcaccaacggcgaggggtgatgtacctgatgatcttcttcagttcactgttcaatgggaaatcccattcagagtgtttgacagaccgatttacagggcccagatctcaaatttttatatgacaacttgttaatcctcctgtaacaaagttgttgatctataatccaactttgatcttgctatagcaaccatactcaaatactcactggatcacactcaaaatagctctcaaac

SEQ ID NO: 49919 - DNA, 810 bp, Zea Mays
cccggcaccttttttcttctttgttcagcgaatctgttattttttcgcgcaccactccgcgcgggattagctttaggattttaggagtagtactatatgaagagcagaagagggcattgacggctggccgatggcacaatattactggtgttgctgcttccctctcatctagtgtctagtctagttctgtctgctgcctgctaagggcaaacacaacatgcatgtacagcagcaccaacaccaccatgcttgctattggctatcgctagctatagatggagtgtgtgcactctatagctttgttgcaatattgcaagcaaggaccacgctatgctactggcgtctagtgtgttgtgtgttgttggcttcattctttcatgctctcactctccctctccctccaatgataatgatggtctgacctagctccatctctgattgttccaaaatcgacatctatcctggtagtctcatgcatctctgatcatctatacataaatggagccagtcaacctgcagagccagtactattactacaccacatgaataatactaaaggtcgtgcaccatttcatcgtatatgattgattctattaactaagtagatgtatgtattgctctttgactggtagctaggtggtgctagtactatattcccagtacccagtcaggactcaggagcatggatgtcttttgcactgttattgagttgcttccatcagtcggtcaaacagatataatacattgcaattggtattttttaggtgcatagcttgttcttctcttcttcagggctcaacctctgagggt

SEQ ID NO: 49920 - DNA, 387 bp, Zea Mays
gcggacgaagagcgtctcatcgtcaggggaggagacaacggggaccctcctcgccccttcaggcagatcaaggggaagacagtttaccttgagcagcatgagggcaggaagaagcgtcgtatggacagagccgctcgtgcagcacttgcagcggcaacagcagcagagcaggctgagcagggaggccagctctagatctcctcagataagataacgtatcgagtttgtcgcctcgtatctcggcctcgctccactgctcccttcacacctttcaccactgtctccactcctcctcccacttcactagctcctgtcgctcgagagccatccactacttctgatgtacccaccacctccaccactccagcttccactgctccccctccc

SEQ ID NO: 49921 - DNA, 539 bp, Zea Mays
tgtctgacgagactgaatgtaatgagtgcgctctacacatgtcaaacatcacaactttgcagaccaagtacgccaccttgctagatgagtgcgacgagttgagatctagatctagcttgttaggtgtgtgtaccgcttgtcctggcttgcagattgagctagcagagagagaaacgctaggataaccttgcttgagaaagctagtgcggtgagtgcccctgcacctacgtagtgtgcactttgtgagggtttagggtttagtgcatgtctttcgttgtgcctactatcccaacacctctgacaccgctcccaacaagctctcccctcgctccacccattgtctttttcttggttactcctctgaccacaaggggtaccgctgccttgatctcctcacccactgcatcctcatctctcgtcatgtcgtttttgatgaagatgactttcccccatgtcgtttttaatgaagatgactttccccttgttggatctgccccacctactgatctcgactccctccttgaccccgatcctgttct

SEQ ID NO: 49922 - DNA, 772 bp, Zea Mays
cggtcggagaggaggaggtgcactggcgcacgcgattggtggccattaccgtggcaacctcaccggcgatcactagatgggctaacacgagtcacgacggtgtggttaaagtgccaaggcatgtggcgcaaagctgcaaggtgtctaactccggcgaggggagatctgaagcgaccgtgagctaagcggacacggcgaccggaatgaacattggccggagttcatccactggtgatatttcttactccctctgcgttatccaactgcaccgagcacgaatcactgcggcagcgtgaatccacgcgtgggggtcgctagcggtgagtttattgagctggcgatctgatctggttactgtaccatcgcgtagctccttcagtctgtctgatagagcatgtttggggtcgatttgctccatattttatgtagtgacccgaccaactctctgcatcaaagtttttgcctaacaaaccagctttaactttgttacagtgttcaccatcaaatagtcacaggatcttactcaaaatcgagctctaagttcatccaacttcactgtttctaaaaattctgacataggactgactgacagcacaactttgagcctagttttctctcaactttgtataacaacaatgcttaatcccttaagcaaagttgtactcccatagtagctgtagacttttaatgtgttgagcctaggcaaaatctttgtatttttggatctacagagttccaaagtcagcctggtgcatcaggtttcagacttagt

SEQ ID NO: 49923 - DNA, 492 bp, Zea Mays
attttcgcctgttggatcctgctccaaccgcgcagattagatcaacctacggtaaaccaaggcgccactaggatcgttgatcctgagctcgaagcccacatctatacgcgatcaagggcatggtatatgagatctatggttcataaccaaacatgggatcggtaagcagccctgactactcgattccaatccaaccgcccaggacacaactcacccaaatagtatgctcgcccgatcctggccgctggttcccaaatccatggttaaccagccttcttccccaacgcaacgctagggcactgagtcgatcgcatgccacgtagacgccaatgctcgccaccgagcccccccaagagttcaccgcgaggcactcaggctccaagcccactgcctacctcactttccctaatcacccacgacaacccagtgaatcctaggataccgcagagggaaggatggaattcaccgaagtttagcgcgttgcgttgcccg

SEQ ID NO: 49924 - DNA, 639 bp, Zea Mays
ggagtatgatccagtggtgacagcggtagcggcgagagttgagccgatcaccgtgaacgagctctatgcgcagcttgtctcatttgagcaacgcatggaggcaaggggcggaggacagcagtcctcggtgaacatggcctccaagggaggccgtggtggtggcaactacaacaacaacgctcgcggtggcgggcgtggaggccgtcgtggtggccgcaaaggaggtcgcagcggtgggcgatttgaaccgggcgtctactgccaagtctgtggcaaggagggacacccggcctaccgctgttacaatcggtatgattcatcttatcaaggccccccacaaaagactgctgctgctgccactagttcatatggtgtcgacacaaattggtacatggacactggagctacggaccatgtcaccggcgagttggagaagttgactgtccatgataagtatcacggtggtgatcaggtgcatgctgcaaacgggacaggtatggagattgctaatgttggtcacagttttttgcattcacctaatcttcatctccgaaatatccttcatgtcccacaagcacacaagaacctttgttctgtcaatcggcttgcacgtgataataatgtttttcttgaattcca

SEQ ID NO: 49925 - DNA, 1814 bp, Zea Mays
cgacagctttcctagtaagcttcggtggcgaggaagaagaagtagacaggtttgtggctaatcctttcttattcaattcgtcatctctgacggtttatcagtacaagtatttataggccattagatgggccagattacaatcaaagaaaagccacacaatggcccagattaaccctaatgcttctagaacctcatagatctccagatctactactacaccgaactcacctctgcttcagtcgttacatttccccccccccccaacagaactcgcttgtccccaagcgagggcatcaggaaacctgtttttgaccacataaaaatcttcccaggttgctgaagaaacaggcaaacctgaccatttaatcatcacttgaggcaatgcatgattacccctccgaaccaaccttctgtccacaattttctcaggccaaatccctggaccagacaaatctgccaccttgggaagctcagcaaaaactggagtatgattagggtgaaatgcctttaactgggatacatgaaaaacagggtgtatctgtgcattttctggcaactccaaccgataagccacatcaccaattcttgccacaattttgaaaggaccaaagaacttaaaggataactttggatatggcctgttaaccactgtcttttgagcataaggttgtaacttgagaagcacaaattctccaacctggaattccataggagttcgccctctgtctgccatttgtttcattctattctgagcttgtgccaacctctctataagcagttcagaggccacttgtctttcctgcaaccaggtagtaacatccctgtccccttcctctctcaaccaaggaacagccatcacaggaggtgtataaccatacagaattttaaagggagaacaatccagagcagtatggtaggtggtgttataccaaaactttgctaaagccaaccactgcctccatttgtgaggatgatcatggactgcacacctaagatattgttccaaacactgattcaccctctcagtctgcccatctgtctgaggatgatatgcagtagaaaacagcaacttcactcccataagctgaaacaaatgtgtccagaaataacttgtaaacactttatctctgtctgacacaatagttttaggagccccatgaagcttaaccacagtgtccagaaacacctgagctaccccttgagcagtgtatggatgtttgagggaaataaaatgagcatatttggagaatctgtccaccactaccaaaatagtgtcaaaaccttcagatttaggcagcccttccacaaaatccatagaaacatcctcccaagcacctgtaggaataggcagaggctgtaacagtcctggtggatgcactctttcacttttagcctgctgacatacttggcactgccccacaaactgagtaacatcattcttaagtcccttccaccaaaccattttttcactctgtgataagtagcatgcactcatgaatgccctccaacagcactgtcatgtaaagctgtgatcaacttagtccttagagcagagttgtctccaatccaaatcaccccattcctccttataattccctgatgcaaactgtagccctgctcattaggactttgaatcaaaagctgagtcttcaactcttgagcctccatatcagtttcatatgaatttaaaacctcctgaacctaaagaggttgtacctcagacacttgggataaggccatgagataactcactctggacagagcatctgccacagcattttccaccccctttttgtatactatctgaaactgca

SEQ ID NO: 49926 - DNA, 351 bp, Zea Mays
ccctcccctccaacgccggtatgaactctcctagtagatttggtgaatttcctagcgcggttagaggtttcagattgggaaaaaaaccaggcaccgccgtcttttgagttggaggtggaagaagggacctgagccgtccatctggttaggggcggttcagatcagtttggggaatacctcttcactcggattaattgtgaccgtcggatattagcggtgtggccaagattagattcacatgtggcaccgttaggtctcatttcataaaatctgagccctcggtttagatcgaacggccagcggtgaaaccctctccacaatctaatctaaaccacaagatgtagatccaac

SEQ ID NO: 49927 - DNA, 294 bp, Zea Mays
cgggggacaacatcaattggttggggggtgccagcttggagatgcgccgcgggaggaagactgagtatctcgagatccctctcaaagacagtatcaagggatggcgcttggaatggttcatagttgagaattacgggaattctctcccctctcggtcgggaagatagccggatgttcgcaccccaagctggaccgagtctcccacaaatcaggaggtagctgaggcaggtgcgttgttagctgaggttggattgctgaaagagaggggtctgactgctgaagctgtggttgctg

SEQ ID NO: 49928 - DNA, 295 bp, Zea Mays
gtctctgcccctagtggggactttgggaatccagattacaaagtttttgactttgagtggacaacaggaggtggtgggtccatgttaggtgtgcttttttaaatgacttatgttggccttggtaggttacctcgccttggtctcggtggaaccttcactgctaggtacctgcccttaaggctggggcataggggaaattctgccaatccatttgggctggcatgatggcagaggcaaatttgacagaggaggttctgaaggatgccactatccaccttcgttgtgtaagtcgcca

SEQ ID NO: 49929 - DNA, 1133 bp, Zea Mays
aagacagcgcaacaattacttaaagacgcagccggaataatgttgattgaagtctatcattacaaccacactccgcacaaagccgcccacgtacgtagccggaacaatacaagcgtacgaaaacgaccaacaggccacaccatcattacaactacatacacacggcaagggcatcacatattacattggctcaacctttgggatgatacccatctccctgtagttgaacatcattatcctccattcctcaccctcaaaaagatttcgtagctcgccctcacctacactcgccccaattggcgaggataacaattctcgcttaccagtcccgtccacgcgaagaagatcactctccatctcactacgatgacgcctaccacttcgcgacaattcactcactctccgtttcgccaccgccctatgccgcttatacccagtactcgcgcccgggagcccctcggaaccctccacgcacggcgaaggctccgccgcaaccacatctaacgctgcaaaataatccaagtcctcatctgaagactcctccgtccacacaatcgaactcccagaatcatcaaactcaaaacacttagacacagagccaaacgaatcatcatcggaagccacagttgaagccgccacaaacatagtattgtcagtagcggttgcgtgcgcaggcccaaacctcagaacctgcacagcaaccgaggtttagtatcacatagacaaaatttacaaactcctcaacacctattcagccacctgcgaaggcccagccaaggccgtggggtcttcggcagccggctcggccaccgccttcaaggcgtcctcgcccgtcggcacggggtctttgctggctccagttggcactgtcggtgcaggggttgatgaggggccctcgccggcataagacggcagcaccagatccgcctccacagcctcgggtagcgcgccgtctagaccaccaaggtcctcgacgccttcggcatgcgccatctgcagcaacaacacacttattcagcaaaaccacacatacccccactcataaccacacaaaaaccagactttaccatttatattgcccggtcggaccgctcctggaccgtttctcggccgtgcgggccccacatcctgtc

SEQ ID NO: 49930 - DNA, 596 bp, Zea Mays
cgccaatcgagccgagcgacgggaattctggtgagaatcaccactctagatgtctctgctttacatttctatgccggtagcagttcgtaggctcgggcagttcgctgccgtgtctttggcgctcagccgcggcatgcgggctggagaaagaaatgagaggagagagagaacactgggaatcgggcggcgtctgtgcttgggcagccaagggttgaagacgatgtgttggccgtagattggggaatcaagggtgtagattagatcgggggcggatcaggccagggtgaatgcggactgttcgatcgcgatcgggcaagccgaggcgatcgcaggggtttttaaatccgagccgtataattctgataggacgatccctgatgcgctcacatttatttaaatcagaaccgttcacgcgtgatccaacggcttggatccgaagataccccttcgaccgcaagttttgcagaagagcccttccagtatttaagaaccaacccgcagtccaccctgtacaacgcttgtgtctcggtttcttttgcgattgagcccctgcgttttccagaaagtgtggcccagtcccgagatcagaaaaaaac

SEQ ID NO: 49931 - DNA, 1126 bp, Zea Mays
ctcaaggggagatctatatccaaaaacttcatttatgcctttgagctgatccaatgttgccacaaatgtaaaaaaaccccaccctggtcctcaagcttgactttgccaaagccctcgataccgttgattagggtgccttgcttgagattctggaagctcacaagttcagttgtaagtagaggaactgggtcagaatgttacttgactcttctataacctctgtccttgttaattgcaattctagctcctggtttccttgtaaataaggtctgtgccaaggcgaccctatgtccccctacctttttctcttggtggctgacgtgctatagttgattatcaggcaggatagacacatcagacatcctttgtctaacgaccaaccttacacggtcctccagtacaccgacagcaccctcatactccttagagggtcaccttggtgtcgggtatcataattaggggtacccagattttgcccctaaacacgcttaacacctaaaaaatcataaggcacattctccaaggtcaagaaaggataagccacgatttgcccaagacctcgtccgatgatcgctcgaaacaccgccttgctcgagcctgtcctcgggcaaaagcagcgctcagagaaatcctcatctcgcccaagcccctttctccacggaatagtggtttccgcctcgcccgatcccatctcggacaggaggacaaccccaagcccgacctcagtcaaaggtcacgggaaccgcagagacatgagcatttaatgtgaatacctaccccacgtgactccgcagtcaaacagagagcgatgggatcgtggtcccatccactttcaccaactatgatgacgcatgcccaggaataacgaccactgctcctccatgccgactactgtgattcgaacaactctggatgggacgtgcacacgtctaagcatggtctcaccctttagagggaacttgtaacaccctgattttgggggcataaaatttctttctaattatcacccaaaatcatgtgttactcttccttttctcactctaggctttctctctctctagatcctatctccctttttctttttgattagaaatagcttaaactagtggaggttaattatttattt

SEQ ID NO: 49932 - DNA, 331 bp, Zea Mays
caaggttctagcccctaatctctctgcctacggtgacattgcgatcaacgaataacatgaagtgttctcggtgatcctatgggttctagctcaattggatgggtcgagaagcgtcacaggcacacagggatgctaaaacaagagcgaggagggcatgatcgaacaagtggagagctggccacagcgagctcacttagtacggtgttctggaccgatttgggggaagtctcaaattggggctctctggtggataatcggaggcacgggtgggtgtgttgggtgcttgactacatagcggggccgatggcacactcaatttataggatccgag

SEQ ID NO: 49933 - DNA, 729 bp, Zea Mays
gtgggtcttatctaactttacaataaagtatacaaaactacaagggttgcaagaagctagaaactcaggaaaatgcttagctaagaaaccttcagattcccaagtagcctcttcttctgtatgttggttccactataccttatagaacttgagtgtcctttttcatgtgactcaatccttttgatccaaaactcagataggatactccaaataagttaagtctagttccaaattaacttctgatatatccatcgtttgattgggtactcgaaggcacttcttcagttgtgatacgtggaacacattgtgtactgcagataatgattctggttgttgaagtctgtacgcaacatgtccacatcattcgagaataaggaacagaccaatgtatcgggctgctaactttcctttaaccccaaaatggttaactcccttcattggcgatactttcaagtatacatgatcaccgacttgaaagattaatggttggcgtcgtttatccgcataattcttctgtcgtgcttgagcttctctcaaattatgtcgtatacattgaactttttcttctatttccttgaccaaatcaggtctaaagaaccaccattctcctggttctgaacagtttaaaggtgttttgcatcgtcgaccatatagagcttcaaatggtgccattttgatactctcttgatagttgttattgtaggagaattctaccagaggcaaacagtc

SEQ ID NO: 49934 - DNA, 376 bp, Zea Mays
atgtgtccatctgtcaaccatgttcccaactgctttctaaaggtttttgaacaacttcctattgtttgcaccaagcatgcacctgcttccaataatttaccagaaacgaaccaaacaaatgtacaaaaaccggttgcgcggttccctgattaacatcaactacacgattgccagtacaattttacttggtattttaatcattcgggtgtgtcattgtagtacattttttagaaaggttagggtacaccatcatggctttttatgtaacactaaaaagcatcatattgacaaaaaaaccatgagaaaccgacaaaaaccaagcacgcacatttagaaatttattatggaccaaaaggtccagtagtcttgttatgaa

SEQ ID NO: 49935 - DNA, 910 bp, Zea Mays
gcaccgtcttaagtcgttgccgacttaagccgattgctccgttagtagggcatagtggtcaccccgagttaagtaagcgcgagcatgttgcaccgccttaagtcgttgccgacttaagccgattgctccgttaggtaggtcatagtggtcaccccgagttaagtaagcgcgagcatgttgcaccgccttaagtcattgccgacttaagccgattgctccgttaggtagggcatagtggtcaccccgagttaagtaagaatgcaagtcaatcgtgaacaaactgagtgtctttgaagccttttttatgacatatttcccattttacagagtacatcgtcgtcccgatagcttttgtaatacaactagggataaaacttcctgaggtgctctatattccaagagttcccaatttttgtgctgtccatttgagtgagacgatatgatcccggccgagtgacttctgctactatgaatggtccttcccgtaagggcgataacttgtgccgtccctcccccgttagaatttggcggaggacgagatctcctactgaaaaggatcgttgtcgcacggccttgtcgtgatagcgtctcagggtctgctggtaccgtgccgattgaattactgcgtttagccgctcttcttcgagtacatcaacatcttccaacctagttgcttcggcctctgctatgctttcaaagatcaacctcggcgccccaaacttgagatcagcaggtagtactgcctctaacccgtagaccaggaagaaaggagtgtttccatgcagagctcggctaggttgggttcttaggctccaaacgacgtagggcaattcccttatccactttcctgcgaacttctcatttttatcgaagaccttttttctgagtgcctccaatatcatcccgttag

SEQ ID NO: 49936 - DNA, 498 bp, Zea Mays
tgacaatcatgctcaaggttgttgccctttatgactttgtggatttggcatgcttttttggataggagggtcggacaacgatgtgtacatgctcaaccagccatcgttgttcatagatgtgctgaaggtgaagcaccaaatatgaacttcatggtgaatggttatgtttacaaccaaggatactacctcgacaatgacatctaccgttgatggccagtatttaatttttgtagaccattctcctttcatagactccaatgcatcgagtgtttgttgcatgtcaggagggcacataaatggatgtagagagggcatttggggtgctcaaaggctgatgcatattcttgctatcccataccattctttttcccaccaaatacttagtccgatcatgtgtgcatatatcattctacaaaatatgatcacgaaggatgaatgttgaggttcatatgacatggacgacaatgagatagttgagtcctcgattgcatcatcaat

SEQ ID NO: 49937 - DNA, 405 bp, Zea Mays
cccaaattggggctctctagtgagtaattggaggcacgagcgtgtggattggatgcttgaatacctaacggagccgagggtgtgctcaatttatagggcccttgagcggtggcccgtgaatttgagctcgcgcggtggcggtcggagaggaggggatgcactagcgcaagcgattggtggcatttaccctggcaagctcactggcgatcaccggatgagctaagatgagtcacggcggtgtggttaaagcactgaggcatgtggtgcaaggttgcgaggtggctaactctggtgagggtggatccgaagcgaccgtgggctaaccggacacagcggtcggagtgaacagtggccggagttcatccactgggtgatatttcttactccctctgcgttatccaactg

SEQ ID NO: 49938 - DNA, 919 bp, Zea Mays
aaaaattggagataaactggcgtaaagatggactgtcagtcaccactgatgattgaatcatgaccacaagtgacattgtcagaactttgagatcaattttgagtaggatctagttattatttgattgtggatgctatagcaaaatcaaagatggattatagggcaacaactttgttatggatggattaacacgttatcacatacaaattagagaatgaagctctccaaatcgtgctgtcagaacttctgatgaagattaccatggtacagtgaaaagaaaagatctccggtgccatgagctcaacaccggtgatctaccaccacaattcgcgcccgcctgggagattcgtgccacgggtggagtagataacgtcggggcgggtgaaaatatctggtgagcggtgaatccagtcgctggctggaccggccgtcgtgtcccgccgcgattagtcacgctggcatcaccggagcttgtcgtttttctggccgtgacacgtaataaccactcctccgcgtcgtaaggtttgtggcaagccgtcggttatcgtccgcagaccagttccctcttgcgcgccacggtgagcaagccactgtgaaatatcctagtcgtgttgtcagaacttcaaatcgtgttgtcagaacttctaatgaagattaccatggtacagtgaccaaaaaagatctatgatgccgtgagctcaacgccggtgatctgccgccacaatttgcacccacctgggagatttgtgccgcgggtggagtagataacgtcagggcgatgtgaaaatatccggtgaggggtgaatccagtcgctggccggaccggccgtcgtgtcccgccgcggtcagtctcgctggcatcactggagctcgtcgtttttccggctgtgacatgtaataaccactcctccgcatcgta

SEQ ID NO: 49939 - DNA, 516 bp, Zea Mays
cggatatttctttgttatccgggagacagtacatgaaatcatcttcgttagtgccattgaacactaaggcctctttggatattttagtttctgggcgtagtgtctggcttctaagatttcttcgttggataattttttcctcgaagcatgccgaataatgtaatcaacatcttcggccggagcttagggggcaggagattttgctttttccatcatatcttgccccgttgccatgccagtatctgaagtttgttgctcaactttatcttcaggcgcgacagccttcgttttaatgggcactgaaggcctagcttcgggttcagcctagactttgacagcttcggcaactttcttagtaggagcagggctcaaggcctttgtggtctccatgacagcgtctagcacgctagccatcctcctcctcttaggagttgcgacaggagctttttgcactttcggcaattctgcctctgctggtgggctcagaatttctggcattttcactgttgtttccat

SEQ ID NO: 49940 - DNA, 1253 bp, Zea Mays
cttgcatttgccagtcaaagcagtagtgccatgccataacaattgcatcagtcgtcatagggtttaggagttcaatataatatgatctgcaacaaagatcaaagcatatgtgccttttctgttctcggaaaagaacaaagctctgaatttcgttgccatgaggttgagtacactagtttgattatttttactgattttatccattcttttgggtaaatacggagtgaatactgctttgtaactggtgcaatgccattatctgtagggagagttagcaaagcagtggtaggcttcatgtttatccttgataacatatttgattttctatatgcccattagtttcccctaggacacaccattcagtttcattcttttagagaaaacgaacaagttctttgttgaaagctagtgatcaagtagctggactagaattggattgggcaaaaggagccactgccctgcaccaagctaacactaaattagcaggagctgcataaaatttgacacaacatgaggcatttgttagtttttctcatttactgtacatgtgattgacttgaatgttcccattatgtaaccaacaagtatacaagaaaaaatgttaaagatgaataatgttactgctctacctaaatttgtgcaagtgcttccattgttagaatagaacatagagtatcctgttttccttttctaacttcctaagaagtataattctcgattcttattttgacttctatttggttcttcttggtactactagttttttcctagttcaggtaggaacgtggcattcttgaacttagatagatcctttcctgaatctgatccttgttctgtgcatatttttttggctctagtctgtacatgcatgtctgctttagtttgttgaaatccagcccagacttgtagcttgttttattgatgagaatctgatccacatttccctgtaaatttgcaggctttgcatctgtagatcacttctgctattactatctcaggttttgaacttagaagccctagcaactcggtggcaactggtaacaacagcctagaattgtggttgttggagatgtttgtatttttaattcttgatcacgatgaggacatgtaaaaagttgacaaattagcattgttggtggtaactggtagcagcaactctgttttattttcatgtagtgtatttcctaaaaaagttatttaaatattgtgtaaactacaaattagcataacgcagttgattgtgggaacaagcg

SEQ ID NO: 49941 - DNA, 414 bp, Zea Mays
ccccgtggtagtggctttggttcttacttccccagcggaccacattttccttcttgtggtgatcgctatccccccatgggactagggaagactagtgtttttcctaacacttttcaggggcaaatgtcgcagcactggtttccttatcaatatcctaaccccaatgatgtgccattttctcaccccatgtcttactatagatgtaggatagaggcctagagaacatatggctcatggattccgtttgttcgtgccacatgaccgaaagcaaaaaatggttctctagcctcgaccccatgattggtaaggaatacattaaggtaatttctcgtggctccattcgattgaacgagagttttgttctcaaggatgttgctttggtttcaaatttgcatttcaatcagctttctattt

SEQ ID NO: 49942 - DNA, 850 bp, Zea Mays
cgggccccttggggttcagtcttggggtgtgcttgcacacgacatggctccttcttacgggttgtgcgctactgtactcttggtatggcattccatctcgtccgtccgatgtatgagtcactgtagcttctcaatgtcaacgtagtcgtacctgatgggtcctgcagagcatgctcacagtgaggttgagggtcgtgttcagtacggcttcatcttcaagtcgtgacccttgtgtcaccttccagcatgcgtgggtatgctcggggtatagcatgttgtcctgtcctttttcttgtacatgggtcgttatgtggagactctgatgtcgagatcccccttggtgttgcatacatggaccggacatggtttggtgatgttgcgtctttgtcatggtcgttgtgggtcggtaatgtcagcctgggttccctccttgcgggtctgctcggcggggacttgatcgtttgctctgcctcgcaggcttgctcggcgaggacttagtcgttcgtcccgcctcacaggttttctcggccgagatttggtcatccgcccgcctcgcaggtttgctcgttaaatgggtcggagagaggttatgggccttactatgggtaccccattcccaggtacccgacagtagctcccgagttttcgtgcgactccatggagtcgggtggaggctttcttgctggggatcaaagccctaagtgcgcgcaagcgcatcaatatgatgtagcccccgagcccccgagtaagccttgaggattgcttgggggtttactttgttcatggcgaagccttgtaccttcgttttgttgacctcttatgaccttctggtcgtatcagatacatgcct

SEQ ID NO: 49943 - DNA, 916 bp, Zea Mays
ctcaacgatcgcatttggagtcaactgatgaatctgcaccttgtacttatctaagacatcagtcataaaccggtggcacaacatcctcgaagacaatcacccccctactagcttcaccgcggtctccaaccctacaaccctaccggtcttcgctagaaaataacccaatgcctccatctcgtggacccttcgcttcatggtcatcgaccgacccaagtcgtaggtctctctatctgatgcattagagggccaccctctcggcagacaaaccggtcacgggaacagacaacgccgccacaacgatcacaccaggcggcggcaacaagaaagtagaatgaatactgccacttggagagggatacatgacaacataccaagggcagaggcggcgcgacaatcttcagatgagctagcccagagcacgcgtcgacggtggtcggcggcgatcagcggcggtgaagatgaaaatagagagaaccgagcgtcgggcacaacagtacaaacaaagaaaaccaacaacaacatatttatagacactcaaaaaaatacatacaaagtatgaacaataatgctagtccaatcaacattaaataaacttcacacccttcgagacaactcaaccgatgatcgagggcaacgttcgtaccattctccattgacttcgggatcagcccattaggttgagcctcacccttagggcctactgttgggacaaaggccaaaccagacctcgaaccaaccattgggtgacctcatctagaacctaattgatcctatctgtgaatgcaggacacaaacgtgatcggagacctcgggtccccacacggccgacacgggccatggcgccgggaggccctcacaccccctcatatgcaacaccgatggagataaaattgttcaccacgggggctcatca

SEQ ID NO: 49944 - DNA, 492 bp, Zea Mays
caaaaatatagataagtagacagaaaacaacattttgtaggcacacaaaaaagcaaaatacaccaaagcattttgaagtacagaataataattacatttgacctcgacgtaccttggttgccaccgagatagcagaagaatttgtcgatgaggttgctctcgccgacgatgtccaaaaccaatccaatctccacaccaggatcacggtgcaagcttttaaaaagaacaatttcatatactcaaaggttgaccttctaatgaatcatttagtaaataagtacatcacagagtgaactttcttagggatcaattaatataatagtatagtataacactcttttgcttcagtatttatgtttggttggtcctttaaattaataaaaagtcagtgggtgtattgtttggttacaaacacgcttagccattgaccaagctcaacaaactcggctacatccgaggacacgacccaaactgaactaaacagaaaggaat

SEQ ID NO: 49945 - DNA, 587 bp, Zea Mays
tttgcagtctgggatatagtgtgttctctgatccggtggtggggaaacgaagagcgatgactgccgccgctggtgcggagctttgctgcgctcagctatcagcggtggaagacgaccgatggaccgttagatcttggtgcacggctctgatcgagtctagacgtaagttgacggggccgttgatcccatagcaaacgactaggattagatctagacgaaataaatcctgagcgacggattagatatgggtggccacgatttgatttggcgtaccctttcgtctcaatgaatcgtggccgtgtgtcgtggatcggatggatccagggggatctcgacttctttaaatccctacccttgatttcagatccaagggttcctgctgcgtaccggttcgggagcgtaggattctaatccgagccatgtgttgccgatcggacggctcagatctattgataccccttcgccgagcaaggcttgcaaaagagaccttatacttttaccaaataaacccgccatccctccattataggaagacttaatagttaggcccagaactttatgcagagccccctaggctttgttcaaat

SEQ ID NO: 49946 - DNA, 515 bp, Zea Mays
gccggatgtaacctttctctgacagctcatcaatttgctttttgagttcaaccaactctagtccagatactctataagctctcttaaagatgggggcggtgccaggaagaagctctatggcaaattctactttccgctctggtggcgtacttggtaagtcctttggaaacacatctgggaactcagacacaaccttgatactctcgattgggtctgcttcactgctatcgacagccatctgataacaacttcttttctttggttcaggcgggactaactcggtcaccacttcctctcctagtggggacaccaacttgattgtcctcttatcacaactaataactgcctgatacttatctagccaattcatccctaggatgacatctattccctgagtacccattactatgaggttagcgggaaatgctatcccccttatttccacacttacattcaaacaaatgctatcagctcgaattctaccaccggctgagtcaatttgaatgggggttgac

SEQ ID NO: 49947 - DNA, 284 bp, Zea Mays
cacgtaatattcatcgaggcctacaatttcaaacaacttgtatgttgactattgagaaaaatgccaccaatgcctgcccctaacatataggtctactatttttcttactgaatttgttatattcatcagttttgttgatatgattaatatgattggcatcttgtatattgatgttcttacgagtaatagatcacacatacgtttttatggtatcacgaaccttccattattatatatctaaatttacctaagatcagagtagtgattctatgttaccatgctcg

SEQ ID NO: 49948 - DNA, 1175 bp, Zea Mays
ccagtactaacttgtctgaactgtgtccgccttctgcgaattagctactacttgtatgcatttattgtgtttttttagctgtggagttagtatatctgatacttatttggatatagtgttcaatacaaagcagtttatagaagttacttcttccaaaccctacatacagttgtacacgcacagctaattcatctgaagatcaatcccccttattcctttaatttcttctaactcaggttacaaaaaaacagaaggcctcaaaaaggaattctggcaagtctagtttgaggtccttgattctaacgaagttatatggaaaggaaggccagaaagagaagatgcttccggttgcaccaaagctactccgcactatttcgatacactatctggaaagcaatgaatacgttcttgacggcgaatccacttcgagcggcgatggttcttcaaacagtactaagccgccgatgcaaaatgctggcgatatgatgaatctgcaccatgctacatctagcgtcccagatggctgtggtgtcgattcaagctcctcacttctcctaaagatagacgacgtccgtacgaagcgaaagaagagccaccgtagcatttcgatggacgggattcttcacaaggtcccctatgggaagaaggtgtccggagatgtgatcagtgaaggtctcccccgatcagcctctgccacgtacgatagggacggcgcgaaaccttactttggtggtgctgctgcaaagaggcatgcaaaccaagggtttcggcgttcacgttccctcagtgaatcctgggaaaactactcgcgcctacttgattccatctcgagtggtgagtccaaaagaacactggccagctctaagtctaccagggatcattccctagatggccctgtcgcgagtacttcattgcaaagaacttctgaagccttgaggtctcaaggtctgggtaaacgtgatgagaacctcgtgactgcagaagatgcgttggcgccacatgttcaagagaaaactggtgaagttgctaagggtcagagctccagcgatacgatggtcgctggtggctctgaaaatcctgctttacctgacgagcacgttgacgacaaagctgaagaaaacacatgcgctgctccttcaccttcagaagctgtcggtatctcagaagaacaggca

SEQ ID NO: 49949 - DNA, 475 bp, Zea Mays
cgggcccagccggtcagagccattttccccggggtgaatcgcacgtgtcactgcgtgtgggacctgtggctcagaatcttccctgccgcatcggactgcagcgagatccgcggcgagcttgcaggccgtgccctggttcctcggctgcgtgatcctcgcctgcacggacttcgctctccccatgggtataaaaccggagccctccatggcccctctagggaaaacctagcgccgccatcgccatattgccatgcatgtgtgtgagggtagactgaatcctcgccgccaccgacgttccacataatcgctgttggcgtggccccgtgtttgggctcggggcactcgccggttcgtgctggagcccagcgtgaagtcggttaaccggttgcgtccacggatgggtgttaattgctcatcggagcacgttatcgccgcggagccgctttaagccgcagactggtttcgtcaccaagcg

SEQ ID NO: 49950 - DNA, 301 bp, Zea Mays
aatgagagagtgtgagctgcatcgaggagaatttcaaagggaccatgatcaccattggtgaaggaatcgaagaagcaacaagcaatctagtctgatcaagtgatagaccacgataattggttatgagcttaaatacgaaattgaggaagatgaaggtgctctaaggttgaagaagccaagttttctagacattagaaagtccattataaaggagggcaacttgaaggtgtatgctaagcttggatacattgagaatagtaagtttgtgcgccttattggcgataatgagacatcacagtcg

SEQ ID NO: 49951 - DNA, 470 bp, Zea Mays
atgacagggatcaacttctttaaatctaaaaccaagggggcttctcagttttggcaaggattacataaagttaaacatttgttccaatagagggtagtgaacattgtccgaaatggagaaggcactctgttttggaaggatacttggatgggagaggtacctctaagtatcagatatccaaatgaccaaatctatatgaaatttgcaaggataaggatgtccttgtagctgattgcttcgatggagataatggatggttggaatttaagagaccactttgtaataaggattttagcgaatgggtgattcttaaatctgaaatgcagaatcatggtatttcacatgggagagatacaatgatctggaccttagagaactctaatatgttctctactaggtcgctgtataggtttatgtctgatggggggtcaggaataatatttataacatcatctggaaatgcaaagttc

SEQ ID NO: 49952 - DNA, 396 bp, Zea Mays
cctcccgtccatcaagggcatggtcctataatagacgacccttggcaccccctgctcccccactgagagctctactacctccaaaggtccatcaagggcattgccaccgttatcaagctcttcgagctccattctgcttccactggatgcctgtcatcctcaaccagacacgactctaagggaactctatcgatacctacgacacgtctctaagggaactctaccgacacctgcgcactggcaatgccgatcctagcttcgccgtgccactgccaccatcgatccatgtttccaaccacatgccgacgctccactcggtaccaggaggtgcataattatatactatacctatccctctcattcttttattcgatcacacactctaaatcgttcttg

SEQ ID NO: 49953 - DNA, 742 bp, Zea Mays
tagagcacaagctcttaacatatcttctaacacttgatttattctttctgtttgcggatgataggctgagctgaagtttagcttggtatccatggactcatgtaatcttttcaaatgcgcgaggtaaattgggttcctcgatctgatacaatcttcttcagtactccatgcagataaacaatccttgacatgtataactctgctaattgggctctcgagtaagttgtcttcacacgtataaagtgtatcaatttagtcaaactatcaactataacccatatggaatcatagccgtcacgggtacggggtaatccaactatgaaacccataccgatttcttcccatttccattccggtacctttagaggttgtaaaaatcctgctggtctttgatgttcggccttaactcgttgacaaacatcacatagtgcaacataagtagcaacatctcttttcaaaccgtacccccaatacttttcctttaggtcctggtacatcttagtacctccagggtaaatagaataagctgaatcgtgagcttctcttaaaataagttgacataggtgctcgatttttggtatacatattctctttctaaccatacggtgccttgttcatctttcgtgaaatcagaggtctttcccactttaatctgtgccttaatttctttgattttctcatcagattcttgtcctttacgaatatctttttccaaagtggattcaacttccataactattgc

SEQ ID NO: 49954 - DNA, 601 bp, Zea Mays
ttttttaaaagaactaacgggatgctgttgcctgttatagtatagtactggaaaactagaagcctttatgtttggtgcaatcatctagagacggatgctaccaagtagtagcgcgcttggctgacctaacatcatgtactaggatttgcgtgctggtggtccatatcattatggtcacgaatcctgatgcgggcaggtggtgctcctcgatggatggcggtacacgggagtgggtcctttagaaaaactacatgaggcgagactttggtccgtttggatctaattttttagtaggttttgtgtctgtacgattaaggctctctctaatagagccggtaaaggctcctctaccctaaatataaagaattaaacggttctctactttctccaataaagtcctcctcccgcccttcgtaatcctcgccggcaactccacgtcctatcaatcccccgcgatcggcgatcccatcccttccgaaaccagcgaaacaagtatccactcaccttgcccgacaaatgtgccgcccgcgtccaagatgcagtcgatgatctcttttttttccactcccctcccttcctctctccgcccgactcgcacgcg

SEQ ID NO: 49955 - DNA, 2562 bp, Zea Mays
tcaaacaattagagaactaaatagattaaagtttactaaactagtttctggttctctaagtaaattaaacttaaacagactcaaatttctaccaggagctgttgtaagggtatataatgtttctgcaaattttcataatttttggtgcgctggttttatttctaaaattcatttaggcattccagaggcacttttaattacccaaaaatttaattatttctgcaaaaatcctaaaactgttcccagcagaaactacagaattttgcggattcaacaaaattggtttcacaatttttgcatttttctacatttttttgcgcattttacaagttggcagctaaaagaaaaagacaaaattctaatggcgattgggctgaaatcaaaccgctcggcccacgaacacaggggaaaccggcccgtgccagccacccgcgcgcaacgcgtcacttatttagcacaaaagccctcaacgaaacaagctaatgagcccaagcactaagcactatttgtataagtcactgacaatcactcatgggtccctggattcctaagccttcacaaaatccatccttgggtcaagcaggtagctccggcgagctacataacaaacgcagggatgtggattcgttctgggcaacctacgactgtgaaatttatacgaagggtcgctcgagtttcaccagtatcaatggagtacaagacatgagatcaacactaagaacaacgtcaagttccttgggtcacggcaaaaggggatatcagtggctgctcaccagatggaggagcaaggatcctcaagacgacttcagaccgaacactcagatatgaccagtcgcgatcgagggaatacgaacgaggaaagggtgacagcaaaaccttgagcaggactaagtaatgagcacaagcagggaccgacaatttactgcccgggtggccacggctgtgaaagaatacggacactggacaggctctgtccatatctgaacagcaacgtgtttcagctacgattggcatgggctgggcacgcggcttcgactcccaggtccacgcaagctcaaactacaataaggcaaaaaccagcgcttgctagcgttttgacagaggagcatgccccagctgagtcagtagcttctaccaaattctattgactgtaccagacttcaaccgtttgtacggtgaaaaaccccccatttctttttcgcccagtattagaaactcctaggcccctttctaattcacgtctagccacatccaacctcatccgaaactggacagctcagtggaatacagcagtgtcctaccaactaatcaactctgaacttttcctttgttttgttttgactgaacctccaatgttcacgtccagtctttcagaaatttctaacggtagctgacccatgtagcttgctaaacatgtttccctaacttaagattatcctattactgccacaaaaccgaagtcgactgtcacagaacaaaactacgaccgctcaaagtaactccgacctcctctctaccagcttccgctaaactaagtcagaataaaaatctgacagaagtaacttaggaccagattatttttcactttataccataccagcccacccccatcaagggaacctgctctctattcccagggctagctatttgctacaaaagtctcaacccgactctccatgaattagccgctacaggtgcctgaacagagcaaaatactactaaaattcagtacttagccattgggttaaatctgaaactgaaacctgatgatccacttttggacacccttcccttctaatttcccataaggacagaccttgcccattacaccaaacttgttcaccaagtattggtcttccacttttctctaaacttatagcatcaatactgcacagatctccatttatgctactccaaaatgaggcacatctcataggagccaaattactgaaattcagaccagtacactattccccatctgaagctgtagaagtctgacagcccctctgtaggcgccattttctgctatatttgtgtagaaccaaaccagcctcccttaagcaaacttgtgccttggtaggtaatctacaatttctctatagcaaatatggcccaatacttcactaatcatccacaaaagggccccaatgttagaccaattatacacatttctaaaatctgaactgcactaagtctgaaatttcagatttgaggatagggcctttgggctaagtttttccaccagttttatacagcattagtggcatgacccttaatcaaatctgcacaccaaagtatgggcttccactttggtacatcactcatagcccagaattacatggatcagcccttaaggagtatcccaaatctgcttcagactgaaaaatcagcaggactgaatttctaagtctgattttccaaactgaacactgcatctttaggctcctttttctaccagttccatatagatttagagctttaatacttaataaaagttgttctcctatagttactctacaagtttactatagcaaccttttgccaaaagcccccagattaaaa

SEQ ID NO: 49956 - DNA, 716 bp, Zea Mays
ttggcgtatcacctttgaagggtttgatcaagccaacatgaaaaacattatggatgcgagcgtcatctggaagttgcagccgataagccaccgtgctcaccttttccggcacctaaaacggacctgtatatcttggacccagcttgctcttcttgatgccaactagtgctcgtgcctggctgtgtagaagtcgcagccatacccagtcacccacctggaattccagctcacgatggtgttcatcatagtgccgttttgcatatgcctgtgcttgcagtaatctttctcgaacatccgagagaaaaatgtctctgtcttttaatagatcatcgactgcatctatggttgttgttccttgtgtatacgacagtaagggtggtggtgaccttccatagaccacttggaatggtgtagtgcggagagctgagtgaaaggcagtgttgtagcaatattccacccatggcaaccaatcgacccacgcccgcggcctatctcctgttaggcatcgcaggtacatggctatagttttattgacgacctcgtactgtccatctgtttgggggtggaaagtcgtgctcatgcggagtttgaccccagccaccatgaaaagatcgcgccagaagctgcctgtaaagactggatcacgatcgctgacaatggaaagtggaaatccatgaagacggactatgttgtcaaagaaggctcgtgccactgag

SEQ ID NO: 49957 - DNA, 801 bp, Zea Mays
caccttttgaagctttatatgggaggaagtgcaggactcctctatactgggatcagactggagaaagacagttctttgggcctgaactgattcaagaggcagaggaacaagtccgtataattcgagagaatttgagggtagctcaaaccaggcaaaagagctatgctgataatagaagaagaccactggaatttgaggaaggagattatgtgtacctcaaggtgtcaccacttcgtgggatgaggagatttaaagttaagggcaaattgtcccctcgctttattggaccattcatgatctttaggcgagttggagagatggcataccaactcgagctacctgctaatctgtctgatgtgcataatgtattccacgtgtctcaacttaagaagtgtctccgtgtccctgaggaacagttacaatggaagagctcagtgttcagggagatttgacttatacggaatacccgatcaagattcttgatactttgactagagttacaagaaataaggtgataaagatgtgcaaagtgcaatggagtcaccatggcgaagatgaagctacttgggagagagaacaggagcttcgcatagatttccccatcttttccctcgttcctcctaaatctcgaggacgagattcttgttaaggggggtaggatttgtaatacccaagtttgtaaagcttgtgaaataagaatttctccttgtatgttttgacctctattcagtataacatatcaacatacaccaaaaaagtgataaacaagctaacgacaaccaaataatatgtgcatcatgc

SEQ ID NO: 49958 - DNA, 807 bp, Zea Mays
tctgccagagaaagacatttgtcccaatctttgccataatgcattacacatgttctcaacatgtcctcgagaatctgattcactctttcggtttgaccatcggtttgaggatgatatgctgagcttctaatcacggttgttccaagtgacttttgtagctgctcccagaaacgtgctacgaacggtgctcctctatccaacacgatagttattgggattccatgcaagcgcactatttggtcaatatagatttctacgtacttttttgtcttgtgggtggtatgcatgggcaagaaatgagctgtcttggttagcctatccacaatgacccaaatagaatcgtggtgcctggaggtgttgggcaatcccataataaaatccatgcaaatgttctcccatttccaagatggtatggggagaggttgtaaggtacctgctacctttaaatgactagcttgattctttggcaagtgtcgcactcagatatgtacttagcaatctctctcttcatgctggtccaccaatacaaggatttgaggtcatgatacatcttgttacttccaaagtgcatggaaaatttggagagatgagcttcgtccaaaattttcctcctgagttctgaattcttgggaacaaccagtcggtcttcgaaccatacaatacccttgttgtcctgacgaaagcatttatacttatccacctttttattgagcatttccttaatgacttgaacacccttgtcaccaagttgtgctatgattatctgctcttgtaaggttggctcaactgagatatgatccaaagtac

SEQ ID NO: 49959 - DNA, 687 bp, Zea Mays
cggatcacattcaggactgagggccctcactgttaaagtcatacgtcaggtttctattggccgacaattgtatgtacagccaaccgtgtaacccggtcgtgcgaagcatgccagaaattctcacctcgaacaggtgccccttcgcaactcacaaagctttttgcaaatacctagccacttcaatgttggggggctagacatcggtggactactgcccacagctcaaggcaacctaaaattcaccttcatcgttgttgaatacttcaccaagtggatcgaggcaagagccgtatccatagtaacctccaagacggcgcaaaaattcttcaggcagaacatcgtatgtcggttcggagtcccatatgagataacagtcgataacgacaaacagtttgacaaccaagacttccaggaattttgcaactctatcgacacgaaggcagtgttcgcctctgtctaccatccgcaatccaacgaagaagttgaacgcgccaacagcaagattttcagtgcaatcaagaaaaggctaatcgacgacaagaaaggcaaatgggcggaccagcttcccgaagtcatatgggcactgcacacaacagaatccagagcgactggatttacaactttctgcttgatgtacggatctgaagctatgacaccgcaagagctgaagcacggatctccacgaac

SEQ ID NO: 49960 - DNA, 596 bp, Zea Mays
agggtgtaagcatagttgttgagaataaattggagataattaggtccaaagttggactgtcaggctgatacagtctgaacttccgattaatagtgactttgatccaagtttgagagccatttcgactaagatccagtgagaatctacctagggttgctataacaaagttgtagagctactatacaggaacaactttgctgcagaacttggtatgtgttgccatgaagatttgagagaaaaaccagcccaaagattggctgtcaggtgctctgatgggagctcgcgatggtacagtgtcccaaatggatcagaacgacagcgcaacggtctcaccgccgacgaccgatctccaccgtgattcgcgccaccgccgttgtgattcacgtcgccgatgacccgataaggccgccatgtaaaagccatgcgcctggggataactccggtgactcaccgtcgtacccccctgctttgcggcttgagcagataagctcgccggtgaaccgccgtcttccggccttgtgccacataccggagtgtttccaccgtgtcgccgtgaacctttgcgactctccgtggctcgccggagtaactgccac

SEQ ID NO: 49961 - DNA, 443 bp, Zea Mays
cttcggcgttcactttggtggcgctgctcttgacgaaggtctgcactggatgccacattcaggtactcattggttccccttcgtccctctcggatgaggggttggaggatctactggaaggctatgatgatgtaaccaatcacgtcgtgcttagggtgtctgatcatgacatcattcacactacacgttaaccgcttagcgtgttatgctcaccactatcaccctggcaataatatatatgaaaagacttttgctttctagttactaccattgttggggcctcagagtcctttccttccgctatctatataggctcgtctgggtacctcccttctttgagagtgcgcgagagggagagagagaaagagaaaactggaaaagcactcctctctgtggatctctcgctagctcgtgctttccttcgcacatggatcagagaggct

SEQ ID NO: 49962 - DNA, 416 bp, Zea Mays
gaaaaatcccccgcaaaaacatgcgtcgaaaaaagaccgcgacgacggtcttcgacattcgaccaatacaaagtcaccgcgaggctcagcgctggccaccctcgcgtgcgacaactccgtgcagaagtcgcctaagggtgcagccggactagcacaacaagtgcgaaaaactgaagtcctccgcgaagactatccgtgcagaagtcgcctacgggtgcagccgggctagcgcaataagtgcgaaaaatcgaagtcctccgcgaagactatccgtgcaacagtcgcccaagggcgcagccggacgaagcgtaacaaaagcgaaaacggctacaccaaattgttcgcgcaaagaccgactacatgcacaccagtccagcataacaattacacctgaccaagcacgtaacgccttcacg

SEQ ID NO: 49963 - DNA, 539 bp, Zea Mays
ggtttataaatatgtgccataagcttgtaattgcttgttcatatgttatgcttgtgtttgtggtttctcttatgcttgcttagcttgtatagttaagttgttgttgctctctagtgtagcttttctagttaaatagtgttagtatagtattgatatttttatctgacaaaaaactcgtcaataaagtggttgatgcttttatttgacaaaaaaactcgacaataaagtgagattatgtgggagcagaaatacacgaaaactggaaagcaaagcgaaagttagctaaaacgagggatgcattagctgtaatatatatactcatatcaaacaaaataaagttgatgctcgaacgaacggctagttaagcttcttgaggccttgacagaattattccatccagtagctcgctccctgcttataattggttgaacacgtgattgatatgcatcgaactatttataataagataagtaatactcccagctgacgtttaattgcttcagaatttagcaggggatcggagctgacctacctgtgcg

SEQ ID NO: 49964 - DNA, 795 bp, Zea Mays
attaaaaccgtccgtggcaagcccaagccttatatttcaaggatcttctccaaaccaattatgttttatatcaaagtatttccatgcctgaccatcagctggatggctaagctcattttccacttctttcctcttcaacttgtgccattgtgcatccttagagttttttctgaagcaaacatcctcttcaatctaggaatcaaatgaaaatgccgcaacaccttctgaggactcttatttctttggtcaccatctttccatcttgatgaaccacactgggcactcattattttttgcataatcctttcgaaacaaaacacaattgttaggacacacatggattgattcatatccaagtcccaatgctttaataagtttcttagcttccttataagatgttggtatagaacaatgtgggaaagccaatgacaacaactttagaatagcagagaacgcaacattactgatctggtaacgagatttgatatgaagtaacttcactacaaaagaaaaccttatgtatgatgcgcctgggtgaagttcttgcgtcatctcattcaatacagatgcaaacatagaattatgtgcacctccctcttcagctctgaaaaaatcttgtaccatatcaggcaatctatcttcaaggttttcaggctcattcatacgaacatcctcattcatactataaagttcatgtagatggccggcttgttcactcagttcagcatccgattgttcttccctatgatgtatccacgtaatgtatgtgctcgccattccatgaatatataaatg

SEQ ID NO: 49965 - DNA, 357 bp, Zea Mays
taaaaatccaattcatttcgtatctcgagacttagtactgggcaaggtaaagcttgaatcatggcctgaaacttaacatccatttcttttcattaatcatagaggttttcctaggtcacatcatatcagaaagacgtgactatctagcctagtacatcatactgtgcctaaaagctaagctataaagagtacaccttactaacatggttcctactaacccatctaaccacgagcaacagaggcagcacttgtctcaggcgaaggggttctctagactgagtggtgtctaggctagaagctaggtcaaactccttggggtcctcctcctcctctctatcttcctctgcctccatctcc

SEQ ID NO: 49966 - DNA, 375 bp, Zea Mays
acccatgaacggtggaatagagaacttaatcttagcaaatggatcatggtctggttcaggattatgatgacgacgtctaccattacctcccataccttctcgattatgtgcgaggcgttgtcgcagaggtgcataaacatcgtcgtcatcatcgccgtcatccacaggagagtgagctggggctggaattggtggtgggggacgagcctccagtacgtccatgcgtgtaacaagttcaacaactcgtcgatcaagctgctcaaaggatgtcgtcgcagggtcctggtattttttaaaagcttcagtcatcgtgcacatcatctccttcaattccagctgagagacacactcatcatcgttaagcttaggcccctt

SEQ ID NO: 49967 - DNA, 574 bp, Zea Mays
taccgatccatctgtataatgattatcccagaagatagaaacctagggtatgccaaatctattaaagaacttgtgaaggattttcataagcagctttttgttctgagatgttaagctcaggactcccaaaccaccacatcttttaggtttgcatgctaatccccacgctgcttacaggggctttttcgcgttgatgtttgcacctctccataagcaatgtcttctatatttgtctacttgtttgactattgagataaggagcttaagggtgcacatgtagtatgtgggtagagcggaaaacattgcatttaccatttggagtctgccagcatgtgataagaaatgggatgtcgatgacaacctacgctcgactcgctgtagtagaggtaagaaagcttctagattaggtttagttgtacccatgggtatgcccaagtatgtgaaaggcataatcccaacttggcatcgaaagttgttcgctagaagaaccattttctgcttagtgggtagagcggaaaacactgcatttaccatttggagtcttccagcttgtgataagaaatgagatgtcgat

SEQ ID NO: 49968 - DNA, 302 bp, Zea Mays
gttattactaccaaatgcatagtcagtcattaagattaagactgatatgcgcaacactattttatccataagggtccttcaggggctcatgcataccattcgtttggagccattagttgacttcagatcaacaagtaaaatgaccatctgggtctaacgctcacaaagtcattcactggttgcattgtgcttttaagcacataggaaaaatgtgtgtgtttatattggtagtgaagtgcacggcatcagaccaatgctgccaagcaaagatttttatatgcagagatgtatagtccagctcg

SEQ ID NO: 49969 - DNA, 454 bp, Zea Mays
gcgtgctccggcgatggctccgccgcgcgtgtgggcggcgccgtcacgctctggcgtcggtagagaacagagtcatggggtccgttggattcaggatgtagggatgggtttagatctgggagagagtcaccgtgggccgttgatcgactgatgatcgggctggatcaaattggggcatagcgtttcgcccaggggggtttaccaccgtggatctttgatcctgcggacatcgtcgcgtaccgattcagttatgatgccgacttttaatctgggccgtccgatttctatcctgcggccacgaatccatcataccccttcgcgctgagtgttttgcataaaagcccctggatttctaataaaccaacctgccgtccatttgggggtttgcctgtgtctgggaacttttgcagagtagcccgtggccttttgtttatttatgcgcccagtccagaac

SEQ ID NO: 49970 - DNA, 1085 bp, Zea Mays
cgtctttccactcgctgcggcacatcaacttcgtctcgctgctcctgagcctgggctacacagtcctcgtggcagccgcctgcgttcgtgctggtaatgttaccctgaacccctccttgtgtttgtgtgcaaactgtgcatatagactccactgtcactgtcaaatcacagtaccttttgtatagctagagaagtacttgatcctagcagctggtagatatgatggaggaattaggttcctataaaaaaggctaaaacatttaggttggcatgacatattaggggaatcagatgccttaaatctatcggtagtactccccgctgtgcatggtcgtcgttagctagctgttcgtttgtacgtacaaattaaaagggaagatggtagttacacccttcgttatgctttgatgcttcgtctgcatgcataaaccagtcagtcatttggtgggagtcttttagccaatgtgtgttccagcagttttttaaaaaaactttgaactgttcttttgccaagtgaagtgtagcccatgaagatcgaccattaactttcctagagtttgttgagtggtacgcaactatactagcgtttaactacatatgtcttacacgttaattatattcttgacaggtttgtccaagaatagtcctgcgaaggactactcgctaagctcgtccaagtccgagcagtccttcgacgctttcctgtccatttccatccttgcctccgtcttcggcaacggcatactgcctgaaatccaggtattttttttaacatttcgaaatccaggggtgtcgtgtctttcttgcttgtccaaaccaaacagcgtggatgcatgatactgggctggggtaaactgacaaaatcggtatgggctgggctccatgctagctgagctagtatcaggaggcccccatgcataataattaataggacggaatcttgacccccggcccaaacatatttgaactccatcgtttctgcaggcgacgttggcgccaccggcagcggggaagatgatgaaggcgctggtgctgtgctactccgtcatcgtcttcaccttcttcctctcgtcgatcacgggcta

SEQ ID NO: 49971 - DNA, 504 bp, Zea Mays
agcacatatttgggtcaaagtatggagacaacttatatcatactattcatagggtgcagtgtgtcataaaataaatatgatgctcatgacatagtatgcactcatcaactttctacatcttatgtttttcttatgattccccctttttgttaattattctccccttttcaaaagtctcttctaacacttagttacataggactaaaggttagctttaatgcacaatttctccccctttgtcataaatctccaaaaaggatataaaggatataaagggaagaaattttgattaagcaagatttaaacacgctatcatgaaaagggtccatagatggcacaaacgtaatggataagtgtcaaaagtgatgtacctttgcgatttaccttttcaagggttttccagacttgtgttggatttagaattcatttgcaagctcttgttggtatagttgtgacataggtccaagatatcaaatgaatattgtcatactaattcgaaagata

SEQ ID NO: 49972 - DNA, 470 bp, Zea Mays
cttttttacaatcttaatgcaatcatagtaccatacacagatatctttttatagagaaactaaacaaacaaaatatgcaagtggagatattaattcatttattaaatgctataccaaagtatcaatactctctttgtagcttccctatgttcagataagttttccatacaaatggactcatggagatcaaggcagtgttgaatatatgcacagttgcaaggggaaaattcccaaaccttcagcagcaagattagcaaccaccttgacagcatggatctgcacatctagatcttcagacttcaacagagcaagcacgtttggaagaccaactgagtgtcaattgaggcaaaatgattgtcagcgtggcagctcaagaaagacaaatatacaacaacaacaaagttttttagttccaagcaaattgggatagatagagttaaaaatttagaaaccgggaacatggaactttg

SEQ ID NO: 49973 - DNA, 420 bp, Zea Mays
accgccgctttatcaagggattctccagcatagcaagacctatgaccgagctcctcaagaaagaccataagtttatgtggaccccgaaatgtgaagaaagtttccagatcataaaggagaagctcacaaccgcacccgttttaacactactggatatacatcaggatttcgtcgtcttctgtgatgcctcgaggcaaggcttagggtgtgtgctgatgcaaaacgagaaagtcattgcttatgcatcacgcctacttaagccgcatgagcaaaattatcccacccatgatttggaattagcagccatagtgcatgctttgaagatatggaggcattacctaattgggaacaaatgtcacatcttcaccgatcataagagtctgaggtatatcttcactcagccagatctcaacctccatc

SEQ ID NO: 49974 - DNA, 859 bp, Zea Mays
gtgaaaaaagaggtaactcgcagttttaatctggatagatctggatgtgctttttgtcactttaaaaatcatcttactaaggattgtcgacatcgctttccttgtgacatttgtggttgtgatgatcatgttgtgtttgattgcaaaaaatgcttgccttggaattttggtccggaactttgtgcgacacaagttgaggatcagagttttttctatattgaagaaaaagtggataatcggatgattaaagaaaaatccagcactgctattatcactgttgttcaagggaatgttagtgaaaaacagattgaattagaattcatgaacatgttaggcaagaatttatggcggtggtctgctagatctgtgggagacaataagtttgttatgagatttccagatcctaaaatgataggggatcttggatactttagacctttaggcatgagaagagcgaaagcccagattacaactgatccttggacacctgctgttaatgctaaaggttgcttgcaaaaagggtggtttagaattagtggcattcctatggaacaaaggtctctggtgacaattgctaaagttggtgggctcgtgggtaaggtgattgaaattgatgaaaggactagactcagaaatgaatatgtgagagctagaattgcttgcagggatgccacaactgttcccggtgttgtggaaggctcccttggattgtttttgtatgattttttctttgaaagggagatacactcggaagaggatgaacaatttcttgagactgggattagaattgatgattctaatcagaaagctgctaaaagatacaaatatgaaggtaaaatgcagaaagataagaaagtgg

SEQ ID NO: 49975 - DNA, 521 bp, Zea Mays
tttggagttacctgagttggaggatgcatagattgtttcagcagggaaacatggaaaaccgggtgaattgacgaagatgatggcaagtctagtttgtaagctgttgttcccactttagccaatacatggtatggcccaaaataacggaacgagagtttgttgtttgaacgacgggcgagggacatctgaacatatggttgtagtttgacaaaaaccaagtctcccacctagaacactcgatcagaccgctgcttatccgcttggtgcttcatccgttgtttggcacgaagcaaatgttgttgtaacaactggttcatatgaatcttgtcagcaatgaatgaactcaagtcgcttgagtgagcatcaaaggcctggatatcgaagtgctttggaggatagccatataaagcctcaaacggagatctacaattgaagagtgtggactggaattataccaaagttctgctgacgctagccaactgaaccacttggaagggcaagcatggacaaaacatcgtaaa

SEQ ID NO: 49976 - DNA, 364 bp, Zea Mays
gtaaaagaggacgtttgtatctgggatgtaaaaaaataataatccgtaatacgatcctttccgctaaagaatgaataatgacttgtagctaaaatgcattgagtaatgaagaggagtagcaattctgactccagaagaaaaggctaagcatcaacagaaaggaaatatgctgccttccccatcgagataaagcgccaagcctcctaacaaattgcacgaaaatgacagcttacaatcagaacagcaaggatacaggatacagtcatacagggcgggcgctagagtagggtaatgagcgcattgcttctcttttcacataaacggtggcgtacctgatgtgcattggaacacctgcaacattcat

SEQ ID NO: 49977 - DNA, 532 bp, Zea Mays
attgttttctccacttcgccatttcgtgagtcttgccttaactctatccttggttatgcttttcacgattatcatctttacccttgtcacctctatatcttaccttgatgcttatattatacctgtccaaaaaaccccttttctccttcgtctcaatcttatagttgtattttacttatttgcccttggtcgtattctcttccttgttgcttgcgagttttcaactccatcctttgttgcctgttactaccttcaccttcattgtctctccatcttaccttgatgactatcttatgtatgttatttaaaatccatctcccatctcgattcgatagaagtgttttacttataccgcccttggtccgaacctcatctttgctaggtgtgagtcttatcttaactccattctttgttgtactcataccactggcccttctatgccttcatcttttctctcatacccttgtctgttatcgcctttgacccttgcgatatttatgtcttctacttaaacgcttaccttgaacttatc

SEQ ID NO: 49978 - DNA, 624 bp, Zea Mays
gacaccttcggcaatcatggcagataaagataagggttcctccaagcctgccttggcggatgacatagggaaggggcctgctgaatttgaattggccaagaaggcaatcgaagatgatacaccgcttggtgaacgaccttttgaccaagacttgggtgctcgaaggtatcaggttcatcatggtatagggaaagtcaagggtgcgaagtagctggccgaggctatcggtttcgccgaacaacttggatacccttcggggtctactatctttggggtgggccagatgattatttatactgctactcagacaatatggaaactaaagtatgccgctatatggcgattaatgttggtttcccgaagctggaggccatgctttcgactgtcttctcaagacttttctgattgcccggcttacactcatcttaaggtaatttctattgatttttgtttttttagctttgggttgcattaatggaataacttatttttcgctttttatatcattgcaaggctttaaggaacaagaagaatgttgagggcgaagtcgcttagaaagaaataatgaaactcagatccaaagtgtccgggcttcagtttgattgagatgagaaggaaaaatct

SEQ ID NO: 49979 - DNA, 1070 bp, Zea Mays
gctattatatataggtggccaaatctaatgattaacttttttagtgctccactactcagcccacttcccacccaagttgtttgattccctcccctagcggctagcccactcgtgggctcgtggctcgcttgctcctttggtaattgactgatcggttagtgggtgacttaacccgccagctgccagtcccacctagcctccacgtcactcatcagctcgtcgcatcgtcaggaccccgcatgcagtgacactgctttgactcttagtccgcactagtgggcggacatagggttgaaaacggacggaaaaatctcgtcccgatccgtaccgttttctacatttgacccgatcgtttccgtatttacggaaaaatatggaaacgggacggaaacgggagagggcttatctcgtccgtttttgcgggatcccgtttttttttcggattgaacccgtatttattccgtatttgacaaatatgggacgagcctaatatgcattagtatataaactaaatcctcgtgtatttatgtgacaaattatagcacaattggccattgtaatcactagctcttttcaaatggcaagtgatctaaagtcttaaacaacatcggttgtagctaaaatgtacacatttagcaaccaaacaataatagaatgttgcctctctatatctatttgttttatgttattattctgccaatcaatcactagttaaactgacatcaataacatttctatttttattaaattatgagtttccgttagtatttccgtttctgttcgttttcgcaattccgtttatcccgctcccgtttccgttcccgactattccagacccgatcctgtttccgatgataaaatacggatatggaaacgggagaggggttttccgtccgtctccgtccgttttcatccctagcggacagcctgtcggtggcatcctgccttggcaccacaataccaccggccctcgctatctcactgcggtaccaacacacccgtcagactgcaagctgttgcctcattgtcgccatctcgcgtcagactcgccgatgtggccgctccgcccc

SEQ ID NO: 49980 - DNA, 417 bp, Zea Mays
gttttagaaactagcgattactatactagtttcaggtgctcacaccggtaaccggacataattagtgactagaatgcttgaggtgcatagttgtagaccttttttagaaccttgtccggtggcatattggacatatatggtgagtactctacctcacaaacacaatttacaacctttctgagtactctatccaatgtcatgtctgttggtatactagacaaattttctcttcaagagctccacaccctcctcactaggagcacttttgtctactacgacaacgtcggcgccgtctatctctttatcaactctgtccaacacgagcgtacaaagcatgtagagatcgaccttcacttcatccgcgagtgcatcactatcggtgacattcgtgtctgacgcgtcgtgacgacctcacag

SEQ ID NO: 49981 - DNA, 1573 bp, Zea Mays
tatggggacacatatgtgcgggtgtgccgtggtgtattatattggtggtggcggaaggtatttgattgaggtgtgcgggtatatgctgtaatatggttatactcgcaacaaagaaatatgtatgtcttgttaacacaacgtttaggttgttgtcgtataaccgtgtgaagaatgctcctgatggtcatgtgactaaagtgtgatgtagtggcaagcgagaagtaagttcaatatttttaaacgattagttgatagcacctatcgacatcgtcatgatttttgttgtatggcggatcaatgccttgtcgtcatagtctcggggaattttcggaaatgtgctagtgttttacggatggggtgaatgtacttgtgatgtcttagaataactgcgtgtcatacgagtatccaaaaatggtgaaagttggtgtatgttggtgattagaaaatggtcacttcgttagccaatagcaagcttatgccgagatttaaaatatgggcaagttaaattgaaatcatgcttatctagacgtgtggttaaataataataattttggcttgtgtagtgaggtggtgacaggccgaagtagtcatcacttcctctacgtttttaagtcgagtcaaaatgcggggtactagtagtacgctaggcaggcggtgttccaaatagataaatcgggtgatgtggtagttgtcaagcgtgatagaggttgagtcacttaggttataaattgatgctcgacatgtgaggtcttctaaaatatggtgttttaagtgactcgtgtgttgtccagtttaagttgagaaaatagttaagaaaaactaattaacctgctcccacctatgtttttgagttgcgaaatctaaaatactttgctaagtgttatactggttaaccaacttgttagatgactttagttatgctcgtggacacgatgatttgcttgttgtagtctaaatatgtatggttgtggtcgcggatgaaaagtattagtgctcatgtgaggtctaagttaaaatgcaaattatggtgtcaacatcacttcgatatcgattatcggggagaatgtgttgttaattaaatatggtacttctagtgctcataatgacacggataaaatttgtaagtctacttgttagtgcttatttgattaatttaactctaacaaatggtaaagtgttagaataactcaagtctctaaaacatggcaattcttgaattatataggagctgaaatttagtaattgttgttttggactgcacacagtgattggctagtgctgtatgtttgatgaacaaaattgtattttctgtagatatgtgctatagaaaagtggtagataactttattatcttgctggtgttaaaatttgacaggcataagtctgatcgtttaggagttatgatttttacaaattcagtaactgaatctgtccaaattctgtacagatttcagaaactgcattgtttgcctaatgtaattttagaatcagtccttgtcgattatacgaaagttgtagatgcttttctcatcttgcttgtgttaaaatttcataaccataggcctgatagttt

SEQ ID NO: 49982 - DNA, 379 bp, Zea Mays
gtcaccctaagtcgagtaagcgtgagcatgttgcaccgtcttaagtcattgccgacttaagccgattgctccttttctatcaccggcaagcaaaaatcctccgcgtcccgtgtccagctacttccaggtctgctcctgctcgttttaatcgtgtttcagcaccaatatacactcgtgatactcattggctccgcccttcttgcttggccatgctcaatcacccggaacacatgaacttgtgttcggtattgcccgccaccgtggtcagactaagtcagagccataaccacgcgattgaagcttgttctagggttgtctcatgtccataatacttacccaataattaaattgggcagccaccaccaatcttggccggtcc

SEQ ID NO: 49983 - DNA, 1148 bp, Zea Mays
cgatcatcagatatataaagaatgaagaggaaccagatgacaaaaatgcagctgagcgcatcgctagacagtcagctcactacacactcattggggaaacactatacagaaggggtgcatcgggcatcctcatgaaatgcattctctcatccactgggaagcaacttctagatgagatccatactgggcaatgtggaatatacgcagcatccaaaacactagttgggaaggtcttcaggtcgggattctattggccgacagcaaaaagtgatgcagccgagttagttcagaggtgcgaagcctgccagtacttgtcaaagcaacaacatctaccagcacagcaactgtagaccataccagtaacttggtcgttcgcatgctggggactggatatgattggacctttcaagaaagctcaaggaggatacactcatatactggtagcaattgacaaattcactaaatggatagagttcaaacccattgcttctttaacctcagctaaggccgtggaattcatacaagacataatattcagattcggaataccaaatagtatcataactgacctaggatccaacttcacaagttcagagttctttgatttctgcgagcaaaaaagcattcagatcaaatacgcctcggtggcacacccaagagccaacgggcaggttgaacgagctaacgggatgatattggaggcactcaggaaaaaagtcttcgataaaaatgaaaagtttgcaggaaagtggataagggagttgccctacgtcgtttggagcctaagaactcaacctagtcgagctctgcatggaaatactcctttcttcatggtctacgggtcagaggcagtactacctgctgacctcaagtttggggcgccaaggttggtctttgaaagcatagcagaagccgaggctactaggctggaggatgttgatatactcgaagaagaacggctaaacatagtaattcaatcagcacggtaccaacaaaccttgaggcgttaccacgataaggccatgcgacgtcgatcctttgcagtaggagatctcgtcctccgccgaattctaatgggggagggacggcataagttgtcacctctatgggaaggaccattcatagtagtagaagtcactcggccggga

SEQ ID NO: 49984 - DNA, 705 bp, Zea Mays
cgtccaatatatgctctactacacattctgcatgtttttgtggttatctgttgtggccctttcatcacaaaaaaagctgagtgacaccttgtcgtttctatactcaagaacaccgtatcgatcggttgtctcgttttgtacacgtgaaacataacatgaatagaacgtatccgtactaacatttgggctggaatatggaatgcacttctacatgcaaaaaccatttccatcaaggttgctcgatacaaataagtcgcactacagtaactggacattttttctacggcaagccaatgaaataaacttattacaatgtgtttggtttgaggcatcttctcactccttgttttttaatttggtttgtggaatcgaattaattgatccatcaccattccattcctaatataggctaatctctactaatctatatgcctctattgtgggcgtccaccacctgtattggtgaagcatgcccactggactcaatcccccaccgcgatccacacctcgtcgcacggaaggcgccatccactcggcgcgatccacggtcgagcccgcccataccgcccgagacctgctctaccccgcaatccactcccccaccgagctactttcctccttctcagcgagatccacgctgctcttcaaaggaaggacggggacctgctctatcccacgatccactcccccatcgagaacagcaac

SEQ ID NO: 49985 - DNA, 725 bp, Zea Mays
atcaggcagtggactcgggtgtgtgctaatgcaagaaggccaagtaattgcatatgcttcaaggcagttacgccgacattagggaacattatcctactcatgatctagagttagctgcggtagttcatgccctaaagatctggcgtcattatttactgggtaatgtctgtcatatttatacagaccataaaagcttgaaatacatcttcacccagtcagaattgaatatgagacagaggcgatggctcgagctgatcaaggattatgaattagaaatccattatcacccaggaaaagcaaatgtagtggcagatgcgctcaatcgcaaggcttcctatcattgtttaacagtgaggacttctgacatcacattatgccaggagatggagaaattgaacctaggaatgattcaacatgggacttcacatcatttaaagctggagtcagtcatcttgcaaagaataattgacacacaaaaagatgatgtgggtatgaagcacatacgtgagaagataagggctggaacagcaaaatgtttcaaagaagacgatcaaggtgtgatatggttcaataaccgcatagtggtgccgaagaatgaagaactccgccagcaaatcttagatgaagcacatcttagtcgctattctattcatccgggaagcactaagatgtatcatgatctaaagcagcactactggtggacgaagatgaaaattgaaattgca

SEQ ID NO: 49986 - DNA, 500 bp, Zea Mays
agaatgaggaggagaagacccaacgtggacatccatggaggtatgagaaggggagcctgcccggacaccctcgggcgctaggtcgtagctcgcgctacccatccgagccggatcattaccggcaacaccctcgggggctgggtaaccgcttgcaccatcctcagggaccgggttccctgcagcagccacctctaaggctgaaggattctcagtcacctccatgggaattgaacaaccttgaccagcctcttggccccgaagactacactccaaggtcgacgaggcacgagacgccgctcgggataactctaatcccacatctggaatgtcagagcaaacgttcatcataccaccgtccgtgggctcgaacaacaaatcttcatgaacaacatcctcgaaagcctaatcaaaatttgctagggataattcttgtagaccaacgagctcctcactgactatgtaatgccgactattcttccgaattaaggggacttcctctt

SEQ ID NO: 49987 - DNA, 434 bp, Zea Mays
ggactgcgggttgaatagcttaaagtggagggtctctttaagaaaatacccgggccgaaggggtacagtgaaatactggccactggatctgagatggaaggctcagatttaaacaaacgaaggggttttctggatgtaatctggaccgttggatcaacggtaggcggcacggattgggccgcacacattatgcacctgaactccttagtagtcgtaggatcccgatctaacagtcaccagataaagtcgcgaagggatacatggcttctaatcgcagccgtcggtgatcagatcagtggttcacacacttcccccccccccccagatctaatcatagccgttggcgtcaacatcagcggccagggaccttcttcaacctcacgacgccaggctgagacggcgtaccccgagcgaaccagcgccccagacccctg

SEQ ID NO: 49988 - DNA, 586 bp, Zea Mays
tatgtagtttgacataggcaactctagtatggagtggtgatgtacacttgtaaaaactagtgctaaataaacccatgagggcccatacaaagattgaaacataaccaaactcaaaaactaattgaaacaagtgagttagcagagttgtggtggcaccaaatgtgtctggtgtgtaccatacatcgagcccaaacataagcatccatcaaggaaatcaccaaatcgaagtataaaagagtactacataccattacaaatgaggggagctgaggagggagtggatggcggcggaggtaggcgagttgccgaaatcataggtgacactaccatctccaaccctactttcctcacactagcggaagctggaagatggagggagagagatagaggaagaaaataggttgggcccatgacatctttatgaccttgtcgtgccggtctgcatggcatgatagctctatcacactcgaatggatggtgtgacaaggtgggccctaccttcgatcgcaggaacatatcaatgtttcacgccactgtggcaccttctatcgtataagtgcatgtggcacgacaaaggtaaattgtc

SEQ ID NO: 49989 - DNA, 510 bp, Zea Mays
ctgtcgtccgtgcgtccacgtcggctgaaaaacaaggtgcgcacgatgtttgatcaacggactccatttctgctctgtctatttgcgtttagagccttccagagtctccacacgaacacaccgctaaagccttccagaaattaccgctacccgaatatctcatctctgtccgcctgctctcaaacgctctgcggtctctagcgacggcaacggcgacaccggatgccaacggccgtccatcgtcgctcctcgtgcactacgttcgcctcgacattttctacaggttcgtccaacactttatggccttttcttcttcctcagtagcgcaaagcggtatctaggttttttccagtctctctatcttcgcggccgtcaatgtcgatcttgcccttgctcttcttcttgacccagacaacaacgagtcagcttgtgtcggaagctggttcggtcagcaccttattatagcgttttcttcttcctcgatagcgtataccggtatctagggtttcc

SEQ ID NO: 49990 - DNA, 369 bp, Zea Mays
ccggcccacgaccacgacgagtaggttcggtgggagcgcgacgtgatggcgtctccgtgcagaggcccgaatccgagtgggcaacaagatgattggaagaaagaggtgaggttcgtacacggtggaagcaagtacctcgcccggtcgatcaccgtgcgtcaccgtagtatacaacgttgttgggtccctcgaaacgacgccaagtcagccaggcaggcacgtgcgcgtcacgcgtttttttaggcttcatgccatttgagcagagcacactgcagcgtttcttcagttattaaagatcacactgcagcgtaccagctgtcttctccgaataccatgctccctagtctatatctatacccctatataaag

SEQ ID NO: 49991 - DNA, 814 bp, Zea Mays
ctcgccgacgacctcccctcaccggcgaccaccgtgctccggcgatctcccgtgtttgtgcctgctcttcacttctctcggtgagcagcccctttccccctcggtcttcctccctctctgttctgttatgcagaggctcttcttcccacctcttgtgcaaatttcaaattcctgtgaattccagtgaaaccatgtggtgaaatgtgttcctctgtgtgccttgaacatccttgtaggttctcagctccttagggagggtttcacagccttaaatagccatttcactgtaaccctaatcctcgcacaccacatgctcggtgaaatgcccaaaccagccaaaaatgctccaattgaacccaaatttttcaggaaccttcacaacacctccagtaacatattcgccaaatttcacgcccatcggatattccaggctttaatttcaccaaattccccgtttcgagcaatcgtttccgagccgagtgcccaaatttcattttcttcgcctaaattcaaaccaagcacacacttcactcatattcacccatataaacctattcgtgaagtatcggctccattccatgtcatttcgtgcctcaattagaattccaaacatcctatggcactatttctcgttcaaacgccgttttctcgtcgtttgacatctcgatcgtcatatttctcgttttctgtgccatatttctctgtgtatttatttattcacatttcatatacttatgactatgtgactaatacgtgctcacctcttctgtcatttcagtgaccttgactgcccgtgtgccgtctcctgtcctgc

SEQ ID NO: 49992 - DNA, 432 bp, Zea Mays
cgatcaacgctaacttcatggccattatcttcaagagcaagatcacctttagcccgggagctattttttgcttcgggaccatctcatgtgtagcggacataaagggaactttgcaccgcacaacagctccacctaagaggaaaccttcctcagaaattccgcgggaagctagagtgaaaccgcaagccatgcccccgctcacagctcggcagggcacggccccacacaagtctgagctcaaaagtccctggaggatggaagtccagtcgaccagggcctctccagcccaaagaacttcgttgtccacctcacccactaaggagtggacacagatcactcggagaagggaagtgaatgttccataccggggaaggaaaacacaacgagctatcctcccaacacctccgccctcaaagaggatgagaagaagca

SEQ ID NO: 49993 - DNA, 801 bp, Zea Mays
aagccactatttgagatagtcgctgacactttcaaataaacccttgaacttctatgtcttcacagagtccaatccacgacggtggacgacgacacaccgatcaccggcgagcctatactggccgatttacgcaatgactagtgccctcgtgcggtggacaccaaatcgtacccctcctagacatttcccctcaatcaattttactaacgaagcttggaatcaatcggcccacggaaacaacgcgaacaaccggacaaccacgtgcgttcctgacgatctaaggcagcttagttcaattaagttggtcggggagtattgggggtacataagaacactcaaacgagggggcaggaggtatgagcagacctgagacgcgctggccacgacgaggtcaaattgctcggggttcttgagggatttgggggaaatcccaaattggggagttctaggggaggatttgaggcacagattgcgttactggttgcgcaattacctagcggagtggacgggggcggcaatttatagcctccaacggcggtggcgtccaatttcacccggatgtgctggcggccagaggggaaaagaggtactggcgctcgggatgagtggctttcaccgtggcagccctccagcgatcatcggacatgcataccacaattcatcacgacgtgggctagcgtttaagcacgtggcacacaacagtgagcgatcaacggtggcgaaatctaccccggccgcacgacgagcaagtgggtgcggtgaatcttatcttatccgcgcccgagcccgagctaatccaac

SEQ ID NO: 49994 - DNA, 1251 bp, Zea Mays
aagcaacatcatgaacagaactaggcaccaaaggaaaggggtaatccaagctaagtgcggcacccattggaatctcgactccaggagcacccattgggtctttagtgccatgggacctgacctctaagttggccgggccagctataccaacgagaagatcagaactcatctctacagcttcgttagaccgaaccatttgtgatcccatgtggacaaccatggaggcagcagagggggagccagtcctaggacccttgggggctggatcacctttagtgacaccctcgggtaaagcatccttagggacctaagcaccctcgagggctggagacacatggcaagatggtggggttgcctcttgcctagccagaagactagcagagggtgcaccgtccgagcattctacacgaacgtcgatgcccctaacctcaaaaagatcgagcaaaaggtcctcgggaataaccttctctagcgcgctgtcgatggcggacatagtcattccctagaggctaaccagccctgagagaacgaggtttggaatgtcattgttagccttactacgacgatccctatgtaccatgggagcacatcttcttcatcaccatcatcctcctcctcttccataacatatctgctgaccctcacaccaccacagctctccacatcatcctcaagatcggcatccgccgcatcatcaccaaggtttagtgcagcagagtcaacctccagttccaagctagatcaacgtcgaagttttcacttcttctttttcgcttcggcagactcagcctgggagtttgcccggcatgctcgcttgcaacaagcactcctatgactgcaaattcttccttccccgccacacgagcgcccgggggcagcactccctgactcaactcaagcagacccagacgattctccagatagtgcactaaggactgcgtccatctcagcgtcatcagtgacaacttgcatctggaagtgggtccgtctctcctcctaaggcaaacctccatgtgcagcaagtatggcctcgacttcatctagagaaggtcacactctatggcctgggctcccatcttgaataggtgggttagacattaactttgaaaagtacctctgcaacaacaaaattccacaggaagagcaccgcatataacaaaacaaagatacatacagtcgacactcactgttgggggaagattccaagtagagtaagattggggcaccagaatttgaaattttaccgctcaa

SEQ ID NO: 49995 - DNA, 277 bp, Zea Mays
gtcgtgttaggggtgttgggtttaggtctatttttgtgatactgaaagtcggttgctacgcaggttccgacgtctgggcctgcgcaagcaacccatactgatgatattaattttgtggcggctgcgaatgcagtgcctgttagtgaaattttgtctggttctgaaactgggtcttggtcatctgacgggggtgagtttgggagtcctttttcgtggactaaggagtctttggatgaggatttatattattttgctgcattagatgtggccacggcgg

SEQ ID NO: 49996 - DNA, 491 bp, Zea Mays
aaaccatcactaaccctagcgaaggtggtctggttcgattgaaatataccttcaggtttacagaccagtttgtcgaaccagatgatgactggctgaagtgtgttgaaaatactagtgatgagctacttggagcatactccaagtctgaagataatgcactatctgcggccttcgggagccgaaaaaagaaaagactaaatagggtttttgatgctattggatttgtgtaccctgactatcgctacccgccgcgagggcagaaaagaaagggtgcaacttttggaaaggttgctgcttcggctgctccaagcgagcctgcgccgaagaggaaaaagttgaaggtccttacccaccgaccgcgctacattgaaccggccatagtgcctgaatttggcggggaaacttcttcagttactgaagcgaaagaacctgctcctctcatacagaagattgaagagccggccaacatgccgaaggcgccctcaacggag

SEQ ID NO: 49997 - DNA, 391 bp, Zea Mays
caaaggtacgaagaggacattggtggggccgagggtctttaggtgttctgctgacgagttggcggagacatgcgctgggcctagggaggttataactttgcccgatctttgggaattatcttcacgaatgctgaaggtgaccgggggtcaggcatagataagacattgtttaccgggccgccgacaaagactactttacgtcctgtttggcttgtgagtttaaaatatttccttacggaagaaatattggtgatgttatgtcgatggtgatggaaaaggaccgtcaggagtccatgtggaagaagcggaaggcccgactttggctggtggacccttgatgcaaaggtgccacgccctagcatgaaggatctaccacggttgctgtgatgcc

SEQ ID NO: 49998 - DNA, 375 bp, Zea Mays
aataccgtatgcacctatattggcataagggacttagttcaagagcatattgcttataaagtatggcctcttgcaagcgagtggtaaatgcagaaggaaacaatcgttggctccatccagggtggcctggtttatctaaagtatacttttcggttcagaaaccaatttgatgagccaaatgatgattggttggacgctatgaggcaacaagtggtgaacttcttgaagcgtattcgagggcagaagacgaagctatgacggctgccttcggcgctcgcggcaaaaagaggttgaatagagtatttgatgttattgggttcatttacccagactactgctatcccgcccaaaagcaagggaggaaaaggaaagtcg

SEQ ID NO: 49999 - DNA, 451 bp, Zea Mays
cggacggtacgtgactttccttcggacaatccacagtagaaatgtgcatttgccatagctcctgtccaaagttcatcgaggtgttgcagacgttattccagacgatccgtactagagccttggacgattcgtgatatgctgttttgagggttcatcttccttgaagtattttctgagtacctgaatttataacttaacaaactagttagcttgattggttacagtggtcgtcagttaccaaaataagtgtggaaatgatttttgggcctatttccctttcaatgacattcggttcttttgaaacccttcacccaagctctagcgacgaagctgctactacccttttctggcaacgaagattccatagatgaagcttatgtaattaccccgaatcaaacttggaaacaaaaagaattcacgatttgaggaccttcggtaaaggcacatcctc

SEQ ID NO: 50000 - DNA, 1338 bp, Zea Mays
gcagtctcagtctccccgacggccaatacacatcagatggtcactcgtggcaaatcaggtttccgccttgacactgaccggctcaatcttcatgttgcagctatttcaccggtcccaacttctcttcgtcgtgccttggctgatccaaactggcatgctgccatgaccgaagagttcgatgctttacaatcaaatgagacatgggatcttgtccctcgtccatctggcgtcaatattgtcactggaaagtgggtctaccgtcacaagctgcgtccagatggctctctcgagcgttacaaggctcgttgggttcttcgaggattcacccaacgtcctggtattgattttgatgaaacttttagcccagtcgtgaagcctgtcactattcgcaccgtgctctcactagctctctcacgtgactggcctattcatcaacttgatgtgaaaaatgcttttttacatggaactttgtctgagacagtatattgtgtgcaaccctctggttttgcagattctactcacccagattatgtctgtcgccttaacaaatccctctacggattaaagcaggctcctcgggcttggtacagtcggtttgcatctcacatttcttctctcgggtttattgaggcaaaatcagatacctccttgttcatcttctctcgaggctcagatatggcttacctgcttttatatgtggatgacattattctaacagcaacaaactatagcttacttcagcgcattatcacagctttacagactgaatttgctatgaaagatttaggtaaccttcatcatttcttgggtatctcggtaactcgtcaacccagctctttatttctgtctcagaagcattacattcttgatatactggatcgtgctggcatgacagattgcaaaccttgcaacacacctattgatacttcatccaaactctctagtgatggacctcgaatatcagacccgacacaatatcgcagtttggctggtgctcttcagtatctcgtgttcacaagaccagatattgcttatgctgtgcaacaggcctgtctcttcatgcatgatccccgcgagcctcatctagccttggtgaagcgtatattgcgatatcttcgtggtactttggactatggattcttaattcacaagtcttcattggacaatttaattgtttacacagatgctgattgggcaggttgtcctgacacacggaagtccacctctgggtatgccgtttttcttggagataatctattgtcgtggtcttccaaaaggcagccaactgtgtctcgctccagtgctgaggctgagtatcgtgctgttgctaacggcgtc

SEQ ID NO: 50001 - DNA, 867 bp, Zea Mays
aacccaaacctaatttctttccaaaatttcaacctcctcatgcatagcattaacccagttaggatcagataaagcatgtccaacatctcgaggctcaaaagtagcaacaaaagctgagtgagcaacatgagaaatctgttgtgacctggagcgagtgactcactcgtgaagctccccgatcatctgttaaggtcggtgatggtgctgaatatgttgtggagcctcccttgtgaaaatgcatccccctcaacagcagcctcaactcctccagtctcagcaagacctggctcgagcggaccccaagtggtggaagaagtggggtcgggtccgtcagtcgtagtagtggaagcaggctcgactcgggcagccggtggagtcggctcaagagcaacccaatcggcatcgtcgtgctcctcctccacaaagatggtctatcccatctgatttggacctgcaagctcaaagacaaggtgcagcctcatcgaatgtaacctcacaagtctccataatgtggttagtctccaggttaagaacacaataagcacgagaatgtaatgcataacctagaaaatccccatcagaagaccgagactcaaacttgtcaaaattaccttgtttcagcacaaagcatctgcagccaaacaccctgaaatggctaaccttgggtggccatccaaatcgcatcttataagaagttttgttcagaaacacccgaagaaagatgcgattggacacatggaaagtattgctgatcgcttcggcccaaaaacgcctaggagtcctatgctcatcaagcatcgtcctgcccatctcaacaagggtccgatttttgcgttcaacaaatgccattctattggggcacaaacg

SEQ ID NO: 50002 - DNA, 994 bp, Zea Mays
cattttcctataaacccggtcaaacttataaaagtttgactagctaatcttcaaatctggaattgcattcctttttagatgcatggaggaagtaccaattaccttacagcatgttggagacttcgaggtcatctgtatataaaagtttcctaataacatcaaacaaaagaaaagaatgatgagcaagctattaaaaatttagaagaccacatgcttgtgatccagttaacccattaatgcaacactatatatactatgtgaaagagaagtgccttgagttgaccttaatagggctcctgaacagatcttaaacagttagcgtggcagtcaaatccgaactgtaaatgggttacaaattatctcataactcatgagttgtctgaggcgttcacctgaaaaagatagggaaggaattagtcaagtattgattggtccaatcttaaaccatacgaacaaatgcacaagttgcctagcactttcatgcatgatgtggacgttgtaggctaagtcatatatatgtaatggttagctaggagctctcacatgagaaatctgatgcttggctccatatattacatatgatgatgatatagtgttgaattggctgggtactataatttgacaaagatcaaatttgcattatgtgatgcaaagcaggcatagtgttgtagagaaccaaacatttgaatcttttaacagattttccgggtgtagcttgtccatacagacatttatcaaagtttgagagttattggtattcttatcatgtcaatagtaggttaactagtcgacaagcaccttacacacatagtacattcattgtgattctttcaatgtcaatactttctttgtgaaacgagtgctggatctctgctattcatttaaaagaacagttaacaccagacaactaaagggccaggaagagataccaaatggcatgtccacagtttaaaatactactctatttttgtactacctggaaagacgatgtggc

SEQ ID NO: 50003 - DNA, 356 bp, Zea Mays
atcagttgatcctgagaaggtacaagaagtgatggattggaaacctcctaccacagtacggcatatccggagttttctgggattggcagggtattatcgacgatttattccggatttctccaggattgccaagccaatgactgaattgttgaagaaaggagtaaagtacgaatggagtcagaaatgtgaagatgcctttcatgcattgagacaacatctaacaacagcacccgtgttagcccagcctgataataccaaaccctttgaggtttattgcgatgctttaggcactggattaggatgtgtcttgatgcaagacaaccaagttattgcctatgcatccagggcactcaggc

SEQ ID NO: 50004 - DNA, 646 bp, Zea Mays
tgattctaggagttcgattgtgtggacagaggagtcttcggatgaggatttggattactttgcggcattggatgtggctgcggcggaggcttcaccgcgtgtaatgggtgatgaggatcttctgggtgcgagtgttgggcataggcggcgaagggcggtggcgaagcggagggtgagtgagttgccgcgaagtgataggcgtcatcatggtgaggtggaaggtggtcgccttcgtatggatgggactggcaagcgggaattgttgtcctcgccgtctggggcgagtgtgggtgagggggagctgcaaagtctgtttgcgggtgaggaattgaggataatgttgttcaactatagggagatgggtatcatcccgaaggttgagccaatgtaatgtttgatgccctcgatgtatgtatgcaaccatactcttgtgcgatgaagttgcgcgctttcgttgatcaggccgctcccgtaggcttctgtacggagttctttagaaaagacttcgattttttcgtactagtattccggttgcacccgtaggcgacttttgcgcggaggctcttttggaaaagacttcgatttttcgcacttattgtgctagtccggttgcaccctttggcgacttttgcacggagagtctttt

SEQ ID NO: 50005 - DNA, 448 bp, Zea Mays
ttggtataatactacctatcacacatctctaggatgttctccatttaaagtggtatatggttatgagccattcgtggctgctgctccagcagtacatatttccagtgatgtgcaggtgtatgaaatgctagaggaatgttgaaagtgcagttggctcgagctcaaaatcggatgaaaaaacaggctgataaattgaggactcatcgaattttccaagttggggagatggtcttactcaagttacaaccatatgtgcagcattcggttgtgtttcgctcttgccctaagctttcttttcggtattttggccctttcaagatagtgaagtgtattggatctctagcttatgagctggagttgcctgtgggggctgcaatacacccagttttccatgtttcgcagttgaagcactttacacccaattatcagccagtcttctctgaattac

SEQ ID NO: 50006 - DNA, 625 bp, Zea Mays
tagacttttagttagctatatatatgacatgtcaacattataaagctcattgtgagctatatcgttaacattactctaattagggccatcgtggacatattgcatgtatacatattaaggttgtagcattcattttgatgaaggggtaaatgcaaccatattgattagggtccacatatgatatgatatatagatacacacacttaataggattgcaacatgcatgcttactagtgtttggaggagtggcacctgaaattaagttcaattttggtgtgcaatgtatagaaaaataatgtttgaaatgatggttatgttctccaacacattctcaaggaaaatgagtaaagcttaccaatgaaaccagggcattggacactatcaacattttgtcatcctgaactaggatacttacattatccctccatctaactacttgttcttgccctcgtgtatctccaactccatgtatccgcagtcggtagagttacctgctagaggcttggtgggtagtgaggaccactatactagggcatctcgcttttcccttcatttgacctcctttgtctccctcatctctagtttggtctagtgacatcgttcgtgctttggtgtttagtgccaa

SEQ ID NO: 50007 - DNA, 331 bp, Zea Mays
caagggtgttctatggtttgaaaaccgactggttgtccccaagaaccccgaactcaggaagaaaattttggacgaagctcatctttccaagttttccatgcaccccgggagtaacaagatgtatcacggcctcagatccttatattggtggaccaggatgaagagggaaattgctaagtatgtatctgagtgcgacacttgccaaaggataaaagcaagccatttgaaggtagcaggtaccttgcagccactccctataccatcttggaaatgggaggacctcagcatggacttcattgtgggattgcccaacacctcccgacaccacgat

SEQ ID NO: 50008 - DNA, 434 bp, Zea Mays
tgagtgcttctactcctaaggcatgaagattgaaattgagagactacaactagagctacgttacatctactcctaaggcatgaagataaataatgtaaatagattggttcgattggattatgtgtgtgtcctcaattggttgtaccccttcatatatataaggggaggtatggacccattcctaaacgaaatccaacagattcccgcgagtctgttaggataaccacacataggataaagactctagcctgaactaatctaatcgcaaatcatctaagctactactatagaccgtccaaggcatggaccgtccgggcctcaaggtcggagcattcgactatccaagagccaaatttgatgttcagtagccctattgctagtatcatagatcatgttagacaataatggttctcacgcccctaggtatggatttc

SEQ ID NO: 50009 - DNA, 301 bp, Zea Mays
tcgcactctaaggcccaaaccactgtcaccaataggaggatttgacacaaaattgatgaaagccttggaaggaggcagattccaggctgaatatgcaacaggagcaccgatattcgacaccttgcctctaagaatcatttcaagctggcttaccagatccacaacaggaatccttctgttggtaacccgggtcgaatcagtgaggccacgataaaaataagctgggtacgctctgtctttcagcggctgaatgttcttaaaaacaaaatcggcgaccatagcctcggcagtcagacccttc

SEQ ID NO: 50010 - DNA, 1256 bp, Zea Mays
catgaatcaatatcctccaggaggaggataggacggaggatatgatggagggtatgatgtgtagtcagggaagaaggtcctcatcacgtcttcctcgaatgaggagtccctagggggctcatcacccgcagaaaaaacagatgccgaagatgtacgatgatgaggaggaggtggagggtggtgatggtaaccagagccggatggccgcgggtcaccaggaatgggtcccggacccgggtagggaggaggaggatagtgaccagagccggacgacctagggtcaccgggagtgggtccctgacccgagtagggaggcggagggtgagaggatgattgacccggatccccatggtagggaggtggggcaaactgctcgcgatcatcaacgtaggcttcttcttcttcttcttcgtctgctgacataaatggcaccccgtaggcctgccggtgccactcattgatctccgggggaggaggatgcataggcacgtcaggcgagcgaggggcaaagggcatacccatagtggaagcttgacgacgaagattgtcgttagtctcccgctgacgccttgccagttcatgtacatcagcagaaatgttccagcacatagagaaaaatgccgcaatcccatggaccaagcgggcacccatccctcggccacgacctcgaccacgaccacgaccacgtggcatgggagatccgcagccaggagagggacgtgaggcggcggcagcatgagaggaggatgggtattgaggaggctggggaggtggctcattagaggaggcagggcctccagaccctgagggagcccgcttcgtacgagcagctgggttggaggaatcaacctagtagggtacgtagcgggagtgtttgacaggtttttcgaagtgagtctgggtgaccacttcgatcatcttcatgataaagggtgcatgaagacaccctttgagaggagaccagaaagcacggatgatctcttcccagatcatgtcaaacacattaatgcgggcgagactgttgggagcaaggaggaggaggaagacccaactctccccaaggacgttcatttgattcccgcccttcgggagaacggtcatcctggacaaagagttaaggtacctgtagtacctatgcatgttagcggtcgttcagaactcccgatcattagagacatgaataaattcagtctcttcccgcatgggcagcctaatgttatgcactcgcatgttgctgccctgaatatcagcatcag

SEQ ID NO: 50011 - DNA, 337 bp, Zea Mays
caggcccaggaaaatcaaaaggtttcggaggtgacaggtccaatcagggacctgcaaagcgaccaaggttggtaattcgaactttcaatcagaatcgttcttcatctcgcccaccctcctacccattcaaacagcctgtcttcattcgccctgccactgcccccacttctacaagtcagccgagtgcccctggtactcattttccctccctccctagttcctcaactggttgctttaattgtgggaagtctggacattttatcaaagactgcccatatccgaggcagaacaaatccaacaatcagcagaactcagggagctcaaatcaaggcaaggg

SEQ ID NO: 50012 - DNA, 639 bp, Zea Mays
gcaacgcgcacgaagctgaacccggacaagtgcgtctttggtgtctctgctgggaagttgctgggattcctggtttcgcaccggggcattgaagcaaacccggagaagatcagggcaattgaggcaatgaggcctccagcccggatcaaggatgtccagaagcttacggggtccctggccgcccttagccacttcatctcacggctggctgagagggcgctacccttcttcaagctcttacagaagttcggctcattctcttggaccgaggaggcagagcgagccttccaagagttgaagcagcaccttgtgtccctaccgatattggtagctccagagccaagggagccgctgtacttatatattgcagcggctgcagatgtggtgagcatggtgttggtcgtcgaaaggatagtgcaacatccccaagggagtcaggaagttcccctaggagaaggtggtggtccgaccaccacggatcttgagggcccggggccacccataggggtccggaccatacagaagccggtctactacgttagcgaggtcctccatgaggcgaaggccaggtaccttgagacgcacaagcttctctatgttgtgcttgttgcgtccaggaaattgcgccactatttccag

SEQ ID NO: 50013 - DNA, 489 bp, Zea Mays
ctttaagctctcttatcgggtcattgataaatgcaatcgaggctgaaccaataatcgcaaagtgaaagtcacgagcttgaagttcggacattatgggcactgatgaaataatgtgtggtgaatgtgatggttcaagtggtcttgtgagagacccctcccacatatgtgttgaataaacattgttccgctatgtaatatatatctggcaaatggcatgaattaaactatgcagttaatagggttcagaagatctgtcatgagatccaaggaggactcatattcttgaattataaatatgcaacatataaatctcatactgaataatgcgttcctgatgaatgaccattctcaagtgtagagagaatatctactagttgagattacagttccctgatggaacctttctagaagaaataaagtctgagttgaacaccaaaatttgttaatcctaataaagggataaagacccatacagacccgaaaagaaat

SEQ ID NO: 50014 - DNA, 535 bp, Zea Mays
atttacgctgttttggttcacgttttacgctgaaatttgaccgagccagaatccgtgcacgatcgaacgtgcgcaattttcacgccgtaattttcgggccccattcgctgttacgaaacaagtctataatttacgtaaatttcgtattcatttacgctatttcggttcacgttttatgattaaatccacccgagccagaaccctagcacggtcggctgcacgcgattttcacgccgtaattttgggccccgtttgctgttacaaaacagatataggatttacgctaaatttcgtatttatttacgctgttttagctcacgttttacgctggaatccgcccgagccagaacccgcgcacgatcgtctgcacgcgattttcacgccataattttgggctccgtttgctgttacaaaacagatataggatttacgctaaatttcatactcatttacgttgttttatctcacgatttacgctggaatcggcccgagccaggacccgcgcacgatcggctgcacgcgattttcacaccgt

SEQ ID NO: 50015 - DNA, 277 bp, Zea Mays
ctaatcctacatcaacgttgaggtatatgatgttgagctgctgataacgtgttgtaccacggatcgctagattcgcttccttccctcacgtcagcagattatgcgtgaagaagttgtagatcatatttcctttctagaagcacgacagaaaaacatacaaaacacctgatgtagggttgtgactctcatatctttcgtctgtgtttttctattacctcaagacgtaaaaggtgttacattatatggagctagggaaaattctttgggaatatttcca

SEQ ID NO: 50016 - DNA, 679 bp, Zea Mays
ttaacatgttatcacatacaaattagagaatgaagctctccaaatcatgctgtcagaacttctgatgaggattaccatggtacagtgaccagaaaagatctccggtgccgtgagctcaacatcggtgatccgccgccacaattcgcgcccgcctgggagattcatgtcgcgggaggagtagataacgtcagggccgggtaaaaacatccggtaggggggtgaatccagtcgctggccggaccggccgtcttgtcccaccgtggacaaagcgctggcataataaccacgcctccacgtcatatgggtcgtggtaagcaaccagttattgaccgcagaccagttcccttttgtgcgccacagtgatcaagccactgtgaaatatcctagccggataaccgtgatcataatcctaaaattcttgtccagttcgatcgggacctataaattgaggatgccctctgctccgcttcttagtaacgcgtccaacccatccccaactagctcctatcgtgcaccaccgcgccccaatttcgcatttcccccaactcgcttctccgcgccaccgtgaaccatcgcgccgtggaccgcccattctaggtctgttcttgttctctttgttcatgtttcaacacctctattcactggtgatgctcgtcggttcaacccattaagctcgacc

SEQ ID NO: 50017 - DNA, 357 bp, Zea Mays
atacaatgccctcaatatcatagaaacactatttttgtgtggtgttttacttgagtggacataaacacaatctaaggatgccatgaatagaggggattatagttaacatattatcacaaaaggtcattaccttgcccaataacgtcttcatccactagttgtactctaataccctctagtgtgaatacaatgcccacaatatcatagaaacgtcatttgaggtttaaaaggtgatatattgttttgaattctttatattccaactttttagcaactgtatggtggaaacctgttatcacaaaaggtcattagctagcccaataatgtcttcatccactagttgtactctaataccct

SEQ ID NO: 50018 - DNA, 472 bp, Zea Mays
cagtccgataggatttgtccgaatctaaggattgaaataaaggggatagacttccccgctagcctagtagtaatgggaactcaagggttagatgtcatcctagggatgaattggctacatagaaatcaagccactgtcagctgtgacaagagaacaatgaagctggtgtccccatccggaaaggaagtagtaaccaagatgtacttacctgaactaggagaaggagcctgtcaccatttatcagtagatgacatggagtccaatccgattgaagcaattaggattgtgttagaattccccgatgtattcactaaggagttaccaggtatgccacctgaaaggaaagttgaatttgccatagagcttatcccaggcactgcccctatttccaagagagcttatcgagtgtccagaccagagttggtggaactcaagaagcaaattgatgagttgttggagaaaggctacatca

SEQ ID NO: 50019 - DNA, 287 bp, Zea Mays
tgtctcatattcaattctgactgggtgaagatgtatttcaagcttttatggtctgtataaatatgacagacattacccagcaaataatgacgccagatctttagggcatgaaccaccacagctaactccagatcatgagtaggataatgttcctcatgtcggcgtaactgccttgaagcatacgcaattactcggccttcttgcattagcacacagccgaggccactgcctgatgcatcacaatatacatcaaagggcttattaatatccggttgagccaataccgg

SEQ ID NO: 50020 - DNA, 484 bp, Zea Mays
cagaattaagcacttcctacaagatggaaggaaagccatcgtgagaaaggaaatcagagctgaaacgagtgtctcctccattggtgggggtaggtgaagtcatttgcgaaagggtatcagatgtaaatattatggtggaaggaagaaaataaaagagtacggatggtttaaaaggaagcgggttagctcaaatgtttacttctttagtttctaataccttttagtttttataatgcatgcatggtgaaaataatgtctcctctctgaataagagggtgcttttagggcatccttttaaaaagctaaggactggcccacagggcctacttaatttgccacctatttctcccactattccaaaggcctttcgtcctaggtctagcgttctagtcctgacgattcacactagtttctaagcaagttttagatttttgaaaattggtattcatggtttattgttcttctctatggtggtgtttgctcc

SEQ ID NO: 50021 - DNA, 362 bp, Zea Mays
aggatttggcctatgtgtcaagaccttggccctcttcggcttcggcgcactagaagaggttgaagcagcaactttccttttccccccttgccttcggataaaaaaatagtaatcagggtaaacaaacccaataacatcgaaaaccttgttcatcctccttttccctcgagcgccaaaggcaacagtcatggcctcgtcctctatcctcgagtaggctccaagtagctcatcactcattgcctctataacttctagccaatcatcatttggcttgtcaaactgacttctgtaccagaaggtgtacttaagataaaccaagccaccctgactggagccagcggcagtttccttcagcatttctc

SEQ ID NO: 50022 - DNA, 1050 bp, Zea Mays
gcgtgccgaatctgggggaggacctggtgttctaggtgctgatgccgtgatgcgtgtggaggtcagggcacagacggtcgctgcccgcgtgaactaatttgggagatatcacaccgatcaattatatcaccaaacagggtaagcccttaataaattagttgtgtgagtccatggtacgactggtgcacataccatctcaaagtttcgatctgtcatctcttatgaaagtaattgctaataaggtatgtgcatggaaaattagtgggtacaaaaaataactattgtatagcagcacaaagatcagtgtttgagttggaaacctgaggaatgaggagagctatagcaactcaacaactggaaaacaagttgtaaatctatctttctttctttgtttcagttcactaattcattgatgtatgcatgaatcatgattaagctatctacactcatgaaactctaaatttttacaccatatttttcaaccgtattttagagttacctttcgagtgaaccgctgcagcctgatccaaactctatatcctattgtatcctcaagaccgtcttatgctgcacatatatgtctaaagcaacatttttaaaatgtatatgtctaaagcaacacttttaaaatgtaaaacatattggtgatcgagtcgtgcaaggcacgaccaatttactagtgtacaagcagctggtgagatttgttgatactagctactgcgtgctgtctggactcgggagcagcagtatatggtttactcaactttgttttcttatttggatcgtttagatgcatgagttgcaacgtacagcgtggtgacagtggattgattattctgtctgtcttgtttgaattgggtagtgtacgtaggcatatccatctttcctgtacgtatgtatacacgaattgaaaccatcgatcaggcaggcatcgtcgtcgacccagttggcatcggttgacggagcccctctccctgaccagctaggcagttcgcatcgaccaaggcatgcagaccaagcatgcagactgagcgccccaccagtacttac

SEQ ID NO: 50023 - DNA, 907 bp, Zea Mays
gggccgttgggaccgattccgtgctttcctgcgcataaagcctctactgtggccctaaccttcgccgccatagcttagaaaccatcacggcagccgccgagggatagagagaacaaacgcctgggcgctcccatcgcgtggaggaccttcggaccgtgagcgtcagtcccgtcttcaccccctccgtgacggtatgtttcgtgcccccctctgtagcgtgataggaagcgcgagacgacttagcctaggcactggcgtggatgcggcggggcaatgctccaggcgctgtcgaggggatgacttgccactggatggcacgtagtctcgagcagtctgtagatgagggcttggcgccgagctagacgggtagtgggaggcgaagaacattccgcgccgtataacggggactcgaacggcggactcgggtcgtcgctgccagatccttggcgcacggccgcggcgaagtggactggagagagaaaagagagaagggagagaaccggtgttaaagaagacgcccgacatcacttgatcatgcgttggacggtaaggattaaagggatagggaggaagaaaccgtgaccgtaggatggtgagtggagggggtagatttatctcgcgtacccgccgttcatcactaatcgcatggctttgattagaagcaggaaataccccttcatcccaaccgttatccaccgtagaccggcaatctgacgactaaagcgaaatagtggggatcgtgcgctgtgaatcgtcgatctcagatccgacgatgactcgggaatcaggatttatacccatcgccggtctaatctgggcgctcggggttggatcggacggtccaaacatcgatgtacctcttcggccaggcactttttcataagagaccctctgtttatttgaaaac

SEQ ID NO: 50024 - DNA, 591 bp, Zea Mays
cggcgcaagagagggctgagtgggcatggtggtggttccaattatccgactcacaatccaggagacccgccactcctggttccaagtcaacaaagcttccaccattgttaattctctcctcctgtacttgcactgcctcttgaaagccctatccggctacccccctccccgctggatccaggctgtgctagtcatacacactcatactaccaattaacaagagagcctgcctgcctgggccagtcgtccatgcggacagtgacaagtggtggcgtttcgtgaggaaggaaccaaactgagagcgattaaacacacggactacatatatatacacatatgccttgcccccgtcggtgctctgaatttggatcgcgtggactcgcctatacgtgctactatgttattattgcaggtgggggatccggttcggtgtatgtgggtggacgccgccgtgcaggacccagctcagccgtgcgcgcgtgaggtactcaagggctccgacgagagatcgctggcaacattaaaccagggctaaatgtctcaaaagaaacactaggaagtacgtaggaacctagcgaacgaaacagccca

SEQ ID NO: 50025 - DNA, 1668 bp, Zea Mays
tgcatatccccatgggtcaccgtggcacagatatgcttcatgggctacctatgatgcctccgatggatcgttcgtggggcacttcgtgggcctcagctggccgaggacaactgaaggagtcacgcgctgagtcaaggagatctttggaagcacgtctcgtgcatgcagtcgtgcccaagcctcacgagaagccaactgaacaccgaagacgtggcacgtttataacgaagtgggtagatacgtatagcgctatgatttgtacatggttatctcttcagtcggtcatataaggctgaagaggtacccctacaaaaaggagagactccattagaccctgctatactcatacaccgctttcatctcctaccttcaacagtcacttgtaatcctcaaactcaaagcaatacaacgaccagcaactcacatgatgtattacacatctaggcagcccgaacctatataaattgttgtgttctgtcgtgccccacacgaaccattgagctgcgatcgtcctcatcgtcctcccaaaagcactacatggtataccctatagtgtgccatcggaaccaaataccgatgagtgtagggggagaatttcgagggtaccgctgtgggagacgtaaaagtaggggtaaaatcttggggatgtggtgcaaaagtgggatatagggggagaaatttagagggaaccgccacggacagtctaagacagccatggtaaaaagacaatagtaaggttggttcccacccgcacatctaccgttacgttagctatcaactgtgccatcaatctttgttagctcttatttaccgtagcactctagtgcattctttgttttcagtgtcatctcaacaccacattagcttttcttttacagacttttagttgacataaaacacattgttttattgaaataaaagtgcatctgattacatatttaagcaagtataattgcatacttcataaaaacaataaaaaatcacataaattaagcataaaattaaaatttacataagtcaataaataaaatctaattgtcatggtgaaggtcctgaatatgctctattaaaatattttagagttgatcatagaccaaactagtatagattgtgaccccatgttgaaggatgactatcaagctagtgggtgcttcgagagagtgatggttgatgttgtaacgaaagacttgaggatctcataatcattcacatcatatgttccttcatgttcattctcaatgatcatgttatgcagaatgatacatgcacacataatcacatcaagtacttggtgagaaaaagaatgacctaggctagcgagaatgtggaagtgagacttaaggatcacaaatgctctctctatgtccgcgtccgcgtcctcctggcatgcaataacatccattgttttagagtctatataagggaaatagtcttcacaaacaccagtcaccaaggtcaaggtcatcagcgagatagtacccttagttgtgatcatgttcattcaccatgaagttcacatttggcgcttctcccttaagcatgccagtgaacaacgatgatcggttgagcagattgatgtcattgttcgaccccgctaccccaaaaaaacatgccaaattcataagtcatatgaggcaaccacctcgagtatgatggtcgagaatccaa

SEQ ID NO: 50026 - DNA, 295 bp, Zea Mays
caattagtttggatgtctgaacctctagttatgaatttttgaaggcataagtctgaatctgcccaaatctgaataaagttgtcgtttatcactatttaaccttattaagtgtctaatcaccttgagatgataataccaaagttgtagagaacttcttagactttccaaaagtatttgatcactatttttagatgaatatcttgtgagttacgactgaaacaagtaaatgttgtgctgctgtcctaatcttgttgattgtggttgattgctctactttcttgtcttgcttgagtat

SEQ ID NO: 50027 - DNA, 584 bp, Zea Mays
acgacgaacagacagatggaggcatcgagcactgagcacagacacaagggtgtcggtgggcaatggccgattggacatgcactgatcgctgactgaccgtggcggcgagtatgacacgacactgcccccgcccgcctgctcggggtccggtccggtcgctggctgctgatcccacgtcggccgtgcgtgtgggcgaagccctgtctggacgaccggtcctgtcctgttggatgagcgcgacggacggcggcattgctcgccaccttttctgtcgtcaggaccagctgcggacgccaccaaacctgcctctgttcctttaagacgagagaactgcttacaaacatacacctactggccactgctgaccactcctctcgatcctgtgtcacggtcctcatttgatggcctcaagggcagagttggaactatcagatctcggaaaccgcgcgaatgatggcaacacgacacaatcgacttctgtgatggctggaaggggagattcggagctggaaaggtagaccactcaccactgggatgagaaacaaaacaagagagacttgggaaatgaagaacgcggcaagtta

SEQ ID NO: 50028 - DNA, 634 bp, Zea Mays
ctctagcagaattctggtataacactacctaccactctattcgggactgctctcctttcaaatttttgtatggttatgatcctcctgtgatggttgttccttggctgagagatggggaagatagggatgtcactatctggttgcaggagagacatgtgacttctgagttgctcaaggaaagattggcccaagctcagaacagaatgaagcaattagcagatagaggtcgaactccaagggaatttcaggtgggggaacttctgcttctcaaattgcaaccttatgcacagaagacagtggtcaacagaccatacccaaagctctctttaagtttttttttggttcttttaagattgtgaccaaaattggtgctgtggcttatcgattggatctgcctaaaaatgcttagatccatcctatttttcatgtgtcccaactgaaggcctttcatccaaaatataccctagtttttgctgagctctccaaggtggcagatttaactggtctagggatttgacctgaggagattgtggatcgaaggttggtcaggaagggtaatcatgtggtgcctcaagtcttaatcaaatggtcaggcttgcctgcttcttcggcaacatgggaagactcatgtcat

SEQ ID NO: 50029 - DNA, 565 bp, Zea Mays
gatggggtgcctagatgttcagtcactgaagaagctccgccgcggtcagggcggcgccgccgtgatctgtgtctcggggaaaggggtgagctaggtgacattgatcatccaacgcatggctaggattatatcttaggtaccggtctgacctagggggcggtgatcgttggatgcggggcgtgtgtttatgattagatcttgctccattgaaccacaatcgttgatccccgatccaagtgttcagaatgcgtaccgattcaatcgaaggctagtctaatctgcgcccttgattttggatccaacgaccagagttggcttgtacccctttgtgcgggtcaaattgcaaaagagaccttgacaaattgacaaatgaacccgtcgtcccgcgcagtgtaaaagttaatacggttaggtccaaaaatttatagattagaccctagaattcgaagaaatggtgtccccagtccataagtatttgtatactaatgaaatttattcggaaattgatttttattaccaaggtagttctacaaacatagaaaacgcataactaactcattttaaa

SEQ ID NO: 50030 - DNA, 751 bp, Zea Mays
ctccatcatatttttacttatttctttggcacagatctgcctgtagaaataacttagctcagctattgcttgccacatggcgttggccatgtaaccacgaaacatgacaaggataattctctccattaatatatggaagtcatggctctttaacccaattagtttttccgttttcaaattcacagatcttttcaaacctgcagcataaccatcgggaattttttttttcatccatctcattacctcgatcttgtctttagaggtaagacagaacaaggcacgtggtggcttgccgttgtcattgagcacttgggttggtcagtcataaagcattgttagatctcttcgagctttcagattatcctttgttttttcaaaatgcatgcaggtgtgtatgagggcttcaacaacattactttcttggtgcatgacatcaatgttgtgcacaagaatcaatgacaacatataagggagctccaagagaccacatatatgtgtccagttgtggtccactccgaatccttcgtacttgtcctccttttcatttaggacaaggttgttcagctgagcatatatttcagctgcgttaagacgtttaggcggtcctttggtgaccacggtgttctttataaagttttccttatcgctcctaaaggggtgtttcctcggcaaccagtgtcgatgacaatcaaagtaagtgatctttccaccatgagcaagacagaagcaatctgtatctgaaccgcaatat

SEQ ID NO: 50031 - DNA, 890 bp, Zea Mays
ctcgtgccactaagttgggcccaaagtattttggaccttatgaagtgctagagaagattgggtcagtggcttatcggcttcttttaccagcagctgctcacatccataatgtgtttcatgtggctcttcttaagccttttgtgggtacccctccggtaggtgatccagtaaagttgccatctcttgtgcatggaagagtggatcctaatccattgaagatcattcatgctcgtctcaaccatggattatgggaattattgggacattgggaaggacatacaagtattgatgcctcttggatttcactcgaagaattcaagaaagagtatccggtgttttagcacgaggacgagttgttccagggggaggggggaagtgttgtggactcattcttctacaggaacacttatgggcataggcacaagaaggaaacctccaccaataaggcaaccgagctagaagaataggaaaggaagcaactaactcaggcaaccggactggaagcaaggaaaggggaatcaggcgagtcctattccagttataccaatcaagtagtttcctattgttgttatagcagatagtagagtttcctatttctttatagaaagtaacaagttgattggatatgttccctgccgcctataccataaaggttggctgctagtttgtaaaagggcatcgaagaataatacaactacctcctagaggtgggctgttctttgacgatggcgccttcagccgccagagacgacagtcctcctctctacattctacgttcctgttctcaagcctctcttctcctccactctcccctacattctcctcgccgaccaccatgcagcacccataacacaatagaacatgcctttgagagcttatacacatggtta

SEQ ID NO: 50032 - DNA, 805 bp, Zea Mays
gaaacagtggaaaaaggaaaattgctccttcaaacatactggctaacctatgaggttaagtctatcttcggcaaagagtcacgaaagaacgtatcaataatacaagatccacgcctttgacagaggtattgtcatacgaggtttataccttcgacaatggtattcttatgcaacatttacggcgagatcttcaaagtcgcttcgacaaagaagggggatttctttctttatgaagcgtgaaaagaagggaaggtgttttttcgcctacagctaaaaaaacgatacatacgaacatttcacggctcacaaagaaatatattacatcattaaatatacaaatagtcaataagtgtttcttacaaaaacaaagttgtatatagaaattctaaagtctcaatagataagctctagtcattccctttcaaaatattgtcagcaactttgttcagtagtttgttgatagcttcgtcaatgacttcattagcaatcctaattacatcaagcacccccttcagagatggatcagctccagggtcgtatggctctggagggggagagagctcagctgcaccacaatacaagtcacgatagatgtacctataagtctggcacgctctacaacttcttcggtttttctggcttcttccaaagcatcttgagactctttttcaattttcctgatagcttcatcagttatctcttggccacccttcagccaaacttcgctataaaactttccacttagtgcagcgacttcggccgaagggttcttaatgtcgttggttgaaatcgagaaccctggctg

SEQ ID NO: 50033 - DNA, 597 bp, Zea Mays
tcagactcttcccttgcatcgcgttgctgctgaactggcgctgtcctttgggttgctggttgtgggacgaagttggggctatgactggtggttgtggcaaggcccatgtagctggagagtggcttgctgaagctactaaaactgtaggatgtgagaatggctgttgattgcccacatactctgtaatgtatggggaataacacaaagcagtatgcaggacttgtttcggctgattttaccatgcttcggccttagctatctccttttgcttttgtattgtaacttggcatgtcctagttgtgtgccccttatcctctccacggaacaaacaaaatagccttctcggttgtgagttgaatcttcttctgaagcttcgtccccctctgtctcttagggttgatggtctgaatgagctttgttgcgtcccgattgactgggaactgtgctagtgcccttggttgtgattttgtctatcttcactttggctagggttatgtatcgtccagacatgccttgggtggagccatctctcaaagcccctggtcatctcataatatctataagcttcttttcttctttgtcggaaatcattgtcgg

SEQ ID NO: 50034 - DNA, 1511 bp, Zea Mays
gtctcactgctctccccttcagtggcagtcaaagtggctgatggcagtattattaattgcaattgtgtgattcctgctgctatctggacaactcagggctattcatttactactgatttccatgtctttcccctctcagcttacgatgtcgtccttggtatggattggcttgagcacttcagccccatgaagattaattggagagaccggtggttggctttaccatacaaggggcaaattgcggtattacacggaaaagttcacacttcagaccagcctgatataatgcatgtggtttatttgttgcagtctggtagtgacactcaactacccgacaacttggatccaaggttgtccctggttctgcagtaatttcagttagttttcaaccccccagaaggtttgccaccatcccgtgcttgtgatcataccattccacagctagtgtttatccatccttaccggtatgcacctgctatcaaggatgagatcgaagcccaggttatggagatgctccagtcagggataattcagcccagtaccagtccattttcaagcccagtgttgatggttcgcaaaaaggatcagacctagcgtttttgcgttgactttcgccacctcaatgctctcacaatcaaacggaaatacccagtcacaatcattgatgagtttttggacgagctgcgcggggctagctagttctccagtcttgatctgcgagctgggttccaccagatattactcaaggagggtgaagagttcaaaacagcctttcagacacatagtggtcactacgaattctgtgttatggcttttgagttgacaggcgcaccagcaactttccagagtgcaatgaacaacaccttgttgccggttttacgcaagtttgctctagtatttttcgacgatattctggtatacagcccttcactagaagcccatattgaacacctatgtgtggtgctggaattgctccagaaagaaaattggaaggttaagttgtccaagtgtacatttgccacaagatccattgcttacctcggccacattatcagttatgcaggagttcaaacagacccacataaagtgactactgtcctccattggcccactccaaacaatgtcaaggaactgcgtagtttcctcggcctcgctggttactatcgcaaattcatcaaacactttggcattatttccaagcccctaactaatttactccggaagaatactatgttctgttggacacaagaacatgaagtggcatttcagtgtctcaaatcagcccttagtcaggccctagttcttgctcttcccgatttctctaagcagttcatcttggaaactgatgcttgtgccatgggaattagagcagtgcttatgcaagctggacatccactcgcctttgtcagtaaggcgttgggcccaaagaccagaggtctttccacttacgagaaggaatatctagctatcttgatggccgttgagcactggcattcctatctccagcaagc

SEQ ID NO: 50035 - DNA, 318 bp, Zea Mays
ctccctataatatgttggcgcctgtaacatctgatatccctttcaagcttcgggaatccgatgctctttgacagggtgcctataatctttgcaccagcacaatcaaggatgcatcctataacttcttcgtccaccccgccaaagagcatggaccctagctggtagccgcagttgatagcaaaatccttcagctccaccatatcttcttcagaaagctactggcgacccaggtgccgtaggtcgaagtctgcttcttccgatgagacttccttagccttcttccctttgtctgacacttctatggccacctcattttcc

SEQ ID NO: 50036 - DNA, 1213 bp, Zea Mays
ccgacccaactctaacaccagcacctaacacttcaaattcaacgcccccagcaccagcacccccatctccttcaagagctactcccccgcctaaaacaacctcaaattatcctgaaggatcaactacccgagacagcacttcatcatctaggaaacacaatacatcaaccctcaagattgttggttttgttcttgctggagtagtgctgtttattgttatagtcttcctagtattattttgtctatccaagtaccaagggagacagtcgagatacgatcgtaatagaagtcagctgggaggggtgcatcatagggttgaaccgcaaatcaagccacctccagtgcaacaaagcaatgatattaaagaaggtaaacctttcatcccactattatatagctttgtgtttattttttgcgttcatgtaattggtttatttgataagttcaggcgagacaccggacaggagggtccatcaactaagttcatctgcagcaggtataaagtctttatgacaaagtgcatctaagttatattcaccaactacagatgtcagaaagtttgcgtgctattgtttacagctctcccaaagaagtctcctgaaaaccaaaaggagcacataattaattttgatcaaacagattcagatctgtttcatgtttctctaccacctcctcctccaccaccgccattaaccccaattgaaagagttgctgcaaatctcattgttccactagaaaagcgatatattcctccaccaaagacaagtagctcgacttcttccgcgtcattctctgttgcatctcttcagcaatatacagatagtctcagagaggagaatgtgatcagagagagtagattaggaagggtttacctagcagagcttcctgatggcaaggtacaaactaagtattacctgtcttgatgaaagagcagtcattatgctcagcattctgttcaagtattaagctagtatcattgtattttgtgtagttattggaggttttaaagattggcaatgctaatggaagaatatcagtagatgacttcctagaacagattgaatgtatctcagatatcaagcatcctaacattcttgagttagtcggatactgtgctgaatatgggcagaggttactcgtatacgaacacttcagcagaacgacactggatgatgcaattcatgatggaaaggatactgaaagtgcactgtca

SEQ ID NO: 50037 - DNA, 435 bp, Zea Mays
ccttgaagcctttttgcacccgccaggcaccaaaggctgtgctcatccattatggtgttcatgatcgagttaatcgaaggagggacagcgtcaaagacacacaagttcctatgcttctagatacaccaagctcctaaaatgattagggagtttattccctttttatcctcctttcggactcttcccaaagaggacacttgactggatgaggtaaatcccttgtagcaagcctgcctggtgtccagcatatgttgcggacagccaaccacatgaacattttgcatttatttggtgcccaagtcctccagatccttttccatggttcaaagattatagacccctcaaaaaaggccctatatgttgatctagatcaatagcagccacctgtttcaaatctccatacgtgctgatcttcgtgctcagttaaatcatatg

SEQ ID NO: 50038 - DNA, 627 bp, Zea Mays
tggagatcaacaagcggttggtgaggttaagacatcgatatcccatatgatcagaagagtacccgagaaacacacaacgagaggatcaacaggaaagcttatgagaagctgtggcatagagactggggtagcacacacacacacccaaagacacgaaggtggtcatagaaaggagtggttccgaagacggcaaaatgaggcgtgtgggagcagagagagctttggtagatagtcaattgagcaggtaggtggcggtgtgaagactctcgacccaatagcgagcaagaacagaggcctgaaacaaggaacacatgatgtcgatagtagcacgaatcatatgctcaaccttgtcggtttgggaagaggatacgagcatgacattctagctgcataccatgtgacagtgacattgttcatccgccgcgctgcctcctcacatcgatgccgcccctgtcttccctcattcacccctaccgattgagagagatccctggtaggatcaggaaccctaccagtccgcctcattgcttaaggcgttgccccaatgcttcgagcggtggcaaggcattaatttgtggatgctttggcctttgtagggtttggggaacgatatagaggtcggaaaag

SEQ ID NO: 50039 - DNA, 430 bp, Zea Mays
catttgaaggttagggttacctgtgtccggcacgatgggaaactggtcagtagtagagctagagtactggttccgttggcgtggaggtagagatggaggaccacgactctggtggatgtgtcggatctaggttccagacgactcctggatttatggtggagagctggagcctataggaggtcgccttgtcgatggtcgttggaggagggcgaaagttgaaggcaacgacaatggctattggaggtggatcgtggaagcgagacaattttgtgggagccgagagagaggagcacagggttgggttggagaggggatcacccggggcacaaattatgtatactccaactagcagaacgcccgtgtgttgcgatgacacacaaatcgatatagtggtgcaacggttgtacggcgtatgagggctcaatcagtg

SEQ ID NO: 50040 - DNA, 477 bp, Zea Mays
cgagcaactcagtgaggcgaaatttttgacctagtactactgacccacatcactacgacaagacgcgtcaccaccaaaccgcgtccggaccacaggtgcgacacactaaaggcgcgccgggaggtcactatcgacacgactatatgccccacgtatggtctaaggcgcgtccccactgccttgtggggccagtcaaccccagtcatggggacctcagcactagagtctctacagtgacccacataccgtaaaggacaggacgatgcaccataccaggtgtatgcctacgcacgcgggaaggtgacacaaggttcatgacgaaagaccctcgaagcacattgtaagtctaccctatgggacccgccaagagtcactacaacaacatcggactcgctatagggacccatgtattgggcggatgaagcagaacaccataccgggagtacacgactctacgaacgacgtcggaaggactac

SEQ ID NO: 50041 - DNA, 339 bp, Zea Mays
tgaaattccagcccttcaaatttgtcttccagtttttggacggctgtacagtacttgcccatagaatcattcaagcaatcccattttttatttatctgacttatgaccaccagtgaatctccatataccatcaacctcttaatgcccagtgatatggcaatgttcaatccatggatcagagcttcatattctgctgcattattggatgctgaaaataacaactgaagagcatatttgagttgttcacctccaggggcaatgaagaggattcccgcgcctactcccagcagtttcagcgagccatcgaaatacatccgccatacttctgtagcctccgag

SEQ ID NO: 50042 - DNA, 633 bp, Zea Mays
caaatgcattttcgtgggttatgccactactaagaaaggatacaagtgttggggtcctattggtaggagattatttctgagtatggatgtgacattccatgaggaagaaccatactacacaagaaaggttgacctagacaattttctggaggacttctctctagtcaatgaaagtgaccggagagaggggagaatgatagtgtctagggtgattgtggccaaggtagtgatttggttagtaggaaatcaagagggttgattattggaggtatggttccaccagaaatgagggaactgattactatagagatagtgagtaatgatgaaagaagtggtggtggggatcatgatgatccaactatcaatagtcaagaggagacataggatgatgaagctatgatttttgggacaattatgtgttctattagggtagaggtgaataagaagcaaggggagcaatgacctataatgtactatcgaagacaggctaagaagtaggggagcaacctctacctgaacaaacacaacctgaacaagttgaagctccagtcccatacctcttgtcaaactcctctctagttccagttggtaatgttgcttctccctctgaacgtgtagaattacctcttgcac

SEQ ID NO: 50043 - DNA, 313 bp, Zea Mays
gtaattaatgtttaaaatagaagtcttagtcttagccttagtcttactctcagttagttttagttagacagggtagtttgcttatcctgtgtttttatgtttgtcatgatggactatgatggatttggatctttgtaatgactgtcgccaaagtgtgggtaccccctgcactttggtttacctgttaatgttaataaaattagttatctagttgggaagcccttttattctacttatctctttatctaggaagctgtgcttgcctgtgttgggagtcagtgaagatgctcatcggttcaatgttgtggaagaa

SEQ ID NO: 50044 - DNA, 545 bp, Zea Mays
tcgatttccatatgatgagaaaacgatcggcatatcaggtgagttttatttatttggttggggactgactgaccagacgatccgcatccgctaagaaaggcttttttcccgtccccttttcagggccacacgtatacgatcggacattttcgtgttgtgaaagggagcgaaaccaatttgccgtcgcagctcgcaatgatgatatatactgtatgcccgtgtgacttggatacacaacgcacagcccatcaccattcaccggcaagcaagcttcgcgccacgcatgcgcgttcggcgttctggcttctaaaggcaccatcatgccatgctcgcgtttatccttctgcaccgcagctcagtgttcagttcggctcggtatgtgatgatgcgctcaatggaatagagcgggcggcccagggcgggcccgcgtcgattctatctacttcccgcgcttctcttcccgggcccgcacactgagaacactgatacaaactacgctcaatcaagatagcacacgaatggaagagaagcgagttggcatgttt

SEQ ID NO: 50045 - DNA, 519 bp, Zea Mays
cgagggggcatgataattattctccgtgcagcatatcccaatagtcccccgcggaatcggcgtggtgcatgcggaggcatcggcggcatggtttgttggagttccacactgggaagaggaacaatgcgaagggctgggtcccacccgtcggcgagacaagggtggacatgctctctcgaagttacatgacgcccgacccaactgctagcgacacagaagttccgatggtgagccaggtgtgaggccgaccggtgggccccacaagtaagcgacttagaaaaggggagaggtccgaggcgagctgcagagggggaatagtggagtgggccggggatgcaggaattcagcccatacgtgggtttttcttttctttcatattttctattttcctttatattttctatttcagatatccaaatcaaattcaaatccctattttgaagttcaaatttccaatatcaaatatgattcaattatgaatataaactctactattttcagtattagtatttattctcc

SEQ ID NO: 50046 - DNA, 475 bp, Zea Mays
gttggtagtcgaacgagcagaagaaggacatgcctacccagtgcagcatcctgtttacttcatcagtgaagtcctgggcccctcaaagaaaaagtatcctcatgttcagaagctattatatgcagtacttctaactgccagcaagctacgtcactactttgatgaccacaaagtcataatagtcactggttttccgataggggatattcttcacaacaaggaagccattggccgaatagccaagtgggcttgtgagctgggatctcatgacgtcgagttccgacctcgcactgccatcaaaactcaagcactggttgatttcgtatcagagtggactgaacaacaagtaccagataacccagagactgcagaagtgtggcgaatgtattttgatggctcgctgaagctgcagggagcaggagctggaattctcttcaccgcacctaggggcgagcacctcaaatataccctccag

SEQ ID NO: 50047 - DNA, 569 bp, Zea Mays
aagggcacatgtttcctcatcatcaatactctccttctagcaaaacccttgggcaaccaacattgccttgtttcgcaccaccatcccatcctcactctatttgttttaaaacctattttgtactgatgggatgacagttcgaaggaggtggcagcaaaacccaaacctggtttctctcaaaattttcaagctcctcatgcatatcattttcccagtttggatcagacaaagcgtgtctgacatgtcgtggctcaaaagaagcaaaaaaatatgagtgaacaaagtgggacatatcgtgatacttggagtgagtgactcgctcataaagctcaccaaacatctactaacgaggctgatcatgctggacatggtgtggagcccctctcttagagatagcctccccatcagcagtagcctgaactcctccaagattagctccctcaggctcgagcgaaccccaagtagtggaagtagacctattgggtctgtcgtctgaagtcatcaatgcaggcacaactggggcagcctgtggagtcggctaagcattaccctagtcagtgtcattgttc

SEQ ID NO: 50048 - DNA, 730 bp, Zea Mays
caataagggacacctgcttagatcttgtccccatttaaaacaaaaaggcatagggttagaaaagaaagtttttactaaccatatagcaggcaacaaacaaggaaagaagaaaacttcaaaacttgaaaaacgcctatgctacacatgccgaaagaagggacatcaatgcaaggattgtcccattggtaacaattccactcctagcttgtcaattaattcttatgtaattaggcaacctaaaattgcaacttgtgctagaaaggtaatgagtttacctaaagctaacacaaaggacttttgggttcctagatttttgttgactaaccgtgatggacccatcaagcgatgggtaccaaaatgtgcttgacaagctttgtaggaggaggagatgatatgaagctttggggtgcttgaggaagctaattcaattcttatcaactcaagctatcaatctacatgatccacatatccaagattgactcaaggttatttcaaattattatatcttaaactcatatcatctcgagggaagatgttgatgttgtaggaaataaagaattatcctatgccgaaaagtcaagacctacaacatggaggaaagccaaaggatggtaacatttatgcttttaagtgcaagtgttttagaatatcatttcttatgtgtctcatgtagtcacatagaaaaataaagcacttcaagtatctttaaattatatcacctttctttgaa

SEQ ID NO: 50049 - DNA, 613 bp, Zea Mays
tgaagatatggtcgggtgtgggagatatggtggcgccaagtcaggtttgtctggactgttcagcccgagacaaaacccatgccaattcatgtcaaatggttttggtttgagttcaaatttttctagggtgttccttgggtattttggcgcccttttgtcaattggaccatgttgatttggcgtctgcaactaagtgaacacatgtgatctttagaagagggctgaaattagacttagaaaaaaggggtttttcttttgtgcttcccacatgagtgattaatttgaggattttgtgggacctttttgggaaaacttccttactatttcttgtaggtatttaaatatgctacaacttttgtgaatgggtcaaggcatgatttggtaatttgcatagttttcccactaatcctttcttggagctctaatggcttaaggagggtggtctagggttttgagcatttttctcaattggaggtgtatgaaaaggctaggatatgacttctagtatgattaacacttgattaagacattgcttctcaattttggtgcttctttctcaaactaaaacacatgtgataataggtcacaggtgtatgtgttgagcaaaggcctt

SEQ ID NO: 50050 - DNA, 321 bp, Zea Mays
tcttataaacaacaacttcgtcttttcccagcttcagcgtcatttcatctccaggaaggcgtacattcaccttgctactgaaatagccaagcctcctcatagattgcaagtctttctccttcagaatggatcgacaatgtcaacatagcttggcttcaaaggtctatccttcggcaactctgtagtagctcttgatgttgatgaagccttcattgcctcggaaataggaagggtatcttgtcgtgcctctgaggaggtaggagtgatcagttttgcggtggtgcgaattctggccatctgagcaagacgaagagtttttct

SEQ ID NO: 50051 - DNA, 642 bp, Zea Mays
gaaaacgttatcttatggagtatatgctgacattgactgttttgagagagagagagagagagagtactgagagtttcatcgacgtaacgacgttgcccattagtgtgtgtctttctaatatcactaggtggactactcgtactaccaaataaaaagtaccgcgacaataataatatgctagagctagctgcaccgtacggcatgcatgtggtcatttgacaatgcggatccacgcatgtgatcgatcccatatgcatgtattcacggggctcaaggaggacatcactgtgcagcacttgcacgcacgcgtagacactgcaccaatcatgacaacctaaatgatactagctagtgcgatcgtgctaccgactagtagtatttcctacatggaatcgacacagagagagagagagagagagagcaagtactctactagtacgtaccatcgaaaccctcctgtgcccgatcgttgttccatcggctgctgtttacacgtcacgtcgctgagttaatcacccaggcacgaacagaaactctctcggccggccagctgacgatgatcaaaagttgagagaaggggggtccacacgcagcagggtgacatcgcgagtcagtcgcccacagcgcctcgatcaatggctc

SEQ ID NO: 50052 - DNA, 699 bp, Zea Mays
tagcgcccaaccctacttccagccatcccacgatcagaccgcgtacaccgccacacggcaccctgcgccattgtcggggagcacaaaagattgtcgttgaaggcaaatccggcatgtgccgtcatcgggctttcgcggtcctgtcggggaggcttggctggtcgcgctgcgtgtgaaaagagcctctctgggcaagattgtcaatcggttggtgaccaattgctcgtcggtcgtccgtctccctcaccaagtcgatgtgtgctgcgggcggccctgtctgcacctagagccacgctgagacttccttctttagatctgtcttcctctcctctgcgtgttgaaccgctctactcgcaatatggggtaccgtggcgctggttcgtctcatgccagcgaagtcgccaccgtggggtttggcggcgccacctgtgctgaccggggaaggaagaaaggcccctcgccgtcgatgtgaattggacggacaagattagaagttcggatcgttttgggcgagtaagttagaatcattgagatctgatcggacgattccgagtcaatcttgacttcattaaatttcaagcactaatttttaatccaacggatctggttaggttgggggtcgatgacgttttagccattggatcgtgatcccacgattagtattatgtaccggtttatttatgtgtccggactaatctg

SEQ ID NO: 50053 - DNA, 426 bp, Zea Mays
acgagcattaccttctgaatgctctacttgcaattcgaaaggaggtagacctgatggagcaggatgcacttgagagcaaagcaaggtctaacccagagaaggagaggatggaggaacaaattaaccttgcggaggctgtgaagccagtgcctagacaatttaatttcacccccccttcctcaccagaattgtatgaggccagtgacaatgacccgtacgactcggacaggtccactaggtatagcatttggaatctgtaattgtggtacctagaccatggtcttagtggtagtaatgcatcgaaataaaataggaacttctgtgttatgtctgtgatgcatgggtaaccgatgtaggaatgctcgaaccttatgtttcttttgtatgaaccttatgtgcaatggttcatccttaagttccttctgt

SEQ ID NO: 50054 - DNA, 643 bp, Zea Mays
tacttgtgaattagaagatttcatatgccaatttttttggtggatggaacatgacacatgtatttatggagcttttatactcacattcttgtatttgttgtttgtagcctcgacaaacctggagtttgaacacatgacagatggtgtgctcacttttttggatgaagagttgcacttatagtttactacgttagatttatgtacataactatgtggattggcccgactatggctcccaatactatatatatacctcctgttatggtttgttcctatgcgtcgcttcactcctgttttttccttgtgctggatggagcctgtgttggatagggcgtcgaatgggcgccacctgattagtttaattagtttacacgtgcctcacatagaagaatcgtccatagtcttcgtattccatcacgccgccaccatcaaattgactagcttctgctgctgaaacttctccgaattcatatattcgtgtcaatttcagttcaactttcagcaaatgagagcccatcgcaagtctcaatcgtctgacggtcgaaggtagcgaagttgggcttcctttggtacagaacccgactaacaaaattgggaacgagtcttcttcagcgtagcatatcatcatcaaatgaaatacgtg

SEQ ID NO: 50055 - DNA, 923 bp, Zea Mays
tacaaatcctatccccccttaacaagaatctcgtcctcgagatttaggaggaacgagggaaaagatggggaaaatctatgcgaagctcttcttctctctcccaagtagcttcatcttcttcatggtgactccattgcactttgcacatctttatcaccttatttcttgtaactctagtcaaagtatcaagaatcctgatcgggtattccgtataagtcaaatctccctgaacactgagctcttccattggtaactgttcctcagggacacggagacacttcttaagatgagacacatggaatacattatgcacatcagatagattagcaggtagctcgagttggtatgccacctccccaactagcctaaagatcatgaatggtccaatgaagcgaggcgacaacttgcccttaactttgaatctcctcattccacgaaggggtgacaccttgaggtacacatgatcaccttcctcaaattccagtggtcttcttctattatcagcgtagctcttttgcctggtttgagctactctcatattctctcgaattatacggacttgtttttctgcctcttgaataagttcaggcccaaagaactgtctttctccagtctgatcccaatatagaggagtcctgcacttcctgccatataaagcttcgaatggtgacatcttcagactggcctcataactattattatatgagaactcagcatatggtagacttttatcccaactccctccatgttgaagggcacaagctctcaacatgtcctcaagtacttgattagtcctttcagtccaggggtgataggtcgtactaaagttcaactttgtattcatattctcatggaagcttctccagaatcttgaggtaaactgtgaacctcgatcagacacgatcttatttggtactccatgt

SEQ ID NO: 50056 - DNA, 522 bp, Zea Mays
ttgcgcagctgattcagccccctcgatttcagagcacccttgaggcctcacgccttgtttttggatcctaccgtcctgcgcctgagattccggtgccagcttctacttctgtgtttgactctcaggccgaggatgcagctcttcgacagtttgacactcagggtacagcagatgatgatgatgatgatgatgattttggggttcctcctccgcctccgcctcctatgcctccacgctcacatgatcatgaggctgggagttctagtgctgcccctgctcctcctcagactatggaccctgctcttgcttcgattctggccaacctggcggccgagcaggcccggttatccgagaggatgctctcgatgtttcagaacatgcaggacaggcaggatgcccttcagcagcagctccttcaggatcgggctgagactagggcattcatggctcttatgcttcagcattctagtatctcagtacctccggttcagtctgctccacctcctccgcttcacgctccag

SEQ ID NO: 50057 - DNA, 854 bp, Zea Mays
acgacttcctgcccatataccagattgtacggtgaagtcttggtggagtcatggcatgagatccagtaggcccacaaagcttttgagaacactttgtgctaatgcctaggatgctcaccgaccttcctcttgatcaacttaataaggctctaattggatgcctcagcttacccatttgcttgggcatactacgaagatgatcttatcagcttggttcccatgtcaaccgcaaattttttgaattcttctaaaacaaaaattgatcctccattggtcattatagtccgaggaattccaaacctgtgaatggcatgttctctaacaaagttaatcacatcctttgttgctattgatttcatggggatgacctccacccacttcgtgaaataatctttgatagccaagatccattggtggcccttgctagatgaggggttgatttttccaatcatgtccatcccccagcctctgaacgaccatggtttcacaattgggttcattattgatgctggtatcatgtgtatcttcccaaacctctgacatgcctgacaccctttgtaatatttaaagcaatcctcaagcatggtaggctagtaatatctcgaccgtatgatcaaccatttcaatttgtgagccgattgatgagtcccacaggctccttcatgtacatcatgcaggagccaatttgctacgatcgaccctaggcacttgagtagcagcccttctagggtcctatagaacatgtcatctcctatcaggacatatttcatggctttgtaaagtgtccccttaggtgccccgagccgaatccttcaaataattgaagatatcagctctccagtcatctggttcca

SEQ ID NO: 50058 - DNA, 616 bp, Zea Mays
actcgcagctgagaacagatcgaggtcgtaggagagcgatcaaacctgagaagagggagaccacacagctttggttcactcgcagcttagaaccgatcgaggtcataggagagcgatccttgcgaagcaaatgaaatcaaatgagaagacaaagcagatgaaagtagatgagcagccaagaaaagggctaacctctcgtcgccgacagcgaagcagatgaacccgagaggcgagagcgaagcagatcgacagagaagcagatcgagctcgtccgcgggcatggtgtcgtcaccacgggtcgagagagatgacggcggcgagggagcacggtggctgtgagtgaacccgagaggcgagagcgagtgaacccgagaggagagagcgagagcgagagccgcggcggcggcgagtcgcgagaggagagactacaaaccctagactgcggcggccaggctcaatcgcgaagggagatatctgcgttccaatcaggcctagccacaatattgcgttgggctcatctcagccaggcccccaagctgggccaggcaaccaaacatggcgctgttgattcaaatgggcctgaccgtgcactgggccagggaaccaaacatatcca

SEQ ID NO: 50059 - DNA, 448 bp, Zea Mays
aactcgcttaggccgagctccctacttttggcccagctcagctcaccttccaacccacctaacgctggcactgcacgggccacccgatctaatgtcgcgcgtgcgcctgctcttgatgtgacactatcgcgtgggccctcaccaccagcgtccccgctccgtaatcgtgacctcccgttcaccgtctggcgggcccatgctgtaagtcgtcttcctcctaaaactgaacaccggggggagcgcaacgaactccgcttcctgcgtgcgcggcttcattgacaaaaccactgcgcgaatcttccaagccatgcgccagcctgattccaggtccgttccgcctctgctattgggcacaacccgacagggccttcttctacctgaggccgatctccgaccaaatcgcacctaaaccgtccttaatcatcggagatcgatcactggctaaatc

SEQ ID NO: 50060 - DNA, 380 bp, Zea Mays
aaaacatgttggctcctctcaattggtcgaacaaattttctattctgggcaaggggtacttattcttaatcgtgacctcattcagagcttgatgatcgatacacatcctactggtgccatctttcttctccatgaataagacaggggcggcccaaggcgaggtgcttggccttatataacctttctctgatatctcatcgatctgcttcttgagttcaatcaactctggtctagatactctataagctcttttagaaatgggggtggtgccaggaagaagctctatggcaaactcaactttccgctcaggtggcatgcctggtaagtcttctggaaacacatctgggaatttagacacaaccttgataatatcgagtgaa

SEQ ID NO: 50061 - DNA, 775 bp, Zea Mays
caaagagccaattgttcctgttggtatgcatcactagattcatcagctagaactgcaatacattcatcaccaagatcctctatgatcaatttagttctttcatgagcactacaactaatgagttgtttctgaatcttgtgatatatcaattaacaacaactaatgtgttctatatatagtacaactatacgttataactataactcgatattatctgtaactcgatactatataactctccctctctcgctctctatacgtaactcgataatatctgtaactcgatactatacgactctccctctctatacgtaactcgataatatccgtaactcaataatatttttaactcaatactatttgtaactcaatactatatgtctctcactctctatatgtaactcgataatacctgtaactcgatagtatacgactatccctctccccctctctatacgtaactcgataatatctgtaactcgatactatactactatccctctctccctctctataccttactcgataaaatccttaacttgatactatatgactctccctaactccctctctatatgctctatacgagtatcagagatttatgacaaagggggagaaattgtgcattaaagcttacatttagacttatgtaactagtgtaagaagacttttgaaaagggggagaaataattgacaaaagggggagaatcataagtaaaacataagatatgggaaattgatgagtgcatagtatgtaatgagcatcacgtttatt

SEQ ID NO: 50062 - DNA, 613 bp, Zea Mays
tttgtagtgatatatagagtgaacttaatcccaaggcaatacccaacacaaaccacaatgcaagaactcaatggttcttccaaaatccaaagagagtagggaggaaacaaccgcggagacgaaattgaataaaaatctgcagcacacacaaactgagcatgcttcaaccaaaacgttgtggatggataggccacccttcctcaaaatgatgaatacaaaaacacatatgttgagttcaaagcatatgtagatcttaggccaaactagggaaatgaagactagggttttctaaacaagagactaatgagctagccaaagagatagttgtccacaacatcccacccatctatttatagagggttatttcactagtctaaactaaccctagatacatagagctcgtcgacttaaccgggagcaaaatggaccaactcttggaatatgcatctgatggccacacgctttacacaaagttgcttcgtctcgacacacccttcacgatgacgccacatgccacctccaatttctactggaactgcaccgccaagttttgaggttgatacttagcaaaaccagcacctagatggttttgaggctcaaccaccaaaattgc

SEQ ID NO: 50063 - DNA, 1526 bp, Zea Mays
acaatttgacagccaagacttcagggatttctgcttctccattggcaccaagcctgtcttcgcctcggtataccacccgcaatccaacggcatcgtcgagcgcgccaatggcaagattttcactgccatcaagaaaagacttctcgacgacaaaaagggcaaatgggccgaccaactacctaaagtggtctgggccctaaacacgacagaatgtcgggcaaccggattcacatcatttcgtctattgtatggatccgaagccatgacgccgcaagagataaagcatgggtcgccccggacaagcacatcagtagtccccgatgtcgatgaaccaacgttcaaagatctcatcgacggagactgtgtcctcgccctataggccctcaacaaatatcaggctcaaaccaaggcctggcgcgacaacgcggttgtcccaagagagttcaacaaaggagacctcatactcgtccggaccacccggacagaatcacggggcaagctggagccgaaatgggagggtccattcatcgtcaagtcgaaggcatcccccagtgcgtacaggctagtaacgccttccggcgaagacttagagcactcctggaacattgacaatctccggaaatttttttgtttaaccatcagggcccacgcacccttgtaattcagcaaacaatgttattccggcccgcactcttttcctcctggggggtgaggtttttaacgaggcggagccatgtaatacaccagcaaaagcccccgcaaaaacaaaaactcagatgcaacatgttgaaaaagaccgctttgacggtcttcggcattcaaccaattcgaagtcaccgcgacaggtagcgtagactaccctcgcgtgcgacactccgcgcaaaagtcgcctaagggtgcagccagaatagcacaacaagtgcgccaatcgaagtcttttatcaaaaagatactccgtgcaaaagttgtctaagggtgcagcagaatagcataacaagtgcgtcaatcgaagtcttttactaaaaagacactccgtgcaaaagtcacccaagggtgcagcaggataagcgcaataagtgcgtcaatcgacactccgcgcaaaagtcgcctaagggtgcagccggattagcacaagtgcgcgaaaacggccaacagaccacattacaatacaagttgcagttacatacactcagtgagggcactacatactacatcggctcaaccttcgggatgatggccgcctccctataattgaacaacatattttcaattcctcaccctcaaaaagattccgcagatccccctcaccaatgctcgtcccaatcggcaaagacattagctctcgtttaccaaaccggtctacttgaagacggtcccgctccatccccatcccacggcgcttaccacttctcgaaacctcacccacgctatgcttcaaaaccacccttcgtcgccgacacttggtcctcgcactaggcagatcagccacctcgccaacctccacccgcggcgaggactccgccgcg

SEQ ID NO: 50064 - DNA, 364 bp, Zea Mays
aagtgtcaatgatcttgattggatactctgtgtaagttagatcaccttgcacactgaattcttccattggtaactgttcctctcaaacacgaagacacttcttgagttgagatacgtggaatacatcatgcacatcagatagatgatctggtagctcaagctggtaggccatctcttcaactcacctaaagattctgaagggcccaataaagcgaggggatagcttgcctttaactttgaatcttctcattccacgaattggtgacaccttgaggtacacatggtcaccctctttgaattccagtggtcttctccggttgtcagcatagctcttctgccgagtctatgctatcctcaagttctc

SEQ ID NO: 50065 - DNA, 603 bp, Zea Mays
gatattgttgctttataactcatcaggaattgcttcggatcagagtgaccgtcatacataggcaattaaggtggtttgtacgaaggtggccatgatattacctgcaactctatagctaaaggagaagcatcatcataaggaaaattgtcatgattaaaggcttcgtaccaaatgtcttcatgattttggctttcatgttgaaggtcttcctgattctggtgatgctcttgacggttagtattgtgtgaaatatttcacatcccttcagtcgcatcatcaatcttcttctaaagttcagaaagccaaagcatcttctgttttcgcttttcaacttgctgatgtatagctccaagattactgatctcatggtccaatgtgttgtcttgtggtattggactggtggccttccttttctagctccgtgcctctcttaggagaattctatcttggttaggatccatgggagtaaggacgagactgagtaccatcgtcttttttggtggcatgtcgaaacactttgtggccgtaaatgagttcatcagaggtgggcaccaatgttgggctcttgcttttgaatcctataggatatcaaaaacaaacaac

SEQ ID NO: 50066 - DNA, 898 bp, Zea Mays
ctttggctgatgggaaacaaagcactggagagcctgagacttgctttgtttcctaacacttaatccttctttggtttcttattgaattgttgggaacggttaacagatggatctgtaattgttttggaaattgattctacagtagcaagtatgtgcatataaatgtgaccatgcaagtaatttctataaggtaactgaaatccttttaattcttgtttacaatgttattttccgtcttcaaactgaaactatttagtttgtgtgattagtgttatttccaccattttttgtgaaaatggaaattatttagttgtgatcagtgctattttcagtctgcagttagtggaactatttcatcttgtgaccagtgttatttccaccatttttgtgaaactaaaacattttttcgcatgcaagcataaactctttccactattttttgtgaagtgttatctgtcgctgcctctatattcttcttgcaatgctactactggcctttttattgttcagctagctataatcactcatgggaatgaaaagtgatggaggagttactacaaccagatttggtcagacacatctggcaaaagtttgggcatcaaagtaattaggcactaactaatagattgtgtttcatcttgctgaatgtttctgtgttcagttcttgcaatgcttcattatttaaaatttatgtttcctgtgttcagttcttgcattgctgtaaaattgcatactgattaatgtggtcactacatatggcttgaactattttttatgatatgaaacattgttaaatatttgtagtcaagcattcaacagcccagaatgtatttcttatgaactatgcatgctgcttctctcctgtgcattcagactttgggatacatacttattgcga

SEQ ID NO: 50067 - DNA, 332 bp, Zea Mays
ttgccctgccgaacgacggaccaagactcgaccggaagcaatggagggccaaactgtccctcacgccggagttcaagcccgtactggacaggatcaaggaactggcggccggtggtctgacctcgatgcacgtggtcggagatttcctgaagcgacgggtcatgccgttgtaggggaggccgcatctgtattgctggtttactggcaccagtgacattggcaggatctagcgcgggccagggaccgacctatccttccaggagctagaggttttagtgaaggggatcactggtgaggcttttatccctgaatccttgatacctccccagggc

SEQ ID NO: 50068 - DNA, 327 bp, Zea Mays
attctgaatttcagaaccctttccaaagatcctttgcgttctctgtttttcaaaactcaaaaccaggaagtccaaatatcaaaattgttccaaattcccttgaacacactctggaaaattttgaactcaaaccaaattcatttgacacgattttggcacagcttgacctcggaaccaggtgttctgacactggcaccttggtgacactacaactccctgtccctagcctaaaaccacgcgacgtccatacacaaaagacaaagcaatgtcagatgaacaaatccttcacagcgatcttgcccaaattcgcgaagatttgcgcccaat

SEQ ID NO: 50069 - DNA, 761 bp, Zea Mays
gcatcatacaaagtttgtggtttctagcatatagcatatcgtgtatcggttcagcataacatgtgcatgaaaattgaggcatgtgtccagtagaacatgcaaacgagcatgcaaatcaatgttttctactttagacgatattatttaaaaaaataaagtttgaaataggtagtgagatcagaggtgagatagataatctgctgggagctgctcgttttttgcgtgaccgcgagcactcgcgacgcgactgcgcgatctgctggacttagggcctgtttggattggcttttttctaacgatcttttctgataagctggctatagagagaagctggttgtagggagaagttggctggtaaaaatatgaaagtttggtaatccaattgtggggagtaaactgtcgtactaatcaacacataatttgaaaatagccgatgtgttctttcctaaaataagttgagcagggtcgaataggtcacgggtccgaataagctgagcaacttcttgtggacgcaggcctggaaccgcttctttccgctcgttggccagccgctgccgcacaccacgcttttgctcgcagccgccgcggaagccggacgtttggggcggctacaccgattctggcggccataagctgccaagaatccgaaccaaacacatccgatttcttactcatttttcgtatccttattttccacatccacgatcgcatccgcgatctactagaaacagtctaatgccagtctaatgccaacacaaacc

SEQ ID NO: 50070 - DNA, 350 bp, Zea Mays
cggaggtcctcgaccacagaaaggggtgaagccgcgacggaacaccacatcggtgagtaattaacggcgatcctatggtctaacacccgatccgaccaatcgtactcactgtggcgaccaaaatggataaatagacagaggctccataccggtggtgaggtcatgcagtaccacccacggaggtgcatcttccgtagagaacaggtacgacggtgaggaattctgcccgcctcgctcggtttcaccacccacccacgattctcactcctttgacaagactaagtgaccccacccaggctccagacggcgtcggcgacgagccagaagcttggtggcacacccgatcgcac

SEQ ID NO: 50071 - DNA, 300 bp, Zea Mays
gtaactgagttggactctaacttgttggcagtttcttcccatataaatatacatcatgtggcctcctatggaggatatatgcttaaacaatttggtggttttctctcatggtattagagcccacctcctaaagacctaaaccctagctgctaggactatccagaaaccctaatcctagccgccaaaaaaatcaatatgccatggtgagttcttcaactttctctgctagttcgcaacttctgttgagacaagcaattgcagagaaactcaacaagaacaattattctctatggagggcgc

SEQ ID NO: 50072 - DNA, 357 bp, Zea Mays
gtccgcggtttagtcggattatccatgattttcagttcctggccgaagtcgaaacggtgccgtggatggcccgccagaagggaccggacggtccgtgctaggcaatttcagaacttgagtttctgactttccgttgatctttgaacaatcttctccaagttgctttggctaaacttgagagagatcctatgacttagaaaaatatctcaagtggctttccatctagtctaaatcatggatcatgaacattttgattctttcattcatatttcttcttttgcccaaactagctctaaaatagtgatatgttgattttgtgctttccaacctttctagaagtgttgaatacgttcctcg

SEQ ID NO: 50073 - DNA, 571 bp, Zea Mays
aatgagaggtctaaatgatcgactacagcaaaagatggccacttgcctggacctcacttacagcagggccgtgagcacatagctttcggtggaagccaagaatatgggcaaggaaagacaaagagatataggcgtgaaggggtgaaggatcctctcaaggattagagaagcgatcgaggttggtgattcgaccttttaactcaaatcgctcttttgctcgtccacccgccttcctttcaagcaaccagtcttcatccatcccactcctgccccgctcaaaacaagcagtcgagtgcccctggtacttgtttccttgccttacctagttcatctaatggttgcttgaactgtgggaagtctggacactgcatcaaggactgtccctatccaaagcaaaataaatctaattttcaacagacttctaagagcacatctcaaggcaagggaaatgtggtcatcactcaggcgggcaaaaatacaaggaaaactgggcgagtctactacactcaagtggctaccaccccggaaggagagcctgtgatgatgggtacgttttacgttgccaatcatc

SEQ ID NO: 50074 - DNA, 372 bp, Zea Mays
ttgtcttccatgtacaacaactatagaatttatttgtaacacagtgggttgcttctctcgttgagcgaatgtttggtttgatgctgtaacacgaaatgtaaactttaaggatactatttgtgctagatctggaggtattggtgctgcttcagtggcttgtttcagaactgtttcacatggtctgccaactatatgtcgtgctacagtatcaaagcaaaacatttgcgctgttgctgttgcatctgatcccatgaatgttaatttatatctgcaatgttattatataattaaaacacattaggtcttatttgttaccatgagtagcaatataattgaatttagaacctgctaatggttctacaaggaatgaag

SEQ ID NO: 50075 - DNA, 509 bp, Zea Mays
tgaaatatctctctatatctagaacatggcaataatagaataattagtgtaaaccatgccatgggaaaaagcaacaattttaaagcatgtagattgtcataatatagaaatgaagaatatgcaatctaccatatgagaggaatttcttcaaagaatggtgacataaatttaaaaacatcttaagtgcttcctttttctatgtgactacacaagacacataagaaatgataatttaaggtacttgcacttaaaagcataagtgttaccatcctttgacagtcctccatgttgtaggccttgattttccgcacatgatgattcttcaattcctacaacatcaatatcttccccgagatgatatgggttttgaatacaataaattgaagtaaccttgggtcaatcttgaatatgtagatcatttgaagattgatagcttgagttgataagaattgaattaactccctcaagtacaccaaggcttcataccatctccttctcctacaaagctt

SEQ ID NO: 50076 - DNA, 480 bp, Zea Mays
tgatcatgtatccacctatgtccggttgatgcaagaatgcttcaatgactcatgcatctacccacggttcttctttagttgaaggtaccacatgctaaggatagcctcttcaaattttagagagggtgggtgagcactccacctccctcactattcaaactgatgtactcaaccataatggtttctccccccaccaaaagtgcacggattccctatgcatgcttgcgttctgtagcattctattgtatagaggtgttatttcatatttcgaatagacgtacaattctcatcccactattgaccgtcttggacaattgttagctaagggggaggaaaggagattttctggtacgatagagagtataggttgcatgcatagaaagtggagggactgtcccattagatggagagggcagttcagaagggggacactggatcctcaaccatcatactcgagacagttgtctcgtatgacttatg

SEQ ID NO: 50077 - DNA, 1001 bp, Zea Mays
ggtcgaatgccgaagatcatcgatgcagtctttttcgacacgttgtgtctgagtttttgttttttgtgggggcttttgtaggtatattacatggctccgcctcgttaaaaacctcaccaccgggaggaaaagagtgcgggccagaacagtattgtttggtggattacaagggcgcgtgggccctgagggttaaacaaaaaatttgcgaagattatcaatgttccaggagtgctctaagtcttcgccggagggcgttgatagcctgtacacgctaggggatgccttcgtcttgaggatgaatggaccctcccatttcggctccagcttgccccgtgactctgtccgggtggtccggacgagtacgaggtttccttcgttgaactctcttgggacgaccacgttgtcgtgccaggccttggtttgagcttgctatttgttgagggctgcagggcgaggacgcggtctccatcgatgaggtctttagacgttggttcgtcgacgtcggggaccgctgatgtgcttgttcggggcgacccatgctttatctcctgcggcgtcatggcctctgatccatatagtagacgaaaaggtgtgaatccggttgtccggcattcggtcgtgtttagggcctagaccacttcaggtagttggtcggcccatttacccttcttgtcgtcgagaactctttttttgatggcagtgaaaatcttgccattggcacgctcgatgatgtcgttggattgcgggtggtataccgaggcgaaggcaggcttggtgccgatggagaggcagaagtccctgaagtcctggctgtcgaactgtttgccgttgtcaactgtgagctcggacgggactccgaatcaacaaacaatgttttgccagaagaacttctgggcggtcttcaacgttattgtggttactgtcctggcctcgatccacttggtgaagtattcgacggcgacgaaggtgaacttgaagttcccttgagccataggtagtgg

SEQ ID NO: 50078 - DNA, 379 bp, Zea Mays
gccccatgaagaatcaaatgcaatgagaacagcgagatcaaagaaaatataggcaaggcaaatcattacgccccctttcggctggataatataggtttctgcaagacgaagacggtcctgtggtcagtcgactctaccgcttttggacgcgcctagttccgcggtccacaaaaccacaacgaagaaagcgagctcggctcgagcacttcccccctcctctctgcagcctgcaggctcccggcagcagagaacaagcgcgaacggaagcgggccaatcaccaccaataatcccccggccggacacagctacagcgcgtcgcgtcctaagggctgagggcctccttggccgttgccacgcgggtcaggcggccagtccgcg

SEQ ID NO: 50079 - DNA, 1048 bp, Zea Mays
cactttcttccatgtaatgattggattctgagcctaaggtacaccatatcatttcataaggaggacagacacaaaaacatgattctaccaacacttcaacttctaggttcaaggcaacaatgtctttcaactagccccacacatggaacaacgacacggtctagagatagaacacaactaatagcaaaatcttggtatgaattaactctatcgtgatgggccacttattcctagcctagttcaatcccccttatgcttaatttccactaggacctggttatcacagtgtttgtcgatgcccctgatgatgagatatgcagtcccaactaccagtccaacagtggacctaggggcctttttcagtgtatggggaaggacataccacccaatgctaccaaaaacacattcaacgatcatggtataggaagctattgagggtcccgactactaggattatcactctcggggcatcatgccctaggatcacccctagtcctatctagggtagggattaacattgggtaacttgatattgggggcactaaaaaagaataatagctacaccaagtcccgttaagtaataagcaacctagggcacactaggtcttaggactctacatggcctagtgcctccgaacgtccctagctagaagattataatctttgaggggcctcgtgtctcgaggcactactaaaggaactaagccatgaagcctctcatgctctgggatgctactaaaggagttaaggtgtctagggtgattcgtcccctaggacacttaacaacatttagtcgtttaggaccctctcctggccctggtcccgaaggtcttagacctcacgtaatatgaactatcgggactcaaacctctcatggcctaacgcctcctatgggaataaagggacttgctacaattaggtacaattcttttcgtgagacaaaaggatgtgtttgggcccaccaagggcattacgaccctagggctagaaccccaccccacaactaaaggcctactaacaggcccataatgctagcttatgatataag

SEQ ID NO: 50080 - DNA, 573 bp, Zea Mays
taggaaacgagtttcatacatgaccaacatatatccaccaaaaaactacgacttagaagactgtcaaccgaagaaagcaagcggaattaatcctaaacagaaaaaccattctaaaaaggaaaatacacccaaccactcatggtcaattctagctaagtcagactttattacatggggaagatcacaccccagcgggttacagctaacctcgctacaaactgtttaaaccagggagaatttaaaccagaacaacaccagatagtgccacaaagacgtcaccattctccatccaagttttttgttgaaaaaatctttaaccggtcacaggtgtccttccttccatctttgtatggatcagagcccaatcattcatacaaaagtagcacatgaagaaaatagcatcagtgtaaactgtatttttaccattaaaacaaacaccatttctaaccctctagagggtccaaaggatcgcactgcagcccaccacgataagatttctgcttttatttttaaatttatagatccattctccaaacatattttcagcagtttttgacattatgtgcatgttct

SEQ ID NO: 50081 - DNA, 571 bp, Zea Mays
gcatggtaccctaccctggattataatgcaaaactaaagttcaccattcctgttacctgttttgtttgtttgaagcacatgcatgcaaatgttaggctgttttcctgtttcaagcacatgctgcaaggatgctaaagctagctagctgtgcatgcacacaacctgacatcgctagcagagttgctgttaccaactgaaaaagatcttccatagattagttcaaaagaaaagcattctattcatagtcacgtatgctgtgtagatgagataaaaagctgcctacacataagacaatacatgagatcttatgaattcaagttccagaaatcacaagggtgaaaaaaaatgcatgagatctgattagttccagaaatcagaaagctatttaaacatgcatgcatgaaaggggccagggatgcatttgcatatactactccatgacacaggctagagaaggaagatgcggacgcttggttcagagagaaacatatttgagaattctctcgcagtatgtgcaaaacctgtaacctcctccgctcttgtgtaaagaaactctcgtgcctgtaacctg

SEQ ID NO: 50082 - DNA, 435 bp, Zea Mays
ggggggggggggtattgggcaaccctacgatgaactccatgcttacatcctcccatttccatgatggtatggaaagtggctgcaaggtgcctaaatccttgctttcgtgacttgacttatggatattaagtccaagtttgcgttcttgaacaattgttacaacaagctcttgaatttaatcagtgaagtgtttccaccaaatcacaagatgctgaaacacgtgtatcagtgcaggaaactcctctctggtctgggtatggactatcacaaaaacgatgtctgtctagataatcacatgcttttctagaaggatcatgagaatgatagtaagtgtctaaagtgtggcaagtccagatatgtagaggttaaaaatgatgatggtgaaaaggtcacatcaatgatagcccaaaagcaacttcgttacatgcctcttgc

SEQ ID NO: 50083 - DNA, 301 bp, Zea Mays
gatttattacaacatgtcgaaggttgcaccttctcaaattgtttctgaggcaagaacatgaaacgagagaaatgaaaattataataggtgtatatgaagtttttagcccaacccctctgtagcttcagtaaatatgcctcgactctagaatagtgttgttaactgtccaagcttcggactcttctctcgcatcacgttgttgttgaatttggttctgcccttcaggatgctggttgtgggacaaagttggagccatgaccggtggttgtggtagggcccatgcagctggagagtggcttgt

SEQ ID NO: 50084 - DNA, 357 bp, Zea Mays
cgtgcgcacaaataaaccaaaggctaggggcttctgtgtgaaaaatcccgagacacaaggttaaactacggtggacgacgggttagtttagcgaaaaaagagggtattatgtgcaaaactgtcgcgaccgaaggggtaagggtgtttttcggtcgttggatccatgtcagatggcccagattagatcgctacacgctacgaagtggtatggaactgggtcatcagatcaacgttcaacggttacgatttaaaatttgcccgattcgatcctgcccttacgtcgatgatcctgcggtcaacatgagatcaagccgaggcggtgcaatctccctaatctacaccgttcttcctaaatca

SEQ ID NO: 50085 - DNA, 713 bp, Zea Mays
cacaactcgacatgcttcatcggccctacatgcatggcgatgtgccattgtggcctacaagagcattcattcttcatgcaattcagttaggtttatcgcaaatcatattagaaaaaaaaatggatgccatggtgtttcatattcgagacatgatgcaatcagagttttctttttttaatgcctcgttatgtaatagagactgtaataaggtatctgattaattgtttagctatccatggagcttatattttttttttaaaaaaaaagattttgaaaaatgtaaactggctaacacgctatggctgaagcgcatgtgttgttttaaattgttcgccgtacgtgctccatttcacttctcaacagcactcttctcttatttgtcccatgagccttgcctacgggatctgaatcctccgtcgtgcggccgtctcctcctttctccatcgtaacactgcttcgtggtcgtggcattatcctgacaccggcaaccgccatgcggccctctcccttctccagcaggacgccatcttctagtcgcatgtatagaaataggagagacaacataattcaggcaaaatggttgaataacttcaaaaaagtataaatgaaaatttagagttactacttcgcgaaatatggactatttggaatgatgaaacacatcattagattttgttagaagctagaatatcaacgctacaaaaaccgttact

SEQ ID NO: 50086 - DNA, 668 bp, Zea Mays
catccactatgagttgttttgcttgggagtctttgagagagtctatctcaatttgtccgttcgcccttgacccagagaagcctgagttggccctctagcagactgagttctattgtgtgtgtgccctcccttttatagcctaagggaggcaagtacatggtgaccgagcgcccaataggtgggtccagtaatctgttgctagatatggagtaagtggagcggcggttcgtggagaacagatatcttctcttgatctttgtgtagatctcctggcttgctgaccctcgccctgtctaatcggagcagggcacaactgtaggttgcggcataggctaatgagcaaccgtatgtaggggtgctcagacgtcgtcatcctatcttttccgcatgttctcctttgcctcggtaacacgcgtgctacagtgggactcatgatgatagcggccccagcggcacagggactcaatggtcttgcctcggtaacacacgagttactgtgcggcctgcgtgctccggacgcactacctacctctagggtgggcaggtatatgtcttgtccgcagttaatgcaaaggcgcgttacactcagaggctgacgacaggctttccccaatggcttacgtcacgcgtcgtagaactcgtggcagcactaggcctcgccttgtgtg

SEQ ID NO: 50087 - DNA, 521 bp, Zea Mays
cttaggttgttttattattagttttatgcttaaaatttaattcccatgtttatttaaatgagattatggctgcggtttcaaataaccgataacccagggttccgttgacaaaatctaggacttgtttattatggttcttaaaggtggaaggactgcgggttaattagagaagaatacgaggtctctttaacaaataagccacgacgaaggggtattgtgcgtttagatccatatgatcaaaatccaagggttcagaatagatcgtgaagcggtaagtgagcttggccatcagatctctaatcgacgacccagatttaagtaacagaggtcgacacggagccacccgatctgaatcaatggccaggattaagaattgaaccggtacacccaagatttaatcgcgtgcatccatcacagatccaacggctaccgtcaatgggctgaaggggtactcgccgcttgatctggtacgttcatcagtccgccaatggtcagggaccgtcgtcttccaccccagactg

SEQ ID NO: 50088 - DNA, 399 bp, Zea Mays
gtccaaaccaagacacacacgcgcgcgaagttgcctgcggcacctcggaatttctcatcggactacgctcttcgcgatcgaccgtcgtgcgccgtggggcagtgtgctacatcgcgggaatcacggtacgaactcctcccacatattcgaatacgtccctattgcgcgtagcatctgtcgagtcagagtttagggcactggagcacttgattgggttttcaccggcgaggttcgccgtgaattgagggcggtgccgccgtgtttctttctgtgaagggggaagacacgctaggaccgttggatgtgtcagtgacgatccagattagatcgggcgtaccgtttcgacacgttagatccaaaccgtagagttataatctaacgggtgagaatcaacctcgg

SEQ ID NO: 50089 - DNA, 479 bp, Zea Mays
cgccaacgctaacagccagccctcaaccaccctcgcccacttcgccgggtataagacccataccctccacgtcgccccaaccctccaatagataatcgggtgctgtcgttaggcatttcgcttgtttgggcaaacacggaccgagagagagagaaggggggaaatcggtgcgctcgtcattgaatcgcccttctggtgtgccgaagatcgtagccacttgactacggggtggcgattgggttacggttggagccgtggcagcttgcgccaccgaaatccccactagcgcgcgactccaccacaacatccaccccagcgtggattggagattcttcccggtaaactacggtaatacctacccctgccggctcaccttgtactactcatgttggtgcaccgtctgggcggggtaatcgggcagtggcgcagcgggaattgctcgccggggattttagcgctgccgcgggccgctctgctcc

SEQ ID NO: 50090 - DNA, 635 bp, Zea Mays
gattattttgtagtgttggatgtggctgcagcggagccttcgccgcgcgcggagggttccgaggagctcccgggcgcgagtactgggtataggcagcgaagggcggtggcgaaacagagagtgagtggattgtcgcgaagcggtaggcgtcatcgtagtgagatggagagtgggcgtcttcgcgtggacgggactggtaagtgagaattgttgtcctcgccgattggggtgagtgtaggtgagggggagctgcgaaatatttttgagggtgaggaattgaggataatgctgttcaactacagggagatgggtatcatcccgaaggttgagccaatataatatatgatgccctcgttgtgtgtatgtaaccataatttgtatgataaggctgcgcgccttcgttgatccgatcacgcccgtaggcgacttctgcacggagagtcttttgggaacgacttcgatctttacgtacttgttgtgttgtttcggctgcgctcgtaagcgacttttgcacggagagtcttttggaaaagacttcgattttgcgcacctattattccggttgtacccttagacgacttttgcacggagagtcttttagaaaagacttcgattttgcgcacctattattccgg

SEQ ID NO: 50091 - DNA, 993 bp, Zea Mays
cacgggcttttgtggagtaccgtccaactgcacctgctgcaaataaacgcatttgttaatttacaccttctcttcaaggaaagaaaaatggaagagaaaaaaaagatggcacgcgcgcttaattggttttgggtgggagtgggacacagcacactacagtctactgctatgggggagctctgggaagaaacaggaacatgacccttgagtgacgtggtgcttgtcgcgtagctctttctttcttctagctcgtgccccccagaccccagtactgcgaaagtatgtggttggtagtgcagcaggccagcagcggtggtgctatggctgctggtgcatagcatagcgtcaagaattggccatgtccatgactgtctcgtcttaatttcttcccctggagctggagctttgcgtcgtcactcgtcgtcgttgtgtgtacgccaccatgcagctcatcaccacaccaccatgcatctatcgcatcatcagttgggccgccgcgcgccggccgacctgacgacgacctctctgtacggcctgacggccacaggcatggggtccagctagtgaccggtcggagtggggctcgctcgcccaccacacggacaaacgccgtgacgaggacgagcacgagtcattgagccacgttaacgctacaggccggccagtcgagggctagcttcaaccgtacgtgcaagtgatgaggtctcccgtcccgtgtacgtactgcctggccgtgaccggcgaagagtcaacgtgttacgcgcgtctaccgccgcctacatcaggaggaaaaggaaggagcgccaaggagtggtgcggtgcggagggaggcaggatagagacgatagacgagggagcgacgacggctggtagccctgccctgccatgccatggcagccacatgtgtgctcaagctggggagatctgctggtgctggcgtgtgtctgtgagaaccttaattcctagcaacggtttcaggcaaagctagctctc

SEQ ID NO: 50092 - DNA, 836 bp, Zea Mays
ccaccaaggtctggagcagcggagttagcctctagctctaagccggatgagtgctgaagctttcttttcctcctcttcgtctcggtggacacaaccggagaaccttctcggcgtgttcgcttgcaacaagcactaccagggctgcagactctctcctccccaccaaacacacgctcggttgcggcactcgccgactcaccgcgaacagactcgactgactcgccagccagaatactaagaacaacattcgctttggcttcatcagagatagtttgtatccggaggtgagtcagtttttcctcttcagggagaccccggtacgcagcaatgaaggattcaatctccttcgaagaatgtcatgctttatggcctagacccccgtcttaaacaggtaggttggatataaaatctgaaagggacctctgcagtgacaaaacgacacaatatgggcactacgtatgacaagtacaaaaactcatatacaacaacgcttaccacagggggaagattccaggtagagtacgaaagtggagcaccaacattcgaagctttgcccctcaacatcgagtcaacccgactcagcacgtcctcctcagatatccgcttatcagtaagtcgagaggggtcattaacaccggtgtacagataagccgggtagactctatctttcaaaggttgaatgttcttgaaaatgaaattgacaatgatagcttcagcagtcagacctctgttcttcgacacagatatctcgaggagcaaaacccttgactccgcaagctccgagtcggtcgggacctctgtccagctaggtgtttagacgtcaggttgtctccccg

SEQ ID NO: 50093 - DNA, 1485 bp, Zea Mays
gccgaaagcagcccaagcggcccaattccaggggaaagcgcgcgcccgcgcctgcgctgcatactttgcacaaaggtccctggagttctggttaactcaaagtgggttcttttactgttgccctgagtcactgacggtttctaaaaagacccccaggttctattcccttccaagtcgaggtccccgacggtgcaccgcacagggagccaagctccggcgagctagactggcaggagggagccaagactggtgctcccgagtggcagacaccgaatcggaccctgcccacgcatttcccccaacacaatttcaccaaaggctacttggtttgctctggccgcagtgaccgtagaccatgcggacagttgaacgcgttcccggcgattggtggcggtctagttcaatcggatgggttgacgagcatcacgggtatgtgagatcactcaaacgagagagcagaggggacgagctaacctgtatcgtgctggccacggcgaggtgttcttgcggcgttcttcgatcgatttgggggtaatcccaaattagggagctgtggggaacgatcgaagctgatagtggtattactggacgcacaattacctagcggaatgtgctgaggcttcaatttataggatgctcaagcggtggtgatcaatttgggcaagttgtgctggcggctggagggcaaagagagctctgtgctaggaacaggtggctttcaccgtggcaatcactccggcgatcaccggacatgcaccccatggttcaccacgatgcggctaaagcttaagcatgtggcgtgcaatggtgacagatcgacggcgacgaaggttatccgatcgaccgatgagctggagagggtacggcaaccttagccgccacgagacccaactcaatccgggcgccaatatttttacctgcccgtgcttatcttgtgaccacggtgcacgaatcgcgacaatcagcgctcatcgcggcggcgagtcaccggtgacggtgaacggctggcagtcgatcttatgcagatactgtaccatggcatcccttattcagttagcctgaccgagcgatttgaaacccaatttcctcccgattttcaatggcaaccagttgattggccagtaaaaaagttgttgtctgatgatccaacaacaatcttgttatagcaaccatggccaaattcttattagatcagggttgatttctagttcaaagttggctcagtatcactgttagtctgaatttcagactgcaaacagcctgacagcccgactttgagctgaattatctccaaattcttcataacaacaatgtttaactccttaaacaaagttgtgcccctttgatagatttacatatttgatgtggtgacctagggcaaaaaccttataatttgaatgttacaaagctccaaagttgagcccatatcacagaattttagacttagtgtgagatctcaaatagggtctttttgcaaataagtcc

SEQ ID NO: 50094 - DNA, 371 bp, Zea Mays
attaaaacagggaatacccccttcgcatgatcggatcgtggccgtcggtcggtggatcggcgatcagcgttggatccggatatcattaaatctagaacgctaatctcggatcgaacggtcggtcctgcgtaccgcttcgccacctctgctgattgatccgaaccacccatttgggatcggatggttgaaagcgcgccctgattcataacctcgctgatctaatcagcgccgctcgtacttgatcgggcggccaggacttaaccgtaccccttcgcgggtacactttacaaacgaaaccccatgcttttagaatttagaacccgcagtccaaccagttattccctgagtcttagactctttttcaccgtgac

SEQ ID NO: 50095 - DNA, 285 bp, Zea Mays
gaacttgggtccataatctttactgatccacttaacaataaacttgattcgacggtatgcacaagttcatctaaagagggggttttcactatcatcatcactactactataactatcatactcactagaggatgcatcatatatgttacctcttgccacaaggcatttgtgagatgagtgtgatgaggagcatgatgaagagcgatggtcgcgactcttaggtggggtgtcatcttcacttgacaaatcatcccaagtcttgaccgaagtgagcactttgttttt

SEQ ID NO: 50096 - DNA, 682 bp, Zea Mays
cctgtctctgggaggtggctggtgttggtgctggtggtcgttgttgagttgagcctgcatgttggccattgcagcggccatctgctgtaataactgtgtctgagcagttaggaatgcttccattccggggggtggaggatttgggggattcatctgcgattctgaattaattgctgcccttcttcgacgtatgcgtgcaggcaggtcaactcctcctcctgtcctggtattgaccatctgggttagagacacagggtaagagagatttgtagataagatagatagctcggtacgcaacacacgactcttttgggtcaaaatagctcagttggttagagtgtcacctacctatcattactatactactgctatgttggtacatgctagaatgtacccactatactaggttttattgtggatataaccccacaaatacatcactcaatcaaagaaccaaatcaagcaggtatcacaagaacaaacactcaagcgcatgtagacctacaaaaacattttttttgattaggtttcctatctcttaggggatcatagttataggatttcgaggtgtgaaatcctatctgtctgtagagtagaaaaggtaagagtagtcagagtagagcagtgaaagatgagacaggataaagaaaagtatagaaagaatcagagttgcaaaggaaag

SEQ ID NO: 50097 - DNA, 468 bp, Zea Mays
tgttacctctggtctaggtccttcagggattgctgctcgtgctggccttgttacctctggtatgggtcctgtcagcagtggacaagtcaatgtctccgtctttatttgggacccagcggtcatgcgaagaacagtttggggacaaactgtatttcaacgattggggaatgtcaaccctgctacacaagaggcggctgtgctaatcacggacgacaaggatggagatagtcgggggtctgccgaggcaagcaactgagcacgtccaaggcgtgagaagcgtggcaacgtctgtattactgggtcgagttggtcgtgttagggttagctgggccgagctgccgagaaagtataaggatacaactcaggcaattgtaaggacatcgaaaaacagagaacaaaatatcaacgcgttgccatcccgagaccttcttccccacgtctccaatctctgctgcttccctctttcct

SEQ ID NO: 50098 - DNA, 404 bp, Zea Mays
ttttcatatagaaccattcattagtccatccagtcggccacttggtacgatagtcaataactggggccttcgtatcctttcgatacacaaaattgtagcagccaaagttcctatgaaggccatctgcttcgtctggtagtgaagttcatgcactcggcagaaagcttcagcattcgcatccattccctggcttcgaagagcccatatgtacacactaagtttaacaatggcattgggggtcagctgatgaaggtatatttcaaagttctttaggacctcccctatcatgtcatttagcgggaaccgaagccctgctctgaagaaactcttaaaaatggtaacttcgtcatccctcggctccggaattatctcttccacagcaaatcgaacaagcttgctctcag

SEQ ID NO: 50099 - DNA, 885 bp, Zea Mays
gccaatcttcatgattcgtgcgctgggactcatggttaatcatgggcagagaaagatctcaactcggggataagagagcaagctatctccagactgttcaccgcgacacctgtcgcgcagtggacgctagtgtcctcgtcggagttcactggtgactataaccgcgccacgtgcttagaagatgtaccatgtcgccgtagctcgtggtaggtagacagttcatcgccggagtaagtacccccggggcgcgccacgattgttcgcaccaatgactcatccttcgtctcggccgccgatcttgctgcgccaaattggacaccaccacttaacctctctataaattgaaggccgggtcagctgcgctatgttatcacgaagccgaagcacccgctcccaccctcaatcgaacaccaaagctcacgaatttctgatttcccccaaaccgggtttccgccactgtgaaaacgacctcgtcgtggccagcacaattctggttagttcataccgtctgctccctcgtttcagtgtactcatgtgcctatgatgctcgtcggctaacccgattgaactagaccgccgccaatcgccgggaacgcgtggttctttggttcatccgcgcggtcaccgtggcgagaccaaattagatcatcattcttgaaattaactttgggggaacattggttaggacttgaattcggtttcagccgaagttgggcaccagtccttaagtaaatgatccggtacaagctcgccggagctcggctctgcgctagtcgccgtcggggacatcgggcggcgaagaattagaactcgggggacatttatgtaaactgttagtgacttattacaacagtacgatgaactcggttcaagatattcaaaacc

SEQ ID NO: 50100 - DNA, 1114 bp, Zea Mays
ccggatacttcttttgtggagccattcggtcagaacaatatcctagacccagctaggattaggtgccaacacatgccccctatttttggtagaatttttatgtcggaactaaatctttgccttgtggaagattaacacctctgttagcggtcaagtcatgtcaactgactcttcatcacacaactctacctcaggtttcggtccgacacttccacttcaagttgtttgcctccttatactagtattagtatgcacaagaactctccaaatagcatgaacctgtcgtaagcaatgacacccgttctcccacctagaacaacgactcttcctacttctcttggccatctgatgctcccatcacccctataagtctcctcttccttctccaccctcgctttatttagtcgaggaggattgggacttccactaagacattgaccccttctcgatcgattatgcctcaacgatcgtcgatgagtccgatgcatattcgttgtttgttgcgtgagttgcttgcctcctacatgcccctttgtactctcctcctcggaagatgattgggactgtgatgaggcatacatcgactccactgaggaggaagtctcctctgaggagatcggaggagttggtagagatgtggctgcgtaacagcagctccaccaacgaggagcctgaggaggacctcgactgagatttcagcgacgatactagtgtggagagcttccttgacgtcgctgccgccaatgacggtggtgacaaggaggaactagagcgtaagcgtaggaggttgatcagatacctctgccttttatagataagatttcttatatagggtccccttgtagtcctgctccttctcgatgaaataaataaaacttttggtcaatctgttctatttgtgcttccctgtgcttgatatattttggccaatctacctgtgatgttcatgttccctgttcttgatgcatttgaatgacctcctcaccattcccattattattagaatgtttcggtagcgtcctattagcccatgaaaaacccccatcttcgtcatctctcctatggcgacggtactcttagctgactgtcattgggactcacgaacgacatcaac

SEQ ID NO: 50101 - DNA, 796 bp, Zea Mays
gtcttcaactcaattagaccattaggtctcctctcagtagccttatatatatctagagagaaggatattgaagaatatctatggtctttaaactgctgacgatgatctagattttatagcatcgaggaagcaacgattattgttttttaaacggcgatctattaataaaaaagttaatggcaaaccacgtgacagatgggaagcacaaacactttatcaaagcagattaagggggacaaacacagtagaacaatgcccataatccttagactgattacaataatacacataagcatctaacagtttaggccaaaaagattaaaaatggaaatgctcctttccattttgttatcattcagcccaagaacccacagacggtgatccgaatcattagaggtcgaactctgcaccaacagattatgaaaatgatcccccaaacagctgaacacaacactctatctaaatacatcatgacaccagtggtaacaggctagctacttcaccctagtaaaccattagaaaggtggtctggtgtaacgtttgtcctgtccgaagcgtcaggggttccagttacttgacacctacatgtttctccattacattatcggataatcatatccctccacttacccttaacgtccacctacaatacatcatacatacaacccatcagtaccttgattggcaaccacagcaagttcactataataaccaaatacaaaccggtgttctgccgataaaaaacgtcaggattgttatctaaaatatcctttcaattgccactaccatacctaca

SEQ ID NO: 50102 - DNA, 374 bp, Zea Mays
gaagactctcttccgtcaaccttactgttgcagctcccgaaggttcagctttagcaaaagcagcagcaacgcttaaagtaatcatttcctttgtatctccaattttcttgccagaaacttcggcagtggcagcagttggcgttttcatcgattccaaaatagtgtccaaaacactagccatcctcctcttcttcaaggtcgttgtcacagtggttgatagttttgttaactctggctttggagggcctaacagctttggctattcgtctgctgggctcagcagctttggttgttcttctgctgttttcgttgtttctggcttttctattgcatcaacactagctttggctggcatggcagggacaactttggcg

SEQ ID NO: 50103 - DNA, 558 bp, Zea Mays
gtcaatccttgcgaacaggctcagtaatccttcgctacccaacgaccatgaatcaaaatcggatcacccatcgctaaagcctattggactacgacaaagcaacgacataacactttccacaacaccaaaaaattatttccccttgcccaataggctaaaatctgcttacgcaggcccagtcgccggaacctgcgcaacaaccgactttaagtattaacaaatagcgaaaatattgttgcagcaatcctactcctaacattacatctacggagaggcagatggatgcaaggttctcgctgctccagggtcagtaacgcccaccgtagcgagcgatgactgctccttgatacccgcctcttcatcagtatcttgtttggacactgagctctccaggccggtgaggtttttcacctcttcgtcccacatcgcctgcaaagaccacataccagcacatcagaaaaacaaacaaaaagaatatcccccaacaacagagtaatcgcatacctacgccagcgcccggtcgaccctctctcggatgactccacggtcgtgacgacc

SEQ ID NO: 50104 - DNA, 730 bp, Zea Mays
caggggtgaggtagacatgttggcgaaaggaaaggaggattcgtcaaaaacaacatgtctagaggtgagaatgcgattggactctagctcgagacaccgataacctttgtgctctgaggagtagccgaggaagacgcatagagatgaacgaggagcgagtttatgggatgtagtggagaacatgtttgggtaacaagcacaaccaaaaactttgaggtgttcataggaaggtgtagtggtgtgaaggaggaagaaaggggtggaggaggcgagggttttggtggggagccggttgacaaggtatgtggcagtgtggagtgcctcaacccagtagaccggaggaagactcgcctgaaataagagtgagcgcaagatgttattaatggtacgaagagagcgctcagctttgccattttgctgggatgtataagggcacgacaagggaagggcaacaccgttggaaagaaagaacgtgcgggccgaggaattatcaaattcacggccattgtcgcattggatgcttttgatggtggtgccaaactgcgtgcggacataagcaaaaaagtgagagagagtagcaaacatgtcggattttaggcgaagcggaaaagtccaaatgtagtgagagcaatcatctaaaatgacaagataatatttgtagcccgacacactcacaataggagatgtccaaagtgtcacacccgagctttaaggaacaaagctgggtgca

SEQ ID NO: 50105 - DNA, 417 bp, Zea Mays
aaaagatggcaggagagctaggtagcacacaattgtgaggcaatcctaaggttgtggctaggagatcgtgcatatggccatgcgaaacactattttgcagtgtagatttcaccattcacaaagtgaagtttaaaatagaaggtaggatagataaggttgcaagatatagcgtaaaaggaaccatagtcatacctgtttttcttgaacatgcttgcatgctttcgctatcaacgctatcttggattccataatgggctcgtcaagtcaaagaaacaacaactcaaaacaaccatgctagcgtcaagttcaactactattagtttcatgctgcccgctagccatatgtatagtgtttacatgtgtgtcctatcgtgacctttcctcaaaacatgtattgtgttgtgtgttccggcattg

SEQ ID NO: 50106 - DNA, 701 bp, Zea Mays
gaaaaaatagatcctaacatgccttggtttgggctgaaatttcctatttaacatcatgtcaggagatttttttgcttcttcagttgttaccttggttggagatgagtctaacactttattttagacaaataggtggttggatgggtcttgtatcgaggattttgcctctactgtagttgctagtgttgataaaagagctatttcatccaaaacagtggcccatgctcttgagaactagcaatgtatcaacaacatagagacctctattaatttgattgggctgcaacaatacctacaactttggcacgctttaagaggagtgttgcttacacaagaggctaatagacatgtgtggattcattcttcctctgggcagctctcttctaaatcctgctataaggcttttttcgtgggttcgattacctttgaaccatggtagaggttatggaagtcttgggctcctcccaaatgcatttttttctatggttggcaataaggaatagatgttggacaatttatagactgcagaagagagggttggatcatcctgaggtatgtgctttatgtgaccatttgctggagaatatccaacatcttatttgcaattgcatttttgctagacggttttggcactacattcgatatccgttggggcttgctaatctttatcctgcttctaatgagttatcttttactgagtg

SEQ ID NO: 50107 - DNA, 326 bp, Zea Mays
cttttctttttttgtttttgatctggagtagatagctgacattgacggtggattaactggtggtggttatcgagggactagtgggttttggtggcagaagcatgataagaacttgaaactcagataagcactataaaccagcaaatcaactaatcaatgcaaaaaaatcaacaagcaagaactaagtagtaacaacaaagcttaaacttgttttgggattttagatctagcctgttttgtgggggttttctttggattgtaggtaaaacaaaggatgaataaatactctcatggatcaaccttgagctttgataccacctaatggg

SEQ ID NO: 50108 - DNA, 414 bp, Zea Mays
caactgtgtaagattgccaattcaaggtggaattttccctatgaagttgtttgattgtagtgttaaaacttgtagatttgtcatctttctgacccattccttaatggtacctatgaggttgttgttttctagtgataatttagttaagccactaagttttccaatagttgggggaactattcctgaaaggttattccaacccatgaatagttgttgaagactagtggacagattagcaatcgaatttggtataggtccgtgtagatgattatgagacactgaaagtataacgagatatctacattttgctagggcatcaaagaattgccagccctcactatgtcttgcttcaagcatgtttacctcaaggtttagaatctgcaactttgaaaggtttccaaaagaacttgggat

SEQ ID NO: 50109 - DNA, 794 bp, Zea Mays
tggctattgtcgttgtgtgatgttgtttggaactgaaaagataccagaaggccttctgcaaatgttgttgataaaatcctccttgcgtgatctcctagtgagtccttcatctttggcatcagatccattctgagccaatctagagggcggcaacagagcaggtaccccagttacatcaccatcttcctcacaaatttcttcttcaaacaattgatctgcttactgatcatgctgctgctgatgcttcaagttcttcctgaagtagactttcaaaggcgtagactcgtgggacatgatagaagacgtgggggggggagctcctcggagctggggggagacaaggaatacaaccggcaaaataaatgcactaggtaggggcgaccacgtacaggcctgtccagcaacccattaggcatatcctgttggggtgaagaaggcctgcccaggcccaacaacccattcaacagaacatcggtagccagaagattctgacgaggcgagctcaactcggtttccttctgcagcccaaccaaagagatttgttggggcaaaggtgacctaatatagcccagcgacttgaatcaaagaaaatctacaccacttgagtcctagtggggcaagctagacctaagagtattcagcggcccaacaggcacatccagctagggcgaacatcgagtggtccagccccacggcccactagagagaacattggagggactatttaacttcttcactgacctcttgccgatagcattgggaataggcagctcccgcccgcccgtcgcaatgcc

SEQ ID NO: 50110 - DNA, 1009 bp, Zea Mays
gctggctttactctaagccccttgaccatggcttcgatgacaatgtcgttttggattgctggtgcctgggctcgaagatgaagaaatcttcagaagaatgagtggagggattcatctggatcctaggtgcactgaaacagagcttgtgcagtggctgactttgaccagaagccttggaagctagtgaggagcatttcctttaacttctaccatgaagtaacagttcttggtcaaagcgatgagtactaggtctgggccacattcctaaccaccatgacgaacttcaccatgactactgagttaccaccatacgaggatatggtagctttgtaactcataaggaattgctttgaatctgttaagccatcatacattggcaatgtcggtgggggtatatagtggtggccatagtgtcgcctgtagttccagtgtcagtggggaagcttcatcatagaggaagtcttggaagttgactggtttagggttgaagccctcgtaattctagtccttgtaattgttctagtcttgcaattcaatgttgcacatctcttcagttccttcgtcaatctttttctaaagttcagaaaaacgaaggaccttctccttgcgcttctccaattgatggtggattgcttcaaggttgtcgatctcttgattgagctctagatcttatggttctaggttgatagccttcctcttttggtttcttgcctccccgaggagagcttcgtccccttggttggtgtccaaggtcctgaggagggagccggtttttgttgccttgttcgacgacatggtgtgagttgttgtggtcgtgagatcatcggaggtgggcaccaatgctgatacttgatttcaatcccctgaaggtatcgaaaatcaaggcaacacaagttaaatattgagaccttcgtcctttgatataacacttcttcagagtgttagaacgatggacgaaggtttttgaagagaagcgtaaataaaatgatatgaaaaagacaatgtgaag

SEQ ID NO: 50111 - DNA, 454 bp, Zea Mays
atttatttaatcggtgacagattggacgtctggtagatggctcttggctggtcttcactttgctctgtgcttcaatgcttatgctgactagacttgcagttaagtagctatatttggctttcctttgatctcttccttctatctcaatacattcattgtgtatactgtatggatgtgacttgttcagaaaatctattgacaattcctggccgtccccctaatgggtgtgaccaagggatgtcttggtacgcagagcgtttagcgcactgtcctagagtagtgacttgatgtgaccatggggcgtaatcatatcgcccgagcagttgacctttgtccaaatggtgccgtgttacgcgaagcagcgtctgctgcctgacttgctttcaggcggtttgaattgcttattgaatacttgcgactgttcggtgagcgtgataggagatgaacagttacc

SEQ ID NO: 50112 - DNA, 475 bp, Zea Mays
cgggcgcgtgggaagggggggttgcgggtgttgggccgagatttggtccaacagggagaggagagggtttttccctttttctttttacttttcaattcccatttcccattttgcccctttttattttgaacaaaatattttgtgaatactctaagtgtttagaaaatagaatctaagtgaggtgctttgtgatcaaacaaaatgtatgcatatgatgaaagaaaacttagtggagatcttagaattagaggatgaagggaggggaagaaggtagattagggtttcaaacctagattaggatttttgggatgctacaaacctaccccacttaaaggaatctcgccctcgagattcagacggggctcaagaaaaggtaagggtattccttcctgagagagtcctcactttcccaggtggcttcctcttctccatctctgctccactgaaccttacagagtctcacttccgaattgcg

SEQ ID NO: 50113 - DNA, 325 bp, Zea Mays
tgcaactttgacaatgactacttttggacttggagcctataaataccaccccaacaagtcatttcaaatgtgtggaagatgaggaatataccaaagaatttggtgctctattctagtgtgctctccacttgcaatgtgcttagtaatacatatggtgataagtgtaggtgctttgtggagtgcctaagctagtttgactatcgattgtgtgcttgctctaggtttcggtctagcactataggaaaccgattcaagaacatcagttaggaaccaatgctcttactctaataggccagcgttcttaaagtaagtatgtcagttcccc

SEQ ID NO: 50114 - DNA, 515 bp, Zea Mays
gttatttcaaattattatgtctaaaactcatatcatcttgggaagatcttgatgttgtaggaaataaagaattaatcctatgctgaaaagtcaagacctacaacatggaggaaagtcaaaggatggtaacaattatgcttttaagtgcaaatatcttaaattatgtcaccattctttgaagaaattcctctcatatggtagattgtttattcatcattcctatactatggcaatctacatgttttaaattattgagcaactcatggcatgttcttccacttattatcttgttattgccatgactctagatatagagagatgttccaagttcctaaaaagaataggatgtcatgtaaggaattcaaatccctacgacatctacaaaaggaacattctctctataactagaatagtgagactaatgcttgtatctaagtaacccatgtagtctcactaatatgtttctctatggagatgcgtaatctaacataaaaggaaaagtcaatccaataatt

SEQ ID NO: 50115 - DNA, 310 bp, Zea Mays
gtcagcactaggcagggaacttctagttggattgttatttaactttacaacaactaggattcagattgcattccttgtttattattccccaccaagctccacatataagcaatggtaatcggtactctggtcttgtattcgcataaccatcactttcttgttaccgccacacattttttcttgcaacccgcagggatctcataagagctttggtaggtaagagtagtgaggttgtgagattccatatatagcttcatattccacctatatttgttgccttgtcgccactaatttcgcaggaagatttttt

SEQ ID NO: 50116 - DNA, 641 bp, Zea Mays
atcctttggtactcatgcaaaaagttgatcacactataagtcaaagtcacattgtctttaaaccttgagtttgtcccctcgcttctacctgtgctttgcaagaatgggaagaagtcatttttgaaatatactggtatgaacctggcacttgtttcccacattttgctgaaatacttgttgttttctaggtggtagtcttcaaccatttgcttccagtccctctcaaattcagaaacagttagtgaatagttaactatgtcctcaaagtcctctggcattcctatatttcttgcaaagcaatttccatttttctggtagcatttgctttttatgtggaagaagcaattcctttgcactgtttcagggaagacctctttgatcgcaggtctcattgccctatcttgatctgttattgttgtgcggggatgtttccctcccatggcctcaaggaatgtcttgaatatccacttgaatgtttctattgtttcattagaaatgaatgcacatgcgaacaagcatgtatgtgcatgccctgtaacacccacaaatggcgcaaatggcaggttgtacttgttagtcatgtatgtggtgtcgaaactgatgcaatctccatacatcttgtagtatttcaaagatgtccc

SEQ ID NO: 50117 - DNA, 371 bp, Zea Mays
ggatttgtccgaatctaaggattgaaataagggggatagacttccccgctagcctagtagtaatgggaactcaagggttagatgtcatcttagggatgaattggctacacagaaatcaagccactgtcagttgtgacaagagaacttttaagttggtgtccccatccggaaaggaagtagtaactaagttgtacttacctgaactagaagaaggagtttgtcaccatttatcagtatatgacaaggagtccaatccgattgaggcaattaggattgtgtcagaattccccgatgtattccctgagcagttaccaggcatgccacctgaaaggaaagttgaatttgccatagagcttatctcaggcaccgcc

SEQ ID NO: 50118 - DNA, 1107 bp, Zea Mays
gaaattagtgatattagctcaactttggggccttgtaactttcaaaccataagggttttgccctaggtcaccacatcaatcctgtagatctatcaaaggagaacaactttgtttaaggaatgtaacactgttgttatgaaaaatgtgaagaaaaatacacccaaagatgggttgtcaggctgtctggggactgaacctggtctgacagtgtgatgaggcaatccttgaacccagatttgaacatgatctagtgcaagtttgggcatgatccccatagcaagattgcagttggttaattgggctataactttgatgcggtgggatgatggggttgttacatgaaatcaggagaaaatcgagatccaaattgctcggtcaggtcaactaaagataaatgccatggtacagtaactgaagaagatacctagttcatccccctttgccgccgatgaccgtcgtgccgcgattcatgtcggtcgccgtgattcgtgcgctgtgacttgtggataacggtgaacgagtaaagatcttggcgcatggatcaacttgggtttggccgcggctaagttccccgtaccacttgctcatcggccgattgggataaacctcgccgttgttggctgattaccgccgtgtgccacgtgctaaagtgttagaccacgtcgctgtgaatcgcgtctcgcatgcacggtgatcgccggtgtaatgccacggtgaaagccactaacccgagcaccagtgatctcccacccctccgaccgccgcgcgtctcaagcccaaattcatcggccacctcttagcgatcctataaattgatggccaggtctgttgcgccatgtaatcacgaagccaacgcaccagctattgcctcaaatcgttcaccagagaccgcgaatttcttacttcccccaatactgtttctaccaccgcagagacaccctcaccgcggccagcttattccaggttaattcaagctccccgatcgtttgttctagcatccttaagttctcctcaagctcctcgacccctctgattgaactagaccaccgtggatcaccgggaacacgttgttcctttgattgtccacgctgtcaccgtggccagaac

SEQ ID NO: 50119 - DNA, 961 bp, Zea Mays
gtgtgggctggggttgtttataaggttttacggggtctctttagcaaatattacactgcgaaggggtaccagtgaagatcggccattggatctgagctctgcggtcgcgattagatctccatgacaccgaacaagacgcaatcgtacccgttggatcttagatccatgccccgaagcgcgagatacactagcaccgcctgatcgactatcgatggcactgaatcaattaaactgaaagggtaagtgccatcaaatcctagccgttgaataagatctaacagaccatgcgacttctccctcatttcgaccaccagggcgacggcacacctgtatcgcgcggcggagctcatcccggcgatgtcccgcacggcaacctatgactcccagcagacgactaactagtgcaacgtgaaatggagagctaggcgaatactatgacatgattcttactcgtgttggtgttgtgaaggatgtttgccacggcactccccgacgtcggcggcccaaccgaactccgtcgagaaattcagggtgccccaaggacccccgcgctccccgacttgcttgcacacaatccagaggccccggtgaactcccttgctcccagcctgaccccagaacagcagggcaagcgaggagagaggacgacgacactttccttctatgacaatggtggtaatcagcgatagcgccaccaaccaaaaggagatgaggagggggttacgggcccctacgttttatagctcggggaccactgcggatcttggtgtcggtggttgagccggtccgatgggctcacggcagctgcggcgttctgtttagccccgtgaagatggagatgagggagatagagctgatagtgcgggtcccattggtcggtgagtgtagaagagcatgcgcagaggggacatgtctacccagaggggcctggttgtgagcgccgaggtgaggtgggcgtggc

SEQ ID NO: 50120 - DNA, 830 bp, Zea Mays
gttgaatatcaacaccccttttggatattttaatttctgggcataatgatgagcttctcgcttttcctcttcagatagccttttgcccgaagcatgtcgtacaatgtaatcatgtactctggaagatgcttcgggagttgaagagagagttttttcaggcagaatttgctttatagcctcttctttcgtttctcctccggtttccaaggttcctccttggcgggctctgaaggcccagcttcggcctcggtctggctctttgcagcttcgtcttcggatggttttgcctcaatttgcgttttcggagcttcggcaggtttcttcggagtggtacttgaagactttatcgtctctagcacatctaatacattgaccatccttttcctcttcggagtcgtcgtgaggtctttttgtgccttcggcactgtcattcctgccgaagggcttgtaacttctactatatttgttttcgcggcccctatttctttaatattatcagccttcggcatcatagccggctcttcattcttctgtgtaagagcaggtcctttggcttcagtagtcgtagacgtctcatcaccaaattcgggcactgaggtcgattcgatgaagcgcggtcggtgagtaaggaccttcacctttttcctctttggtgcggcctcactcagagcaactgaagcatcaccttttccagaagttgcgctttttctcttttgccctttcagcgggtagcggtaatcagggtacataaacccaatagcatcgaaaactctattcagcatctccttcttccggcctccgaaggtcgcagatagtgtgttatcttctgc

SEQ ID NO: 50121 - DNA, 591 bp, Zea Mays
aaactcaaatgatatagaatcaagcgcaagcaagagaactagagagacgaaggaggaagaaacaaatcacaaaagcatcaacacaaggaacatagacaatttgtttcttgaggttcaactctgaagaatctacgtccccattgaggagtccactaggtctctttcaaccctttcccgctctcaatcagtcatgtagaccggttgagtgttctcaatctcaaaggacacaaagttcccgcaaggatcaccacacaatttggcatcacttgctagctttacacggtgaaagaatgaggttgggaatgagagtgaaacataatcaagagcagaagaacttcaaaaactaaaggataaatctctcacaaggcattaactcttctctagctcaaatcacttgaatgtggtgcttgggaggctagttaatgcttgggagtagttgcactaagtgtagagatgtttggtgtagcttttgtgtcttcaatgtgctacttggggtgtatttatagacccaaaccatgaagtggggaaactacaatattgtgtgtcgcatcgaaccatgaacagtgaaggttcattgtgcaccagacccct

SEQ ID NO: 50122 - DNA, 406 bp, Zea Mays
ggccatttggcatccttgtatgtcgttttcaagggcagtggatggtctcctaatgccgaaacgagaccagatagggcattgaataatccccttaatatcttccctttcaaccaggtcgttcttcacatagaaccactcctacatccaggcctcaggccatctctttcgaaatgttggaactgggtagctcatctcagagcgaggcacaaagctataacaaccgaagttgttgtgatattgctcctttctggtagcctttgtctcataggacagctcatgcatgttgcagaagcatggcccaaataaacaaccctgtcttgataatagcttcaggggtaagctaatgaaggtaaaatttcgaaagtctttaaaacttcgaccagcaacttatccaaagggaactgaa

SEQ ID NO: 50123 - DNA, 1088 bp, Zea Mays
cgagcgggttgctggatccggcgaatgtgggaggcttgagccttaagaactctcccattctatcatgaggtcttcctccaatcgggcgctggttctcgaggcttctagtgaggacctcaatgagtcgggtttggttggctagaacttgggctaggtctaatggtagctctggaggcgcggggaggtgggtctcactcccttctccactgacttctccttcgacacctaggggagaccttgctccaattcctgaggcggtaggcgttgttttatccgaggccatctgctagaggggagaaaggattactactatgcatatgccagatttttttttctcaaacatgttattttattcagcactccagttcattacaagcatacaaccaccacatatttgactacacacgagcgttttctaaggtgtccccaaactccctgataagatcatcaaggctagttagggacacttcctcgatgtcgaaaaagttccctattcctaaggagggtagtgctggtggggcttcttcccttgggtcagtctagcatccctggctcttgaagcgcttttggatcttctttgcaggggcgagcttcttcagcctcctagcatagtctatctttagggtccggtatgcctcacgagtgttggcttcttcaccttctgccatctcgagactgtcttgaagagccgcattttcttccttcaattccttgatttactgctctaggctttccacccaggagtttaggtggttgtagtgggagaaaaggtagtcaaagtggttgtcaagggtgtggagatatccggccatgtagactatggtagggtcatcttcattaggatctctccctgataaggcctagagtcttttcctctaagcaagagtatttttgttgctaggtggaaagtagcgaaggggtgtctcaaagacctccctgttgtagttttggcatagctggcggagggctttttgggcagcattctggcaggtatctaggaagcggtggccagtagcggtgatctgaaagggagggtgatttgggtagttttggctttctcccaggtagactgccatggagcatttctc

SEQ ID NO: 50124 - DNA, 441 bp, Zea Mays
cacggcggacaccgaggtcgggatcacgcgttcccgccaaaccaaggccgagttgtgagaacggatgccacagtgagcttcacaagcgcgcagggctatggaaacaacacatgaattgggcagagccttaacagagcggttcggccatggtggggtgtgtttcacggtggcggagaccggtttgggagaactcaaaattcgtggattcaggcgaatgatcgaggctgattcgtggtggctggatagtttactgccctacggagcttgcggcgctctcaatttataggcgtatcgagcgacggtgatgaattcggccgaggggtgctggcggccggagaggggaggcgagctcagtgcgtgggaaaagtgactttcgccgtggcagttgctccggtgatcgccggacatgcatccagtgagtcactgtgatgaagtccagcg

SEQ ID NO: 50125 - DNA, 414 bp, Zea Mays
gcagacgatatggaactggagctcagcaagctggactgggagggtgacatgaaatctatcactgaagaaatgtttcaccttcgccatcgaagggcacacactctacatgaacaaaaatcatcacatgtttagtttcctatgagaagctagggtaaatatatgaagagtgcgaaggcgacttcagattctttagttctttgggcttgaagcgtgctgcttaagttctttcgccatataattattgtgttctcttggaatttttcgtgcgaacgttctcgcggccgacccagtcaggagcattttgcatctgtccggcggccggttgctagttgctgcatcagaacattggccctaaaatccacgaaccttgagatgctgctaatgcccacttggggtttgtttcccttgcgtctg

SEQ ID NO: 50126 - DNA, 405 bp, Zea Mays
gcctcgcaccccgaaaggatatgattcgatatgggtgattgtggatagactgaccaaagtagctcatttcattctggtcaagactacctataagggatctcaattggtagagtatatatggctcggactgtgtctctacacggtgtacccaagaagaccgttttggatagaggatcacagtttacctccagattttggaaaagttttcatgagaatatggatacgaagttgaattttagttcggcctaccagcctcagactgataaacagactaaaatgactaatcaagttttggaggacatgttgagagcttgtgcctttaacatggtagtagttgggacaagagtctacattatgctgagttctcatataatagtagttacgaggccagtccgaagatgtcac

SEQ ID NO: 50127 - DNA, 466 bp, Zea Mays
gtcaaaccgatgctggaagatctcatttgcaaagcacagcatttggacgccgagatggcaggacttgcagaaaaggctagcaaggaacaacttctggatctcaggacagatgaaaagggagccctttggttcagaaatcgtctgtgtgtaccgaagggagaggaatgaaaaaggagatagctcagtatgtggcccggtgtgatacttgtcaacgaactaaggtagaacatcagaggcctgtaggcttactgcaacccctcccagtgcccaaatggaagtgggaagaaataggcatggatttcgtaatcagactgccccgaacccaaaaggggaacgattctatctaggttataattgaccgtcattccagtgaagactaccttcggaggagccacccttgcccggatatatctcaaagaaatagtcagacttcatggcattccacgaagaatagtgtcagacaggg

SEQ ID NO: 50128 - DNA, 327 bp, Zea Mays
attttggatctatatgattttgctgtcatatttgatatttatgtgtgactctctgaactatgtgctgagttaaaatatggaatctagttttgtcactagttcaagtgtaacccgtcccacaggatgaacaaatgttttttataatataagaggagctctggatttgttagttggtcttataaccaactccagaccataactctccgggagaaattagacattgtgttattgttctttgaaattgttagaaacttcaaggttctgacaacatataaccataaagagttcaagctggttaaatcaaaacagtctaatgtgtactgggaa

SEQ ID NO: 50129 - DNA, 587 bp, Zea Mays
tgccaacaggcatttgctggcggttggttgcttgcaaccgagggggctgaaaggagctctgactctgctgactgtaacgtgacggagtgggtccagctggtctactgaagcttggtcccttgggtggaagtccgaaggatcgagctctctggtgacggtcctgctgctgagctcggagaacccggaattgcctcttgaggtgccctttttcttcctcttttgccctttccacttgtatggctttgttggagaggtgcaagaagctgaggaaatcttggctggcgaggatggtcttgagtatggtcttagccctttcagaaaacgggccatcttcctggttttggtgctgacatcgtcaggcgcgtagcgagccaactctgtgaatttgtgcacgtactcactgacagaccttccaccttgagttagttcctagaattcatcctccttgagttgaacgatcccttggggtacgtggtgctcacggaaagcagtttcgaattctgcccaggtagcgtccctgacggtcgcgctgaaggtatcccaccatgctagggccatcccagaaagttgatgagcagccaattgaa

SEQ ID NO: 50130 - DNA, 422 bp, Zea Mays
ccactggtaccccacaacctttgtacacggtgcagttgtatgaggagcaccgggtgccacactgtagggtttggataaccctggagtctcaccctctgtagcctgggtggcgttcacttgattctgaaactgtaggatttagggcagacgacaccactgaggccgcgacactaaaggctttgatgaccttctacggataccacccactgggagatgatgatgcacccacttggactcttccccgctgagaagagggatgatccgatgtggtgcaacagagtgagccacgtcaaggatgtgtgggccatgcatcctaatcaggttgggagaatcaccgtccagtgcatgagtgcactgtaccgcctgcagccctgcaaagcgatgccatgacgcacctcactaggatcgctcaaacggcaaag

SEQ ID NO: 50131 - DNA, 439 bp, Zea Mays
gtccggcactgtataggtgtctgaagcagaagatggcgtgacgctgatgtgactggaaagttgcgttagataagaacgggtaggtataaatcggtcgaaaatgagggtgacggtaggcacaaactcggtgcattggatccccgcccaagaatctcagatattatcggcgcaaatctcagacccagtctgattaaactagcaaggagcggttggtgagttcttgttaggcgatggagggcgcatggtacggccgctcataagcttgagcaccacgcacgccacgcgtctattttttttcaaaccgtgctgtttactctctgcgtgcgtacgtacgcacgcccagaagatcatttgcacatgcccgcgcgcggaaaataaagaaaaacgtcgcgaatcaattcggcacatggcgttcttcgttcgtccgtttggatcgacg

SEQ ID NO: 50132 - DNA, 359 bp, Zea Mays
ccgattgtctccctgaccgaggggggagggacttgccatggttttccatgatgaaccactctaagcgccatcctttaatgctatccttaagtgggatgtcaaggtattctgttttcctcccacggcgcatctccagactcgcaccacccacaagctggtgctgccccccagctatctcaggacgacaatgatacaagtacttccacaaaccgaagtgaggaagaattccaatgtaggcttcacacagatgaacaaagacagaaatttgcagaatagagttggggttcaggttagtcagattcagattgtaaaagtcaaggagaccgtgaaagaagggagaaatgggaagagcaaggtca

SEQ ID NO: 50133 - DNA, 320 bp, Zea Mays
gcacttaagaccttggaagcatgagtgagttaagaaatgccaaggaccaaggtattacccaagcttttaggcaatgatcacctagggcaagggaggattgaaccttgggccccctctcttgaagcctttagttgagagaaagattaggcaaatgcacatttcataatttaaaccttaaccaaagtttaagagtaccaaaatgtttacaaaagacaacaaaggaactttacaaaaagacccctataagacccctaaatcagcccccaagtagagaacactatggaatcacccccattccctctaagtccaaaatcagccct

SEQ ID NO: 50134 - DNA, 614 bp, Zea Mays
tcagagctggctccaattgagtaaaacacatccttcagtcgctgcacacatcgattgccgaaatctaaacatttttcctgaagctccttcaatgatttctgcaaatttgaattcttctcaatttcagtcttgagacttgtttcaagattcttcttttcttgctcagatttttctgattttatgagtaattcgctgtttaatttgtcaatttcggcttgagcttcagccagtgaaccttccatagagtgaattacgaagtacttcttctccagggcagcttcgtgatctttaagtttattttcaaggtcttgaatgacgaagtcctttttcttcaaagcagcttcgtaactttcgactttattttctagatctttgatggtagcttcgtttttctcgtctccaagatcttgttgcatcctcagcactttacttagtaatatactctggcaaaacaaccttcgtcagaaaacatcttaattcaaaaaacaataaaaagttgagagtttttaccttgaaattagcgtagaacaagctaccggtgatatgctgtcgctagtacctgcagaggcccgcttcaatcttcggcaggccaacattctttgagaaagtcctaa

SEQ ID NO: 50135 - DNA, 678 bp, Zea Mays
gtagagcctcaggcttggggttttgactcgggaggggagagggagctatcgcagcggtggcagtacggcaccaatgtgcgtgcgtgccggcatggacgatgggtgcatggtccgggcctggagcaagtcagagtcagcctgctgagctgaaacgaccaattcaaaagctgattgaccgctcggcgttcacgtcgccctctcttctcccactcaaagccctctcgatcggcctctgtagctggtagcgatgtgacatgacctccttcctgttgtttcttctcttgaccacgggggcgagatggagatggggagagagagacagaggtgtcctccgatccgtatccatccatccgtcgacatgatcatccatcgcgccagcactcgatggatccactgctgctgcatgctgctgggcaatcatttatatatggtcggccatgtactagcacactactcctcggatcccctatctcgtagtagtggtacgttctcctgacctactagtacacatatacagaagagcactacctcatgggtaattgattgatggctacctctatctcaattctttcctcggcaaagaaagctacgaatcgaccccgggcctctctctcaaaatatcgtcgttagttagtttgaaaactcaaattctgctaggataattttctatggcttatt

SEQ ID NO: 50136 - DNA, 780 bp, Zea Mays
tgccgttgacagagggctaattagtgcggacgctgttggcagtaaagtgatcgtgcctgcgagtttcatttgcagtaggcgataccatgttatgaattaccaagacgcgatggctatttgcagagtgtacggcccaccagtactttttttgacttttacatgcaaccccaaatggagggaaattgcggatgcgttgtgcttcgaaccgggtcagcaaccatgcgatcgttcagacttagttgtatgagtcttccatatgaaagtcgatgagttcatagctgatataaggcagggcgtgacattcggaccagttcttgcggtcttgtatactgttgagttccaaaaacgaggcttgccacatatacattgccttgtgtggttggctgctggcgcaagagtttgatgcttctgttgtcgacaattttatatgcgctgagattccggatgtgaacactaacccgcttggttatgctttagtcgacgaattcatgatacacatgccatgtggtgaaagcaacaggaattgcccatgtatgaaaaacaacaaatgctcaaaaaaatttccaaaatattttcaagatgagaccaccatagacgactttggttttgcgctctacatgcttagagacgatgacagacatgtcgtcaaacgtggcattcgactagacaatagaagtgttgtaccgtacaacatgcatcttctaaaaaaatacaatgcacacataaacgttgaatggtgcaacaagtctaacatgatcaagtatctattcaaatatgtta

SEQ ID NO: 50137 - DNA, 380 bp, Zea Mays
aaacaatgcaacaaacgaactagttcataactcagttcgctaagcgaacaattacattgacaccatcaccactgacacctgcaaagaatgactcagttttcctttgtagatgaagcctctgcagattgtgcactaatctgcttctacttcctaatgtaatagtccctcgcccacggaagcatcttgtcaacgtccgcactcatgaacctttcatctctgtcttccagttaattactcatcatcatttcttggagttgaatctctctcttttgtagctcagtctgtgtctcaagcagttgcagttgcctttcactcttggctacctctattgcctctttcatctctagaatttcaagttgtctttcactctaagctttctc

SEQ ID NO: 50138 - DNA, 437 bp, Zea Mays
tcgctgtctccggtttcacaggccatttcatcatcccgtcacgttccgtttcgtttcgttccgatgggccccgactgtgacgtactgtactggtgtgtgctcgttatcttccgtacagagacctcctacatcttctgcatctacatttaaaggccgcttggatcctgcgtgtcaggagcaaagcatcataacttagaacagagactttgagagcattcactcccaacggtaccatatcaggttccttaaaacctgaagcgattcggagcgctctccgcgttcggcggttgttccgcctgtctcacgccgatgcgtggcagctgtatatcatgtgacggacccaaatttattatcaaattgcattgagctatctcgggtccgctccctccggcctctctctcccctacctgcttcccactcccactgtcccatgccgc

SEQ ID NO: 50139 - DNA, 793 bp, Zea Mays
gccgaggccaggctcgggcgagacgaagatttctcccaaggccttggttgagcctgccttggggcatgtagtcgtacagagaggggttagtacagtttgtcggagtggcctcatgtgggattcgcggggagttgttgccggggtagttggtcgaagccgagcttgggtgaggcagagttttctccaaggtgtggcggagtttcatcctaagggtgagaccatgctctatcgtacgtacgtctcatccagagttgtttgagcacaacatacggtgtgggggagcagtggccgttattactggacgtgcatcatcgtagttggtgaaattggatgggatcgtggtcccgtcgctccctttttgactgcagcgtcacgtgggggtaggtatttgcattaaatggtcatgtcttcgcagtttccgtgacctttgactgagatcgggctcggggttgtcctcctgtccgagacgggctcgggcgaggcggaaactgccattccgtgaagaggggaccttgggcgggacgaggattttcccgagtgctcccctcgtccgaggacatgctcgggcgaggaggagttttgagcgaccgccgaaccgcgtctcgggcggatcgtggctcatcctttcttgacctcgaggaatgtgtcttatgatcttttttggtagttaggcgttaagtgggtttaggggtataacctgggtactcctaattataatacccgacacgtatatttatagagtaaataatgaagtataattgttttcatgacttttgatagtttgactgtaccg

SEQ ID NO: 50140 - DNA, 375 bp, Zea Mays
ccggggtctgttttaaataaaacatgatctcttcataattacttttgactggccatggaggttggttggttttataagaactcgaggtcttttttgtaaaacaggcgaccaaaggggtacacttctatcccagtcgttggatctccctgcaacggtttcgattagatctgaaccggcacagccttctagccggaggattcgcgacctacggcacggattcaaaatatgccagagctcatcctaggcgcatggtggacgatcaatgggcgagaggagtccacgccgaaggggactgcagatctaatcagcgtcgttagatccatatctgacgatcggcgctcatcacactcctccaacgccggagttcggtggcgc

SEQ ID NO: 50141 - DNA, 685 bp, Zea Mays
ggcgaatctgagcgaagaacgagaatgaggaggcgacggggatccttaggatacgttcattggtcgtcggggatcatgggagcactcgggccacggggatggcggtccacggaactctagtgaggtcagggtgtcgtctcagagcggaatcgaggcagaggcagcttgggtaggcaatggcaggctctggagacttcggtggtggactcggcatggtcgaagaggcaccggaggcacctgaccacgggcggcagtggtgtagttgcaacggtggccacgggcaaagggctgggagcacaggagggagtgtgcgggcatggatcgatagtaggggctcgagcagcacatagaagagaaaggggaaagatcgagctccaaatcgcctcgcatccaaggaatcgtcactctggctgaccttccatccatggtgcgtgagaaaggaaagaaattcacctcggtaggaaaggaggagggcaccgaatcacacggaaaaggaaagggcagatcacctgcctgctccaattggtaatgaaacgatgggagcagccgtggtgagggcggcacagcgcgacgtcgatcgaagcacgcgcgatagggtggggaagaagcactgggcaactgacaggtggggctcggtcgtcaaaggggaaaaagaaagagcgggcgcggtctgatgggctacttg

SEQ ID NO: 50142 - DNA, 437 bp, Zea Mays
cctcgactgggacctggacctgcacatagcttcggctaggaagtgttagcagcacacccgttaggacccatcgtctggtatcagccaacctttgattcatgcaacaggacctgcaggatttggcctgggaatccaagccgtgtgcccggaccccctgaatcacagttccagatactagggcacccatcgcagagtggtggagcgtgtaggcttatggtacgggaccaggctaagcggctatacggctctggaccaccccaggggatgtgcgtccattttctagaaccggaccccagattcccggacccacagggctatagttccaaatactaggatacccatcgcatagtggtggagcatgcaggcttagggtgcggaaccaagcaaagtggctacacagctccgaaccccccaggagatgagtaccattctctaga

SEQ ID NO: 50143 - DNA, 353 bp, Zea Mays
gaattgaaactatcctaggatgaggtgtcggcgctcaacgagtctctgaattccaaagatgcttccatcaaagatcttcatgcctcgaagaagcttgttgttggaattggccgatgcgtggtcaagctaactcaaatagtgggagaacgaaaacagtttgatgcatgctaacacagtgtattagaacaacaatgtttttttcgtccccaacaatggtgttgtacgagggtatttataggtaaccaggggacggttccaccttgtcaaatacggttatgcccctagttacctacattatccctagaatattcacctcctaggggttatcgcgggtcattacagcgtgattaagt

SEQ ID NO: 50144 - DNA, 1298 bp, Zea Mays
tttttagtctgtgtaatcatactccaggcagctagagcaggtttctttgaattgacgtcgtttcccctccagagacagtgtttccgataagaatcaatcttctttaccatagtaaccgggattttcagagtacacatcaaaaaggtcgggagagctgaaaataccgagttaacaagctcaagcctgccagcatgggagaggagggcagaggtgcatgataatctcttttgaatcctctgaatgagtggtaaaaagtgacatgttttaggctttgaaatacccaacggaacaccaagataggtaaagggcattgaacctatctgacagttgagagttcccgcaaggatcgccattttagcaggactgacgttgatggggtacatacttgatttgttgtagttcaccttcaaccccgtcgaggatgcaaaagagttcaggacagctctgagaaaaaagagctgtctagggcaagcttccaatatcagtagagtgtcatccgtatattggactatcggaaaatcttgaccacaattctcgggaagtggtaacttgagtaggtcttgccgccgcgctttattaatgatgctctgtaacagatccgccgcgagaacaaaaagaagaggcgagaggggatctccctgcctaaccccacgcttgcagtggaaggttttccccggaacaccattgagaagaactgaagacgtgccagaccgaagaatatccctaatccagctcagccatctgggcccgaagccattgtgcagcaatacctgaagaatgaactcatgttctagagaatcaaaagccttttcaaagtccagtttaagcacaataatctctttttttgaaatatgacaaagatgaatatattcaaatgcccaggccagacagtcctgaatggttcttcctttgatgaagccatattgatttttgtggacaagggaagtcatcactgtctgtaaccggttagccagcagcttagtgatgattttcatactattattcagaagcgagattggtctgaagtcacccactactctggcattatccttcttcggtatcaggacaatataagaaccattaatgcttcgaaggcaaacatccccgtggaaaaattggtcacataagtcatagaagtcttgtgaaataatcggccagcattttttgataaagttggtattaaacccatcaggtcccggggatttatcagaaggaagggccgccacaatactatcaatttcttgctttgaaaaaggctcatctaaccaatgcaagtcactgcggcagagcaacaaact

SEQ ID NO: 50145 - DNA, 611 bp, Zea Mays
taaacaaactgatcgttctacttttctttcacaatcttgttcaacactttttttgtacttttctttcttctctttttttatactctttttttatagaactaaacacagagatctgatatgatattgcacactttataatacttaacaaagaactcaaccagcagctataacttaaataggatcaaatttaacgcgaaggaaatgatgagggttttcagattttttttgtgtggatattttcagatatatataaaaggctcaaaggaaacacaaaggatagagtgaccagcaactaaacaaagactctaaggactgaaacttaacaaaactcactggaacaatagattgaaacaaagggctatggcaaaaatattttatggctttttggtggataggacgaacacaaaatatatgtagctaagggtaaagaatcctaccgtggcaactgaggctttgataccagatgatgcgtcacgatgcccgatctttacgacgtaggatcaatcttcagataactagcttcaaagaagccaagataattttttgtaagcagcgataactagtgcaatctgacaaataaaactcgaagccaaccactgtctttaaccggc

SEQ ID NO: 50146 - DNA, 301 bp, Zea Mays
cttaacctatgtttggacagttctctcatgcaacttggctaaatttcccatggtctttattttattttgagaaacgatgtgctataatgatgtgcgatgttttacttgagtggacataaacaccatctaggtatgcctttaatagaggggattataggaaacctggtatcgcaaaaggtcattagctagcccaataatgtcttcatccactacttgtactctagtaccctctcgtgtgaatacaatgccctcaatatcatagaaacgtcatttgaggtttaaaaggtgatatattgttttg

SEQ ID NO: 50147 - DNA, 532 bp, Zea Mays
aattagcccaaaacagtccataagataaaccctgcaatctgtttttggatagcagcatacccggattcgaacagcgatatctcctaaaatataactccgaatcgagcgcataagtactcgttggaaaggtatgacaaagatctacatgattctccctctgattcccactaattacccacgaaaaattctcagaaactgctagaactactgctgttcgcccacccacaaaatttctggacaacacctctaccaattcgcatacgtaaacatctaatcgattgaattgcaacacaaataaacaagagttaaacacaaaatcaccttgacttctccccctttcctccctccttcttccttccaccaaattccaattggagatttgaacccacacgacgtagatcaagcgagagggctgcaactaggagaggagaagatggggaggcggctagggtttgtggaatggtggctgcaagagtttgagggaggaggagatgagaagggggggcatctacacaaaggctagagagagggg

SEQ ID NO: 50148 - DNA, 278 bp, Zea Mays
ctgctatgtcagtgtcaccgcagacgctgttgcgcgggaccctatcgtcagctctatctgcaccaacggagcgcagccgattccttcgccgtgaatctcgctcctagacgacgcggctttaacaaattccccggtgtcagcctcccctgccagtggtgttttactcccttctcaaacactgactgcgtggaccccattacccagtaggatcttcgcgtgaacaccctggccggtgacgtcgcgtggttcgttgagatccgaccgggattctcgccggt

SEQ ID NO: 50149 - DNA, 727 bp, Zea Mays
gttccaatagtctttataaaacctcccagtgaaaccatcaggccctagggccttatcagaaggaaggtttctgatggtatcccatacttcctgatctgaacaaggggaatccaaatccgagaggtcatgatatggtagtccaagagcctctagatcaatagttctctctgtgaattcagactgtccaatgaggttgttgtagaattggtccaccagagctgttttttcaggatggttaatacagatattttctctatctcagcctggtcaccaaatttttcttttttcggtatctggcatgcatatgaaaaaatttagtgtccgcatccccttcctttagccatgagattcttgatcttaaccttgtcattgttcttctaaaggaggctaacatcaaggactgcttcttgagtttattccttagccataattcagcaggtgtaagagccctatgatcctgggcaatctcaaatttatgcaatagcttctttgccaaagaaagctaggaagccacatgcccgacctgcctgtcactccaactctgtaatcttgtagctgtctccttaattttcctatccaaggtcagaaaaggacaactggaaggctcaacagcgttccatgcagcctgacaacttcctgaaaaccttccatcctggtccaaaaggattcaaagtggaacctcttcttgccaagagtattgtccttaacacctaaaagcagaggcagt

SEQ ID NO: 50150 - DNA, 809 bp, Zea Mays
ccagtccggccacgtagcctggcggacccgcggcgagcagctccgccgatgaggaattccgtgcggtttggtaggtaatctgtcctggcagagactcggtccagaacagcggagcttggtgaagcccatagatccaaaaccgaggcattgaggagtcgccacagccacacacatatcgagctcggcaaccgagcaacaatggcggcagcgaagtctcacctggttcgtgacgagggatgagaggagggatgcggcacggttttataacctaggcgaaagggagccgagcccgggtaggtagtattccacgaatttcggcttcgatttcggtaggcgcatgcgcgagctcggaatccccggacagcactgccgttctattgaggaagaagtcctcccttggagagtgggacccagccgtaagcgaaatccgagagaaggggaaaaaaagaaaagggagggaagtgggctgccagggagaggaaagagtgaagatgggccaccgttgaggactttggacccgagagccagggagttcttctttttttctgttttcttttccatccttttcttttctattcccatctattttcgaattctaattttttttagactcaaacttgtttcacatatttgaatacaactacaagaatttcattatgaggtgcgcatttctatatttatttattttgttatctgaataatataatcctattaattggaattgctaaagggaaaaagggaaccaattaatctccttaggtttcaaaatccaaaacattatcatataaatatatttatttattcgcttt

SEQ ID NO: 50151 - DNA, 344 bp, Zea Mays
ctttgatgcctccactattgatggatttatttgtgctgaggtacctgatttcaggactgacccattgggatatgtattggttgacgaattcatgatgcacgacccatgctgccaacacaacaaaagatgcccttgtatgaagaatgacaaatgctcaaaaaactaccctaagtccttccaggttgagactatcattgatgattttggattcatgatctataagagacgcgatgatgatggatacattgttaagaatggggttaagctagataacaggagcgttgttccttataacatggcgttgctcaaaaattattgtgcacatatcaacgttgagtggtgta

SEQ ID NO: 50152 - DNA, 431 bp, Zea Mays
ctaaggttgatcccaatgggtgtgtccttcctgaggttgatcccaatgggtgtgtccttcctgatgttgatcccaattggtgtgtccatcctgaggttgaacctaatgggtgtgatcgtcctgaagttgatcccaatgggtgtgaccctgcaccggctattgtctgtgtatttgatgaagatgaagaggaagaagaagaagtcccgctggtccgtaagaacaaccggcattacagaggtagtgaggggggagtgatattccttctctagctctatcagctcttgttggccttcaggaactgtcaatatcagatttttattaggcccttgaaagaggtcgtccctgaggatatgctatcgaagccaactgctgatgacgtaatggttgtttgttcagaaattccagacatgggattggaggtatcatgagca

SEQ ID NO: 50153 - DNA, 930 bp, Zea Mays
gtcgaggagcttgaggaggacttaaggatgctggaactaatgaccagagagcttgaactaacctggagcaaggtggccacgacgaggtgtttctggtgaacaattggaggcaagacttggtggcttggtgtgtgatttccctacggacccaacggtgcgctcaatttatagagtccgcgagcggtggccggtgaattagacgacgacgcgctgcggccggagaaacaagaagttactagcgcgcgcgataggtgtctattaccatggcaagctctccggcgatcgccggatacgctctacacgactaattgtgacgtgggtagatgctcgggcacgtggcgcatggtcggtaaacggctaacgccggcgaggaccaattcggccagctgcaatccgagcgggtgcggtgaactccccgtcgatccaatccaaacttatcagtcgccaggatctttcacccgggagtgttatccggtactggcgagcacgaatcgtggcgacggcgcaaatccgggcacaagggtcgtcggcggcgaggggagttgcatctggatcatgttcagggtactgtaccatcagcatgtggttcagaacacctgacagagcaatttgcagagggatttgctcccaattttgtgtagtaacgtgatcatcactctgtatcaaagttacaggcccatgatccagctacattcttgttatagcaaccatagacaaacacttactagatcatcctcgaaaagattcccaaagttcatctgatgtcactgaataccaaaattcaggtttaggctgactgatagcccaactttgggccaagttttctctcaactttgcataacaacaatgcttaaccccttaagcaaaattgttctcctaacatagctttacaaacttgatgtgttgacctagggcaaaatcttcataacc

SEQ ID NO: 50154 - DNA, 633 bp, Zea Mays
ctctgccatgccacaatccacgctttggccgcacaactactagttgggcaactggcctaagtacaacaacaattttgacccttgataacacatcatgagctagcagatggttgtaacattgtttggaggcgatgatagtgcgatggtgaagtctttcatcatatccctagaaggcccaacattgacttggtacacaaggctatcatcattacccatcgactcctggagggcccttcgcaaaaagttcctgttcaatttccaaggctacatgccagatattgatgccctcacagaactatccctctacaagcaataagaaaaggagagcattcacgattactataacaaattcctactactaaagtctcagttaccctcgatcgaacttagcagccttcgcgctaggcacgtctacagtcactacactagggaccctcccaacaacttctaggagctctaccaactctttgagaaatacagaagattagaagagttgcattatcgaaagttggaaacacagtggaagacgaaggagactccgcaaaccagcaaccaaccttgggccaagagccaacaacaacagaaccaccaatagtaagtccacaatataactaattatcaatagcatggaaa

SEQ ID NO: 50155 - DNA, 385 bp, Zea Mays
aagggtcctggcccattaagtggtgagatggtaaatacacggggtagaaccccaaaccctaaacgggtacactgacactatatatcgtatagatagaccttgcttaaatgagatatctctcctatctgtaacgcacacagacatatggtgcagtggtagaggttgtttgtctcctgctcaaggtgtagggtttgatcccccaccaacacgccctatttttaacaacgtgtgcgggaatagcgacacgcatggggaggcaacgcgtgtgcgggaatcgctaggggaggacgcatgacgaatctcacacttaaatatagtagagattgatatatgggctgggccaaaacccaattacatagacacaaatacaataatccaacaagat

SEQ ID NO: 50156 - DNA, 360 bp, Zea Mays
cacaatatcatcaacatcaataaccaatatagtgatagatgaacccttgttcttgaagaagactgtatgttcaacattacattgagaataccccataccacaaacagcacgtctaaacctgtcgaaccatgcacgtggtgactgcttcaggccatagagtgacttcttaagtttgcacactttcccaacagtctgttcattttcaaacccaggtggaatttccatatagacctcttcctgtaagtcaccatgaagaaatgcatttttcacatctagttggtgaatgggccatccaaaattaactgcacatgagatcaaagttctaacagtgtccatctttgccacaggtgcaaaagtctc

SEQ ID NO: 50157 - DNA, 448 bp, Zea Mays
cttctctccttccctaatcttcgaacatgcatgcacaaaccagccagcgtagccgctgccgccagcctactcatcttctcacgctcttcgcctcctgggtcatggagcacccgcgacggtcatccgtctccctcctctactgcgacgattctccttactggtggcaaccgttctagcgccctgcatttcttcagccattccctttcgtcgttatggccatcacaatttcagtttcctctgtaaattcaagagagcatcaattggtcataaaatcctggcgtttattctctttcgcgttggctataaaatggagccacaatgttgagtcatcatccctgctcgctccctcctccacagcttaatcctctgtgcacttgtctcctccgtgtgcacgccctgttcagctcgtcgttgctactctctcctcctcgccaagtgctgcgtcgcg

SEQ ID NO: 50158 - DNA, 465 bp, Zea Mays
ttcaagaattgctgcgttctaaagacttgaaccattctaacacttttccatctgttagagttaaaacaaccaaattaggaccaataagtagacttactaattatatacaagttattttgtgcgctagaattaccatacacaattagtaacgcatctaccacaataatcttacccggcatacatatatatggatgcgctcttcacatagtaatttgcattttaacttggacatcacatgagcactactaatttttacctgcgaccacaaccatacgcatttggaccacaacaagcaattcatcgtgattatgagcttaaccaaaccatctaacaatttggctaactagagcaacgacatagccgttaaataacatacacgtcagcttgcctattatcgtcgcaatccgagacacaacatatactacaacatttttataaacacacagagtcacaagtattttcgca

SEQ ID NO: 50159 - DNA, 442 bp, Zea Mays
ctaaagcattttacgctcgaacctgaagctaaactgaggaatttatttaacactgaagcattttacgctaaagctatttgaagccttaggctcgaacctggagtgtgtccacgagtgcactttatttataaggtctaaacgaacgagtgaccctcatttacccttaaacattgtttaaaacggattaaaccgccgtttagccgaacaaatttaacagacacgatgatatgcatgctattgctatagctgcagagtgcagacacaaatataagtcacacacgtatatataatttgatctttcgttgacgaaagattgaacctataaatccagtacgtgataatttttttacatcgtatttaaggagatgtagggagcactttgttctttcattccggacactttaagcgacgagttgcgtgagaattttactatagattcgct

SEQ ID NO: 50160 - DNA, 1056 bp, Zea Mays
ttctcccatttgtccactgaaattacaagctatggctaaactagacacaaaaaatcctaggtgtcccttacctctgttaggcattgaagtgtaagattctgataagcagccatagggaagaacttcagtaatgtctccagctaaataaaaaataagaagaaaaaaggtaaggctcagcattttttgtaggcacggttggcattcagtcactcacaaagttcagccatcaacataccaacggtgactcaaaaatgaatccaattgggatccatgataagaaagcatggagtgtcgccaatgtagcacggatgagctgtggcctttgcgttgcagataagacatacaagcatagctcatgaatgagccggaattcactgaacaaagaaaataacatataagttaaaacagaagtatccttgactaaagagccaagtaacttttttgttaaaacatagattcacgaataaattatcacacagcacatccaaggtagccatgaaaatatagaagttgacaacaaacccaacctattaagtgaagacttcagttctttgatcttttgttgtgtcatttcacctcttgagaagtcaaaaatttcttcacttagaagctgcatgttattaaattggatatgcataatgggtccaatatgtaaattaaagatgtcaacgaaaatgtcaaaactgaaaatacagacaaaataacttgccttcaatatagccatgcaattttcacatatagtttcactactctttgcagctgcaacaagatcaggtacgaaggatgaccatctggcaggccactcatgtttcaggacctatcacattgcaaggaagcaccatgagaaataaatgtatcaaaacacaaagcatcatatcaatgttgggaacaagaacattaaaattcagcgcatagtttagatgaccttgtaaagtagctgccaaggtgaagaaaaaagaaaagctaaatgtgcagcttacctgcaccaaaataatattgagtttattgacgtaaagcctctcctgccgaaaggtaacttcattgctagaaagctgt

SEQ ID NO: 50161 - DNA, 679 bp, Zea Mays
cggagaggtaccaacagggggtccagacaaaatcgaaggcaccactggagcgtgaagcggaggaggcggagcagactgaaccggaggtgctgagataccagaatgctgaagcatgagagccatgaatgccctattctctgccctatcctgaatgagctgctgctgaagtgcatcctgcctgtcctgcatgctctgaaacatcgagagcatcgtctcggataacctggcctgctcggctgccaggttggccagaatcgccgcaagagcagggtccatagccggaggaggagcaggggcagcacgagaactcccagcctcatgatcatgtgagcgtggaggcataggaggcggaggcggaggaggaaccccaaaatcatcatcatcatcatcatcatcatcagcggctgtaccctgagtgtcaaactgtcgaagagctgcatcctcggcctgagagtcaaacacagaagcagaagctggcactggaatctcaggagcaggacggtaagatccaaatacaaggcgtgaggcctcaagagtgctctgaaattgaggtggctgaatcagctgcacaaagatgtggcacaagtagtgagcataaggtagctgccgacgagcacgaatcccatccagaacggtgtcctcgatctcacagatcagaaagtccacaacatcaaactca

SEQ ID NO: 50162 - DNA, 507 bp, Zea Mays
taaatttgatgaaccaaatgacgactggctaaaatgtatcgaagctacaagtgatgaactgcttgggccatattccaaagcggaagataatgcattatccacatccttcgggggtcgaggaaaaaagagattgaacagagtttttgatgccattggttttgtttaccccgactactgctactcgctgcaaggacggggaaagaagagaaaaactgctgcttcgaccaagactgctgcttcggccactccagatgagcctgcgccgaagagcaaaaagttgaaagtccttacccaccggccacgttatattgaaccggccgtagtgcctgagtttggcggggagacttcttcagctgctaaaccaaaagagcccattcctcctacgcagaaggttgaagatccggctgtaatgtcgaaggtacccttaaccgagctagctgagtcgaagactgataaagataaggccgaagagccaaaaattgaaggaacaaaaatgttataaatttt

SEQ ID NO: 50163 - DNA, 751 bp, Zea Mays
accctcgccggagttggacacctcgcggtcttgtgccacatgcctcggcactttaaccacgccgccatgactcatactaacctatcaaatgatcgccggtgaggttgccacggttatggccaccaatcgtgtgcgctagtgcacctcctcctctccggtcgccgcgcgtccccatcaaattcactagccaccgctcaaacacactataaattgagcacaccctcggctccgttaggtaatccagcatccaatccaaccgcatgtgccctcaattactcaccagagcccgcgaattgctcttttcccccaaatcggtttccgccaccgtgaaagagccctcgccgtgactagcttgttccaggtctgttcatactctctgctcttccgttttagcatccttaggatctcctaatgctcctcgacccatttgattgatctagactatcctagatcaccaggaacacgtttgttcacttgttgtttgtgctgtctccgtggactggacgacttaaagctccactagtgaaattgattgaggggaaatgctcgttaggtactaaattaggtcttagccaaattagggcaccagccattgcgtattttagccggtacaagtttgccggagctcggtcctccgtcgctccacgtcgtggacctcgggttgtgaagagataaaagtgcaagggtctatttgcaaatgtcagcgactgaaacaaatagtgccacggactctttcaggttgtttaaaagg

SEQ ID NO: 50164 - DNA, 1443 bp, Zea Mays
cctacctccgcggtcacccctctgcccagccgaccatcgccgccgcatctttacccgcaacggccagccatgtcttggcgcgtgtaaccgccaccgccaccacctggcttctacccccgcgcgcagggaccttcggctcccaatccacgtgattttggccaccagcgaaccccgcctcgtccactccgacaacatccgtgatagctcgtcgacatcgggcgtgcaagtggttgcaagcgcagcgccaagatctgtgtggtccaccacgatgatcatcagtcgagcctcgtggcgtacgaggttgccatcgtcgaccaccagccaagctccaacctcgacacttacgaggacggcccaagtcgccgcataatcgaagaagtctgacgcccatcatcattcgggcagttggcagggcgcctgcaccattcatcgaaaaggtagcatgagagtgaactcttccttcgtaataggatagtgtttacctgtgatccagccggtgaggtccgccctcataaacccggtctctagaatccatcgcacagttcttttgtactcggtgaggtccaccctcataaacccaatctctggcgtccatcgcctaactcttacaaattcatttatgaaggaagaatttgctctcaattcaatcattttcctgctttaatttacatatattgtttcctctagccctcacgtggttcctaacttctgttgtgatcatgtaactagcttgtcgcttagtttggggccccatttgatgttgaacgaggatcgaatagctagggacctccaaccaggggaaaggaccacgttctcaggggtggtccggagctaggtagccacttagcctggttccgtaccataagcctacaccctccaccaccctagaattgttgtcctaatacctcggactgggtccctaaaggtctggaccttgaccaaacttaagggttggttcctaaagctctgctcgacaagctccagctacatgattcgaaaggttgagcacaacaaagtaggagccctgagggtatagtactaagccatgttcaggattgatttctggcttgatcacggcttcagaagtgcatcaccgcagggggtacaccaataacaagcaaggcgattaaccaccccatcacgccatctgtgcatgacttccactccaatggctcgcacttcagcattcaccggcggcaagagcttcgctccaggaagccgcatcatgttcggctctctcgacttcctcgccaccgtcaccagcgaaccccgcctcgtccactccgacagcatccgtggcggctcgccgacatcgggcgcgccaggggttgcaagggcagcgccaagatttgtgtggtccaccacgatgatcatcagccgagcctcgtggcatacgaggttgccatcttcgaccaccagccaagctccaacctcgacacttac

SEQ ID NO: 50165 - DNA, 693 bp, Zea Mays
cgccatgcgagtacctgaaaaagaagacacgagcaacagtccaaaaggagttgtaatcgggttagagtgatcatcgagggtcgaaggccactgctgtgggtggattggaatcctcggaaaagggaaacgaggtttcataaaaaaccacatgacgggagatgattgtacgattggattggcgatcaaagcataggtagcctttgtggttgggagaatagccaagggagacacaaagggttgagcgaggagataatttatgtggagtggtggcggaaagattggggtagcatatgcagccaaaaacatgaaggtgctcataggatgggttgtgggcgaagagagcaaagtgtggtgtagagagtgcaagtgttttggtgggtaatatgttgaggagataggttgcggtgccaagagccgcaacccaaaaactgggggaaacactagattgaatgaggagggtgcgaatgatattgttgatggagcggataacacgttcaaccttaccattttgagctgaagtgtaggggcaagacatacttcttgatggtgcctgtttgtcaaaatttcatacttaaatggttagctgtctgttgatgactattgaatacttactgcttgttgaaagctgatctgctcaagttatggttttggactctgaattttaaatgtttaattcaccaaattatacttcta

SEQ ID NO: 50166 - DNA, 718 bp, Zea Mays
aaaatctatccctggcggcccagttaggtttccttttattattatttttttgtgtttttctgattttttattctctcatctctatttaaattcaaatacagtttgaactctcaatttaattacaatgcatagtcaataaattctagcatggcttgaatttatttattccatttatattagttattcatttgtttgggcaaatgcaacacacatatatttcctttgatgacatgtcccaaatcaaataataaatagtaactcatatttttttcatatattactttatcctttaaaatatatgttcccagatataatggtaaaacaaataaaacaatatttagtttgggagaatatgccaaggtatgtttttagcgtaaaccttttagagagtacttttaaccttatagtgggatgactaatttcatgtgggtctgttttaagtaactatttattaggaaggatatttattttaagggatatgacttcaaaagtttctttaaaaaatattctaactcaaaatctttggaaaattttaccaaattctcaaaatgagattttgaggtgttacaatttccaagatggtatgggaaggggttgcaaagggcctgctaccttcaaatgactagccttgattctctggcaggtgtcacattctgatatatacttcgcaatttccctcttcattctggtccaccagtataaagatctgagatcatga

SEQ ID NO: 50167 - DNA, 439 bp, Zea Mays
gactcaggtctaatccggggcgcacgttttagattcgacaccgagatccaagaataccccttcgcggatacagttttgcataagagaccccctgctttcgctaaatgaacccgctgtccatagtctacacaaaataattacaactgatcctgagattttatgaattaaacccataggttctctggaattggaccggtgatgccgagatccaggcgtggcggcatcgtcttctctctcctccccatttcctttactcggcactgctctctctggagcgcccgatggctcggtgcacagatcacgatgggggcggtgcgggggttctattttatacccaacaatggatggagtgtgagcgtggattgagggattgaccccgaagtcctagcggcgaactcgctgtttctgttacggagctcgagtggaagatgaagccgac

SEQ ID NO: 50168 - DNA, 449 bp, Zea Mays
tggtgcatttagagtagcttgttgcctattttaacggttgaagaaactcatttgagagtgaggaagagcatttgcctagcgagggacttagagttgataattacttgattagaagtcttattagtgcattgagagaagcttgtgtgcatccaccattgacattagacttggataggttaggtgagagtccttgcttattactcttagtggtcaatatcccatagatggtttggtggtgattaagaatttgttgatcatctatagagtttgtgggtgatagatccaactcaaaggtgtacatggttctgagtggtttgccatgtgggggaggtaaagaaccatcttgtagagaacgcttggtgtttgcgtggatcaaggagcgacattcatgtacaagtgctccattgagaactagtggggagtgtcgagtctctaatacatcggtaaaa

SEQ ID NO: 50169 - DNA, 1549 bp, Zea Mays
ttcataagccacgagattcacctgctttgtgatcagaaacggtccaaaatagcgaaatgacaatttagcgttcaacctgctccccatcgaactctgacaaaatggctgcagtttcagaaatacacgttgtcccacttgaaacaccctttcagatcttcctttgtcagcttgttttttcattcgatcttgagccctttgaagatgtaacttggcctgttggagcataagctgtctggttgccagatatgtttgcagatcagcactttgacattgttcaatggttgacagtcctaactgggatggagtgtggccatacaaaacctcaaacagtgactgacccagtgcagtgtgaaaacatgtattataccaaaactctgcaagggatagccaattggaccactgtttagggcagccatggacaaagcatcgaagataagcttccacacattggttgacccgttcagtttggccatcggattgggggtgatatgcactgctgagacataattttgtgcccaccaacttaaacaattcctgccacaagttactggtgaatattggatccctgtcagaaatgatagacaatggtaggccatggagtttgtagacctctgataggaatagcttggccacagatagagcagtaaaaggatgggacatggctaagaaatgagcatattttgaaaatttatctactaccaccaatatgcagttgaatcgacgggatgtaggtaatccagaaataaaatccaagctaataacttgccaagcctgatccggtatgggtaatggcaatagcagaccgaggtatctgtttctgtcggccttggcctttttgcaaatctcacatgactgcacgaactccttgatctgtcctttcatgccaacccagtaaaacagcttcttgatgcgatgatatgttaccggaaacccagaatggcctcctatagggctgtcatggagggcagtcatcacctttaattgaacttggttactgcaacccagccaaatccttcctttatgtttgattactcctgataccaaagtgaatggctccattatatcccctgcagcaagtgtactcaaaatgttcttagcttcctcattctccccatagctgctagtcacctcagtgagccaacttggtaccactgtcgaagttgctaacacgttgagttgcagtttggaaccatcagtgcataggtttggccgtctagaaagagcatctgccacacggttttccacccccttcttatatataatgcggaattggagacccaacagcttggttaaggctttttgttgccagatagtcgacaacttttggtcttctagatgggttaggctttgctgatcagtcttgataaaaaattctccatgttggaggtaagggcgccagtgatcaactgcaaataaaatggctagatattccttttcgtaggtggacaatcctaagttcttaggacctaaagctttactgatgtaagctataggatggccttttttctgcaaaactgccccaatacccgatccacttgcgtcagtttcc

SEQ ID NO: 50170 - DNA, 722 bp, Zea Mays
cggaacatgacaggtgaaacacgcccgcacgtgcgcccacgctaatgactttgcgcaaaggcccctggcgatttaaacaacttgaaaagagtctgtagcactatttccatgagtcactaacaattgcaccgagaccctcgcacttctattccttcacaacgccaggtccacgatgctgaacggcaaagcagtggctccggcgagcctgtaccggccaagatacgcaatgaccggtgctcaggaatggttgacacctaattcggcccctaataatcatttcccctcaaccaatttcaagattataaccccccaatctctctgcccacggtgacagcgcgatcaacagacaactcgaagcgttcccagtgatcttatgggttctagcttaattggtcgggtcgagaagcatcacaagcacacagggatgccaaaacaagagggaggagggcatgattggacctgtggagagttggccatggcgagttcactcagtatgttgttctggaccgatttggggggaagtctcaaattggggctctctggtgggtaatcggaggcacgagtgggtgcgttgggtgcttgactacatagcggggccgatggcacactcaatttataggatctgagggcagtggcgttcaatttgaagagattgcgctagcggtcggagagggaagaagtgtaaagcccaaaatttctattaggaaaatagtaataacaat

SEQ ID NO: 50171 - DNA, 642 bp, Zea Mays
ccgccgcagcccctgggccgatctgtatttatctatccgccgccctcagcatcagtgcatcacgccgtggcttggccggtagtaggtaccgacaacgtcggttgcacacggataacaggaaaccggattgaaatattgaatcgatgtctattcgattttaattagcaggtgatctaatccctttcaaatctccgattgacttataactgaacaagcttcaaggatgacaatgaggagaggaccgggaccagccctctggtaacatatccattgagcatacaaaattatactcatatccgctagagaaaaattttaattcatactcactacttatcatgggtataaaattacgacatactcatacacgccaaaggtaacggatactcatcgagtttcactaacattatagtaggcataatcatttgaatcgcaaaaataagtaccaaatacaaaatgttgaaatcacatatctcatcaatattgaaagatgataaaataacatattatctttgtgccagcatgacacaggatgtgggcggtctgcggtggatgggagttgggactacgagaaattagggttagattttgaaactttatattatatgaaacaccttaaaatccggaggtacatattatatgtta

SEQ ID NO: 50172 - DNA, 598 bp, Zea Mays
ctgcagggaaggggtaaaccctgttgttgcgatgaaaggtcaggtaatgtagaacaaacacatgttggtccattagttcatcctgcatttgtcaaggtaacaaagaagcaatttagtaacgtgcgactttgataatggttagaaattgtattaatactgattttatgcagtaacaaagaagcaatttagtaacataccggtacaacaatttctgatacatcaccatcatcaaagtcgtagcatcgtatgaagctggtgacaaaaaagccacaatcattggagcctggctgcatggttggacagttgggaagaagcacaattttgaagttgccaaactttagtatacaagaatctggtcaagcttcttataacgccatgctaagtcttttcatgattaatctagaccatgggagtttcattccatttatcattacttgatcattgtggatatctttccaggtagtacagccaagggctggaccatatggatttaaatataaaatgtctatgcaacgaagctggaaattgattgcatatagagtccagtgactacgacggagcataagaaccatgatccgttaacataaattgataggat

SEQ ID NO: 50173 - DNA, 1178 bp, Zea Mays
acataccacggaccgcacaaccagtgagaaaaccacctatttgctatcagtatatacccaatttgcattctttacgggtgccactcgtttgactgatgggtatttcagctatgtgtagtttggaatagttcgtgttcgggtaccaggtgtcgtgccggaccctagaaaaggctatggtgccatccatccatccatcagcgtctaccgtcgccgttgcttttgagcaacgcactgaatggatcccaaggctcgatagccatgcctactacgagtccgaggtagctaggaatcctaccaggataccgacatcggaacaactcaaaagcgctcctgctttcagagacaggcgtggattctgcagccaactcattgcctacgcaagaattcaacccccaactgtcctagtatgagactcttctccagccacatgttcctttcagttttatattgggcggaatttgatgctgcaaaagaatccacggtactcttgatggacttcacaacacaaaatataacatcctatctccataaaaagggggggaagaaaaacaacataacatgcaagctacttgcatatacaagtaataataaaaacaacataacatgcacgctacttgtgccgttgccatgccatgacatgccatgtagcagcagtcataacatgtagctcggttcagaaccctatatatcatcaggcagacacgccaaatatgctacacggcatcgcaaacagtccaagtatcatcaagcactagttcctctcttaatcacacagttctctagcacaaacagatgcgtacaacacttgatgtatgtgttttagataattaacagatttaaacgaatactattttgatacggagtgagtacaatcttagaggattatgcgacacggtttcaacttacaatagaagtgtgctacaatatcaagtcatcaacagtattaaaaaacacacacaaacaacccaggatgaactagatggttatgtaattaaataagaagaaataggcatccaaatcgaagtgggtgtgacaaagacctggatgtggatgtacagtgtacacccacgcctcccacacggtcccaccaactgagcctagctcaatttcttcctagagacactagtggtttagacaggcaacatagagcaataatcatagcaaacttttgtttaaga

SEQ ID NO: 50174 - DNA, 785 bp, Zea Mays
gaaccatcttgccgtgacgacaagggtgacaaacaagatccttcttaaattttaacttgggtgatccttggatcaggctaagtgagctcagtctacacaaaagtttaaagctcaagtgtgctagtctcctatgccatttcaaaatcaaagaagaggatcctgccagcaaacatctagaagggcgagaagaatatgaaaaatcagcattgaaaactcgaccaaaaggggaaatctgacaaacaagtccccctggacatcaaaaacccgagacaagcactttttaaagcgcacttcatagccatactcaaggagttgtgaaacagaaagaagattgaaatgcaaatttgaaaccaaagcaacatccttgaggacaaaactcccgttcactcgaacggagccacgagagacaaccttaccgctcgacttatccccaaatgtgatgtattccttaccaatgatgggggtcgaggctagagaaccatttttgcttctggtcatgtggcatgaacagccggagtcgatgagccaattgttctccaagcctccatcctgcattagtagaaagatacagggtgagcaaatggcacaacactagggttaggatactgaggatcataccagtgctgtggcatctgaccataaaaagtgttaggaaaagcaccacccatctccattccagaagggaggcgatcaccacaagaaggaaaccatggtccgctggggaagtaagaatcatagccactgccacggggtccttggccatatggcacacgatcagcacccgc

SEQ ID NO: 50175 - DNA, 446 bp, Zea Mays
aaaagtttggccaaaataattaattaaaatccccaaaaaggccatccaagtgggagctatctagggaaatatgaaaattcagatttctgaatttcagccctcacctagaactcgagcacgttcaccttgatccctagctcaaatccttaagcccccattgacaaaattgtgctaaattaacctctctgcaacatgtgtgaagatggcatcgagattcgtgccctagacatgtcaaatctgggatttcatctcgggtttcagcagtgagacaaaccagatttcatcactccatatctttggctccagtcagcaaaacccataagcctccacacataaacgacaaaggaaggtcaagtgaagatctctcaacgagatcatggccataatcacgaagatttggagccaatccgcgcttgaacttgaccactctctgcgctgcctcgtgc

SEQ ID NO: 50176 - DNA, 444 bp, Zea Mays
cagctccaagaggcagaggaggaagaagctttggaggaaggttcaacactcaacctaggagattgttctgcttattctgtggggaggataagggacacacaacaaggacgtgccaagtcacgatccaaaagcaaaaggagatagctgaagccgaagcatgacagaatcagccgaagtaagtcttgtatactgtttcatgttattcgtcatatatccctgagtatgtgggcaaccaacaacccacgacattagttgcttcaacaagtcaatctcaacctgcatgggctcagttactaccaccaccaccattggcacctaccttggttcataatcagtagccagaagggcatcgccaagtgcaacaacaacatgacactcgagaggagtctgaagctcgcacaatcaacaacacaggggcttgaccagaaagtttctgagttcaat

SEQ ID NO: 50177 - DNA, 304 bp, Zea Mays
agacacgctcgtgttgggcttgatgttttgacttagtcaatctatgaggtaacgacccactgatagacaaggagcgaaggagaggaacatatctacgcacgacacataaaaatcatgctttaaatatttattcatatcatgagtttaatatatggtatatagacaatacgttcactttaatattaaatttatttattatgtgtatttgttgtgggatgggtccaccacactggtttgctggacactcgcgtgtcgctcagctattacattgccggtaagacttgacccactcctaactaatatt

SEQ ID NO: 50178 - DNA, 680 bp, Zea Mays
aattatcaatccaaccactattaactcaaagcaatctaagaatctgaactaagagaccaatcaaactccaaagtcctaacagactggaactgtagcttccgagcatgctgtcacgccattttgttactgttgttatcgtgctgttcttcttggcctggtgggaatagtggttgccccacataacaatttgtctctgatgtttagagtatctggaagcttggcagatcttttacgctatctgatttcttaagagtttgttacagtatttccgaatgtactggtatttgaggaagaaaattaacttgtgcctgctatgtacgtgtaaaaacttgaccaacctatgaggaactaggtgcctttttatttatgaagaataggcaggaacaaggacttgaactaggtggtttgggtatacatccatgccttcaacgagtaaactcagttcctgttcctcctgctacatattcataataatagcttgatgttgaatgttgacttgacaagtttgattatgccatgcagcttgacattagtctacaatcatttactagaactagattcagtttatatagctatcaaagggaaaagataatcatgtgattgattttttttttgtttagtatttgcctcaagttcacaaactgaagtaggtcacctatcatttgtttatgcactccttt

SEQ ID NO: 50179 - DNA, 540 bp, Zea Mays
ctgagctgatgataacctgacctcagatctatcttggagaacacgctggctcctctcaactggtcgaacagatcttctattctgggcaaagggtacttgttcttgatggtgacctcatttagagctcgataatcgatacacatccttttggtgccatctttcttctccataaataagacagggcggcccaaggcgaggtgcttggccggatgtaacctttctctgacagctcatcaatctgcttcttgagttcaaccaaatctggtccggatattttgtaagctctcttaaagatagggtcggttccaggaagaagctctatggcaaattcaactttccgctctggtggcatacctggtaaatcctttggaaacacatctgggaacttggacacaaccttgatactctcaattgggtctgcttcactgctatcgacagccatctgataacagcttcttttcttcggctcaagcgggactaactcggtcaccacttcctctcctagtggggacaccaacttgattgtcctcttatcacaac

SEQ ID NO: 50180 - DNA, 660 bp, Zea Mays
atttttcgataagtttaaggcgtcagtcgttactggtgaacaactctggagacaaaggtgctacattctttcatctcctatgtcataataaatttacctgtgtgccactcatgtcttacatggacttactttattgcagttgtataaaggattggttggtcagttgatggatattgttgtgaatgcagtacgtttgatttctgttgtagtttttctgtgaaaggtttctatacctgtccatttcgaagcatacttgaagtatgaaactgttataggcttataggttctgtgcatctgcaattcagatgactcagttgatcagttgtatgttagtagcgaaccccttacattaattcatgggatgtcgtagaaacaaatagacttgtgatccggatataacgtgggcgtccacatctccttggtgaagcccccgccgtgcccccgttgcgcctacatcgcacgattcccgtcgcgagagcccctgacgaccgcccctctcgcgcgatgcttgtcgcgacaaccgcctgtcccctcccccaacgccatgcctgcataaaagggaggtgtcggaggatctgctccgctcggcagcaaagtccggtgcagaatccgtgccccccaccgccaccgctaccctgtctccgcccttgacccctgcca

SEQ ID NO: 50181 - DNA, 441 bp, Zea Mays
caaaatcccttccacgccagcccaactctcgcgccagccctttctgtcgctgtcatggtgggacccgggatgtcatagtctcttgtgtgccctcgttccactgtggtgtgggccaaccttgtcaggcttatccccttcgttgttcctgcacgcccggtaacagaacgcacgtagctcgtgcaatctcaaccacatcccgctttgttggcttcgtggcctggtgcataaaggcggagtcttgctcccctaactcgtccatcgggtctagaaatagatggagttctcgagcccctgcgaccgtgaacaatggcgggtatggtgggaatcactgctgaaccttgggtcaatcccgaacaaatcggtggccataacagacctccgctccggctcggactccgggcgccgcctgggtataaaaatcgtgtcgccgcttctttcccc

SEQ ID NO: 50182 - DNA, 841 bp, Zea Mays
aaagaagagaagatgcctagagatatgtagacatgactaggggcttcaggggaaggttcaacctaagtcatgttaggagcatccacaacccacctcaaaacaaagacaaaaccagtcagacttaggggcaacagaatcaatcgcaaggctttgggacccagcaacaaccctctcaaaacaacttccatccaccatccctaagaggaggcagaggaggaagaagctttggaggaagattcaattcccaaccaagtagtagttatgtcttttctggggagaagacaagggacataccataaggacatgacaggtaacaatccaaagcagaaggaaattgccaagcagaatagaaccaaccaaaataggtccttcatacttcctcatactactccccatacatcccagagcatgtccatcgtcaatagccaaggccacagtctttagggtccattgctctggcaaacctatcttcatctcactagatcaagccctagtctttcataccaacaccttcatcatatgagtaataacttccaagtccatcacagatccagctacagttttctacacaaaacataccacaatgcaatgcaagggaacaatctgaagccaaatcagtcaacagtgttgtccctaagtcgaaacacatttagtgaagtgcctgaggggctagagcaagaggttgaagtttcaaaaaaagcctagaaaaactagtgtaatcttgatttctgttttttctttcatttatgtttcaagaaacattaagctttgaagtcgttcctaaggggatgtagagctcgaatgaaacacctagtaaaggtgaaaaagctccaaagtcgtt

SEQ ID NO: 50183 - DNA, 1146 bp, Zea Mays
agtttgtaaatttcagatttgtcctattcaccccccccccctctaggcgactttcagcctgcaattccctgaaatcctcgcaacccacgagctgatttaggtgttggccaggcggtgattgctttgattttgtcactgtccatagagacccctgattctgagatgacgtgtcccaggtatacaatagaagtggctccaaagctgcatttagatttcttgacaaataaattgttgacgcaaagtaaagtcatcactgctctgacatgttgaaggtgggttgaataggatggactgtatatcaatatgtcatcgaagaaaaccaacacgcagcgtcgcaacaggggctgcagtacaaaattcatcaagctctgaaacgtccctggtgcattggtaagaccaaacggcatgaccaaaaattcaaaatgaccatgatgtgtatgaaaggttgtcttctcaatgtcatccttgtgcatacggacctgatggtaccctgaacggaggtccaacttagtgtagaatcgagccccatggagttcatcttgcaactcgtcaaccactgttatagtatatttatccttgatagtgtgttcattgagggctctgtaatcaatgcaaaaacgccatgtattgtcttgcttcttcactaggaggaccggggctgagaatgtggatgtactgtatcggattataccacgacgaagcatatccgcacattgagcttctaattcatccttttgcaatcgggggtaacgatatggatgaacatctacaggtgcagtgcctggtttcaggtggatcctgtggtcacaatgtctggctggcggtactgactgtggttcctcaaagacatcatcaaaggactacagcaagtgatccatcatgtgcttgggttcagtgctgatgctacatgtggttggtgtagtggtgtctgtgcggacggaccctaaacccttccacagtatgcgtagaccttcatgccagaaggtcatgcaaaggtcctagagatcccataatactggtcccaatgttctcaggaatgctgtcccaagaatgatctcaaatgtatccaagggaattgcatatgcctcaatggtgaacttctctgtgttgatgtcaatggctgcgcgacgagttactccctggcag

SEQ ID NO: 50184 - DNA, 819 bp, Zea Mays
atctgcggccttcgagagccgaaaaaagaagaggctaaatagagtttttgatgctattggatttatgtaccctgactaccgctacccgccatgggggcagaagagaaagagtgtaacttctgggaaggatgttgcttcagctgctccaagcgagcccgcaccgaagaggaaaaaggtgaaggttcttactcactgaccgcgctatattgaaccggccacagtgcctgaatttggcggtgagacctcttcggctactgaagccaaagaacctacgcttacgcagaggattgaagagtcagctgcaatgccaaaggcatcctcagccaaattagctgagccgaaggctgataatattgaagagatagaagtcgagggaatgaaaatattagaagttctaagcccttcggcagaagtgacagtgccgaaggcacaaaaatgtcttaaagcgacccccaagaggaaaagatggccagtgtactagatgtgctggagacgataaaaacttcaagctctactccagggaaaactgccgaggcttcaaaagcgcagactgatacaaagctgatcgaagctgaagctacaaagagccaggccgagaccgaagctaggccttcagagcccgccaaggagaaatccttggaaaccggagaaaaggcaacggaaaaagaagctgtagaacaaattctgcctaaaaaagctaccactcctactcctgaagcaccttccgaagttcttgattatattatacgacacgcttcgggaaaaagattatctgaagaagagatttttgaagctaaacactatgcccgagaactgaag

SEQ ID NO: 50185 - DNA, 319 bp, Zea Mays
ggctaattgagggtgagaacgggtgcttcggcttcgtgataacatggcgcaactgacccgaccttcaatttatagaaatgctaagcgatggtgtccaattttgaaagagaagaacgatgaccgagaggaggggtgagtcatcagcgtaaactatcgtggcgctccctcgggtgatgcctccggcgatgaactgaccttctatgaatatctactgcgacgcgatacatcttctaagcacgtggcacggttataaatcgtcggcgaactccgacgaggacactgccgtccactgcgcgacaggtgtcgcggtgaatagtcc

SEQ ID NO: 50186 - DNA, 733 bp, Zea Mays
aattggattactattgttaagcactatataacctagctatagttttttttgaaattaaatttaaacaaaaaaaaattgccatctttgaagtttgatgaagtgccggccagcccttgctgccccttggtaggagagaatctttactgtttggtaaagcagggcgagatgatgatgaaaaaggcggtgggttttagctttgcaaattgggcccaagtttttttttgttttgttcctgtaattattaccgcatctttatcaatctactaccatggccccccttaggccgggtgaaatgatgctagtagtacctgggtagctagcgcggaatattattattactctcggtatctctctacatattttttccctccttcatgtgtcagggccatgattgagatttccaatcgtcgctgtacttttaacagccggctaaaatagccgtagtaagtaggagtactgcgtacccgggttcaattcgtcctgaaataattgacgttatagaatttgtttttattatacaattcaaattctattctaaaatacgtaccattctcacctttccatgcgtatacctttctattcttttcattagtttttttttgccaatatatatcttcacctctacttttatttctctctgtgtcttttttcatattttatgtgcaccatgtatttttcgcttcttctaaatactccgatccaaactaaatctaaaaagccaactattttatgc

SEQ ID NO: 50187 - DNA, 435 bp, Zea Mays
ccacaaactcataggacatagggtattacgcactcgagcgacctgaacctgtataatccattatgttccgttgagccccgtacgaaccatcgagctacgatcaacctcgccgcgcacccaaaagcactacacggtacaccttgtagtgtgccgttggtaccaaacaccaacacatatatagtgttgtctcagtataacaagatatgatatagattgatagagagagatttgagaagaggattactagttaggatcaatcatgatctttaccatttaggatatttccttttgtctcacctcctcttcatgtgttccctctcaatcgataaatccattattcctacatcatctaacatggtaatcactatcacttctcggttgtcatctatgtagctgtcaccacccttggccgccgccaccacatctgcctctctg

SEQ ID NO: 50188 - DNA, 612 bp, Zea Mays
gagcaatgaatctgtaacaaccaaagttgttgtgatgctgctccttaccggtagccttcatctcgtacgaaagttcatgcatgctacaaaaacaccttgcgcttggttccaatccttgaattctcacagcccaaataaacaaacccatcctgattatagcttcaggggtaagttgatgaagaaaaatctgaaacgtcttcagtacttcaaccatgaatctgctcaacgggaaccgaagccctgctttcaaaaagcttcagtaaataaccacctcatttacttcaggagtaggagcagcgctgtctcctccaaccctcataatagtcatgtcgcggaagtatcttcctctcatcgcatcaacatgactttgtttgatagtcgattttccgaagatggtatggcttggtcgccatggccgatcttcagaatcttcgtctccactttctgcatcatactcatcactgtcgtcggagtcttcagacagatccgccagtatttctcttgtaattttttctttgttcgtttttgccatagattcgaaaaacccagctatgaaaaggatccacaacttttttctcttcaaacaacttcgagtcctcagttatcttcgtc

SEQ ID NO: 50189 - DNA, 318 bp, Zea Mays
tggaggtcttgggatgaatggcacaggtaccatccagtggcttggtgatgcccttgttgaagcaaaggaacctgaaggttgtggcttcgaatgctgatgttgaacatgctctagaacacagggggaatagtatgaagatgtatggaagactccctttgactggttttgtcaagcttcggcaagctccttctgcttttgtatggttacatgataattctttgtagtatggcccttgttattcccacagaaaaggcaaaacaactttcttggtagggcgttaaatcttccttcaaagctttggcctcctctccccctctt

SEQ ID NO: 50190 - DNA, 551 bp, Zea Mays
caggaacaggaaggtatacaacacaactacacattcttgaatcttgtaactgtagcttaatattaggtagtagtgtaactgtgtaagtatgtaactctagtatgagctgcggacctgggcagtgggcacattggcggctggcgcgttgctttgttgttggcttctgtggatcttcgttgacgactgaatgagctgcggacctgggcagtgggcacgttggcgactagcttccgtggatcttcgttgagctgttggcttttgctgcctgctgggctgctggccatatgaagttatgaactgttggtgttggctgtagcctgtaggagtaggactgggcgttagcagtttagcacaaagctgttggcgactggcgttttatttctgttgggcgtttagcacaaagttgttgggtgtccgtggatcttcgtcctagttggctgttagcacaaagctgctggagtttaatttctgttgcgttgcgttgctttgaaacagtagcagtttacttaatgattaccttccgtggatcttctgtggatcttagttaaaat

SEQ ID NO: 50191 - DNA, 454 bp, Zea Mays
ctaaggtcgacgggccttcagctacttctgtgggaccagaacaatccaagtcagcatcccgaccctcgagatcatgctctaaggtcgacgaggcacgggacgacctcaatccagcatcgggcatggcagcacaagcctctgttgcatcatcatccacaggctccaacaacaagtcctccgggaccatatcctctagagtttgatcaaagttggccaggaacagttcttgcaaaccaataagggcagataatgcaggagaaggaactccactactttcaccactggtgacgaactgccgactattcttccgagttaatggagcctcattttcttcctcctcatcttctacagtgacagcgcaagcagcacacccattgggatcagcgacagataaggcacctgcattgggatcagtagcagtctgggtacacccattggggccagtgtcagttgg

SEQ ID NO: 50192 - DNA, 1495 bp, Zea Mays
ggcagaggccagcaactacggcgcctggtccacagcagcagccaccacggctcgctagcgctaggccgacctagatgagatgcagtgagctgatgggagggatgggcgagcaagaataggtacagtaaccgagagccgatcttgatttattccttatgtcatgaattccttttatttacacccacactttctaactttcgtacagggctaacttatgtgctcatgctttacgaaccctagcatatgtcgcaaaaaatccttacctaaagtaataactaactctgcaacctcttcaagctctagatttcaattcttatggcctaagaagtgtttttttatttcataatataagctttcacaacaatcaaattgttggagtcagattctataaatacccaacatttactaacctacatttttttcaattggtgccatgaccatcacataatgttgatgagctattctttccaatttgctgattgcatgtggattaccatgcatggctatttgctatttggttgtcccgacctttcttaggatctattggatgtagtacatattatcactatttagctaatatttgctaactactgcctagcagagtggatagtaggttgtggtgttcagatccataactaatggattaattaataagtggagagtaatgttcctgttagtccccattatttgggtagatagtaagataatggggatttagaaacaatctaaagtttattcccatctgttatctagacctatttatatccatatagctaaagtttagcatattgctacatcctcattattagtttggagccaaacatgtactgattgtataatttaaatgtttataggagtaactaatttgttttagctttgctattttacgagtgtcaggatgcttaactatttcatacttgctttgtaggaatgttcgatgccgacaacatcttgctctaccagaaggtaccagatccaaatcaagaaccaaaatttaggaaaaaatacgaactgcaaccttatccgtcatctttagtaattcatgtgtttatcttatttgcaccaagaactatgctggaggctataaaactatgaatgttatgtgtgacatgtaaataatactagcttgtacatgcatctaaatgcatataagaaacacaatgcaccttttgtttgcattccatgtaaattatagattaaatccgaacattacaaaattacaaaacacacacacaacactacgcgcgctgcgcgcgcgcaagacactagttgccaacatgagatgacgaattggggtgagtcctggtccgtttatttttcccttttttatttccctaaaataaaaggacacttgatacattatcgtcttcctagtttaacctcgcgatgaatgaatcttctgcgcgacttggcaacgtgtcatttggcgagattacgcccttgtttggactgactgctgagatacgtgtttggttgtccatcatgtcgaatgatt

SEQ ID NO: 50193 - DNA, 342 bp, Zea Mays
cttcaataaaagttcctgtgtggtacggacaagagcaagtggataagtgaaggtgtcaaaaatctacagctaatctggacgtttccaaaaccaattttcgtgttttctccttccaccaccggctgtccttcgcgtacattccaccgacacagtaacgcatcagaaggaagaaaaaatatgcgctgattatgtagtactccagttgacatattgcaccgtcgtcagatttggtagtttcacattgtcttaataagggcacaagtgctggcatttggtacgcaccactcaaattatttgatttatcctcccattccctgtactagttaagctgttggtatcaac

SEQ ID NO: 50194 - DNA, 348 bp, Zea Mays
ccgagattggagagtacaccgtggaccatgccggcgagtacgtcccgaagagtgagcgccttgccgacgctgctgggcttattgacgccatccataggttcgtcgccactgccacggacaaccgacgtcgtgctcacggattactaccatagttcagtgaatatgtcacgtgtttcctcttttcctgggctagtgcttcggttgcagctgagtctgtcacgaactgtaattcatcctgcaaatttgcagacactgcttttaggctatgcaggtcgtcgtattatgtattcagcatgattgaatccgagttttacgaatgagaaatgttataccacactttgtttggac

SEQ ID NO: 50195 - DNA, 332 bp, Zea Mays
tggcacataaaataagaatatccaatatagtttccttgtatacattttgggtattacaatattacaaaacctggaagtccattgcaggactccagaaatcaaatagtaaaacgtcaatgtcttccaaactctcaacctctatgtatatatcattggttttagtaagaagttcatcaaatttctcatcagaatagtccacaactacctattctttggtccgagagacatccatgattggatagtgagatctggtcaaggctagggttagggtgctagaccgatccacactatcctgagaaaacatcactatcctttcaggtagaccggccagc

SEQ ID NO: 50196 - DNA, 494 bp, Zea Mays
atgtccaccttgcagtcgcagtcgcactcgcagggagaccgagagcgcccagaaaccaacaagtccaagctccccatcaggttcaggccccagctttatttcaagcgcgtgtcgcggtcaaaagaccagcggccagcgcgcagcaggatttccattccttgcgacgcagcgagggcgatgcagtgcagcggctcttttctttatttcttttcccaagccagcatctcccttccaagaaccaccccgcattatctgctgccgtcagatccccgcatctggtcgtcgtccggtgccatcttaaaaccgcatttatggtttttttttttttttttgcattgcagatgtactcctgtccagcaacactgggcagccccacagctagtgggtcggctcagtccaagcccatcgtcatgccctaaagcacgatgtgtctttgttaggctatgccggtctaagcccgacccatatattcgaacacataaaatcaaaatgtt

SEQ ID NO: 50197 - DNA, 504 bp, Zea Mays
aaattatgacaaggggggagatgatgggggcataattgcgatgctacggttctctccaccagtgattagcagcagctggttcctcccagcttacaccgttagagttgaattggtgatccgggatcccgagagaattggggggattgaggggaaactggctaggccattccgtcatctagattgcaatttgacgacccatgctagtccgcggtgaaaacagagctataattgccgtcattacagcggaatccacggaattaaattatgacacggtgggagatgatgggtgcataattgcgatgctacggttctctccaccaatgattagcagcagctggttcgtcccagcatacaccgttagagctgaattggtgatccaggatcccggtagaattggaggagattgagggggaaactggtcaggccattccgtcatccaggttgcaatttgacgacccatgctggtccgctgtgaaaacagagctataatggccatcattagag

SEQ ID NO: 50198 - DNA, 673 bp, Zea Mays
gtagagcgcgcttttccacatagcctcacatgcgtagctttgtgttttgtttattttgaaattgttgaagagaagaaaaacgaagagcttgctcttgttgagttttaggaggccatggagatgtctaatgttgagaatattagtgatgaaatgatggccgggttgtcagatgactctgaagatagcgaggagtttaactttgaagagaatgttgatgataacgaagaacagttgtggaaaccaagccatgttatattcggcaagccgaccataaaaaggggcatatcgaggtaatgaaggacacatctttttgtgacatttctattgtaaggcccggtggggaggatgttgtcccacaccctgaaaaagataaagtagtggttttctgaagtttcatgagggctgaccttcagtttccccttcacaagatgctgatagaagttctaaagagatttgatatttatcttcatcaacttacccccaaacactttgataagggtaggggttttatttggacagtgagaatccaaggcgtggagccaaatgttgattgtttctgcaatattaatgagctccactatcaaacaaaaggaaatgaaaaggagcaacttgatcataattttggttgctacaccttttgcgtacgagtcagatgcttgataccctatcttgg

SEQ ID NO: 50199 - DNA, 780 bp, Zea Mays
tttcccagccaacaaactaagtacagcatccatctctgcatcatcagtgttggctggcatttcaaaatgattctgcctctcatcctctgggagacttcggagtggggcaatcatagcctcaatgccctcagaagagggtcgcactctaagacccaggctaccatcatgagcaggagggttggacacaaactcagaaaatggcctaggtggtggcaggttccagccagagtaggcaataggagctccagcatttgaaactctgcccctcagaatcatatccagtcggctcaacagatctgcagtggggattttcttattcgtaacccgagtggagtcattgacactacagaaaatgcataaattttcgtgggccagaatattttcgtcggccgacccacaaaaataaagctccctattttcgtcggccaccggggccgacgaaactatcccgccgagcacctattttcgtcggccttggggaagccgacgaaaataagtcatttacgtcggtaccgacgaaaatagttgcacattttcgtagaatatattttcagcggctattttcgtcggcatgaaaatagccttttttgtcggtttacgcttattttcgtgggtttttggcccacgaaaatttatgtgtttcctgtagtgtgatgccactgtacagataagtagggtatgccctgtccttcaaaggctggatattcttgaagataaaatcagcgaccatagcctcagcagtcagacctctgtccttcaggaagcaaacctcagcgagca

SEQ ID NO: 50200 - DNA, 700 bp, Zea Mays
gaggtagaggtcaaggccggggacggggttagggtcgggtactatttgtgtgtctggccaagggcatcgccggtgtctttgccatgtgacgtagccggtcaatcgaggagtctgtgcacaggcgtcagactaaggcgttgcaggaggacttcatcattacgtcgcctccacgagtcatcccttgcctccgcgctctcctccgcctccgacccctgcctacccggagaacgttaacgagtggcaccaacaggagtatggtgtgtcattcgttacccctgaggatgaggccgaggagtttgacgactccttctacacatctgctcctccttacccagatccgagacccattcctggtgatctcaggacatctggttgtggtcactttcctcctcctccctaccctggtctgggacctattcctggtgatcacaggccttccggctctagtcaccatcaccatcatcctccatactagggtccttcatcttcatcaggttttccttctggtgataagccccctctagaatcatcatttggggaagatatgatgtgtgctttcttttcggagtacccttcctaccctccttcatatcctcctccttccggggactattgagtattgtgctctctcttttggtacttgctgccaaaaagggggagaaatctgaggatagctaggttgttttctttttttggccac
